(19) United States
(12) Patent Application Publication
(10) Pub. No.: US 2024/0294613 A1
(43) Pub. Date: Sep. 5, 2024

(54) CROSS-NEUTRALIZING SARS-COV2 ANTIBODIES

(71) Applicants: The Broad Institute, Inc., Cambridge, MA (US); The General Hospital Corporation, Boston, MA (US); California Institute of Technology, Pasadena, CA (US)

(72) Inventors: Ramnik Xavier, Cambridge, MA (US); Johannes Scheid, Boston, MA (US); Christopher Barnes, Pasadena, CA (US); Pamela Bjorkman, Pasadena, CA (US); Basak Eraslan, Cambridge, MA (US)

(21) Appl. No.: 18/270,131

(22) PCT Filed: Dec. 30, 2021
(86) PCT No.: PCT/US21/65737

§ 371 Date: Jun. 28, 2023

Related U.S. Application Data
(60) Provisional application No. 63/132,695, filed on Dec. 31, 2020.
(60) Provisional application No. 63/155,220, filed on Mar. 1, 2021.

(51) Int. Cl. C07K 16/10; G01N 33/569

(52) U.S. Cl. CPC C07K 16/1003; G01N 33/56983; C07K 2317/21; C07K 2317/33; C07K 2317/34; C07K 2317/51; C07K 2317/55; C07K 2317/76; C07K 2317/92; G01N 2333/165; G01N 2469/20

(57) ABSTRACT

The present invention provides for cross-neutralizing SARS-COV2 antibodies. The antibodies can be used to treat SARS-CoV2 and variants thereof.

### CROSS-REFERENCE TO RELATED APPLICATIONS

[0001] This application claims the benefit of U.S. Provisional Application No. 63/132,695 filed Dec. 31, 2020 and 63/155,220 filed Mar. 1, 2021. The entire contents of the above-identified applications are hereby fully incorporated herein by reference.

### STATEMENT REGARDING FEDERALLY SPONSORED RESEARCH

[0002] This invention was made with government support under Grant Nos. DK43351, AI138938 and AI150464 awarded by the National Institutes of Health. The government has certain rights in the invention.

### REFERENCE TO AN ELECTRONIC SEQUENCE LISTING

[0003] The contents of the electronic sequence listing (BROD-5305WP_ST25.txt”; Size is 7,287,042 bytes and it was created on Dec. 29, 2021) is herein incorporated by reference in its entirety.

### TECHNICAL FIELD

[0004] The subject matter disclosed herein is generally directed to cross-neutralizing SARS-CoV2 antibodies.

### BACKGROUND

[0005] SARS-COV-2 is the third zoonotic betacoronavirus to cause a human outbreak after SARS-COV in 2002 and Middle East respiratory syndrome coronavirus (MERS-COV) in 2012 (de Wit et al., 2016). After the SARS-COV and MERS-COV outbreaks, limited numbers of neutralizing antibodies were isolated using phage display library techniques (Prabakaran et al., 2006; Sui et al., 2004) and Epstein-Barr virus transformation of B cells from recovered patients (Corti et al., 2015; Traggiai et al., 2004). The ability to characterize specific antibody responses in humans was advanced for pathogens such as human immunodeficiency virus 1 (HIV-1) (Scheid et al., 2009b; Wardemann et al., 2003), malaria (Triller et al., 2017), Zika virus (Robbiani et al., 2017), influenza (Wrammert et al., 2008) and viral hepatitis (Wang et al., 2020a) through the use of single-cell sorting followed by immunoglobulin gene sequencing. Since then, high-throughput single-cell RNA-seq (scRNA-seq) of virus-specific B cells has allowed simultaneous characterization of the clonal landscape of such cells and their associated transcriptional profiles (Neu et al., 2019). When combined with functional testing and structural characterization of selected monoclonal antibodies, this integrated approach should allow us to learn more about transcriptional pathways involved in the generation of efficient antiviral antibody responses and the roles of different B cell subpopulations (Horns et al., 2020; Mathew et al., 2020; Neu et al., 2019; Waickman et al., 2020).

[0006] Given the recent promising clinical results of therapeutic monoclonal antibodies against Ebola (Mulangu et al., 2019) and HIV-1 (Caskey et al., 2019; Scheid et al., 2016) numerous efforts have been undertaken to develop protective and potentially therapeutic antibodies against SARS-COV-2 (Baum et al., 2020; Brouwer et al., 2020; Cao et al., 2020b; Chen et al., 2020; Chi et al., 2020; Hurlburt et al., 2020; Ju et al., 2020; Liu et al., 2020; Lv et al., 2020; Pinto et al., 2020b; Robbiani et al., 2020; Rogers et al., 2020; Shi et al., 2020; Wan et al., 2020; Zost et al., 2020). These efforts were aided by structures that have revealed how the SARS-COV-2 spike binds to its angiotensin-converting enzyme 2 (ACE2) receptor (Yan et al., 2020), specificities of polyclonal antibody responses in COVID-19 convalescent individuals (Barnes et al., 2020b), and commonalities among receptor-binding domain (RBD)-binding monoclonal neutralizing antibodies that prevent infection (Barnes et al., 2020a; Tortorici, 2020; Yuan et al., 2020). Collectively, these structures provide foundations for potential therapeutic benefits by guiding choices of monoclonal antibody pairs for treatment cocktails, while informing structure-based engineering experiments to improve antibody potencies and/or create antibodies resistant to viral mutations. Furthermore, recent mapping of neutralizing SARS-COV-2 antibodies that target conserved spike epitopes (Lv et al., 2020; Piccoli et al., 2020) has the potential to guide structure-based immunogen design to elicit cross-reactive antibodies against zoonotic coronaviruses with spillover potential.

[0007] Citation or identification of any document in this application is not an admission that such a document is available as prior art to the present invention.

### SUMMARY

[0008] In one aspect, the present invention provides for an antibody or antigen binding fragment thereof that binds to the SARS-COV-2 receptor-binding domain (RBD) and/or SARS-CoV-2 spike trimer comprising: a complementarity-determining region 3 (CDR3) heavy chain and light chain pair that shares at least 90% identity with the heavy chain and/or light chain of a pair selected from the group consisting of: BG1-1, BG1-3 to BG1-28, BG4-1 to BG4-27, BG7-1 to BG7-7, BG7-9 to BG7-20, and BG10-1 to BG10-19 (SEQ ID NOS: 1-184); or a heavy chain and light chain pair that shares at least 90% identity with the heavy chain and/or light chain of a pair selected from the group consisting of: BG1-1, BG1-3 to BG1-28, BG4-1 to BG4-27, BG7-1 to BG7-7, BG7-9 to BG7-20, and BG10-1 to BG10-19 (SEQ ID NOS: 185-368). In certain embodiments, said antibody or antigen binding fragment is an IgG antibody or antigen binding fragment. In certain embodiments, said antibody or antigen binding fragment is a monoclonal antibody.

[0009] In certain embodiments, said CDR3 heavy chain and light chain pair or heavy chain and light chain pair is selected from the group consisting of: BG1-6, BG1-12, BG1-14, BG1-17, BG1-22, BG1-23, BG1-24, BG1-25, BG1-26, BG1-28, BG4-10, BG4-11, BG4-14, BG4-16, BG4-17, BG4-24, BG4-25, BG4-26, BG7-14, BG7-15, BG7-16, BG7-18, BG7-19, BG7-20, BG10-10, BG1014, and BG10-19. In certain embodiments, said CDR3 heavy chain and light chain pair or heavy chain and light chain pair is selected from the group consisting of: BG1-22, BG1-24, BG4-25, BG7-15, BG7-20, and BG10-19.

[0010] In certain embodiments, said heavy chain and light chain pair is BG7-15. In certain embodiments, said antibody or antigen binding fragment thereof binds the two “down”/one “up” RBD conformation on the SARS COV2 spike trimer with no glycan or interprotomer contacts. In certain embodiments, said antibody or antigen binding fragment recognizes an epitope in proximity to RBD residues 439-450. In certain embodiments, said antibody or antigen binding fragment blocks RBD-ACE2 interactions.

[0011] In certain embodiments, said heavy chain and light chain pair is BG7-20. In certain embodiments, said antibody or antigen binding fragment thereof binds a 2d/1u or 1d/2u binding state in the SARS COV2 spike trimer.

[0012] In certain embodiments, said heavy chain and light chain pair is BG10-19. In certain embodiments, said antibody or antigen binding fragment thereof binds to an all down RBD conformation in the SARS COV2 spike trimer. In certain embodiments, said antibody or antigen binding fragment recognizes an epitope in proximity to the N343-glycan. In certain embodiments, said antibody or antigen binding fragment light chain makes secondary contacts with an adjacent RBD. In certain embodiments, said antibody or antigen binding fragment heavy chain makes contacts with an epitope in proximity to the N343-glycan and the light chain contacts adjacent down RBDs and interacts with residues that overlap with the ACE2 receptor binding motif.

[0013] In certain embodiments, said heavy chain and light chain pair is BG1-24. In certain embodiments, said antibody or antigen binding fragment thereof binds both the up/down RBD conformation on the SARS COV2 spike trimer.

[0014] In certain embodiments, said heavy chain and light chain pair is BG1-22. In certain embodiments, said antibody or antigen binding fragment thereof binds only the up RBD conformation on the SARS COV2 spike trimer.

[0015] In certain embodiments, said antibody or antigen binding fragment is a VH3-53/3-66 antibody. In certain embodiments, said antibody or antigen binding fragment comprises a CDR3 having a consensus sequence according to FIG. 29. In certain embodiments, said heavy chain and light chain pair is BG4-25.

[0016] In another aspect, the present invention provides for an antibody or antigen binding fragment thereof that binds to the SARS, MERS and CoV2 spike trimers outside of the receptor-binding domain (RBD) comprising a complementarity-determining region 3 (CDR3) heavy chain and light chain pair that shares at least 90% identity with the heavy chain and/or light chain of a pair selected from the group consisting of LKA-1-17 (Table 7).

[0017] In certain embodiments, the antibody or antigen binding fragment is modified to enhance stabilization, in vivo half-life, neutralizing activity and/or dimerization. In certain embodiments, the antibody or antigen binding fragment is a fusion protein. In certain embodiments, the antibody or antigen binding fragment is fused to another antibody or antibody fragment, Fc domain, antigen binding domain, glutathione S-transferase (GST), and/or serum albumin. In certain embodiments, the antibody or antigen binding fragment comprises amino acid substitutions that increase antibody binding and/or viral neutralization activity.

[0018] In another aspect, the present invention provides for a method of treating a coronavirus infection comprising administering to a subject in need thereof one or more antibodies or antigen binding fragments of any embodiment herein. In certain embodiments, the coronavirus is selected from the group consisting of SARS-COV-2, SARS and MERS. In certain embodiments, the SARS-CoV-2 is a SARS-COV-2 variant. In certain embodiments, the SARS-COV-2 variant is selected from the group consisting of B.1.1.7 and B.1.351. In certain embodiments, BG10-19 is administered. In certain embodiments, BG10-19 and BG4-25 are administered.

[0019] In another aspect, the present invention provides for a method of identifying neutralizing antibodies from a subject infected with a virus comprising selecting antibodies expressed in B cells further expressing a transcriptional program, wherein the transcriptional program comprises one or more genes selected from the group consisting of: GRAMD1C, TMEM156, PDE4D, NFKBIA, S100A10, TKT, CAPG, CXCR3, CFLAR, HMGA1, MARCKSL1, PIM3, RHOF, MIF, ZFP36L1, NME2, MGAT4A, COCH, HOPX, ITGB2-AS1, BASP1, CD80, PAPSS1, CD70, LYPLAL1, LMNA, and FAS; or TKT, ARHGDIB, CFL1, CNN2, S100A10, HSPA8, HMGA1, PPIA, RAC2, CLIC1, SLC25A5, ARPC1B, SELL, PPP1CA, CAPZB, PPP1R18, CAPG, LDHB, S100A4, VIM, LTB, ANXA2, LCP1, TUBB, ACTG1, GAPDH, ACTB, PFN1, CORO1A, and TMSB10; or CD27, CD80, CD46 and CD86.

[0020] These and other aspects, objects, features, and advantages of the example embodiments will become apparent to those having ordinary skill in the art upon consideration of the following detailed description of example embodiments.

### BRIEF DESCRIPTION OF THE DRAWINGS

[0021] An understanding of the features and advantages of the present invention will be obtained by reference to the following detailed description that sets forth illustrative embodiments, in which the principles of the invention may be utilized, and the accompanying drawings of which:

[0022] FIGS. 1A-1E—SARS-COV-2 binding B cell populations in 14 recovered subjects; Representative FACS plots with the gating strategy for sorting of SARS-COV-2 S (FIG. 1A) and RBD binding (FIG. 1B) B cells. Pre-enriched CD20 cells were gated on live cells based on their appearance in side scatter (SSC) and forward scatter (FSC). Of these, CD19-FITC and SARS-CoV-2 S-APC or SARS-COV-2 RBD-APC double-positive cells were selected for sorting and sequencing. (FIG. 1C) Bar diagram showing the number of cells for which transcriptional profile and matching VDJ sequences were obtained in each subject against SARS-COV-2 S (turquoise) and SARS-COV-2 RBD (yellow). (FIG. 1D) Pie charts showing the total number of B cells sorted from each subject in the center of each pie and expanded B cell clones represented by differently colored pie slices. The white areas in each pie chart represent singlets. (FIG. 1E) Bar diagram showing the fraction (in %) of VH3-53 and VH3-66 genes combined among SARS-COV-2 S trimer (left), RBD binding cells (center) and all cells combined (right) in each donor compared to historic control memory B cells (Rubelt et al., 2012). Red stars indicate fractions with statistically significant difference (P value<0.005) to historic control memory B cells (Rubelt et al., 2012).

[0023] FIGS. 2A-2G—Antibody neutralization, cross-binding and cross-neutralization. (FIG. 2A) Dot plots showing ELISA binding of all expressed antibodies against SARS-COV-2 S (y-axis) and RBD (x-axis) (Table 3) expressed as area under the curve (AUC) for subjects BG1, BG4, BG7 and BG10, respectively. Red dots represent neutralizers and black dots non-neutralizers in a SARS-COV-2 pseudovirus assay (Tables 2 and 3). Green dots represent negative control antibody mGO53 (Wardemann et al., 2003). Two tailed P values were generated by calculating Spearman correlation coefficient. As in Table 3 high binding was defined as AUC>1, intermediate binding as an AUC 0.25-1 and low binding as an AUC<0.25. (FIG. 2B) Bar diagram showing the IC₅₀ values in μg/ml (y-axis) against SARS-COV-2 pseudovirus in red and authentic SARS-COV-2 virus in black for all antibodies that showed neutralizing activity against SARS-COV-2 pseudovirus (Table 2). Pearson correlation coefficient (r) and P value were calculated comparing results from both assays. (FIG. 2C) Bar diagram showing the ELISA AUC for all antibodies that showed neutralizing activity in a SARS-COV-2 pseudovirus assay (Table 2) against SARS-COV-2 S (black), SARS-COV-2 RBD (red), SARS-COV S (orange), SARS-COV RBD (magenta), MERS-COV S (dark grey) and MERS-COV RBD (light grey). The two antibodies showing cross reactivity, BG1-28 and BG10-19, are indicated with red stars. (FIG. 2D) In vitro pseudovirus neutralization assay comparing the potencies of antibodies BG1-28, BG10-19 and S309 against SARS-COV (Pinto et al., 2020a). Data points represent the average of duplicates, with error bars representing the standard deviation. (FIG. 2E) Normalized relative luminescence values in cell lysates after infection with SARS-COV-2 pseudoviruses harboring WT-D614G (black), B.1.1.7 (hot pink), or B.1.351 (green) sequences in the presence of indicated antibodies. (FIG. 2F) Bar diagram showing the ELISA AUC for all antibodies that showed neutralizing activity in a SARS-CoV-2 pseudovirus assay (Table 2) against SARS-COV-2 S (red), SARS-COV-2 RBD (brown), SARS-COV S (dark blue), SARS-COV RBD (light blue), MERS-COV S (dark grey) and MERS-CoV RBD (light grey). The three antibodies showing strong cross reactivity, BG1-28, BG10-14 and BG10-19, are indicated with red stars. (FIG. 2G) In vitro pseudovirus neutralization assay comparing the potencies of antibodies BG1-28, BG10-19 and S309 (left panel) or several SARS-CoV reactive antibodies and CR3022 (right panel) against SARS-COV. Data points for neutralization assays represent the average of duplicates, with error bars representing the standard deviation.

[0024] FIGS. 3A-3H—Cryo-EM structure of the BG10-19-S complex illustrates a distinct binding mode. (FIG. 3A) 3.3 Å cryo-EM density for the BG10-19-S trimer complex revealing three BG10-19 Fabs bound to a closed spike conformation. Side view (left panel) illustrates orientation with respect to the viral membrane (dashed line). Red circle (right panel) highlights quaternary epitope of BG10-19. (FIG. 3B) Close-up view of quaternary epitope highlighted in panel A (red circle) of BG10-19 (blue) involving bridging interactions that span neighboring protomers. (FIG. 3C) BG10-19 CDR loops (cartoon) mapped on the RBD surface. (FIG. 3D) Surface representation of BG10-19 quaternary epitope colored for BG10-19 heavy chain (steel blue) and light chain (light steel blue) interactions. (FIG. 3E) BG10-19 CDRH3 (sticks) buries into a concave pocket formed by core RBD residues near the N343-glycan (teal spheres). (FIG. 3F) BG10-19 CDRH2 (steel blue) interactions with RBD residue (light gray) R346. Potential cation-pi and hydrogen bond interactions are illustrated by dashed black lines. (FIG. 3G) Cryo-EM density map contoured at 5σ around the N343_{RBD}-glycan (teal sticks), which interfaces with the BG10-19 CDRH3 (steel blue) and CDRL2 (light steel blue) loops. Inset shows schematic of N343_{RBD}-glycan (Blue square: N-acetylglucosamine (GlcNAc), Green circle: Mannose (Man), Red triangle: Fucose (Fuc)). (FIG. 3H) SPR experiment to assess whether BG10-19 Fab blocks ACE2 binding on S trimer through inducing the closed prefusion state. SARS-COV-2 S trimer or RBD (black curves, Fab-S, or Fab-RBD complexes (colored curves) were injected over immobilized ACE2-CH3 (Tada et al., 2020).

[0025] FIGS. 4A-4E—B cell transcriptome analysis. (FIG. 4A) Heatmap displaying the relative expression levels of the top 15 marker genes of the 6 clusters (rows) across cells (columns) (Z-score normalization, row normalized). Marker genes that are known to be differentially expressed in particular B cell developmental stages are indicated (Table 4 for a full list of marker genes). (FIG. 4B) Uniform Manifold Approximation and Projection (UMAP) plot displaying the cells defined by their single-cell transcriptome measurements. The cells are colored based on their cluster assignments by the Louvain clustering algorithm. (FIG. 4C) Same UMAP plot as in (B) but with cells colored based on their heavy chain isotypes: IGHD in blue, IGHM in yellow, IGHA in red and IGHG in green. (FIG. 4D) Same UMAP plot as in (B) but cells colored based on antibody binding and neutralization: cells with non-tested antibodies in grey, highly potent SARS-COV-2 neutralizers (IC50<0.1 mg/ml in pseudovirus neutralization assay as either IgG1 or IgA monomer) in red, low neutralizers (IC_{50≥0.1} mg/ml) in yellow, non-neutralizing high binders in green and non-neutralizing low binders in blue (FIG. 9L, Tables 2 and 3). (FIG. 4E) Same UMAP plot as in (B) but cells with antibody CDRH3 shorter than 14 amino acids based on the IMGT definition (Lefranc et al., 2015) and VH3-53 or VH3-66 are shown in red and blue respectively. All other sorted and sequenced cells are shown in grey.

[0026] FIGS. 5A-5E—Cryo-EM structure of BG1-22-S provides insight into the VH3-53/VH3-66/long CDRH3 antibody binding mode. (FIG. 5A) Cryo-EM density for the BG1-22-S trimer complex. (FIG. 5B) Left panel: Close-up view of BG1-22 (orange) recognition of RBD epitope (gray surface). Right panels: Overlay of VH3-53 antibodies BG4-25 (green, this study), COVA2-39 (purple, PDB 7JMP), and C144 (blue, PDB 7K90) with BG1-22 (orange). (FIG. 5C) BG1-22 (orange) and BG4-25 (green) CDR loops mapped on the RBD (gray surface). Disordered residues in the BG1-22 CDRH3 are denoted by a black dashed line. (FIG. 5D) Flattened surface representation of BG1-22 (orange) and BG4-25 (green) with CDRH3 loops highlighted. The CDRH3 of BG1-22 is displaced from the canonical binding pocket along the RBD surface adopted by C102-like antibodies. (FIG. 5E) Surface representation of the BG1-22 RBD epitope (orange). Underlying residues are shown as sticks.

[0027] FIGS. 6A-6G—Cryo-EM structures of BG7-15, BG7-20, and BG1-24-S trimer complexes. (FIG. 6A) Cryo-EM density for the BG7-15-S trimer complex. (FIG. 6B) BG7-15 (HC: dark red, LC: salmon) targeting of its RBD (gray surface) epitope. Glycans are depicted as teal spheres. Color coding will be the same throughout the remaining panels. (FIG. 6C) BG7-15 CDR loops mapped on the RBD. (FIG. 6D) Surface representation of BG7-15 epitope. (FIG. 6E) Overlay of BG7-15 (red), REGN-10987 (gold, PDB 6XDG), and hACE2 (green, PDB 6M0J) on the RBD (gray surface). Despite non-overlapping epitopes, BG7-15 and REGN-10987 binding would sterically-hinder hACE2 interactions with the RBD. (FIG. 6F) Top down view of BG7-20 (HC: magenta, LC; pink) bound to S trimer. Inset: cryo-EM density of BG7-20-S trimer complex. (FIG. 6G) Close-up view of BG1-24 (HC: burnt orange, LC: wheat) bound to RBD. Interactions with the adjacent up RBD and N165_{NTD}-glycan are shown. Inset: cryo-EM density of BG1-24-S trimer complex.

[0028] FIGS. 7A-7R-Effects of RBD substitutions on monoclonal antibody binding and neutralization. (FIG. 7A) Heat map showing the log fold change in ELISA AUC of antibody Fabs binding to indicated SARS-COV-2 RBD mutants relative to wild-type SARS-COV-2 RBD binding. Mutations that lead to non-binding or decreases >20-fold relative to wild-type are shown as dark red. (FIG. 7B) Surface representation of the SARS-COV-2 RBD with monoclonal antibody footprints (BG1-22, orange; BG7-15, red; BG1-24, magenta; and BG10-19, blue) shown as dashed lines. Sites of individual RBD substitutions are shown as red spheres. (FIGS. 7C-7H) Normalized relative luminescence values in cell lysates after infection with SARS-COV-2 pseudoviruses harboring wild-type or RBD substitutions in the presence of indicated 6 antibodies. (FIG. 71) Summary table of IC₅₀ and IC₉₀ values measured for 6 different antibodies against pseudoviruses harboring wild-type or mutant RBDs. (FIG. 7J) Heat map showing the log fold change in ELISA AUC of antibody Fabs binding to indicated SARS-COV-2 RBD mutants relative to wild-type SARS-COV-2 RBD binding. Mutations that lead to non-binding or decreases >20-fold relative to wild-type are shown as dark red. (FIG. 7K-7P) Normalized relative luminescence values in cell lysates after infection with SARS-COV-2 pseudoviruses harboring wild-type or RBD substitutions in the presence of indicated 6 antibodies. (FIG. 7Q) Summary table of IC₅₀, IC₈₀ and IC50_{eff} values measured for 6 different antibodies and antibody combinations against SARS-COV-2 pseudoviruses. IC50eff values were calculated based on synergistic models previously described (West et al., 2010). (FIG. 7R) Infection of 293T/ACE2cl.22 cells by rVSV/SARS-COV-2/GFP encoding the indicated spike mutations in the presence of increasing amounts of BG10-19. Infection was quantified by FACS after 16 h, with mean and SD from two technical replicates shown.

[0029] FIGS. 8A-8P-Serum Neutralization against SARS-COV-2 pseudovirus and B cell repertoire characteristics (related to FIG. 1). (FIG. 8A) Serum ID₅₀ titers of all 14 study subjects against SARS-COV-2 pseudovirus. The blue dots represent subjects that were selected for monoclonal antibody isolation. (FIG. 8B) Correlation between ID₅₀ titers of all 14 study subjects against SARS-COV-2 pseudovirus and days between COVID-19 diagnosis and blood draw. P value was calculated based on the Pearson correlation coefficient (R). (FIG. 8C) Correlation between ID₅₀ titers of all 14 study subjects against SARS-COV-2 pseudovirus and age of the subjects in years. P value was calculated based on the Pearson correlation coefficient (R). (FIG. 8D) Serum ID₅₀ titers of all 14 study subjects against SARS-COV-2 pseudovirus grouped based on subject gender. P value was calculated using an unpaired two-tailed t-test. (FIG. 8E) Pie charts show the total number of B cells sorted from each subject in the center of each pie and differentially expanded pie slices represent the fraction of IgM/IgD (black), IgG (white) and IgA (grey) cells among all sorted cells. (FIG. 8F) Box plots showing absolute numbers of inferred nucleotide mutations per heavy chain V segment for all sorted cells (red bar), S-binding B cells (blue bar), RBD-binding B cells (green bar) and historic control memory B cells (brown bar) (Rubelt et al., 2012). The box limits are at the lower and upper quartiles and the center line indicates the median. (FIG. 8G) Box plots showing absolute numbers of inferred nucleotide mutations per heavy chain V segment for all sorted cells grouped by immunoglobulin isotypes IgD (pink), IgM (purple), IgA (green) and IgG (blue). The box limits are at the lower and upper quartiles, the center line indicates the median, the whiskers indicate 1.5× interquartile range and the dots represent outliers. P values were calculated using two tailed t-test and red brackets indicate statistical significance of the difference between samples with *P<=0.05, **P<=0.01, ***P<=0.001, ****P<=0.0001 and n/s indicating no statistical significance. P values were calculated using a two-tailed t-test. (FIG. 8H) Bar diagram showing the frequency of kappa and lambda light chains among all sorted cells (red), S-binding B cells (blue), RBD-binding B cells (green), historic control memory B cells (brown) (Rubelt et al., 2012). (FIG. 8I) Box plots showing the CDRH3 length in amino acids for all sorted cells (red), S-binding B cells (blue), RBD-binding B cells (green), historic control memory B cells (brown) (Rubelt et al., 2012). (FIG. 8J) Box plots showing the CDRH3 amino acid charges for all sorted cells (red), S-binding B cells (blue), RBD-binding B cells (green), historic control memory B cells (brown) (Rubelt et al., 2012). (FIG. 8K) Box plots showing the CDRH3 amino acid hydrophobicity scores for all sorted cells (red), S-binding B cells (blue), RBD-binding B cells (green), historic control memory B cells (brown) (Rubelt et al., 2012). (FIG. 8L) Box plots showing the CDRH3 length in amino acids for historic control memory B cells (brown) (Rubelt et al., 2012), IgD⁺ SARS COV2-binding B cells (pink), IgM⁺ SARS COV2-binding B cells (purple), IgA⁺ SARS CoV2-binding B cells (green), IgG⁺ SARS COV2-binding B cells (blue). (FIG. 8M) Box plots showing the CDRH3 amino acid charges for historic control memory B cells (brown) (Rubelt et al., 2012), IgD⁺ SARS COV2-binding B cells (pink), IgM⁺ SARS COV2-binding B cells (purple), IgA⁺ SARS COV2-binding B cells (green), IgG⁺ SARS COV2-binding B cells (blue). CDRH3 amino acid charges were calculated as in (FIG. 8J). (FIG. 8N) Box plots showing the CDRH3 amino acid hydrophobicity scores for historic control memory B cells (brown) (Rubelt et al., 2012), IgD⁺ SARS COV2-binding B cells (pink), IgM⁺ SARS COV2-binding B cells (purple), IgA⁺ SARS CoV2-binding B cells (green), IgG⁺ SARS COV2-binding B cells (blue). Hydrophobicity scores were calculated as in (FIG. 8K). For all box plots the box limits are at the lower and upper quartiles, the center line indicates the median, the whiskers indicate 1.5× interquartile range and the dots represent outliers. P values were calculated using two tailed t-test and red brackets indicate statistical significance of the difference between samples with stars indicating P values as in (FIG. 8G). (FIG. 8O) Distribution of clone sizes for each donor stratified by the clone isotype. Clones that contain cells from multiple isotypes are included as a data point in each of the respective groups. Numbers at the top of the violin plots display the percentage of cells from each isotype. Red brackets indicate statistical significance of the difference between isotypes with *P<=0.05, **P<=0.01, ***P<=0.001, ****P<=0.0001 and n/s indicating no statistical significance. P values were calculated using a two-tailed t-test. (FIG. 8P) Scatterplot displaying the relationship between clone size (number of cells, x-axis) and number of inferred mutations in the heavy chain V segment (y-axis). Each dot represents a cell or a group of cells within a clone with the same heavy chain isotype and number of inferred heavy chain mutations. Clonally related cells with different number of inferred heavy chain mutations are shown with the same color and grouped with violin plots. Pearson correlation coefficients and the p-values of each sub-plot are shown on separately.

[0030] FIGS. 9A-9M—Selection and testing of representative antibodies (related to FIG. 2). Venn diagrams summarizing all expanded clones, their immunoglobulin isotypes and selection of representative antibodies for donors BG1 (FIG. 9A), BG4 (FIG. 9B), BG7 (FIG. 9C) and BG10 (FIG. 9D). Colored circles show expanded B cell clones with the diameter of the circle corresponding to the size of the clone except for the largest clone in BG10 with 36 members. The numbers in the circles indicate the number of clonal members for all clones with more than 2 members. Red circles show expanded clones of which one representative antibody was produced and tested and blue circles show expanded clones of which no representative antibodies were tested. Red triangles represent singlets that were produced and tested. (FIG. 9E) Heatmap summarizing the polyreactivity ELISA results for all antibodies produced as IgG1 isolated from BG1, BG4, BG7 and BG10 against double strand DNA (dsDNA), single strand DNA (ssDNA), lipopolysaccharide (LPS), insulin (Ins) and streptavidin-APC (SA-APC) (Methods). OD⁴¹⁵ values less than 0.5 at an antibody concentration of 1 μg/ml are considered non-reactive and are indicated in white, OD⁴¹⁵ values between 0.5 and 1.9 at an antibody concentration of 1 μg/ml are considered moderately reactive and are indicated in orange, and OD⁴¹⁵ values of 2 and above at an antibody concentration of 1 μg/ml are considered strongly reactive and are indicated in red (Tiller et al., 2007). Results for highly-, moderately- and non-polyreactive control antibodies ED38, JB40 and mGO53 are included as indicated (Wardemann et al., 2003). (FIG. 9F) Dot plots summarizing IC₈₀ values from SARS-COV-2 pseudovirus neutralization assay in μg/ml (y-axis) for all antibodies isolated from subjects BG1, BG4, BG7 and BG10 and produced as IgG1 (Table 2). Pink dots represent antibodies isolated from IgG⁺ B cells, bright blue dots represent antibodies isolated from IgA⁺ B cells and black dots show antibodies isolated from IgM⁺ B cells. (FIG. 9G) Bar diagram showing the percent of neutralizing antibodies in a SARS-COV-2 pseudovirus neutralization assay among antibodies derived from IgM/IgD+ B cells (black), IgG⁺ B cells (white) and IgA⁺ B cells (grey) (Table 2). (FIG. 9H) Bar diagram showing the IC₈₀ values in μg/ml (y-axis) against SARS-CoV-2 pseudovirus in red and authentic SARS-COV-2 virus in black for all antibodies that showed neutralizing activity against SARS-COV-2 pseudovirus (Table 2). Pearson correlation coefficient (R) and P value were calculated comparing results from both assays. (FIG. 9I) Table summarizing neutralizing activity of antibodies BG10-19, BG1-22, BG4-25 and BG7-15 against SARS-COV-2 D614G, B.1.1.7 and B.1.351. Shown are IC50 and IC80 values in mg/ml as indicated. (FIG. 9J) Representative image from size exclusion chromatography for purification of IgA dimers for antibody BG1-20 (Tables 2 and 3). Y-axis displays absorption at 280 nm (mAU) and x-axis displays elution volume (in ml). (FIG. 9K) Representative Criterion™ TGX™ precast gel under non-reducing conditions after Coomassie Blue staining. Ladders with bands at indicated molecular weights are shown on the left and right end of the gel and adjacent to these are the pre-SEC sample and a monomeric IgA as indicated. The 22 lanes in the middle show consecutive elution fractions from SEC covering the multimer, dimer and monomer peaks as indicated and seen in (J). (FIG. 9L) Summary table for IgA neutralization of SARS-COV-2 pseudovirus. Shown are the IC50 and IC80 values in mg/ml (left two columns) followed by IC50 and IC80 values in nmol and IC50 and IC80 values in nmol corrected for the number of binding sites (Corr.) and the molar neutralization ratio (MNR) as defined by the IC50 of monomeric IgA divided by the IC50 for the dimeric version (Klein and Bjorkman, 2010). G-IgG1, mIgA=monomeric IgA, dIgA=dimeric IgA. (FIG. 9M) Bar graph summarizing the data from (L). Shown are all IgA antibodies which showed some level of neutralization in SARS-COV-2 pseudovirus neutralization assay in monomeric or dimeric form. Y-axis depicts IC50 (in nmol) corrected for the number of binding sites, x-axis indicates the different antibodies as indicated. Black bars show neutralization in IgG1 form (IgG), red bars in monomeric IgA (mIgA) and orange bars in dimeric IgA (dIgA) form.

[0031] FIGS. 10A-10H—BG10-19 cryo-EM validation, epitope mapping, and cross-reactive ELISA binding data (related to FIG. 3). (FIG. 10A) Representative micrograph and 2D class averages for BG10-19-S cryo-EM data collection. (FIG. 10B) Gold-standard FSC plot showing an overall resolution of 3.3 Å at FSC-0.143. (FIG. 10C) cryo-EM. (FIG. 10D) Local resolution estimation for the final cryo-EM reconstruction. (FIG. 10E) Structure of ACE2, RBD and BG10-19. (FIG. 10F) Sequence alignment of SARS-COV-2, SARS-COV, WIV1-COV, and SCH014-COV. RBD residues on the primary BG10-19 epitope are shaded blue. Residues contacted on the adjacent RBD are shaded orange. S309 epitope residues are also shown. (FIGS. 10G-10J) ELISA binding data for BG10-19, BG1-28, S309 (Pinto et al., 2020a), CR3022 (Tian et al., 2020), and the HIV-1 antibody IOMA (Gristick et al., 2016) against several sarbecoviruses.

[0032] FIGS. 11A-11H—Transcriptional Characteristics (related to FIG. 4). (FIG. 11A) Bar diagram showing the percentage of cells from individual donors contributing to all cells within each cluster as indicated. (FIG. 11B) Uniform Manifold Approximation and Projection (UMAP) plot displaying the cells defined by their single-cell transcriptome measurements. The cells are colored based on whether they were isolated with SARS-COV-2 S trimer (red) or RBD (turquoise) during cell sorting. (FIG. 11C) Same UMAP as in (FIG. 11B), but cells are colored based on their cell cycle phase G1 (red), G2M (green) or S (blue) as predicted by the Seurat cell cycle scoring function (Butler et al., 2018; Stuart et al., 2019). (FIG. 11D) Violin plots displaying the distribution of the expression levels of CD44, CXCR4 and CD38 (log 2) within each single-cell transcriptome cluster. (FIG. 11E) Bar plot displaying the percentage of each heavy chain isotype usage within each transcriptome cluster. (FIG. 11F) Box plots displaying the distribution of the number of inferred mutations in the heavy chains within each of the 6 transcriptome clusters. Mean values are displayed above each box. Significance of the difference between the mean values of each cluster with the mean of cluster 1 was calculated using one-tailed t-test. (FIG. 11G) Box plots displaying the distribution of the percentage of donor clonal cells within each transcriptome cluster (i.e. fraction of cells that are part of a B cell clone with 2 or more members across the entire donor). Significance of the difference between the mean values of clusters 3 and 4 with the mean of cluster 1 was calculated with one-tailed t-test. (FIG. 11H) Shannon entropy values calculated based on the general form of the diversity index proposed by (Hill, 1973), improved by resampling strategies in (Chao et al., 2014; Chao et al., 2015) and implemented in the Alakazam R package (Gupta et al., 2015). Each dot represents the Shannon entropy value of a specific donor among the 14 donors in the specified cluster. Shannon entropy values are reversely related with the clonal expansion within the clusters. Thus, according to the displayed comparisons TC1 contains the smallest clonal expansion. Significance values of pairwise comparisons are computed with two-tailed t-test. For (FIG. 11F), (FIG. 11G) and (FIG. 11H) red brackets indicate statistical significance of the difference between samples. *P<=0.05, ***P<=0.001, ****P<=0.0001 and n/s indicates no statistical significance.

[0033] FIGS. 12A-12D—TC3 and TC4 characterization (related to FIG. 4). (FIG. 12A) Violin plots displaying the distribution of the expression levels of various genes across single-cell transcriptome clusters. The significance of the mean value comparisons between different clusters was calculated using a two-tailed t-test. (FIG. 12B) Box plots displaying the percentage of VH3-53 or VH3-66 (with CDRH3 length smaller than 14 aa by IMGT definition (Lefranc et al., 2015)) cells of the 14 donors within each transcriptome cluster. Mean values of cluster 3 and 4 were compared with the mean values of other clusters using a two-tailed t-test. For (FIG. 12A) and (FIG. 12B) red brackets indicate statistical significance of the difference between samples. *P<=0.05, ***P<=0.001, ****P<=0.0001, and n/s indicates no statistical significance. (FIG. 12C) Scatter plots displaying the relationship between the percent of cells within each donor coming from TC0-5 with the neutralization titer values measured for each donor. Spearman correlation values with corresponding P values are shown on each subplot. Dots are colored based on the donor ID, as indicated. (FIG. 12D) Distribution of the percent of B-cell clones across 6 transcriptome clusters, stratified by neutralizing activity of the tested antibody. Each dot displays the percentage of cells from a specific clone (y-axis) that belongs to the specified transcriptome cluster (x-axis). Numbers on top of each violin plot show the median value of the distribution.

[0034] FIGS. 13A-13H—BG4-25-RBD structure and BG1-22-S trimer cryoEM validation (related to FIG. 5). (FIG. 13A) X-ray structure overview of BG4-25 (green) in complex with the SARS-COV-2 RBD (gray surface) and antibody CR3022 (yellow) (Tian et al., 2020). (FIG. 13B) BG4-25 CDR loops mapped on the surface of the RBD. Epitope residues are colored green and the ACE2 footprint shown (orange dotted line). (FIG. 13C) Bar diagram showing the mutation frequency of all inferred mutations that occurred in 10% or more of 93 isolated IgG VH3-53/VH3-66 antibodies with CDRH3 less than 14 amino acids (IMGT definition; (Lefranc et al., 2015)) from the collection of 6,113 SARS-COV-2 binding B cells and a reference group of 13,900 VH3-53/VH3-66 sequences from a human Ig gene repertoire set (see Methods and (Rubelt et al., 2012)). The frequencies of mutations in the antibodies from the SARS-COV-2 binding B cells are shown above the dotted line and the frequencies of mutations in the reference group are shown below the dotted line. (FIG. 13D, FIG. 13E) Residue level contacts between BG4-25 (green) and RBD (light gray). Potential H-bonds are shown as dashed lines. (FIG. 13F) Representative micrograph and 2D class averages for BG1-22-S cryo-EM data collection. (FIG. 13G) Gold-standard FSC plot showing an overall resolution of 3.7 Å at FSC-0.143. (FIG. 13H) Local resolution estimation for the final cryo-EM reconstruction.

[0035] FIGS. 14A-14I—Cryo-EM validation of BG7-15, BG7-20, and BG1-24-S trimer complexes (related to FIG. 6). Representative micrograph (scale bar=100 nm) selected from total dataset, 2D class averages, gold-standard FSC plots, and local resolution estimations for (FIGS. 14A-14C) BG7-15-S complex, (FIGS. 14D-14F) BG7-20-S complex, and (FIGS. 14G-14I) BG1-24-S complex.

[0036] FIG. 15—Schematic and results illustrating sorting of the receptor-binding domain and -trimer specific B cells from 24 individuals with likely SARS-COV-2 infection.

[0037] FIG. 16—There is a positive correlation between plasma neutralization titers and the fraction of IgG+ B cells in the SARS-COV-2-specific repertoire in 14 donors, consistent with the finding that most neutralizers stem from IgG+ B cells.

[0038] FIG. 17—Data showing that neutralization does not correlate with mutation levels but correlates with binding to SARS-COV-2 trimer in ELISA.

[0039] FIG. 18—Graphs showing that almost all neutralizing antibodies bind to the SARS-CoV-2 receptor-binding domain (RBD).

[0040] FIG. 19—Graphs showing that almost all neutralizing antibodies bind to the SARS-CoV-2 RBD.

[0041] FIG. 20—Graph showing that BG10-19 and BG1-28 show equal binding to SARS-CoV-2 and trimer/RBD.

[0042] FIG. 21—Table showing selected antibodies for structural characterization.

[0043] FIG. 22—Shows a 4.0 Å cryoEM structure of BG7-20-SARS-COV-2-S 6P complex. Dataset has preferential orientation issues, which will limit the ability to push the resolution much higher without collecting more data.

[0044] FIG. 23—Shows a 4.0 Å cryoEM structure of BG7-20-SARS-COV-2-S 6P complex. Data show two binding states: 2d/1u and 1d/2u bound by Fabs. The data look very similar to previously described C121-S structure (C121 is VH1-2/VL2-23).

[0045] FIG. 24—Shows a 3.5 Å cryoEM structure of BG10-19-SARS-COV-2-S 6P complex. Shows one main class that is symmetrical.

[0046] FIG. 25—Shows a 3.5 Å cryoEM structure of BG10-19-SARS-COV-2-S 6P complex. BG10-19 binds to an all down RBD conformation, with a main epitope focused near the N343-glycan. Interestingly, BG10-19 LC seems to make secondary contacts with adjacent RBD.

[0047] FIG. 26—Shows a 3.5 Å cryoEM structure of BG10-19-SARS-COV-2-S 6P complex . . . bridging RBDs on S trimers. BG10-19 HC makes contacts with primary epitope near N343-glycan, while the LC bridges adjacent down RBDs and interacts with residues that overlap with ACE2 receptor binding motif.

[0048] FIG. 27—Shows cryoEM reconstructions of BG1-22 and BG1-24-S complexes.

[0049] FIG. 28—Pie charts showing the total number of B cells sorted from each subject in the center of each pie and expanded B cell clones represented by pie slices. The white areas in each pie chart represent singlets. SARS-COV-2 surface trimer specific repertoire includes expanded B cell clones.

[0050] FIG. 29—Illustrates that SARS-COV-2 surface trimer-specific repertoire from 14 donors includes heavily expanded class of VH3-53/VH3-66 antibodies. These show a highly conserved sequence.

[0051] FIG. 30—UMAP plots showing that SARS-COV-2 surface trimer-specific repertoire from 14 donors falls into 5 distinct transcriptional clusters.

[0052] FIG. 31—Heat map showing that SARS-COV-2 surface trimer-specific repertoire from 14 donors falls into 5 distinct transcriptional clusters.

[0053] FIG. 32—Graphs showing that clusters 3 and 4 have higher levels of B cell activation markers such as CD80, CD40, and CD86.

[0054] FIG. 33—Graphs showing that VH3-53/VH3-66 with HC CDR3<14 amino acids are enriched in clusters 3 and 4.

[0055] FIG. 34—Pie chart and schematic illustrating the search for SARS/CoV-2/MERS cross-binding antibodies.

[0056] FIG. 35—Pie charts showing the total number of B cells sorted from each subject in the center of each pie and expanded B cell clones represented by pie slices. The white areas in each pie chart represent singlets. When used as sorting bait all 6 proteins yield differently expanded B cell clones.

[0057] FIG. 36—Pie charts showing that there is considerable clonal overlap between B cells sorted with the 6 different proteins.

[0058] FIG. 37—Venn diagrams summarizing all expanded clones and their immunoglobulin isotypes. The majority of expanded clones are IgM+ but some expanded clones include class-switched B cells.

[0059] FIG. 38—Graph illustrating that sorting with SARS/MERS/COV-2 trimers selects for antibodies that bind outside of the RBD (see, also, Table 7).

[0060] FIG. 39—Flow cytometry charts showing a pilot experiment for simultaneous staining with multiple coronavirus trimer single stains.

[0061] The figures herein are for illustrative purposes only and are not necessarily drawn to scale.

### DETAILED DESCRIPTION OF THE EXAMPLE EMBODIMENTS

### General Definitions

[0062] Unless defined otherwise, technical and scientific terms used herein have the same meaning as commonly understood by one of ordinary skill in the art to which this disclosure pertains. Definitions of common terms and techniques in molecular biology may be found in Molecular Cloning: A Laboratory Manual, 2^{nd} edition (1989) (Sambrook, Fritsch, and Maniatis); Molecular Cloning: A Laboratory Manual, 4^{th} edition (2012) (Green and Sambrook); Current Protocols in Molecular Biology (1987) (F. M. Ausubel et al. eds.); the series Methods in Enzymology (Academic Press, Inc.): PCR 2: A Practical Approach (1995) (M. J. MacPherson, B. D. Hames, and G. R. Taylor eds.): Antibodies, A Laboratory Manual (1988) (Harlow and Lane, eds.): Antibodies A Laboratory Manual, 2^{nd} edition 2013 (E. A. Greenfield ed.); Animal Cell Culture (1987) (R. I. Freshney, ed.); Benjamin Lewin, Genes IX, published by Jones and Bartlet, 2008 (ISBN 0763752223); Kendrew et al. (eds.), The Encyclopedia of Molecular Biology, published by Blackwell Science Ltd., 1994 (ISBN 0632021829); Robert A. Meyers (ed.), Molecular Biology and Biotechnology: a Comprehensive Desk Reference, published by VCH Publishers, Inc., 1995 (ISBN 9780471185710); Singleton et al., Dictionary of Microbiology and Molecular Biology 2nd ed., J. Wiley & Sons (New York, N.Y. 1994), March, Advanced Organic Chemistry Reactions, Mechanisms and Structure 4th ed., John Wiley & Sons (New York, N.Y. 1992); and Marten H. Hofker and Jan van Deursen, Transgenic Mouse Methods and Protocols, 2^{nd} edition (2011).

[0063] As used herein, the singular forms “a”, “an”, and “the” include both singular and plural referents unless the context clearly dictates otherwise.

[0064] The term “optional” or “optionally” means that the subsequent described event, circumstance or substituent may or may not occur, and that the description includes instances where the event or circumstance occurs and instances where it does not.

[0065] The recitation of numerical ranges by endpoints includes all numbers and fractions subsumed within the respective ranges, as well as the recited endpoints.

[0066] The terms “about” or “approximately” as used herein when referring to a measurable value such as a parameter, an amount, a temporal duration, and the like, are meant to encompass variations of and from the specified value, such as variations of +/−10% or less, +/−5% or less, +/−1% or less, and +/−0.1% or less of and from the specified value, insofar such variations are appropriate to perform in the disclosed invention. It is to be understood that the value to which the modifier “about” or “approximately” refers is itself also specifically, and preferably, disclosed.

[0067] As used herein, a “biological sample” may contain whole cells and/or live cells and/or cell debris. The biological sample may contain (or be derived from) a “bodily fluid”. The present invention encompasses embodiments wherein the bodily fluid is selected from amniotic fluid, aqueous humour, vitreous humour, bile, blood serum, breast milk, cerebrospinal fluid, cerumen (earwax), chyle, chyme, endolymph, perilymph, exudates, feces, female ejaculate, gastric acid, gastric juice, lymph, mucus (including nasal drainage and phlegm), pericardial fluid, peritoneal fluid, pleural fluid, pus, rheum, saliva, sebum (skin oil), semen, sputum, synovial fluid, sweat, tears, urine, vaginal secretion, vomit and mixtures of one or more thereof. Biological samples include cell cultures, bodily fluids, cell cultures from bodily fluids. Bodily fluids may be obtained from a mammal organism, for example by puncture, or other collecting or sampling procedures.

[0068] The terms “subject,” “individual,” and “patient” are used interchangeably herein to refer to a vertebrate, preferably a mammal, more preferably a human. Mammals include, but are not limited to, murines, simians, humans, farm animals, sport animals, and pets. Tissues, cells and their progeny of a biological entity obtained in vivo or cultured in vitro are also encompassed.

[0069] Various embodiments are described hereinafter. It should be noted that the specific embodiments are not intended as an exhaustive description or as a limitation to the broader aspects discussed herein. One aspect described in conjunction with a particular embodiment is not necessarily limited to that embodiment and can be practiced with any other embodiment(s). Reference throughout this specification to “one embodiment”, “an embodiment,” “an example embodiment,” means that a particular feature, structure or characteristic described in connection with the embodiment is included in at least one embodiment of the present invention. Thus, appearances of the phrases “in one embodiment,” “in an embodiment,” or “an example embodiment” in various places throughout this specification are not necessarily all referring to the same embodiment, but may. Furthermore, the particular features, structures or characteristics may be combined in any suitable manner, as would be apparent to a person skilled in the art from this disclosure, in one or more embodiments. Furthermore, while some embodiments described herein include some but not other features included in other embodiments, combinations of features of different embodiments are meant to be within the scope of the invention. For example, in the appended claims, any of the claimed embodiments can be used in any combination.

[0070] All publications, published patent documents, and patent applications cited herein are hereby incorporated by reference to the same extent as though each individual publication, published patent document, or patent application was specifically and individually indicated as being incorporated by reference.

### Overview

[0071] Embodiments disclosed herein provide cross-neutralizing coronavirus antibodies, in particular, cross-neutralizing SARS-COV2 antibodies capable of neutralizing a broad range of SARS-COV2 variants (e.g., BG10-19). SARS-COV2 poses a significant threat worldwide and monoclonal antibodies have been a focus in vaccine and therapeutic design to counteract the threat of SARS-COV-2. Here, Applicants combined SARS-COV-2-specific B cell sorting with single-cell VDJ and RNA-seq and structures of monoclonal antibodies to characterize B cell responses against SARS-COV-2. Applicants show that the SARS-COV-2-specific B cell repertoire consists of transcriptionally distinct B cell populations with potently neutralizing antibodies localized in two clusters that resemble memory and activated B cells. Of 92 isolated antibodies, 27 neutralize SARS-COV-2 with IC₈₀ values as low as 7 ng/ml Cryo-electron microscopy structures of potently-neutralizing antibody Fabs complexed with SARS-COV-2 spike trimers show recognition of various receptor-binding domain (RBD) epitopes, including one antibody (BG10-19) that locks the spike trimer in a completely closed conformation to potently neutralize SARS-COV-2, including lineages B.1.1.7 and B.1.351, SARS-COV and cross-reacts with heterologous RBDs. In certain embodiments, due to the epitopes targeted, the antibodies neutralize variants harboring mutations in the spike protein and RBD domains. Together, the results characterize transcriptional differences among SARS-COV-2-specific B cells and can inform vaccine and therapeutic development of cross-reactive antibodies, as well as, inform design of immunogens to elicit cross-reactive protection.

### Therapeutic Antibodies or Binding Fragments of an Antibody

### Antibodies

[0072] In certain embodiments, the present invention provides antibodies, antibody fragments, binding fragments of an antibody, or antigen binding fragments capable of binding to an antigen of interest (e.g., the receptor binding domain of SARS-COV-2 or the spike protein of SARS-COV-2). Applicants have identified antibodies from B cells that bound to specific bait proteins, i.e., trimers and RBD proteins from SARS-COV-2, SARS and MERS (see, Tables 2, 7 and 8). Table 8 provides a list of all nucleotide sequences identified in isolated B cells from 14 donors. The antibodies are not limited to the nucleotide sequences. The invention also includes antibodies comprising the amino acid sequences encoded for by the nucleotide sequences. One skilled in the art routinely converts nucleotide sequences to amino acid sequences. The disclosed antibodies may be cross-reactive to any coronavirus, thus providing for cross-reactive therapeutic antibodies. In certain embodiments, the antibodies provide epitopes for generating cross-reactive antibodies. In certain embodiments, the antibodies can be administered to treat a coronavirus infection, in particular SARS-COV-2 and variants thereof. In certain embodiments, the therapeutic antibodies described herein can be used as an initial treatment upon diagnosis or suspicion of a coronavirus infection, in particular a novel coronavirus infection. As used herein, “coronavirus” refers to enveloped viruses with a positive-sense single-stranded RNA genome and a nucleocapsid of helical symmetry that constitute the subfamily Orthocoronavirinae, in the family Coronaviridae (see, e.g., Woo P C, Huang Y, Lau S K, Yuen K Y. Coronavirus genomics and bioinformatics analysis. Viruses. 2010; 2(8):1804-1820).

[0073] In certain embodiments, the antibodies disclosed herein are cross-reactive to SARS-CoV-2 variants. As used herein, the term “variant” refers to any virus having one or more mutations as compared to a known virus. A strain is a genetic variant or subtype of a virus. The terms ‘strain’, ‘variant’, and ‘isolate’ may be used interchangeably. In certain embodiments, a variant has developed a “specific group of mutations” that causes the variant to behave differently than that of the strain it originated from.

[0074] While there are many thousands of variants of SARS-COV-2, (Koyama, Takahiko Koyama; Platt, Daniela; Parida, Laxmi (June 2020). “Variant analysis of SARS-COV-2 genomes”. Bulletin of the World Health Organization. 98: 495-504) there are also much larger groupings called clades. Several different clade nomenclatures for SARS-COV-2 have been proposed. As of December 2020, GISAID, referring to SARS-COV-2 as hCoV-19 identified seven clades (O, S, L, V, G, GH, and GR) (Alm E, Broberg E K, Connor T, et al. Geographical and temporal distribution of SARS-COV-2 clades in the WHO European Region, January to June 2020 [published correction appears in Euro Surveill. 2020 August; 25(33):]. Euro Surveill. 2020; 25(32):2001410). Also as of December 2020, Nextstrain identified five (19A, 19B, 20A, 20B, and 20C) (Cited in Alm et al. 2020). Guan et al. identified five global clades (G614, S84, V251, I378 and D392) (Guan Q, Sadykov M, Mfarrej S, et al. A genetic barcode of SARS-COV-2 for monitoring global distribution of different clades during the COVID-19 pandemic. Int J Infect Dis. 2020; 100:216-223). Rambaut et al. proposed the term “lineage” in a 2020 article in Nature Microbiology; as of December 2020, there have been five major lineages (A, B, B.1, B.1.1, and B.1.777) identified (Rambaut, A.; Holmes, E. C.; O'Toole, Á.; et al. “A dynamic nomenclature proposal for SARS-COV-2 lineages to assist genomic epidemiology”. 5: 1403-1407).

[0075] Genetic variants of SARS-COV-2 have been emerging and circulating around the world throughout the COVID-19 pandemic (see, e.g., The US Centers for Disease Control and Prevention; www.cdc.gov/coronavirus/2019-ncov/variants/variant-info.html). Exemplary, non-limiting variants applicable to the present disclosure include variants of SARS-COV-2, particularly those having substitutions of therapeutic concern. Table A shows exemplary, non-limiting genetic substitutions in SARS-COV-2 variants.

TABLE A

| | Common Pango Lineages with Spike |
|---|---|
| Spike Protein Substitution | Protein Substitutions |
| L452R | A.2.5, B.1, B.1.429, B.1.427, B.1.617.1, |
| | B.1.526.1, B.1.617.2, C.36.3 |
| E484K | B.1.1.318, B.1.1.7, B.1.351, B.1.525, |
| | B.1.526, B.1.621, B.1.623, P.1, P.1.1, |
| | P.1.2, R.1 |
| K417N, E484K, N501Y | B.1.351, B.1.351.3 |
| K417T, E484K, N501Y | P.1, P.1.1, P.1.2 |
| A67V, del69-70, T95I, del142-144, Y145D, del211, | B.1.1.529 and BA lineages |
| L212I, ins214EPE, G339D, S371L, S373P, S375F, | |
| K417N, N440K, G446S, S477N, T478K, E484A, | |
| Q493R, G496S, Q498R, N501Y, Y505H, T547K, | |
| D614G, H655Y, N679K, P681H, N764K, D796Y, | |
| N856K, Q954H, N969K, L981F | |

Phylogenetic Assignment of Named Global Outbreak (PANGO) Lineages is software tool developed by members of the Rambaut Lab. The associated web application was developed by the Centre for Genomic Pathogen Surveillance in South Cambridgeshire and is intended to implement the dynamic nomenclature of SARS-COV-2 lineages, known as the PANGO nomenclature. It is available at cov-lineages.org.

[0076] In some embodiments, the SARS-COV-2 variant is and/or includes: B.1.1.7, also known as Alpha (WHO) or UK variant, having the following spike protein substitutions: 69del, 70del, 144del, (E484K*), (S494P*), N501Y, A570D, D614G, P681H, T716I, S982A, and D1118H (K1191N*); B.1.351, also known as Beta (WHO) or South Africa variant, having the following spike protein substitutions: D80A, D215G, 241del, 242del, 243del, K417N, E484K, N501Y, D614G, and A701V; B.1.427, also known as Epsilon (WHO) or US California variant, having the following spike protein substitutions: L452R, and D614G; B.1.429, also known as Epsilon (WHO) or US California variant, having the following spike protein substitutions: S13I, W152C, L452R, and D614G; B.1.617.2, also known as Delta (WHO) or India variant, having the following spike protein substitutions: T19R, (G142D), 156del, 157del, R158G, L452R, T478K, D614G, P681R, and D950N; P.1, also known as Gamma (WHO) or Japan/Brazil variant, having the following spike protein substitutions: L18F, T20N, P26S, D138Y, R190S, K417T, E484K, N501Y, D614G, H655Y, and T1027I; and B.1.1.529 also known as Omicron (WHO), having the following spike protein substitutions: A67V, del69-70, T95I, del142-144, Y145D, del211, L212I, ins214EPE, G339D, S371L, S373P, S375F, K417N, N440K, G446S, S477N, T478K, E484A, Q493R, G496S, Q498R, N501Y, Y505H, T547K, D614G, H655Y, N679K, P681H, N764K, D796Y, N856K, Q954H, N969K, L981F, or any combination thereof.

[0077] In some embodiments, the SARS-COV-2 variant is classified and/or otherwise identified as a Variant of Concern (VOC) by the World Health Organization and/or the U.S. Centers for Disease Control. A VOC is a variant for which there is evidence of an increase in transmissibility, more severe disease (e.g., increased hospitalizations or deaths), significant reduction in neutralization by antibodies generated during previous infection or vaccination, reduced effectiveness of treatments or vaccines, or diagnostic detection failures.

[0078] In some embodiments, the SARS-Cov-2 variant is classified and/or otherwise identified as a Variant of High Consequence (VHC) by the World Health Organization and/or the U.S. Centers for Disease Control. A variant of high consequence has clear evidence that prevention measures or medical countermeasures (MCMs) have significantly reduced effectiveness relative to previously circulating variants.

[0079] In some embodiments, the SARS-Cov-2 variant is classified and/or otherwise identified as a Variant of Interest (VOI) by the World Health Organization and/or the U.S. Centers for Disease Control. A VOI is a variant with specific genetic markers that have been associated with changes to receptor binding, reduced neutralization by antibodies generated against previous infection or vaccination, reduced efficacy of treatments, potential diagnostic impact, or predicted increase in transmissibility or disease severity.

[0080] In some embodiments, the SARS-Cov-2 variant is classified and/or is otherwise identified as a Variant of Note (VON). As used herein, VON refers to both “variants of concern” and “variants of note” as the two phrases are used and defined by Pangolin (cov-lineages.org) and provided in their available “VOC reports” available at cov-lineages.org.

[0081] In some embodiments the SARS-Cov-2 variant is a VOC. In some embodiments, the SARS-COV-2 variant is or includes an Alpha variant (e.g., Pango lineage B.1.1.7), a Beta variant (e.g., Pango lineage B.1.351, B.1.351.1, B.1.351.2, and/or B.1.351.3), a Delta variant (e.g., Pango lineage B.1.617.2, AY.1, AY.2, AY.3 and/or AY.3.1); a Gamma variant (e.g., Pango lineage P.1, P.1.1, P.1.2, P.1.4, P.1.6, and/or P.1.7), a Omicon variant (B.1.1.529) or any combination thereof.

[0082] In some embodiments the SARS-Cov-2 variant is a VOI. In some embodiments, the SARS-COV-2 variant is or includes an Eta variant (e.g., Pango lineage B.1.525 (Spike protein substitutions A67V, 69del, 70del, 144del, E484K, D614G, Q677H, F888L)); an Iota variant (e.g., Pango lineage B.1.526 (Spike protein substitutions L5F, (D80G*), T95I, (Y144-*), (F157S*), D253G, (L452R*), (S477N*), E484K, D614G, A701V, (T859N*), (D950H*), (Q957R*))); a Kappa variant (e.g., Pango lineage B.1.617.1 (Spike protein substitutions (T95I), G142D, E154K, L452R, E484Q, D614G, P681R, Q1071H)); Pango lineage variant B.1.617.2 (Spike protein substitutions T19R, G142D, L452R, E484Q, D614G, P681R, D950N)), Lambda (e.g., Pango lineage C.37); or any combination thereof.

[0083] In some embodiments SARS-Cov-2 variant is a VON. In some embodiments, the SARS-Cov-2 variant is or includes Pango lineage variant P.1 (alias, B.1.1.28.1.) as described in Rambaut et al. 2020. Nat. Microbiol. 5:1403-1407) (spike protein substitutions: T20N, P26S, D138Y, R190S, K417T, E484K, N501Y, H655Y, TI027I)); an Alpha variant (e.g., Pango lineage B.1.1.7); a Beta variant (e.g., Pango lineage B.1.351, B.1.351.1, B.1.351.2, and/or B.1.351.3); Pango lineage variant B.1.617.2 (Spike protein substitutions T19R, G142D, L452R, E484Q, D614G, P681R, D950N)); an Eta variant (e.g., Pango lineage B.1.525); Pango lineage variant A.23.1 (as described in Bugembe et al. medRxiv. 2021. doi: doi.org/10.1101/2021.02.08.21251393) (spike protein substitutions: F157L, V367F, Q613H, P681R); or any combination thereof.

[0084] Structures have been determined for SARS-COV-2 variants and provide a structural framework for describing the impact of individual mutations on immune evasion (see, e.g., McCallum, et al., 2021, Molecular basis of immune evasion by the delta and kappa SARS-COV-2 variants, bioRxiv 2021.08.11.455956; doi.org/10.1101/2021.08.11.455956). The antibodies described herein can bind to epitopes on the structures of the variants described herein.

[0085] The term “antibody” is used interchangeably with the term “immunoglobulin” herein, and includes intact antibodies, fragments of antibodies, e.g., Fab, F(ab′)2 fragments, and intact antibodies and fragments that have been mutated either in their constant and/or variable region (e.g., mutations to produce chimeric, partially humanized, or fully humanized antibodies, as well as to produce antibodies with a desired trait, e.g., enhanced binding and/or reduced FcR binding). The term “fragment” refers to a part or portion of an antibody or antibody chain comprising fewer amino acid residues than an intact or complete antibody or antibody chain. Fragments can be obtained via chemical or enzymatic treatment of an intact or complete antibody or antibody chain. Fragments can also be obtained by recombinant means. Exemplary fragments include Fab, Fab′, F(ab′)2, Fabc, Fd, dAb, VHH and scFv and/or Fv fragments.

[0086] The term “antigen-binding fragment” refers to a polypeptide fragment of an immunoglobulin or antibody that binds antigen or competes with intact antibody (i.e., with the intact antibody from which they were derived) for antigen binding (i.e., specific binding). As such these antibodies or fragments thereof are included in the scope of the invention, provided that the antibody or fragment binds specifically to a target molecule.

[0087] In certain embodiments, the antibody or antibody fragment is a therapeutic antibody. In certain embodiments, the antibody is a neutralizing antibody. As used herein, “neutralizing antibody” refers to an antibody that is capable of neutralizing a pathogen or reducing infectivity, such as a viral pathogen (e.g., SARS-COV-2).

[0088] Applicants have identified specific antibodies capable of neutralizing SARS-COV-2, as well as neutralizing antibodies capable of binding SARS, MERS and CoV2 spike protein (Table 2). The antibodies identified specifically bind to the receptor binding domain (RBD) of SARS-CoV-2 spike or a region in the spike protein outside of the RBD. The antibodies neutralize pseudotyped virus expressing the spike protein. The antibodies include “complementarity determining regions” or “CDRs” interspersed among “frame regions” or “FRs”, as defined herein. As used herein CDRs refer to variable regions in an antibody that provide for antigen specificity. In certain embodiments, specific CDRs identified can be used in any antibody framework described further herein. In certain embodiments, one, two, or all three CDRs are used in a framework. In certain embodiments, CDR3 for the light and heavy chains are used in a framework. As used herein, framework can refer to an entire antibody where one or more variable chains or CDR sequences are substituted. It is common for therapeutic antibodies to use a common antibody constant region substituted with the identified variable chains or CDR sequences. In certain embodiments, frame region (FR) refers to the non-CDR regions or constant regions in the antibody.

[0089] In certain embodiments, antibodies prepared according to the present invention are substantially free of non-antibody protein. As used herein, a preparation of antibody protein having less than about 50% of non-antibody protein (also referred to herein as a “contaminating protein”), or of chemical precursors, is considered to be “substantially free.” 40%, 30%, 20%, 10% and more preferably 5% (by dry weight), of non-antibody protein, or of chemical precursors is considered to be substantially free. When the antibody protein or biologically active portion thereof is recombinantly produced, it is also preferably substantially free of culture medium, i.e., culture medium represents less than about 30%, preferably less than about 20%, more preferably less than about 10%, and most preferably less than about 5% of the volume or mass of the protein preparation.

[0090] In preferred embodiments, the antibodies of the present invention are monoclonal antibodies. As used herein, the term “monoclonal antibody” refers to a single antibody produced by any means, such as recombinant DNA technology. As used herein, the term “monoclonal antibody” also refers to an antibody derived from a clonal population of antibody-producing cells (e.g., B lymphocytes or B cells) which is homogeneous in structure and antigen specificity. The term “polyclonal antibody” refers to a plurality of antibodies originating from different clonal populations of antibody-producing cells which are heterogeneous in their structure and epitope specificity but which recognize a common antigen. Monoclonal and polyclonal antibodies may exist within bodily fluids, as crude preparations, or may be purified, as described herein.

[0091] The term “binding portion” of an antibody (or “antibody portion”) includes one or more complete domains, e.g., a pair of complete domains, as well as fragments of an antibody that retain the ability to specifically bind to a target molecule. It has been shown that the binding function of an antibody can be performed by fragments of a full-length antibody. Binding fragments are produced by recombinant DNA techniques, or by enzymatic or chemical cleavage of intact immunoglobulins. Binding fragments include Fab, Fab′, F(ab′)2, Fabc, Fd, dAb, Fv, single chains, VHH, single-chain antibodies, e.g., scFv, and single domain antibodies.

[0092] In certain embodiments, the antibodies described herein are humanized. In certain embodiments, “humanized” forms of non-human antibodies are chimeric antibodies that contain minimal sequence derived from non-human immunoglobulin. For the most part, humanized antibodies are human immunoglobulins (recipient antibody) in which residues from a hypervariable region of the recipient are replaced by residues from a hypervariable region of a non-human species (donor antibody) such as mouse, rat, rabbit or nonhuman primate having the desired specificity, affinity, and capacity. In some instances, FR residues of the human immunoglobulin are replaced by corresponding non-human residues. Furthermore, humanized antibodies may comprise residues that are not found in the recipient antibody or in the donor antibody. These modifications are made to further refine antibody performance. In general, the humanized antibody will comprise substantially all of at least one, and typically two, variable domains, in which all or substantially all of the hypervariable regions correspond to those of a non-human immunoglobulin and all or substantially all of the FR regions are those of a human immunoglobulin sequence. The humanized antibody optionally also will comprise at least a portion of an immunoglobulin constant region (Fc), typically that of a human immunoglobulin.

[0093] Examples of portions of antibodies or epitope-binding proteins encompassed by the present definition include: (i) the Fab fragment, having VL, CL, VH and CH1 domains; (ii) the Fab′ fragment, which is a Fab fragment having one or more cysteine residues at the C-terminus of the CH1 domain; (iii) the Fd fragment having VH and CH1 domains; (iv) the Fd′ fragment having VH and CH1 domains and one or more cysteine residues at the C-terminus of the CH1 domain; (v) the Fv fragment having the VL and VH domains of a single arm of an antibody; (vi) the dAb fragment (Ward et al., 341 Nature 544 (1989)) which consists of a VH domain or a VL domain that binds antigen; (vii) isolated CDR regions or isolated CDR regions presented in a functional framework; (viii) F(ab′)2 fragments which are bivalent fragments including two Fab′ fragments linked by a disulphide bridge at the hinge region; (ix) single chain antibody molecules (e.g., single chain Fv; scFv) (Bird et al., 242 Science 423 (1988); and Huston et al., 85 PNAS 5879 (1988)); (x) “diabodies” with two antigen binding sites, comprising a heavy chain variable domain (VH) connected to a light chain variable domain (VL) in the same polypeptide chain (see, e.g., EP 404,097; WO 93/11161; Hollinger et al., 90 PNAS 6444 (1993)); (xi) “linear antibodies” comprising a pair of tandem Fd segments (VH-Ch1-VH-Ch1) which, together with complementary light chain polypeptides, form a pair of antigen binding regions (Zapata et al., Protein Eng. 8(10): 1057-62 (1995); and U.S. Pat. No. 5,641,870).

[0094] In certain embodiments, the antibodies and CDRs of the present invention can be transferred to another antibody type to generate chimeric antibodies. It is intended that the term “antibody type” encompass any Ig class or any Ig subclass (e.g. the IgG1, IgG2, IgG3, and IgG4 subclassess of IgG) obtained from any source (e.g., humans and non-human primates, and in rodents, lagomorphs, caprines, bovines, equines, ovines, etc.).

[0095] The term “Ig class” or “immunoglobulin class”, as used herein, refers to the five classes of immunoglobulin that have been identified in humans and higher mammals, IgG, IgM, IgA, IgD, and IgE. The term “Ig subclass” refers to the two subclasses of IgM (H and L), three subclasses of IgA (IgA1, IgA2, and secretory IgA), and four subclasses of IgG (IgG1, IgG2, IgG3, and IgG4) that have been identified in humans and higher mammals. The antibodies can exist in monomeric or polymeric form; for example, IgM antibodies exist in pentameric form, and IgA antibodies exist in monomeric, dimeric or multimeric form.

[0096] The term “IgG subclass” refers to the four subclasses of immunoglobulin class IgG-IgG1, IgG2, IgG3, and IgG4 that have been identified in humans and higher mammals by the heavy chains of the immunoglobulins, V1-γ4, respectively. The term “single-chain immunoglobulin” or “single-chain antibody” (used interchangeably herein) refers to a protein having a two-polypeptide chain structure consisting of a heavy and a light chain, said chains being stabilized, for example, by interchain peptide linkers, which has the ability to specifically bind antigen. The term “domain” refers to a globular region of a heavy or light chain polypeptide comprising peptide loops (e.g., comprising 3 to 4 peptide loops) stabilized, for example, by ß pleated sheet and/or intrachain disulfide bond. Domains are further referred to herein as “constant” or “variable”, based on the relative lack of sequence variation within the domains of various class members in the case of a “constant” domain, or the significant variation within the domains of various class members in the case of a “variable” domain. Antibody or polypeptide “domains” are often referred to interchangeably in the art as antibody or polypeptide “regions”. The “constant” domains of an antibody light chain are referred to interchangeably as “light chain constant regions”, “light chain constant domains”, “CL” regions or “CL” domains. The “constant” domains of an antibody heavy chain are referred to interchangeably as “heavy chain constant regions”, “heavy chain constant domains”, “CH” regions or “CH” domains). The “variable” domains of an antibody light chain are referred to interchangeably as “light chain variable regions”, “light chain variable domains”, “VL” regions or “VL” domains). The “variable” domains of an antibody heavy chain are referred to interchangeably as “heavy chain constant regions”, “heavy chain constant domains”, “VH” regions or “VH” domains).

[0097] The term “region” can also refer to a part or portion of an antibody chain or antibody chain domain (e.g., a part or portion of a heavy or light chain or a part or portion of a constant or variable domain, as defined herein), as well as more discrete parts or portions of said chains or domains. For example, light and heavy chains or light and heavy chain variable domains include “complementarity determining regions” or “CDRs” interspersed among “frame regions” or “FRs”, as defined herein.

[0098] The term “conformation” refers to the tertiary structure of a protein or polypeptide (e.g., an antibody, antibody chain, domain or region thereof). For example, the phrase “light (or heavy) chain conformation” refers to the tertiary structure of a light (or heavy) chain variable region, and the phrase “antibody conformation” or “antibody fragment conformation” refers to the tertiary structure of an antibody or fragment thereof.

[0099] “Specific binding” of an antibody means that the antibody exhibits appreciable affinity for a particular antigen or epitope and, generally, does not exhibit significant cross reactivity. “Appreciable” binding includes binding with an affinity of at least 25 μM. Antibodies with affinities greater than 1×10⁷ M⁻¹ (or a dissociation coefficient of 1 μM or less or a dissociation coefficient of 1 nm or less) typically bind with correspondingly greater specificity. Values intermediate of those set forth herein are also intended to be within the scope of the present invention and antibodies of the invention bind with a range of affinities, for example, 100 nM or less, 75 nM or less, 50 nM or less, 25 nM or less, for example 10 nM or less, 5 nM or less, 1 nM or less, or in embodiments 500 pM or less, 100 pM or less, 50 pM or less or 25 pM or less. An antibody that “does not exhibit significant crossreactivity” is one that will not appreciably bind to an entity other than its target (e.g., a different epitope or a different molecule). For example, an antibody that specifically binds to a target molecule will appreciably bind the target molecule but will not significantly react with non-target molecules or peptides. An antibody specific for a particular epitope will, for example, not significantly crossreact with remote epitopes on the same protein or peptide. Specific binding can be determined according to any art-recognized means for determining such binding. Preferably, specific binding is determined according to Scatchard analysis and/or competitive binding assays.

[0100] As used herein, the term “affinity” refers to the strength of the binding of a single antigen-combining site with an antigenic determinant. Affinity depends on the closeness of stereochemical fit between antibody combining sites and antigen determinants, on the size of the area of contact between them, on the distribution of charged and hydrophobic groups, etc. Antibody affinity can be measured by equilibrium dialysis or by the kinetic BIACORE™ method. The dissociation constant, Kd, and the association constant, Ka, are quantitative measures of affinity.

[0101] In certain embodiments, the antibodies described herein or identified according to the methods described herein are blocking antibodies. As used herein, a “blocking” antibody or an antibody “antagonist” is one which inhibits or reduces biological activity of the antigen(s) it binds. In certain embodiments, the blocking antibodies or antagonist antibodies or portions completely inhibit the biological activity of the antigen(s). For example, the present invention includes antibodies which disrupt receptor/ligand interactions either partially or fully.

### Therapeutic Antibody Modifications

[0102] In certain example embodiments, the therapeutic antibodies of the present invention may be modified, such that they acquire advantageous properties for therapeutic use (e.g., stability and specificity), but maintain their biological activity. Therapeutic antibodies may be modified to increase stability or to provide characteristics that improve efficacy of the antibody when administered to a subject in vivo. As used herein in reference to therapeutic antibodies, the terms “modified”, “modification” and the like refer to one or more changes that enhance a desired property of the therapeutic antibody. “Modification” includes a covalent chemical modification that does not alter the primary amino acid sequence of the therapeutic antibody itself. Such desired properties include, for example, prolonging the in vivo half-life, increasing the stability, reducing the clearance, altering the immunogenicity or allergenicity, or cellular targeting. Changes to a therapeutic antibody that may be carried out include, but are not limited to, conjugation to a carrier protein, conjugation to a ligand, conjugation to another antibody, PEGylation, polysialylation HESylation, recombinant PEG mimetics, Fc fusion, albumin fusion, nanoparticle attachment, nanoparticulate encapsulation, cholesterol fusion, iron fusion, acylation, amidation, glycosylation, side chain oxidation, phosphorylation, biotinylation, the addition of a surface active material, the addition of amino acid mimetics, or the addition of unnatural amino acids. Modified therapeutic antibodies also include analogs. By “analog” is meant a molecule that is not identical, but has analogous functional or structural features. For example, a therapeutic antibody analog retains the biological activity of a corresponding antibody, while having certain biochemical modifications that enhance the analog's function relative to another antibody. Such biochemical modifications could increase the analog's protease resistance, membrane permeability, or half-life, without altering, for example, antigen binding. An analog may include an unnatural amino acid.

[0103] The recitation of a listing of chemical groups in any definition of a variable herein includes definitions of that variable as any single group or combination of listed groups. The recitation of an embodiment for a variable or aspect herein includes that embodiment as any single embodiment or in combination with any other embodiments or portions thereof.

[0104] Modified antibodies (e.g., fusion proteins) may include a spacer or a linker. The terms “spacer” or “linker” as used in reference to a fusion protein refers to a peptide that joins the proteins comprising a fusion protein. Generally, a spacer has no specific biological activity other than to join or to preserve some minimum distance or other spatial relationship between the proteins. However, in certain embodiments, the constituent amino acids of a spacer may be selected to influence some property of the molecule such as the folding, net charge, or hydrophobicity of the molecule. Suitable linkers for use in an embodiment of the present invention are well known to those of skill in the art and include, but are not limited to, straight or branched-chain carbon linkers, heterocyclic carbon linkers, or peptide linkers. The linker is used to separate two peptides by a distance sufficient to ensure that, in a preferred embodiment, each peptide properly folds. Preferred peptide linker sequences adopt a flexible extended conformation and do not exhibit a propensity for developing an ordered secondary structure. Typical amino acids in flexible protein regions include Gly, Asn and Ser. Virtually any permutation of amino acid sequences containing Gly, Asn and Ser would be expected to satisfy the above criteria for a linker sequence. Other near neutral amino acids, such as Thr and Ala, also may be used in the linker sequence. Still other amino acid sequences that may be used as linkers are disclosed in Maratea et al. (1985), Gene 40: 39-46; Murphy et al. (1986) Proc. Nat'l. Acad. Sci. USA 83: 8258-62; U.S. Pat. Nos. 4,935,233; and 4,751,180.

[0105] The clinical effectiveness of protein therapeutics (e.g., antibodies) is often limited by short plasma half-life and susceptibility to protease degradation. Studies of various therapeutic proteins (e.g., filgrastim) have shown that such difficulties may be overcome by various modifications, including conjugating or linking the polypeptide sequence to any of a variety of non-proteinaceous polymers, e.g., polyethylene glycol (PEG), polypropylene glycol, or polyoxyalkylenes (see, for example, typically via a linking moiety covalently bound to both the protein and the nonproteinaceous polymer, e.g., a PEG).

[0106] It is well known that the properties of certain proteins can be modulated by attachment of polyethylene glycol (PEG) polymers, which increases the hydrodynamic volume of the protein and thereby slows its clearance by kidney filtration. (See, e.g., Clark et al., J. Biol. Chem. 271: 21969-21977 (1996)). Such PEG-conjugated biomolecules have been shown to possess clinically useful properties, including better physical and thermal stability, protection against susceptibility to enzymatic degradation, increased solubility, longer in vivo circulating half-life and decreased clearance, reduced immunogenicity and antigenicity, and reduced toxicity. Therefore, it is envisioned that certain agents can be PEGylated (e.g., on peptide residues) to provide enhanced therapeutic benefits such as, for example, increased efficacy by extending half-life in vivo. In certain embodiments, PEGylation of the agents may be used to extend the serum half-life of the agents and allow for particular agents to be capable of crossing the blood-brain barrier. Thus, in one embodiment, PEGylating antibodies improve the pharmacokinetics and pharmacodynamics of the antibodies.

[0107] In regards to peptide PEGylation methods, reference is made to Lu et al., Int. J. Pept. Protein Res. 43: 127-38 (1994); Lu et al., Pept. Res. 6: 140-6 (1993); Felix et al., Int. J. Pept. Protein Res. 46: 253-64 (1995); Gaertner et al., Bioconjug. Chem. 7: 38-44 (1996); Tsutsumi et al., Thromb. Haemost. 77: 168-73 (1997); Francis et al., hit. J. Hematol. 68: 1-18 (1998); Roberts et al., J. Pharm. Sci. 87: 1440-45 (1998); and Tan et al., Protein Expr. Purif. 12: 45-52 (1998). Polyethylene glycol or PEG is meant to encompass any of the forms of PEG that have been used to derivatize other proteins, including, but not limited to, mono-(C1-10) alkoxy or aryloxy-polyethylene glycol. Suitable PEG moieties include, for example, 40 kDa methoxy poly(ethylene glycol) propionaldehyde (Dow, Midland, Mich.); 60 kDa methoxy poly(ethylene glycol) propionaldehyde (Dow, Midland, Mich.); 40 kDa methoxy poly(ethylene glycol) maleimido-propionamide (Dow, Midland, Mich.); 31 kDa alpha-methyl-w-(3-oxopropoxy), polyoxyethylene (NOF Corporation, Tokyo); mPEG2-NHS-40k (Nektar); mPEG2-MAL-40k (Nektar), SUNBRIGHT GL2-400MA ((PEG)240 kDa) (NOF Corporation, Tokyo), SUNBRIGHT ME-200MA (PEG20 kDa) (NOF Corporation, Tokyo). The PEG groups are generally attached to the peptide (e.g., RBD) via acylation or alkylation through a reactive group on the PEG moiety (for example, a maleimide, an aldehyde, amino, thiol, or ester group) to a reactive group on the peptide (for example, an aldehyde, amino, thiol, a maleimide, or ester group).

[0108] The PEG molecule(s) may be covalently attached to any Lys, Cys, or K(CO(CH2)2SH) residues at any position in a peptide. In certain embodiments, the antibodies described herein can be PEGylated directly to any amino acid at the N-terminus by way of the N-terminal amino group. A “linker arm” may be added to a peptide to facilitate PEGylation. PEGylation at the thiol sidechain of cysteine has been widely reported (see, e.g., Caliceti & Veronese, Adv. Drug Deliv. Rev. 55: 1261-77 (2003)). If there is no cysteine residue in the peptide, a cysteine residue can be introduced through substitution or by adding a cysteine to the N-terminal amino acid. In certain embodiments, proteins are PEGylated through the side chains of a cysteine residue added to the N-terminal amino acid.

[0109] In exemplary embodiments, the PEG molecule(s) may be covalently attached to an amide group in the C-terminus of a peptide. In certain embodiments, the PEG molecule used in modifying an agent of the present invention is branched while in other embodiments, the PEG molecule may be linear. In particular aspects, the PEG molecule is between 1 kDa and 100 kDa in molecular weight. In further aspects, the PEG molecule is selected from 10, 20, 30, 40, 50, 60, and 80 kDa. In further still aspects, it is selected from 20, 40, or 60 kDa. Where there are two PEG molecules covalently attached to the agent of the present invention, each is 1 to 40 kDa and in particular aspects, they have molecular weights of 20 and 20 kDa, 10 and 30 kDa, 30 and 30 kDa, 20 and 40 kDa, or 40 and 40 kDa. In particular aspects, the antibodies contain mPEG-cysteine. The mPEG in mPEG-cysteine can have various molecular weights. The range of the molecular weight is preferably 5 kDa to 200 kDa, more preferably 5 kDa to 100 kDa, and further preferably 20 kDa to 60 kDA. The mPEG can be linear or branched.

[0110] The present disclosure also contemplates the use of PEG Mimetics. Recombinant PEG mimetics have been developed that retain the attributes of PEG (e.g., enhanced serum half-life) while conferring several additional advantageous properties. By way of example, simple polypeptide chains (comprising, for example, Ala, Glu, Gly, Pro, Ser and Thr) capable of forming an extended conformation similar to PEG can be produced recombinantly already fused to the antibodies (e.g., Amunix' XTEN technology; Mountain View, CA). This obviates the need for an additional conjugation step during the manufacturing process. Moreover, established molecular biology techniques enable control of the side chain composition of the polypeptide chains, allowing optimization of immunogenicity and manufacturing properties.

[0111] Glycosylation can dramatically affect the physical properties of proteins and can also be important in protein stability, secretion, and subcellular localization (see, e.g., Solá and Griebenow, Glycosylation of Therapeutic Proteins: An Effective Strategy to Optimize Efficacy. BioDrugs. 2010; 24(1): 9-21). Proper glycosylation can be essential for biological activity. In fact, some genes from eukaryotic organisms, when expressed in bacteria (e.g., E. coli) which lack cellular processes for glycosylating proteins, yield proteins that are recovered with little or no activity by virtue of their lack of glycosylation. For purposes of the present disclosure, “glycosylation” is meant to broadly refer to the enzymatic process that attaches glycans to proteins, lipids or other organic molecules. The use of the term “glycosylation” in conjunction with the present disclosure is generally intended to mean adding or deleting one or more carbohydrate moieties (either by removing the underlying glycosylation site or by deleting the glycosylation by chemical and/or enzymatic means), and/or adding one or more glycosylation sites that may or may not be present in the original sequence.

[0112] Addition of glycosylation sites can be accomplished by altering the amino acid sequence. The alteration to the polypeptide may be made, for example, by the addition of, or substitution by, one or more serine or threonine residues (for O-linked glycosylation sites) or asparagine residues (for N-linked glycosylation sites). The structures of N-linked and O-linked oligosaccharides and the sugar residues found in each type may be different. One type of sugar that is commonly found on both is N-acetylneuraminic acid (hereafter referred to as sialic acid). Sialic acid is usually the terminal residue of both N-linked and O-linked oligosaccharides and, by virtue of its negative charge, may confer acidic properties to the glycoprotein. A particular embodiment of the present disclosure comprises the generation and use of N-glycosylation variants.

[0113] The present disclosure also contemplates the use of polysialylation, the conjugation of peptides and proteins to the naturally occurring, biodegradable a-(2→8) linked polysialic acid (“PSA”) in order to improve their stability and in vivo pharmacokinetics. PSA is a biodegradable, non-toxic natural polymer that is highly hydrophilic, giving it a high apparent molecular weight in the blood which increases its serum half-life. In addition, polysialylation of a range of peptide and protein therapeutics has led to markedly reduced proteolysis, retention of activity in vivo activity, and reduction in immunogenicity and antigenicity (see, e.g., G. Gregoriadis et al., Int. J. Pharmaceutics 300(1-2): 125-30). As with modifications with other conjugates (e.g., PEG), various techniques for site-specific polysialylation are available (see, e.g., T. Lindhout et al., PNAS 108(18)7397-7402 (2011)).

[0114] Additional suitable components and molecules for conjugation include, for example, thyroglobulin; albumins such as human serum albumin (HAS); tetanus toxoid; Diphtheria toxoid; polyamino acids such as poly(D-lysine:D-glutamic acid); VP6 polypeptides of rotaviruses; influenza virus hemaglutinin, influenza virus nucleoprotein; Keyhole Limpet Hemocyanin (KLH); and hepatitis B virus core protein and surface antigen; or any combination of the foregoing.

[0115] Fusion of albumin to one or more antibodies of the present disclosure can, for example, be achieved by genetic manipulation, such that the DNA coding for HSA, or a fragment thereof, is joined to the DNA coding for the one or more antibodies. Albumin itself may be modified to extend its circulating half-life. Fusion of the modified albumin to one or more polypeptides can be attained by the genetic manipulation techniques described above or by chemical conjugation; the resulting fusion molecule has a half-life that exceeds that of fusions with non-modified albumin. (See WO2011/051489).

[0116] Several albumin-binding strategies have been developed as alternatives for direct fusion, including albumin binding through a conjugated fatty acid chain (acylation). Because serum albumin is a transport protein for fatty acids, these natural ligands with albumin-binding activity have been used for half-life extension of small protein therapeutics. For example, insulin determir (LEVEMIR), an approved product for diabetes, comprises a myristyl chain conjugated to a genetically-modified insulin, resulting in a long-acting insulin analog.

[0117] Another type of modification is to conjugate (e.g., link) one or more additional components or molecules at the N- and/or C-terminus of a polypeptide sequence, such as another protein, or a carrier molecule. Thus, an exemplary polypeptide sequence can be provided as a conjugate with another component or molecule. A conjugate modification may result in a polypeptide sequence that retains activity with an additional or complementary function or activity of the second molecule. For example, a polypeptide sequence may be conjugated to a molecule, e.g., to facilitate solubility, storage, in vivo or shelf half-life or stability, reduction in immunogenicity, delayed or controlled release in vivo, etc. Other functions or activities include a conjugate that reduces toxicity relative to an unconjugated polypeptide sequence, a conjugate that targets a type of cell or organ more efficiently than an unconjugated polypeptide sequence, or a drug to further counter the causes or effects associated with a disorder or disease as set forth herein.

[0118] The present disclosure contemplates the use of other modifications, currently known or developed in the future, of the polypeptides to improve one or more properties. One such method for prolonging the circulation half-life, increasing the stability, reducing the clearance, or altering the immunogenicity or allergenicity of a polypeptide of the present disclosure involves modification of the polypeptide sequences by hesylation, which utilizes hydroxyethyl starch derivatives linked to other molecules in order to modify the molecule's characteristics. Various aspects of hesylation are described in, for example, U.S. Patent Appln. Nos. 2007/0134197 and 2006/0258607.

[0119] In particular embodiments, the antibodies include a protecting group covalently joined to the N-terminal amino group. In exemplary embodiments, a protecting group covalently joined to the N-terminal amino group of the proteins reduces the reactivity of the amino terminus under in vivo conditions. Amino protecting groups include —C1-10 alkyl, —C1-10 substituted alkyl, —C2-10 alkenyl, —C2-10 substituted alkenyl, aryl, —C1-6 alkyl aryl, —C(O)—(CH2)1-6-COOH, —C(O)—C1-6 alkyl, —C(O)-aryl, —C(O)—O-C1-6 alkyl, or —C(O)—O-aryl. In particular embodiments, the amino terminus protecting group is selected from the group consisting of acetyl, propyl, succinyl, benzyl, benzyloxycarbonyl, and t-butyloxycarbonyl. In other embodiments, deamination of the N-terminal amino acid is another modification that may be used for reducing the reactivity of the amino terminus under in vivo conditions.

[0120] Chemically modified compositions of the antibodies wherein the antibody is linked to a polymer are also included within the scope of the present invention. The polymer selected is usually modified to have a single reactive group, such as an active ester for acylation or an aldehyde for alkylation, so that the degree of polymerization may be controlled. Included within the scope of polymers is a mixture of polymers. Preferably, for therapeutic use of the end-product preparation, the polymer will be pharmaceutically acceptable. The polymer or mixture thereof may include but is not limited to polyethylene glycol (PEG), monomethoxy-polyethylene glycol, dextran, cellulose, or other carbohydrate-based polymers, poly-(N-vinyl pyrrolidone) polyethylene glycol, propylene glycol homopolymers, a polypropylene oxide/ethylene oxide co-polymer, polyoxyethylated polyols (for example, glycerol), and polyvinyl alcohol.

[0121] In other embodiments, the antibodies are modified by PEGylation, cholesterylation, or palmitoylation. The modification can be to any amino acid residue. In preferred embodiments, the modification is to the N-terminal amino acid of the antibodies, either directly to the N-terminal amino acid or by way coupling to the thiol group of a cysteine residue added to the N-terminus or a linker added to the N-terminus such as trimesoyl tris(3,5-dibromosalicylate (Ttds). In certain embodiments, the N-terminus of the antibodies comprise a cysteine residue to which a protecting group is coupled to the N-terminal amino group of the cysteine residue and the cysteine thiolate group is derivatized with N-ethylmaleimide, PEG group, cholesterol group, or palmitoyl group. In other embodiments, an acetylated cysteine residue is added to the N-terminus of the agents, and the thiol group of the cysteine is derivatized with N-ethylmaleimide, PEG group, cholesterol group, or palmitoyl group. In certain embodiments, the antibodies of the present invention consist of an amino acid sequence which is bound with a methoxypolyethylene glycol(s) via a linker.

[0122] Substitutions of amino acids may be used to modify an antibody of the present invention. The phrase “substitution of amino acids” as used herein encompasses substitution of amino acids that are the result of both conservative and non-conservative substitutions. Conservative substitutions are the replacement of an amino acid residue by another similar residue in a polypeptide. Typical but not limiting conservative substitutions are the replacements, for one another, among the aliphatic amino acids Ala, Val, Leu and Ile; interchange of Ser and Thr containing hydroxy residues, interchange of the acidic residues Asp and Glu, interchange between the amide-containing residues Asn and Gln, interchange of the basic residues Lys and Arg, interchange of the aromatic residues Phe and Tyr, and interchange of the small-sized amino acids Ala, Ser, Thr, Met, and Gly. Non-conservative substitutions are the replacement, in a polypeptide, of an amino acid residue by another residue which is not biologically similar. For example, the replacement of an amino acid residue with another residue that has a substantially different charge, a substantially different hydrophobicity, or a substantially different spatial configuration.

[0123] In certain embodiments, antibodies of the present invention are modified by affinity maturation. Affinity maturation refers to the introduction of random mutations across the full length of selected CDR or variable chains and screening for increased affinity or neutralization activity. In certain embodiments, phage display or ribosome display is used to produce antibodies with increased affinity for the antigen. The in vitro affinity maturation has successfully been used to optimize antibodies, antibody fragments or other peptide molecules like antibody mimetics. Random mutations inside the CDRs are introduced using radiation, chemical mutagens or error-prone PCR. In addition, the genetic diversity can be increased by chain shuffling. Two or three rounds of mutation and selection using display methods like phage display usually results in antibody fragments with affinities in the low nanomolar range (see, e.g., Roskos L.; Klakamp S.; Liang M.; Arends R.; Green L. (2007). Stefan Dübel (ed.). Handbook of Therapeutic Antibodies. Weinheim: Wiley-VCH. pp. 145-169).

[0124] One of skill in the art from this disclosure and the knowledge in the art will appreciate that there are a variety of ways in which to produce such therapeutic antibodies. In general, such therapeutic antibodies may be produced either in vitro or in vivo. Therapeutic antibodies may be produced in vitro as peptides or polypeptides, which may then be formulated into a pharmaceutical composition and administered to a subject. Such in vitro production may occur by a variety of methods known to one of skill in the art such as, for example, peptide synthesis or expression of a peptide/polypeptide from a DNA or RNA molecule in any of a variety of bacterial, eukaryotic, or viral recombinant expression systems, followed by purification of the expressed antibodies (e.g., with protein A or G). Alternatively, antibodies may be produced in vivo by introducing molecules (e.g., DNA, RNA, viral expression systems, and the like) that encode antibodies into a subject, whereupon the encoded therapeutic antibodies are expressed.

[0125] In certain embodiments, the antibodies as defined for the present invention include derivatives that are modified, i.e., by the covalent attachment of any type of molecule to the antibody such that covalent attachment does not prevent the antibody from generating an anti-idiotypic response. For example, but not by way of limitation, the antibody derivatives include antibodies that have been modified, e.g., by glycosylation, acetylation, pegylation, phosphylation, amidation, derivatization by known protecting/blocking groups, proteolytic cleavage, linkage to a cellular ligand or other protein, etc. Any of numerous chemical modifications may be carried out by known techniques, including, but not limited to specific chemical cleavage, acetylation, formylation, metabolic synthesis of tunicamycin, etc. Additionally, the derivative may contain one or more non-classical amino acids.

### Administration of Therapeutic Antibodies

[0126] For therapeutic uses, the antibodies described herein may be administered systemically, for example, formulated in a pharmaceutically-acceptable buffer such as physiological saline. Preferable routes of administration include, for example, subcutaneous, intravenous, interperitoneal, intramuscular, or intradermal injections that provide continuous, sustained levels of the antibody in the patient. Treatment of human patients or other animals will be carried out using a therapeutically effective amount of a therapeutic identified herein in a physiologically-acceptable carrier. Suitable carriers and their formulation are described, for example, in Remington's Pharmaceutical Sciences by E. W. Martin. The amount of the therapeutic agent to be administered varies depending upon the manner of administration, the age and body weight of the patient, and with the clinical symptoms of the neoplasia. Generally, amounts will be in the range of those used for other agents used in the treatment of other diseases associated with neoplasia, although in certain instances lower amounts will be needed because of the increased specificity of the compound. For example, a therapeutic compound is administered at a dosage that is cytotoxic to a neoplastic cell.

[0127] Human dosage amounts can initially be determined by extrapolating from the amount of antibody used in mice, as a skilled artisan recognizes it is routine in the art to modify the dosage for humans compared to animal models. Of course, this dosage amount may be adjusted upward or downward, as is routinely done in such treatment protocols, depending on the results of the initial clinical trials and the needs of a particular patient.

[0128] The therapeutic regimens disclosed herein comprise administration of antibodies of the invention or pharmaceutical compositions thereof to the patient in a single dose or in multiple doses (e.g., 1, 2, 3, 4, 5, 6, 7, 8, 10, 15, 20, or more doses). In one aspect, the therapeutic regimens comprise administration of the antibodies of the invention or pharmaceutical compositions thereof in multiple doses. When administered in multiple doses, the antibodies are administered with a frequency and in an amount sufficient to treat SARS-COV-2. For example, the frequency of administration ranges from once a day up to about four times a day. In another example, the frequency of administration ranges from about once a week up to about once every six weeks.

[0129] Significant progress has been made in understanding pharmacokinetics (PK), pharmacodynamics (PD), as well as toxicity profiles of therapeutic antibodies in animals and humans, which have been in commercial development for more than three decades (see, e.g., Vugmeyster et al., Pharmacokinetics and toxicology of therapeutic proteins: Advances and challenges, World J Biol Chem. 2012 Apr. 26; 3(4): 73-92). In certain embodiments, therapeutic antibodies are administered by parenteral routes, such as intravenous (IV), subcutaneous (SC) or intramuscular (IM) injection. Molecular size, hydrophilicity, and gastric degradation are the main factors that preclude gastrointestinal (GI) absorption of therapeutic proteins (see, e.g., Keizer, et al., Clinical pharmacokinetics of therapeutic monoclonal antibodies. Clin Pharmacokinet. 2010 August; 49(8):493-507). Pulmonary delivery with aerosol formulations or dry powder inhalers has been used for selected proteins, e.g., exubera™ (see, e.g., Scheuch and Siekmeier, Novel approaches to enhance pulmonary delivery of proteins and peptides. J Physiol Pharmacol. 2007 November; 58 Suppl 5(Pt 2):615-25). Intravitreal injections have been used for peptides and proteins that require only local activity (see, e.g., Suresh, et al., Ocular Delivery of Peptides and Proteins. In: Van Der Walle C., editor. Peptide and Protein Delivery. London: Academic Press; 2011. pp. 87-103). In certain embodiments, SC administration of therapeutic antibodies is often a preferred route. In particular, the suitability of SC dosing for self-administration translates into significantly reduced treatment costs.

[0130] The pharmaceutical composition may be administered parenterally by injection, infusion or implantation (subcutaneous, intravenous, intramuscular, intraperitoneal, or the like) in dosage forms, formulations, or via suitable delivery devices or implants containing conventional, non-toxic pharmaceutically acceptable carriers and adjuvants. The formulation and preparation of such compositions are well known to those skilled in the art of pharmaceutical formulation. Formulations can be found in Remington: The Science and Practice of Pharmacy, supra.

[0131] As indicated above, the pharmaceutical compositions according to the invention may be in the form suitable for sterile injection. To prepare such a composition, the suitable antibodies are dissolved or suspended in a parenterally acceptable liquid vehicle. Among acceptable vehicles and solvents that may be employed are water, water adjusted to a suitable pH by addition of an appropriate amount of hydrochloric acid, sodium hydroxide or a suitable buffer, 1,3-butanediol, Ringer's solution, and isotonic sodium chloride solution and dextrose solution. The aqueous formulation may also contain one or more preservatives (e.g., methyl, ethyl or n-propyl p-hydroxybenzoate).

### Vector Delivery

[0132] The invention also provides a delivery system comprising one or more vectors or one or more polynucleotide molecules, the one or more vectors or polynucleotide molecules comprising one or more polynucleotide molecules encoding an antibody of the present invention.

[0133] In general, and throughout this specification, the term “vector” refers to a nucleic acid molecule capable of transporting another nucleic acid to which it has been linked. Vectors include, but are not limited to, nucleic acid molecules that are single-stranded, double-stranded, or partially double-stranded; nucleic acid molecules that comprise one or more free ends, no free ends (e.g., circular); nucleic acid molecules that comprise DNA, RNA, or both; and other varieties of polynucleotides known in the art. One type of vector is a “plasmid,” which refers to a circular double stranded DNA loop into which additional DNA segments can be inserted, such as by standard molecular cloning techniques. Another type of vector is a viral vector, wherein virally-derived DNA or RNA sequences are present in the vector for packaging into a virus (e.g., retroviruses, replication defective retroviruses, adenoviruses, replication defective adenoviruses, and adeno-associated viruses). Viral vectors also include polynucleotides carried by a virus for transfection into a host cell. Certain vectors are capable of autonomous replication in a host cell into which they are introduced (e.g., bacterial vectors having a bacterial origin of replication and episomal mammalian vectors). Other vectors (e.g., non-episomal mammalian vectors) are integrated into the genome of a host cell upon introduction into the host cell, and thereby are replicated along with the host genome. Moreover, certain vectors are capable of directing the expression of genes to which they are operatively-linked. Such vectors are referred to herein as “expression vectors.” Vectors for and that result in expression in a eukaryotic cell can be referred to herein as “eukaryotic expression vectors.” Common expression vectors of utility in recombinant DNA techniques are often in the form of plasmids.

### Identification of Neutralizing Antibodies

[0134] Applicants identified specific gene signatures present in B cells that produced neutralizing antibodies (clusters 3 and 4 of Table 4). In certain embodiments, neutralizing antibodies are identified by first enriching for B cells expressing the signature. In certain embodiments, cell sorting using antibodies specific for surface markers in the signatures are used to enrich for the cell types. In certain embodiments, fluorescence-activated cell sorting (FACS) can be used to enrich for the B cells. In certain embodiments, magnetic beads specific for surface markers can be used to enrich for the B cells. In certain embodiments, B cells are enriched from a subject infected with the pathogen (e.g., virus). Antibodies for any pathogen may be identified by enriching for B cells having the disclosed signatures followed by sequencing of the antibody sequences from the enriched cells.

[0135] In certain embodiments, B cells are obtained from a unit of blood collected from a subject using any number of techniques known to the skilled artisan, such as Ficoll separation. In one preferred embodiment, cells from the circulating blood of an individual are obtained by apheresis or leukapheresis. The apheresis product typically contains lymphocytes, including T cells, monocytes, granulocytes, B cells, other nucleated white blood cells, red blood cells, and platelets. In one embodiment, the cells collected by apheresis may be washed to remove the plasma fraction and to place the cells in an appropriate buffer or media for subsequent processing steps. In one embodiment of the invention, the cells are washed with phosphate buffered saline (PBS). B cells can be further isolated by positive or negative selection. A preferred method is cell sorting and/or selection via magnetic immunoadherence or flow cytometry that uses a cocktail of monoclonal antibodies directed to cell surface markers present on the cells positively or negatively selected. Such separation can be performed using standard methods available in the art. For example, any magnetic separation methodology may be used including a variety of which are commercially available, (e.g., DYNAL® Magnetic Particle Concentrator (DYNAL MPC®)).

[0136] In certain embodiments, the method includes assays capable of validating antibody binding and neutralization activity. In certain embodiments, the validation assay is an immunoassay. Immunoassay methods are based on the reaction of an antibody to its corresponding target or analyte and can detect the analyte in a sample depending on the specific assay format. Immunoassays have been designed for use with a wide range of biological sample matrices Immunoassay formats have been designed to provide qualitative, semi-quantitative, and quantitative results. Quantitative results may be generated by determining the concentration of analyte detected by an antibody.

[0137] Numerous immunoassay formats have been designed. Exemplary assay formats include enzyme-linked immunosorbent assay (ELISA), radioimmunoassay, fluorescent, chemiluminescence, and fluorescence resonance energy transfer (FRET) or time resolved-FRET (TR-FRET) immunoassays. ELISA or EIA can be quantitative for the detection of an analyte/biomarker. This method relies on attachment of a label to either the analyte or the antibody and the label component includes, either directly or indirectly, an enzyme. ELISA tests may be formatted for direct, indirect, competitive, or sandwich detection of the analyte. Additional techniques include, for example, agglutination, nephelometry, turbidimetry, Western blot, immunoprecipitation, immunocytochemistry, immunohistochemistry, flow cytometry, Luminex assay, and others (see ImmunoAssay: A Practical Guide, edited by Brian Law, published by Taylor & Francis, Ltd., 2005 edition).

[0138] Viral neutralizing assays can be used to validate identified antibody frameworks. In certain embodiments, the assay uses live virus. In certain embodiments, the assay uses pseudotyped virus particles (see, e.g., Gentili, 2015). In certain embodiments, the neutralizing assay is performed without live virus (see, e.g., Tan, C. W., Chia, W. N., Qin, X. et al. A SARS-CoV-2 surrogate virus neutralization test based on antibody-mediated blockage of ACE2-spike protein-protein interaction. Nat Biotechnol 38, 1073-1078 (2020).

[0139] Further embodiments are illustrated in the following Examples which are given for illustrative purposes only and are not intended to limit the scope of the invention.

### EXAMPLES

### Example 1—B Cell Genomics and Structural Studies Uncover Cross-Neutralizing SARS-COV-2 Antibodies

[0140] Applicants used scRNA-Seq to investigate SARS-COV-2 spike-specific B cell responses in 14 subjects who had recovered from COVID-19. By matching the VDJ sequence and transcriptional profile with neutralization and binding studies from 92 monoclonal antibodies produced from single B cells, Applicants identified two transcriptional clusters that are enriched in B cells that produce binding and neutralizing antibodies. Six of the most potently neutralizing antibodies in the collection derived from B cells in these two transcriptional clusters were structurally characterized. Applicants found that they adopt distinct RBD-binding orientations, including the BG10-19 antibody that reaches between adjacent RBDs on the protomers of a single spike trimer, resulting in a locked spike trimer conformation that cannot bind ACE2. BG10-19 binds adjacent RBDs in a manner distinct from previously-described antibodies that lock the trimer into a closed conformation (Barnes et al., 2020a; Tortorici, 2020). It recognizes SARS-COV-2, SARS-COV, and zoonotic RBDs, and demonstrated potent neutralization of SARS-COV-2, the UK variant B.1.1.7 (Davies et al., 2021), the South African variant B.1.351 (Tegally et al., 2020) as well as the heterologous SARS-COV pseudotyped viruses. Furthermore, characterization of antibodies belonging to the VH3-53/VH3-66-encoded class (Barnes et al., 2020b; Wu et al., 2020a; Yuan et al., 2020) showed common binding modes for antibodies with short (<14 amino acids) and long (>15 amino acids) CDRH3 loops, providing new insights into this recurring class of SARS-COV-2 neutralizing antibodies.

[0141] A cohort of recently recovered COVID-19 patients shows serum neutralizing activity. To understand the development of B cell responses after SARS-COV-2 infection, Applicants enrolled 14 subjects who had recently recovered from COVID-19. All subjects were diagnosed in March 2020, none required hospitalization, and the time between diagnosis and enrollment of subjects ranged between 31 and 61 days with a median of 51 days (Table 1). 12 of 14 subjects were diagnosed with COVID-19 using PCR-based testing at the time of presentation. The remaining two subjects were diagnosed based on serum reactivity to RBD in ELISA, clinical symptoms and history of recent exposure (Table 1). All subjects had serum antibodies against RBD in ELISA (Table 1).

[0142] To evaluate serum neutralizing activity, Applicants used a pseudotyped virus with SARS-COV-2 spike (S) protein (Robbiani et al., 2020; Schmidt et al., 2020)(STAR Methods). Applicants detected serum neutralization in 11 of 14 (79%) subjects (FIG. 8A, Table 1). ID₅₀ titers ranged from 51 to 655, and no correlation was seen between serum neutralization and time since diagnosis or age of the subjects (FIG. 8B, C, Table 1). Although 3 of the top 4 neutralizing sera were obtained from male subjects, there was no statistically significant difference between serum neutralizing activity in female versus male subjects (FIG. 8D, Table 1). Applicants conclude that serum neutralizing activity was detected in a majority of subjects in this cohort of recently recovered non-hospitalized SARS-COV-2 patients.

[0143] SARS-COV-2 binding B cell repertoires from recovered subjects are enriched for class 1 neutralizing antibodies against RBD. To characterize the B cell response against the SARS-COV-2 spike, Applicants sorted a total of 6,113 B cells from 14 subjects that bound to the SARS-COV-2 receptor binding domain (RBD) or SARS-COV-2 S trimer (Wrapp et al., 2020) using fluorescence-activated cell sorting (FACS) (FIGS. 1A, B). The frequency of SARS-COV-2 S- or RBD-binding B cells ranged from 0.05-0.3% of CD19+ B cells (FIGS. 1A, B). Applicants profiled sorted cells by 5′ directed scRNA-Seq for both mRNA and paired VDJ profiling, recovering matched single-cell VDJ and transcriptome profiles in 129-649 cells for SARS-COV-2 S and 47-487 cells for RBD per donor (FIG. 1C). Applicants identified clonally related B cells of each donor, by accounting for V and J gene similarities as well as sequence similarity between the heavy chain complementarity-determining region (CDRH3) amino acid sequences (Nouri and Kleinstein, 2018). Expanded B cell clones, which Applicants define as the clones with at least 2 clonally related cells in the samples, accounted for 7-45% of sorted B cells in the 14 subjects (FIG. 1D).

[0144] Applicants tested if the sorted B cell repertoires include cells that have undergone somatic hypermutation and class switch recombination, two steps in the pathway to generate high affinity B cell responses (Victora and Nussenzweig, 2012). Assessing immunoglobulin isotypes, Applicants found that the fractions of IgG⁺, IgM/IgD⁺ and IgA⁺ B cells varied substantially among subjects (9-48%, 48-87% and 3-12% respectively) (FIG. 8E). When Applicants investigated clonal expansion within each antibody isotype, Applicants found that in 8 of 14 subjects IgM+ clones were statistically significantly more expanded than either IgA+ clones or IgG+ clones or both (FIG. 8O). Inferring levels of somatic mutations (from RNA, Methods), the total number of inferred heavy chain somatic mutations was lower in SARS-COV-2 S- and RBD-binding B cells than in historic control memory B cells (Rubelt et al., 2012) (FIG. 8F). IgM⁺ and IgD⁺ SARS-CoV-2 binding B cells showed significantly lower levels of inferred heavy chain somatic mutations compared to IgG⁺ and IgA⁺ B cells (FIG. 8G). Lower levels of somatic mutations were especially observed in IgM+ B cells with low clonal expansion as 9/14 subjects showed a statistically significant positive correlation between clone size and number of inferred heavy chain mutations in their IgM+ repertoire as opposed to IgG+ and IgA+ cells where this positive correlation was only observed in 4 and 0 subjects respectively (FIG. 8P).

[0145] Applicants next tested if the sorted B cells were enriched for immunoglobulin genes VH3-53 and VH3-66, as class 1 antibodies that block ACE2 binding to the RBD show a preference for VH3-53 and VH3-66 heavy chain genes (Barnes et al., 2020b; Wu et al., 2020a; Yuan et al., 2020). Several class 1 antibodies have been isolated from different subjects, most of which carry CDRH3 regions that are shorter than 14 amino acids (IMGT definition; (Lefranc et al., 2015)) (Barnes et al., 2020b; Wu et al., 2020a; Yuan et al., 2020). Applicants thus compared the frequency of these two VH genes to combined historic control memory B cells from 14 healthy donors (Rubelt et al., 2012). 13 of the 14 recovered donors showed a higher fraction of combined VH3-53/VH3-66 in B cell repertoires against SARS-COV-2 S, RBD or both compared to historic memory B cell controls. This difference was statistically significant in 10 of 14 (71%, FDR<0.1, Two-proportions z-test) subjects (FIG. 1E) and remained significant in 10 of 14 (71%, FDR<0.1, Two-proportions z-test) subjects when considering only antibodies with CDRH3 regions shorter than 14 amino acids (not shown). Among other antibody features, the kappa and lambda light chain ratios were comparable to historic controls (FIG. 8H), whereas CDRH3 length and hydrophobicity were slightly increased and CDRH3 charge was decreased, and these differences existed for both S- and RBD-binding B cells (FIGS. 8I-K) and across Ig isotypes (FIGS. 8L-N). Thus, the B cell repertoire that binds to SARS-COV-2 S and SARS-COV-2 RBD in recovered individuals includes class switched IgG and IgA affinity maturated B cells and is enriched for heavy chain genes that are associated with class 1 neutralizing antibodies. See, also, FIGS. 15, 28 and 29.

[0146] SARS-COV-2 spike binding monoclonal antibodies are directed against RBD and targets outside of the RBD. To functionally evaluate selected antibodies, Applicants chose 4 of the 14 subjects with the highest serum neutralization titers (FIG. 8A and Table 1) and produced a total of 92 antibodies from these donors (Table 2). The selection of antibodies consisted of 72 representatives from most of the expanded B cell clones in these subjects and 20 singlets (FIGS. 9A-D). All of the selected antibodies selected were expressed as IgG1s in order to allow for direct comparison of binding and neutralization and were initially evaluated for binding by ELISA. 56 of 92 antibodies (61%) showed strong or intermediate binding to either SARS-COV-2 S, RBD, or both in ELISA (FIG. 2A and Table 3). 42 of 56 strong or intermediate binders (75%) bound to both SARS-COV-2 S and RBD, 9 of 56 strong or intermediate binders (16%) only bound to SARS-CoV-2 S, and 5 of 56 (9%) only to RBD (FIG. 2A and Table 3). Applicants conclude that most antibodies isolated from SARS-COV-2 S- and RBD-binding B cells target either the RBD or epitopes on the spike outside of the RBD.

[0147] Table 2A-2B. Selected Antibodies for functional evaluation (related to FIGS. 2 and 9). All neutralization results in this table are from antibodies expressed as IgG1. A. Shown are isotype, VH gene, CDRH3 amino acid sequence, light chain kappa or lambda light chain use, V kappa/V lambda gene, light chain CDRL3 amino acid sequence, sorting bait used to identify the cell, antibody name, IC50 in μg/ml in SARS-COV-2 pseudovirus neutralization assay (PV), IC80 in μg/ml in SARS-COV-2 pseudovirus neutralization assay, IC50 in μg/ml in SARS-COV-2 authentic virus neutralization assay (LV), IC80 in μg/ml in SARS-COV-2 authentic virus neutralization assay for antibodies from subject BG1, BG4, BG7 and BG10 as indicated by the antibody names. (SEQ ID NOS: 1-184). B. Shown are the heavy chain sequences (HC), kappa light chain (KC) sequences and third lambda light chain (LC) sequences for the indicated antibodies tested (SEQ ID NOS: 185-368).

TABLE 2A

| | | | | | CDR3 | | | PV | PV | LV | LV |
|---|---|---|---|---|---|---|---|---|---|---|---|
| | VH | CDR3 | LIGHT | VK/VL | LIGHT | SORT | | IC50 | IG80 | IC50 | IG80 |
| ISOTYPE | GENE | HEAVY CHAIN | CHAIN | GENE | CHAIN | BAIT | Name | (ug/ml) | (ug/ml) | (ug/ml) | (ug/ml) |
| IGH | IGHV6- | CAKQWLANWFDPW | IGK | IGKV3- | CQQSESSPY | RBD | BG1- | >50 | >50 | | |
| M | 1 | | | 20 | TF | | 1 | | | | |
| IGHG | IGHV1- | CARGRAGYYDFWSTSS | IGL | IGLV1- | CAAWDDSL | RBD | BG1- | >50 | >50 | | |
| 1 | 8 | LDNGGMDVW | | 47 | SGVVF | | 3 | | | | |
| IGH | IGHV3- | CVKDVPSMYYIFWSGQ | IGK | IGKV1- | CQQYNTYS | RBD | BG1- | >50 | >50 | | |
| M | 23 | GTYW | | 5 | PITF | | 4 | | | | |
| IGH | IGHV3- | CAKDLPSRYYDFWSG | IGK | IGKV1- | CQQYNSYS | RBD | BG1- | >50 | >50 | | |
| M | 23 | QGNYW | | 5 | SITF | | 5 | | | | |
| IGHG | IGHV2- | CAREMATITGLDYW | IGK | IGKV1- | CQQSYSTP | RBD | BG1- | 1.178 | 10.581 | 0.2037 | 0.3314 |
| 1 | 70 | | | 39; | RTF | | 6 | | | | |
| | | | | IGK | | | | | | | |
| | | | | V1D-39 | | | | | | | |
| IGHA | IGHV2- | CARVPPTDYHFDSW | IGK | IGKV3- | CQHYGSSP | 2P | BG1- | >45 | >45 | | |
| 1 | 70 | | | 20 | PLTF | | 7 | | | | |
| IGH | IGHV1- | CARDTSGYRNPGYGM | IGK | IGKV3- | CQQRSNWP | 2P | BG1- | >50 | >50 | | |
| M | 18 | DVW | | 11 | PWTF | | 8 | | | | |
| IGHG | IGHV5- | CATGTFLAVPGFDFW | IGL | IGLV6-57; | CQSYDSGR | RBD | BG1- | >25 | >25 | | |
| 1 | 51 | | | IGLV6-57 | QGVF | | 9 | | | | |
| IGH | IGHV3- | CARDLQRYGSGSSLGP | IGK | IGKV1- | CQQLDTYP | RBD | BG1- | >50 | >50 | | |
| M | 48 | NYFDYW | | 9 | RF | | 10 | | | | |
| IGH | IGHV4- | CARRAQYYYDSSGYY | IGK | IGKV3- | CQQYNSYS | RBD | BG1- | >35 | >35 | | |
| M | 39 | DAFDIW | | 20 | TF | | 11 | | | | |
| IGHG | IGHV3- | CARDVFRYDSSGRPRY | IGK | IGKV2- | CMQALQTP | RBD | BG1- | 1.151 | >50 | 0.2338 | 0.3866 |
| 1 | 13 | AFDIW | | 28; | LTF | | 12 | | | | |
| | | | | IGKV2D- | | | | | | | |
| | | | | 28 | | | | | | | |
| IGHG | IGHV4- | CARETRWNWIDSW | IGK | IGKV4- | CQQYHNTP | 2P | BG1- | >30 | >30 | | |
| 1 | 59; | | | 1 | WTF | | 13 | | | | |
| | IGHV4- | | | | | | | | | | |
| | 59 | | | | | | | | | | |
| IGHG | IGHV3- | CARDLVDYGMDVW | IGK | IGKV1- | CQQLNSYP | RBD | BG1- | 0.020 | 0.072 | 0.03716 | 0.06751 |
| 1 | 53 | | | 9 | PYTF | | 14 | | | | |
| IGHA | IGHV3- | CAKDGRRDGYNHALD | IGK | IGKV1- | CQQYSSYP | RBD | BG1- | >50 | >50 | | |
| 1 | 43D | NW | | 5 | TF | | 15 | | | | |
| IGH | IGHV3- | CAKGRESTSIGGWFDP | IGK | IGKV1- | CQHYNAYP | 2P | BG1- | >37 | >37 | | |
| M | 30; | W | | 16 | DHL | | 16 | | | | |
| | IGHV3- | | | | | | | | | | |
| | 30-5 | | | | | | | | | | |
| IGH | IGHV | CARTIVGGTNWYFDL | IGL | IGLV1- | CASWDDSV | RBD | BG1- | 24.883 | >50 | 5.174 | 15.25 |
| M | 2-70 | W | | 44 | NGVF | | 17 | | | | |
| IGH | IGHV | CARRVMGSGWLDSW | IGL | IGLV2- | CSSYTSSST | 2P | BG1- | >50 | >50 | | |
| M | 4-39 | | | 14 | WVF | | 18 | | | | |
| IGHG | IGHV | CAKDMGNGFYYYYGL | IGK | IGKV2D- | CMQTIHLP | RBD | BG1- | >30 | >30 | | |
| 1 | 3-9 | DVW | | 29 | RVTF | | 19 | | | | |
| IGHA | IGHV3- | CAKDAPDVVLVPVPY | IGK | IGKV3- | CQHYGSSR | 2P | BG1- | >50 | >50 | | |
| 2 | 23; | YHYGLEVW | | 20 | RTF | | 20 | | | | |
| | IGHV3- | | | | | | | | | | |
| | 23D | | | | | | | | | | |
| IGHA | IGHV3- | CARERSGSYYARVELG | IGL | IGLV2- | CSSYTSSIT | RB | BG1- | >25 | >25 | | |
| 1 | 30 | YW | | 14 | GVF | D | 21 | | | | |
| IGHG | IGHV3- | CASSRPPIGQLVPGLDL | IGL | IGLV1- | CQSYDSRL | RBD | BG1- | 0.023 | 0.072 | 0.09962 | 0.1181 |
| 1 | 66; | DWFDPW | | 40 | SGWVF | | 22 | | | | |
| | IGHV3- | | | | | | | | | | |
| | 66 | | | | | | | | | | |
| IGHA | IGHV | CARDSYRGGGIW | IGK | IGKV1- | CQQYDNLP | RBD | BG1- | 0.009 | 0.039 | 0.02004 | 0.02348 |
| 1 | 3-53 | | | 33; | QTF | | 23 | | | | |
| | | | | IGKV1D- | | | | | | | |
| | | | | 33 | | | | | | | |
| IGHG | IGHV1- | CARGPYYYDSGGYYL | IGK | IGKV3- | CQQYAGSP | RBD | BG1- | 0.004 | 0.007 | 0.04294 | 0.07228 |
| 1 | 69; | DYW | | 20 | RTF | | 24 | | | | |
| | IGHV1- | | | | | | | | | | |
| | 69 | | | | | | | | | | |
| IGHG | IGHV3- | CARDMGGDVFDIW | IGK | IGKV1- | CQQLNSSPP | RBD | BG1- | 0.091 | 0.59 | 0.1224 | 0.14601 |
| 1 | 53 | | | 9 | KLTF | | 25 | | | | |
| IGHA | IGHV4- | CAAHITVFGIITGNWFD | IGL | IGLV1- | CQSYASSLS | RBD | BG1- | 0.360 | 3.962 | 0.235 | 0.3127 |
| 1 | 39 | PW | | 40 | VHVVF | | 26 | | | | |
| IGHA | IGHV3- | CARESAAAWGWLDPW | IGK | IGKV139; | CQQSYSMP | RBD | BG1- | >40 | >40 | | |
| 1 | 53 | | | IGKV1D- | YTF | | 27 | | | | |
| | | | | 39 | | | | | | | |
| IGHG | IGHV3- | CAKDLGYSYGSEIFDY | IGK | IGKV1- | CQQSYSTP | RBD | BG1- | 10.398 | 39.842 | 12.75 | 17.54 |
| 1 | 23 | W | | 39; | VF | | 28 | | | | |
| | | | | IGKV1D- | | | | | | | |
| | | | | 39 | | | | | | | |
| IGH | IGHV3- | CARARSGSYYSAIDYW | IGK | IGKV1- | CQQYDYLP | 2P | BG4- | >50 | >50 | | |
| M | 30-3 | | | 33; | LTF | | 1 | | | | |
| | | | | IGKV1D- | | | | | | | |
| | | | | 33 | | | | | | | |
| IGH | IGHV3- | CAKEAYFTAWLHFPFD | IGK | IGKV3- | CQQYGSSL | 2P | BG4- | >50 | >50 | | |
| M | 23; | PW | | 20 | TF | | 2 | | | | |
| | IGHV3- | | | | | | | | | | |
| | 23D | | | | | | | | | | |
| IGHG | IGHV3- | CARDRDDYGDPYGMD | IGL | IGLV3- | CYSVADNM | 2P | BG4- | >50 | >50 | | |
| 3 | 30; | VW | | 27 | GVF | | 3 | | | | |
| | IGHV3- | | | | | | | | | | |
| | 30-3 | | | | | | | | | | |
| IGHG | IGHV3- | CTTGPTVRGVSVYW | IGL | IGLV7- | CLLSYSGA | 2P | BG4- | >50 | >50 | | |
| 2 | 15 | | | 46 | WVF | | 4 | | | | |
| IGHG | IGHV1- | CARSVGYDAFDVW | IGL | IGLV1- | CAAWDDSL | RBD | BG4- | >45 | >45 | | |
| 1 | 2 | | | 47 | FVVF | | 5 | | | | |
| IGH | IGHV3- | CARDLMDYDILTGYYP | IGK | IGKV4- | CQQYFSTPP | RBD | BG4- | >50 | >50 | | |
| M | 21 | AGYW | | 1 | STF | | 6 | | | | |
| IGH | IGHV1- | CARGPPPPAITMIVVTT | IGK | IGKV22 | CMQALQTP | RBD | BG4- | >35 | >35 | | |
| M | 2 | VWTS | | 28; | YTF | | 7 | | | | |
| | | | | IGKV2D- | | | | | | | |
| | | | | 28 | | | | | | | |
| IGHG | IGHV5- | CARLETTVTTDWFDP | IGL | IGLV2- | CSSYTRGN | RBD | BG4- | >50 | >50 | | |
| 1 | 10-1 | W | | 14 | YVF | | 8 | | | | |
| IGHG | IGHV3- | CTIGNWHGSGNNIMHD | IGK | IGKV4- | CHQYYLVP | RBD | BG4- | >50 | >50 | | |
| 3 | 49 | YW | | 1 | FTF | | 9 | | | | |
| IGHG | IGHV1- | CARDRWFGKLEGSFD | IGL | IGLV2- | CCSYATGS | RBD | BG4- | 5.53 | 48.924 | 11.48 | 15.58 |
| 1 | 2 | VW | | 23; | SVVF | | 10 | | | | |
| | | | | IGLV2- | | | | | | | |
| | | | | 23; | | | | | | | |
| | | | | IGLV2- | | | | | | | |
| | | | | 23 | | | | | | | |
| IGH | IGHV4- | CARDTVVVVGAHAFDI | IGK | IGKV4- | CQQYYTTP | RBD | BG4- | 11.335 | 36.996 | 10.7 | 13.55 |
| M | 34 | W | | 1 | LTF | | 11 | | | | |
| IGHG | IGHV4- | CARPQVLYYYGSGSYS | IGL | IGLV1- | CQSYDSSLS | 2P | BG4- | >50 | >50 | | |
| 1 | 39 | HWFDPW | | 40 | AVWVF | | 12 | | | | |
| IGH | IGHV3- | CARGSGWYVGFDYW | IGL | IGLV1- | CAAWDDSL | RBD | BG4- | >50 | >50 | | |
| M | 48 | | | 47 | SALVF | | 13 | | | | |
| IGH | IGHV1- | CARVTTIPQYDYGDYY | IGL | IGLV2- | CCSYAGSS | 2P | BG4- | 0.878 | 8.971 | 0.2553 | 0.3563 |
| M | 2 | YYYGMDVW | | 23 | TLVF | | 14 | | | | |
| IGHG | IGHV4- | CARDLGQDW | IGK | IGKV3- | CQQYGSSP | 2P | BG4- | >50 | >50 | | |
| 3 | 59 | | | 20 | WTF | | 15 | | | | |
| IGH | IGHV4- | CARDIFGSGSPPSGVAF | IGL | IGLV2- | CSSHTSSSS | RBD | BG4- | 0.806 | 9.388 | 0.1342 | 0.1703 |
| M | 61 | DYW | | 14 | PHVVF | | 16 | | | | |
| IGHG | IGHV3- | CARESYGMDVW | IGK | IGKV3- | CQQYGSSP | 2P | BG4- | 0.024 | 0.102 | 0.1276 | 0.2202 |
| 1 | 53 | | | 20 | GTF | | 17 | | | | |
| IGHG | IGHV1- | CARVKEWGSYYSDSG | IGL | IGLV2- | CCSYAGTY | 2P | BG4- | >50 | >50 | | |
| 1 | 69; | SHGKNYFDYW | | 11 | TVIF | | 18 | | | | |
| | IGHV1- | | | | | | | | | | |
| | 69D | | | | | | | | | | |
| IGH | IGHV1- | CARDGYSSSFIPGPRNY | IGK | IGKV3- | CQQFNNWP | RBD | BG4- | >50 | >50 | | |
| M | 2 | YGMDVW | | 15 | RGTF | | 19 | | | | |
| IGHG | IGHV1- | CARPRGRLITFGGLIVT | IGK | IGKV2- | CMQALQTP | 2P | BG4- | >50 | >50 | | |
| 1 | 18 | TLDYYYGMGVW | | 28; | VTF | | 20 | | | | |
| | | | | IGKV2D- | | | | | | | |
| | | | | 28 | | | | | | | |
| IGHG | IGHV1- | CATDKADTSWWEFDP | IGL | IGLV7- | CLLSYSGV | RBD | BG4- | >35 | >35 | | |
| 1 | 2 | W | | 46 | VVF | | 21 | | | | |
| IGHG | IGHV3- | CARFSKLYQWSFDIW | IGL | IGLV2- | CCSYAGTY | 2P | BG4- | >50 | >50 | | |
| 1 | 53 | | | 11 | TPVVF | | 22 | | | | |
| IGH | IGHV3- | CARGTHYGSGSYYHW | IGK | IGKV3- | CQQYNNW | RBD | BG4- | >50 | >50 | | |
| M | 53 | | | 15 | PPGLKITF | | 23 | | | | |
| IGHG | IGHV3- | CVRDLDYYGMDVW | IGK | IGKV1- | CQQLNSSP | RBD | BG4- | 0.013 | 0.05 | 0.02494 | 0.04633 |
| 1 | 53 | | | 9 | GSLTF | | 24 | | | | |
| IGHG | IGHV3- | CARDLEVVGAMDVW | IGK | IGKV3- | CQQYGSPM | 2P | BG4- | 0.003 | 0.013 | 0.04379 | 0.0706 |
| 1 | 53 | | | 20 | YTF | | 25 | | | | |
| IGHG | IGHV3- | CAREGPHGMDVW | IGK | IGKV1- | CQQYDNLP | RBD | BG4- | 0.016 | 0.072 | 0.04001 | 0.05179 |
| 1 | 53 | | | 33; | PTF | | 26 | | | | |
| | | | | IGK | | | | | | | |
| | | | | V1D-33 | | | | | | | |
| IGHG | IGHV3- | CARGPVRGVITHFDYW | IGL | IGLV2- | CSSYTSSST | 2P | BG4- | >50 | >50 | | |
| 3 | 53 | | | 14 | SSVF | | 27 | | | | |
| IGHD | IGHV3- | CVKSSSGWYLRLGYW | IGK | IGKV2- | CMQALQTP | 2P | BG7- | >50 | >50 | | |
| | 30; | | | 28; | TF | | 1 | | | | |
| | IGHV3- | | | IGKV2D- | | | | | | | |
| | 30-5 | | | 28 | | | | | | | |
| IGH | IGHV3- | CAREGRRGQWSWFDP | IGK | IGKV3- | CQQFGSSPL | 2P | BG7- | >50 | >50 | | |
| M | 53 | W | | 20 | YTF | | 2 | | | | |
| IGH | IGHV3- | CAGSPVRGVITHFDYW | IGL | IGLV2- | CSSYTSSST | 2P | BG7- | >50 | >50 | | |
| M | 53 | | | 14 | QVF | | 3 | | | | |
| IGH | IGHV4- | CARVDRRYCIITSCYIF | IGK | IGKV4- | CQQYYSTPI | RBD | BG7- | >50 | >50 | | |
| M | 61 | DYW | | 1 | TF | | 4 | | | | |
| IGH | IGHV3- | CARGRDGYYYGMDV | IGK | IGKV1- | CQQLNSLF | 2P | BG7- | >50 | >50 | | |
| M | 30-3 | W | | 9 | TF | | 5 | | | | |
| IGH | IGHV1- | CARAPPFSSSSIGVDYW | IGK | IGKV1- | CQQYNSYP | 2P | BG7- | >50 | >50 | | |
| M | 2 | | | 16 | LTF | | 6 | | | | |
| IGH | IGHV1- | CAKDHCATTNCFEYLY | IGK | IGKV2- | CMQSLQTR | 2P | BG7- | >50 | >50 | | |
| M | 2 | FGMGVW | | 28; | TF | | 7 | | | | |
| | | | | IGKV2D- | | | | | | | |
| | | | | 28 | | | | | | | |
| IGH | IGHV4- | CARDLTYYGSNGYTN | IGK | IGKV1- | CQQYNTYF | 2P | BG7- | >50 | >50 | | |
| M | 4 | W | | 5 | WTF | | 9 | | | | |
| IGH | IGHV3- | CASSPVRGVITQFDYW | IGL | IGLV2- | CSSYTSRSP | 2P | BG7- | >50 | >50 | | |
| M | 53 | | | 14 | WVF | | 10 | | | | |
| IGHG | IGHV5- | CARHDGSKVTTNDYW | IGK | IGKV3- | CQQRRDWP | 2P | BG7- | >50 | >50 | | |
| 1 | 51 | | | 11 | GTF | | 11 | | | | |
| IGHA | IGHV3- | CARDRSGSYYRPGYW | IGK | IGKV1-33; | CQQYGNLP | 2P | BG7- | >50 | >50 | | |
| 1 | 30-3 | | | IGKV1D- | PLTF | | 12 | | | | |
| | | | | 33 | | | | | | | |
| IGH | IGHV3- | CAQTGGSYFGPFDYW | IGL | IGLV2- | CYSYTTSST | 2P | BG7- | >50 | >50 | | |
| M | 30; | | | 14 | PYVF | | 13 | | | | |
| | IGHV3- | | | | | | | | | | |
| | 30; | | | | | | | | | | |
| | IGHV3- | | | | | | | | | | |
| | 30-5 | | | | | | | | | | |
| IGHG | IGHV3- | CAKDILYGDYVGGFAY | IGL | IGLV2- | CSSYTTSST | RBD | BG7- | 0.385 | 19.178 | 0.2084 | 0.2981 |
| 1 | 9 | W | | 14 | LVF | | 14 | | | | |
| IGHG | IGHV1- | CAIPYSSVTFDCW | IGK | IGKV3- | CQQYGSSR | RBD | BG7- | 0.016 | 0.092 | 0.1139 | 0.1345 |
| 1 | 18 | | | 20 | PTF | | 15 | | | | |
| IGHG | IGHV3- | CARDSQPHYYYGVDV | IGL | IGLV2- | CSSYTKTRT | RBD | BG7- | 3.5992 | 21.792 | 3.172 | 4.817 |
| 1 | 53 | W | | 14 | LYVF | | 16 | | | | |
| IGHG | IGHV5- | CAKKKDDRAEAVFDY | IGL | IGLV1- | CATWDDSL | RBD | BG7- | >50 | >50 | | |
| 1 | 51 | W | | 44 | NTYVF | | 17 | | | | |
| IGHG | IGHV3- | CARGAAMVKELFDYW | IGK | IGKV4- | CQQYYSTP | RBD | BG7- | 0.083 | 0.244 | 0.1152 | 0.1601 |
| 1 | 53 | | | 1 | LTF | | 18 | | | | |
| IGHG | IGHV3- | CARVRWLQGGIDYW | IGL | IGLV6- | CQSYDSGS | RBD | BG7- | 2.735 | 13.72 | 1.854 | 3.653 |
| 1 | 7 | | | 57 | WVF | | 19 | | | | |
| IGHG | IGHV1- | CARGGRYCSSTTCYSG | IGL | IGLV1- | CQSYDSSLS | RBD | BG7- | 0.007 | 0.023 | 0.05679 | 0.0942 |
| 1 | 8 | VGMDVW | | 40 | GWVF | | 20 | | | | |
| IGH | IGHV3- | CAKSNSSGLTPFDHW | IGK | IGKV1- | CQQSYSNP | RBD | BG10- | >50 | >50 | | |
| M | 9 | | | 39; | FTF | | 1 | | | | |
| | | | | IGKV1D- | | | | | | | |
| | | | | 39 | | | | | | | |
| IGH | IGHV4- | CARRDGSYFDYW | IGL | IGLV3- | CQAGDSDT | RBD | BG10- | >50 | >50 | | |
| M | 39 | | | 1 | VLF | | 2 | | | | |
| IGHG | IGHV4- | CARHVSDGQSIGWLYY | IGL | IGLV3- | CQVWDRSS | RBD | BG10- | >50 | >50 | | |
| 1 | 39 | FDCW | | 21 | VF | | 3 | | | | |
| IGHA | IGHV4- | CARLAPFGERRVDQYY | IGK | IGKV2D- | CMQSTQLP | RBD | BG10- | >50 | >50 | | |
| 1 | 31 | LMDVW | | 29 | WTF | | 4 | | | | |
| IGHA | IGHV4- | CARAYYYYYMDVW | IGL | IGLV1- | CSAWDDSL | RBD | BG10- | >50 | >50 | | |
| 1 | 4 | | | 47 | RGPVF | | 5 | | | | |
| IGH | IGHV4- | CARADRGYCTITDCFIF | IGK | IGKV4- | CQQYYSTP | RBD | BG10- | >50 | >50 | | |
| M | 61 | NYW | | 1 | LTF | | 6 | | | | |
| IGHG | IGHV3- | CTRGAHYDFWRGYYT | IGL | IGLV1- | CQSYDSRL | RBD | BG10- | >50 | >50 | | |
| 1 | 13 | DDHHYMDVW | | 40 | SAWVF | | 7 | | | | |
| IGHA | IGHV3- | CVRGEGGPHDAFDIW | IGL | IGLV3- | CQVWDSSR | RBD | BG10- | >50 | >50 | | |
| 1 | 11 | | | 21 | DLRVF | | 8 | | | | |
| IGH | IGHV3- | CVRCGYDDWYFDVW | IGL | IGLV3- | CQAWDSST | 2P | BG10- | >50 | >50 | | |
| M | 7 | | | 1 | GVF | | 9 | | | | |
| IGHG | IGHV1- | CGRGPTTAKSGVEWFD | IGL | IGLV1- | CQSFDSSLS | RBD | BG10- | 0.099 | 0.359 | 0.03891 | 0.05747 |
| 1 | 8 | PW | | 40 | GFYVF | | 10 | | | | |
| IGHA | IGHV3- | CAKDMGWNVFQGLD | IGL | IGLV2- | CTSYRSSSL | RBD | BG10- | >50 | >50 | | |
| 1 | 9 | VW | | 14 | QGVF | | 11 | | | | |
| IGHA | IGHV1- | CARSWSAYYNWFDPW | IGK | IGKV3- | CQHYGSSP | 2P | BG10- | >50 | >50 | | |
| 1 | 18 | | | 20 | PVTF | | 12 | | | | |
| IGH | IGHV3- | CTTDRHVRGTYWGAY | IGL | IGLV1- | CAAWDDSL | RBD | BG10- | >50 | >50 | | |
| M | 15; | YYYGMDVW | | 44 | NGLYVF | | 13 | | | | |
| | IGHV3- | | | | | | | | | | |
| | 15 | | | | | | | | | | |
| IGHG | IGHV3- | CARAVRISSGYGLYGD | IGL | IGLV3- | CQVWDSSS | 2P | BG10- | 12.318 | >50 | 8.683 | 9.542 |
| 1 | 74 | SDYFDYW | | 21 | DPWVF | | 14 | | | | |
| IGH | IGHV3- | CARARGDAFDIW | IGL | IGLV1- | CGTWDNSL | RBD | BG10- | >50 | >50 | | |
| M | 48 | | | 51 | SVGVF | | 15 | | | | |
| IGHG | IGHV5- | CARPLFYCSGGSCLTG | IGL | IGLV2- | CSSYAGSD | 2P | BG10- | >50 | >50 | | |
| 1 | 51 | YW | | 8 | NWVF | | 16 | | | | |
| IGHA | IGHV3- | CARGRRDGNDLAPDY | IGL | IGLV3- | CYSTDSSD | 2P | BG10- | >50 | >50 | | |
| 1 | 74; | W | | 10 | NHRVF | | 17 | | | | |
| | IGHV3- | | | | | | | | | | |
| | 74 | | | | | | | | | | |
| IGHA | IGHV3- | CVKDLGAYASGRLAD | IGK | IGKV1- | CQQSYTTP | RBD | BG10- | >50 | >50 | | |
| 1 | 30; | W | | 39; | YTF | | 18 | | | | |
| | IGHV3- | | | IGK39 | | | | | | | |
| | 30-5 | | | | | | | | | | |
| IGHG | IGHV5- | CARTQWGYNYGSHFF | IGL | IGLV1- | CAAWDASL | RBD | BG10- | 0.009 | 0.026 | 0.03334 | 0.03846 |
| 1 | 51 | YMDVW | | 47 | SGYVF | | 19 | | | | |

TABLE 2B
Amino acid sequences of the variable regions of the antibodies produced and tested
(heavy chain sequences (HC), kappa light chain (KC) sequences and lambda light chain (LC)
sequences). (SEQ ID NOS: 185-368).

| | |
|---|---|
| HCBG1-1 | TGVHSQVQLQQSGPGLVKPSQTLSLTCAISGDSVSSKNAAWNWIRQSPSRGLEWLGTTYYRSKWYN |
| | DYAVSVKGRIAINPDTSKNQFSLQLHSVTPEDTAVYYCAKQWLANWFDPWGQGTQVTVSSAST |
| HCBG1-3 | TGVHSQVQLVQSGAEVKKPGASVKVSCKASGYTFTSYDINWVRQATGQGLEWMGWMNPNSGNTG |
| | YAQKFQGRVTMTRNTSISTAYMELSSLTSEDTAVYYCARGRAGYYDFWSTSSLDNGGMDVWGQGT |
| | TVTVSSAST |
| HCBG1-4 | TGVHSEVHLVESGGDLVHPGGSLRLSCVASGFTFTDYAMTWVRQAPGKGLEWVSTISGNGGTTNTA |
| | DSVKGRFTISRDNSKNTLYLEMSSLSDEDTAIYYCVKDVPSMYYIFWSGQGTYWGQGTLVTVSSAST |
| HCBG1-5 | TGVHSEVQLVESGGGLVQPGGSLRLSCAASGFTFSSYAMSWVRQAPGKGLEWVSTISNSGGTTNYA |
| | DSVKGRFTISRDNSKNTLFLQMNSLRAEDTAVYYCAKDLPSRYYDFWSGQGNYWGQGTLVTVSSAS |
| | T |
| HCBG1-6 | TGVHSQVTLRESGPALVKPTQTLTLTCTFSGFSLSTSGMCVSWIRQPPGKALEWLARIDWDDDKYYS |
| | TSLRTRLTISKDTSKNQVVLTMTNMDPVDTATYYCAREMATITGLDYWGQGTLVTVSSAST |
| HCBG1-7 | TGVHSQVTLRESGPALVKPTQTLTLTCTFSGFSLSTSGMCVSWIRQPPGKALEWLALIDWTDDKYYS |
| | TSLKTRLTISKDSSKNEVVLTMTNMDPVDTATYYCARVPPTDYHFDSWGQGTLVTVSSAST |
| HCBG1-8 | TGVHSQVQLVQSGAEVKKPGASVKVSCKASGYTFTSYGISWVRQAPGQGLEWMGWISAYNGNTNY |
| | AQKLQGRVTMTTDTSTSTAYMELRSLRSDDTAVYYCARDTSGYRNPGYGMDVWGQGTTVTVSSAS |
| | T |
| HCBG1-9 | TGVHSEVQLVQSGAEVKKPGESLKISCKTSGYSFASYWIGWVRQMPGKGLEWMGIIYPGDSDTIYTP |
| | PFQGQVTISADTSTRTASLEWRSLRASDSAIYYCATGTFLAVPGFDFWGQGTLVSVSSAST |
| HCBG1-10 | TGVHSEVQLVESGGGLAQPGGSLRLSCAASGFTFSTYSMNWVRQAPGKGLEWVSFISRSSNTIYYAD |
| | SVKGRFTISRDNAKNSLYLQMNSLRDEDTAVYYCARDLQRYGSGSSLGPNYFDYWGQGTVVTVSSA |
| | ST |
| HCBG1-11 | TGVHSQLHLQESGPGLVKPSETLSLTCTASGGSISSSSYYWGWIRQPPGKGLEWIGSVYYSGRTYYNP |
| | SLKSRVTISVDTSKNQFSLKLSSVTAADTAVYYCARRAQYYYDSSGYYDAFDIWGQGTTVTVSSAST |
| HCBG1-12 | TGVHSEVQLVESGGGLVQPGGSLRLSCAASGFTFSTYDMHWVRQATGKGLEWVSAIGTAGDTYYP |
| | GSVQGRFTISRENAKNSLYLQMNSLRAGDTAVYYCARDVFRYDSSGRPRYAFDIWGQGTMVTVSSA |
| | ST |
| HCBG1-13 | TGVHSQVQLQESGPGLVKPSETLSLTCTVSGGSMSSDYWSWIRQPPGKGLEWIGYIYYRGSTNLNPS |
| | LQSRLTMSVDTSKNQFSLKLSSVTAADTAVYYCARETRWNWIDSWGQGTPVTVSSAST |
| HCBG1-14 | TGVHSEVQLVESGGGLIQPGGSLRLSCAASGLTVNSNYMTWVRQAPGKGLEWVSVIYSGGSTFYAD |
| | SVKGRFTISRDNSKNTLYLQMNSLRAEDTAVYYCARDLVDYGMDVWGQGTTVTVSSAST |
| HCBG1-15 | TGVHSDVQLVESGGVVVQPGGSLRLACAASGFTFDDYAMHWVRQAPGKGLEWVSLITRDGGSTHY |
| | ADSVKGRFTISRDNSKNSLYLQMNSLRLEDTAFYYCAKDGRRDGYNHALDNWGQGTLVTVSSAST |
| HCBG1-16 | TGVHSQVQLVESGGGVVQPGRSLRLSCAASGFSFSSHVMHWVRQAPGKGLEWVAVISYDGSNKFY |
| | ADSVKGRFTISRDSSKNTVFLQMNSLRDEDTAMYYCAKGRESTSIGGWFDPWGQGTLVTVSSAST |
| HCBG1-17 | TGVHSQVTLRESGPSLVKPTQTLTLTCTFSGFSLSTSGMCVSWIRQPPGKALEWLARIDWDDDKFYST |
| | SLKTRLTISKGTSRNQVVLTMTNMGPVDTATYYCARTIVGGTNWYFDLWGRGTLVTVSSAST |
| HCBG1-18 | TGVHSQLQLQESGPGLVKPSETLSLTCTVSGGSISSSSYYWGWIRQPPGKGLEWIGNFYYIGSTNYNP |
| | SLKSRVTISVDTSRNQFSLKLTSVTAADTAVYYCARRVMGSGWLDSWGQGTLVTVSSAST |
| HCBG1-19 | TGVHSEVQLVESGGGLVQPGGSLRLACAVSGLILDDYALHWVRLAPGKGLEWVSGINWNSGTIHYA |
| | DSVRGRFTTSRDNAKRSLYLQMNSLRPEDTALYYCAKDMGNGFYYYYGLDVWGQGTSVTVSSAST |
| HCBG1-20 | TGVHSEVLLLESGGGLVQPGGSLRLSCAASGFPFGSYAMSWVRQAPGKGLEWVSVISGSADTTYYA |
| | DSVKGRFTISRDNSKNTLYLQMNSLGAEDTAVYYCAKDAPDVVLVPVPYYHYGLEVWGQGTTVTV |
| | SSAST |
| HCBG1-21 | TGVHSQVQLVESGGGVVQPGRSLRLSCAASGFTFRTYDMHWVRQAPGKGLEWVAVISYDGSIKYFA |
| | DSVKDRFTISRDNSQSTLYLQMNSLRAEDTAVYYCARERSGSYYARVELGYWGQGTLVTVSSAST |
| HCBG1-22 | TGVHSEVQLVESGGGLVQPGGSLRLSCSVSGFTVSSNYMNWVRQAPGKGLEWVSVIYPGGSTFYPD |
| | SVKGRFTISRDDSKNTLYLQMNSLRPEDTAAYYCASSRPPIGQLVPGLDLDWFDPWGQGTLVIVSSA |
| | ST |
| HCBG1-23 | TGVHSEVQLVESGGGLIQPGGSLRLSCAASGLTVSSNYMSWVRQAPGKGLEWVSVMYPGGSTYYA |
| | DSVKGRFTISRDNSKNTLYLQMNSLRAEDTAVYYCARDSYRGGGIWGQGTMVTVSSAST |
| HCBG1-24 | TGVHSQVQLVQSGAEVKKPGSSVKVSCKASGGTFSSYAISWVRQAPGQGLEWMGRIISMFGIANNA |
| | QKFQGRLTITADTSTSTAYMELSSLRSEDTAVYYCARGPYYYDSGGYYLDYWGQGTLVTVSSAST |
| HCBG1-25 | TGVHSEVQLVESGGGLIQPGGSLRLSCAASGFIVSRNYMSWVRQAPGKGLEWVSVIYSGGSTFYADA |
| | VKGRFTISRDNSKNTLYLQMNSLRAEDTAVYYCARDMGGDVFDIWGQGTMVTVSSAST |
| HCBG1-26 | TGVHSQLQLQESGPGLVKPSETLSLTCTVSGGSIYSSDYYWGWIRQPPGKGLEWIGSMHYSGSTYHS |
| | PSLNSRVTISVDPSTNQLSLRLSSATAADTAVYYCAAHITVFGIITGNWFDPWGQGTLVTVSSAST |
| HCBG1-27 | TGVHSEVQLVESGGGLIQPGGSLRLSCAASGFNLSGNYMSWVRQAPGQGLEWVSLIYAGGYAYYA |
| | DSVKGRFTISRDNSKNMFYLQMNSLRAEDTAIYYCARESAAAWGWLDPWGQGTLVTVSSAST |
| HCBG1-28 | TGVHSEVQLVESGGGLVQPGGSQRLSCAASGFTFSSYVINWVRQAPGKGLEWVSAISGSGDITYYAD |
| | SVKGRFTMSRDNSKKTLYLQMNSLRAEDTAVYYCAKDLGYSYGSEIFDYWGQGTLVTVSSAST |
| HCBG4-1 | ATGVHSQVRLVESGGGVVQPGRSLRLSCAVSGFTFSSYAMNWVRQAPGKGLEWVTVISYDGSNKY |
| | YADSVKGRFTISRDNSKNTLYLQMNSLRPDDTAVYYCARARSGSYYSAIDYWGQGTLVTVSSAST |
| HCBG4-2 | ATGVHSEVQLLESGGSLVQPGGSLRLSCAASGFTFSSYAMSWVRQAPGKGLEWVSAISGSGGSTYY |
| | ADSVKGRFTISRDNSKNTLYLQMNSLRAEDTAVYYCAKEAYFTAWLHFPFDPWGQGTLVTVSSAST |
| HCBG4-3 | ATGVHSHVQLVESGGGVVQPGRSLRISCAASGFTFSSYTMHWVRQAPGKGLEWVAVISKEADISYD |
| | GNNKYYADSVKGRFTISRDNSKNTLYLQLNSLRTEDTAVYYCARDRDDYGDPYGMDVWGQGTTV |
| | TVSSAST |
| HCBG4-4 | ATGVHSEVQLVESGGGLVKPGGSLRLSCAASEFTFSNVWMSWVRQAPGKGLEWVGRIKSKTDGGT |
| | TDYAAPVKGRFTISRDDSKNTLYLQMNSLKTEDTGVYYCTTGPTVRGVSVYWGQGTLVTVSSAST |
| HCBG4-5 | ATGVHSQVQLMQSGAEVKKPGASVKVSCKASGDSFTDYYVHWVRQAPGQGLEWMGWISPYSGGT |
| | NYAPKFRGRVTMTRDTSITTAHMELGRLRSDDTAVYFCARSVGYDAFDVWGPGTMVTVSSAST |
| HCBG4-6 | ATGVHSEVQLVESGGGLVKPGGSLRLSCAASGFTFSSYTMNWVRQAPGKGLEWVSSISGAPNYIYY |
| | ADSVKGRFTISRDNAKNSLSLQMNSLRAEDTAVYYCARDLMDYDILTGYYPAGYWGQGTLVTVSS |
| | AST |
| HCBG4-7 | ATGVHSQVQLVQSGAEVKKPGASVKVSCKASGYTFTGYYMHWVRQAPGQGLEWMGWINLNSGGT |
| | NYAQKFQGRVTMTRDTSISTAYMELSRLRSDDTAVYYCARGPPPPAITMIVVTTVWTSWGQGTTVT |
| | VSSAST |
| HCBG4-8 | ATGVHSEVQLVQSGAEVKKPGESLRISCKGSGYSFTSYWISWVRQMPGKGLEWMGRIDPSDSYTNY |
| | SPSFQGHVTISADKSISTAYLQWSSLKASDTAMYYCARLETTVTTDWFDPWGQGTLVTVSSAST |
| HCBG4-9 | ATGVHSEVQLVESGGGLAQPGRSLRLSCRCSGFRFGDYAVNWVRQFPGKGPEWIGFIRTKTFGAATQ |
| | YAASVKGRFTISRDDSQSVAYLQMNRLITDDTAVYYCTIGNWHGSGNNIMHDYWGQGTLVSVSSAS |
| | T |
| HCBG4-10 | ATGVHSQVQLVQSGAEVKKPGASVKVSCKASGYIFTGYYIHWVRQAPGQGLEWMGWINPISGGTN |
| | YAQKFQGRVTATRDTSITTAYMELTSLTSDDTAVFYCARDRWFGKLEGSFDVWGQGTMVTVSSAST |
| HCBG4-11 | ATGVHSQVQLQQWGAGLLKPSETLSLTCAVYDESFSDYYWTWIRQPPGKGLEWIGEINHSGSTNYN |
| | PSLKSRVTISVDTSKNQFSLRLSSVTAADTAVYYCARDTVVVVGAHAFDIWGQGTMVTVSSAST |
| HCBG4-12 | ATGVHSQLQLQESGPGLVKPSETLSLTCIVSGGSISSSSYYWGWIRQPPGKGLEWIGTIYNSGSTHYNP |
| | SLRSRVTISVDTSKSHFSLKLSSVTAADTAVYYCARPQVLYYYGSGSYSHWFDPWGQGTLVTVSSAS |
| | T |
| HCBG4-13 | ATGVHSEVQLVESGGGLVQPGGSLRLSCAASGFTFSSYEMNWVRQAPGKGLEWVSYISSSGSTIYYA |
| | DSVKGRFTISRDNAKNSLYLQVNSLRAEDTAVYYCARGSGWYVGFDYWGQGTLVTVSSAST |
| HCBG4-14 | ATGVHSQVQLVQSGAEVKKPGASVKVSCKASGYTFTGYYIHWVRQAPGQGLEWMGWINPNSGGT |
| | NYAQKFQGRVTMTRDTSISTAYMELSRLRSDDTAVYFCARVTTIPQYDYGDYYYYYGMDVWGQGT |
| | TVTVSSAST |
| HCBG4-15 | ATGVHSQVQLQESGPGLVKPSETLSLTCTVSGGSISSYYWSWIRQPPGKGLDWIGYIYYSGSTNYNPS |
| | LKSRVTISVDTSKNQFSLKLSSVTAADTAVYYCARDLGQDWGQGTLVTVSSAST |
| HCBG4-16 | ATGVHSQVQLQESGPGLVKPSQTLSLTCTVSGGSISSGSSYWSWIRQPAGKGLEWIGRIYTSGSTNYN |
| | PSLKSRVTISVDTSKNQFSLKLSSVTAADTAVYYCARDIFGSGSPPSGVAFDYWGQGTLVTVSSAST |
| HCBG4-17 | ATGVHSEVQLVESGGGLIQPGGFLRLSCAASGLTVSSNYMNWVRQAPGKGLEWVSVIYSGGSTYYA |
| | DSVKGRFTISRDNSKNTLYLQMNSLRAEDTAVYYCARESYGMDVWGQGTTVTVSSAST |
| HCBG4-18 | ATGVHSQVQLVQSGAEVKKPGSSVKVSCKASGGTFSNYAVSWVRQAPGQGLEWMGGIISIFATANY |
| | AQKFQGRVTITADESTSTAYMELSSLRSEDTAVYYCARVKEWGSYYSDSGSHGKNYFDYWGQGTL |
| | VTVSSAST |
| HCBG4-19 | ATGVHSQVQLVQSGAEVKKPGASVKVSCKASGYTFTGYSMHWVRQAPGQGLEWMGWINPNSGGT |
| | NYAQKFQGRVTMTRDTSISTTYMELSRLRSDDTAVYYCARDGYSSSFIPGPRNYYGMDVWGQGTTV |
| | TVSSAST |
| HCBG4-20 | ATGVHSQVHLVQSGAEVKKPGASVKVSCKASGYTFTSYGINWVRQAPGQGLEWMGWISAYNGNT |
| | NYAQKLQGRVTMTTDTSTSTAYMELRSLRSDDTAVYYCARPRGRLITFGGLIVTTLDYYYGMGVW |
| | GQGTTVTVSSAST |
| HCBG4-21 | ATGVHSQVQLVQSGPEVKKPGASVRVSCKTSGHTFTDYWIQWVRQAPGQGLEWMGWIELSTGGTN |
| | YAPKFQGRVAMSSDTSIRTAYMDLWSLTSDDTALYYCATDKADTSWWEFDPWGQGTLVTVSSAST |
| HCBG4-22 | ATGVHSEVQLVESGGGLVQPGASLRLSCAASGFTVSNNYMSWVRQAPGKGLEWVSVIYSGGSTYY |
| | ADSVKGRFTISRHNSENTLYLQMNSLRAEDTAVYYCARFSKLYQWSFDIWGQGTMVTVSSAST |
| HCBG4-23 | ATGVHSEVQLVESGGGLVQPGGSLRLSCAASGFTVSSNYMSWVRQAPGKGLEWVSVIYSGGSTYYA |
| | DSVKGRFTISRHNSKNTLYLQMNSLRAEDTAVYYCARGTHYGSGSYYHWGQGTLVTVSSAST |
| HCBG4-24 | ATGVHSEVQLVESGGGLIQPGGSLRLSCAASGLTVSSNYMNWVRQAPGKGLEWVSVIYSGGSTFYA |
| | DSVKGRFTISRDNSKNTLFLQMNSLRAEDTAVYYCVRDLDYYGMDVWGQGTTVTVSSAST |
| HCBG4-25 | ATGVHSEVQLVESGGGLIQPGGSLRLSCAASGITVVRNYMTWVRQAPGKGLEWVSVIYSGGTTYYA |
| | DSVKGRFTISRDNSKNTMYLQMNSLRAEDTAIYYCARDLEVVGAMDVWGQGTTVTVSSAST |
| HCBG4-26 | ATGVHSEVQLVESGGGLIQPGGSLRLSCAASGVIVSSNYMSWVRQAPGKGLEWVSVIYSGGSTYYA |
| | DSVKGRFTISRDKSKNTLYLQMNSLRAEDTAVYYCAREGPHGMDVWGQGTTVTVSSAST |
| HCBG4-27 | ATGVHSEVQLVESGGGLVQPGGSLRLSCAASGFTILSNYMSWVRQAPGKGLEWVSVIYSGGSTYYA |
| | DSVKGRFTISRHNSKNTLFLQMNSLRVEDTAVYYCARGPVRGVITHFDYWGQGTLVTVSSAST |
| HCBG7-1 | ATGVHSQVQLVESGGGVVRPGRSLRLSCAASGFTFSTYGMHWVRQAPGKGLEWVAIISYDGNNKY |
| | YTDSVKGRFTISRDNSKNMVYLQMNSLRAEDTAVYYCVKSSSGWYLRLGYWGRGTLVTVSSAST |
| HCBG7-2 | ATGVHSEVQLVESGGGLIQAGGSLRLSCTASGFSVSGNYMNWVRQAPGQGLEWVSVIYTDDTTYYP |
| | DSVKGRFTISRDNSKNTLYLQMNSLRAEDTAVYYCAREGRRGQWSWFDPWGQGTLVTVSSAST |
| HCBG7-3 | ATGVHSEVQLVESGGGLIQPGGSLRLSCTASTFTVSSNYMSWVRQAPGKGLEWVSVIYTGGSTYYA |
| | DSVKGRFTISRDNSKNTLYLQVNSLRAEDTAVYYCAGSPVRGVITHFDYWGQGTLVTVSSAST |
| HCBG7-4 | ATGVHSQVQLQESGPGLVKPSETLSLTCIVSGGSVSSSSYYWSWIRQPPGKGLEWIGYVDYSGSTNY |
| | NPSLKSRVTMSVDTSKNQFSLRLSSVTAADTAMYYCARVDRRYCIITSCYIFDYWGQGTLVTVSSAS |
| | T |
| HCBG7-5 | ATGVHSQVQLVESGGGVVQPGRSLRLSCAASGFTFSSYAMNWVRQAPGKGLEWVAVISYDGGNKY |
| | YADSVKGRFTISRDNSKNTLYLQMNSLRAEDTAVYYCARGRDGYYYGMDVWGQGTTVTVSSAST |
| HCBG7-6 | ATGVHSQVQLVQSGAEVKKPGASVKVSCKASGYTFTGYSIHWVRQAPGQGLEWMGWINPYTGDTS |
| | YVQKFQGCVTMTRDTSISTAYMELSRLTSDDTAVYYCARAPPFSSSSIGVDYWGQGTLVTVSSAST |
| HCBG7-7 | ATGVHSQVQLVQSGAEVKKPGASVKVSCKASGYSFSDYYLQWVRQAPGQGLEWMGWINPKSGGT |
| | HYAQKFQGRVTVTRDTSISTTYMELSSLRSDDTAVYYCAKDHCATTNCFEYLYFGMGVWGQGTTV |
| | TVSSAST |
| HCBG7-9 | ATGVHSQVQLQESGPKQVKPSETLSLTCTVSGASMSSYYWFWLRQPAGKGLEWIGRIYSGGSTNYN |
| | PSFKSRVTMSVDTSKNQFFLELSSVTAADTAVYYCARDLTYYGSNGYTNWGQGTLVTVSSAST |
| HCBG7-10 | ATGVHSEVQLVESGGGLIHPGGSLRLSCAASGFTVTSNYMSWVRQAPGKGLEWVSVIYSGGSTYYA |
| | DSVKGRFTISRDNSKNTLYLQMNSLRAEDTAVYYCASSPVRGVITQFDYWGQGTLVTVSSAST |
| HCBG7-11 | ATGVHSEVQLVQSGAEVKKPGESLKISCKGSGYTFTNYWIAWVRQMPGKGLEWMGAIYPGDSDTR |
| | YSPSFQGQVTISADKSISTAYLQWSSLKASDTAMYFCARHDGSKVTTNDYWGQGTLVTVSSAST |
| HCBG7-12 | ATGVHSQVQLVESGGGVVQPGRSLRLSCAASGFTFSIYAMHWVRQAPGKGLEWVAVISYDGSNKY |
| | YADSVKGRFTISRDNSKNTLYLQMNSLRVEDTAVYYCARDRSGSYYRPGYWGQGTLVTVSSAST |
| HCBG7-13 | ATGVHSQVQLVESGGGVVQPGRSLRLSCAASGFTFSSYGMHWVRQAPGKGLEWVAVISYDGNNKY |
| | YADSVKGRFTISRDNSKNTLYLQMNSLRPEDTAVYYCAQTGGSYFGPFDYWGQGTLVTVSSAST |
| HCBG7-14 | ATGVHSEVQLVESGGGLVQPGRSLRLSCAASGFTFEDYAMHWVRQTPGKGLEWVSGISWNGGIIGY |
| | ADSVKGRFTISRDNAKNSLYLQMIRLRAEDTALYYCAKDILYGDYVGGFAYWGQGTLVTVSSAST |
| HCBG7-15 | ATGVHSQVQLVQSGAEVKKPGASVKVSCKASGYTFTSYAISWVRQAPGQGLEWMGWVSAYNGNT |
| | NYAQKLQGRVTMTTDTSTNTAYMELRSLRSDDTAIYYCAIPYSSVTFDCWGQGTLVTVSSAST |
| HCBG7-16 | ATGVHSEVQLVESGGGLVQPGGSLRLSCVASGFTVTNNFMNWIRQAPGMGLEWVAVVYPGGGSDY |
| | SDSVKGRFIISRDNSKNTVYLQMNSLRSEDTAIYYCARDSQPHYYYGVDVWGQGATVTVSSAST |
| HCBG7-17 | ATGVHSEVQLVQSGAEVKKPGESLKISCKVSGYRFTSYWIGWVRQMPGKGLEWMGMIYLSDSDSR |
| | VGPSFRGQVTISADKSISTAYLQWSSLKTSDSAVYYCAKKKDDRAEAVFDYWGQGTLVTVSSAST |
| HCBG7-18 | ATGVHSEVQLMESGGGLIQPGGSLRLSCAASGFIVSSNYMSWVRQAPGKGLEWVSVIYSGGGTDYA |
| | DSVKGRFTISRDNSKNTLFLQMNSLRAEDTAVYYCARGAAMVKELFDYWGQGTQVTVSSAST |
| HCBG7-19 | ATGVHSEVQLVESGGGLVQPGGGSLRLSCAASGFTFSTYWMSWVRQAPGKGLEWVANIKEDGSEK |
| | YYVDSVKGRVTISRDNAKNSLYLQMNSLRVEDTAVYYCARVRWLQGGIDYWGQGTLVTVSSAST |
| HCBG7-20 | ATGVHSQVQLVQSGAEVKKAGASVKVSCKASGYTFTSYDINWVRQASGQGLEWMGWMNPISGNT |
| | GYAQKFQGRVTMTRNTSITTAYMELSSLRSEDTAVYFCARGGRYCSSTTCYSGVGMDVWGQGTTV |
| | TVPSAST |
| HCBG10-1 | ATGVHSEVQLVESGGGLVQPGRSLRLSCAASGFTFDEYAMHWVRQAPGKGLEWVSGISWSSVSIAY |
| | ADSVKGRFTISRDKAKNSLYLQMNSLRAEDTALYYCAKSNSSGLTPFDHWGQGLLVTVSSAST |
| HCBG10-2 | ATGVHSQLQLQESGPGLVKPSETLSLTCTVSGGSISGSSYQWGWVRQPPGKGLAWIAGIHYSGSTYY |
| | NPSLKSRVTISVETSKNQFSLRLYSVTATDTSLYYCARRDGSYFDYWGQGALVTVSSAST |
| HCBG10-3 | ATGVHSQLQLQESGPGLVKPSETLSLTCTVSGDSMSSRSYYWGWIRQPPGKGLEWIGSIYYSGDTYY |
| | DPSLKSRVTISVDTSKIQFTLNLSSVTAADTAVYYCARHVSDGQSIGWLYYFDCWGQGTLVTVSSAS |
| | T |
| HCBG10-4 | ATGVHSQVQLQESGPGFVKPSQTLSLTCTVSGGSLSSGGYYWTWIRQHPGKGLEWIGYISSSGSTFYN |
| | PSLKSRITISIDTSENQFSLKVSSVTAADTAVYYCARLAPFGERRVDQYYLMDVWGQGTTVTVSSAST |
| HCBG10-5 | ATGVHSQVQLQESGPGLVRPSGTLSLTCGVSGGSISSNNWWSWVRQPPGKGLEWIGEIHYSGGTNY |
| | NPSLKSRVTISLDRSTNQFSLRLTSVTAADTAVYYCARAYYYYYMDVWAEGTTVTVASAST |
| HCBG10-6 | ATGVHSQVQLQESGPGLVKPSETLSLTCTVSGGSISSTSYYWSWVRQPPGKGLEWIGYIYYSGNTNY |
| | NPSLKSRVTMSVDTSKNQFSLKLSSVTAADTAVYYCARADRGYCTITDCFIFNYWGQGTLVTVSSAS |
| | T |
| HCBG10-7 | ATGVHSEVQLVESGGGLVQPGESLRLSCTASAFSVNTYDMYWVRQPTGKGLEWVSTIRVTGDTYYP |
| | DSVKGRFTISRESATNSLYLQMNSLRAGDTAIYYCTRGAHYDFWRGYYTDDHHYMDVWGKGTTVT |
| | VSSAST |
| HCBG10-8 | ATGVHSQMELVESGGGLVKPGGSLRLSCASSGFSLGDYYMTWIRQAPGKGLEWVSYISRSDGKTFY |
| | ADSVKGRFTLSTDDGKKSLYLQMNSLRAEDTAVYYCVRGEGGPHDAFDIWGQGTMVTVSSAST |
| HCBG10-9 | ATGVHSEVQLVESGGGLVQPGGSLRLSCAASGFTFRNYWMSWVRQAPGKGLEWVANIKQDGSEKY |
| | YVDSVKGRFTISRDNAKNSLYLQMNSLRAEDTAVYYCVRCGYDDWYFDVWGRGTLVTVSSAST |
| HCBG10-10 | ATGVHSQVQLVQSGAEVKKPGASVKVSCKASGYIFTNYDINWVRQATGQGLEWMGWMNPNSGNA |
| | GYAQKFQGRVTMTRNTSITTAYMELSSLRSEDTAVYYCGRGPTTAKSGVEWFDPWGQGTLVTVSSA |
| | ST |
| HCBG10-11 | ATGVHSEVQLEESGGGLVQPGRSLRLSCVASGFSFDDYAVHWVRQAPGKGLEWVSGINWNSDSTD |
| | YADSVEGRFTISRDNAKKSVYLQMRSLRAEDSALYYCAKDMGWNVFQGLDVWGQGTTVTVSSAST |
| HCBG10-12 | ATGVHSQVQLVQSGAEVKKPGASVKVSCMASGFSFTSFVISWVRQAPGQGLEWMGWISAYNGNTD |
| | YAQKFQGRVTMTTDTSTSTAYMELRSLRSDDTAIYYCARSWSAYYNWFDPWGQGTLVTVSSAST |
| HCBG10-13 | ATGVHSEVQLVESGGDLVKPGGSLRLSCTVSRFTFKNAWMSWVRQAPGKGLEWVGRIKSKADGGT |
| | TDYAAPVRTRFTISRDDSKNTLYLQMNSLTSEDTAVYYCTTDRHVRGTYWGAYYYYGMDVWGQG |
| | TTVTVSSAST |
| HCBG10-14 | ATGVHSEVQLVESGGGLVQPGGSLRLSCAASGFTFSSYWMHWVRQAPGKGLVWVSRINNDGSSTS |
| | YADSVKGRFTISRDNAKNTLYLQMNSLRAEDTAVYYCARAVRISSGYGLYGDSDYFDYWGQGTLV |
| | TVSSAST |
| HCBG10-15 | ATGVHSEVQLVESGGGSVQPGGSLRLSCAASGFTFSPYSMTWVRQAPGKGLEWVSYISSSSSTIHYA |
| | ESVKGRFTISRDNARDSLYLQMNSLKDEDTAVYYCARARGDAFDIWGQGTMVTVSSAST |
| HCBG10-16 | ATGVHSEVQLVQSGAEVKKPGESLRISCKGFGYYFPSYWIAWVRQMPGKGLEWMGIIYPGDSGTRY |
| | SPSFRGQVTISADRSISTAYLQWSSLKASDTAIYYCARPLFYCSGGSCLTGYWGQGTLVTVSSAST |
| HCBG10-17 | ATGVHSEVQLVESGGGLVQPGGSLRLSCAASGFTFSSYCMHWVRQAPGKGLVWVSRIKSDGSGTTY |
| | ADSVQGRFTISRDNAKNALFLQMNSLRAEDTAVYYCARGRRDGNDLAPDYWGQGTLVTVSSAST |
| HCBG10-18 | ATGVHSQVQLVESGGGVVQPGRSLRLSCAASGFPFIISGMHWVRQAPGKGLEWVAVLSFDGSNEYY |
| | ADSVKGRFTISRDNSKNTLYLQIDSLGPEDTAVYYCVKDLGAYASGRLADWGQGTLVTVSSAST |
| HCBG10-19 | ATGVHSEVQLVQSGAEVKKPGESLKISCKGSGYSFTSYWIGWVRQMPGKGLEWMGVIYPGDSDTRY |
| | SPSFQGQVTISADKSISTAYLQWSSLKASDTAMYYCARTQWGYNYGSHFFYMDVWGKGTTVTVSS |
| | AST |
| KCBG1-1 | TGVHSEIVLTQSPGTLSLSPGEGTTLSCRASQSVSSSYLAWYQQKPGQAPRLLIYGASGRATGIPDRFS |
| | GSGSGTDFTLTISRLEPEDFAVYYCQQSESSPYTFGQGTKLEIKRT |
| KCBG1-4 | TGVHSDIQMTQSPSTMSASVGDRVTITCRASQSISNWLAWYQQKPGKAPNLLIYKASSLESGVPSRFS |
| | GSGSGTEFTLTISSLQPDDFATYYCQQYNTYSPITFGQGTRLEIKRT |
| KCBG1-5 | TGVHSDIQMTQSPSTLSASVGDRVTITCRASQNINSRLAWYQQKSGKAPKPLIYKASSLESGVPSRFS |
| | GGGSGTEFTLTISSLQPDDFATYYCQQYNSYSSITFGQGTRLEIKRT |
| KCBG1-6 | TGVHSDIQMTQSPSSLSASVGDRVTITCRASQNIRRYLNWYQQKPGNAPKLLIYAASSLQSGVPSRFS |
| | GSGSGTDFTLTISSLQPDDFATYSCQQSYSTPRTFGQGTKVEIKRT |
| KCBG1-7 | TGVHSEIVLTQSPGTLSLSPGERAALSCRASLPISARYLAWYQQKPGQTPRLLIYGASSRATGIPDRFS |
| | GSGSGTDFTLTISRLDPEDFAVYYCQHYGSSPPLTFGGGTKVEIKRT |
| KCBG1-8 | TGVHSEIVLTQSPATLSLSPGERATLSCRASQSVSSYLAWYQQKPGQAPRLLIYDASNRATGIPARFSG |
| | SGSGTDFTLTISSLEPEDFAVYYCQQRSNWPPWTFGQGTKVEIKRT |
| KCBG1-10 | TGVHSDIQLTQSPSFLSASVGDRVTITCRASQGISSYLAWYQQKPGKAPKLLIYAASTLQSGVPSRFSG |
| | SGSGTEFTLTISSLQPEDFATYYCQQLDTYPRFGGGTKVDIQRT |
| KCBG1-11 | TGVHSEIVLTQSPGTLSLSPGERATLSCRASQSVNSRFLAWYQQKPGQAPRLLIYAASSRATGIPDRFS |
| | GSGSGTDFTLTISSLQPDDFATYYCQQYNSYSTFGQGTKVEIKRT |
| KCBG1-12 | TGVHGDIVMTQSPLSLPVTPGEPASISCRSSQSLLHSNGYNYLDWYLQKPGQSPQLLIYLGSNRASGV |
| | PDRFSGSGSGTDFTLKISRVEAEDVGVYYCMQALQTPLTFGPGTKVDIKRT |
| KCBG1-13 | TGVHSDIVMTQSPDSLAVSLGERATISCKSSQSVSYTSNNKSYLAWYQQKAGQPPKLLIYWASTRES |
| | GVPDRFSGSGSGTDFSLTISSLQAEDVAVYYCQQYHNTPWTFGQGTKVEIKRT |
| KCBG1-14 | TGVHSDIQLTQSPSFLSASVGDRVTITCRASQGISSYLAWYQQKPGKAPKLLIYAASTLQSGVPSRFSG |
| | SGSGTEFTLTIRSLQPEDFATYYCQQLNSYPPYTFGQGTKLEIKRT |
| KCBG1-15 | TGVHSDIQMTQSPSTLSASVGDRVTITCRASQSISSWLAWYQQKPGKAPKLLINRASSLESGVPSRFSG |
| | SGSGTEFTLTISSLQPDDFATYYCQQYSSYPTFGQGTKVEIKRT |
| KCBG1-16 | TGVHSDIQMTQSPSSLSASVGDRVTITCRASQGIGNYLAWFQQKPGKAPKSLIYVASSLQSGVPSKFS |
| | GSGSGTDFILSISSLQPEDFATYYCQHYNAYPITFGQGTRLEIKRTV |
| KCBG1-19 | TGVHGDVVLTQTPLSLSVTPGQPASISCKSNQSLLHSDGKTYLYWYFQRPGQPPQLLIYEVSNPFSGV |
| | PYRFSGSGSGTDFTLKISRVEAEDVGVYYCMQTIHLPRVTFGQGTRLDIKRT |
| KCBG1-20 | TGVHSEIVLTQSPGTLSLSPGERATLSCRASQSVTGNFLSWYQQKPGQAPRLLIYGASSRATGIPDRFS |
| | GSGSGTDFTLTISRLEPEDFAVYYCQHYGSSRRTFGQGTKVEIKRT |
| KCBG1-23 | TGVHSDIQMTQSPSSLSASVGDRVTITCQASQDISNYLNWYQQKPGKAPKLLIYDASNLQIGVPSRFS |
| | GSGSGTDFTFTISSLQPEDIATYYCQQYDNLPQTFGGGTKVEIKRT |
| KCBG1-24 | TGVHSEIVLTQSPGTLSLSPGERATLSCRASQSVGSGYLAWYQQRPGQAPRLLIYGASSRATGIPDRFS |
| | GSGSGTDFTLTISRLEPEDFAVYYCQQYAGSPRTFGQGTRLEIKRT |
| KCBG1-25 | TGVHSDIQLTQSPSFLSASVGDRVTITCRASQGISSYLAWYQQKPGKAPKLLIYAASTLQSGVPSRFSG |
| | SGSGTEFTLTISSLQPEDFATYYCQQLNSSPPKLTFGGGTKVEIKRT |
| KCBG1-27 | TGVHSDIQMTQSPSSLSASVGDRVTITCRASQSMSTYLNWYQQKAEKAPKLLIYAASSLQSGVPSRFS |
| | GSGSGTDFTLTISSLQPEDFATYYCQQSYSMPYTFGQGTKLEVKRT |
| KCBG1-28 | TGVHSDIQMTQSPSSLSASVGDRVTITCRASQSISGYLNWYQHKAGKAPKLLIYAASSLQSGVPSRFS |
| | GSGSGTDFTLTISSLQPEDFATYYCQQSYSTPVFGQGTKLEIKRT |
| KCBG4-1 | TGVHSDIQMTQSPSSLSASVGDRVTITCQASQDISNYLNWYQQKPGKAPKLLIYDASNLETGVPSRFS |
| | GSGSGTDFTFTISSLQPEDIATYYCQQYDYLPLTFGGGTKVEIKRT |
| KCBG4-2 | TGVHSEIVLTQSPGTLSLSPGERATLSCRASQSVSSSYFAWYQQRPGQAPRLLIYGASSRATGIPDRFS |
| | GSGSGTDFTLTISRLEPEDFAVYYCQQYGSSLTFGGGTKVEIKRT |
| KCBG4-6 | TGVHSDIVMTQSPDSLAVSLGERATINCKSSQSVLYSSNNKNYLAWYQQKPGQPPKLLIYWASTRES |
| | GVPDRFSGSGSGTDFTLTISRLQAEDVAVYYCQQYFSTPPSTFGGGTKVEIKRT |
| KCBG4-7 | TGVHGDIVMTQSPLSLPVTPGEPASISCRSSQSLLHSNGYNYLDWYLQKPGQSPQLLIYLGSNRASGV |
| | PDRFSGSGSGTDFTLKISRVEAEDVGVYYCMQALQTPYTFGQGTKLEIKRT |
| KCBG4-9 | TGVHSDIVLTQSPDSLGVSLGERATINCRATETVLYSPHNRNYLAWYQQKAGQPPKLLFYWATTREN |
| | GVPDRFSATGSATDFTLTVNSLQAEDVAVYYCHQYYLVPFTFGPGTRVDIKRT |
| KCBG4-11 | TGVHSDIVMTQSPDSLAVSLGERATINCKSSQSVLYSSNNKNYLGWYQQKPGQPPKLLIYWASTRES |
| | GVPDRFSGSGSGTDFTLTISSLQAEDVAVYYCQQYYTTPLTFGGGTKVEIKRT |
| KCBG4-15 | TGVHSEIVLTQSPGTLSLSPGERATLSCRASQSVSTIYLAWYQQKPGQAPRLLIYAASSRATGIPDRFS |
| | GSGSGTDFTLTISRLEPEDFAVYYCQQYGSSPWTFGQGTKVEIKRT |
| KCBG4-17 | TGVHSEIVLTQSPGTLSLSPGERATLSCRASQSISSTYLAWYQQKLGQAPRLLMYGASSRATGIPDRFS |
| | GSGSGSDFTLTISRLEPEDFAVYFCQQYGSSPGTFGQGTKLEIKRT |
| KCBG4-19 | TGVHSEIVMTQSPAALSVSPGERATLSCRASQSVTSNLAWYQQKPGQAPRLLIYGASTRATGIPARFS |
| | GSGSGTEFTLTISSLQSEDFAVYYCQQFNNWPRGTFGQGTKVEVKRT |
| KCBG4-20 | TGVHGDIVMTQSPLSLPVTPGEPASISCRSSQSLLHSNGYNYLDWYLQKPGQSPQLLIYLGSDRAFGV |
| | PDRFSGSGSGTDFTLKISRVEAEDVGVYYCMQALQTPVTFGGGTKVEIKRT |
| KCBG4-23 | TGVHSEIVMTQSPATLSVSPGERATLSCRASQSVSSNLAWYQQKPGQAPRLLIYGASTRATGIPARFS |
| | GSGSGTEFTLTISSLQSEDFAVYYCQQYNNWPPGLKITFGQGTRLEIKRT |
| KCBG4-24 | TGVHSDIQLTQSPAFLSASVGDRVTITCRASQGISSYLAWYQQRPGKAPKLLIYAASTLQSGVPSRFSG |
| | SGSGTEFTLTISSLQPEDFATYYCQQLNSSPGSLTFGGGTKVEIKRT |
| KCBG4-25 | TGVHSEIVLTQSPGTLSLSPGERATLSCRASQSVPSSYLAWYQQKPGQAPRLLIYGASSRATGIPDRFS |
| | GSGSGTDFTLTISRLEPEDFAVYYCQQYGSPMYTFGQGTKLEIKRT |
| KCBG4-26 | TGVHSDIQMTQSPSSLSASVGDRVTITCQASQDISNYLNWYQQKPGKAPKLLIFDASNSETGVPSRFS |
| | GSGSGTDFTFTISSLQPEDIATYYCQQYDNLPPTFGQGTKLQIKRT |
| KCBG7-1 | ATGVHGDIVMTQSPLSLPVTPGEPASISCRSSQSLLQSNGYNYLDWYLQKPGQSPQLLIYLGSNRASG |
| | VPDRFSGSGSGTDFTLKISRVEADDVGVYYCMQALQTPTFGGGTKVEIKRT |
| KCBG7-2 | ATGVHSEIVLTQSPGTLSLSPGERATLSCRASQSVSSTYLAWYQQKPGQAPSLLIYGASHRATGIPDRF |
| | SGSGSGTDFTLTISRLEPEDFAVYYCQQFGSSPLYTFGQGTKLEIKRT |
| KCBG7-4 | ATGVHSDIVMTQSPDSLAVSLGERATINCKSSLSVLYSSNNKNYLAWYQQKPGQPPKLLIYWASTRE |
| | SGVPDRFSGSGSGTDFTLTISGLQAEDVAVYYCQQYYSTPITFGQGTRLEIKRT |
| KCBG7-5 | ATGVHSDIQLTQSPSFLSASVGDRVTITCRASQGINSYLAWYQQKPGKAPKLLIYAASTLQSGVPSRFS |
| | GSGSGTEFTLTISSLQPEDFATYYCQQLNSLFTFGPGTKVDIKRT |
| KCBG7-6 | ATGVHSDIQMTQSPSSLSASVGDRVTITCRASQAISNYLAWFQQKPGKAPKSLIYAASSLQSGVPSKF |
| | SGSGSGTDFTLTISSLQPEDFATYYCQQYNSYPLTFGGGTKVEIKRT |
| KCBG7-7 | ATGVHGDIVVTQSPLSLPVAPGEPASISCRSSQSLLHSNGYNYLDWYLQKPGQSPQLLIYLGSNRASG |
| | VPDRFSGSGSGTDFTLKISRVEAEDVGIYYCMQSLQTRTFGQGTKVEIKRT |
| KCBG7-9 | ATGVHSDIQMTQSPSTLSASVGDRVTITCRASQSISRWLAWYQQTPGKAPKLLIYKASSLESGVPSRF |
| | SGSGSGTEFTLTISSLQPDDFATYYCQQYNTYFWTFGQGTKVEVKRT |
| KCBG7-11 | ATGVHSEIVLTQSPATLSLSPGERATLSCRASQSVPTYLAWYQQKPGQAPRLLIYDASNRATGVPARF |
| | SGSGSGTDFTLTISSLEPEDFAVYYCQQRRDWPGTFGQGTKLEIKRT |
| KCBG7-12 | ATGVHSDIQMTQSPSSLSASVGDRVTITCQASQDISNYLNWYQQKPGKAPKLLIYDASNLETGVPSRF |
| | SGSGSGTDFTFTISSLQPEDIATYYCQQYGNLPPLTFGQGTRLEIKRT |
| KCBG7-15 | ATGVHSEIVLTQSPGTLSLSPGERATLSCRASQSVSGTFLAWYQQKPGQAPRLLISGASSRATGIPDRF |
| | SGSGSGTDFTLTISRLEPEDFAVYYCQQYGSSRPTFGQGTKLEIKRT |
| KCBG7-18 | ATGVHSDIVMTQSPDSLAVSLGERATINCKSSQSVLYSSNNKNYLAWYQQKPGQPPKLLIYWASTRE |
| | SGVPDRFSGSGSGTDFTLTITSLQAEDVAVYYCQQYYSTPLTFGPGTKVDIKRT |
| KCBG10-1 | ATGVHSDIQMTQSPSSLSASVGDRVTITCRASHSISDYLNWYQQKPGKAPKLLIYAASSLQSGVPSRF |
| | SGSGSGTDFTLTISSLQPKDFATYYCQQSYSNPFTFGPGTKVDIKRT |
| KCBG10-4 | ATGVHGDIVMTQTPLSLSVTPGQPASFSCRSSESLLYSDGKTYLHWYLRKPGQPPQLLIYEVSKRFSG |
| | VPDRFSGSGSGTDFTLKISRVEAEDVGVYYCMQSTQLPWTFGQGTKVEIQRT |
| KCBG10-6 | ATGVHSDIVMTQSPDSLAVSLGDRATINCKSSQNLLFSSNNKNYLAWYQQKPGQPPKLLIYWASTRE |
| | SGVPDRFSGSGSGTDFTLTITSLQAEDVAVYYCQQYYSTPLTFGGGTKVEIKRT |
| KCBG10-12 | ATGVHSEIVLTQSPGTLSLSPGERATLSCRASQSVSSIYLAWYQQKPGQAPRLLIYGASSRATGIPDRF |
| | SGSGSGTDFTLTISRLEPEDFAVYYCQHYGSSPPVTFGQGTKLEIKRT |
| KCBG10-18 | ATGVHSDIQMTQTPSSLSASVGDRVSITCRASQNIHTFLIWYLQRPGKAPNFLIYAASSLQSGVPSRFS |
| | GSGSETDFTLTISSLQPEDFGTYYCQQSYTTPYTFGQGTKLEIKRT |
| LCBG1-3 | TGSWAQSVLTQPPSASGTPGQRVTISCSGSSSNIGSNYVYWYQQLPGTAPKLLIYRNNQRPSGVPDRF |
| | SGSKSGTSASLAISGLRSEDEADYYCAAWDDSLSGVVFGGGTKLTVLGQPKAAPSVTLFPPS |
| LCBG1-9 | TGSWANFMLTQPHSVSDSPGRTVTISCTRSSGDIASSYVQWYQQRPGSVPTTVIHENSERPSGVPDRF |
| | SGSIDTSSNSASLTISGLQTEDEAVYYCQSYDSGRQGVFGGGTKLTVLGQPKAAPSVTLFPPS |
| LCBG1-17 | TGSWAQSVLTQSPSASGTPGQRVTISCSGSSSNIGGNTVNWYQQLPGTAPKLLIYSNNQRPSGVPDRF |
| | SGSKSGTSASLAISGLQSEDEADYYCASWDDSVNGVFGGGTKLTVLGQPKAAPSVTLFPPS |
| LCBG1-18 | TGSWAQSALTQPASVSGSPGQSITISCTGTSSDVGGYNYVSWYQQHPGKAPKVMIYDVRNRPSGVSN |
| | RFSGSKSGNTASLTISGLQAEDEADYYCSSYTSSSTWVFGGGTKLTVLGQPKAAPSVTLFPPS |
| LCBG1-21 | TGSWAQSALTQPASVSGSPGQSITISCTGTSSDVGGYNYVSWYQQHPGKAPKLMIYEVSNRPSGVSN |
| | RFSGSKSGNTASLTISGLQAEDEADYYCSSYTSSITGVFGGGTKLTVLGQPKAAPSVTLFPPS |
| LCBG1-22 | TGSWAQSVLTQPPSVSGAPGQRVTISCTGSSSNIGAGYYVHWYQQHPGTAPKLLIYGNSNRPSGVPD |
| | RFSGSKSGTSASLAITGLQAEDEADYYCQSYDSRLSGWVFGGGTKLTVLGQPKAAPSVTLFPPS |
| LCBG1-26 | TGSWAQSVLTQPPSVSGAPGQRVTISCTGSSSNIGAGYDVHWYQQLPGTAPKLLIYGNNNRPSGVPD |
| | RFSGSKSGTSASLAITGLQAEDEADYYCQSYASSLSVHVVFGGGTKLTVLGQPKAAPSVTLFPPS |
| LCBG4-3 | TGSVTSFELTQPSSVSVSPGQTVTITCSGDVLEKKYVRWFQQRPGQAPILVIYKDTERPSRIPERFSGSS |
| | SGTTVSLIITGAQVEDEADYYCYSVADNMGVFGGGTKLTVLGQPKAAPSVTLFPPS |
| LCBG4-4 | TGSNSQAVVTQEPSLTVSPGGTVTLTCGSTTGAVTSGHYPYWFQQKPGQAPRTLIYDTNNKHSWTPA |
| | RFSGSLLGGKAALTLSGAQPEDEAEYYCLLSYSGAWVFGGGTKLTVLGQPKAAPSVTLFPPS |
| LCBG4-5 | TGSWAQSVLTQPPSASGTPGQRVTVSCSGSSSNILNNYVYWYQQLPGTAPKLLIYRNNQRPSGVPDR |
| | FSGSKSGTSASLAISGLRSEDEADYYCAAWDDSLFVVFGGGTKLTVLGQPKAAPSVTLFPPS |
| LCBG4-8 | TGSWAQSALTQPASVSGSPGQSITISCTGTSSDVGGYNYVSWYQQHPGKAPKLMIYDVSNRPSGVSN |
| | RFSGSKSGNTASLTISGLQAEDEADYYCSSYTRGNYVFGTGTKVTVLGQPKANPTVTLFPPS |
| LCBG4-10 | TGSWAQSALTQPASVSGSPGQSITISCTGTSDDVGGYNLVSWYQQHPSKAPKLMIYAANKRPSGVSN |
| | RFSGSKSGNTASLTISGLQAEDEAHYYCCSYATGSSVVFGGGTKLTVLGQPKAAPSVTLFPPS |
| LCBG4-12 | TGSWAQSVLTQPPSVSGAPGQRITISCTGSTSNIGAGYDVHWYQQLPGTAPKLLIYANSNRPSGVPDR |
| | FSGSKSGTSASLAITGLQAEDEADYYCQSYDSSLSAVWVFGTGTKVTVLRQPKANPTVTLFPPS |
| LCBG4-13 | TGSWAQSVLTQPPSASGTPGQRVTISCSGSNSNIGSNYVYWYQQLPGTAPKLLIYRNNQRPSGVPDRF |
| | SGSKSGTSASLAISGLRSEDEADYYCAAWDDSLSALVFGGGTKLTVLGQPKAAPSVTLFPPS |
| LCBG4-14 | TGSWAQSALTQPASVSGSPGQSITISCTGTSSDVGSYNLVSWYQHHPGKAPKLMIYEVSKRPSGVSNR |
| | FSGSKSGNTASLTISGLQAEDETDYYCCSYAGSSTLVFGGGTKLTVLGQPKAAPSVTLFPPS |
| LCBG4-16 | TGSWAQSALTQPASVSGSPGQSITISCTGTSSDVGGYNYVSWYQQHPGKAPKIMIYDVSNRPSGVSN |
| | RFSGSKSGNTASLTISGLQAEDEADYYCSSHTSSSSPHVVFGGGTKLTVLGQPKAAPSVTLFPPS |
| LCBG4-18 | TGSWAQSALTQPRSVSGSPGQSVTISCTGTSSDVGGYNYVSWYQQHPGKAPKLMIYDVSQRPSGVP |
| | DRFSGSKSGNTASLTISGLQAEDEADYYCCSYAGTYTVIFGGGTKLTVLGQPKAAPSVTLFPPS |
| LCBG4-21 | TGSNSQAVVTQEPSLTVSPGGTVTLTCGSSTGTVTSYHYAYWFQQKPGQVPRVLIYDTSDKPSWTPA |
| | RFSGFLLGDKAALTLSGAQPEDEADYYCLLSYSGVVVFGGGTKLTVLGQPRSAPSVTLFPPS |
| LCBG4-22 | TGSWAQSALTQPRSVSGSPGQSVTISCTGSSTDVGVYNYVSWYQQHPGNAPKLMIFDVSKRPSGVPD |
| | RFSGSKSGNTASLTISGLQAEDEADYYCCSYAGTYTPVVFGGGTKLTVLGQPKAAPSVTLFPPS |
| LCBG4-27 | TGSWAQSALTQPASVSGSPGQSITISCTGTSSDVGGYDFVSWYQQHPGKAPKLMIYDDINRPSGVSNR |
| | FSGSKSGNTASLTISGLQAEDEADYYCSSYTSSSTSSVFGGGTKLTVLGQPKAAPSVTLFPPS |
| LCBG7-3 | ATGSWAQSALTQPASVSGSPGQSITISCTGTSSDVGGYNYVSWYQQHPGKAPKLMIYDVSNRPSGVS |
| | NRFSGSKSGNTASLTISGLQAEDEADYYCSSYTSSSTQVFGGGTKLTVLGQPKAAPSVTLFPPS |
| LCBG7-10 | ATGSWAQSALTQPASVSGSPGQSITISCTGTSSDVGGYNYVSWYQQHPGKAPKLMIYDVSNRPSGVS |
| | NRFSGSKSGNTASLTISGLQAEDEADYYCSSYTSRSPWVFGGGTKLTVLGQPKAAPSVTLFPPS |
| LCBG7-13 | ATGSWAQSALTQPASVSGSPGQSITISCTGTSSDVGGYNYVSWYQQHPGKAPKLMIYEVSNRPSGVS |
| | SRFSGSKSGNTASLTISGLQAEDEADYYCYSYTTSSTPYVFGTGTKVTVLGQPKANPTVTLFPPS |
| LCBG7-14 | ATGSWAQSALTQPASVSGSPGQSITISCTGTSSDVGGYNYVSWYQQHPGKAPKLMIYDVSNRPSGVS |
| | NRFSGSKSGNTASLTISGLQAEDEADYYCSSYTTSSTLVFGTGTKVTVLGQPKANPTVTLFPPS |
| LCBG7-16 | ATGSWAQSGPTQPASVSGSPGQSITISCTGTSTDVGGYHYVSWHQQHPGEAPKLIIYEVSNRPSGVSH |
| | RFSGSKSGNTASLTISGLQAEDEADYYCSSYTKTRTLYVFGTGTMVTVLGQPKANPTVTLFPPS |
| LCBG7-17 | ATGSWAQSVLTQPPSASGTPGQRVTISCSGSSSNIGGNTVTWYRQLPGTAPKLLISTNNQRPSGVPDR |
| | FSGSKSGTSASLAISGLQSEDEADYYCATWDDSLNTYVFGTGTKVTVLGQPKANPTVTLFPPS |
| LCBG7-19 | ATGSWANFMLTQPRSVSESPGKTVTISCTRTSGSIAINYVQWYQQRPGSSPTTVIYEDSQRPSGVPDRF |
| | SGSIDSSSNSASLTISGLKTEDEADYYCQSYDSGSWVFGGGTKLTVLGQPKAAPSVTLFPPS |
| LCBG7-20 | ATGSWAQSVLTQPPSVSGAPGQRVTISCTGSSSNIGAGYDVHWYHQLPGTAPKFLIYGNSNRPSGVP |
| | DRFSGSKSGTSASLAITRLQAEDEADYYCQSYDSSLSGWVFGGGTKLTVLGQPKAAPSVTLFPPS |
| LCBG10-2 | ATGSVTSYELTQPPSVSVSPGQTATITCSGDKLGDQFVSWYRQRPGQSPVVVIYQDIKRPSGIPERFSG |
| | SNSGNRATLTIRGTQALDEADYYCQAGDSDTVLFGGGTQLTVLGQPKAAPSVTLFPPS |
| LCBG10-3 | ATGSVTSYVLTQPPSVSVAPGQTARISCGGDKIGSKNVHWYQQKPGQAPVLVVYDDSDRPSGIPERF |
| | SGSNSGNTATLTITRVEARDEADYYCQVWDRSSVFGTGTKVSVLGQPKANPTVTLFPPS |
| LCBG10-5 | ATGSWAQSLLTQPPSASGTPGQRVTISCSGGSSNIGSNSVCWYQQLPGTAPKLLIYRSNQRPSGVPDR |
| | FSGSKSGTSASLAISGLWSEDEADYYCSAWDDSLRGPVFGGGTKLTVLGQPKAAPSVTLFPPS |
| LCBG10-7 | ATGSWAQSVLTQPPSVSGAPGQRVTISCTGSTSNIGAGYDVHWYQQLPGTAPKLLIYANTNRPSGVP |
| | DRFSGSKSGTSASLAISGLQAEDEADYFCQSYDSRLSAWVFGGGTKLTVLGQPKAAPSVTLFPPS |
| LCBG10-8 | ATGSVTSYVLTQPPSVSVAPGQTARISCGGNNIESKTVHWYQQKPGQAPILVVYDDNDRPSGIPERFS |
| | GSNSGNTATLSISRAEAGDEADYYCQVWDSSRDLRVFGGGTKLSVLGQPKAAPSVTLFPPS |
| LCBG10-9 | ATGSVTSYELTQPPSVSVSPGQTASITCSVDKLGNKYVCWYQQKPGQSPVLVIYQDSKRPSGIPERFS |
| | GSNSGNTATLTISGTQAMDEADYYCQAWDSSTGVFGGGTKLTVLGQPKAAPSVTLFPPS |
| LCBG10-10 | ATGSWAQSVLTQPPSVSGAPGQRVTISCTGSSSDIGAGYNVHWYQQLPGTAPKLLIYGNNNRPSGVP |
| | DRFSGSKSGASASLAISGLQAEDEADYYCQSFDSSLSGFYVFGTGTKVTVLGQPKANPTVTLFPPS |
| LCBG10-11 | ATGSWAQSALTQPASVSGSPGQSITISCTGTTSDVGGYNYVSWYQQHPGKAPKLMIFEVSNRPSGVS |
| | DRFSGSKSGNTASLTISGLQAEDEADYYCTSYRSSSLQGVFGTGTKVTVLGQPKANPTVTLFPPS |
| LCBG10-13 | ATGSWAQSVLTQPPSASGTPGQRVTISCSGSSSNIGSNTVNWYQQLPGTAPKLLIYTNNQRPSGVPDR |
| | FSGSKSGTSASLAISGLQSEDEADYYCAAWDDSLNGLYVFGTGTKVTVLGQPKANPTVTLFPPS |
| LCBG10-14 | ATGSVTSYVLTQPPSVSVAPGQTARITCGGNNIGSKSVHWYQQKPGQAPVLVVYDDSDRPSGIPERFS |
| | GSNSGNTATLTISRVEAGDEADYYCQVWDSSSDPWVFGGGTKVTVLGQPKAAPSVTLFPPS |
| LCBG10-15 | ATGSWAQSVLTQPPSVSAAPGQKVTISCSGNSSNIGNNYVSWYHQLPGTAPKLLIYDNNKRPSGIPDR |
| | FSGSKSGTSATLGITGLQTGDEADYYCGTWDNSLSVGVFGGGTKLTVLGQPKAAPSVTLFPPS |
| LCBG10-16 | ATGSWAQSALTQPPSASGSPGQSVTISCTGTSSDIGAYNYVSWYQQHPDKAPKLMIYEVNNRPSGVS |
| | DRFSGSKSGNTASLTVSGLQAEDEADYYCSSYAGSDNWVFGGGTKLAVLGQPKAAPSVTLFPPS |
| LCBG10-17 | ATGSVTSYALTQPPSVSVSPGQTARITCSGDALPRRYAYWYQQKSGQAPVLVIYEDTKRPSGIPERFS |
| | GSSSGTMATLTISGAQVEDEADYYCYSTDSSDNHRVFGGGTKLTVLGQPKAAPSVTLFPPS |
| LCBG10-19 | ATGSWAQSVLTQPPSASGTPGQRVTISCSGSSSNIGSDHVYWYQQLPGTAPKLFIYRNNQRPSGVPDR |
| | FSGSKSGTSASLAISGLRSEDEADYYCAAWDASLSGYVFGTGTKVTVLGQPKANPTVTLFPPS |

[0148] Antibodies isolated from SARS-COV-2 S- and RBD-binding B cells are typically non-polyreactive. Polyreactivity is a feature of antibodies that is selected against in several checkpoints throughout B cell development (Wardemann et al., 2003), but can be generated during affinity maturation (Tiller et al., 2007). Antibody responses to HIV-1 envelope trimer, for example, display elevated levels of polyreactivity, which was suggested to be a means to increase antibody avidity in the setting of a low density of envelope spikes on the HIV surface (Mouquet et al., 2010) and to allow for better binding to divergent HIV-1 envelope strains (Prigent et al., 2018). At the same time, polyreactivity negatively affects the half-life and therefore clinical utility of monoclonal antibodies when considered for clinical use in humans (Horwitz et al., 2013; Shingai et al., 2014).

[0149] To assess if antibodies isolated from SARS-COV-2 S- and RBD-binding B cells have an increased frequency of polyreactivity, Applicants tested all 92 isolated antibodies for binding to dsDNA, insulin, bacterial lipopolysaccharide (LPS) and streptavidin-APC by ELISA (Wardemann et al., 2003). Applicants included streptavidin-APC as an antigen to additionally assess any potential off-target binding of B cells to the reagent used to stain the baits used in cell sorting (Methods). 11 of 92 (12%) of all antibodies and 6 of 56 (11%) intermediate or strong binders to SARS-COV-2 S or RBD showed reactivity against two or more of the four polyyreactivity antigens in ELISA (FIG. 9E and Table 3), significantly less than polyreactivity frequencies detected in healthy memory B cells (22.7%, (Tiller et al., 2007)) or HIV-specific B cells (75% (Mouquet et al., 2010)). In addition, Applicants tested all 92 antibodies in an ELISA assay developed to screen for off-target antibody binding against baculovirus lysate in the presence of bovine serum albumin (BSA) (Hotzel et al., 2012) (Methods). None of the antibodies were found to be reactive against baculovirus lysate in this assay (Table 3). Applicants conclude that most antibodies isolated from SARS-COV-2 S- and RBD-binding B cells are not polyreactive when expressed as IgG1 and that intermediate or strong binding to the SARS-COV-2 surface trimer does not require polyreactivity.

[0150] Neutralizing antibodies against SARS-COV-2 mostly arise from IgG+ B cells and target the RBD. Applicants next screened all 92 antibodies for neutralizing activity in the pseudotyped virus neutralization assay used on the serum samples (Robbiani et al., 2020; Schmidt et al., 2020) (above and Methods). 27 of 92 antibodies (29%) showed neutralizing activity when tested up to a concentration of at least 25 μg/ml, and neutralizing antibodies were identified from all 4 selected subjects (FIG. 9F and Table 2). IC50 values ranged from 3 ng/ml to 25 μg/ml with a median of 99 ng/ml (FIG. 9F and Table 2). Neutralizers showed at least intermediate binding in ELISA to both SARS-COV-2 S trimer and RBD, with the exception of one antibody, BG4-14, a weak neutralizer with binding by ELISA only to RBD (Tables 2 and 3).

[0151] Neutralizing activity was detected for 21 of 42 antibodies (50%) selected from IgG cells compared with 4 of 35 (11%) from IgM/D cells and 2 of 15 (13%) from IgA cells (×2=15.9, P value 0.0004) (FIG. 9G and Table 2). To evaluate if these 27 neutralizers were similarly potent against authentic SARS-COV-2 virus compared with pseudovirus, Applicants tested their activities in a neutralization assay against authentic SARS-COV-2 and found the results between both SARS-COV-2 neutralization assays to be comparable (correlation coefficient (r) for comparison between IC₅₀ values 0.701, P value <0.0001) (FIG. 2B, FIG. 9H and Table 2). Applicants conclude that neutralizing antibodies targeting the RBD of SARS-COV-2 were present in all four selected subjects, mostly arise from IgG⁺ B cells, and are active against both a pseudotyped virus and against authentic SARS-COV-2. See, also, FIGS. 17-20.

[0152] Select antibodies retain potent neutralizing activity against circulating variants B.1.1.7 and B.1.351. Several circulating variants of SARS-COV-2, including B.1.1.7 and B.1.351 (Tegally et al., 2020) show decreased sensitivity to some SARS-COV-2 monoclonal antibodies, polyclonal sera from recovered COVID-19 patients (Wibmer et al., 2021) and sera from individuals who have received SARS-COV-2 mRNA vaccines (Wang et al., 2021) (Wu et al., 2021) (Liu et al., 2021). To test if the antibodies described herein retain neutralizing activity against B.1.1.7 and B.1.351 Applicants produced pseudotyped SARS-COV-2 viruses carrying the reported spike mutations in these variants ((Davies et al., 2021) (Tegally et al., 2020) and Methods) and tested antibodies BG10-19, BG1-22, BG4-25 and BG7-15 in a pseudovirus neutralization assay (FIGS. 2E and 9I). All three antibodies neutralized B.1.1.7 with similar potency as WT (D614G) and both BG10-19 and BG7-15 retained neutralization potency against B.1.351 whereas both BG1-22 and BG4-25 showed a 15-fold increase in IC50 values against this variant respectively (FIGS. 2E and 9I). Applicants conclude that BG10-19 and BG7-15 retain potent neutralizing activity against the recently identified circulating variants B.1.1.7 and B.1.351.

[0153] Antibody BG10-19 potently neutralizes both SARS-COV-2 and SARS-COV. Antibodies that target conserved epitopes among different betacoronaviruses are the subject of intense investigation given their potential utility in future coronavirus outbreaks. A small set of antibodies that were isolated from SARS-COV-infected individuals have been shown to cross-react with SARS-COV-2 (Pinto et al., 2020a) and vice versa (Robbiani et al., 2020).

[0154] To evaluate potential cross-reactivity of the antibodies to other coronaviruses, Applicants tested all 92 neutralizing antibodies for binding to SARS-COV and MERS-COV spike (S) protein and RBD in ELISA (FIG. 2C, 2F and Table 3). Two SARS-COV-2 non-neutralizing antibodies showed strong cross binding to MERS (BG4-23 and BG1-13), one of which (BG4-23) also showed strong cross binding to SARS-COV (Table 3). Three SARS-COV-2 neutralizers (BG1-28, BG10-14, BG10-19) showed strong cross-binding to SARS-COV (Table 3), and BG10-19 also showed weak binding to MERS S (FIG. 2C). Applicants next tested if any of the SARS-COV-2 neutralizers that cross-bind SARS-COV also show neutralizing activity against SARS-COV using a pseudovirus neutralization assay. BG10-19 neutralized SARS-COV potently with an IC50 value of 3 ng/ml compared with 20 ng/ml for antibody S309, a cross neutralizing antibody that was originally isolated from a SARS-COV patient (FIG. 2D, 2G) (Pinto et al., 2020a). BG10-19 also neutralized SARS-COV-2 more potently than S309 with an IC₅₀ of 9 ng/ml compared to 79 ng/ml (Table 2 and (Pinto et al., 2020a)). BG1-28 and BG10-14 did not neutralize SARS-COV and neither did a selection of SARS-COV-2 neutralizers that showed intermediate cross binding to SARS-COV in ELISA (FIG. 2D, 2G and Table 3).

[0155] IgA dimerization increases neutralization of SARS-COV-2. Secreted IgA and IgM antibodies can, if expressed with J chain, multimerize and therefore increase overall antibody avidity depending on the density and accessibility of the antigen binding sites (Klein and Bjorkman, 2010). Consistent with this, some IgA dimers of SARS-COV-2 neutralizing antibodies show increased neutralizing potency when compared to their monomeric versions (Wang et al., 2020b). To test the effect of dimerization on neutralizing activity in our antibodies Applicants expressed and purified 13/15 antibodies which were derived from IgA+ B cells (Tables 2 and 3) as IgA monomers and dimers (FIG. 9J, K) and tested them for neutralization of SARS-COV-2 in a pseudotyped neutralization assay. Both antibodies that showed neutralizing activity against SARS-COV-2 when expressed as IgG1 (BG1-23 and BG1-26, Tables 2 and 3) showed similar neutralization potency when expressed as IgA monomers. In dimeric form, their neutralizing activity increased with molar neuralization ratios (MNRs) (Klein and Bjorkman, 2010) of 6 and 8 respectively suggesting an added avidity effect through dimerization (FIGS. 9L, M). 6 of the remaining 11 antibodies that had not shown any neutralizing activity when expressed as IgG1 neutralized SARS-COV-2 either weakly only as dimeric IgA (BG10-5) or both as IgA monomer and dimer with IC50 values ranging from 26 ng/ml (dimeric BG10-8) to 6.5 μg/ml (dimeric BG1-15) (FIGS. 9L, M). MNRs>2 were observed for weakly neutralizing IgA dimer BG1-27 (MNR=3) and potently neutralizing IgA dimer BG10-8 (MNR=10.86) suggesting that in these cases dimerization leads to increased overall avidity of the antibody (Klein and Bjorkman, 2010) (FIGS. 9L, M). Applicants conclude that expression as IgA can increase the neutralizing activity of some SARS-COV-2 antibodies against SARS-COV-2 pseudovirus and that in some cases dimerization can further increase potency by increasing overall antibody avidity.

[0156] A cryo-electron microscopy structure of a complex between the SARS-COV-2 S trimer and the Fab fragment of cross-neutralizing antibody BG10-19. To understand the mechanism of potent BG10-19-mediated neutralization of both SARS-COV-2 and SARS-COV, Applicants determined a 3.3 Å single-particle cryo-electron microscopy (cryo-EM) structure of a complex between a soluble, stabilized SARS-COV-2 S (Hsieh et al., 2020) and the BG10-19 Fab (FIG. 3, FIG. 10 and Table 5).

[0157] The BG10-19-S structure revealed S trimers adopting a closed conformation bound to three BG10-19 Fab fragments (FIGS. 3A and 10A-C). BG10-19 recognizes a quaternary epitope comprising distinct regions from all three protomers, including interactions that bridge two neighboring RBDs and the N165_{NTD}-glycan (FIG. 3B). Specifically, BG10-19 uses five of its six complementarity-determining region (CDR) loops to interact with a proteoglycan epitope focused atop the RBD α1 (residues 338-347) and α2 (residues 364-374) helices, with additional contacts with residues 436-450 (FIG. 3C-G). The CDRH2 and CDRH3 loops mediate the majority of RBD contacts (˜760 Å² of ˜1090 Å² total paratope buried surface area (BSA)), establishing extensive hydrogen bonding and van der Waals interactions with RBD residues (FIG. 3E, G). The N343_{RBD}-glycan (modeled as a complex-type pentasaccharide) at the base of the al helix interfaces with both CDRH3 and CDRL2 loops, including contacts with the core fucose moiety in a manner similar to the cross-reactive SARS-COV monoclonal antibody S309 (FIG. 3F) (Pinto et al., 2020a). The CDRH2 and CDRH3 loops mediate the majority of RBD contacts (˜760 Å² of ˜1090 Å² total paratope buried surface area (BSA)), establishing extensive hydrogen bonding and van der Waals interactions with RBD residues (FIG. 3E,F). Collectively, interactions mediated by CDRH1-3 and CDRL2 loops establish the primary epitope recognized by BG10-19, which does not overlap with the ACE2 receptor-binding motif (RBM) (FIG. 10) and accounts for 87% of BSA on the S trimer (˜925 Å² of peptide BSA and ˜220 Å² glycan BSA).

[0158] However, unlike the binding mode of S309, BG10-19 adopts a pose that positions the light chain CDRL1 loop and FWR3 atop the neighboring “down” RBD to lock the S trimer into a closed conformation (FIG. 3A-D and FIG. 10C). This binding orientation is distinct from previously-described neutralizing antibodies that utilize interactions of long CDRH3s to mediate bridging interactions to stabilize the S trimer in a closed, prefusion conformation state (Barnes et al., 2020a; Tortorici, 2020). Additional BG10-19 interactions on the neighboring RBD involve residues 490-498 (FIG. 3D), which overlap with the ACE2 RBM and contribute ˜150 Å² BSA to the total quaternary epitope. Such interactions prevent sampling of the “up” RBD conformation to expose the ACE2 RBM, thus blocking the SARS-COV-2 S 6P trimer binding to immobilized sACE2-CH3 (Tada et al., 2020) in SPR experiments (FIG. 3H). These data suggest that BG10-19 utilizes a neutralization mechanism that inhibits exposure of the ACE2 RBM.

[0159] Furthermore, sequence conservation at the BG10-19 epitope explains the potent cross-neutralizing activity against SARS-COV (FIG. 2D, G). The primary binding site for BG10-19 comprises 23 of 29 residues strictly or conservatively substituted between SARS-COV-2 and SARS-COV RBDs (FIG. 10E). Given the highly conserved nature of the BG10-19 epitope, Applicants further characterized the potential of BG10-19 to cross-react with heterologous sarbecoviruses. Bat coronavirus strains WIV1-CoV and SCH014-CoV belong to the clade 1 family of sarbecoviruses and are ACE2-tropic (Li et al., 2003). When Applicants assessed BG10-19 cross-reactivity to these viruses, Applicants observed the binding to WIV1-COV RBD at the same levels as SARS-COV-2 and SARS-COV, but no neutralizing activity (FIG. 10G-J). The lack of neutralizing activity against WIV1-CoV was surprising, given its 95% amino acid sequence identity with SARS-COV (Cohen et al., 2020; Pinto et al., 2020a). Interestingly, key sequence differences occur at RBD positions 346, 439, 440, and 445, and mutations at these positions have been shown to provide immune escape against class 3 anti-SARS-COV-2 neutralizing antibodies and polyclonal sera (Thomson et al., 2020; Weisblum et al., 2020). For example, substitutions at RBD residue R346 have the potential to disrupt cation-pi and hydrogen bond interactions at the antibody-antigen interface (FIGS. 3E, F and 10D). Overall, the findings suggest that the SARS-CoV-2 trimer-specific antibody response includes rare antibodies such as BG10-19 with highly potent cross-neutralizing activity against SARS-COV. See, also, FIGS. 24-26.

[0160] SARS-COV-2 S- and RBD-binding B cell repertoires include different B cell populations. To characterize the transcriptional properties SARS-COV2 and RBD-binding B cells, Applicants performed scRNA-seq paired with VDJ sequencing of B cell populations sorted from the 14 convalescent subjects. These B cells were selected based on expression of CD20, CD19 and SARS-COV-2 S or RBD binding alone without selection for other surface markers or immunoglobulin isotype expression (Methods and above). Applicants profiled 6,113 sorted B cells, revealing 6 distinct transcriptional cell clusters (TCs) (FIGS. 4A, B) that had representation from all donors, though with enrichment of some donors in specific clusters. (FIG. 11A and see below). These clusters were neither dependent on binding to SARS-COV-2 S or RBD (FIG. 11B) nor on cell cycle phase (FIG. 11C). As expected, CD44 and CXCR4 were abundantly expressed throughout all TCs, consistent with their frequent expression among mature B cells (FIG. 11D) (Kremmidiotis and Zola, 1995; Nagasawa et al., 1996; Nie et al., 2004). CD38 expression levels were low throughout all clusters, in keeping with a low frequency of antibody-secreting cells which was expected as B cells were selected based on binding of surface immunoglobulin to SARS-COV-2 S or RBD (Ellebedy et al., 2016) (FIG. 11D). The cell clusters were distinguished by increased expression of specific marker genes (FIG. 4A), such as genes associated with different B cell populations, including naïve and memory B cells, consistent with isotype, mutation status and clonal expansion features of these cells. Specifically, the TC1 marker genes FCER2 (CD23) and TCL1A are known to be highly expressed in mature naïve B cells (FIG. 4A, Table 4) (Horns et al., 2020), consistent with an enrichment in TC1 of IgD and IgM B cells (36% and 63% of cells, respectively, FIG. 11E) with low levels of inferred somatic mutations (FIG. 11F) and minimal clonal expansion (FIG. 11G, H). In TC3 and TC4, CD27 and CD80, both expressed in memory B cells (Moroney et al., 2020; Zuccarino-Catania et al., 2014) were highly expressed (FIG. 12A), and the majority of cells in these clusters were IgG1+(53% and 73% of cells, respectively, FIG. 11E), somatically mutated (FIG. 11F) and more clonally expanded than cells in TC1 (FIG. 11G, H). Cells in TC3 and TC4 are also highly expressed CXCR3, a chemokine receptor found on some class switched B cells that is believed to facilitate migration to sites of inflammation (Moroney et al., 2020; Muehlinghaus et al., 2005) and CD70, which is upregulated on stimulated B cells where its interaction with CD27 on effector T cells plays an important role in antiviral T cell responses (Izawa et al., 2017; van Gisbergen et al., 2011) (FIG. 4A and FIG. 12A).

[0161] In the weeks following vaccination or infection with influenza or infection with Ebola, antigen specific B cells can present as antibody secreting cells, memory B cells or “activated B cells” (ABCs), which wane after several weeks and show relatively higher expression levels of CD52, TLR10, CD19 and CD20 (Ellebedy et al., 2016). To test if either TC3 or TC4 include ABCs, Applicants examined the distribution of expression levels in each cell cluster of CD52, TLR10, CD19 and CD20 and 10 other genes that are expressed at higher levels in ABCs compared to memory B cells (FIG. 12A) (Ellebedy et al., 2016). All 14 genes were significantly higher expressed (one-tailed t-test, FDR<0.01) in TC4 than in TC3 (FIG. 12A). Thus, SARS-COV-2 S- and RBD-binding B cell repertoires in recently recovered subjects include ABCs (TC4) and memory B cells (TC3) that are both mostly IgG1⁺, show expansion of B cell clones and somatic hypermutation. Applicants also detected IgD⁺ and IgM⁺ mature naïve B cells (TC1) with low levels of somatic hypermutation, minimal clonal expansion and high expression of CD23 and TCLA1.

TABLE 4
Transcriptome cluster marker genes (related to FIG. 4 and FIG. 11).
For each of the 6 transcriptome clusters the top 30 genes that are
differentially upregulated are displayed. Genes are included only
if their minimum log fold change is greater than 0.25 with a
false discovery rate (FDR) < 0.05. Columns show the gene
name, transcriptome cluster, average log fold change
(avg_logFC) and BH adjusted P values (p_val_adj)
respectively.

| gene | cluster | avg_logFC | p_val_adj |
|---|---|---|---|
| EMP3 | 0 | 0.742674 | 7.4E−231 |
| CIB1 | 0 | 0.704189 | 5.3E−174 |
| LITAF | 0 | 0.696586 | 1.1E−144 |
| LGALS1 | 0 | 0.648787 | 6.46E−87 |
| RHOB | 0 | 0.591643 | 1.06E−85 |
| COTL1 | 0 | 0.586451 | 4.6E−187 |
| SRGN | 0 | 0.570442 | 3.11E−24 |
| PSAP | 0 | 0.528844 | 6.22E−96 |
| YWHAH | 0 | 0.52012 | 1.77E−44 |
| TNFRSF1B | 0 | 0.51046 | 6.22E−57 |
| ITM2C | 0 | 0.509568 | 1.57E−77 |
| IFITM2 | 0 | 0.450464 | 9.91E−88 |
| FCRLA | 0 | 0.444861 | 1.77E−91 |
| SYK | 0 | 0.436202 | 1.16E−85 |
| THEMIS2 | 0 | 0.40288 | 1.43E−83 |
| VOPP1 | 0 | 0.401409 | 6.67E−78 |
| CNFN | 0 | 0.387881 | 2.94E−19 |
| S100A6 | 0 | 0.38559 | 1.87E−38 |
| CBLB | 0 | 0.384918 | 1.32E−81 |
| RGS2 | 0 | 0.381306 | 1.48E−47 |
| GPR183 | 0 | 0.380305 | 2.76E−66 |
| NEAT1 | 0 | 0.379959 | 4.52E−59 |
| KLK1 | 0 | 0.373715 | 5.25E−20 |
| LY6E | 0 | 0.368067 | 7.06E−75 |
| MAP1LC3B | 0 | 0.363525 | 4.22E−38 |
| CLECL1 | 0 | 0.359972 | 4.62E−21 |
| ARL4C | 0 | 0.359298 | 8.06E−19 |
| FCGR2B | 0 | 0.359257 | 1.82E−75 |
| ENC1 | 0 | 0.357722 | 2.84E−59 |
| MYADM | 1 | 1.243403 | 2.3E−225 |
| TCL1A | 1 | 1.225935 | 3.7E−199 |
| IGLL5 | 1 | 1.046009 | 2.42E−69 |
| TUBA1A | 1 | 1.03559 | 2.7E−164 |
| BACH2 | 1 | 0.901778 | 1E−144 |
| CXCR4 | 1 | 0.864938 | 8.9E−189 |
| FCER2 | 1 | 0.827531 | 8.04E−86 |
| CA5B | 1 | 0.783617 | 9.16E−76 |
| FOS | 1 | 0.762213 | 1.7E−99 |
| YBX3 | 1 | 0.73925 | 4.63E−44 |
| TAGAP | 1 | 0.705204 | 4.6E−109 |
| TSC22D3 | 1 | 0.700201 | 2.2E−176 |
| TXNIP | 1 | 0.684033 | 5.7E−154 |
| IQGAP1 | 1 | 0.68283 | 8.19E−82 |
| ITM2B | 1 | 0.682475 | 1.7E−113 |
| IL4R | 1 | 0.673833 | 1.02E−36 |
| CFAP20 | 1 | 0.669236 | 6.18E−48 |
| PIK3IP1 | 1 | 0.666655 | 5.62E−36 |
| APLP2 | 1 | 0.602008 | 3.22E−48 |
| DUSP1 | 1 | 0.601203 | 6.7E−111 |
| ARL4A | 1 | 0.57224 | 7.76E−46 |
| FOXP1 | 1 | 0.559891 | 1.4E−105 |
| SNX9 | 1 | 0.550919 | 2.06E−56 |
| FAM129C | 1 | 0.54711 | 2.8E−55 |
| KLF3 | 1 | 0.541581 | 2.6E−32 |
| SNX29 | 1 | 0.530698 | 5.2E−35 |
| JUN | 1 | 0.514755 | 7.63E−56 |
| TMEM123 | 1 | 0.510121 | 3.92E−29 |
| H1FX | 1 | 0.507778 | 1.98E−11 |
| LINC00926 | 1 | 0.495411 | 2.6E−63 |
| LINC01857 | 2 | 0.89658 | 6.2E−141 |
| LY9 | 2 | 0.805187 | 1.06E−55 |
| ZNF331 | 2 | 0.793354 | 1.3E−112 |
| NR4A2 | 2 | 0.716041 | 8.47E−46 |
| ZFP36 | 2 | 0.683502 | 8.91E−92 |
| JUNB | 2 | 0.621796 | 5.86E−87 |
| CXCR4 | 2 | 0.61256 | 3.1E−119 |
| H3F3B | 2 | 0.5396 | 4.45E−84 |
| RGS2 | 2 | 0.48302 | 2.18E−31 |
| SELENOK | 2 | 0.449154 | 1.37E−49 |
| CD83 | 2 | 0.437254 | 1.85E−45 |
| SAT1 | 2 | 0.429319 | 2.81E−36 |
| BTG1 | 2 | 0.421039 | 6.36E−76 |
| EZR | 2 | 0.415967 | 7.78E−86 |
| IDI1 | 2 | 0.411112 | 1.24E−23 |
| HSPA5 | 2 | 0.401979 | 3.29E−29 |
| FTH1 | 2 | 0.397222 | 1.3E−58 |
| C7orf50 | 2 | 0.388294 | 6.36E−20 |
| ZFP36L2 | 2 | 0.376236 | 1.65E−23 |
| ATP6V0C | 2 | 0.36337 | 3.38E−34 |
| PTP4A1 | 2 | 0.356091 | 4.39E−16 |
| GPR183 | 2 | 0.350688 | 1.52E−24 |
| SELENOM | 2 | 0.347283 | 1.93E−07 |
| RPS3 | 2 | 0.334121 | 3.2E−182 |
| PDCD4 | 2 | 0.333819 | 2.22E−18 |
| PDE4B | 2 | 0.328615 | 8.84E−26 |
| DDIT4 | 2 | 0.328236 | 5.39E−06 |
| RPL3 | 2 | 0.325632 | 8.5E−151 |
| ZFAS1 | 2 | 0.322384 | 3.31E−41 |
| SNX9 | 2 | 0.322189 | 2.42E−32 |
| PDE4D | 3 | 0.617391 | 1.4E−74 |
| GRAMD1C | 3 | 0.5433 | 7.13E−80 |
| TMEM156 | 3 | 0.48219 | 2.27E−75 |
| NFKBIA | 3 | 0.404666 | 4.09E−61 |
| CXCR3 | 3 | 0.390844 | 1.47E−37 |
| CFLAR | 3 | 0.346347 | 7.76E−37 |
| PIM3 | 3 | 0.331141 | 5.81E−32 |
| TKT | 3 | 0.328569 | 3.22E−51 |
| CD70 | 3 | 0.315321 | 1.15E−18 |
| RHOF | 3 | 0.312104 | 2.01E−29 |
| MGAT4A | 3 | 0.304847 | 1.51E−26 |
| HOPX | 3 | 0.298667 | 3.67E−23 |
| CAPG | 3 | 0.296711 | 1.13E−45 |
| MARCKSL1 | 3 | 0.295157 | 1.35E−35 |
| S100A10 | 3 | 0.289821 | 7.32E−59 |
| CD80 | 3 | 0.285129 | 1.57E−19 |
| ZFP36L1 | 3 | 0.28247 | 3.44E−27 |
| COCH | 3 | 0.280678 | 1.25E−25 |
| HMGA1 | 3 | 0.279839 | 9.8E−37 |
| FAS | 3 | 0.27515 | 2.3E−11 |
| BASP1 | 3 | 0.27404 | 6.05E−23 |
| PAPSS1 | 3 | 0.261811 | 1.77E−19 |
| ITGB2-AS1 | 3 | 0.258236 | 4.33E−23 |
| LYPLAL1 | 3 | 0.258037 | 1.67E−18 |
| NME2 | 3 | 0.256528 | 7.04E−27 |
| MIF | 3 | 0.253228 | 2.95E−27 |
| LMNA | 3 | 0.252637 | 6.57E−15 |
| ACTG1 | 4 | 2.187489 | 0 |
| GAPDH | 4 | 1.415694 | 0 |
| S100A10 | 4 | 1.383357 | 7.2E−274 |
| ACTB | 4 | 1.243456 | 0 |
| TKT | 4 | 1.199748 | 2E−301 |
| PFN1 | 4 | 1.193543 | 0 |
| CORO1A | 4 | 1.132533 | 0 |
| HSPA8 | 4 | 1.082111 | 3.2E−263 |
| S100A4 | 4 | 1.056015 | 3.6E−181 |
| HMGA1 | 4 | 1.043888 | 1.8E−253 |
| CNN2 | 4 | 1.042658 | 3.6E−276 |
| SELL | 4 | 1.018083 | 5.4E−218 |
| TMSB10 | 4 | 0.991662 | 0 |
| ARPC1B | 4 | 0.991293 | 4.7E−219 |
| CLIC1 | 4 | 0.952471 | 6.8E−232 |
| RAC2 | 4 | 0.938414 | 1.2E−246 |
| ARHGDIB | 4 | 0.90303 | 1.3E−289 |
| SLC25A5 | 4 | 0.889603 | 6.1E−229 |
| VIM | 4 | 0.859558 | 7.6E−175 |
| PPP1R18 | 4 | 0.84057 | 1.9E−201 |
| PPP1CA | 4 | 0.833401 | 4E−215 |
| CAPZB | 4 | 0.814333 | 3.8E−206 |
| ANXA2 | 4 | 0.803902 | 2.7E−162 |
| CAPG | 4 | 0.793994 | 6.6E−194 |
| CFL1 | 4 | 0.778148 | 1.4E−279 |
| LDHB | 4 | 0.752417 | 7.2E−191 |
| LTB | 4 | 0.736497 | 1.6E−162 |
| TUBB | 4 | 0.725367 | 1E−110 |
| PPIA | 4 | 0.721525 | 1.9E−250 |
| LCP1 | 4 | 0.719491 | 1.6E−135 |
| PTPRC | 5 | 1.302366 | 3.5E−69 |
| MALAT1 | 5 | 1.155559 | 9.5E−118 |
| TMEM123 | 5 | 1.08055 | 0.000249 |
| B4GALT1 | 5 | 1.077235 | 3.42E−24 |
| NFKBID | 5 | 1.057845 | 7.32E−09 |
| CEMIP2 | 5 | 1.021713 | 2.23E−06 |
| LINC00926 | 5 | 1.016311 | 7.84E−33 |
| VPS13C | 5 | 1.015257 | 0.003396 |
| MTRNR2L12 | 5 | 1.012071 | 7.3E−48 |
| SMCHD1 | 5 | 1.00159 | 2.43E−26 |
| NSF | 5 | 0.997369 | 1.08E−09 |
| BACH1 | 5 | 0.983251 | 1.45E−12 |
| PARP14 | 5 | 0.975469 | 3.07E−05 |
| EML4 | 5 | 0.971648 | 1.41E−31 |
| CD69 | 5 | 0.967358 | 0.000444 |
| CASP8 | 5 | 0.954006 | 1.86E−11 |
| BTG2 | 5 | 0.953929 | 3.32E−09 |
| NCOA3 | 5 | 0.949408 | 7.56E−17 |
| SF1 | 5 | 0.949164 | 4.3E−55 |
| REL | 5 | 0.941262 | 1.26E−27 |
| MS4A1 | 5 | 0.940841 | 1.15E−49 |
| AKAP13 | 5 | 0.936896 | 3.65E−06 |
| TMEM131L | 5 | 0.931662 | 0.000402 |
| PRDM2 | 5 | 0.921625 | 7.83E−18 |
| PNN | 5 | 0.918618 | 6.3E−23 |
| STK4 | 5 | 0.914263 | 1.76E−21 |
| PELI1 | 5 | 0.90293 | 0.000183 |
| SRSF4 | 5 | 0.899508 | 2.23E−07 |

TABLE 5
Cryo-EM data collection and refinement statistics (related to FIGS. 3, 5, 6 and. FIGS. 10, 13, and 14).

| | BG10-19 Fab | BG1-22 Fab | BG7-15 Fab | BG7-20 Fab | BG1-24 Fab |
|---|---|---|---|---|---|
| | SARS-COV-2 S 6P | SARS-COV-2 S 6P | SARS-COV-2 S 6P | SARS-COV-2 S 6P | SARS-COV-2 S 6P |
| PDB | XXXX | XXXX | XXXX | XXXX | XXXX |
| EMD | xxxx | xxxx | xxxx | xxxx | xxxx |

Data collection conditions

| | | | | | |
|---|---|---|---|---|---|
| Microscope | Talos Arctica | Talos Artica | Talos Arctica | Talos Artica | Talos Artica |
| Camera | Gatan K3 Summit | Gatan K3 Summit | Gatan K3 Summit | Gatan K3 Summit | Gatan K3 Summit |
| Magnification | 45,000x | 45,000x | 45,000x | 45,000x | 45,000x |
| Voltage (kV) | 200 | 200 | 200 | 200 | 200 |
| Recording mode | counting | counting | counting | counting | counting |
| Dose rate (e⁻/pixel/s) | 13.5 | 13.3 | 13.8 | 13.8 | 13.3 |
| Electron dose (e⁻/Å²) | 60 | 60 | 60 | 60 | 60 |
| Defocus range (μm) | 0.7-2.0 | 0.7-2.0 | 0.7-2.0 | 0.7-2.0 | 0.7-2.0 |
| Pixel size (Å) | 0.8689 | 0.8689 | 0.8689 | 0.8689 | 0.8689 |
| Micrographs collected | 3,807 | 3,386 | 3,065 | 3,717 | 2,609 |
| Micrographs used | 2,860 | 2,720 | 2,464 | 2,830 | 2,060 |
| Total extracted particles | 856,326 | 756,649 | 791,968 | 809,834 | 556,346 |
| Refined particles | 162,522 | 188,436 | 209,924 | 230,863 | 105,245 |
| Particles in final refinement | 101,085 | 71,104 | 130,297 | 135,666 | 84,059 |
| Symmetry imposed | C3 | C3 | C1 | C1 | C1 |
| Nominal Resolution (Å) | | | | | |
| FSC 0.5 (unmasked/masked) | 7.5/3.7 | 7.6/4.1 | 7.8/4.0 | 8.0/4.3 | 8.3/4.5 |
| FSC 0.143 (unmasked/masked) | 4.4/3.3 | 5.9/3.7 | 5.2/3.7 | 6.7/3.8 | 6.7/4.0 |

Refinement and Validation

| | | | | | |
|---|---|---|---|---|---|
| Initial model used | 7K43 | 7K4N | 6XKL | 6XKL | 6XKL |
| Number of atoms | | | | | |
| Protein | 28,466 | 27,798 | 25,662 | 25,238 | 28,871 |
| Ligand | 715 | 873 | 837 | 675 | 779 |
| MapCC (global/local) | 0.81/0.79 | 0.80/0.75 | 0.74/0.73 | 0.79/0.76 | 0.86/0.81 |
| Map sharpening B-factor | 55.7 | 75.3 | 80.7 | 92.4 | 79.1 |
| R.m.s. deviations | | | | | |
| Bond lengths (Å) | 0.002 | 0.005 | 0.01 | 0.015 | 0.001 |
| Bond angles (°) | 0.6 | 0.89 | 0.92 | 0.73 | 0.9 |
| MolProbity score | 2.37 | 2.26 | 2.46 | 2.19 | 2.14 |
| Clashscore (all atom) | 19.7 | 14.8 | 18.1 | 19.24 | 15.2 |
| Poor rotamers (%) | 1.3 | 1.1 | 2.4 | 0.32 | 0 |
| Ramachandran plot | | | | | |
| Favored (%) | 94 | 89.9 | 93.7 | 96.63 | 92.9 |
| Allowed (%) | 5.6 | 10.1 | 6.3 | 3.24 | 6.5 |
| Disallowed (%) | 0.4 | 0 | 0 | 0.13 | 0.6 |

[0162] Memory B cells and activated B cells are enriched for cells that generate binding and neutralizing antibodies. To test if antibodies with high levels of binding to or neutralization of SARS-COV-2 were preferentially isolated from B cells in certain TCs, Applicants identified the clusters from which the 92 antibodies Applicants produced and tested are derived. Given that antibodies were selected for production and testing only based on representation of expanded clones (72/92) or randomly selected mostly IgG+ or IgA+ singlets (20/92) all transcriptional clusters are not equally represented among the 92 antibodies (Table 3). However, 20 of 33 (60%) neutralizers, 14 of 15 (94%) potent neutralizers (IC50≤0.1 μg/ml) and 5 of 10 (50%) non-neutralizing high binders were derived from cells in TCs 3 and 4 (FIGS. 4D and 9L, Tables 2 and 3), whereas 36 of 49 (73%) of the low binders belonged to TCs 0 and 2 (FIG. 4D and Table 3). The majority of neutralizers from TCs 3 and 4 were derived from singlets or small clones and did not have clonal members in other TCs among the cells Applicants sampled (FIG. 12D, Table 3). Applicants further tested the clusters for enrichment in class 1 neutralizers (VH3-53/VH3-66 antibodies with short CDRH3 regions (Barnes et al., 2020a) and see above). VH3-53/VH3-66 antibodies were overall significantly enriched in TC3 and TC4 compared to TCs 1, 2 and 5 (FIGS. 4E and 12B, two-tailed t-test, P<=0.0001), and all (8/9) VH3-53/VH3-66 neutralizing antibodies with CDRH3 regions shorter than 14 amino acids according to IMGT definition (Lefranc et al., 2015) were derived from B cells that belonged to either TC3 or TC4 (Tables 2 and 3). Note that the difference between TC3 and TC0 did not reach statistical significance. Applicants conclude that both strongly binding and neutralizing antibodies against SARS-COV-2 are frequently isolated from cells with a transcriptional profile consistent with memory B cells and ABCs.

[0163] Frequency of SARS-COV-2 S- and RBD-binding ABCs and memory B cells correlates with serum neutralizing activity. While memory B cells and antibody secreting plasma cells are two separate B cell compartments that are regulated differently (Leyendeckers et al., 1999), memory B cells and plasma cells can originate from the same germinal center reaction, memory B cells can become antibody secreting plasma cells upon antigen binding and stimulation (Victora and Nussenzweig, 2012) and antibodies derived from memory B cells against HIV have been detected in serum from matched patients using mass spectrometry (Scheid et al., 2009a). Whether the frequency of memory B cells among SARS-COV-2 S- and RBD-binding B cells correlates with plasma neutralizing activity in recently recovered subjects is not known. To test this, Applicants measured if the frequency of cells from any TC among SARS-COV-2 S- and RBD-binding B cells correlated with serum neutralization in the 14 study subjects and found that the frequency of only TC3 and TC4 cells correlated positively with serum neutralization against SARS-COV-2 in a pseudovirus assay (Pearson's r=0.64 and 0.66, P=0.013 and 0.011, respectively) (FIG. 12C) and this correlation was not significantly affected by correcting for time since COVID-19 diagnosis (Pearson's r=0.69 and 0.76, P=0.017 and 0.007, respectively). Applicants conclude that expansion of both SARS-COV-2 binding memory B cells and ABCs correlate with serum neutralization titers against SARS-COV-2 in convalescent COVID-19 patients.

[0164] VH3-53/VH3-66 antibodies with long CDRH3s can adapt class 1 antibody structural poses. Given the enrichment of VH3-53/VH3-66-encoded antibodies in TC3 and TC4 that correlated with strong binding and potent neutralization of SARS-COV-2, Applicants selected two antibodies which were coded by cells in these clusters with distinct CDRH3 lengths for structural characterization of their Fab fragments complexed with SARS-COV-2 RBD or stabilized S trimer. Applicants solved a 3.0 Å crystal structure of Fabs from BG4-25 (VH3-53-encoded with 12 aa CDRH3, IC₈₀=13 ng/ml) and the SARS-COV antibody CR3022 (Tian et al., 2020) in complex with SARS-COV-2 RBD (FIG. 13A and Table 6). Consistent with the binding mode of class 1 neutralizing antibodies (Barnes et al., 2020b; Yuan et al., 2020), BG4-25 recognizes a RBD epitope that overlaps with >90% of residues in the ACE2 RBM (FIG. 13B), which is only fully accessible with “up” RBD conformations. Two V-gene encoded regions in class 1 neutralizing antibodies prominently contribute to epitope recognition; the ³¹SNY³³ CDRH1 and ⁵³SGGS⁵⁶ CDRH2 sequence motifs, which take part in extensive hydrogen bond interactions at the RBD interface (Yuan et al., 2020; Tan et al., 2021; Wu et al., 2020b). Analysis of inferred somatic mutations in 93 VH3-53/VH3-66 antibodies coded in the collection of SARS-COV-2 binding B cells with CDRH3 less than 14 amino acids (IMGT definition; (Lefranc et al., 2015) revealed frequent inferred mutations in these motifs, including S31R and S56T in the antibody heavy chain positions 31 and 56, respectively, which are observed in BG4-25 (FIG. 13C-E). VH3-53/VH3-66-encoded antibodies from SARS-COV-2 binding B cells with short CDRH3s were also enriched for inferred mutations Y58F, F27L, and T28I, with the latter two mutations reported to increase neutralization potency in this class of antibodies (Hurlburt et al., 2020). Despite lacking these specific mutations, BG4-25 shows exceptional neutralizing activity, which is potentially explained by the F27I and S31R CDRH1 loop mutations that provide increased van der Waals interactions along the antibody-RBD interface (FIG. 13D, E).

[0165] In addition to the recurrent, class 1 neutralizing antibodies defined by VH3-53/VH3-66-encoded gene segments and short CDRH3s (e.g., BG4-25), a subset of VH3-53/VH3-66-encoded neutralizing antibodies have been described with CDRH3 lengths >15 amino acids which would seemingly be incompatible with the binding mode of the recurring class 1 antibodies. A 3.7 Å cryo-EM structure of BG1-22 (VH3-53-encoded with 21 aa CDRH3, IC₈₀=72 ng/ml, Table 2) Fab complexed with stabilized S trimers revealed binding of BG1-22 to “up” RBD conformations (FIGS. 5A and 13F-H). Surprisingly, the binding orientation of BG1-22 was consistent with class 1 antibody binding modes (FIG. 5B), which contrasts with previously-characterized VH3-53/VH3-66-long CDRH3 antibodies (Barnes et al., 2020a) (Wu et al., 2020a). To accommodate this binding mode, the 21-residue long CDRH3 of BG1-22 flips outward towards RBD residue Q493 resulting in a slight rotation of the antibody light chain relative to the canonical class 1 RBD-binding antibodies (FIG. 5C-E). The displaced CDRH3 conformation makes few sidechain interactions with the RBD, such that 6 residues of the CDRH3 loop are disordered (FIG. 5C, D).

[0166] Although unliganded Fab structures often exhibit a disordered CDRH3 (e.g., 1RZI, 1RZF), it is unusual for an antibody bound to an antigen to exhibit a disordered CDRH3. From an examination of 731 antibody-antigen structures with resolutions of 3.5 Å or better in the Structural Antibody Database (SABDab; (Dunbar et al., 2014)), Applicants found only 6 with missing residue numbers between heavy chain residues 95 to 107, implying a disordered CDRH3 (PDB Codes 3LH2, 4JDT, 7JWB, 5ANM, 4M8Q, 3LHP). None of these complexes involved conventional antibody-antigen pairs; instead, they were germline forms of antibodies, the epitope was presented in a scaffold, or only the VH domain was involved in binding. This suggests that the orientation adopted by BG1-22 is not one that promotes CDRH3-mediated interactions with the antigen, as is classically observed in antibody-antigen structures, but instead simply accommodates the longer CDRH3 length by displacing much of the loop to outside the antibody-antigen interface. Taken together, these results provide further insight into the recurring VH3-53/VH3-66 neutralizing antibody class and suggests that longer CDRH3s, while infrequent, are not a restriction to V-gene mediated interactions at the RBD interface for VH3-53/VH3-66 antibodies. See, also, FIGS. 16, 27, 29 and 30-33.

TABLE 6
X-ray crystallographic data collection and refinement
statistics (related to FIGS. 5 and 13).

| | |
|---|---|
| | BG4-25 - SARS2-RBD |
| PDB ID | (12-2, SSRL) |

Data collection^{a}

| Space group | P2₁2₁2₁ | |
|---|---|---|
| Unit cell (Å) | 56.0, 104.3, 268.8 | |
| α, β, γ (°) | 90, 90, 90 | |
| Wavelength (Å) | 1.0 | |
| Resolution (Å) | 38.8-3.0 | (3.16-3.0) |
| Unique Reflections | 31,903 | (4079) |
| Completeness (%) | 97.9 | (88.1) |
| Redundancy | 6.1 | (4.2) |
| CC_{1/2} (%) | 97.2 | (25.9) |
| <I/σI> | 4.0 | (0.7) |
| Mosaicity (°) | 0.23 | |
| R_{merge} (%) | 27.1 | (135.8) |
| Rₚᵢₘ (%) | 12.5 | (88.6) |

| | |
|---|---|
| Wilson B-factor | 60.9 |

Refinement and Validation

| Resolution (Å) | 38.8-3.0 |
|---|---|
| Number of atoms | |
| Protein | 8,183 |
| Ligand | 0 |
| Waters | 0 |
| R_{work}/R_{free} (%) | 22.8/27.6 |
| R.m.s. deviations | |
| Bond lengths (Å) | 0.01 |
| Bond angles (°) | 1.6 |
| MolProbity score | 1.89 |
| Clashscore (all atom) | 18.9 |
| Poor rotamers (%) | 0.9 |
| Ramachandran plot | |

| | |
|---|---|
| Favored (%) | 86.4 |
| Allowed (%) | 11.1 |
| Disallowed (%) | 0.7 |
| Average B-factor (Å) | 80.5 |

^{a}Numbers in parentheses correspond to the highest resolution shell

[0167] Structural characterization of neutralizing antibodies with distinct epitope recognition and mutational escape patterns. To further understand the specificity of RBD-targeting, Applicants determined cryo-EM structures of Fab-S complexes for three additional potently neutralizing antibodies: BG7-15 (VH1-18-encoded, 11 aa CDRH3, IC₈₀=92 ng/ml), BG7-20 (VH1-8-encoded, 20 aa CDRH3, IC₈₀=23 ng/ml) and BG1-24 (VH1-69-encoded, 16 aa CDRH3, IC₈₀=7 ng/ml), to resolutions of 3.7, 4.0, and 3.9 Å, respectively (FIGS. 6 and 14, Table 5). In all cases, Fabs were bound to either up or down RBD conformations, demonstrating recognition of antibody epitopes in either state. Analysis of the BG7-15-S structure revealed an antibody epitope focused on RBD residues 439-451, mainly mediated by contacts with CDRH3 and CDRL3 loops, which is non-overlapping with the ACE2 RBM (FIG. 6B-D). Overlay of BG7-15 and REGN-10987 (Hansen et al., 2020) showed a shared antibody footprint that binds outside the ACE2 RBM but would sterically hinder ACE2 receptor binding to RBD (FIG. 3H and FIG. 6E) while allowing binding of class 1 neutralizing antibodies (e.g., BG4-25, C102, REGN-10933).

[0168] Cryo-EM structures of BG7-20-S and BG1-24-S complexes revealed RBD-targeting similar to human neutralizing antibodies that belong to the class 2 binding mode (Barnes et al., 2020a). This class of SARS-COV-2 neutralizing antibodies is defined by potent neutralizers capable of recognizing up and down RBD conformations, an epitope that overlaps with the ACE2 RBM, has secondary interactions with neighboring “up” RBDs, and has the potential for intra-protomer avidity effects. Despite preferred VH gene usages yet to be established for class 2 antibodies (BG7-20 and BG1-24 are VH1-8 and VH1-69, respectively), BG7-20 and BG1-24 show a similar epitope focused along the RBD ridge that overlaps with residues involved in ACE2 binding and includes contacts with E484, F486, and Q493. The binding pose of BG1-24 promotes stabilization of the N165_{NTD} glycan, adding to the observation that class 2 antibodies can involve interprotomer glycan contacts (Cao et al., 2020a). Interestingly, the N-glycan interaction is mediated by a hydrophobic Met-Phe sequence at the tip of CDRH2, a common feature of VH1-69 antibodies (Chen et al., 2019). This feature has been attributed to facilitating broad neutralization by antibodies against influenza and Hepatitis C (Guthmiller et al., 2020) (Chen et al., 2019) and likely explains BG1-24's polyreactivity (FIG. 9E and Table 3).

[0169] With the use of monoclonal antibodies as therapeutic options for SARS-COV-2 infection, understanding possible RBD mutations selected under monoclonal antibody pressure and the frequency of SARS-COV-2 isolates harboring RBD mutations that confer immune escape is critical. While deep mutational scanning and in vitro selection experiments have facilitated the choice of therapeutic antibody cocktails, these experiments have also illustrated that single-point mutations are sufficient for viral escape (Greaney et al., 2020; Weisblum et al., 2020). Indeed, reports of the SARS-COV-2 spike variant N439K, which now accounts for 3-4% of global isolates, could potentially limit the use of REGN-10987 as a therapy in SARS-COV-2 infection (Barnes et al., 2020b).

[0170] To assess the effects of RBD substitutions, Applicants assayed ELISA binding and SARS-COV-2 pseudovirus neutralization for 6 of the 7 antibodies reported in this study against a panel of RBD point mutations by ELISA (FIG. 7A-P). Decreased binding and neutralization potency was observed for most antibodies when RBD substitutions occurred within the antibody epitope and were consistent with RBD substitutions known to decrease binding of antibodies in the same class (FIG. 7C-Q) (Barnes et al., 2020a; Greaney et al., 2020). Notable exceptions included BG7-15, which showed neutralizing activity against the RBD N439K mutant that confers escape against REGN-10987, and BG4-25, which neutralized the class 1 escape variant A475V (FIG. 7M, N). In general, decreased binding affinity correlated with RBD mutations that conferred viral escape in pseudotyped viral neutralization assays and were consistent with the observation that RBD mutations that affect antibodies from one class do not affect antibodies in a different RBD-targeting class (FIGS. 7C-H and K-P). Given that several potently neutralizing antibodies were non-competitive, Applicants assessed antibody cocktails for synergistic neutralization effects (IC50_{eff}>1) against SARS-COV-2 pseudovirus using a previously described synergistic model (West et al., 2010). Results suggest that only the BG10-19+ BG4-25 antibody combination demonstrated synergistic neutralizing activity (FIG. 7Q) with other pairs showing no synergistic effects, consistent with published results for similarly classed antibody pairs (Hansen et al., 2020).

[0171] Finally, given the broad binding and neutralization activity of BG10-19 against a panel of SARS-COV-2 RBD substitutions (FIG. 7J, K), Applicants utilized a rVSV/SARS-COV-2 chimeric virus to determine spike variants that escape neutralization BG10-19 ((Weisblum et al., 2020) Methods). Initial attempts at selection experiments for BG10-19 showed no viral escape variants, consistent with observations for potently neutralizing convalescent plasma, antibody cocktails, and some monoclonal antibodies (Weisblum et al., 2020). However, after several passages, plaque purified viruses harboring the G339R and L441P mutations showed partial escape from BG10-19 (FIG. 7R). Thus, Applicants conclude that BG10-19's SARS-COV-2/SARS-CoV cross neutralization and ability to tolerate single RBD mutations within its epitope makes it an attractive therapeutic candidate as Applicants observe increasing point mutations among different SARS-COV-2 isolates (FIG. 10D). See, also, FIGS. 22, 23 and 27.

[0172] Discussion Antibodies play an indispensable role in antiviral immune responses both through their ability to neutralize viruses via interactions with their Fabs (Corti and Lanzavecchia, 2013) and by engaging other components of the immune system through interactions with their Fc regions (Bournazos et al., 2020). Characteristic features of different viruses influence the dynamics of how antiviral B cell and antibody responses are generated. HIV-1, for example, constrains efficient antibody responses through narrow structural pathways to broad neutralization (Scheid et al., 2011) and by causing B cell exhaustion (Moir et al., 2008).

[0173] In this study, Applicants show from a comprehensive in-depth analysis of SARS-COV-2 binding B cells from convalescent individuals 4-8 weeks post SARS-COV-2 infection that the repertoire of SARS-COV-2 binding B cells includes clonally expanded memory B cells and ABCs, as well as mature naïve B cells that are mostly observed as singlets, IgM⁺ or IgD⁺ and non-mutated. Interestingly, Applicants found clonal cells to be present in TC0, which is enriched in IgM⁺ B cells with inferred somatic mutations and low expression of CD27. Despite showing clonal expansion and somatic mutations, antibodies produced from this cluster were mostly low binding and non-neutralizing. An important point to consider in this context is that the comparatively low affinity of these antibodies could potentially be overcome in vivo if expressed as pentamers in the presence of J chain, similar to the observation of increased neutralization of some IgA antibodies when expressed as dimers. Applicants speculate that this cluster might contain cells from an early extrafollicular B cell response as also observed in influenza infection (Lam and Baumgarth, 2019). On the other hand, high binding and potent neutralizing activity were mostly detected in antibodies isolated from ABCs and memory B cells that shared transcriptional phenotypes across different individuals.

[0174] Immunologic correlates for protection from SARS-COV-2 after vaccination or prior exposure are not yet defined, but studies of other respiratory viruses suggest that serum neutralization could play an important role in protective immunity against SARS-COV-2 (Kulkarni et al., 2018; Verschoor et al., 2015). Consistent with other SARS-COV-2 studies, Applicants did not detect any intra-donor correlation between serum neutralization and the potency of monoclonal antibodies (Robbiani et al., 2020), but Applicants found a strong correlation between serum neutralization and the relative size of the ABC and memory B cell populations. This underscores the close relationship between high affinity memory B cell responses and serum antibody activity in SARS-COV-2. It is important to investigate if a similar correlation exists in individuals who have been vaccinated against SARS-COV-2 in an effort to delineate different responses to SARS-CoV-2 vaccines. Given its limited size, entry into the memory B cell compartment is tightly regulated by selection for high affinity of the immunoglobulin receptor (Victora and Nussenzweig, 2012). If neutralizing activity can also be selected for in the germinal center reaction is not known. Applicants did not find that to be the case, as both non-neutralizing high binders and neutralizers were found in TC3 and TC4 which are consistent with post germinal center B cells. This highlights the importance of integrating antibody structural and functional information in antiviral vaccine design, as neutralization cannot be independently selected for in the immune response (Chen et al., 2018).

[0175] The structural analysis revealed new insights into commonalities and differences among RBD-specific monoclonal antibodies. For example, in common with potently neutralizing antibodies C144 (Barnes et al., 2020a) and S2M11 (Tortorici, 2020), BG10-19 bridges between adjacent RBDs to lock the S trimer into a closed, prefusion conformation. However, in contrast to most previously described antibodies, BG10-19 recognizes a conserved epitope within the RBD core that is accessible in up/down RBD conformations on the spike trimer of both SARS-COV-2 and SARS-COV (unlike the conserved, cryptic CR3022 epitope only accessible on up RBD conformations), which may allow design of immunogens that elicit cross-reactive protection against future emerging coronaviruses. BG10-19's unique binding/neutralization properties and resistance to all RBD mutations identified in circulating isolates with a frequency >0.01%, including those found within the B.1.1.7 and B.1.351 lineages, make this an ideal therapeutic candidate in the arsenal against SARS-COV-2.

[0176] Additionally, high-resolution structures of VH3-53/VH3-66-class antibodies provided further understanding of the rules that govern potent neutralization and viral escape from this recurring antibody class and showed that CDRH3 length may not be a limitation to VH gene segment-mediated interactions at the RBD interface. Collectively, these structures and insights into the cellular processes behind the induction of potent, cross-reactive, neutralizing antibodies will not only aid in the battle to control the current COVID-19 pandemic through the use of safe and effective antibody treatments but will also provide additional criteria for the evaluation of humoral immune responses elicited from candidate vaccines against emerging zoonotic viruses with pandemic potential.

### Example 2-SARS/COV2/MERS Cross Binding Antibodies

[0177] Applicants also identified antibodies that bind to SARS, COV2 and MERS (FIGS. 34-39 and Table 7). Applicants used Hash tags for cells specific to MERS, SARS and COV2 and sequenced the antibodies together (FIG. 34). When used as sorting bait all 6 proteins yielded differently expanded B cell clones (FIG. 35). There was considerable clonal overlap between B cells sorted with the 6 different proteins (FIG. 36). The majority of expanded clones were IgM+, but some expanded clones include class switched B cells (FIG. 37). Sorting with SARS/MERS/COV2 trimers selects for antibodies that bind outside of the RBD region of the spike protein (FIG. 38). Thus, the antibodies may be specific to non-mutated virus as most mutations occur in the RBD domain. Thus, the antibodies may be used for identifying immunogenic epitopes outside of the RBD domain. FIG. 39 shows staining with multiple coronavirus trimers for use in simultaneous staining.

TABLE 7
SARS/MERS/CoV2 Antibodies (SEQ ID NOS: 369-446).

| Iso- | VH | Heavy | CDR3 | Light | VK/VL | | CDR3 | | |
|---|---|---|---|---|---|---|---|---|---|
| type | Gene | Chain | Heavy Chain | Chain | Gene | | Light Chain | Virus | Name |
| IGHGI | IGHV4- | IGHJ6 | CARHWRDCSGGVC | IGL | IGLVI-40 | IGLJ2, | CQSYDGSL | MERS | LKA1 |
| | 59 | | QASQYSSMDVW | | | IGLJ3, | SESAVF | 2P | |
| | | | | | | IGLJ3 | | | |
| IGHGI | IGHV4- | IGHJ6 | CARHWRDCTGGVC | IGL | IGLVI-40 | IGLJ2, | CHSYDGSL | SARS | LKA2 |
| | 59 | | RASQYSSMDVW | | | IGLJ3, | SESAVF | 2P | |
| | | | | | | IGLJ3 | | | |
| IGHA2 | IGHV4- | IGHJ6 | CARHWRDCSGGVC | IGL | IGLVI-40 | IGLJ2, | CQSYDGSL | SARS | |
| | 59 | | RASQYSSMDVW | | | IGLJ3, | SESAVF | 2P | |
| | | | | | | IGLJ3 | | | |
| IGHA2 | IGHV4- | IGHJ6 | CARHWRDCSGGVC | IGL | IGLVI-40 | IGLJ2, | CQSYDGSL | SARS | |
| | 59 | | RASQYSSMDVW | | | IGLJ3, | SESAVF | 2P | |
| | | | | | | IGLJ3 | | | |
| IGHA1 | IGHV4- | IGHJ6 | CARHWRDCNRGVC | IGL | IGLVI-40 | IGLJ2, | CHSYDGTL | SARS | |
| | 59 | | RASQYSSMDVW | | | IGLJ3, | SESAVF | 2P | |
| | | | | | | IGLJ3 | | | |
| IGHGI | IGHV4- | IGHJ6 | CARHWRECSGGVC | IGL | IGLVI-40 | IGLJ2, | CQSYDGSL | SARS | |
| | 59 | | RASQYSSMDVW | | | IGLJ3, | SESAVF | 2P | |
| | | | | | | IGLJ3 | | | |
| IGHGI | IGHV4- | IGHJ6 | CARHWRDCNGGVC | IGL | IGLVI-40 | IGLJ2, | CQSYDGSL | SARS | |
| | 59 | | RASQYASMDVW | | | IGLJ3, | SESAVF | 2P | |
| | | | | | | IGLJ3 | | | |
| IGHGI | IGHV4- | IGHJ6 | CARHWRECSGGVC | IGL | IGLVI-40 | IGLJ2, | CQSYDGSL | SARS | |
| | 59 | | RTSQYSSMDVW | | | IGLJ3, | SESAVF | 2P | |
| | | | | | | IGLJ3 | | | |
| IGHGI | IGHV4- | IGHJ6 | CARHWRDCSGGVC | IGL | IGLVI-40 | IGLJ3 | CHSYDGSL | COVID | LKA3 |
| | 59 | | RASQYSAMDVW | | | | SESAVF | 2P | |
| IGHA1 | IGHV3- | IGHJ3 | CAHVRPLTGYHVGH | IGL | GLVI-51 | IGLJ2, | CGTWDTSL | MERS | LKA4 |
| | 30 | | DPFDIW | | | IGLJ3, | SIGVF | 2P | |
| | | | | | | IGLJ3 | | | |
| IGHA1 | IGHV3- | IGHJ3 | CAHVRPLTGYHVGH | IGL | IGLVI-51 | IGLJ2, | CGTWDTSL | MERS | |
| | 30 | | DPFDIW | | | IGLJ3, | RIGVF | 2P | |
| | | | | | | IGLJ3 | | | |
| IGHA1 | IGHV3- | IGHJ3 | CAHVRPLTGYHVGH | IGL | IGLVI-51 | IGLJ3 | CGTWDTSL | SARS | LKA5 |
| | 30 | | DPFDIW | | | | SIGVF | 2P | |
| IGHA1 | IGHV3- | IGHJ3 | CAHVRPLTGYHVGH | IGL | IGLVI-51 | IGLJ2, | CGTWDTSL | SARS | |
| | 30 | | DPFDIW | | | IGLJ3, | SAGVF | 2P | |
| | | | | | | IGLJ3 | | | |
| IGHA1 | IGHV3- | IGHJ3 | CAHVRPLTGYHVGR | IGL | IGLVI-51 | IGLJ2, | CGTWDTSL | SARS | |
| | 30 | | DPFDIW | | | IGLJ3, | SAGVF | 2P | |
| | | | | | | IGLJ3 | | | |
| IGHA1 | IGHV3- | IGHJ3 | CAHVRPLTGYHVGR | IGL | IGLV3-1 | IGLJ2, | CQAWNN | SARS | |
| | 30 | | DPFDVW | | | IGLJ3 | NNVVF | 2P | |
| IGHA1 | IGHV4- | IGHJ4 | CARGFDYW | IGK | IGKV3- | IGKJI | CQQYGNS | MERS | LKA6 |
| | 59 | | | | 20 | | PWTF | 2P | |
| IGHGI | IGHV4- | IGHJ4 | CARGFDYW | IGK | IGKV3- | IGKJI | CLQYGGSG | SARS | LKA7 |
| | 59 | | | | 20 | | WTF | 2P | |
| IGHGI | IGHV4- | IGHJ4 | CARGFDYW | IGK | IGKV3- | IGKJI | CQQYGSSP | SARS | |
| | 59 | | | | 20 | | WTF | 2P | |
| IGHG3 | IGHV4- | IGHJ4 | CARGFDYW | IGK | IGKV3- | IGKJI | CQQYGSSP | SARS | |
| | 59 | | | | 20 | | WTF | 2P | |
| IGHGI | IGHV4- | IGHJ4 | CARGFDYW | IGK | IGKV3- | IGKJI | CHQYGSSP | SARS | |
| | 59 | | | | 20 | | WTF | 2P | |
| IGHGI | IGHV4- | IGHJ3 | CARRIYGGDGFDIW | IGL | IGKV3- | IGLJI | CQVWHGT | SARS | LKA8 |
| | 59 | | | | 21 | | GDQYVF | 2P | |
| IGHGI | IGHV4- | IGHJ3 | CARRIYGGDGFDIW | IGL | IGKV3- | IGLJI | CQVWPGS | SARS | |
| | 59 | | | | 21 | | SDHYVF | 2P | |
| IGHGI | IGHV4- | IGHJ3 | CARRIYGGDGFDIW | IGL | IGKV3- | IGLJI | CQVWHGT | SARS | |
| | 59 | | | | 21 | | SDHYVF | 2P | |
| IGHA1 | IGHV3- | IGHJ6 | CARSRGGSYYYGM | IGK | IGKV1- | IGKJ2, | CQQSYSTL | SARS | LKA9 |
| | 30 | | DVW | | 39 | IGKJ2 | ETF | 2P | |
| IGHGI | IGHV3- | IGHJ6 | CARSRGGSYYYGM | IGK | IGKV1- | IGKJI | CQHYNSFS | SARS | |
| | 30 | | DVW | | 5 | | PTWTF | 2P | |
| IGHGI | IGHV3- | IGHJ6 | CARAAGGGYYYGM | IGL | IGLV2- | IGLJI | CCSYAGGY | SARS | LKA10 |
| | 30 | | DVW | | 23 | | VF | 2P | |
| IGHGI | IGHV3- | IGHJ6 | CARAAGGNYYYGM | IGK | IGKV1- | IGKJ4 | CQQSYGSP | SARS | |
| | 30 | | DVW | | 39 | | LTF | 2P | |
| IGHA1 | IGHV4- | IGHJ3 | CARSVAALTWELNK | IGK | IGKV3- | IGKJI | CQQYGSPT | COVID | LKA11 |
| | 59 | | LAFDVW | | 20 | | WTF | 2P | |
| IGHA1 | IGHV4- | IGHJ3 | CARSVAALTWELNK | IGK | IGKV3- | IGKJI | CQQYGSPT | COVID | |
| | 59 | | LAFDVW | | 20 | | WTF | RBD | |
| IGHA1 | IGHV1- | IGHJ4 | CAQTTPYDSSGYYRS | IGK | IGKV3- | IGKJ4 | CQQRTNW | MERS | LKA12 |
| | 69 | | YW | | 11 | | PPRLTF | 2P | |
| IGHA1 | IGHV1- | IGHJ4 | CAETTPYDSSGYYRS | IGK | IGKV3- | IGKJ4 | CQQRTNW | SARS | LKA13 |
| | 69 | | YW | | 11 | | PPRLTF | 2P | |
| IGHGI | IGHVS- | IGHJ4 | CARWEAGGTSPLDY | IGK | IGKVI-5 | IGKJ2 | CQRYNSYS | SARS | LKA14 |
| | 51 | | W | | | | QNTF | 2P | |
| IGHGI | IGHVS- | IGHJ4 | CARWEAGGTSPLDS | IGK | IGKVI-5 | IGKJ2, | CQQYSSYS | SARS | |
| | 51 | | W | | | IGKJ2 | QITF | 2P | |
| IGHA1 | IGHV3- | IGHJ4 | CARGYGDYYFDYW | IGK | IGKV3- | IGKJ2, | CQHFGSSP | SARS | LKA15 |
| | 66 | | | | 20 | IGKJ2, | LF | 2P | |
| | | | | | | IGKJ2 | | | |
| IGHGI | IGHV3- | IGHJ4 | CARAYGDYYFDYW | IGK | IGKV3- | IGKJ2, | CQQYRTF | SARS | |
| | 66 | | | | 20 | IGKJ2 | | 2P | |
| IGHG3 | IGHVS- | IGHJ5 | CARHPKGYGLRLPN | IGL | IGLV2- | IGLJI | CSSYTSSST | SARS | LKA16 |
| | 51 | | WFDPW | | 14 | | FF | 2P | |
| IGHG3 | IGHVS- | IGHJ5 | CARHPKGYGLRLPN | IGL | IGLV2- | IGLJI | CSSYTTSST | SARS | |
| | 51 | | WFDPW | | 14 | | FF | 2P | |
| IGHGI | IGHV3- | IGHJ4 | CAKDLLPYRCSGGS | IGL | IGLVI- | IGLJ2, | CSAWDDS | SARS | LKA17 |
| | 23 | | CFGLYFDYW | | 44 | IGLJ3 | LNGVVF | 2P | |
| IGHM | IGHV3- | IGHJ4 | CAKDLLPYRCSGGS | IGL | IGLVI- | IGLJ2, | CAAWDDS | SARS | |
| | 23 | | CFGFYFDYW | | 44 | IGLJ3 | LNGVVF | 2P | |

### Example 3—Methods

[0178] Experimental model and subject details. All work with human samples was performed in accordance with approved Institutional Review Board protocols (IRB) which were reviewed by the IRB at Brigham and Women's Hospital, Boston. Subjects who had recovered from COVID-19 (Table 1) were recruited through a patient cohort that has been created in collaboration between The Broad Institute of MIT and Harvard, Cambridge (MA, USA) and Brigham and Women's Hospital, Boston (MA, USA) under IRB protocol 2020P000849, “Biorepository for Samples from those at increased risk for or infected with SARS-COV-2”. Blood draws were performed at Brigham and Women's Hospital.

[0179] Serum RBD Enzyme-linked immunosorbent assay (ELISA). Serum ELISAs against SARS-COV-2 RBD were performed in a protocol modified from (Roy et al., 2020). MaxiSorp 384-well microplates (Sigma) were coated with 50 μl/well of 2,500 ng/ml of SARS-COV-2 RBD in coating buffer (1 packet BupH carbonate-bicarbonate (ThermoFisher) in 500 ml of Milli-Q H20) overnight at 4° C. Plates were then washed 3 times with 100 μl/well of wash buffer (0.05% Tween-20, 400 mM NaCl, and 50 mM Tris-HCl [pH 8.0] in Milli-Q H20) using a BioTek 406 plate washer. Plates were blocked by adding 100 μl/well of blocking buffer (1% BSA, 140 mM NaCl, and 50 mM Tris-HCl (pH 8.0)) for 30 min at room temperature. Plates were then washed as described above. 50 μl of 1:100 diluted serum samples in dilution buffer (1% BSA, 0.05% Tween-20, 140 mM NaCl, and 50 mM Tris-HCl (pH 8.0)) were added to the wells and incubated for 30 min at 37° C. Plates were then washed 7 times as described above. 50 μl/well of 1:25,000 diluted detection antibody solution (HRP-anti human IgG and IgM, Bethyl Laboratory #A80-104P, A80-100P) was added to the wells and incubated for 30 min at room temperature. Plates were then washed 7 times as described above. 40 μl/well of Pierce TMB peroxidase substrate (ThermoFisher) was then added to the wells and incubated at room temperature for 3 min (IgG) or 5 min (IgM). The reaction was then stopped by adding 40 μl/well of stop solution (0.5M H2S04 in Milli-Q H20) to each well. The OD was read after 15 min at 450 nm and 570 nm on a BioTek Synergy HT. For control antibodies CR3022 (Tian et al., 2020) IgG1 and IgM (Absolute Antibody #Ab01680-10.0, Ab01680-15.0) dilution curves, the antibodies were diluted to a concentration of 1 μg/ml in dilution buffer and duplicate 12 two-fold serial dilution curves were generated. One known positive and two known negative samples were included on each plate as controls.

[0180] Serum ELISA analysis. A standard curve based on absorbances from the monoclonal antibody CR3022 (Tian et al., 2020) dilution series included with each plate was used to estimate antibody abundance in test samples and allow for comparison of results across batches. Estimated antibody abundance in test samples was compared to the background signal from a cohort of pre-pandemic serum samples that served as negative controls. Serum samples with antibody abundance greater than 3 standard deviations (SD) above the mean of the pre-pandemic serum samples were considered to be positive and samples with antibody abundance less than 3 SD above the mean of the pre-pandemic serum samples were considered negative.

[0181] SARS-COV-2 and SARS-COV pseudovirus neutralization assay. Neutralizing activity against SARS-COV-2 pseudovirus was measured using a single-round infection assay in human ACE2-expressing target cells. Convalescent patient serum samples were tested against pseudotyped virus particles produced in 293T/17 cells (American Type Culture Collection) by co-transfection of plasmids encoding codon-optimized S (containing D at position 614) with a partially deleted cytoplasmic tail (provided by Dr. Dan Barouch, Beth Israel Deaconess Medical Center), and the HIV-1 backbone vector SG3 Δ Env (NIH AIDS Reagent Program). This pseudovirus strain was used for infecting TZM.bl/ACE2 target cells which encode an integrated luciferase reporter gene under control of an HIV-1 LTR. Subsequently, a second pseudovirus assay platform was implemented and used for testing neutralizing activity of purified monoclonal antibodies. This assay platform utilized pseudovirus produced in 293T/17 cells by co-transfection of plasmids encoding codon-optimized SARS-COV-2 full-length S (containing G at position 614), packaging plasmid pCMV ΔR8.2 expressing HIV-1 gag and pol, and luciferase reporter plasmid pHR′ CMV-Luc. Plasmids were kindly provided by Dr. Barney Graham (NIH, Vaccine Research Center). This pseudovirus strain was used for infecting 293/ACE2 target cells. The 293T and TZM.bl cell lines stably overexpressing the human ACE2 cell surface receptor protein were kindly provided by Drs. Michael Farzan and Huihui Ma (The Scripps Research Institute). For neutralization assays, serial dilutions of patient serum samples (primary 1:20 with 3-fold dilution series) or antibodies (up to 50 μg/ml with 5-fold dilution series) were performed in duplicate followed by addition of pseudovirus. Plates were incubated for 1 hour at 37° C. followed by addition of 293T/ACE2 or TZM.bl/ACE2 target cells (1×10⁴/well). Wells containing cells+pseudovirus (without sample) or cells alone acted as positive and negative infection controls, respectively. Assays were harvested on either day 2 (TZM.bl/ACE2 target cells) or day 3 (293/ACE2 target cells) using Promega Bright-Glo luciferase reagent and luminescence detected with a Perkin-Elmer Victor luminometer. Titers were determined as the serum dilution or antibody concentration that inhibited 50% or 80% virus infection (serum ID₅₀/ID₈₀ or antibody IC₅₀/IC₈₀ titers, respectively).

[0182] Similarly, neutralizing activity of monoclonal antibodies against SARS-COV pseudovirus as well as SARS-COV-2 variants B.1.1.7 and B.1.351 was determined using HIV-based lentiviral particles pseudotyped with either SARS-COV S lacking the C-terminal 21 amino acids of the cytoplasmic tail or SARS-COV-2 S (containing G at position 614) carrying the reported spike mutations in B.1.1.7 and B.1.351 (Tegally et al., 2020) (Davies et al., 2021). Pseudotyped particles were generated and neutralization assays were performed as previously described (Crawford et al., 2020a) (Crawford et al., 2020b). Briefly, the genes encoding the respective spike proteins were co-transfected with Env-deficient HIV backbone to create pseudotyped lentiviral particles. For neutralization assays, 4- or 5-fold serially diluted purified IgG was incubated with SARS-COV pseudotyped virus for 1 hour at 37° C. The virus/antibody mixture was added to 293TACE2 target cells and incubated for 48 hours at 37° C., then cells were lysed and luciferase activity was measured using Britelite Plus (Perkin Elmer). Relative luminescence units (RLUs) were normalized to values derived from cells infected with pseudotyped virus in the absence of antibody. Data were fit to a 5-parameter nonlinear regression in AntibodyDatabase (West et al., 2013).

[0183] Blood sample processing. 60-80 ml of blood from each donor were processed using Ficoll Paque Plus (GE Healthcare) in order to isolate peripheral blood mononuclear cells (PBMCs) according to the manufacturer's instructions. After PBMC isolation Applicants immediately proceeded with isolation of CD20 B cells using magnetic cell separation (MACS). In brief, cells were resuspended in MACS buffer (phosphate buffered saline (PBS) pH 7.2, 0.5% bovine serum albumin (BSA) and 2 mM EDTA) and stained with mouse anti-human CD20 IgG1 antibody coupled to magnetic beads (Miltenyi Biotec, #130-091-104). After washing and resuspending in MACS buffer cells were added to LS columns (Miltenyi Biotec) placed on a magnetic stand and the columns washed 3 times with 3 ml MACS buffer before removing the columns from the magnet and elution of cells according to the manufacturer's instructions. Cells were then washed and resuspended in Cell Staining Buffer (Biolegend, #420201).

[0184] Cell staining and sorting. CD20 enriched cells were stained with DNA-barcoded Totalseq C antibodies (Biolegend) according to the manufacturer's instructions. In brief, cells underwent Fc receptor blocking with Human TruStain FcX™ Fc (Biolegend) for 10 minutes at 4° C., after which cells were washed and resuspended in Cell Staining Buffer (Biolegend, #420201). Cells from different subjects were then stained with different Totalseq C antibodies (Biolegend): 1 (TotalSeq™-C0251 anti-human Hashtag 1 Antibody), 2 (TotalSeq™-C0252 anti-human Hashtag 2 Antibody), 3 (TotalSeq™-C0253 anti-human Hashtag 3 Antibody), 4 (TotalSeq™-C0254 anti-human Hashtag 4 Antibody), 6 (TotalSeq™-C0256 anti-human Hashtag 6 Antibody), 7 (TotalSeq™-C0257 anti-human Hashtag 7 Antibody), 8 (TotalSeq™-C0258 anti-human Hashtag 8 Antibody), 10 (TotalSeq™-C0260 anti-human Hashtag 10 Antibody). After staining with hashing antibodies, cells were washed 3 times in Cell Staining Buffer (Biolegend, #420201) and then up to 7 separate samples were combined for staining of antigen binding B cells. For this, the combined samples were stained with either 1 μg/ml biotinylated SARS-COV-2 spike trimer or 1 μg/ml biotinylated SARS-COV-2 RBD (See below for protein expression; biotinylation was performed using avitag technology (Avidity) following the manufacturer's instructions). Cells were simultaneously stained with FITC mouse anti-human CD19 antibody (BD, 340864) and incubated for 20 minutes at 4° C. before they were washed and resuspended in PBS with 5% fetal bovine serum (FBS). Cells were then stained with streptavidin-coupled APC (Biolegend #405207) for 5 minutes at 4° C. and washed and resuspended in PBS with 5% FBS. Antigen binding B cells were then sorted using a Sony MA900 cell sorter by gating on live cells in the forward scatter and side scatter (FIGS. 1A and 1B) and on CD19-FITC and SARS-COV-2 S-APC or RBD-APC double-positive cells. After sorting, cells were washed and counted using a hemocytometer and microscopy, before resuspending up to 10,000 cells in a volume of 32 μl for 5′ single cell RNA-Seq (see below).

[0185] 5′ scRNA-seq library generation. Cells were separated into droplet emulsions using the Chromium Next GEM Single-cell 5′ Solution (v1.1) and the 10× Chromium Controller. 5,000-10,000 cells were loaded per channel of the Chromium Next GEM single-cell 5′ (v1.1) Chip G. Following lysis of cells, barcoded mRNA reverse transcription, and cDNA amplification, a 0.6× SPRI cleanup was performed and the supernatant was set aside for Feature Barcoding library construction as instructed by the Chromium NextGEM single-cell V(D)J v1.1 protocol. A final elution of 45 μL was saved for further construction of libraries. Using the saved supernatant of the 0.6× cDNA cleanup, Feature Barcoding libraries were completed according to the 5′ Next GEM (v1.1) Feature Barcoding library construction methods provided by 10× Genomics. Gene expression and V(D)J libraries were created according to manufacturer's instruction (10× Genomics), which includes enzymatic fragmentation, adaptor ligation, and sample index barcoding steps. The V(D)J libraries were created from the original cDNA after it was enriched for human B cells, following the Chromium NextGEM single-cell V(D)J v1.1 protocol.

[0186] sc RNA-seq library sequencing. Gene expression, feature barcoding libraries, and BCR enriched V(D)J libraries were sequenced on a Nextseq500 (Illumina) using a high output 150 cycle flowcell, with the read configuration Read 1: 28 cycles, Read 2: 96 cycles, Index read 1: 8 cycles or sequenced on a HiSeq X (Illumina), using a 150 cycle flowcell with the read configuration: Read 1: 28 cycles, Read 2: 96 cycles, Index read 1: 8 cycles. Feature Barcoding libraries were spiked into the gene expression libraries (at 10-20% of the sample pool) prior to sequencing. All BCR enriched V(D)J libraries were pooled together and sequenced on a NextSeq500 (Illumina) using the same parameters as previously mentioned.

[0187] Antibody production. Antibody VDJ heavy chain and VJ light chain sequences of selected antibodies were produced as minigenes and cloned into IgG1 heavy chain, IgA1 heavy chain, IgA2 heavy chain, kappa light chain or lambda light chain expression vectors as previously described (Wardemann et al., 2003) (Wang et al., 2020b). After cloning into expression vectors, matching antibody heavy chain and light chain plasmids were co-transfected into Expi293F cells following the manufacturer's instructions. In brief, heavy chain plasmid DNA and light chain plasmid DNA were diluted in 1.5 ml Opti-Plex Complexation Buffer (Invitrogen) before mixing with 80 μl ExpiFectamine 293 Reagent (Invitrogen) diluted in 1.4 ml Opti-Plex Complexation Buffer (Invitrogen). For dimeric IgA production equal amounts of heavy chain plasmid DNA, light chain plasmid DNA and J chain plasmid DNA were used in the transfection. Mixture was incubated for 15 minutes at room temperature before adding to 25 ml of Expi293F cells at a density of 3.0×10⁶ viable cells/ml and incubation in a shaker incubator according to the manufacturer's instructions. ExpiFectamine 293 Transfection Enhancer 1 and 2 (150 μl and 1.5 ml, respectively) were added 18 hours post-transfection. Antibody containing supernatants were harvested after 7 days by centrifugation of cells at 3,000g for 20 minutes and transfer of supernatants into 50 ml falcon tubes (Fisher Scientific). Prior to size exclusion chromatography (see below) IgA dimers were purified from transfection supernatants using peptide M coupled agarose beads (Invivogen) according to the manufacturer's instructions.

[0188] IgA dimer purification through size exclusion chromatography. A pre-packed HiLoad™ 16/600 Superdex™ 200 pg (Cytiva, #28-9893-35) column on the Cytiva “ÄKTA pure Chromatography System” was equilibrated with PBS. After equilibration of the column with PBS each IgA preparation was applied onto the column and the column was run at a flow rate of 1.25 ml/min. The total column volume was 120 ml. Fractions were collected in a volume of 1.5 ml per fraction. Peaks consistent with IgA multimers, IgA dimers and IgA monomers were detected at 0.3-0.4, 0.4-0.5 and 0.5-0.6 column volumes respectively (FIG. 9J). Fractions spanning all three peaks were collected and evaluated individually by running Criterion™ TGX™ precast gels (Biorad 5671095) under non-reducing conditions with a Precision Plus Protein™ Kaleidoscope™ Prestained Protein Standard (Biorad #1610375) (FIG. 9K).

[0189] Antibody ELISA testing. Antibody concentrations were determined measuring absorbance at 280 nm using Nanodrop 2000c (Thermo Scientific) or IgG specific ELISA as previously described (Tiller et al., 2008). Antibody reactivities to SARS-COV-2 S, SARS-COV-2 RBD, SARS-COV S, SARS-COV RBD, MERS-COV S and MERS-COV RBD were determined using the same protocol with the following modifications: Antigens were coated on Corning™ Costar™ Brand 96-Well EIA/RIA Plates at a concentration of 5 μg/ml. Antibody binding was then assessed at starting concentrations of 1 μg/ml, 1.1 μg/ml and 1.2 μg/ml for IgG, monomeric IgA and dimeric IgA respectively in order to achieve equal Fab molar concentrations. 3 consecutive 1/4 dilutions were performed. Positive control antibodies used in these assays included antibodies BG10-19 for SARS-COV-2 S and SARS-COV-2 RBD (see above), 3B12 (Absolute Antibody #Ab01673-10.0) for MERS-COV S and MERS-COV RBD (Tang et al., 2014) and S227.14 (Absolute Antibody Ab00263-10.0) for SARS COV S and SARS COV RBD (Rockx et al., 2008). Antigen specific ELISA results are expressed as AUC using Graphpad PRISM software. Polyreactivity ELISAs were performed as previously described (Tiller et al., 2008) with the following modification: In addition to the antigens ssDNA, dsDNA, LPS and insulin (Tiller et al., 2008), streptavidin-coupled APC (Biolegend #405207) was used as a fifth antigen in order to assess potential off target binding against this reagent used for cell sorting (see above). As described previously (Tiller et al., 2008), polyreactivity is defined as reactivity to 2 or more antigens among the antigens single stranded DNA, double stranded DNA, lipopolysaccharide (LPS) or insulin. As previously described, antibodies ED38, JB40 and mGO53 (Wardemann et al., 2003) were used as strongly polyreactive, intermediately polyreactive and non-polyreactive control antibodies respectively. In ELISA assays including IgG, IgA monomers and IgA dimers, HRP-conjugated goat anti-human kappa and lambda chain antibodies (Biorad #STAR127P and #STAR129P) were used as secondary antibodies at a 1/5000 dilution.

[0190] Off-target antibody binding to baculovirus (BV) particles generated in Sf9 insect cells was tested as previously described (Hotzel et al., 2012). A solution of 1% baculovirus in 100 mM sodium bicarbonate buffer pH 9.6 was adsorbed to a 384-well ELISA plate (Nunc Maxisorp) using a Tecan Freedom Evo2 liquid handling robot and the plate was incubated overnight at 4° C. Following blocking with 0.5% BSA in PBS, 1 μg/ml of IgG was added to the blocked assay. Plates were incubated for 3 hours at room temperature. Antibody binding was detected using an HRP-conjugated anti-Human IgG (H&L) secondary antibody (Genscript). ELISA was developed using SuperSignal ELISA Femto Maximum Sensitivity Substrate (Thermo Scientific). Anti-HIV antibodies NIH45-46 (Scheid et al., 2011) and 45-46m2 (Diskin et al., 2013) were used as positive controls and antibody 3BNC117 (Scheid et al., 2011) was used as negative control. Measurements were performed in quadruplicate and OD values within 1.5-fold the negative control were considered to be negative.

[0191] Neutralization activity of antibodies against authentic SARS-COV-2. Vero E6-TMPRSS2 were seeded at 10,000 per well the day prior to infection in CellCarrier-384 ultra microplate (Perkin Elmer). Monoclonal antibody samples were tested in 4-fold 9-point dilution spots starting at a highest concentration of 100 μg/mL. Serial diluted antibodies were mixed separately with diluted SARS-COV-2 virus and incubated at 37 C with 5% CO₂ for 1 hour. Antibody-virus complexes were added to the cells in triplicate. Plates were incubated at 37 C with 5% CO₂ for 48 hours. After that, plates were fixed and inactivated using 4% paraformaldehyde in PBS for 2 hours at room temperature. Plates were then washed and incubated with diluted anti-SARS-COV/SARS-COV-2 nucleoprotein mouse antibody (Sino) for 1.5 hours at room temperature. Plates were subsequently incubated with Alexa488-conjugated goat anti-mouse (JacksonImmuno) for 45 mins at room temperature, followed by nuclear staining with Hoechst 33342 (ThermoFisher). The fluorescence images were recorded and analyzed using Opera Phenix™ High Content Screening System. The half-maximal inhibitory concentrations (I₅₀) were determined using four parameters logistic regression (GraphPad Prism 8.0).

[0192] Protein expression and purification. Expression and purification of SARS-COV-2 6P stabilized S trimers (Hsieh et al., 2020) and constructs encoding the sarbecovirus RBDs were conducted as previously described (Cohen et al., 2020). Briefly, constructs were purified from supernatants of transiently transfected Expi293F cells (Gibco) by Ni2⁺-NTA affinity and size exclusion chromatography (SEC). Peak fractions were identified by SDS-PAGE, pooled, and stored at 4° C. IgGs were expressed, purified, and stored as described (Barnes et al., 2020b). Fabs were generated by papain digestion using crystallized papain (Sigma-Aldrich) in 50 mM sodium phosphate, 2 mM EDTA, 10 mM L-cysteine, pH 7.4 for 30-60 min at 37° C. at a 1:100 enzyme:IgG ratio. To remove undigested IgGs and Fc fragments, digested products were applied to a 1-mL HiTrap MabSelect SuRe column (GE Healthcare Life Sciences) and the flow-through containing cleaved Fabs was collected. Fabs were further purified by SEC using a Superdex 200 Increase 10/300 column (GE Healthcare Life Sciences) in TBS before concentrating and storage at 4° C.

[0193] Cryo-EM sample preparation. Purified Fab and S 6P trimer were incubated at a 1.1:1 molar ratio per protomer on ice for 30 minutes prior to deposition on a freshly glow-discharged 300 mesh, 1.2/1.3 UltrAuFoil grid. Immediately before 3 μl of complex was applied to the grid, fluorinated octyl-malotiside was added to the Fab-S complex to a final detergent concentration of 0.02% w/v, resulting in a final complex concentration of 3 mg/ml. Samples were vitrified in 100% liquid ethane using a Mark IV Vitrobot after blotting for 3 s with Whatman No. 1 filter paper at 22° C. and 100% humidity.

[0194] Cryo-EM data collection and processing. Data collection and processing followed a similar workflow to what has been previously described in detail (Barnes et al., 2020a). Briefly, micrographs were collected on a Talos Arctica transmission electron microscope (Thermo Fisher) operating at 200 kV for all Fab-S complexes. Data were collected using SerialEM automated data collection software (Mastronarde, 2005) and movies were recorded with K3 camera (Gatan). Data collections parameters are summarized in Table 5. For all data sets, cryo-EM movies were patch motion corrected for beam-induced motion including dose-weighting within cryoSPARC v2.15 (Punjani et al., 2017) after binning super resolution movies. The non-dose-weighted images were used to estimate CTF parameters using cryoSPARC implementation of the Patch CTF job. Processing for all datasets was carried out in a similar fashion. Briefly, an initial set of particles was picked based on templates from 2D classification of blob picked particles on a small sub-set of images. This set was pared down through several rounds of 3D classification. An ab initio job on a small good subset of these particles revealed distinct states and junk particles. Full set of particles was heterogeneously refined against distinct states, as well as a junk class acting as a trap for bad particles. Particles from each were separately refined using non-uniform refinement in C1 symmetry. Particles from distinct states were re-extracted without binning and were further refined separately in several rounds of 3D classification. Particles were subdivided into groups based on beam-tilt, refined separately for CTF parameters and aberration correction. For all states, a soft mask (3-pixel extension, 6-pixel soft edge) was generated for the S1 subunits and Fab variable domains. The resolution at the Fab interface was modestly improved, with overall reported resolutions reported based on gold standard FSC calculations.

[0195] Cryo-EM Structure Modeling and Refinement. Coordinates for initial complexes were generated by docking individual chains from reference structures into cryo-EM density using UCSF Chimera (Goddard et al., 2018) (see Table 5 for PDB coordinates). Models were then refined into cryo-EM maps rigid body and real space refinement with morphing in Phenix (Terwilliger et al., 2018). Sequence-updated models were built manually in Coot (Emsley et al., 2010) and then refined using iterative rounds of real-space refinement in Phenix and Coot. Glycans were modeled at potential N-linked glycosylation sites (PNGSs) in Coot using ‘blurred’ maps processed with a variety of B-factors generated in cryoSPARC v2.15. Validation of model coordinates was performed using MolProbity (Chen et al., 2010) (Table 5).

[0196] BG4-25-RBD X-ray crystallography experiments. Crystallization trials for a stoichiometric complex of BG4-25-SARS-COV2 RBD-CR3022 were carried out at room temperature using the sitting drop vapor diffusion method by mixing equal volumes of the Fab-RBD complex and reservoir using a TTP LabTech Mosquito robot and commercially-available screens (Hampton Research). Crystals were obtained in 0.05 M Citric acid, 0.05 M BIS-TRIS propane pH 5.0 and 16% polyethylene glycol 3350 and quickly cryo-protected in a solution matching the reservoir+20% glycerol. X-ray diffraction data were collected for Fab-RBD complex at the Stanford Synchrotron Radiation Lightsource (SSRL) beamline 12-2 on a Pilatus 6M pixel detector (Dectris). Data from a single crystal were indexed and integrated in XDS (Kabsch, 2010) and merged using AIMLESS in CCP4 (Winn et al., 2011) (Table 6). The Fab-RBD complex structure was determined by molecular replacement in PHASER (McCoy et al., 2007) using Fab and RBD coordinates from individual components of PDB 6XC3 (CC12.1 Fab-CR3022 Fab-SARS-COV2 RBD) as search models after trimming heavy chain and light chain CDR loops for CC12.1 Fab. Coordinates were refined using rigid body and B-group refinement in Phenix (Adams et al., 2010) followed by cycles of manual building in Coot (Emsley et al., 2010) (Table 6).

[0197] Structural Analyses. CDR lengths and Kabot numbering were calculated based on IMGT definitions (Lefranc et al., 2015). Structure figures were made with UCSF ChimeraX. Local resolution maps were calculated using cryoSPARC v 2.15. Buried surface areas were calculated using PDBePISA (Krissinel and Henrick, 2007) and a 1.4 Å probe. Potential hydrogen bonds were assigned as interactions that were <4.0 Å and with A-D-H angle >90°. Potential van der Waals interactions between atoms were assigned as interactions that were <4.0 Å. Hydrogen bond and van der Waals interaction assignments are tentative due to resolution limitations.

[0198] Surface Plasmon Resonance (SPR) binding experiments. SPR experiments were performed using a Biacore T200 instrument (GE Healthcare). ACE2 microbody (Tada et al., 2020) was immobilized on a CM5 chip by primary amine chemistry at pH 4.5 to a final response level of ˜1000 resonance units (RUS). Fabs were complexed with 100 nM SARS2 S 6P or SARS2 RBD at a 10:1 molar ratio and incubated for a minimum of 1 hour. Antigen or Fab-antigen complex was injected over immobilized ACE2 microbody surface at a flow rate of 30 μL/min for a contact time of 300 seconds. Sensorgrams were buffer corrected using an injection of 0.01 M HEPES pH 7.4, 0.15 M NaCl, 3 mM EDTA, 0.005% v/v surfactant P20 buffer.

[0199] SARS-COV-2 mutant RBD and sarbecovirus RBD ELISA binding assay. Binding of Fabs to SARS-COV-2 RBDs containing single mutations or to sarbecovirus RBDs was evaluated by ELISA. RBD antigens (mutant or wild-type) were adsorbed to 384-well Nunc MaxiSorp plates (Sigma) at a concentration of 2 μg/mL overnight. Plates were blocked with 3% BSA in TBS-T (TBS with 0.05% Tween20) for 1 h at room temperature, then 5-fold serial dilutions starting at 10 μg/mL of Fab were added. Plates were washed with TBS-T and bound Fab was detected using an HRP-conjugated secondary Ab (Genscript) and SuperSignal ELISA Femto Substrate (Thermo Scientific). AUC for each Fab-antigen pair was calculated using Graphpad PRISM software. Fold decrease in AUC was calculated relative to SARS-COV2 RBD AUC for the same Fab. Data shown are representative of two independent experiments.

[0200] SARS-COV-2 mutant pseudotyped reporter virus and mutant pseudotyped virus neutralization assay. SARS-COV-2 pseudotyped particles were generated as previously described (Robbiani et al., 2020; Schmidt et al., 2020). Briefly, 293T cells were transfected with pNL4-3 Env-nanoluc and pSARS-COV-2-S_{Δ19}. For generation of RBD-mutant pseudoviruses, pSARS-CoV-2-S_{Δ19} carrying indicated spike mutations was used instead. Particles were harvested 48 hpt, filtered and stored at −80° C.

[0201] Fourfold serially diluted monoclonal antibodies were incubated with SARS-COV-2 pseudotyped virus for 1 h at 37° C. The mixture was subsequently incubated with HT1080_{Ace2} cl14 cells (Schmidt et al., 2020) for 48 h after which cells were washed with PBS and lysed with Luciferase Cell Culture Lysis 5× reagent (Promega). Nanoluc Luciferase activity in lysates was measured using the Nano-Glo Luciferase Assay System (Promega) with the Glomax Navigator (Promega). The obtained relative luminescence units were normalized to those derived from cells infected with SARS-COV-2 pseudotyped virus in the absence of monoclonal antibodies. The half-maximal and 90% inhibitory concentrations (IC50 and IC90) were determined using four-parameter nonlinear regression (least squares regression method without weighting; constraints: top=1, bottom=0) (GraphPad Prism).

[0202] Antibody resistance selection experiments. 293T/ACE2.cl22 (Schmidt et al., 2020) were cultured in Dulbecco's Modified Eagle Medium (DMEM) supplemented with 10% fetal bovine serum (FBS) at 37° C. and 5% CO₂. Cells have been tested negative for contamination with mycoplasma. rVSV/SARS-COV-2/GFP chimeric virus stocks were generated by infecting 293T/ACE2.cl22 cells. Supernatant was harvested 1 day post infection (dpi), cleared from cellular debris, aliquoted and stored at −80° C. Two plaque purified variants designated rVSV/SARS-COV-2/GFP1D7 and rVSV/SARS-COV-2/GFP2E1 that encode F157S/R685M (1D7) and D215G/R683G (2E1) substitutions were used in these studies (Schmidt et al., 2020). For BG10-19 selection experiments, the virus was passaged multiple times in the presence of 1 μg/ml or 5 μg/ml antibody. At passage 4, virus was allowed to replicate in the presence of antibodies until all the cells were infected then harvested. The virus was then passaged in the presence of antibodies for a fifth and final time before supernatant was harvested for further analysis. To isolate individual mutants, the supernatants of passage 5 were serially diluted and individual viral foci were isolated by limiting dilution in 96-well plates.

[0203] For the identification of putative antibody resistance mutations, RNA was isolated from aliquots of supernatant containing selected viral populations and isolates using NucleoSpin 96 Virus Core Kit (Macherey-Nagel). The purified RNA was subjected to reverse transcription using SuperScript VILO cDNA Synthesis Kit (Thermo Fisher Scientific). The cDNA was amplified using KOD Xtreme Hot Start DNA Polymerase (Millipore Sigma) and primers flanking the entire S-encoding sequence. The PCR products were purified and sequenced using Sanger-sequencing.

[0204] To measure neutralizing activity, 40 μg/ml antibody was five-fold serially diluted in 96-well plates over 7 dilutions. Thereafter, approximately 5×10⁴ infectious units of rVSV/SARS-CoV-2/GFP WT or mutant isolates were mixed with BG10-19 at a 1:1 ratio and incubated for 1 hr at 37° C. in a 96-well plate. The mixture was then added to 293T/ACE2.cl22 target cells plated at 1×10⁴ cells/well in 100 μl medium in 96-well plates the previous day. Thus, the final starting dilution was 10 μg/ml. Cells were then cultured for 16 hr, then harvested for flow cytometry.

[0205] scRNA-seq analysis. mRNA and VDJ sequence reads were mapped to the reference human genome GRCh38-3.0.0 with the cloud-based Cumulus workflows (Li et al., 2020), using the CellRanger 3.0.2 software pipeline. Cells with both high-quality VDJ sequence and transcriptome information were kept for the downstream analysis by filtering out the cells which had less than 300 detected genes or which had poor quality VDJ contig information defined by i) being non-productive by 10× standards, ii) having more than four productive VDJ contigs, iii) having less than three filtered UMIs. For the transcriptome analysis, batch effects were removed with the ComBat algorithm (Johnson et al., 2007) implemented in SVA R Package version 3.38.0. For the transcriptome mRNA count normalization, dimensionality reduction, clustering, cell cycle scoring, cluster marker genes detection and differential gene expression analysis steps Seurat R package (Butler et al., 2018) (Stuart et al., 2019) was employed. For the normalization step gene expression counts for each cell were divided by the total counts for that cell and multiplied by 1e6, which was then log-transformed using log1p. Dimensionality reduction was done by PCA with selecting 50 first principal components.

[0206] For clustering of the cells into transcriptome clusters, first the k-nearest neighbor (kNN) graph of the cells was constructed. Second, this kNN graph was used to generate the shared nearest neighbor (sNN) graph by calculating Jaccard index between every cell and its k nearest neighbors. Third, the leiden algorithm (Traag et al., 2019) was used to find the clusters of the cells based on the generated sNN graph.

[0207] Cell cycle scoring was done by calculating the module scores of the cell cycle genes defined in (Tirosh et al., 2016). Positive cluster marker genes and differentially expressed genes were detected with a log-fold change threshold of 0.25, where only the genes that were detected in a minimum fraction of 20% in either of the six transcriptome populations were considered. Expression levels of immunoglobulin genes were discarded during the clustering and differential gene expression analysis steps.

[0208] Antibody Repertoire Analysis. 10×V(D)J contig assembly algorithm takes many forms of noise specific to scRNA-seq data into account while generating the assembled V(D)J sequences (support. 10×genomics.com/single-cell-vdj/software/pipelines/latest/algorithms/assembly). Nevertheless, only the cells with high-quality V(D)J contig sequences were selected and V(D)J gene annotations were assigned by using IGBLAST (version 1.14.0) software with the Change-O R package (Gupta et al., 2015). Donor specific B cell clones were identified by the Change-O R package (Gupta et al., 2015), where the appropriate threshold for trimming the hierarchical clustering into B cell clones was found by inspecting the bimodal distribution of the distance between each sequence in the data and its nearest-neighbor.

[0209] Mutation inference based on the scRNA-seq VDJ sequences of the donor and the control cells (Rubelt et al., 2012) was performed by the Shazam R Package (Yaari et al., 2012) where the region definition parameter was set to be “IMGT_V_BY_SEGMENTS” which provides no subdivisons and treats the entire V segment as a single region.

[0210] CDRH3 length was defined based on IMGT definition (Lefranc et al., 2015) with the addition of two conserved amino acid residues that were added to assist in clonal analysis (Nouri and Kleinstein, 2018). This addition was corrected for all analyses involving specific CDRH3 length, such as selection of VH3-53/3-66 antibodies with CDRH3 shorter than 14 amino acid length.

[0211] CDRH3 amino acid charges were calculated by the Alakazam R package (Gupta et al., 2015) using the method of Moore (Moore, 1985) excluding the N-terminus and C-terminus charges, and normalizing by the number of informative positions.

[0212] Hydrophobicity scores were calculated with the Alakazam R package using the method of Kyte and Doolittle (Kyte and Doolittle, 1982).

[0213] Shannon entropy values were calculated using Alakazam R package. For each donor the transcriptome cluster specific Hill diversity index, proposed in (Hill, 1973), improved by (Chao et al., 2014; Chao et al., 2015) was calculated by setting the diversity order equal to 1 with Alakazam R package. For each run the number of bootstrap realizations is set to be 400, and the minimum number of observations to sample is set to be 10.

[0214] Mutational analysis of VH3-53/3-66 antibodies. Inferred somatic mutations in the V gene segment of VH3-53/VH3-66 antibodies were counted for the IgG⁺ antibodies with CDRH3 lengths less than 14 amino acids from SARS-COV-2 binding B cells across 14 subjects, listing only those sites where the frequency was >10% in either the IgG⁺ set or in the repertoire comparison. The repertoire comparison set of human VH3-53/VH3-66 sequences was taken from the sequence read archive of (Rubelt et al., 2012).

[0215] Table 8A-8B. The Table lists the nucleotide sequence (SEQ ID NOS: 447-12672), the bait that was used to sort the respective cell and the sequence name. The sequence name includes the donor (e.g., BG1, BG10) and whether the sequence is a light chain or heavy chain (e.g., LC, HC). The nucleotide sequences can be converted to amino acid sequence by one skilled in the art. 8A. Full list of nucleotide sequences for heavy and light chains identified in B cells bound to bait proteins from the 14 donors. 8B. For patients BG1, BG4, BG7 and BG10 there is an additional column that shows the antibody names for the antibodies produced from the nucleotide sequences in that line.

TABLE 8A

| SEQ | | |
|---|---|---|
| ID NO | BAIT | SEQUENCE NAME |
| 447 | RBD | BG1NUC-HC1 |
| 448 | 2F | BG1NUC-HC2 |
| 449 | RBD | BG1NUC-HC3 |
| 450 | 2F | BG1NUC-HC4 |
| 451 | RBD | BG1NUC-HC5 |
| 452 | 2F | BG1NUC-HC6 |
| 453 | RBD | BG1NUC-HC7 |
| 454 | RBD | BG1NUC-HC8 |
| 455 | RBD | BG1NUC-HC9 |
| 456 | RBD | BG1NUC-HC10 |
| 457 | RBD | BG1NUC-HC11 |
| 458 | 2F | BG1NUC-HC12 |
| 459 | RBD | BG1NUC-HC13 |
| 460 | RBD | BG1NUC-HC14 |
| 461 | RBD | BG1NUC-HC15 |
| 462 | RBD | BG1NUC-HC16 |
| 463 | RBD | BG1NUC-HC17 |
| 464 | 2P | BG1NUC-HC18 |
| 465 | 2P | BG1NUC-HC19 |
| 466 | RBD | BG1NUC-HC20 |
| 467 | 2P | BG1NUC-HC21 |
| 468 | 2P | BG1NUC-HC22 |
| 469 | 2P | BG1NUC-HC23 |
| 470 | 2P | BG1NUC-HC24 |
| 471 | RBD | BG1NUC-HC25 |
| 472 | 2P | BG1NUC-HC26 |
| 473 | RBD | BG1NUC-HC27 |
| 474 | 2P | BG1NUC-HC28 |
| 475 | RBD | BG1NUC-HC29 |
| 476 | 2P | BG1NUC-HC30 |
| 477 | RBD | BG1NUC-HC31 |
| 478 | RBD | BG1NUC-HC32 |
| 479 | 2P | BG1NUC-HC33 |
| 480 | 2P | BG1NUC-HC34 |
| 481 | RBD | BG1NUC-HC35 |
| 482 | 2P | BG1NUC-HC36 |
| 483 | RBD | BG1NUC-HC37 |
| 484 | RBD | BG1NUC-HC38 |
| 485 | 2P | BG1NUC-HC39 |
| 486 | RBD | BG1NUC-HC40 |
| 487 | RBD | BG1NUC-HC41 |
| 488 | 2P | BG1NUC-HC42 |
| 489 | 2P | BG1NUC-HC43 |
| 490 | RBD | BG1NUC-HC44 |
| 491 | RBD | BG1NUC-HC45 |
| 492 | RBD | BG1NUC-HC46 |
| 493 | 2P | BG1NUC-HC47 |
| 494 | RBD | BG1NUC-HC48 |
| 495 | RBD | BG1NUC-HC49 |
| 496 | RBD | BG1NUC-HC50 |
| 497 | 2P | BG1NUC-HC51 |
| 498 | 2P | BG1NUC-HC52 |
| 499 | RBD | BG1NUC-HC53 |
| 500 | 2P | BG1NUC-HC54 |
| 501 | 2P | BG1NUC-HC55 |
| 502 | RBD | BG1NUC-HC56 |
| 503 | 2P | BG1NUC-HC57 |
| 504 | 2P | BG1NUC-HC58 |
| 505 | 2P | BG1NUC-HC59 |
| 506 | RBD | BG1NUC-HC60 |
| 507 | RBD | BG1NUC-HC61 |
| 508 | RBD | BG1NUC-HC62 |
| 509 | 2P | BG1NUC-HC63 |
| 510 | 2P | BG1NUC-HC64 |
| 511 | 2P | BG1NUC-HC65 |
| 512 | 2P | BG1NUC-HC66 |
| 513 | RBD | BG1NUC-HC67 |
| 514 | RBD | BG1NUC-HC68 |
| 515 | 2P | BG1NUC-HC69 |
| 516 | 2P | BG1NUC-HC70 |
| 517 | 2P | BG1NUC-HC71 |
| 518 | RBD | BG1NUC-HC72 |
| 519 | RBD | BG1NUC-HC73 |
| 520 | RBD | BG1NUC-HC74 |
| 521 | 2P | BG1NUC-HC75 |
| 522 | RBD | BG1NUC-HC76 |
| 523 | 2P | BG1NUC-HC77 |
| 524 | 2P | BG1NUC-HC78 |
| 525 | 2P | BG1NUC-HC79 |
| 526 | RBD | BG1NUC-HC80 |
| 527 | RBD | BG1NUC-HC81 |
| 528 | 2P | BG1NUC-HC82 |
| 529 | RBD | BG1NUC-HC83 |
| 530 | 2P | BG1NUC-HC84 |
| 531 | 2P | BG1NUC-HC85 |
| 532 | 2P | BG1NUC-HC86 |
| 533 | RBD | BG1NUC-HC87 |
| 534 | 2P | BG1NUC-HC88 |
| 535 | RBD | BG1NUC-HC89 |
| 536 | RBD | BG1NUC-HC90 |
| 537 | RBD | BG1NUC-HC91 |
| 538 | RBD | BG1NUC-HC92 |
| 539 | RBD | BG1NUC-HC93 |
| 540 | RBD | BG1NUC-HC94 |
| 541 | RBD | BG1NUC-HC95 |
| 542 | RBD | BG1NUC-HC96 |
| 543 | 2P | BG1NUC-HC97 |
| 544 | 2P | BG1NUC-HC98 |
| 545 | 2P | BG1NUC-HC99 |
| 546 | RBD | BG1NUC-HC100 |
| 547 | 2P | BG1NUC-HC101 |
| 548 | RBD | BG1NUC-HC102 |
| 549 | 2P | BG1NUC-HC103 |
| 550 | 2P | BG1NUC-HC104 |
| 551 | 2F | BG1NUC-HC105 |
| 552 | 2P | BG1NUC-HC106 |
| 553 | RBD | BG1NUC-HC107 |
| 554 | RBD | BG1NUC-HC108 |
| 555 | 2P | BG1NUC-HC109 |
| 556 | 2P | BG1NUC-HC110 |
| 557 | 2P | BG1NUC-HC111 |
| 558 | 2P | BG1NUC-HC112 |
| 559 | 2P | BG1NUC-HC113 |
| 560 | RBD | BG1NUC-HC114 |
| 561 | RBD | BG1NUC-HC115 |
| 562 | RBD | BG1NUC-HC116 |
| 563 | RBD | BG1NUC-HC117 |
| 564 | 2P | BG1NUC-HC118 |
| 565 | 2P | BG1NUC-HC119 |
| 566 | RBD | BG1NUC-HC120 |
| 567 | 2P | BG1NUC-HC121 |
| 568 | 2P | BG1NUC-HC122 |
| 569 | 2P | BG1NUC-HC123 |
| 570 | RBD | BG1NUC-HC124 |
| 571 | RBD | BG1NUC-HC125 |
| 572 | RBD | BG1NUC-HC126 |
| 573 | RBD | BG1NUC-HC127 |
| 574 | RBD | BG1NUC-HC128 |
| 575 | RBD | BG1NUC-HC129 |
| 576 | RBD | BG1NUC-HC130 |
| 577 | RBD | BG1NUC-HC131 |
| 578 | RBD | BG1NUC-HC132 |
| 579 | RBD | BG1NUC-HC133 |
| 580 | 2P | BG1NUC-HC134 |
| 581 | 2P | BG1NUC-HC135 |
| 582 | RBD | BG1NUC-HC136 |
| 583 | RBD | BG1NUC-HC137 |
| 584 | RBD | BG1NUC-HC138 |
| 585 | RBD | BG1NUC-HC139 |
| 586 | 2P | BG1NUC-HC140 |
| 587 | 2P | BG1NUC-HC141 |
| 588 | 2P | BG1NUC-HC142 |
| 589 | 2P | BG1NUC-HC143 |
| 590 | 2P | BG1NUC-HC144 |
| 591 | 2P | BG1NUC-HC145 |
| 592 | 2P | BG1NUC-HC146 |
| 593 | 2P | BG1NUC-HC147 |
| 594 | 2P | BG1NUC-HC148 |
| 595 | 2P | BG1NUC-HC149 |
| 596 | RBD | BG1NUC-HC150 |
| 597 | 2P | BG1NUC-HC151 |
| 598 | RBD | BG1NUC-HC152 |
| 599 | RBD | BG1NUC-HC153 |
| 600 | 2P | BG1NUC-HC154 |
| 601 | 2P | BG1NUC-HC155 |
| 602 | RBD | BG1NUC-HC156 |
| 603 | 2P | BG1NUC-HC157 |
| 604 | 2P | BG1NUC-HC158 |
| 605 | 2F | BG1NUC-HC159 |
| 606 | 2P | BG1NUC-HC160 |
| 607 | RBD | BG1NUC-HC161 |
| 608 | 2P | BG1NUC-HC162 |
| 609 | RBD | BG1NUC-HC163 |
| 610 | RBD | BG1NUC-HC164 |
| 611 | RBD | BG1NUC-HC165 |
| 612 | RBD | BG1NUC-HC166 |
| 613 | 2P | BG1NUC-HC167 |
| 614 | RBD | BG1NUC-HC168 |
| 615 | RBD | BG1NUC-HC169 |
| 616 | 2P | BG1NUC-HC170 |
| 617 | 2P | BG1NUC-HC171 |
| 618 | 2P | BG1NUC-HC172 |
| 619 | RBD | BG1NUC-HC173 |
| 620 | RBD | BG1NUC-HC174 |
| 621 | RBD | BG1NUC-HC175 |
| 622 | 2P | BG1NUC-HC176 |
| 623 | RBD | BG1NUC-HC177 |
| 624 | RBD | BG1NUC-HC178 |
| 625 | 2P | BG1NUC-HC179 |
| 626 | RBD | BG1NUC-HC180 |
| 627 | RBD | BG1NUC-HC181 |
| 628 | RBD | BG1NUC-HC182 |
| 629 | RBD | BG1NUC-HC183 |
| 630 | 2P | BG1NUC-HC184 |
| 631 | RBD | BG1NUC-HC185 |
| 632 | RBD | BG1NUC-HC186 |
| 633 | RBD | BG1NUC-HC187 |
| 634 | RBD | BG1NUC-HC188 |
| 635 | 2P | BG1NUC-HC189 |
| 636 | RBD | BG1NUC-HC190 |
| 637 | 2P | BG1NUC-HC191 |
| 638 | 2P | BG1NUC-HC192 |
| 639 | 2P | BG1NUC-HC193 |
| 640 | 2P | BG1NUC-HC194 |
| 641 | 2P | BG1NUC-HC195 |
| 642 | 2P | BG1NUC-HC196 |
| 643 | 2P | BG1NUC-HC197 |
| 644 | 2P | BG1NUC-HC198 |
| 645 | 2P | BG1NUC-HC199 |
| 646 | RBD | BG1NUC-HC200 |
| 647 | RBD | BG1NUC-HC201 |
| 648 | RBD | BG1NUC-HC202 |
| 649 | 2P | BG1NUC-HC203 |
| 650 | 2P | BG1NUC-HC204 |
| 651 | 2P | BG1NUC-HC205 |
| 652 | RBD | BG1NUC-HC206 |
| 653 | 2P | BG1NUC-HC207 |
| 654 | 2P | BG1NUC-HC208 |
| 655 | 2P | BG1NUC-HC209 |
| 656 | RBD | BG1NUC-HC210 |
| 657 | RBD | BG1NUC-HC211 |
| 658 | 2P | BG1NUC-HC212 |
| 659 | 2P | BG1NUC-HC213 |
| 660 | 2P | BG1NUC-HC214 |
| 661 | 2P | BG1NUC-HC215 |
| 662 | RBD | BG1NUC-HC216 |
| 663 | 2P | BG1NUC-HC217 |
| 664 | 2P | BG1NUC-HC218 |
| 665 | RBD | BG1NUC-HC219 |
| 666 | 2P | BG1NUC-HC220 |
| 667 | 2P | BG1NUC-HC221 |
| 668 | 2P | BG1NUC-HC222 |
| 669 | 2P | BG1NUC-HC223 |
| 670 | RBD | BG1NUC-HC224 |
| 671 | RBD | BG1NUC-HC225 |
| 672 | 2P | BG1NUC-HC226 |
| 673 | 2P | BG1NUC-HC227 |
| 674 | 2P | BG1NUC-HC228 |
| 675 | RBD | BG1NUC-HC229 |
| 676 | RBD | BG1NUC-HC230 |
| 677 | RBD | BG1NUC-HC231 |
| 678 | 2P | BG1NUC-HC232 |
| 679 | RBD | BG1NUC-HC233 |
| 680 | RBD | BG1NUC-HC234 |
| 681 | 2P | BG1NUC-HC235 |
| 682 | 2P | BG1NUC-HC236 |
| 683 | 2P | BG1NUC-HC237 |
| 684 | 2P | BG1NUC-HC238 |
| 685 | RBD | BG1NUC-HC239 |
| 686 | RBD | BG1NUC-HC240 |
| 687 | 2P | BG1NUC-HC241 |
| 688 | 2P | BG1NUC-HC242 |
| 689 | 2P | BG1NUC-HC243 |
| 690 | RBD | BG1NUC-HC244 |
| 691 | RBD | BG1NUC-HC245 |
| 692 | RBD | BG1NUC-HC246 |
| 693 | 2P | BG1NUC-HC247 |
| 694 | 2P | BG1NUC-HC248 |
| 695 | 2P | BG1NUC-HC249 |
| 696 | RBD | BG1NUC-HC250 |
| 697 | RBD | BG1NUC-HC251 |
| 698 | 2P | BG1NUC-HC252 |
| 699 | RBD | BG1NUC-HC253 |
| 700 | RBD | BG1NUC-HC254 |
| 701 | RBD | BG1NUC-HC255 |
| 702 | 2P | BG1NUC-HC256 |
| 703 | 2P | BG1NUC-HC257 |
| 704 | 2P | BG1NUC-HC258 |
| 705 | 2P | BG1NUC-HC259 |
| 706 | RBD | BG1NUC-HC260 |
| 707 | RBD | BG1NUC-HC261 |
| 708 | 2P | BG1NUC-HC262 |
| 709 | 2P | BG1NUC-HC263 |
| 710 | 2P | BG1NUC-HC264 |
| 711 | RBD | BG1NUC-HC265 |
| 712 | 2P | BG1NUC-HC266 |
| 713 | 2P | BG1NUC-HC267 |
| 714 | 2P | BG1NUC-HC268 |
| 715 | RBD | BG1NUC-HC269 |
| 716 | RBD | BG1NUC-HC270 |
| 717 | RBD | BG1NUC-HC271 |
| 718 | RBD | BG1NUC-HC272 |
| 719 | RBD | BG1NUC-HC273 |
| 720 | 2P | BG1NUC-HC274 |
| 721 | 2P | BG1NUC-HC275 |
| 722 | 2P | BG1NUC-HC276 |
| 723 | RBD | BG1NUC-HC277 |
| 724 | 2P | BG1NUC-HC278 |
| 725 | 2P | BG1NUC-HC279 |
| 726 | 2P | BG1NUC-HC280 |
| 727 | 2P | BG1NUC-HC281 |
| 728 | 2P | BG1NUC-HC282 |
| 729 | 2P | BG1NUC-HC283 |
| 730 | RBD | BG1NUC-HC284 |
| 731 | 2P | BG1NUC-HC285 |
| 732 | 2P | BG1NUC-HC286 |
| 733 | 2P | BG1NUC-HC287 |
| 734 | 2P | BG1NUC-HC288 |
| 735 | 2P | BG1NUC-HC289 |
| 736 | 2P | BG1NUC-HC290 |
| 737 | 2P | BG1NUC-HC291 |
| 738 | RBD | BG1NUC-HC292 |
| 739 | RBD | BG1NUC-HC293 |
| 740 | RBD | BG1NUC-HC294 |
| 741 | RBD | BG1NUC-HC295 |
| 742 | RBD | BG1NUC-HC296 |
| 743 | RBD | BG1NUC-HC297 |
| 744 | 2P | BG1NUC-HC298 |
| 745 | 2P | BG1NUC-HC299 |
| 746 | RBD | BG1NUC-HC300 |
| 747 | RBD | BG1NUC-HC301 |
| 748 | RBD | BG1NUC-HC302 |
| 749 | RBD | BG1NUC-HC303 |
| 750 | RBD | BG1NUC-HC304 |
| 751 | 2P | BG1NUC-HC305 |
| 752 | RBD | BG1NUC-HC306 |
| 753 | RBD | BG1NUC-HC307 |
| 754 | 2P | BG1NUC-HC308 |
| 755 | RBD | BG1NUC-LC1 |
| 756 | 2P | BG1NUC-LC2 |
| 757 | RBD | BG1NUC-LC3 |
| 758 | 2P | BG1NUC-LC4 |
| 759 | RBD | BG1NUC-LC5 |
| 760 | 2P | BG1NUC-LC6 |
| 761 | RBD | BG1NUC-LC7 |
| 762 | RBD | BG1NUC-LC8 |
| 763 | RBD | BG1NUC-LC9 |
| 764 | RBD | BG1NUC-LC10 |
| 765 | RBD | BG1NUC-LC11 |
| 766 | 2P | BG1NUC-LC12 |
| 767 | RBD | BG1NUC-LC13 |
| 768 | RBD | BG1NUC-LC14 |
| 769 | RBD | BG1NUC-LC15 |
| 770 | RBD | BG1NUC-LC16 |
| 771 | RBD | BG1NUC-LC17 |
| 772 | 2P | BG1NUC-LC18 |
| 773 | 2P | BG1NUC-LC19 |
| 774 | RBD | BG1NUC-LC20 |
| 775 | 2P | BG1NUC-LC21 |
| 776 | 2P | BG1NUC-LC22 |
| 777 | 2P | BG1NUC-LC23 |
| 778 | 2P | BG1NUC-LC24 |
| 779 | RBD | BG1NUC-LC25 |
| 780 | 2P | BG1NUC-LC26 |
| 781 | RBD | BG1NUC-LC27 |
| 782 | 2P | BG1NUC-LC28 |
| 783 | RBD | BG1NUC-LC29 |
| 784 | 2P | BG1NUC-LC30 |
| 785 | RBD | BG1NUC-LC31 |
| 786 | RBD | BG1NUC-LC32 |
| 787 | 2P | BG1NUC-LC33 |
| 788 | 2P | BG1NUC-LC34 |
| 789 | RBD | BG1NUC-LC35 |
| 790 | 2P | BG1NUC-LC36 |
| 791 | RBD | BG1NUC-LC37 |
| 792 | RBD | BG1NUC-LC38 |
| 793 | 2P | BG1NUC-LC39 |
| 794 | RBD | BG1NUC-LC40 |
| 795 | RBD | BG1NUC-LC41 |
| 796 | 2P | BG1NUC-LC42 |
| 797 | 2P | BG1NUC-LC43 |
| 798 | RBD | BG1NUC-LC44 |
| 799 | RBD | BG1NUC-LC45 |
| 800 | RBD | BG1NUC-LC46 |
| 801 | 2P | BG1NUC-LC47 |
| 802 | RBD | BG1NUC-LC48 |
| 803 | RBD | BG1NUC-LC49 |
| 804 | RBD | BG1NUC-LC50 |
| 805 | 2P | BG1NUC-LC51 |
| 806 | 2P | BG1NUC-LC52 |
| 807 | RBD | BG1NUC-LC53 |
| 808 | 2P | BG1NUC-LC54 |
| 809 | 2P | BG1NUC-LC55 |
| 810 | RBD | BG1NUC-LC56 |
| 811 | 2P | BG1NUC-LC57 |
| 812 | 2P | BG1NUC-LC58 |
| 813 | 2P | BG1NUC-LC59 |
| 814 | RBD | BG1NUC-LC60 |
| 815 | RBD | BG1NUC-LC61 |
| 816 | RBD | BG1NUC-LC62 |
| 817 | 2P | BG1NUC-LC63 |
| 818 | 2P | BG1NUC-LC64 |
| 819 | 2P | BG1NUC-LC65 |
| 820 | 2P | BG1NUC-LC66 |
| 821 | RBD | BG1NUC-LC67 |
| 822 | RBD | BG1NUC-LC68 |
| 823 | 2P | BG1NUC-LC69 |
| 824 | 2P | BG1NUC-LC70 |
| 825 | 2P | BG1NUC-LC71 |
| 826 | RBD | BG1NUC-LC72 |
| 827 | RBD | BG1NUC-LC73 |
| 828 | RBD | BG1NUC-LC74 |
| 829 | 2P | BG1NUC-LC75 |
| 830 | RBD | BG1NUC-LC76 |
| 831 | 2P | BG1NUC-LC77 |
| 832 | 2P | BG1NUC-LC78 |
| 833 | 2P | BG1NUC-LC79 |
| 834 | RBD | BG1NUC-LC80 |
| 835 | RBD | BG1NUC-LC81 |
| 836 | 2P | BG1NUC-LC82 |
| 837 | RBD | BG1NUC-LC83 |
| 838 | 2P | BG1NUC-LC84 |
| 839 | 2P | BG1NUC-LC85 |
| 840 | 2P | BG1NUC-LC86 |
| 841 | RBD | BG1NUC-LC87 |
| 842 | 2P | BG1NUC-LC88 |
| 843 | RBD | BG1NUC-LC89 |
| 844 | RBD | BG1NUC-LC90 |
| 845 | RBD | BG1NUC-LC91 |
| 846 | RBD | BG1NUC-LC92 |
| 847 | RBD | BG1NUC-LC93 |
| 848 | RBD | BG1NUC-LC94 |
| 849 | RBD | BG1NUC-LC95 |
| 850 | RBD | BG1NUC-LC96 |
| 851 | 2P | BG1NUC-LC97 |
| 852 | 2P | BG1NUC-LC98 |
| 853 | 2P | BG1NUC-LC99 |
| 854 | RBD | BG1NUC-LC100 |
| 855 | 2P | BG1NUC-LC101 |
| 856 | RBD | BG1NUC-LC102 |
| 857 | 2P | BG1NUC-LC103 |
| 858 | 2P | BG1NUC-LC104 |
| 859 | 2P | BG1NUC-LC105 |
| 860 | 2P | BG1NUC-LC106 |
| 861 | RBD | BG1NUC-LC107 |
| 862 | RBD | BG1NUC-LC108 |
| 863 | 2P | BG1NUC-LC109 |
| 864 | 2P | BG1NUC-LC110 |
| 865 | 2P | BG1NUC-LC111 |
| 866 | 2P | BG1NUC-LC112 |
| 867 | 2P | BG1NUC-LC113 |
| 868 | RBD | BG1NUC-LC114 |
| 869 | RBD | BG1NUC-LC115 |
| 870 | RBD | BG1NUC-LC116 |
| 871 | RBD | BG1NUC-LC117 |
| 872 | 2P | BG1NUC-LC118 |
| 873 | 2P | BG1NUC-LC119 |
| 874 | RBD | BG1NUC-LC120 |
| 875 | 2P | BG1NUC-LC121 |
| 876 | 2P | BG1NUC-LC122 |
| 877 | 2P | BG1NUC-LC123 |
| 878 | RBD | BG1NUC-LC124 |
| 879 | RBD | BG1NUC-LC125 |
| 880 | RBD | BG1NUC-LC126 |
| 881 | RBD | BG1NUC-LC127 |
| 882 | RBD | BG1NUC-LC128 |
| 883 | RBD | BG1NUC-LC129 |
| 884 | RBD | BG1NUC-LC130 |
| 885 | RBD | BG1NUC-LC131 |
| 886 | RBD | BG1NUC-LC132 |
| 887 | RBD | BG1NUC-LC133 |
| 888 | 2P | BG1NUC-LC134 |
| 889 | 2P | BG1NUC-LC135 |
| 890 | RBD | BG1NUC-LC136 |
| 891 | RBD | BG1NUC-LC137 |
| 892 | RBD | BG1NUC-LC138 |
| 893 | RBD | BG1NUC-LC139 |
| 894 | 2P | BG1NUC-LC140 |
| 895 | 2P | BG1NUC-LC141 |
| 896 | 2P | BG1NUC-LC142 |
| 897 | 2P | BG1NUC-LC143 |
| 898 | 2P | BG1NUC-LC144 |
| 899 | 2P | BG1NUC-LC145 |
| 900 | 2P | BG1NUC-LC146 |
| 901 | 2P | BG1NUC-LC147 |
| 902 | 2P | BG1NUC-LC148 |
| 903 | 2P | BG1NUC-LC149 |
| 904 | RBD | BG1NUC-LC150 |
| 905 | 2F | BG1NUC-LC151 |
| 906 | RBD | BG1NUC-LC152 |
| 907 | RBD | BG1NUC-LC153 |
| 908 | 2P | BG1NUC-LC154 |
| 909 | 2F | BG1NUC-LC155 |
| 910 | RBD | BG1NUC-LC156 |
| 911 | 2P | BG1NUC-LC157 |
| 912 | 2P | BG1NUC-LC158 |
| 913 | 2P | BG1NUC-LC159 |
| 914 | 2P | BG1NUC-LC160 |
| 915 | RBD | BG1NUC-LC161 |
| 916 | 2P | BG1NUC-LC162 |
| 917 | RBD | BG1NUC-LC163 |
| 918 | RBD | BG1NUC-LC164 |
| 919 | RBD | BG1NUC-LC165 |
| 920 | RBD | BG1NUC-LC166 |
| 921 | 2P | BG1NUC-LC167 |
| 922 | RBD | BG1NUC-LC168 |
| 923 | RBD | BG1NUC-LC169 |
| 924 | 2P | BG1NUC-LC170 |
| 925 | 2P | BG1NUC-LC171 |
| 926 | 2P | BG1NUC-LC172 |
| 927 | RBD | BG1NUC-LC173 |
| 928 | RBD | BG1NUC-LC174 |
| 929 | RBD | BG1NUC-LC175 |
| 930 | 2P | BG1NUC-LC176 |
| 931 | RBD | BG1NUC-LC177 |
| 932 | RBD | BG1NUC-LC178 |
| 933 | 2P | BG1NUC-LC179 |
| 934 | RBD | BG1NUC-LC180 |
| 935 | RBD | BG1NUC-LC181 |
| 936 | RBD | BG1NUC-LC182 |
| 937 | RBD | BG1NUC-LC183 |
| 938 | 2F | BG1NUC-LC184 |
| 939 | RBD | BG1NUC-LC185 |
| 940 | RBD | BG1NUC-LC186 |
| 941 | RBD | BG1NUC-LC187 |
| 942 | RBD | BG1NUC-LC188 |
| 943 | 2P | BG1NUC-LC189 |
| 944 | RBD | BG1NUC-LC190 |
| 945 | 2P | BG1NUC-LC191 |
| 946 | 2P | BG1NUC-LC192 |
| 947 | 2P | BG1NUC-LC193 |
| 948 | 2P | BG1NUC-LC194 |
| 949 | 2P | BG1NUC-LC195 |
| 950 | 2P | BG1NUC-LC196 |
| 951 | 2P | BG1NUC-LC197 |
| 952 | 2P | BG1NUC-LC198 |
| 953 | 2P | BG1NUC-LC199 |
| 954 | RBD | BG1NUC-LC200 |
| 955 | RBD | BG1NUC-LC201 |
| 956 | RBD | BG1NUC-LC202 |
| 957 | 2P | BG1NUC-LC203 |
| 958 | 2P | BG1NUC-LC204 |
| 959 | 2P | BG1NUC-LC205 |
| 960 | RBD | BG1NUC-LC206 |
| 961 | 2P | BG1NUC-LC207 |
| 962 | 2P | BG1NUC-LC208 |
| 963 | 2P | BG1NUC-LC209 |
| 964 | RBD | BG1NUC-LC210 |
| 965 | RBD | BG1NUC-LC211 |
| 966 | 2P | BG1NUC-LC212 |
| 967 | 2P | BG1NUC-LC213 |
| 968 | 2P | BG1NUC-LC214 |
| 969 | 2F | BG1NUC-LC215 |
| 970 | RBD | BG1NUC-LC216 |
| 971 | 2P | BG1NUC-LC217 |
| 972 | 2P | BG1NUC-LC218 |
| 973 | RBD | BG1NUC-LC219 |
| 974 | 2P | BG1NUC-LC220 |
| 975 | 2P | BG1NUC-LC221 |
| 976 | 2P | BG1NUC-LC222 |
| 977 | 2P | BG1NUC-LC223 |
| 978 | RBD | BG1NUC-LC224 |
| 979 | RBD | BG1NUC-LC225 |
| 980 | 2P | BG1NUC-LC226 |
| 981 | 2P | BG1NUC-LC227 |
| 982 | 2P | BG1NUC-LC228 |
| 983 | RBD | BG1NUC-LC229 |
| 984 | RBD | BG1NUC-LC230 |
| 985 | RBD | BG1NUC-LC231 |
| 986 | 2P | BG1NUC-LC232 |
| 987 | RBD | BG1NUC-LC233 |
| 988 | RBD | BG1NUC-LC234 |
| 989 | 2P | BG1NUC-LC235 |
| 990 | 2P | BG1NUC-LC236 |
| 991 | 2P | BG1NUC-LC237 |
| 992 | 2P | BG1NUC-LC238 |
| 993 | RBD | BG1NUC-LC239 |
| 994 | RBD | BG1NUC-LC240 |
| 995 | 2P | BG1NUC-LC241 |
| 996 | 2P | BG1NUC-LC242 |
| 997 | 2P | BG1NUC-LC243 |
| 998 | RBD | BG1NUC-LC244 |
| 999 | RBD | BG1NUC-LC245 |
| 1000 | RBD | BG1NUC-LC246 |
| 1001 | 2P | BG1NUC-LC247 |
| 1002 | 2P | BG1NUC-LC248 |
| 1003 | 2P | BG1NUC-LC249 |
| 1004 | RBD | BG1NUC-LC250 |
| 1005 | RBD | BG1NUC-LC251 |
| 1006 | 2P | BG1NUC-LC252 |
| 1007 | RBD | BG1NUC-LC253 |
| 1008 | RBD | BG1NUC-LC254 |
| 1009 | RBD | BG1NUC-LC255 |
| 1010 | 2P | BG1NUC-LC256 |
| 1011 | 2P | BG1NUC-LC257 |
| 1012 | 2P | BG1NUC-LC258 |
| 1013 | 2P | BG1NUC-LC259 |
| 1014 | RBD | BG1NUC-LC260 |
| 1015 | RBD | BG1NUC-LC261 |
| 1016 | 2P | BG1NUC-LC262 |
| 1017 | 2P | BG1NUC-LC263 |
| 1018 | 2P | BG1NUC-LC264 |
| 1019 | RBD | BG1NUC-LC265 |
| 1020 | 2P | BG1NUC-LC266 |
| 1021 | 2P | BG1NUC-LC267 |
| 1022 | 2P | BG1NUC-LC268 |
| 1023 | RBD | BG1NUC-LC269 |
| 1024 | RBD | BG1NUC-LC270 |
| 1025 | RBD | BG1NUC-LC271 |
| 1026 | RBD | BG1NUC-LC272 |
| 1027 | RBD | BG1NUC-LC273 |
| 1028 | 2P | BG1NUC-LC274 |
| 1029 | 2P | BG1NUC-LC275 |
| 1030 | 2P | BG1NUC-LC276 |
| 1031 | RBD | BG1NUC-LC277 |
| 1032 | 2P | BG1NUC-LC278 |
| 1033 | 2P | BG1NUC-LC279 |
| 1034 | 2P | BG1NUC-LC280 |
| 1035 | 2P | BG1NUC-LC281 |
| 1036 | 2P | BG1NUC-LC282 |
| 1037 | 2P | BG1NUC-LC283 |
| 1038 | RBD | BG1NUC-LC284 |
| 1039 | 2P | BG1NUC-LC285 |
| 1040 | 2P | BG1NUC-LC286 |
| 1041 | 2P | BG1NUC-LC287 |
| 1042 | 2P | BG1NUC-LC288 |
| 1043 | 2P | BG1NUC-LC289 |
| 1044 | 2P | BG1NUC-LC290 |
| 1045 | 2P | BG1NUC-LC291 |
| 1046 | RBD | BG1NUC-LC292 |
| 1047 | RBD | BG1NUC-LC293 |
| 1048 | RBD | BG1NUC-LC294 |
| 1049 | RBD | BG1NUC-LC295 |
| 1050 | RBD | BG1NUC-LC296 |
| 1051 | RBD | BG1NUC-LC297 |
| 1052 | 2P | BG1NUC-LC298 |
| 1053 | 2P | BG1NUC-LC299 |
| 1054 | RBD | BG1NUC-LC300 |
| 1055 | RBD | BG1NUC-LC301 |
| 1056 | RBD | BG1NUC-LC302 |
| 1057 | RBD | BG1NUC-LC303 |
| 1058 | RBD | BG1NUC-LC304 |
| 1059 | 2P | BG1NUC-LC305 |
| 1060 | RBD | BG1NUC-LC306 |
| 1061 | RBD | BG1NUC-LC307 |
| 1062 | 2P | BG1NUC-LC308 |
| 1063 | RBD | BG2NUC-HC1 |
| 1064 | RBD | BG2NUC-HC2 |
| 1065 | 2P | BG2NUC-HC3 |
| 1066 | RBD | BG2NUC-HC4 |
| 1067 | RBD | BG2NUC-HC5 |
| 1068 | RBD | BG2NUC-HC6 |
| 1069 | RBD | BG2NUC-HC7 |
| 1070 | RBD | BG2NUC-HC8 |
| 1071 | 2P | BG2NUC-HC9 |
| 1072 | RBD | BG2NUC-HC10 |
| 1073 | 2P | BG2NUC-HC11 |
| 1074 | RBD | BG2NUC-HC12 |
| 1075 | RBD | BG2NUC-HC13 |
| 1076 | RBD | BG2NUC-HC14 |
| 1077 | RBD | BG2NUC-HC15 |
| 1078 | RBD | BG2NUC-HC16 |
| 1079 | RBD | BG2NUC-HC17 |
| 1080 | RBD | BG2NUC-HC18 |
| 1081 | RBD | BG2NUC-HC19 |
| 1082 | RBD | BG2NUC-HC20 |
| 1083 | RBD | BG2NUC-HC21 |
| 1084 | 2P | BG2NUC-HC22 |
| 1085 | RBD | BG2NUC-HC23 |
| 1086 | RBD | BG2NUC-HC24 |
| 1087 | RBD | BG2NUC-HC25 |
| 1088 | RBD | BG2NUC-HC26 |
| 1089 | RBD | BG2NUC-HC27 |
| 1090 | RBD | BG2NUC-HC28 |
| 1091 | RBD | BG2NUC-HC29 |
| 1092 | 2P | BG2NUC-HC30 |
| 1093 | RBD | BG2NUC-HC31 |
| 1094 | RBD | BG2NUC-HC32 |
| 1095 | RBD | BG2NUC-HC33 |
| 1096 | RBD | BG2NUC-HC34 |
| 1097 | 2P | BG2NUC-HC35 |
| 1098 | RBD | BG2NUC-HC36 |
| 1099 | 2P | BG2NUC-HC37 |
| 1100 | RBD | BG2NUC-HC38 |
| 1101 | RBD | BG2NUC-HC39 |
| 1102 | RBD | BG2NUC-HC40 |
| 1103 | RBD | BG2NUC-HC41 |
| 1104 | RBD | BG2NUC-HC42 |
| 1105 | RBD | BG2NUC-HC43 |
| 1106 | RBD | BG2NUC-HC44 |
| 1107 | RBD | BG2NUC-HC45 |
| 1108 | RBD | BG2NUC-HC46 |
| 1109 | 2P | BG2NUC-HC47 |
| 1110 | 2P | BG2NUC-HC48 |
| 1111 | RBD | BG2NUC-HC49 |
| 1112 | RBD | BG2NUC-HC50 |
| 1113 | 2P | BG2NUC-HC51 |
| 1114 | RBD | BG2NUC-HC52 |
| 1115 | RBD | BG2NUC-HC53 |
| 1116 | 2P | BG2NUC-HC54 |
| 1117 | RBD | BG2NUC-HC55 |
| 1118 | RBD | BG2NUC-HC56 |
| 1119 | 2P | BG2NUC-HC57 |
| 1120 | RBD | BG2NUC-HC58 |
| 1121 | 2P | BG2NUC-HC59 |
| 1122 | RBD | BG2NUC-HC60 |
| 1123 | RBD | BG2NUC-HC61 |
| 1124 | 2P | BG2NUC-HC62 |
| 1125 | 2F | BG2NUC-HC63 |
| 1126 | 2F | BG2NUC-HC64 |
| 1127 | 2P | BG2NUC-HC65 |
| 1128 | 2P | BG2NUC-HC66 |
| 1129 | 2P | BG2NUC-HC67 |
| 1130 | 2P | BG2NUC-HC68 |
| 1131 | 2P | BG2NUC-HC69 |
| 1132 | 2P | BG2NUC-HC70 |
| 1133 | RBD | BG2NUC-HC71 |
| 1134 | RBD | BG2NUC-HC72 |
| 1135 | RBD | BG2NUC-HC73 |
| 1136 | 2F | BG2NUC-HC74 |
| 1137 | RBD | BG2NUC-HC75 |
| 1138 | RBD | BG2NUC-HC76 |
| 1139 | 2P | BG2NUC-HC77 |
| 1140 | 2P | BG2NUC-HC78 |
| 1141 | RBD | BG2NUC-HC79 |
| 1142 | 2P | BG2NUC-HC80 |
| 1143 | RBD | BG2NUC-HC81 |
| 1144 | 2P | BG2NUC-HC82 |
| 1145 | 2P | BG2NUC-HC83 |
| 1146 | RBD | BG2NUC-HC84 |
| 1147 | RBD | BG2NUC-HC85 |
| 1148 | 2P | BG2NUC-HC86 |
| 1149 | RBD | BG2NUC-HC87 |
| 1150 | 2P | BG2NUC-HC88 |
| 1151 | RBD | BG2NUC-HC89 |
| 1152 | RBD | BG2NUC-HC90 |
| 1153 | 2P | BG2NUC-HC91 |
| 1154 | 2P | BG2NUC-HC92 |
| 1155 | 2P | BG2NUC-HC93 |
| 1156 | 2F | BG2NUC-HC94 |
| 1157 | 2P | BG2NUC-HC95 |
| 1158 | 2P | BG2NUC-HC96 |
| 1159 | RBD | BG2NUC-HC97 |
| 1160 | 2P | BG2NUC-HC98 |
| 1161 | 2P | BG2NUC-HC99 |
| 1162 | RBD | BG2NUC-HC100 |
| 1163 | RBD | BG2NUC-HC101 |
| 1164 | RBD | BG2NUC-HC102 |
| 1165 | RBD | BG2NUC-HC103 |
| 1166 | RBD | BG2NUC-HC104 |
| 1167 | 2P | BG2NUC-HC105 |
| 1168 | RBD | BG2NUC-HC106 |
| 1169 | RBD | BG2NUC-HC107 |
| 1170 | RBD | BG2NUC-HC108 |
| 1171 | 2P | BG2NUC-HC109 |
| 1172 | RBD | BG2NUC-HC110 |
| 1173 | RBD | BG2NUC-HC111 |
| 1174 | RBD | BG2NUC-HC112 |
| 1175 | 2P | BG2NUC-HC113 |
| 1176 | 2P | BG2NUC-HC114 |
| 1177 | RBD | BG2NUC-HC115 |
| 1178 | RBD | BG2NUC-HC116 |
| 1179 | 2P | BG2NUC-HC117 |
| 1180 | 2P | BG2NUC-HC118 |
| 1181 | 2F | BG2NUC-HC119 |
| 1182 | 2F | BG2NUC-HC120 |
| 1183 | RBD | BG2NUC-HC121 |
| 1184 | RBD | BG2NUC-HC122 |
| 1185 | 2P | BG2NUC-HC123 |
| 1186 | 2P | BG2NUC-HC124 |
| 1187 | RBD | BG2NUC-HC125 |
| 1188 | RBD | BG2NUC-HC126 |
| 1189 | 2P | BG2NUC-HC127 |
| 1190 | 2P | BG2NUC-HC128 |
| 1191 | 2P | BG2NUC-HC129 |
| 1192 | 2P | BG2NUC-HC130 |
| 1193 | 2P | BG2NUC-HC131 |
| 1194 | 2P | BG2NUC-HC132 |
| 1195 | 2P | BG2NUC-HC133 |
| 1196 | 2P | BG2NUC-HC134 |
| 1197 | RBD | BG2NUC-HC135 |
| 1198 | RBD | BG2NUC-HC136 |
| 1199 | RBD | BG2NUC-HC137 |
| 1200 | 2P | BG2NUC-HC138 |
| 1201 | 2P | BG2NUC-HC139 |
| 1202 | 2P | BG2NUC-HC140 |
| 1203 | 2P | BG2NUC-HC141 |
| 1204 | 2P | BG2NUC-HC142 |
| 1205 | 2P | BG2NUC-HC143 |
| 1206 | 2P | BG2NUC-HC144 |
| 1207 | RBD | BG2NUC-HC145 |
| 1208 | RBD | BG2NUC-HC146 |
| 1209 | 2P | BG2NUC-HC147 |
| 1210 | RBD | BG2NUC-HC148 |
| 1211 | 2P | BG2NUC-HC149 |
| 1212 | 2P | BG2NUC-HC150 |
| 1213 | 2P | BG2NUC-HC151 |
| 1214 | 2P | BG2NUC-HC152 |
| 1215 | 2P | BG2NUC-HC153 |
| 1216 | 2P | BG2NUC-HC154 |
| 1217 | 2P | BG2NUC-HC155 |
| 1218 | 2P | BG2NUC-HC156 |
| 1219 | RBD | BG2NUC-HC157 |
| 1220 | 2P | BG2NUC-HC158 |
| 1221 | 2P | BG2NUC-HC159 |
| 1222 | RBD | BG2NUC-HC160 |
| 1223 | 2P | BG2NUC-HC161 |
| 1224 | 2P | BG2NUC-HC162 |
| 1225 | RBD | BG2NUC-HC163 |
| 1226 | 2P | BG2NUC-HC164 |
| 1227 | RBD | BG2NUC-HC165 |
| 1228 | RBD | BG2NUC-HC166 |
| 1229 | 2P | BG2NUC-HC167 |
| 1230 | 2P | BG2NUC-HC168 |
| 1231 | 2P | BG2NUC-HC169 |
| 1232 | 2P | BG2NUC-HC170 |
| 1233 | RBD | BG2NUC-HC171 |
| 1234 | 2P | BG2NUC-HC172 |
| 1235 | 2P | BG2NUC-HC173 |
| 1236 | 2P | BG2NUC-HC174 |
| 1237 | RBD | BG2NUC-HC175 |
| 1238 | 2P | BG2NUC-HC176 |
| 1239 | RBD | BG2NUC-HC177 |
| 1240 | RBD | BG2NUC-HC178 |
| 1241 | RBD | BG2NUC-HC179 |
| 1242 | 2P | BG2NUC-HC180 |
| 1243 | RBD | BG2NUC-HC181 |
| 1244 | RBD | BG2NUC-HC182 |
| 1245 | 2P | BG2NUC-HC183 |
| 1246 | 2P | BG2NUC-HC184 |
| 1247 | RBD | BG2NUC-HC185 |
| 1248 | 2P | BG2NUC-HC186 |
| 1249 | RBD | BG2NUC-HC187 |
| 1250 | 2P | BG2NUC-HC188 |
| 1251 | 2P | BG2NUC-HC189 |
| 1252 | 2P | BG2NUC-HC190 |
| 1253 | 2P | BG2NUC-HC191 |
| 1254 | RBD | BG2NUC-HC192 |
| 1255 | 2P | BG2NUC-HC193 |
| 1256 | RBD | BG2NUC-HC194 |
| 1257 | 2P | BG2NUC-HC195 |
| 1258 | 2P | BG2NUC-HC196 |
| 1259 | RBD | BG2NUC-HC197 |
| 1260 | RBD | BG2NUC-HC198 |
| 1261 | 2P | BG2NUC-HC199 |
| 1262 | 2P | BG2NUC-HC200 |
| 1263 | RBD | BG2NUC-HC201 |
| 1264 | 2P | BG2NUC-HC202 |
| 1265 | RBD | BG2NUC-HC203 |
| 1266 | 2P | BG2NUC-HC204 |
| 1267 | RBD | BG2NUC-HC205 |
| 1268 | 2P | BG2NUC-HC206 |
| 1269 | RBD | BG2NUC-HC207 |
| 1270 | 2P | BG2NUC-HC208 |
| 1271 | 2P | BG2NUC-HC209 |
| 1272 | 2P | BG2NUC-HC210 |
| 1273 | RBD | BG2NUC-HC211 |
| 1274 | 2P | BG2NUC-HC212 |
| 1275 | RBD | BG2NUC-HC213 |
| 1276 | 2P | BG2NUC-HC214 |
| 1277 | RBD | BG2NUC-HC215 |
| 1278 | 2F | BG2NUC-HC216 |
| 1279 | RBD | BG2NUC-HC217 |
| 1280 | RBD | BG2NUC-HC218 |
| 1281 | RBD | BG2NUC-HC219 |
| 1282 | 2P | BG2NUC-HC220 |
| 1283 | RBD | BG2NUC-HC221 |
| 1284 | RBD | BG2NUC-HC222 |
| 1285 | RBD | BG2NUC-HC223 |
| 1286 | 2P | BG2NUC-HC224 |
| 1287 | RBD | BG2NUC-HC225 |
| 1288 | 2P | BG2NUC-HC226 |
| 1289 | 2P | BG2NUC-HC227 |
| 1290 | 2P | BG2NUC-HC228 |
| 1291 | RBD | BG2NUC-HC229 |
| 1292 | 2P | BG2NUC-HC230 |
| 1293 | RBD | BG2NUC-HC231 |
| 1294 | 2P | BG2NUC-HC232 |
| 1295 | 2P | BG2NUC-HC233 |
| 1296 | 2P | BG2NUC-HC234 |
| 1297 | RBD | BG2NUC-HC235 |
| 1298 | RBD | BG2NUC-HC236 |
| 1299 | 2P | BG2NUC-HC237 |
| 1300 | RBD | BG2NUC-HC238 |
| 1301 | 2P | BG2NUC-HC239 |
| 1302 | 2P | BG2NUC-HC240 |
| 1303 | 2P | BG2NUC-HC241 |
| 1304 | RBD | BG2NUC-HC242 |
| 1305 | 2P | BG2NUC-HC243 |
| 1306 | RBD | BG2NUC-HC244 |
| 1307 | RBD | BG2NUC-HC245 |
| 1308 | 2P | BG2NUC-HC246 |
| 1309 | RBD | BG2NUC-HC247 |
| 1310 | RBD | BG2NUC-HC248 |
| 1311 | 2P | BG2NUC-HC249 |
| 1312 | 2P | BG2NUC-HC250 |
| 1313 | 2P | BG2NUC-HC251 |
| 1314 | RBD | BG2NUC-HC252 |
| 1315 | 2P | BG2NUC-HC253 |
| 1316 | RBD | BG2NUC-HC254 |
| 1317 | 2P | BG2NUC-HC255 |
| 1318 | RBD | BG2NUC-HC256 |
| 1319 | 2P | BG2NUC-HC257 |
| 1320 | 2P | BG2NUC-HC258 |
| 1321 | 2P | BG2NUC-HC259 |
| 1322 | 2P | BG2NUC-HC260 |
| 1323 | 2P | BG2NUC-HC261 |
| 1324 | RBD | BG2NUC-HC262 |
| 1325 | 2P | BG2NUC-HC263 |
| 1326 | RBD | BG2NUC-HC264 |
| 1327 | 2P | BG2NUC-HC265 |
| 1328 | 2P | BG2NUC-HC266 |
| 1329 | 2P | BG2NUC-HC267 |
| 1330 | 2P | BG2NUC-HC268 |
| 1331 | RBD | BG2NUC-HC269 |
| 1332 | 2P | BG2NUC-HC270 |
| 1333 | 2P | BG2NUC-HC271 |
| 1334 | 2P | BG2NUC-HC272 |
| 1335 | 2P | BG2NUC-HC273 |
| 1336 | 2P | BG2NUC-HC274 |
| 1337 | 2P | BG2NUC-HC275 |
| 1338 | 2P | BG2NUC-HC276 |
| 1339 | 2P | BG2NUC-HC277 |
| 1340 | 2P | BG2NUC-HC278 |
| 1341 | 2P | BG2NUC-HC279 |
| 1342 | RBD | BG2NUC-HC280 |
| 1343 | RBD | BG2NUC-HC281 |
| 1344 | RBD | BG2NUC-HC282 |
| 1345 | 2P | BG2NUC-HC283 |
| 1346 | 2P | BG2NUC-HC284 |
| 1347 | 2P | BG2NUC-HC285 |
| 1348 | 2P | BG2NUC-HC286 |
| 1349 | RBD | BG2NUC-HC287 |
| 1350 | 2P | BG2NUC-HC288 |
| 1351 | 2P | BG2NUC-HC289 |
| 1352 | RBD | BG2NUC-HC290 |
| 1353 | 2P | BG2NUC-HC291 |
| 1354 | 2P | BG2NUC-HC292 |
| 1355 | 2P | BG2NUC-HC293 |
| 1356 | 2P | BG2NUC-HC294 |
| 1357 | RBD | BG2NUC-HC295 |
| 1358 | 2P | BG2NUC-HC296 |
| 1359 | 2P | BG2NUC-HC297 |
| 1360 | RBD | BG2NUC-HC298 |
| 1361 | 2P | BG2NUC-HC299 |
| 1362 | 2P | BG2NUC-HC300 |
| 1363 | 2P | BG2NUC-HC301 |
| 1364 | 2P | BG2NUC-HC302 |
| 1365 | 2P | BG2NUC-HC303 |
| 1366 | 2P | BG2NUC-HC304 |
| 1367 | RBD | BG2NUC-HC305 |
| 1368 | 2P | BG2NUC-HC306 |
| 1369 | 2P | BG2NUC-HC307 |
| 1370 | 2P | BG2NUC-HC308 |
| 1371 | 2P | BG2NUC-HC309 |
| 1372 | RBD | BG2NUC-HC310 |
| 1373 | RBD | BG2NUC-HC311 |
| 1374 | RBD | BG2NUC-HC312 |
| 1375 | RBD | BG2NUC-HC313 |
| 1376 | RBD | BG2NUC-HC314 |
| 1377 | RBD | BG2NUC-HC315 |
| 1378 | 2P | BG2NUC-HC316 |
| 1379 | RBD | BG2NUC-HC317 |
| 1380 | 2P | BG2NUC-HC318 |
| 1381 | 2P | BG2NUC-HC319 |
| 1382 | 2P | BG2NUC-HC320 |
| 1383 | 2P | BG2NUC-HC321 |
| 1384 | RBD | BG2NUC-HC322 |
| 1385 | RBD | BG2NUC-HC323 |
| 1386 | RBD | BG2NUC-HC324 |
| 1387 | RBD | BG2NUC-HC325 |
| 1388 | RBD | BG2NUC-HC326 |
| 1389 | 2P | BG2NUC-HC327 |
| 1390 | 2P | BG2NUC-HC328 |
| 1391 | 2P | BG2NUC-HC329 |
| 1392 | 2P | BG2NUC-HC330 |
| 1393 | 2P | BG2NUC-HC331 |
| 1394 | 2P | BG2NUC-HC332 |
| 1395 | 2P | BG2NUC-HC333 |
| 1396 | RBD | BG2NUC-HC334 |
| 1397 | 2P | BG2NUC-HC335 |
| 1398 | 2P | BG2NUC-HC336 |
| 1399 | RBD | BG2NUC-HC337 |
| 1400 | 2P | BG2NUC-HC338 |
| 1401 | 2P | BG2NUC-HC339 |
| 1402 | 2P | BG2NUC-HC340 |
| 1403 | 2P | BG2NUC-HC341 |
| 1404 | 2P | BG2NUC-HC342 |
| 1405 | 2P | BG2NUC-HC343 |
| 1406 | 2P | BG2NUC-HC344 |
| 1407 | RBD | BG2NUC-HC345 |
| 1408 | 2P | BG2NUC-HC346 |
| 1409 | 2P | BG2NUC-HC347 |
| 1410 | 2P | BG2NUC-HC348 |
| 1411 | RBD | BG2NUC-HC349 |
| 1412 | RBD | BG2NUC-HC350 |
| 1413 | 2P | BG2NUC-HC351 |
| 1414 | RBD | BG2NUC-HC352 |
| 1415 | RBD | BG2NUC-HC353 |
| 1416 | 2P | BG2NUC-HC354 |
| 1417 | 2P | BG2NUC-HC355 |
| 1418 | 2P | BG2NUC-HC356 |
| 1419 | 2P | BG2NUC-HC357 |
| 1420 | 2P | BG2NUC-HC358 |
| 1421 | 2P | BG2NUC-HC359 |
| 1422 | 2P | BG2NUC-HC360 |
| 1423 | 2P | BG2NUC-HC361 |
| 1424 | 2P | BG2NUC-HC362 |
| 1425 | 2P | BG2NUC-HC363 |
| 1426 | RBD | BG2NUC-HC364 |
| 1427 | 2P | BG2NUC-HC365 |
| 1428 | 2P | BG2NUC-HC366 |
| 1429 | 2P | BG2NUC-HC367 |
| 1430 | RBD | BG2NUC-HC368 |
| 1431 | 2P | BG2NUC-HC369 |
| 1432 | 2P | BG2NUC-HC370 |
| 1433 | 2P | BG2NUC-HC371 |
| 1434 | 2P | BG2NUC-HC372 |
| 1435 | 2P | BG2NUC-HC373 |
| 1436 | 2P | BG2NUC-HC374 |
| 1437 | 2P | BG2NUC-HC375 |
| 1438 | 2P | BG2NUC-HC376 |
| 1439 | 2P | BG2NUC-HC377 |
| 1440 | 2P | BG2NUC-HC378 |
| 1441 | 2P | BG2NUC-HC379 |
| 1442 | 2P | BG2NUC-HC380 |
| 1443 | RBD | BG2NUC-LC1 |
| 1444 | RBD | BG2NUC-LC2 |
| 1445 | 2P | BG2NUC-LC3 |
| 1446 | RBD | BG2NUC-LC4 |
| 1447 | RBD | BG2NUC-LC5 |
| 1448 | RBD | BG2NUC-LC6 |
| 1449 | RBD | BG2NUC-LC7 |
| 1450 | RBD | BG2NUC-LC8 |
| 1451 | 2P | BG2NUC-LC9 |
| 1452 | RBD | BG2NUC-LC10 |
| 1453 | 2P | BG2NUC-LC11 |
| 1454 | RBD | BG2NUC-LC12 |
| 1455 | RBD | BG2NUC-LC13 |
| 1456 | RBD | BG2NUC-LC14 |
| 1457 | RBD | BG2NUC-LC15 |
| 1458 | RBD | BG2NUC-LC16 |
| 1459 | RBD | BG2NUC-LC17 |
| 1460 | RBD | BG2NUC-LC18 |
| 1461 | RBD | BG2NUC-LC19 |
| 1462 | RBD | BG2NUC-LC20 |
| 1463 | RBD | BG2NUC-LC21 |
| 1464 | 2P | BG2NUC-LC22 |
| 1465 | RBD | BG2NUC-LC23 |
| 1466 | RBD | BG2NUC-LC24 |
| 1467 | RBD | BG2NUC-LC25 |
| 1468 | RBD | BG2NUC-LC26 |
| 1469 | RBD | BG2NUC-LC27 |
| 1470 | RBD | BG2NUC-LC28 |
| 1471 | RBD | BG2NUC-LC29 |
| 1472 | 2P | BG2NUC-LC30 |
| 1473 | RBD | BG2NUC-LC31 |
| 1474 | RBD | BG2NUC-LC32 |
| 1475 | RBD | BG2NUC-LC33 |
| 1476 | RBD | BG2NUC-LC34 |
| 1477 | 2P | BG2NUC-LC35 |
| 1478 | RBD | BG2NUC-LC36 |
| 1479 | 2P | BG2NUC-LC37 |
| 1480 | RBD | BG2NUC-LC38 |
| 1481 | RBD | BG2NUC-LC39 |
| 1482 | RBD | BG2NUC-LC40 |
| 1483 | RBD | BG2NUC-LC41 |
| 1484 | RBD | BG2NUC-LC42 |
| 1485 | RBD | BG2NUC-LC43 |
| 1486 | RBD | BG2NUC-LC44 |
| 1487 | RBD | BG2NUC-LC45 |
| 1488 | RBD | BG2NUC-LC46 |
| 1489 | 2P | BG2NUC-LC47 |
| 1490 | 2P | BG2NUC-LC48 |
| 1491 | RBD | BG2NUC-LC49 |
| 1492 | RBD | BG2NUC-LC50 |
| 1493 | 2P | BG2NUC-LC51 |
| 1494 | RBD | BG2NUC-LC52 |
| 1495 | RBD | BG2NUC-LC53 |
| 1496 | 2P | BG2NUC-LC54 |
| 1497 | RBD | BG2NUC-LC55 |
| 1498 | RBD | BG2NUC-LC56 |
| 1499 | 2P | BG2NUC-LC57 |
| 1500 | RBD | BG2NUC-LC58 |
| 1501 | 2P | BG2NUC-LC59 |
| 1502 | RBD | BG2NUC-LC60 |
| 1503 | RBD | BG2NUC-LC61 |
| 1504 | 2P | BG2NUC-LC62 |
| 1505 | 2P | BG2NUC-LC63 |
| 1506 | 2P | BG2NUC-LC64 |
| 1507 | 2P | BG2NUC-LC65 |
| 1508 | 2P | BG2NUC-LC66 |
| 1509 | 2P | BG2NUC-LC67 |
| 1510 | 2P | BG2NUC-LC68 |
| 1511 | 2P | BG2NUC-LC69 |
| 1512 | 2P | BG2NUC-LC70 |
| 1513 | RBD | BG2NUC-LC71 |
| 1514 | RBD | BG2NUC-LC72 |
| 1515 | RBD | BG2NUC-LC73 |
| 1516 | 2P | BG2NUC-LC74 |
| 1517 | RBD | BG2NUC-LC75 |
| 1518 | RBD | BG2NUC-LC76 |
| 1519 | 2P | BG2NUC-LC77 |
| 1520 | 2P | BG2NUC-LC78 |
| 1521 | RBD | BG2NUC-LC79 |
| 1522 | 2P | BG2NUC-LC80 |
| 1523 | RBD | BG2NUC-LC81 |
| 1524 | 2P | BG2NUC-LC82 |
| 1525 | 2P | BG2NUC-LC83 |
| 1526 | RBD | BG2NUC-LC84 |
| 1527 | RBD | BG2NUC-LC85 |
| 1528 | 2P | BG2NUC-LC86 |
| 1529 | RBD | BG2NUC-LC87 |
| 1530 | 2P | BG2NUC-LC88 |
| 1531 | RBD | BG2NUC-LC89 |
| 1532 | RBD | BG2NUC-LC90 |
| 1533 | 2P | BG2NUC-LC91 |
| 1534 | 2P | BG2NUC-LC92 |
| 1535 | 2P | BG2NUC-LC93 |
| 1536 | 2P | BG2NUC-LC94 |
| 1537 | 2P | BG2NUC-LC95 |
| 1538 | 2P | BG2NUC-LC96 |
| 1539 | RBD | BG2NUC-LC97 |
| 1540 | 2P | BG2NUC-LC98 |
| 1541 | 2P | BG2NUC-LC99 |
| 1542 | RBD | BG2NUC-LC100 |
| 1543 | RBD | BG2NUC-LC101 |
| 1544 | RBD | BG2NUC-LC102 |
| 1545 | RBD | BG2NUC-LC103 |
| 1546 | RBD | BG2NUC-LC104 |
| 1547 | 2P | BG2NUC-LC105 |
| 1548 | RBD | BG2NUC-LC106 |
| 1549 | RBD | BG2NUC-LC107 |
| 1550 | RBD | BG2NUC-LC108 |
| 1551 | 2P | BG2NUC-LC109 |
| 1552 | RBD | BG2NUC-LC110 |
| 1553 | RBD | BG2NUC-LC111 |
| 1554 | RBD | BG2NUC-LC112 |
| 1555 | 2P | BG2NUC-LC113 |
| 1556 | 2P | BG2NUC-LC114 |
| 1557 | RBD | BG2NUC-LC115 |
| 1558 | RBD | BG2NUC-LC116 |
| 1559 | 2P | BG2NUC-LC117 |
| 1560 | 2P | BG2NUC-LC118 |
| 1561 | 2P | BG2NUC-LC119 |
| 1562 | 2P | BG2NUC-LC120 |
| 1563 | RBD | BG2NUC-LC121 |
| 1564 | RBD | BG2NUC-LC122 |
| 1565 | 2P | BG2NUC-LC123 |
| 1566 | 2P | BG2NUC-LC124 |
| 1567 | RBD | BG2NUC-LC125 |
| 1568 | RBD | BG2NUC-LC126 |
| 1569 | 2P | BG2NUC-LC127 |
| 1570 | 2P | BG2NUC-LC128 |
| 1571 | 2P | BG2NUC-LC129 |
| 1572 | 2P | BG2NUC-LC130 |
| 1573 | 2P | BG2NUC-LC131 |
| 1574 | 2P | BG2NUC-LC132 |
| 1575 | 2P | BG2NUC-LC133 |
| 1576 | 2P | BG2NUC-LC134 |
| 1577 | RBD | BG2NUC-LC135 |
| 1578 | RBD | BG2NUC-LC136 |
| 1579 | RBD | BG2NUC-LC137 |
| 1580 | 2P | BG2NUC-LC138 |
| 1581 | 2P | BG2NUC-LC139 |
| 1582 | 2P | BG2NUC-LC140 |
| 1583 | 2P | BG2NUC-LC141 |
| 1584 | 2P | BG2NUC-LC142 |
| 1585 | 2P | BG2NUC-LC143 |
| 1586 | 2P | BG2NUC-LC144 |
| 1587 | RBD | BG2NUC-LC145 |
| 1588 | RBD | BG2NUC-LC146 |
| 1589 | 2P | BG2NUC-LC147 |
| 1590 | RBD | BG2NUC-LC148 |
| 1591 | 2P | BG2NUC-LC149 |
| 1592 | 2P | BG2NUC-LC150 |
| 1593 | 2P | BG2NUC-LC151 |
| 1594 | 2P | BG2NUC-LC152 |
| 1595 | 2P | BG2NUC-LC153 |
| 1596 | 2P | BG2NUC-LC154 |
| 1597 | 2P | BG2NUC-LC155 |
| 1598 | 2P | BG2NUC-LC156 |
| 1599 | RBD | BG2NUC-LC157 |
| 1600 | 2P | BG2NUC-LC158 |
| 1601 | 2P | BG2NUC-LC159 |
| 1602 | RBD | BG2NUC-LC160 |
| 1603 | 2P | BG2NUC-LC161 |
| 1604 | 2P | BG2NUC-LC162 |
| 1605 | RBD | BG2NUC-LC163 |
| 1606 | 2P | BG2NUC-LC164 |
| 1607 | RBD | BG2NUC-LC165 |
| 1608 | RBD | BG2NUC-LC166 |
| 1609 | 2P | BG2NUC-LC167 |
| 1610 | 2P | BG2NUC-LC168 |
| 1611 | 2P | BG2NUC-LC169 |
| 1612 | 2P | BG2NUC-LC170 |
| 1613 | RBD | BG2NUC-LC171 |
| 1614 | 2P | BG2NUC-LC172 |
| 1615 | 2P | BG2NUC-LC173 |
| 1616 | 2P | BG2NUC-LC174 |
| 1617 | RBD | BG2NUC-LC175 |
| 1618 | 2P | BG2NUC-LC176 |
| 1619 | RBD | BG2NUC-LC177 |
| 1620 | RBD | BG2NUC-LC178 |
| 1621 | RBD | BG2NUC-LC179 |
| 1622 | 2P | BG2NUC-LC180 |
| 1623 | RBD | BG2NUC-LC181 |
| 1624 | RBD | BG2NUC-LC182 |
| 1625 | 2P | BG2NUC-LC183 |
| 1626 | 2P | BG2NUC-LC184 |
| 1627 | RBD | BG2NUC-LC185 |
| 1628 | 2P | BG2NUC-LC186 |
| 1629 | RBD | BG2NUC-LC187 |
| 1630 | 2P | BG2NUC-LC188 |
| 1631 | 2P | BG2NUC-LC189 |
| 1632 | 2P | BG2NUC-LC190 |
| 1633 | 2P | BG2NUC-LC191 |
| 1634 | RBD | BG2NUC-LC192 |
| 1635 | 2P | BG2NUC-LC193 |
| 1636 | RBD | BG2NUC-LC194 |
| 1637 | 2P | BG2NUC-LC195 |
| 1638 | 2P | BG2NUC-LC196 |
| 1639 | RBD | BG2NUC-LC197 |
| 1640 | RBD | BG2NUC-LC198 |
| 1641 | 2P | BG2NUC-LC199 |
| 1642 | 2P | BG2NUC-LC200 |
| 1643 | RBD | BG2NUC-LC201 |
| 1644 | 2P | BG2NUC-LC202 |
| 1645 | RBD | BG2NUC-LC203 |
| 1646 | 2P | BG2NUC-LC204 |
| 1647 | RBD | BG2NUC-LC205 |
| 1648 | 2P | BG2NUC-LC206 |
| 1649 | RBD | BG2NUC-LC207 |
| 1650 | 2P | BG2NUC-LC208 |
| 1651 | 2P | BGZNUC-LC209 |
| 1652 | 2P | BG2NUC-LC210 |
| 1653 | RBD | BG2NUC-LC211 |
| 1654 | 2P | BG2NUC-LC212 |
| 1655 | RBD | BG2NUC-LC213 |
| 1656 | 2P | BG2NUC-LC214 |
| 1657 | RBD | BG2NUC-LC215 |
| 1658 | 2P | BG2NUC-LC216 |
| 1659 | RBD | BG2NUC-LC217 |
| 1660 | RBD | BG2NUC-LC218 |
| 1661 | RBD | BG2NUC-LC219 |
| 1662 | 2P | BG2NUC-LC220 |
| 1663 | RBD | BG2NUC-LC221 |
| 1664 | RBD | BG2NUC-LC222 |
| 1665 | RBD | BG2NUC-LC223 |
| 1666 | 2P | BG2NUC-LC224 |
| 1667 | RBD | BG2NUC-LC225 |
| 1668 | 2P | BG2NUC-LC226 |
| 1669 | 2P | BG2NUC-LC227 |
| 1670 | 2P | BG2NUC-LC228 |
| 1671 | RBD | BG2NUC-LC229 |
| 1672 | 2P | BG2NUC-LC230 |
| 1673 | RBD | BG2NUC-LC231 |
| 1674 | 2P | BG2NUC-LC232 |
| 1675 | 2P | BG2NUC-LC233 |
| 1676 | 2P | BG2NUC-LC234 |
| 1677 | RBD | BG2NUC-LC235 |
| 1678 | RBD | BG2NUC-LC236 |
| 1679 | 2P | BG2NUC-LC237 |
| 1680 | RBD | BG2NUC-LC238 |
| 1681 | 2P | BG2NUC-LC239 |
| 1682 | 2P | BG2NUC-LC240 |
| 1683 | 2P | BG2NUC-LC241 |
| 1684 | RBD | BG2NUC-LC242 |
| 1685 | 2P | BG2NUC-LC243 |
| 1686 | RBD | BG2NUC-LC244 |
| 1687 | RBD | BG2NUC-LC245 |
| 1688 | 2P | BG2NUC-LC246 |
| 1689 | RBD | BG2NUC-LC247 |
| 1690 | RBD | BG2NUC-LC248 |
| 1691 | 2P | BG2NUC-LC249 |
| 1692 | 2P | BG2NUC-LC250 |
| 1693 | 2P | BG2NUC-LC251 |
| 1694 | RBD | BG2NUC-LC252 |
| 1695 | 2P | BG2NUC-LC253 |
| 1696 | RBD | BG2NUC-LC254 |
| 1697 | 2P | BG2NUC-LC255 |
| 1698 | RBD | BG2NUC-LC256 |
| 1699 | 2P | BG2NUC-LC257 |
| 1700 | 2P | BG2NUC-LC258 |
| 1701 | 2P | BG2NUC-LC259 |
| 1702 | 2P | BG2NUC-LC260 |
| 1703 | 2P | BG2NUC-LC261 |
| 1704 | RBD | BG2NUC-LC262 |
| 1705 | 2P | BG2NUC-LC263 |
| 1706 | RBD | BG2NUC-LC264 |
| 1707 | 2P | BG2NUC-LC265 |
| 1708 | 2P | BG2NUC-LC266 |
| 1709 | 2P | BG2NUC-LC267 |
| 1710 | 2P | BG2NUC-LC268 |
| 1711 | RBD | BG2NUC-LC269 |
| 1712 | 2P | BG2NUC-LC270 |
| 1713 | 2P | BG2NUC-LC271 |
| 1714 | 2P | BG2NUC-LC272 |
| 1715 | 2P | BG2NUC-LC273 |
| 1716 | 2P | BG2NUC-LC274 |
| 1717 | 2P | BG2NUC-LC275 |
| 1718 | 2P | BG2NUC-LC276 |
| 1719 | 2P | BG2NUC-LC277 |
| 1720 | 2P | BG2NUC-LC278 |
| 1721 | 2P | BG2NUC-LC279 |
| 1722 | RBD | BG2NUC-LC280 |
| 1723 | RBD | BG2NUC-LC281 |
| 1724 | RBD | BG2NUC-LC282 |
| 1725 | 2P | BG2NUC-LC283 |
| 1726 | 2P | BG2NUC-LC284 |
| 1727 | 2P | BG2NUC-LC285 |
| 1728 | 2P | BG2NUC-LC286 |
| 1729 | RBD | BG2NUC-LC287 |
| 1730 | 2P | BG2NUC-LC288 |
| 1731 | 2P | BG2NUC-LC289 |
| 1732 | RBD | BG2NUC-LC290 |
| 1733 | 2P | BG2NUC-LC291 |
| 1734 | 2P | BG2NUC-LC292 |
| 1735 | 2P | BG2NUC-LC293 |
| 1736 | 2P | BG2NUC-LC294 |
| 1737 | RBD | BG2NUC-LC295 |
| 1738 | 2P | BG2NUC-LC296 |
| 1739 | 2F | BG2NUC-LC297 |
| 1740 | RBD | BG2NUC-LC298 |
| 1741 | 2P | BG2NUC-LC299 |
| 1742 | 2P | BG2NUC-LC300 |
| 1743 | 2P | BG2NUC-LC301 |
| 1744 | 2P | BG2NUC-LC302 |
| 1745 | 2P | BG2NUC-LC303 |
| 1746 | 2P | BG2NUC-LC304 |
| 1747 | RBD | BG2NUC-LC305 |
| 1748 | 2P | BG2NUC-LC306 |
| 1749 | 2P | BG2NUC-LC307 |
| 1750 | 2P | BG2NUC-LC308 |
| 1751 | 2P | BG2NUC-LC309 |
| 1752 | RBD | BG2NUC-LC310 |
| 1753 | RBD | BG2NUC-LC311 |
| 1754 | RBD | BG2NUC-LC312 |
| 1755 | RBD | BG2NUC-LC313 |
| 1756 | RBD | BG2NUC-LC314 |
| 1757 | RBD | BG2NUC-LC315 |
| 1758 | 2P | BG2NUC-LC316 |
| 1759 | RBD | BG2NUC-LC317 |
| 1760 | 2P | BG2NUC-LC318 |
| 1761 | 2P | BG2NUC-LC319 |
| 1762 | 2P | BG2NUC-LC320 |
| 1763 | 2P | BG2NUC-LC321 |
| 1764 | RBD | BG2NUC-LC322 |
| 1765 | RBD | BG2NUC-LC323 |
| 1766 | RBD | BG2NUC-LC324 |
| 1767 | RBD | BG2NUC-LC325 |
| 1768 | RBD | BG2NUC-LC326 |
| 1769 | 2P | BG2NUC-LC327 |
| 1770 | 2P | BG2NUC-LC328 |
| 1771 | 2P | BG2NUC-LC329 |
| 1772 | 2P | BG2NUC-LC330 |
| 1773 | 2P | BG2NUC-LC331 |
| 1774 | 2P | BG2NUC-LC332 |
| 1775 | 2P | BG2NUC-LC333 |
| 1776 | RBD | BG2NUC-LC334 |
| 1777 | 2P | BG2NUC-LC335 |
| 1778 | 2P | BG2NUC-LC336 |
| 1779 | RBD | BG2NUC-LC337 |
| 1780 | 2P | BG2NUC-LC338 |
| 1781 | 2P | BG2NUC-LC339 |
| 1782 | 2P | BG2NUC-LC340 |
| 1783 | 2P | BG2NUC-LC341 |
| 1784 | 2P | BG2NUC-LC342 |
| 1785 | 2P | BG2NUC-LC343 |
| 1786 | 2P | BG2NUC-LC344 |
| 1787 | RBD | BG2NUC-LC345 |
| 1788 | 2P | BG2NUC-LC346 |
| 1789 | 2P | BG2NUC-LC347 |
| 1790 | 2P | BG2NUC-LC348 |
| 1791 | RBD | BG2NUC-LC349 |
| 1792 | RBD | BG2NUC-LC350 |
| 1793 | 2P | BG2NUC-LC351 |
| 1794 | RBD | BG2NUC-LC352 |
| 1795 | RBD | BG2NUC-LC353 |
| 1796 | 2P | BG2NUC-LC354 |
| 1797 | 2P | BG2NUC-LC355 |
| 1798 | 2P | BG2NUC-LC356 |
| 1799 | 2P | BG2NUC-LC357 |
| 1800 | 2P | BG2NUC-LC358 |
| 1801 | 2P | BG2NUC-LC359 |
| 1802 | 2P | BG2NUC-LC360 |
| 1803 | 2P | BG2NUC-LC361 |
| 1804 | 2P | BG2NUC-LC362 |
| 1805 | 2P | BG2NUC-LC363 |
| 1806 | RBD | BG2NUC-LC364 |
| 1807 | 2P | BG2NUC-LC365 |
| 1808 | 2P | BG2NUC-LC366 |
| 1809 | 2P | BG2NUC-LC367 |
| 1810 | RBD | BG2NUC-LC368 |
| 1811 | 2P | BG2NUC-LC369 |
| 1812 | 2P | BG2NUC-LC370 |
| 1813 | 2P | BG2NUC-LC371 |
| 1814 | 2P | BG2NUC-LC372 |
| 1815 | 2P | BG2NUC-LC373 |
| 1816 | 2P | BG2NUC-LC374 |
| 1817 | 2P | BG2NUC-LC375 |
| 1818 | 2P | BG2NUC-LC376 |
| 1819 | 2P | BG2NUC-LC377 |
| 1820 | 2P | BG2NUC-LC378 |
| 1821 | 2P | BG2NUC-LC379 |
| 1822 | 2P | BG2NUC-LC380 |
| 1823 | 2P | BG4NUC-HC1 |
| 1824 | 2P | BG4NUC-HC2 |
| 1825 | 2P | BG4NUC-HC3 |
| 1826 | 2P | BG4NUC-HC4 |
| 1827 | 2P | BG4NUC-HC5 |
| 1828 | 2P | BG4NUC-HC6 |
| 1829 | 2P | BG4NUC-HC7 |
| 1830 | 2P | BG4NUC-HC8 |
| 1831 | 2P | BG4NUC-HC9 |
| 1832 | 2P | BG4NUC-HC10 |
| 1833 | 2P | BG4NUC-HC11 |
| 1834 | 2P | BG4NUC-HC12 |
| 1835 | 2P | BG4NUC-HC13 |
| 1836 | 2P | BG4NUC-HC14 |
| 1837 | RBD | BG4NUC-HC15 |
| 1838 | 2P | BG4NUC-HC16 |
| 1839 | 2P | BG4NUC-HC17 |
| 1840 | 2P | BG4NUC-HC18 |
| 1841 | RBD | BG4NUC-HC19 |
| 1842 | 2P | BG4NUC-HC20 |
| 1843 | 2P | BG4NUC-HC21 |
| 1844 | RBD | BG4NUC-HC22 |
| 1845 | RBD | BG4NUC-HC23 |
| 1846 | 2P | BG4NUC-HC24 |
| 1847 | RBD | BG4NUC-HC25 |
| 1848 | RBD | BG4NUC-HC26 |
| 1849 | RBD | BG4NUC-HC27 |
| 1850 | RBD | BG4NUC-HC28 |
| 1851 | RBD | BG4NUC-HC29 |
| 1852 | RBD | BG4NUC-HC30 |
| 1853 | RBD | BG4NUC-HC31 |
| 1854 | RBD | BG4NUC-HC32 |
| 1855 | RBD | BG4NUC-HC33 |
| 1856 | RBD | BG4NUC-HC34 |
| 1857 | 2P | BG4NUC-HC35 |
| 1858 | RBD | BG4NUC-HC36 |
| 1859 | RBD | BG4NUC-HC37 |
| 1860 | RBD | BG4NUC-HC38 |
| 1861 | 2P | BG4NUC-HC39 |
| 1862 | 2P | BG4NUC-HC40 |
| 1863 | 2P | BG4NUC-HC41 |
| 1864 | RBD | BG4NUC-HC42 |
| 1865 | 2P | BG4NUC-HC43 |
| 1866 | 2P | BG4NUC-HC44 |
| 1867 | RBD | BG4NUC-HC45 |
| 1868 | 2P | BG4NUC-HC46 |
| 1869 | 2P | BG4NUC-HC47 |
| 1870 | RBD | BG4NUC-HC48 |
| 1871 | RBD | BG4NUC-HC49 |
| 1872 | 2P | BG4NUC-HC50 |
| 1873 | RBD | BG4NUC-HC51 |
| 1874 | 2P | BG4NUC-HC52 |
| 1875 | 2P | BG4NUC-HC53 |
| 1876 | RBD | BG4NUC-HC54 |
| 1877 | 2P | BG4NUC-HC55 |
| 1878 | 2P | BG4NUC-HC56 |
| 1879 | 2P | BG4NUC-HC57 |
| 1880 | RBD | BG4NUC-HC58 |
| 1881 | RBD | BG4NUC-HC59 |
| 1882 | 2P | BG4NUC-HC60 |
| 1883 | 2P | BG4NUC-HC61 |
| 1884 | 2P | BG4NUC-HC62 |
| 1885 | RBD | BG4NUC-HC63 |
| 1886 | RBD | BG4NUC-HC64 |
| 1887 | RBD | BG4NUC-HC65 |
| 1888 | 2P | BG4NUC-HC66 |
| 1889 | 2P | BG4NUC-HC67 |
| 1890 | 2P | BG4NUC-HC68 |
| 1891 | RBD | BG4NUC-HC69 |
| 1892 | 2P | BG4NUC-HC70 |
| 1893 | RBD | BG4NUC-HC71 |
| 1894 | 2P | BG4NUC-HC72 |
| 1895 | RBD | BG4NUC-HC73 |
| 1896 | 2P | BG4NUC-HC74 |
| 1897 | RBD | BG4NUC-HC75 |
| 1898 | 2P | BG4NUC-HC76 |
| 1899 | 2P | BG4NUC-HC77 |
| 1900 | 2P | BG4NUC-HC78 |
| 1901 | 2P | BG4NUC-HC79 |
| 1902 | RBD | BG4NUC-HC80 |
| 1903 | RBD | BG4NUC-HC81 |
| 1904 | RBD | BG4NUC-HC82 |
| 1905 | RBD | BG4NUC-HC83 |
| 1906 | 2P | BG4NUC-HC84 |
| 1907 | 2P | BG4NUC-HC85 |
| 1908 | 2P | BG4NUC-HC86 |
| 1909 | 2P | BG4NUC-HC87 |
| 1910 | 2P | BG4NUC-HC88 |
| 1911 | RBD | BG4NUC-HC89 |
| 1912 | RBD | BG4NUC-HC90 |
| 1913 | 2P | BG4NUC-HC91 |
| 1914 | 2P | BG4NUC-HC92 |
| 1915 | 2P | BG4NUC-HC93 |
| 1916 | RBD | BG4NUC-HC94 |
| 1917 | 2P | BG4NUC-HC95 |
| 1918 | RBD | BG4NUC-HC96 |
| 1919 | RBD | BG4NUC-HC97 |
| 1920 | RBD | BG4NUC-HC98 |
| 1921 | 2P | BG4NUC-HC99 |
| 1922 | 2P | BG4NUC-HC100 |
| 1923 | 2P | BG4NUC-HC101 |
| 1924 | RBD | BG4NUC-HC102 |
| 1925 | 2P | BG4NUC-HC103 |
| 1926 | 2P | BG4NUC-HC104 |
| 1927 | 2P | BG4NUC-HC105 |
| 1928 | 2P | BG4NUC-HC106 |
| 1929 | 2P | BG4NUC-HC107 |
| 1930 | 2P | BG4NUC-HC108 |
| 1931 | 2P | BG4NUC-HC109 |
| 1932 | 2P | BG4NUC-HC110 |
| 1933 | 2P | BG4NUC-HC111 |
| 1934 | 2P | BG4NUC-HC112 |
| 1935 | RBD | BG4NUC-HC113 |
| 1936 | RBD | BG4NUC-HC114 |
| 1937 | RBD | BG4NUC-HC115 |
| 1938 | 2P | BG4NUC-HC116 |
| 1939 | RBD | BG4NUC-HC117 |
| 1940 | 2P | BG4NUC-HC118 |
| 1941 | 2P | BG4NUC-HC119 |
| 1942 | 2P | BG4NUC-HC120 |
| 1943 | RBD | BG4NUC-HC121 |
| 1944 | 2P | BG4NUC-HC122 |
| 1945 | RBD | BG4NUC-HC123 |
| 1946 | 2P | BG4NUC-HC124 |
| 1947 | RBD | BG4NUC-HC125 |
| 1948 | RBD | BG4NUC-HC126 |
| 1949 | 2P | BG4NUC-HC127 |
| 1950 | RBD | BG4NUC-HC128 |
| 1951 | RBD | BG4NUC-HC129 |
| 1952 | 2P | BG4NUC-HC130 |
| 1953 | 2P | BG4NUC-HC131 |
| 1954 | 2P | BG4NUC-HC132 |
| 1955 | 2P | BG4NUC-HC133 |
| 1956 | RBD | BG4NUC-HC134 |
| 1957 | 2P | BG4NUC-HC135 |
| 1958 | 2P | BG4NUC-HC136 |
| 1959 | 2P | BG4NUC-HC137 |
| 1960 | 2P | BG4NUC-HC138 |
| 1961 | 2P | BG4NUC-HC139 |
| 1962 | 2P | BG4NUC-HC140 |
| 1963 | 2P | BG4NUC-HC141 |
| 1964 | 2P | BG4NUC-HC142 |
| 1965 | 2P | BG4NUC-HC143 |
| 1966 | RBD | BG4NUC-HC144 |
| 1967 | 2P | BG4NUC-HC145 |
| 1968 | 2P | BG4NUC-HC146 |
| 1969 | 2P | BG4NUC-HC147 |
| 1970 | 2P | BG4NUC-HC148 |
| 1971 | 2P | BG4NUC-HC149 |
| 1972 | 2P | BG4NUC-HC150 |
| 1973 | 2P | BG4NUC-HC151 |
| 1974 | 2P | BG4NUC-HC152 |
| 1975 | 2P | BG4NUC-HC153 |
| 1976 | 2P | BG4NUC-HC154 |
| 1977 | 2P | BG4NUC-HC155 |
| 1978 | RBD | BG4NUC-HC156 |
| 1979 | 2P | BG4NUC-HC157 |
| 1980 | RBD | BG4NUC-HC158 |
| 1981 | 2P | BG4NUC-HC159 |
| 1982 | RBD | BG4NUC-HC160 |
| 1983 | RBD | BG4NUC-HC161 |
| 1984 | RBD | BG4NUC-HC162 |
| 1985 | 2P | BG4NUC-HC163 |
| 1986 | RBD | BG4NUC-HC164 |
| 1987 | RBD | BG4NUC-HC165 |
| 1988 | RBD | BG4NUC-HC166 |
| 1989 | RBD | BG4NUC-HC167 |
| 1990 | 2P | BG4NUC-HC168 |
| 1991 | 2P | BG4NUC-HC169 |
| 1992 | 2P | BG4NUC-HC170 |
| 1993 | RBD | BG4NUC-HC171 |
| 1994 | 2P | BG4NUC-HC172 |
| 1995 | 2P | BG4NUC-HC173 |
| 1996 | RBD | BG4NUC-HC174 |
| 1997 | 2P | BG4NUC-HC175 |
| 1998 | RBD | BG4NUC-HC176 |
| 1999 | 2P | BG4NUC-HC177 |
| 2000 | 2P | BG4NUC-HC178 |
| 2001 | 2P | BG4NUC-HC179 |
| 2002 | RBD | BG4NUC-HC180 |
| 2003 | 2P | BG4NUC-HC181 |
| 2004 | RBD | BG4NUC-HC182 |
| 2005 | 2P | BG4NUC-HC183 |
| 2006 | 2P | BG4NUC-HC184 |
| 2007 | 2P | BG4NUC-HC185 |
| 2008 | 2P | BG4NUC-HC186 |
| 2009 | 2P | BG4NUC-HC187 |
| 2010 | 2P | BG4NUC-HC188 |
| 2011 | 2P | BG4NUC-HC189 |
| 2012 | 2P | BG4NUC-HC190 |
| 2013 | 2P | BG4NUC-HC191 |
| 2014 | 2P | BG4NUC-HC192 |
| 2015 | RBD | BG4NUC-HC193 |
| 2016 | 2P | BG4NUC-HC194 |
| 2017 | RBD | BG4NUC-HC195 |
| 2018 | RBD | BG4NUC-HC196 |
| 2019 | RBD | BG4NUC-HC197 |
| 2020 | 2P | BG4NUC-HC198 |
| 2021 | 2P | BG4NUC-HC199 |
| 2022 | 2P | BG4NUC-HC200 |
| 2023 | 2P | BG4NUC-HC201 |
| 2024 | 2P | BG4NUC-HC202 |
| 2025 | 2P | BG4NUC-HC203 |
| 2026 | 2P | BG4NUC-HC204 |
| 2027 | 2P | BG4NUC-HC205 |
| 2028 | 2P | BG4NUC-HC206 |
| 2029 | 2P | BG4NUC-HC207 |
| 2030 | 2P | BG4NUC-HC208 |
| 2031 | 2P | BG4NUC-HC209 |
| 2032 | RBD | BG4NUC-HC210 |
| 2033 | RBD | BG4NUC-HC211 |
| 2034 | RBD | BG4NUC-HC212 |
| 2035 | 2P | BG4NUC-HC213 |
| 2036 | 2P | BG4NUC-HC214 |
| 2037 | 2P | BG4NUC-HC215 |
| 2038 | 2P | BG4NUC-HC216 |
| 2039 | RBD | BG4NUC-HC217 |
| 2040 | 2P | BG4NUC-HC218 |
| 2041 | RBD | BG4NUC-HC219 |
| 2042 | RBD | BG4NUC-HC220 |
| 2043 | 2P | BG4NUC-HC221 |
| 2044 | RBD | BG4NUC-HC222 |
| 2045 | RBD | BG4NUC-HC223 |
| 2046 | 2P | BG4NUC-HC224 |
| 2047 | RBD | BG4NUC-HC225 |
| 2048 | RBD | BG4NUC-HC226 |
| 2049 | 2P | BG4NUC-HC227 |
| 2050 | RBD | BG4NUC-HC228 |
| 2051 | 2P | BG4NUC-HC229 |
| 2052 | 2P | BG4NUC-HC230 |
| 2053 | RBD | BG4NUC-HC231 |
| 2054 | 2P | BG4NUC-HC232 |
| 2055 | 2P | BG4NUC-HC233 |
| 2056 | 2P | BG4NUC-HC234 |
| 2057 | RBD | BG4NUC-HC235 |
| 2058 | RBD | BG4NUC-HC236 |
| 2059 | 2P | BG4NUC-HC237 |
| 2060 | 2P | BG4NUC-HC238 |
| 2061 | 2P | BG4NUC-HC239 |
| 2062 | 2P | BG4NUC-HC240 |
| 2063 | 2P | BG4NUC-HC241 |
| 2064 | 2P | BG4NUC-HC242 |
| 2065 | 2P | BG4NUC-HC243 |
| 2066 | 2P | BG4NUC-HC244 |
| 2067 | 2P | BG4NUC-HC245 |
| 2068 | 2P | BG4NUC-HC246 |
| 2069 | RBD | BG4NUC-HC247 |
| 2070 | RBD | BG4NUC-HC248 |
| 2071 | RBD | BG4NUC-HC249 |
| 2072 | RBD | BG4NUC-HC250 |
| 2073 | 2P | BG4NUC-HC251 |
| 2074 | 2P | BG4NUC-HC252 |
| 2075 | 2F | BG4NUC-HC253 |
| 2076 | RBD | BG4NUC-HC254 |
| 2077 | 2P | BG4NUC-HC255 |
| 2078 | RBD | BG4NUC-HC256 |
| 2079 | RBD | BG4NUC-HC257 |
| 2080 | RBD | BG4NUC-HC258 |
| 2081 | 2P | BG4NUC-HC259 |
| 2082 | RBD | BG4NUC-HC260 |
| 2083 | 2F | BG4NUC-HC261 |
| 2084 | RBD | BG4NUC-HC262 |
| 2085 | RBD | BG4NUC-HC263 |
| 2086 | RBD | BG4NUC-HC264 |
| 2087 | 2F | BG4NUC-HC265 |
| 2088 | RBD | BG4NUC-HC266 |
| 2089 | 2P | BG4NUC-HC267 |
| 2090 | 2P | BG4NUC-HC268 |
| 2091 | RBD | BG4NUC-HC269 |
| 2092 | RBD | BG4NUC-HC270 |
| 2093 | RBD | BG4NUC-HC271 |
| 2094 | 2P | BG4NUC-HC272 |
| 2095 | RBD | BG4NUC-HC273 |
| 2096 | 2P | BG4NUC-HC274 |
| 2097 | 2P | BG4NUC-HC275 |
| 2098 | RBD | BG4NUC-HC276 |
| 2099 | RBD | BG4NUC-HC277 |
| 2100 | RBD | BG4NUC-HC278 |
| 2101 | 2P | BG4NUC-HC279 |
| 2102 | RBD | BG4NUC-HC280 |
| 2103 | RBD | BG4NUC-HC281 |
| 2104 | 2P | BG4NUC-HC282 |
| 2105 | 2P | BG4NUC-HC283 |
| 2106 | 2P | BG4NUC-HC284 |
| 2107 | RBD | BG4NUC-HC285 |
| 2108 | 2P | BG4NUC-HC286 |
| 2109 | 2P | BG4NUC-HC287 |
| 2110 | RBD | BG4NUC-HC288 |
| 2111 | 2P | BG4NUC-HC289 |
| 2112 | 2P | BG4NUC-HC290 |
| 2113 | RBD | BG4NUC-HC291 |
| 2114 | 2P | BG4NUC-HC292 |
| 2115 | RBD | BG4NUC-HC293 |
| 2116 | 2P | BG4NUC-HC294 |
| 2117 | RBD | BG4NUC-HC295 |
| 2118 | 2P | BG4NUC-HC296 |
| 2119 | RBD | BG4NUC-HC297 |
| 2120 | 2P | BG4NUC-HC298 |
| 2121 | 2P | BG4NUC-HC299 |
| 2122 | 2P | BG4NUC-HC300 |
| 2123 | 2P | BG4NUC-HC301 |
| 2124 | 2P | BG4NUC-HC302 |
| 2125 | 2P | BG4NUC-HC303 |
| 2126 | 2F | BG4NUC-HC304 |
| 2127 | 2P | BG4NUC-HC305 |
| 2128 | RBD | BG4NUC-HC306 |
| 2129 | 2P | BG4NUC-HC307 |
| 2130 | 2P | BG4NUC-HC308 |
| 2131 | 2P | BG4NUC-HC309 |
| 2132 | 2P | BG4NUC-HC310 |
| 2133 | RBD | BG4NUC-HC311 |
| 2134 | 2P | BG4NUC-HC312 |
| 2135 | 2F | BG4NUC-HC313 |
| 2136 | 2P | BG4NUC-HC314 |
| 2137 | 2P | BG4NUC-HC315 |
| 2138 | 2F | BG4NUC-HC316 |
| 2139 | RBD | BG4NUC-HC317 |
| 2140 | RBD | BG4NUC-HC318 |
| 2141 | 2P | BG4NUC-HC319 |
| 2142 | 2P | BG4NUC-HC320 |
| 2143 | 2P | BG4NUC-HC321 |
| 2144 | RBD | BG4NUC-HC322 |
| 2145 | 2P | BG4NUC-HC323 |
| 2146 | RBD | BG4NUC-HC324 |
| 2147 | 2P | BG4NUC-HC325 |
| 2148 | RBD | BG4NUC-HC326 |
| 2149 | RBD | BG4NUC-HC327 |
| 2150 | RBD | BG4NUC-HC328 |
| 2151 | 2P | BG4NUC-HC329 |
| 2152 | 2P | BG4NUC-HC330 |
| 2153 | RBD | BG4NUC-HC331 |
| 2154 | 2P | BG4NUC-HC332 |
| 2155 | 2P | BG4NUC-HC333 |
| 2156 | 2P | BG4NUC-HC334 |
| 2157 | 2P | BG4NUC-HC335 |
| 2158 | RBD | BG4NUC-HC336 |
| 2159 | 2P | BG4NUC-HC337 |
| 2160 | RBD | BG4NUC-HC338 |
| 2161 | 2P | BG4NUC-HC339 |
| 2162 | RBD | BG4NUC-HC340 |
| 2163 | 2P | BG4NUC-HC341 |
| 2164 | RBD | BG4NUC-HC342 |
| 2165 | RBD | BG4NUC-HC343 |
| 2166 | RBD | BG4NUC-HC344 |
| 2167 | 2P | BG4NUC-HC345 |
| 2168 | RBD | BG4NUC-HC346 |
| 2169 | 2P | BG4NUC-HC347 |
| 2170 | RBD | BG4NUC-HC348 |
| 2171 | 2P | BG4NUC-HC349 |
| 2172 | 2P | BG4NUC-HC350 |
| 2173 | 2P | BG4NUC-HC351 |
| 2174 | 2P | BG4NUC-HC352 |
| 2175 | RBD | BG4NUC-HC353 |
| 2176 | RBD | BG4NUC-HC354 |
| 2177 | RBD | BG4NUC-HC355 |
| 2178 | 2P | BG4NUC-HC356 |
| 2179 | 2P | BG4NUC-HC357 |
| 2180 | RBD | BG4NUC-HC358 |
| 2181 | RBD | BG4NUC-HC359 |
| 2182 | RBD | BG4NUC-HC360 |
| 2183 | RBD | BG4NUC-HC361 |
| 2184 | RBD | BG4NUC-HC362 |
| 2185 | 2P | BG4NUC-HC363 |
| 2186 | 2P | BG4NUC-HC364 |
| 2187 | RBD | BG4NUC-HC365 |
| 2188 | 2P | BG4NUC-HC366 |
| 2189 | 2P | BG4NUC-HC367 |
| 2190 | 2P | BG4NUC-HC368 |
| 2191 | 2P | BG4NUC-HC369 |
| 2192 | 2P | BG4NUC-HC370 |
| 2193 | 2P | BG4NUC-HC371 |
| 2194 | 2P | BG4NUC-HC372 |
| 2195 | 2P | BG4NUC-HC373 |
| 2196 | 2P | BG4NUC-HC374 |
| 2197 | RBD | BG4NUC-HC375 |
| 2198 | 2P | BG4NUC-HC376 |
| 2199 | 2P | BG4NUC-HC377 |
| 2200 | 2P | BG4NUC-HC378 |
| 2201 | RBD | BG4NUC-HC379 |
| 2202 | 2P | BG4NUC-HC380 |
| 2203 | 2P | BG4NUC-HC381 |
| 2204 | 2P | BG4NUC-HC382 |
| 2205 | 2P | BG4NUC-HC383 |
| 2206 | 2P | BG4NUC-HC384 |
| 2207 | 2P | BG4NUC-HC385 |
| 2208 | RBD | BG4NUC-HC386 |
| 2209 | RBD | BG4NUC-HC387 |
| 2210 | 2P | BG4NUC-HC388 |
| 2211 | 2P | BG4NUC-HC389 |
| 2212 | 2P | BG4NUC-HC390 |
| 2213 | 2P | BG4NUC-HC391 |
| 2214 | 2P | BG4NUC-HC392 |
| 2215 | 2P | BG4NUC-HC393 |
| 2216 | RBD | BG4NUC-HC394 |
| 2217 | 2P | BG4NUC-HC395 |
| 2218 | 2P | BG4NUC-HC396 |
| 2219 | 2P | BG4NUC-HC397 |
| 2220 | 2P | BG4NUC-HC398 |
| 2221 | 2P | BG4NUC-HC399 |
| 2222 | RBD | BG4NUC-HC400 |
| 2223 | RBD | BG4NUC-HC401 |
| 2224 | 2P | BG4NUC-HC402 |
| 2225 | 2P | BG4NUC-HC403 |
| 2226 | 2F | BG4NUC-HC404 |
| 2227 | RBD | BG4NUC-HC405 |
| 2228 | 2P | BG4NUC-HC406 |
| 2229 | RBD | BG4NUC-HC407 |
| 2230 | 2P | BG4NUC-HC408 |
| 2231 | 2P | BG4NUC-HC409 |
| 2232 | 2P | BG4NUC-LC1 |
| 2233 | 2P | BG4NUC-LC2 |
| 2234 | 2P | BG4NUC-LC3 |
| 2235 | 2P | BG4NUC-LC4 |
| 2236 | 2P | BG4NUC-LC5 |
| 2237 | 2P | BG4NUC-LC6 |
| 2238 | 2P | BG4NUC-LC7 |
| 2239 | 2F | BG4NUC-LC8 |
| 2240 | 2F | BG4NUC-LC9 |
| 2241 | 2P | BG4NUC-LC10 |
| 2242 | 2P | BG4NUC-LC11 |
| 2243 | 2P | BG4NUC-LC12 |
| 2244 | 2F | BG4NUC-LC13 |
| 2245 | 2P | BG4NUC-LC14 |
| 2246 | RBD | BG4NUC-LC15 |
| 2247 | 2P | BG4NUC-LC16 |
| 2248 | 2P | BG4NUC-LC17 |
| 2249 | 2P | BG4NUC-LC18 |
| 2250 | RBD | BG4NUC-LC19 |
| 2251 | 2P | BG4NUC-LC20 |
| 2252 | 2P | BG4NUC-LC21 |
| 2253 | RBD | BG4NUC-LC22 |
| 2254 | RBD | BG4NUC-LC23 |
| 2255 | 2P | BG4NUC-LC24 |
| 2256 | RBD | BG4NUC-LC25 |
| 2257 | RBD | BG4NUC-LC26 |
| 2258 | RBD | BG4NUC-LC27 |
| 2259 | RBD | BG4NUC-LC28 |
| 2260 | RBD | BG4NUC-LC29 |
| 2261 | RBD | BG4NUC-LC30 |
| 2262 | RBD | BG4NUC-LC31 |
| 2263 | RBD | BG4NUC-LC32 |
| 2264 | RBD | BG4NUC-LC33 |
| 2265 | RBD | BG4NUC-LC34 |
| 2266 | 2P | BG4NUC-LC35 |
| 2267 | RBD | BG4NUC-LC36 |
| 2268 | RBD | BG4NUC-LC37 |
| 2269 | RBD | BG4NUC-LC38 |
| 2270 | 2P | BG4NUC-LC39 |
| 2271 | 2P | BG4NUC-LC40 |
| 2272 | 2P | BG4NUC-LC41 |
| 2273 | RBD | BG4NUC-LC42 |
| 2274 | 2P | BG4NUC-LC43 |
| 2275 | 2P | BG4NUC-LC44 |
| 2276 | RBD | BG4NUC-LC45 |
| 2277 | 2P | BG4NUC-LC46 |
| 2278 | 2P | BG4NUC-LC47 |
| 2279 | RBD | BG4NUC-LC48 |
| 2280 | RBD | BG4NUC-LC49 |
| 2281 | 2P | BG4NUC-LC50 |
| 2282 | RBD | BG4NUC-LC51 |
| 2283 | 2P | BG4NUC-LC52 |
| 2284 | 2P | BG4NUC-LC53 |
| 2285 | RBD | BG4NUC-LC54 |
| 2286 | 2P | BG4NUC-LC55 |
| 2287 | 2P | BG4NUC-LC56 |
| 2288 | 2P | BG4NUC-LC57 |
| 2289 | RBD | BG4NUC-LC58 |
| 2290 | RBD | BG4NUC-LC59 |
| 2291 | 2P | BG4NUC-LC60 |
| 2292 | 2P | BG4NUC-LC61 |
| 2293 | 2P | BG4NUC-LC62 |
| 2294 | RBD | BG4NUC-LC63 |
| 2295 | RBD | BG4NUC-LC64 |
| 2296 | RBD | BG4NUC-LC65 |
| 2297 | 2P | BG4NUC-LC66 |
| 2298 | 2P | BG4NUC-LC67 |
| 2299 | 2P | BG4NUC-LC68 |
| 2300 | RBD | BG4NUC-LC69 |
| 2301 | 2P | BG4NUC-LC70 |
| 2302 | RBD | BG4NUC-LC71 |
| 2303 | 2P | BG4NUC-LC72 |
| 2304 | RBD | BG4NUC-LC73 |
| 2305 | 2P | BG4NUC-LC74 |
| 2306 | RBD | BG4NUC-LC75 |
| 2307 | 2P | BG4NUC-LC76 |
| 2308 | 2P | BG4NUC-LC77 |
| 2309 | 2P | BG4NUC-LC78 |
| 2310 | 2P | BG4NUC-LC79 |
| 2311 | RBD | BG4NUC-LC80 |
| 2312 | RBD | BG4NUC-LC81 |
| 2313 | RBD | BG4NUC-LC82 |
| 2314 | RBD | BG4NUC-LC83 |
| 2315 | 2P | BG4NUC-LC84 |
| 2316 | 2P | BG4NUC-LC85 |
| 2317 | 2P | BG4NUC-LC86 |
| 2318 | 2P | BG4NUC-LC87 |
| 2319 | 2P | BG4NUC-LC88 |
| 2320 | RBD | BG4NUC-LC89 |
| 2321 | RBD | BG4NUC-LC90 |
| 2322 | 2P | BG4NUC-LC91 |
| 2323 | 2P | BG4NUC-LC92 |
| 2324 | 2P | BG4NUC-LC93 |
| 2325 | RBD | BG4NUC-LC94 |
| 2326 | 2P | BG4NUC-LC95 |
| 2327 | RBD | BG4NUC-LC96 |
| 2328 | RBD | BG4NUC-LC97 |
| 2329 | RBD | BG4NUC-LC98 |
| 2330 | 2P | BG4NUC-LC99 |
| 2331 | 2P | BG4NUC-LC100 |
| 2332 | 2P | BG4NUC-LC101 |
| 2333 | RBD | BG4NUC-LC102 |
| 2334 | 2P | BG4NUC-LC103 |
| 2335 | 2P | BG4NUC-LC104 |
| 2336 | 2P | BG4NUC-LC105 |
| 2337 | 2P | BG4NUC-LC106 |
| 2338 | 2P | BG4NUC-LC107 |
| 2339 | 2P | BG4NUC-LC108 |
| 2340 | 2P | BG4NUC-LC109 |
| 2341 | 2P | BG4NUC-LC110 |
| 2342 | 2P | BG4NUC-LC111 |
| 2343 | 2P | BG4NUC-LC112 |
| 2344 | RBD | BG4NUC-LC113 |
| 2345 | RBD | BG4NUC-LC114 |
| 2346 | RBD | BG4NUC-LC115 |
| 2347 | 2P | BG4NUC-LC116 |
| 2348 | RBD | BG4NUC-LC117 |
| 2349 | 2P | BG4NUC-LC118 |
| 2350 | 2P | BG4NUC-LC119 |
| 2351 | 2P | BG4NUC-LC120 |
| 2352 | RBD | BG4NUC-LC121 |
| 2353 | 2P | BG4NUC-LC122 |
| 2354 | RBD | BG4NUC-LC123 |
| 2355 | 2P | BG4NUC-LC124 |
| 2356 | RBD | BG4NUC-LC125 |
| 2357 | RBD | BG4NUC-LC126 |
| 2358 | 2P | BG4NUC-LC127 |
| 2359 | RBD | BG4NUC-LC128 |
| 2360 | RBD | BG4NUC-LC129 |
| 2361 | 2P | BG4NUC-LC130 |
| 2362 | 2P | BG4NUC-LC131 |
| 2363 | 2P | BG4NUC-LC132 |
| 2364 | 2P | BG4NUC-LC133 |
| 2365 | RBD | BG4NUC-LC134 |
| 2366 | 2P | BG4NUC-LC135 |
| 2367 | 2P | BG4NUC-LC136 |
| 2368 | 2P | BG4NUC-LC137 |
| 2369 | 2P | BG4NUC-LC138 |
| 2370 | 2P | BG4NUC-LC139 |
| 2371 | 2P | BG4NUC-LC140 |
| 2372 | 2P | BG4NUC-LC141 |
| 2373 | 2P | BG4NUC-LC142 |
| 2374 | 2P | BG4NUC-LC143 |
| 2375 | RBD | BG4NUC-LC144 |
| 2376 | 2P | BG4NUC-LC145 |
| 2377 | 2P | BG4NUC-LC146 |
| 2378 | 2P | BG4NUC-LC147 |
| 2379 | 2P | BG4NUC-LC148 |
| 2380 | 2P | BG4NUC-LC149 |
| 2381 | 2P | BG4NUC-LC150 |
| 2382 | 2P | BG4NUC-LC151 |
| 2383 | 2P | BG4NUC-LC152 |
| 2384 | 2P | BG4NUC-LC153 |
| 2385 | 2P | BG4NUC-LC154 |
| 2386 | 2P | BG4NUC-LC155 |
| 2387 | RBD | BG4NUC-LC156 |
| 2388 | 2P | BG4NUC-LC157 |
| 2389 | RBD | BG4NUC-LC158 |
| 2390 | 2P | BG4NUC-LC159 |
| 2391 | RBD | BG4NUC-LC160 |
| 2392 | RBD | BG4NUC-LC161 |
| 2393 | RBD | BG4NUC-LC162 |
| 2394 | 2P | BG4NUC-LC163 |
| 2395 | RBD | BG4NUC-LC164 |
| 2396 | RBD | BG4NUC-LC165 |
| 2397 | RBD | BG4NUC-LC166 |
| 2398 | RBD | BG4NUC-LC167 |
| 2399 | 2P | BG4NUC-LC168 |
| 2400 | 2P | BG4NUC-LC169 |
| 2401 | 2P | BG4NUC-LC170 |
| 2402 | RBD | BG4NUC-LC171 |
| 2403 | 2P | BG4NUC-LC172 |
| 2404 | 2P | BG4NUC-LC173 |
| 2405 | RBD | BG4NUC-LC174 |
| 2406 | 2P | BG4NUC-LC175 |
| 2407 | RBD | BG4NUC-LC176 |
| 2408 | 2P | BG4NUC-LC177 |
| 2409 | 2P | BG4NUC-LC178 |
| 2410 | 2P | BG4NUC-LC179 |
| 2411 | RBD | BG4NUC-LC180 |
| 2412 | 2P | BG4NUC-LC181 |
| 2413 | RBD | BG4NUC-LC182 |
| 2414 | 2P | BG4NUC-LC183 |
| 2415 | 2P | BG4NUC-LC184 |
| 2416 | 2P | BG4NUC-LC185 |
| 2417 | 2P | BG4NUC-LC186 |
| 2418 | 2P | BG4NUC-LC187 |
| 2419 | 2P | BG4NUC-LC188 |
| 2420 | 2P | BG4NUC-LC189 |
| 2421 | 2P | BG4NUC-LC190 |
| 2422 | 2P | BG4NUC-LC191 |
| 2423 | 2P | BG4NUC-LC192 |
| 2424 | RBD | BG4NUC-LC193 |
| 2425 | 2P | BG4NUC-LC194 |
| 2426 | RBD | BG4NUC-LC195 |
| 2427 | RBD | BG4NUC-LC196 |
| 2428 | RBD | BG4NUC-LC197 |
| 2429 | 2P | BG4NUC-LC198 |
| 2430 | 2P | BG4NUC-LC199 |
| 2431 | 2P | BG4NUC-LC200 |
| 2432 | 2P | BG4NUC-LC201 |
| 2433 | 2P | BG4NUC-LC202 |
| 2434 | 2P | BG4NUC-LC203 |
| 2435 | 2P | BG4NUC-LC204 |
| 2436 | 2P | BG4NUC-LC205 |
| 2437 | 2P | BG4NUC-LC206 |
| 2438 | 2P | BG4NUC-LC207 |
| 2439 | 2P | BG4NUC-LC208 |
| 2440 | 2P | BG4NUC-LC209 |
| 2441 | RBD | BG4NUC-LC210 |
| 2442 | RBD | BG4NUC-LC211 |
| 2443 | RBD | BG4NUC-LC212 |
| 2444 | 2P | BG4NUC-LC213 |
| 2445 | 2P | BG4NUC-LC214 |
| 2446 | 2P | BG4NUC-LC215 |
| 2447 | 2P | BG4NUC-LC216 |
| 2448 | RBD | BG4NUC-LC217 |
| 2449 | 2P | BG4NUC-LC218 |
| 2450 | RBD | BG4NUC-LC219 |
| 2451 | RBD | BG4NUC-LC220 |
| 2452 | 2P | BG4NUC-LC221 |
| 2453 | RBD | BG4NUC-LC222 |
| 2454 | RBD | BG4NUC-LC223 |
| 2455 | 2P | BG4NUC-LC224 |
| 2456 | RBD | BG4NUC-LC225 |
| 2457 | RBD | BG4NUC-LC226 |
| 2458 | 2P | BG4NUC-LC227 |
| 2459 | RBD | BG4NUC-LC228 |
| 2460 | 2P | BG4NUC-LC229 |
| 2461 | 2P | BG4NUC-LC230 |
| 2462 | RBD | BG4NUC-LC231 |
| 2463 | 2P | BG4NUC-LC232 |
| 2464 | 2P | BG4NUC-LC233 |
| 2465 | 2P | BG4NUC-LC234 |
| 2466 | RBD | BG4NUC-LC235 |
| 2467 | RBD | BG4NUC-LC236 |
| 2468 | 2P | BG4NUC-LC237 |
| 2469 | 2P | BG4NUC-LC238 |
| 2470 | 2P | BG4NUC-LC239 |
| 2471 | 2P | BG4NUC-LC240 |
| 2472 | 2P | BG4NUC-LC241 |
| 2473 | 2P | BG4NUC-LC242 |
| 2474 | 2P | BG4NUC-LC243 |
| 2475 | 2P | BG4NUC-LC244 |
| 2476 | 2P | BG4NUC-LC245 |
| 2477 | 2P | BG4NUC-LC246 |
| 2478 | RBD | BG4NUC-LC247 |
| 2479 | RBD | BG4NUC-LC248 |
| 2480 | RBD | BG4NUC-LC249 |
| 2481 | RBD | BG4NUC-LC250 |
| 2482 | 2P | BG4NUC-LC251 |
| 2483 | 2P | BG4NUC-LC252 |
| 2484 | 2P | BG4NUC-LC253 |
| 2485 | RBD | BG4NUC-LC254 |
| 2486 | 2P | BG4NUC-LC255 |
| 2487 | RBD | BG4NUC-LC256 |
| 2488 | RBD | BG4NUC-LC257 |
| 2489 | RBD | BG4NUC-LC258 |
| 2490 | 2P | BG4NUC-LC259 |
| 2491 | RBD | BG4NUC-LC260 |
| 2492 | 2P | BG4NUC-LC261 |
| 2493 | RBD | BG4NUC-LC262 |
| 2494 | RBD | BG4NUC-LC263 |
| 2495 | RBD | BG4NUC-LC264 |
| 2496 | 2P | BG4NUC-LC265 |
| 2497 | RBD | BG4NUC-LC266 |
| 2498 | 2P | BG4NUC-LC267 |
| 2499 | 2P | BG4NUC-LC268 |
| 2500 | RBD | BG4NUC-LC269 |
| 2501 | RBD | BG4NUC-LC270 |
| 2502 | RBD | BG4NUC-LC271 |
| 2503 | 2P | BG4NUC-LC272 |
| 2504 | RBD | BG4NUC-LC273 |
| 2505 | 2P | BG4NUC-LC274 |
| 2506 | 2P | BG4NUC-LC275 |
| 2507 | RBD | BG4NUC-LC276 |
| 2508 | RBD | BG4NUC-LC277 |
| 2509 | RBD | BG4NUC-LC278 |
| 2510 | 2P | BG4NUC-LC279 |
| 2511 | RBD | BG4NUC-LC280 |
| 2512 | RBD | BG4NUC-LC281 |
| 2513 | 2P | BG4NUC-LC282 |
| 2514 | 2P | BG4NUC-LC283 |
| 2515 | 2P | BG4NUC-LC284 |
| 2516 | RBD | BG4NUC-LC285 |
| 2517 | 2P | BG4NUC-LC286 |
| 2518 | 2P | BG4NUC-LC287 |
| 2519 | RBD | BG4NUC-LC288 |
| 2520 | 2P | BG4NUC-LC289 |
| 2521 | 2P | BG4NUC-LC290 |
| 2522 | RBD | BG4NUC-LC291 |
| 2523 | 2F | BG4NUC-LC292 |
| 2524 | RBD | BG4NUC-LC293 |
| 2525 | 2P | BG4NUC-LC294 |
| 2526 | RBD | BG4NUC-LC295 |
| 2527 | 2P | BG4NUC-LC296 |
| 2528 | RBD | BG4NUC-LC297 |
| 2529 | 2P | BG4NUC-LC298 |
| 2530 | 2P | BG4NUC-LC299 |
| 2531 | 2P | BG4NUC-LC300 |
| 2532 | 2P | BG4NUC-LC301 |
| 2533 | 2P | BG4NUC-LC302 |
| 2534 | 2P | BG4NUC-LC303 |
| 2535 | 2P | BG4NUC-LC304 |
| 2536 | 2P | BG4NUC-LC305 |
| 2537 | RBD | BG4NUC-LC306 |
| 2538 | 2P | BG4NUC-LC307 |
| 2539 | 2P | BG4NUC-LC308 |
| 2540 | 2P | BG4NUC-LC309 |
| 2541 | 2P | BG4NUC-LC310 |
| 2542 | RBD | BG4NUC-LC311 |
| 2543 | 2P | BG4NUC-LC312 |
| 2544 | 2P | BG4NUC-LC313 |
| 2545 | 2P | BG4NUC-LC314 |
| 2546 | 2P | BG4NUC-LC315 |
| 2547 | 2P | BG4NUC-LC316 |
| 2548 | RBD | BG4NUC-LC317 |
| 2549 | RBD | BG4NUC-LC318 |
| 2550 | 2P | BG4NUC-LC319 |
| 2551 | 2P | BG4NUC-LC320 |
| 2552 | 2P | BG4NUC-LC321 |
| 2553 | RBD | BG4NUC-LC322 |
| 2554 | 2P | BG4NUC-LC323 |
| 2555 | RBD | BG4NUC-LC324 |
| 2556 | 2P | BG4NUC-LC325 |
| 2557 | RBD | BG4NUC-LC326 |
| 2558 | RBD | BG4NUC-LC327 |
| 2559 | RBD | BG4NUC-LC328 |
| 2560 | 2P | BG4NUC-LC329 |
| 2561 | 2P | BG4NUC-LC330 |
| 2562 | RBD | BG4NUC-LC331 |
| 2563 | 2P | BG4NUC-LC332 |
| 2564 | 2P | BG4NUC-LC333 |
| 2565 | 2P | BG4NUC-LC334 |
| 2566 | 2F | BG4NUC-LC335 |
| 2567 | RBD | BG4NUC-LC336 |
| 2568 | 2P | BG4NUC-LC337 |
| 2569 | RBD | BG4NUC-LC338 |
| 2570 | 2P | BG4NUC-LC339 |
| 2571 | RBD | BG4NUC-LC340 |
| 2572 | 2P | BG4NUC-LC341 |
| 2573 | RBD | BG4NUC-LC342 |
| 2574 | RBD | BG4NUC-LC343 |
| 2575 | RBD | BG4NUC-LC344 |
| 2576 | 2P | BG4NUC-LC345 |
| 2577 | RBD | BG4NUC-LC346 |
| 2578 | 2P | BG4NUC-LC347 |
| 2579 | RBD | BG4NUC-LC348 |
| 2580 | 2P | BG4NUC-LC349 |
| 2581 | 2P | BG4NUC-LC350 |
| 2582 | 2P | BG4NUC-LC351 |
| 2583 | 2P | BG4NUC-LC352 |
| 2584 | RBD | BG4NUC-LC353 |
| 2585 | RBD | BG4NUC-LC354 |
| 2586 | RBD | BG4NUC-LC355 |
| 2587 | 2P | BG4NUC-LC356 |
| 2588 | 2P | BG4NUC-LC357 |
| 2589 | RBD | BG4NUC-LC358 |
| 2590 | RBD | BG4NUC-LC359 |
| 2591 | RBD | BG4NUC-LC360 |
| 2592 | RBD | BG4NUC-LC361 |
| 2593 | RBD | BG4NUC-LC362 |
| 2594 | 2P | BG4NUC-LC363 |
| 2595 | 2P | BG4NUC-LC364 |
| 2596 | RBD | BG4NUC-LC365 |
| 2597 | 2P | BG4NUC-LC366 |
| 2598 | 2P | BG4NUC-LC367 |
| 2599 | 2P | BG4NUC-LC368 |
| 2600 | 2P | BG4NUC-LC369 |
| 2601 | 2P | BG4NUC-LC370 |
| 2602 | 2P | BG4NUC-LC371 |
| 2603 | 2P | BG4NUC-LC372 |
| 2604 | 2P | BG4NUC-LC373 |
| 2605 | 2P | BG4NUC-LC374 |
| 2606 | RBD | BG4NUC-LC375 |
| 2607 | 2P | BG4NUC-LC376 |
| 2608 | 2P | BG4NUC-LC377 |
| 2609 | 2P | BG4NUC-LC378 |
| 2610 | RBD | BG4NUC-LC379 |
| 2611 | 2P | BG4NUC-LC380 |
| 2612 | 2P | BG4NUC-LC381 |
| 2613 | 2P | BG4NUC-LC382 |
| 2614 | 2P | BG4NUC-LC383 |
| 2615 | 2P | BG4NUC-LC384 |
| 2616 | 2P | BG4NUC-LC385 |
| 2617 | RBD | BG4NUC-LC386 |
| 2618 | RBD | BG4NUC-LC387 |
| 2619 | 2P | BG4NUC-LC388 |
| 2620 | 2P | BG4NUC-LC389 |
| 2621 | 2P | BG4NUC-LC390 |
| 2622 | 2P | BG4NUC-LC391 |
| 2623 | 2P | BG4NUC-LC392 |
| 2624 | 2P | BG4NUC-LC393 |
| 2625 | RBD | BG4NUC-LC394 |
| 2626 | 2P | BG4NUC-LC395 |
| 2627 | 2P | BG4NUC-LC396 |
| 2628 | 2P | BG4NUC-LC397 |
| 2629 | 2P | BG4NUC-LC398 |
| 2630 | 2P | BG4NUC-LC399 |
| 2631 | RBD | BG4NUC-LC400 |
| 2632 | RBD | BG4NUC-LC401 |
| 2633 | 2P | BG4NUC-LC402 |
| 2634 | 2P | BG4NUC-LC403 |
| 2635 | 2P | BG4NUC-LC404 |
| 2636 | RBD | BG4NUC-LC405 |
| 2637 | 2P | BG4NUC-LC406 |
| 2638 | RBD | BG4NUC-LC407 |
| 2639 | 2P | BG4NUC-LC408 |
| 2640 | 2P | BG4NUC-LC409 |
| 2641 | 2P | BG5NUC-HC1 |
| 2642 | RBD | BG5NUC-HC2 |
| 2643 | RBD | BG5NUC-HC3 |
| 2644 | 2P | BG5NUC-HC4 |
| 2645 | RBD | BG5NUC-HC5 |
| 2646 | 2P | BG5NUC-HC6 |
| 2647 | RBD | BG5NUC-HC7 |
| 2648 | 2P | BG5NUC-HC8 |
| 2649 | RBD | BG5NUC-HC9 |
| 2650 | 2P | BG5NUC-HC10 |
| 2651 | RBD | BG5NUC-HC11 |
| 2652 | 2P | BG5NUC-HC12 |
| 2653 | 2P | BG5NUC-HC13 |
| 2654 | 2P | BG5NUC-HC14 |
| 2655 | 2P | BG5NUC-HC15 |
| 2656 | RBD | BG5NUC-HC16 |
| 2657 | RBD | BG5NUC-HC17 |
| 2658 | 2P | BG5NUC-HC18 |
| 2659 | RBD | BG5NUC-HC19 |
| 2660 | RBD | BG5NUC-HC20 |
| 2661 | 2P | BG5NUC-HC21 |
| 2662 | RBD | BG5NUC-HC22 |
| 2663 | 2P | BG5NUC-HC23 |
| 2664 | RBD | BG5NUC-HC24 |
| 2665 | RBD | BG5NUC-HC25 |
| 2666 | 2F | BG5NUC-HC26 |
| 2667 | RBD | BG5NUC-HC27 |
| 2668 | RBD | BG5NUC-HC28 |
| 2669 | RBD | BG5NUC-HC29 |
| 2670 | RBD | BG5NUC-HC30 |
| 2671 | RBD | BG5NUC-HC31 |
| 2672 | 2P | BG5NUC-HC32 |
| 2673 | RBD | BG5NUC-HC33 |
| 2674 | RBD | BG5NUC-HC34 |
| 2675 | 2P | BG5NUC-HC35 |
| 2676 | RBD | BG5NUC-HC36 |
| 2677 | RBD | BG5NUC-HC37 |
| 2678 | 2P | BG5NUC-HC38 |
| 2679 | 2P | BG5NUC-HC39 |
| 2680 | 2P | BG5NUC-HC40 |
| 2681 | 2P | BG5NUC-HC41 |
| 2682 | 2P | BG5NUC-HC42 |
| 2683 | 2P | BG5NUC-HC43 |
| 2684 | RBD | BG5NUC-HC44 |
| 2685 | 2P | BG5NUC-HC45 |
| 2686 | 2P | BG5NUC-HC46 |
| 2687 | RBD | BG5NUC-HC47 |
| 2688 | RBD | BG5NUC-HC48 |
| 2689 | RBD | BG5NUC-HC49 |
| 2690 | RBD | BG5NUC-HC50 |
| 2691 | 2P | BG5NUC-HC51 |
| 2692 | 2P | BG5NUC-HC52 |
| 2693 | 2P | BG5NUC-HC53 |
| 2694 | 2P | BG5NUC-HC54 |
| 2695 | 2P | BG5NUC-HC55 |
| 2696 | 2P | BG5NUC-HC56 |
| 2697 | 2P | BG5NUC-HC57 |
| 2698 | 2P | BG5NUC-HC58 |
| 2699 | 2P | BG5NUC-HC59 |
| 2700 | 2P | BG5NUC-HC60 |
| 2701 | RBD | BG5NUC-HC61 |
| 2702 | RBD | BG5NUC-HC62 |
| 2703 | RBD | BG5NUC-HC63 |
| 2704 | RBD | BG5NUC-HC64 |
| 2705 | RBD | BG5NUC-HC65 |
| 2706 | RBD | BG5NUC-HC66 |
| 2707 | RBD | BG5NUC-HC67 |
| 2708 | RBD | BG5NUC-HC68 |
| 2709 | RBD | BG5NUC-HC69 |
| 2710 | RBD | BG5NUC-HC70 |
| 2711 | 2P | BG5NUC-HC71 |
| 2712 | RBD | BG5NUC-HC72 |
| 2713 | 2P | BG5NUC-HC73 |
| 2714 | 2P | BG5NUC-HC74 |
| 2715 | 2P | BG5NUC-HC75 |
| 2716 | 2P | BG5NUC-HC76 |
| 2717 | 2P | BG5NUC-HC77 |
| 2718 | 2P | BG5NUC-HC78 |
| 2719 | 2P | BG5NUC-HC79 |
| 2720 | 2P | BG5NUC-HC80 |
| 2721 | 2P | BG5NUC-HC81 |
| 2722 | 2P | BG5NUC-HC82 |
| 2723 | 2P | BG5NUC-HC83 |
| 2724 | 2P | BG5NUC-HC84 |
| 2725 | 2P | BG5NUC-HC85 |
| 2726 | 2P | BG5NUC-HC86 |
| 2727 | 2P | BG5NUC-HC87 |
| 2728 | 2P | BG5NUC-HC88 |
| 2729 | 2P | BG5NUC-HC89 |
| 2730 | 2P | BG5NUC-HC90 |
| 2731 | 2P | BG5NUC-HC91 |
| 2732 | 2P | BG5NUC-HC92 |
| 2733 | 2P | BG5NUC-HC93 |
| 2734 | 2P | BG5NUC-HC94 |
| 2735 | 2P | BG5NUC-HC95 |
| 2736 | 2P | BG5NUC-HC96 |
| 2737 | RBD | BG5NUC-HC97 |
| 2738 | RBD | BG5NUC-HC98 |
| 2739 | RBD | BG5NUC-HC99 |
| 2740 | RBD | BG5NUC-HC100 |
| 2741 | 2P | BG5NUC-HC101 |
| 2742 | 2P | BG5NUC-HC102 |
| 2743 | 2P | BG5NUC-HC103 |
| 2744 | 2P | BG5NUC-HC104 |
| 2745 | RBD | BG5NUC-HC105 |
| 2746 | RBD | BG5NUC-HC106 |
| 2747 | 2P | BG5NUC-HC107 |
| 2748 | RBD | BG5NUC-HC108 |
| 2749 | 2P | BG5NUC-HC109 |
| 2750 | RBD | BG5NUC-HC110 |
| 2751 | 2P | BG5NUC-HC111 |
| 2752 | RBD | BG5NUC-HC112 |
| 2753 | 2P | BG5NUC-HC113 |
| 2754 | 2P | BG5NUC-HC114 |
| 2755 | 2P | BG5NUC-HC115 |
| 2756 | 2P | BG5NUC-HC116 |
| 2757 | RBD | BG5NUC-HC117 |
| 2758 | 2P | BG5NUC-HC118 |
| 2759 | 2P | BG5NUC-HC119 |
| 2760 | 2P | BG5NUC-HC120 |
| 2761 | RBD | BG5NUC-HC121 |
| 2762 | RBD | BG5NUC-HC122 |
| 2763 | 2P | BG5NUC-HC123 |
| 2764 | 2P | BG5NUC-HC124 |
| 2765 | 2P | BG5NUC-HC125 |
| 2766 | 2P | BG5NUC-HC126 |
| 2767 | 2P | BG5NUC-HC127 |
| 2768 | 2P | BG5NUC-HC128 |
| 2769 | RBD | BG5NUC-HC129 |
| 2770 | 2P | BG5NUC-HC130 |
| 2771 | RBD | BG5NUC-HC131 |
| 2772 | 2P | BG5NUC-HC132 |
| 2773 | RBD | BG5NUC-HC133 |
| 2774 | RBD | BG5NUC-HC134 |
| 2775 | 2P | BG5NUC-HC135 |
| 2776 | 2P | BG5NUC-HC136 |
| 2777 | 2P | BG5NUC-HC137 |
| 2778 | 2P | BG5NUC-HC138 |
| 2779 | 2P | BG5NUC-HC139 |
| 2780 | 2P | BG5NUC-HC140 |
| 2781 | 2P | BG5NUC-HC141 |
| 2782 | 2P | BG5NUC-HC142 |
| 2783 | 2P | BG5NUC-HC143 |
| 2784 | RBD | BG5NUC-HC144 |
| 2785 | 2P | BG5NUC-HC145 |
| 2786 | 2P | BG5NUC-HC146 |
| 2787 | 2P | BG5NUC-HC147 |
| 2788 | 2P | BG5NUC-HC148 |
| 2789 | 2P | BG5NUC-HC149 |
| 2790 | 2P | BG5NUC-HC150 |
| 2791 | 2P | BG5NUC-HC151 |
| 2792 | 2P | BG5NUC-HC152 |
| 2793 | 2P | BG5NUC-HC153 |
| 2794 | 2P | BG5NUC-HC154 |
| 2795 | 2P | BG5NUC-HC155 |
| 2796 | RBD | BG5NUC-HC156 |
| 2797 | RBD | BG5NUC-HC157 |
| 2798 | 2P | BG5NUC-HC158 |
| 2799 | 2P | BG5NUC-HC159 |
| 2800 | 2P | BG5NUC-HC160 |
| 2801 | 2P | BG5NUC-HC161 |
| 2802 | 2P | BG5NUC-HC162 |
| 2803 | RBD | BG5NUC-HC163 |
| 2804 | 2P | BG5NUC-HC164 |
| 2805 | 2P | BG5NUC-HC165 |
| 2806 | RBD | BG5NUC-HC166 |
| 2807 | 2P | BG5NUC-HC167 |
| 2808 | 2P | BG5NUC-HC168 |
| 2809 | 2P | BG5NUC-HC169 |
| 2810 | RBD | BG5NUC-HC170 |
| 2811 | RBD | BG5NUC-HC171 |
| 2812 | RBD | BG5NUC-HC172 |
| 2813 | 2P | BG5NUC-HC173 |
| 2814 | 2P | BG5NUC-HC174 |
| 2815 | 2P | BG5NUC-HC175 |
| 2816 | 2P | BG5NUC-HC176 |
| 2817 | 2P | BG5NUC-HC177 |
| 2818 | 2P | BG5NUC-HC178 |
| 2819 | RBD | BG5NUC-HC179 |
| 2820 | RBD | BG5NUC-HC180 |
| 2821 | 2P | BG5NUC-HC181 |
| 2822 | 2P | BG5NUC-HC182 |
| 2823 | 2P | BG5NUC-HC183 |
| 2824 | 2P | BG5NUC-HC184 |
| 2825 | 2P | BG5NUC-HC185 |
| 2826 | 2P | BG5NUC-HC186 |
| 2827 | 2P | BG5NUC-HC187 |
| 2828 | 2P | BG5NUC-HC188 |
| 2829 | 2P | BG5NUC-HC189 |
| 2830 | 2P | BG5NUC-HC190 |
| 2831 | 2P | BG5NUC-HC191 |
| 2832 | 2P | BG5NUC-HC192 |
| 2833 | 2P | BG5NUC-HC193 |
| 2834 | 2P | BG5NUC-HC194 |
| 2835 | 2P | BG5NUC-HC195 |
| 2836 | 2P | BG5NUC-HC196 |
| 2837 | RBD | BG5NUC-HC197 |
| 2838 | 2P | BG5NUC-HC198 |
| 2839 | 2P | BG5NUC-HC199 |
| 2840 | RBD | BG5NUC-HC200 |
| 2841 | 2P | BG5NUC-HC201 |
| 2842 | RBD | BG5NUC-HC202 |
| 2843 | 2P | BG5NUC-HC203 |
| 2844 | 2P | BG5NUC-HC204 |
| 2845 | 2P | BG5NUC-HC205 |
| 2846 | RBD | BG5NUC-HC206 |
| 2847 | 2P | BG5NUC-HC207 |
| 2848 | RBD | BG5NUC-HC208 |
| 2849 | 2P | BG5NUC-HC209 |
| 2850 | 2P | BG5NUC-HC210 |
| 2851 | RBD | BG5NUC-HC211 |
| 2852 | 2P | BG5NUC-HC212 |
| 2853 | 2P | BG5NUC-HC213 |
| 2854 | 2P | BG5NUC-HC214 |
| 2855 | 2P | BG5NUC-HC215 |
| 2856 | RBD | BG5NUC-HC216 |
| 2857 | RBD | BG5NUC-HC217 |
| 2858 | 2P | BG5NUC-HC218 |
| 2859 | RBD | BG5NUC-HC219 |
| 2860 | 2P | BG5NUC-HC220 |
| 2861 | 2P | BG5NUC-HC221 |
| 2862 | 2P | BG5NUC-HC222 |
| 2863 | RBD | BG5NUC-HC223 |
| 2864 | 2P | BG5NUC-HC224 |
| 2865 | 2P | BG5NUC-HC225 |
| 2866 | 2P | BG5NUC-HC226 |
| 2867 | RBD | BG5NUC-HC227 |
| 2868 | 2P | BG5NUC-HC228 |
| 2869 | 2P | BG5NUC-HC229 |
| 2870 | RBD | BG5NUC-HC230 |
| 2871 | RBD | BG5NUC-HC231 |
| 2872 | 2P | BG5NUC-HC232 |
| 2873 | 2P | BG5NUC-HC233 |
| 2874 | 2P | BG5NUC-HC234 |
| 2875 | 2P | BG5NUC-HC235 |
| 2876 | 2P | BG5NUC-HC236 |
| 2877 | 2P | BG5NUC-HC237 |
| 2878 | 2P | BG5NUC-HC238 |
| 2879 | 2P | BG5NUC-HC239 |
| 2880 | RBD | BG5NUC-HC240 |
| 2881 | RBD | BG5NUC-HC241 |
| 2882 | RBD | BG5NUC-HC242 |
| 2883 | RBD | BG5NUC-HC243 |
| 2884 | 2P | BG5NUC-HC244 |
| 2885 | 2P | BG5NUC-HC245 |
| 2886 | 2P | BG5NUC-HC246 |
| 2887 | RBD | BG5NUC-HC247 |
| 2888 | RBD | BG5NUC-HC248 |
| 2889 | RBD | BG5NUC-HC249 |
| 2890 | 2P | BG5NUC-HC250 |
| 2891 | 2P | BG5NUC-HC251 |
| 2892 | 2P | BG5NUC-HC252 |
| 2893 | 2P | BG5NUC-HC253 |
| 2894 | 2P | BG5NUC-HC254 |
| 2895 | 2P | BG5NUC-HC255 |
| 2896 | RBD | BG5NUC-HC256 |
| 2897 | 2P | BG5NUC-HC257 |
| 2898 | 2P | BG5NUC-HC258 |
| 2899 | 2P | BG5NUC-HC259 |
| 2900 | 2P | BG5NUC-HC260 |
| 2901 | 2P | BG5NUC-HC261 |
| 2902 | 2P | BG5NUC-HC262 |
| 2903 | 2P | BG5NUC-HC263 |
| 2904 | 2P | BG5NUC-HC264 |
| 2905 | 2P | BG5NUC-HC265 |
| 2906 | 2F | BG5NUC-HC266 |
| 2907 | RBD | BG5NUC-HC267 |
| 2908 | 2P | BG5NUC-HC268 |
| 2909 | RBD | BG5NUC-HC269 |
| 2910 | RBD | BG5NUC-HC270 |
| 2911 | 2P | BG5NUC-HC271 |
| 2912 | 2P | BG5NUC-HC272 |
| 2913 | RBD | BG5NUC-HC273 |
| 2914 | 2P | BG5NUC-HC274 |
| 2915 | 2P | BG5NUC-HC275 |
| 2916 | 2P | BG5NUC-HC276 |
| 2917 | RBD | BG5NUC-HC277 |
| 2918 | 2P | BG5NUC-HC278 |
| 2919 | RBD | BG5NUC-HC279 |
| 2920 | RBD | BG5NUC-HC280 |
| 2921 | 2P | BG5NUC-HC281 |
| 2922 | 2P | BG5NUC-HC282 |
| 2923 | RBD | BG5NUC-HC283 |
| 2924 | RBD | BG5NUC-HC284 |
| 2925 | RBD | BG5NUC-HC285 |
| 2926 | 2P | BG5NUC-HC286 |
| 2927 | 2P | BG5NUC-HC287 |
| 2928 | 2P | BG5NUC-HC288 |
| 2929 | 2P | BG5NUC-HC289 |
| 2930 | 2P | BG5NUC-HC290 |
| 2931 | 2P | BG5NUC-HC291 |
| 2932 | 2P | BG5NUC-HC292 |
| 2933 | 2P | BG5NUC-HC293 |
| 2934 | 2P | BG5NUC-HC294 |
| 2935 | 2P | BG5NUC-HC295 |
| 2936 | RBD | BG5NUC-HC296 |
| 2937 | RBD | BG5NUC-HC297 |
| 2938 | 2P | BG5NUC-HC298 |
| 2939 | RBD | BG5NUC-HC299 |
| 2940 | RBD | BG5NUC-HC300 |
| 2941 | 2P | BG5NUC-HC301 |
| 2942 | 2P | BG5NUC-HC302 |
| 2943 | RBD | BG5NUC-HC303 |
| 2944 | 2P | BG5NUC-HC304 |
| 2945 | RBD | BG5NUC-HC305 |
| 2946 | RBD | BG5NUC-HC306 |
| 2947 | RBD | BG5NUC-HC307 |
| 2948 | 2P | BG5NUC-HC308 |
| 2949 | 2P | BG5NUC-HC309 |
| 2950 | RBD | BG5NUC-HC310 |
| 2951 | 2P | BG5NUC-HC311 |
| 2952 | 2P | BG5NUC-HC312 |
| 2953 | 2P | BG5NUC-HC313 |
| 2954 | 2P | BG5NUC-HC314 |
| 2955 | RBD | BG5NUC-HC315 |
| 2956 | 2P | BG5NUC-HC316 |
| 2957 | RBD | BG5NUC-HC317 |
| 2958 | RBD | BG5NUC-HC318 |
| 2959 | 2P | BG5NUC-HC319 |
| 2960 | RBD | BG5NUC-HC320 |
| 2961 | RBD | BG5NUC-HC321 |
| 2962 | RBD | BG5NUC-HC322 |
| 2963 | 2P | BG5NUC-HC323 |
| 2964 | 2P | BG5NUC-HC324 |
| 2965 | 2P | BG5NUC-HC325 |
| 2966 | RBD | BG5NUC-HC326 |
| 2967 | 2P | BG5NUC-HC327 |
| 2968 | 2P | BG5NUC-HC328 |
| 2969 | 2P | BG5NUC-HC329 |
| 2970 | 2P | BG5NUC-HC330 |
| 2971 | 2P | BG5NUC-HC331 |
| 2972 | RBD | BG5NUC-HC332 |
| 2973 | RBD | BG5NUC-HC333 |
| 2974 | RBD | BG5NUC-HC334 |
| 2975 | RBD | BG5NUC-HC335 |
| 2976 | RBD | BG5NUC-HC336 |
| 2977 | RBD | BG5NUC-HC337 |
| 2978 | 2P | BG5NUC-HC338 |
| 2979 | 2P | BG5NUC-HC339 |
| 2980 | 2P | BG5NUC-HC340 |
| 2981 | 2P | BG5NUC-HC341 |
| 2982 | 2P | BG5NUC-HC342 |
| 2983 | 2P | BG5NUC-HC343 |
| 2984 | 2P | BG5NUC-HC344 |
| 2985 | 2P | BG5NUC-HC345 |
| 2986 | RBD | BG5NUC-HC346 |
| 2987 | RBD | BG5NUC-HC347 |
| 2988 | 2P | BG5NUC-HC348 |
| 2989 | 2F | BG5NUC-HC349 |
| 2990 | 2P | BG5NUC-HC350 |
| 2991 | 2P | BG5NUC-HC351 |
| 2992 | RBD | BG5NUC-HC352 |
| 2993 | 2P | BG5NUC-HC353 |
| 2994 | RBD | BG5NUC-HC354 |
| 2995 | RBD | BG5NUC-HC355 |
| 2996 | 2P | BG5NUC-HC356 |
| 2997 | RBD | BG5NUC-HC357 |
| 2998 | 2P | BG5NUC-HC358 |
| 2999 | RBD | BG5NUC-HC359 |
| 3000 | 2P | BG5NUC-HC360 |
| 3001 | 2P | BG5NUC-HC361 |
| 3002 | 2P | BG5NUC-HC362 |
| 3003 | RBD | BG5NUC-HC363 |
| 3004 | 2P | BG5NUC-HC364 |
| 3005 | 2P | BG5NUC-HC365 |
| 3006 | 2P | BG5NUC-HC366 |
| 3007 | 2P | BG5NUC-HC367 |
| 3008 | RBD | BG5NUC-HC368 |
| 3009 | RBD | BG5NUC-HC369 |
| 3010 | 2P | BG5NUC-HC370 |
| 3011 | RBD | BG5NUC-HC371 |
| 3012 | 2P | BG5NUC-HC372 |
| 3013 | RBD | BG5NUC-HC373 |
| 3014 | 2P | BG5NUC-HC374 |
| 3015 | 2P | BG5NUC-HC375 |
| 3016 | 2P | BG5NUC-HC376 |
| 3017 | RBD | BG5NUC-HC377 |
| 3018 | 2P | BG5NUC-HC378 |
| 3019 | 2P | BG5NUC-HC379 |
| 3020 | RBD | BG5NUC-HC380 |
| 3021 | RBD | BG5NUC-HC381 |
| 3022 | RBD | BG5NUC-HC382 |
| 3023 | RBD | BG5NUC-HC383 |
| 3024 | 2P | BG5NUC-HC384 |
| 3025 | 2P | BG5NUC-HC385 |
| 3026 | 2F | BG5NUC-HC386 |
| 3027 | 2P | BG5NUC-HC387 |
| 3028 | 2F | BG5NUC-HC388 |
| 3029 | 2P | BG5NUC-HC389 |
| 3030 | 2P | BG5NUC-HC390 |
| 3031 | 2P | BG5NUC-HC391 |
| 3032 | 2P | BG5NUC-HC392 |
| 3033 | 2P | BG5NUC-HC393 |
| 3034 | RBD | BG5NUC-HC394 |
| 3035 | RBD | BG5NUC-HC395 |
| 3036 | RBD | BG5NUC-HC396 |
| 3037 | 2P | BG5NUC-HC397 |
| 3038 | 2P | BG5NUC-HC398 |
| 3039 | 2P | BG5NUC-HC399 |
| 3040 | 2P | BG5NUC-HC400 |
| 3041 | 2P | BG5NUC-HC401 |
| 3042 | 2P | BG5NUC-HC402 |
| 3043 | 2F | BG5NUC-HC403 |
| 3044 | 2P | BG5NUC-HC404 |
| 3045 | 2P | BG5NUC-HC405 |
| 3046 | 2P | BG5NUC-HC406 |
| 3047 | RBD | BG5NUC-HC407 |
| 3048 | 2P | BG5NUC-HC408 |
| 3049 | RBD | BG5NUC-HC409 |
| 3050 | RBD | BG5NUC-HC410 |
| 3051 | 2P | BG5NUC-HC411 |
| 3052 | 2P | BG5NUC-HC412 |
| 3053 | 2P | BG5NUC-HC413 |
| 3054 | 2P | BG5NUC-HC414 |
| 3055 | 2P | BG5NUC-HC415 |
| 3056 | RBD | BG5NUC-HC416 |
| 3057 | 2P | BG5NUC-HC417 |
| 3058 | RBD | BG5NUC-HC418 |
| 3059 | 2P | BG5NUC-HC419 |
| 3060 | 2P | BG5NUC-HC420 |
| 3061 | 2P | BG5NUC-HC421 |
| 3062 | 2P | BG5NUC-HC422 |
| 3063 | 2P | BG5NUC-HC423 |
| 3064 | 2P | BG5NUC-HC424 |
| 3065 | RBD | BG5NUC-HC425 |
| 3066 | 2P | BG5NUC-HC426 |
| 3067 | RBD | BG5NUC-HC427 |
| 3068 | 2P | BG5NUC-HC428 |
| 3069 | 2P | BG5NUC-HC429 |
| 3070 | 2P | BG5NUC-HC430 |
| 3071 | 2P | BG5NUC-HC431 |
| 3072 | 2P | BG5NUC-HC432 |
| 3073 | 2P | BG5NUC-HC433 |
| 3074 | RBD | BG5NUC-HC434 |
| 3075 | RBD | BG5NUC-HC435 |
| 3076 | 2P | BG5NUC-HC436 |
| 3077 | RBD | BG5NUC-HC437 |
| 3078 | 2P | BG5NUC-HC438 |
| 3079 | 2P | BG5NUC-HC439 |
| 3080 | 2P | BG5NUC-HC440 |
| 3081 | 2P | BG5NUC-HC441 |
| 3082 | RBD | BG5NUC-HC442 |
| 3083 | 2P | BG5NUC-HC443 |
| 3084 | 2P | BG5NUC-HC444 |
| 3085 | 2P | BG5NUC-HC445 |
| 3086 | 2P | BG5NUC-HC446 |
| 3087 | 2P | BG5NUC-HC447 |
| 3088 | RBD | BG5NUC-HC448 |
| 3089 | 2P | BG5NUC-HC449 |
| 3090 | 2P | BG5NUC-HC450 |
| 3091 | 2P | BG5NUC-HC451 |
| 3092 | 2P | BG5NUC-HC452 |
| 3093 | 2P | BG5NUC-HC453 |
| 3094 | 2P | BG5NUC-HC454 |
| 3095 | 2P | BG5NUC-HC455 |
| 3096 | 2P | BG5NUC-HC456 |
| 3097 | 2P | BG5NUC-HC457 |
| 3098 | 2P | BG5NUC-HC458 |
| 3099 | 2P | BG5NUC-HC459 |
| 3100 | 2P | BG5NUC-HC460 |
| 3101 | RBD | BG5NUC-HC461 |
| 3102 | 2P | BG5NUC-HC462 |
| 3103 | 2P | BG5NUC-HC463 |
| 3104 | 2P | BG5NUC-HC464 |
| 3105 | 2P | BG5NUC-HC465 |
| 3106 | RBD | BG5NUC-HC466 |
| 3107 | 2P | BG5NUC-HC467 |
| 3108 | 2P | BG5NUC-HC468 |
| 3109 | 2P | BG5NUC-HC469 |
| 3110 | RBD | BG5NUC-HC470 |
| 3111 | RBD | BG5NUC-HC471 |
| 3112 | 2F | BG5NUC-HC472 |
| 3113 | RBD | BG5NUC-HC473 |
| 3114 | RBD | BG5NUC-HC474 |
| 3115 | RBD | BG5NUC-HC475 |
| 3116 | 2P | BG5NUC-HC476 |
| 3117 | 2P | BG5NUC-LC1 |
| 3118 | RBD | BG5NUC-LC2 |
| 3119 | RBD | BG5NUC-LC3 |
| 3120 | 2P | BG5NUC-LC4 |
| 3121 | RBD | BG5NUC-LC5 |
| 3122 | 2P | BG5NUC-LC6 |
| 3123 | RBD | BG5NUC-LC7 |
| 3124 | 2P | BG5NUC-LC8 |
| 3125 | RBD | BG5NUC-LC9 |
| 3126 | 2P | BG5NUC-LC10 |
| 3127 | RBD | BG5NUC-LC11 |
| 3128 | 2P | BG5NUC-LC12 |
| 3129 | 2P | BG5NUC-LC13 |
| 3130 | 2P | BG5NUC-LC14 |
| 3131 | 2P | BG5NUC-LC15 |
| 3132 | RBD | BG5NUC-LC16 |
| 3133 | RBD | BG5NUC-LC17 |
| 3134 | 2P | BG5NUC-LC18 |
| 3135 | RBD | BG5NUC-LC19 |
| 3136 | RBD | BG5NUC-LC20 |
| 3137 | 2P | BG5NUC-LC21 |
| 3138 | RBD | BG5NUC-LC22 |
| 3139 | 2P | BG5NUC-LC23 |
| 3140 | RBD | BG5NUC-LC24 |
| 3141 | RBD | BG5NUC-LC25 |
| 3142 | 2P | BG5NUC-LC26 |
| 3143 | RBD | BG5NUC-LC27 |
| 3144 | RBD | BG5NUC-LC28 |
| 3145 | RBD | BG5NUC-LC29 |
| 3146 | RBD | BG5NUC-LC30 |
| 3147 | RBD | BG5NUC-LC31 |
| 3148 | 2P | BG5NUC-LC32 |
| 3149 | RBD | BG5NUC-LC33 |
| 3150 | RBD | BG5NUC-LC34 |
| 3151 | 2P | BG5NUC-LC35 |
| 3152 | RBD | BG5NUC-LC36 |
| 3153 | RBD | BG5NUC-LC37 |
| 3154 | 2P | BG5NUC-LC38 |
| 3155 | 2P | BG5NUC-LC39 |
| 3156 | 2P | BG5NUC-LC40 |
| 3157 | 2P | BG5NUC-LC41 |
| 3158 | 2P | BG5NUC-LC42 |
| 3159 | 2P | BG5NUC-LC43 |
| 3160 | RBD | BG5NUC-LC44 |
| 3161 | 2P | BG5NUC-LC45 |
| 3162 | 2P | BG5NUC-LC46 |
| 3163 | RBD | BG5NUC-LC47 |
| 3164 | RBD | BG5NUC-LC48 |
| 3165 | RBD | BG5NUC-LC49 |
| 3166 | RBD | BG5NUC-LC50 |
| 3167 | 2P | BG5NUC-LC51 |
| 3168 | 2P | BG5NUC-LC52 |
| 3169 | 2P | BG5NUC-LC53 |
| 3170 | 2P | BG5NUC-LC54 |
| 3171 | 2P | BG5NUC-LC55 |
| 3172 | 2P | BG5NUC-LC56 |
| 3173 | 2P | BG5NUC-LC57 |
| 3174 | 2P | BG5NUC-LC58 |
| 3175 | 2P | BG5NUC-LC59 |
| 3176 | 2P | BG5NUC-LC60 |
| 3177 | RBD | BG5NUC-LC61 |
| 3178 | RBD | BG5NUC-LC62 |
| 3179 | RBD | BG5NUC-LC63 |
| 3180 | RBD | BG5NUC-LC64 |
| 3181 | RBD | BG5NUC-LC65 |
| 3182 | RBD | BG5NUC-LC66 |
| 3183 | RBD | BG5NUC-LC67 |
| 3184 | RBD | BG5NUC-LC68 |
| 3185 | RBD | BG5NUC-LC69 |
| 3186 | RBD | BG5NUC-LC70 |
| 3187 | 2P | BG5NUC-LC71 |
| 3188 | RBD | BG5NUC-LC72 |
| 3189 | 2P | BG5NUC-LC73 |
| 3190 | 2P | BG5NUC-LC74 |
| 3191 | 2P | BG5NUC-LC75 |
| 3192 | 2P | BG5NUC-LC76 |
| 3193 | 2P | BG5NUC-LC77 |
| 3194 | 2P | BG5NUC-LC78 |
| 3195 | 2P | BG5NUC-LC79 |
| 3196 | 2P | BG5NUC-LC80 |
| 3197 | 2P | BG5NUC-LC81 |
| 3198 | 2P | BG5NUC-LC82 |
| 3199 | 2P | BG5NUC-LC83 |
| 3200 | 2P | BG5NUC-LC84 |
| 3201 | 2P | BG5NUC-LC85 |
| 3202 | 2P | BG5NUC-LC86 |
| 3203 | 2P | BG5NUC-LC87 |
| 3204 | 2P | BG5NUC-LC88 |
| 3205 | 2P | BG5NUC-LC89 |
| 3206 | 2P | BG5NUC-LC90 |
| 3207 | 2P | BG5NUC-LC91 |
| 3208 | 2P | BG5NUC-LC92 |
| 3209 | 2P | BG5NUC-LC93 |
| 3210 | 2P | BG5NUC-LC94 |
| 3211 | 2P | BG5NUC-LC95 |
| 3212 | 2P | BG5NUC-LC96 |
| 3213 | RBD | BG5NUC-LC97 |
| 3214 | RBD | BG5NUC-LC98 |
| 3215 | RBD | BG5NUC-LC99 |
| 3216 | RBD | BG5NUC-LC100 |
| 3217 | 2P | BG5NUC-LC101 |
| 3218 | 2P | BG5NUC-LC102 |
| 3219 | 2P | BG5NUC-LC103 |
| 3220 | 2P | BG5NUC-LC104 |
| 3221 | RBD | BG5NUC-LC105 |
| 3222 | RBD | BG5NUC-LC106 |
| 3223 | 2P | BG5NUC-LC107 |
| 3224 | RBD | BG5NUC-LC108 |
| 3225 | 2P | BG5NUC-LC109 |
| 3226 | RBD | BG5NUC-LC110 |
| 3227 | 2P | BG5NUC-LC111 |
| 3228 | RBD | BG5NUC-LC112 |
| 3229 | 2P | BG5NUC-LC113 |
| 3230 | 2P | BG5NUC-LC114 |
| 3231 | 2P | BG5NUC-LC115 |
| 3232 | 2P | BG5NUC-LC116 |
| 3233 | RBD | BG5NUC-LC117 |
| 3234 | 2P | BG5NUC-LC118 |
| 3235 | 2P | BG5NUC-LC119 |
| 3236 | 2P | BG5NUC-LC120 |
| 3237 | RBD | BG5NUC-LC121 |
| 3238 | RBD | BG5NUC-LC122 |
| 3239 | 2P | BG5NUC-LC123 |
| 3240 | 2P | BG5NUC-LC124 |
| 3241 | 2P | BG5NUC-LC125 |
| 3242 | 2P | BG5NUC-LC126 |
| 3243 | 2P | BG5NUC-LC127 |
| 3244 | 2P | BG5NUC-LC128 |
| 3245 | RBD | BG5NUC-LC129 |
| 3246 | 2P | BG5NUC-LC130 |
| 3247 | RBD | BG5NUC-LC131 |
| 3248 | 2P | BG5NUC-LC132 |
| 3249 | RBD | BG5NUC-LC133 |
| 3250 | RBD | BG5NUC-LC134 |
| 3251 | 2P | BG5NUC-LC135 |
| 3252 | 2P | BG5NUC-LC136 |
| 3253 | 2P | BG5NUC-LC137 |
| 3254 | 2P | BG5NUC-LC138 |
| 3255 | 2P | BG5NUC-LC139 |
| 3256 | 2P | BG5NUC-LC140 |
| 3257 | 2P | BG5NUC-LC141 |
| 3258 | 2P | BG5NUC-LC142 |
| 3259 | 2P | BG5NUC-LC143 |
| 3260 | RBD | BG5NUC-LC144 |
| 3261 | 2P | BG5NUC-LC145 |
| 3262 | 2P | BG5NUC-LC146 |
| 3263 | 2P | BG5NUC-LC147 |
| 3264 | 2P | BG5NUC-LC148 |
| 3265 | 2P | BG5NUC-LC149 |
| 3266 | 2P | BG5NUC-LC150 |
| 3267 | 2P | BG5NUC-LC151 |
| 3268 | 2P | BG5NUC-LC152 |
| 3269 | 2P | BG5NUC-LC153 |
| 3270 | 2P | BG5NUC-LC154 |
| 3271 | 2P | BG5NUC-LC155 |
| 3272 | RBD | BG5NUC-LC156 |
| 3273 | RBD | BG5NUC-LC157 |
| 3274 | 2P | BG5NUC-LC158 |
| 3275 | 2P | BG5NUC-LC159 |
| 3276 | 2P | BG5NUC-LC160 |
| 3277 | 2P | BG5NUC-LC161 |
| 3278 | 2P | BG5NUC-LC162 |
| 3279 | RBD | BG5NUC-LC163 |
| 3280 | 2P | BG5NUC-LC164 |
| 3281 | 2P | BG5NUC-LC165 |
| 3282 | RBD | BG5NUC-LC166 |
| 3283 | 2P | BG5NUC-LC167 |
| 3284 | 2P | BG5NUC-LC168 |
| 3285 | 2P | BG5NUC-LC169 |
| 3286 | RBD | BG5NUC-LC170 |
| 3287 | RBD | BG5NUC-LC171 |
| 3288 | RBD | BG5NUC-LC172 |
| 3289 | 2P | BG5NUC-LC173 |
| 3290 | 2P | BG5NUC-LC174 |
| 3291 | 2P | BG5NUC-LC175 |
| 3292 | 2P | BG5NUC-LC176 |
| 3293 | 2P | BG5NUC-LC177 |
| 3294 | 2P | BG5NUC-LC178 |
| 3295 | RBD | BG5NUC-LC179 |
| 3296 | RBD | BG5NUC-LC180 |
| 3297 | 2P | BG5NUC-LC181 |
| 3298 | 2P | BG5NUC-LC182 |
| 3299 | 2P | BG5NUC-LC183 |
| 3300 | 2P | BG5NUC-LC184 |
| 3301 | 2P | BG5NUC-LC185 |
| 3302 | 2P | BG5NUC-LC186 |
| 3303 | 2P | BG5NUC-LC187 |
| 3304 | 2P | BG5NUC-LC188 |
| 3305 | 2P | BG5NUC-LC189 |
| 3306 | 2P | BG5NUC-LC190 |
| 3307 | 2P | BG5NUC-LC191 |
| 3308 | 2P | BG5NUC-LC192 |
| 3309 | 2P | BG5NUC-LC193 |
| 3310 | 2P | BG5NUC-LC194 |
| 3311 | 2P | BG5NUC-LC195 |
| 3312 | 2P | BG5NUC-LC196 |
| 3313 | RBD | BG5NUC-LC197 |
| 3314 | 2P | BG5NUC-LC198 |
| 3315 | 2P | BG5NUC-LC199 |
| 3316 | RBD | BG5NUC-LC200 |
| 3317 | 2P | BG5NUC-LC201 |
| 3318 | RBD | BG5NUC-LC202 |
| 3319 | 2P | BG5NUC-LC203 |
| 3320 | 2P | BG5NUC-LC204 |
| 3321 | 2P | BG5NUC-LC205 |
| 3322 | RBD | BG5NUC-LC206 |
| 3323 | 2P | BG5NUC-LC207 |
| 3324 | RBD | BG5NUC-LC208 |
| 3325 | 2P | BG5NUC-LC209 |
| 3326 | 2P | BG5NUC-LC210 |
| 3327 | RBD | BG5NUC-LC211 |
| 3328 | 2P | BG5NUC-LC212 |
| 3329 | 2P | BG5NUC-LC213 |
| 3330 | 2P | BG5NUC-LC214 |
| 3331 | 2P | BG5NUC-LC215 |
| 3332 | RBD | BG5NUC-LC216 |
| 3333 | RBD | BG5NUC-LC217 |
| 3334 | 2P | BG5NUC-LC218 |
| 3335 | RBD | BG5NUC-LC219 |
| 3336 | 2P | BG5NUC-LC220 |
| 3337 | 2P | BG5NUC-LC221 |
| 3338 | 2P | BG5NUC-LC222 |
| 3339 | RBD | BG5NUC-LC223 |
| 3340 | 2P | BG5NUC-LC224 |
| 3341 | 2P | BG5NUC-LC225 |
| 3342 | 2P | BG5NUC-LC226 |
| 3343 | RBD | BG5NUC-LC227 |
| 3344 | 2P | BG5NUC-LC228 |
| 3345 | 2P | BG5NUC-LC229 |
| 3346 | RBD | BG5NUC-LC230 |
| 3347 | RBD | BG5NUC-LC231 |
| 3348 | 2P | BG5NUC-LC232 |
| 3349 | 2P | BG5NUC-LC233 |
| 3350 | 2P | BG5NUC-LC234 |
| 3351 | 2P | BG5NUC-LC235 |
| 3352 | 2P | BG5NUC-LC236 |
| 3353 | 2P | BG5NUC-LC237 |
| 3354 | 2P | BG5NUC-LC238 |
| 3355 | 2P | BG5NUC-LC239 |
| 3356 | RBD | BG5NUC-LC240 |
| 3357 | RBD | BG5NUC-LC241 |
| 3358 | RBD | BG5NUC-LC242 |
| 3359 | RBD | BG5NUC-LC243 |
| 3360 | 2P | BG5NUC-LC244 |
| 3361 | 2P | BG5NUC-LC245 |
| 3362 | 2P | BG5NUC-LC246 |
| 3363 | RBD | BG5NUC-LC247 |
| 3364 | RBD | BG5NUC-LC248 |
| 3365 | RBD | BG5NUC-LC249 |
| 3366 | 2P | BG5NUC-LC250 |
| 3367 | 2P | BG5NUC-LC251 |
| 3368 | 2P | BG5NUC-LC252 |
| 3369 | 2P | BG5NUC-LC253 |
| 3370 | 2P | BG5NUC-LC254 |
| 3371 | 2P | BG5NUC-LC255 |
| 3372 | RBD | BG5NUC-LC256 |
| 3373 | 2P | BG5NUC-LC257 |
| 3374 | 2P | BG5NUC-LC258 |
| 3375 | 2P | BG5NUC-LC259 |
| 3376 | 2P | BG5NUC-LC260 |
| 3377 | 2P | BG5NUC-LC261 |
| 3378 | 2P | BG5NUC-LC262 |
| 3379 | 2P | BG5NUC-LC263 |
| 3380 | 2P | BG5NUC-LC264 |
| 3381 | 2P | BG5NUC-LC265 |
| 3382 | 2P | BG5NUC-LC266 |
| 3383 | RBD | BG5NUC-LC267 |
| 3384 | 2P | BG5NUC-LC268 |
| 3385 | RBD | BG5NUC-LC269 |
| 3386 | RBD | BG5NUC-LC270 |
| 3387 | 2P | BG5NUC-LC271 |
| 3388 | 2P | BG5NUC-LC272 |
| 3389 | RBD | BG5NUC-LC273 |
| 3390 | 2P | BG5NUC-LC274 |
| 3391 | 2P | BG5NUC-LC275 |
| 3392 | 2P | BG5NUC-LC276 |
| 3393 | RBD | BG5NUC-LC277 |
| 3394 | 2P | BG5NUC-LC278 |
| 3395 | RBD | BG5NUC-LC279 |
| 3396 | RBD | BG5NUC-LC280 |
| 3397 | 2P | BG5NUC-LC281 |
| 3398 | 2P | BG5NUC-LC282 |
| 3399 | RBD | BG5NUC-LC283 |
| 3400 | RBD | BG5NUC-LC284 |
| 3401 | RBD | BG5NUC-LC285 |
| 3402 | 2P | BG5NUC-LC286 |
| 3403 | 2P | BG5NUC-LC287 |
| 3404 | 2P | BG5NUC-LC288 |
| 3405 | 2P | BG5NUC-LC289 |
| 3406 | 2P | BG5NUC-LC290 |
| 3407 | 2P | BG5NUC-LC291 |
| 3408 | 2P | BG5NUC-LC292 |
| 3409 | 2P | BG5NUC-LC293 |
| 3410 | 2P | BG5NUC-LC294 |
| 3411 | 2P | BG5NUC-LC295 |
| 3412 | RBD | BG5NUC-LC296 |
| 3413 | RBD | BG5NUC-LC297 |
| 3414 | 2P | BG5NUC-LC298 |
| 3415 | RBD | BG5NUC-LC299 |
| 3416 | RBD | BG5NUC-LC300 |
| 3417 | 2P | BG5NUC-LC301 |
| 3418 | 2P | BG5NUC-LC302 |
| 3419 | RBD | BG5NUC-LC303 |
| 3420 | 2P | BG5NUC-LC304 |
| 3421 | RBD | BG5NUC-LC305 |
| 3422 | RBD | BG5NUC-LC306 |
| 3423 | RBD | BG5NUC-LC307 |
| 3424 | 2P | BG5NUC-LC308 |
| 3425 | 2P | BG5NUC-LC309 |
| 3426 | RBD | BG5NUC-LC310 |
| 3427 | 2P | BG5NUC-LC311 |
| 3428 | 2P | BG5NUC-LC312 |
| 3429 | 2P | BG5NUC-LC313 |
| 3430 | 2P | BG5NUC-LC314 |
| 3431 | RBD | BG5NUC-LC315 |
| 3432 | 2P | BG5NUC-LC316 |
| 3433 | RBD | BG5NUC-LC317 |
| 3434 | RBD | BG5NUC-LC318 |
| 3435 | 2P | BG5NUC-LC319 |
| 3436 | RBD | BG5NUC-LC320 |
| 3437 | RBD | BG5NUC-LC321 |
| 3438 | RBD | BG5NUC-LC322 |
| 3439 | 2P | BG5NUC-LC323 |
| 3440 | 2P | BG5NUC-LC324 |
| 3441 | 2P | BG5NUC-LC325 |
| 3442 | RBD | BG5NUC-LC326 |
| 3443 | 2P | BG5NUC-LC327 |
| 3444 | 2P | BG5NUC-LC328 |
| 3445 | 2P | BG5NUC-LC329 |
| 3446 | 2P | BG5NUC-LC330 |
| 3447 | 2P | BG5NUC-LC331 |
| 3448 | RBD | BG5NUC-LC332 |
| 3449 | RBD | BG5NUC-LC333 |
| 3450 | RBD | BG5NUC-LC334 |
| 3451 | RBD | BG5NUC-LC335 |
| 3452 | RBD | BG5NUC-LC336 |
| 3453 | RBD | BG5NUC-LC337 |
| 3454 | 2P | BG5NUC-LC338 |
| 3455 | 2P | BG5NUC-LC339 |
| 3456 | 2P | BG5NUC-LC340 |
| 3457 | 2P | BG5NUC-LC341 |
| 3458 | 2P | BG5NUC-LC342 |
| 3459 | 2P | BG5NUC-LC343 |
| 3460 | 2P | BG5NUC-LC344 |
| 3461 | 2P | BG5NUC-LC345 |
| 3462 | RBD | BG5NUC-LC346 |
| 3463 | RBD | BG5NUC-LC347 |
| 3464 | 2P | BG5NUC-LC348 |
| 3465 | 2P | BG5NUC-LC349 |
| 3466 | 2P | BG5NUC-LC350 |
| 3467 | 2P | BG5NUC-LC351 |
| 3468 | RBD | BG5NUC-LC352 |
| 3469 | 2P | BG5NUC-LC353 |
| 3470 | RBD | BG5NUC-LC354 |
| 3471 | RBD | BG5NUC-LC355 |
| 3472 | 2P | BG5NUC-LC356 |
| 3473 | RBD | BG5NUC-LC357 |
| 3474 | 2P | BG5NUC-LC358 |
| 3475 | RBD | BG5NUC-LC359 |
| 3476 | 2P | BG5NUC-LC360 |
| 3477 | 2P | BG5NUC-LC361 |
| 3478 | 2P | BG5NUC-LC362 |
| 3479 | RBD | BG5NUC-LC363 |
| 3480 | 2P | BG5NUC-LC364 |
| 3481 | 2P | BG5NUC-LC365 |
| 3482 | 2P | BG5NUC-LC366 |
| 3483 | 2P | BG5NUC-LC367 |
| 3484 | RBD | BG5NUC-LC368 |
| 3485 | RBD | BG5NUC-LC369 |
| 3486 | 2P | BG5NUC-LC370 |
| 3487 | RBD | BG5NUC-LC371 |
| 3488 | 2P | BG5NUC-LC372 |
| 3489 | RBD | BG5NUC-LC373 |
| 3490 | 2P | BG5NUC-LC374 |
| 3491 | 2P | BG5NUC-LC375 |
| 3492 | 2P | BG5NUC-LC376 |
| 3493 | RBD | BG5NUC-LC377 |
| 3494 | 2P | BG5NUC-LC378 |
| 3495 | 2P | BG5NUC-LC379 |
| 3496 | RBD | BG5NUC-LC380 |
| 3497 | RBD | BG5NUC-LC381 |
| 3498 | RBD | BG5NUC-LC382 |
| 3499 | RBD | BG5NUC-LC383 |
| 3500 | 2P | BG5NUC-LC384 |
| 3501 | 2P | BG5NUC-LC385 |
| 3502 | 2P | BG5NUC-LC386 |
| 3503 | 2P | BG5NUC-LC387 |
| 3504 | 2P | BG5NUC-LC388 |
| 3505 | 2P | BG5NUC-LC389 |
| 3506 | 2P | BG5NUC-LC390 |
| 3507 | 2P | BG5NUC-LC391 |
| 3508 | 2P | BG5NUC-LC392 |
| 3509 | 2P | BG5NUC-LC393 |
| 3510 | RBD | BG5NUC-LC394 |
| 3511 | RBD | BG5NUC-LC395 |
| 3512 | RBD | BG5NUC-LC396 |
| 3513 | 2P | BG5NUC-LC397 |
| 3514 | 2P | BG5NUC-LC398 |
| 3515 | 2P | BG5NUC-LC399 |
| 3516 | 2P | BG5NUC-LC400 |
| 3517 | 2P | BG5NUC-LC401 |
| 3518 | 2P | BG5NUC-LC402 |
| 3519 | 2P | BG5NUC-LC403 |
| 3520 | 2P | BG5NUC-LC404 |
| 3521 | 2P | BG5NUC-LC405 |
| 3522 | 2P | BG5NUC-LC406 |
| 3523 | RBD | BG5NUC-LC407 |
| 3524 | 2P | BG5NUC-LC408 |
| 3525 | RBD | BG5NUC-LC409 |
| 3526 | RBD | BG5NUC-LC410 |
| 3527 | 2P | BG5NUC-LC411 |
| 3528 | 2P | BG5NUC-LC412 |
| 3529 | 2P | BG5NUC-LC413 |
| 3530 | 2P | BG5NUC-LC414 |
| 3531 | 2P | BG5NUC-LC415 |
| 3532 | RBD | BG5NUC-LC416 |
| 3533 | 2P | BG5NUC-LC417 |
| 3534 | RBD | BG5NUC-LC418 |
| 3535 | 2P | BG5NUC-LC419 |
| 3536 | 2P | BG5NUC-LC420 |
| 3537 | 2P | BG5NUC-LC421 |
| 3538 | 2P | BG5NUC-LC422 |
| 3539 | 2P | BG5NUC-LC423 |
| 3540 | 2P | BG5NUC-LC424 |
| 3541 | RBD | BG5NUC-LC425 |
| 3542 | 2P | BG5NUC-LC426 |
| 3543 | RBD | BG5NUC-LC427 |
| 3544 | 2P | BG5NUC-LC428 |
| 3545 | 2P | BG5NUC-LC429 |
| 3546 | 2P | BG5NUC-LC430 |
| 3547 | 2P | BG5NUC-LC431 |
| 3548 | 2P | BG5NUC-LC432 |
| 3549 | 2P | BG5NUC-LC433 |
| 3550 | RBD | BG5NUC-LC434 |
| 3551 | RBD | BG5NUC-LC435 |
| 3552 | 2P | BG5NUC-LC436 |
| 3553 | RBD | BG5NUC-LC437 |
| 3554 | 2P | BG5NUC-LC438 |
| 3555 | 2P | BG5NUC-LC439 |
| 3556 | 2P | BG5NUC-LC440 |
| 3557 | 2P | BG5NUC-LC441 |
| 3558 | RBD | BG5NUC-LC442 |
| 3559 | 2P | BG5NUC-LC443 |
| 3560 | 2P | BG5NUC-LC444 |
| 3561 | 2P | BG5NUC-LC445 |
| 3562 | 2P | BG5NUC-LC446 |
| 3563 | 2P | BG5NUC-LC447 |
| 3564 | RBD | BG5NUC-LC448 |
| 3565 | 2P | BG5NUC-LC449 |
| 3566 | 2P | BG5NUC-LC450 |
| 3567 | 2P | BG5NUC-LC451 |
| 3568 | 2P | BG5NUC-LC452 |
| 3569 | 2P | BG5NUC-LC453 |
| 3570 | 2P | BG5NUC-LC454 |
| 3571 | 2P | BG5NUC-LC455 |
| 3572 | 2P | BG5NUC-LC456 |
| 3573 | 2P | BG5NUC-LC457 |
| 3574 | 2P | BG5NUC-LC458 |
| 3575 | 2P | BG5NUC-LC459 |
| 3576 | 2P | BG5NUC-LC460 |
| 3577 | RBD | BG5NUC-LC461 |
| 3578 | 2P | BG5NUC-LC462 |
| 3579 | 2P | BG5NUC-LC463 |
| 3580 | 2P | BG5NUC-LC464 |
| 3581 | 2P | BG5NUC-LC465 |
| 3582 | RBD | BG5NUC-LC466 |
| 3583 | 2P | BG5NUC-LC467 |
| 3584 | 2P | BG5NUC-LC468 |
| 3585 | 2P | BG5NUC-LC469 |
| 3586 | RBD | BG5NUC-LC470 |
| 3587 | RBD | BG5NUC-LC471 |
| 3588 | 2P | BG5NUC-LC472 |
| 3589 | RBD | BG5NUC-LC473 |
| 3590 | RBD | BG5NUC-LC474 |
| 3591 | RBD | BG5NUC-LC475 |
| 3592 | 2P | BG5NUC-LC476 |
| 3593 | RBD | BG6NUC-HC1 |
| 3594 | 2P | BG6NUC-HC2 |
| 3595 | RBD | BG6NUC-HC3 |
| 3596 | RBD | BG6NUC-HC4 |
| 3597 | RBD | BG6NUC-HC5 |
| 3598 | RBD | BG6NUC-HC6 |
| 3599 | 2P | BG6NUC-HC7 |
| 3600 | 2P | BG6NUC-HC8 |
| 3601 | RBD | BG6NUC-HC9 |
| 3602 | RBD | BG6NUC-HC10 |
| 3603 | RBD | BG6NUC-HC11 |
| 3604 | 2P | BG6NUC-HC12 |
| 3605 | 2P | BG6NUC-HC13 |
| 3606 | 2P | BG6NUC-HC14 |
| 3607 | 2P | BG6NUC-HC15 |
| 3608 | 2P | BG6NUC-HC16 |
| 3609 | 2P | BG6NUC-HC17 |
| 3610 | 2P | BG6NUC-HC18 |
| 3611 | 2P | BG6NUC-HC19 |
| 3612 | 2P | BG6NUC-HC20 |
| 3613 | 2P | BG6NUC-HC21 |
| 3614 | 2P | BG6NUC-HC22 |
| 3615 | 2P | BG6NUC-HC23 |
| 3616 | 2P | BG6NUC-HC24 |
| 3617 | RBD | BG6NUC-HC25 |
| 3618 | 2P | BG6NUC-HC26 |
| 3619 | 2F | BG6NUC-HC27 |
| 3620 | 2P | BG6NUC-HC28 |
| 3621 | 2F | BG6NUC-HC29 |
| 3622 | RBD | BG6NUC-HC30 |
| 3623 | RBD | BG6NUC-HC31 |
| 3624 | RBD | BG6NUC-HC32 |
| 3625 | RBD | BG6NUC-HC33 |
| 3626 | 2P | BG6NUC-HC34 |
| 3627 | RBD | BG6NUC-HC35 |
| 3628 | RBD | BG6NUC-HC36 |
| 3629 | 2P | BG6NUC-HC37 |
| 3630 | 2P | BG6NUC-HC38 |
| 3631 | 2P | BG6NUC-HC39 |
| 3632 | RBD | BG6NUC-HC40 |
| 3633 | 2P | BG6NUC-HC41 |
| 3634 | RBD | BG6NUC-HC42 |
| 3635 | 2P | BG6NUC-HC43 |
| 3636 | 2P | BG6NUC-HC44 |
| 3637 | RBD | BG6NUC-HC45 |
| 3638 | RBD | BG6NUC-HC46 |
| 3639 | 2P | BG6NUC-HC47 |
| 3640 | 2F | BG6NUC-HC48 |
| 3641 | RBD | BG6NUC-HC49 |
| 3642 | RBD | BG6NUC-HC50 |
| 3643 | 2P | BG6NUC-HC51 |
| 3644 | 2P | BG6NUC-HC52 |
| 3645 | RBD | BG6NUC-HC53 |
| 3646 | 2P | BG6NUC-HC54 |
| 3647 | RBD | BG6NUC-HC55 |
| 3648 | 2P | BG6NUC-HC56 |
| 3649 | 2P | BG6NUC-HC57 |
| 3650 | 2P | BG6NUC-HC58 |
| 3651 | 2P | BG6NUC-HC59 |
| 3652 | 2P | BG6NUC-HC60 |
| 3653 | RBD | BG6NUC-HC61 |
| 3654 | 2P | BG6NUC-HC62 |
| 3655 | RBD | BG6NUC-HC63 |
| 3656 | 2P | BG6NUC-HC64 |
| 3657 | 2P | BG6NUC-HC65 |
| 3658 | RBD | BG6NUC-HC66 |
| 3659 | 2P | BG6NUC-HC67 |
| 3660 | 2P | BG6NUC-HC68 |
| 3661 | RBD | BG6NUC-HC69 |
| 3662 | 2P | BG6NUC-HC70 |
| 3663 | 2F | BG6NUC-HC71 |
| 3664 | 2P | BG6NUC-HC72 |
| 3665 | RBD | BG6NUC-HC73 |
| 3666 | RBD | BG6NUC-HC74 |
| 3667 | RBD | BG6NUC-HC75 |
| 3668 | RBD | BG6NUC-HC76 |
| 3669 | RBD | BG6NUC-HC77 |
| 3670 | RBD | BG6NUC-HC78 |
| 3671 | 2P | BG6NUC-HC79 |
| 3672 | 2P | BG6NUC-HC80 |
| 3673 | 2P | BG6NUC-HC81 |
| 3674 | 2P | BG6NUC-HC82 |
| 3675 | 2P | BG6NUC-HC83 |
| 3676 | RBD | BG6NUC-HC84 |
| 3677 | 2P | BG6NUC-HC85 |
| 3678 | RBD | BG6NUC-HC86 |
| 3679 | 2P | BG6NUC-HC87 |
| 3680 | 2P | BG6NUC-HC88 |
| 3681 | RBD | BG6NUC-HC89 |
| 3682 | 2P | BG6NUC-HC90 |
| 3683 | 2P | BG6NUC-HC91 |
| 3684 | RBD | BG6NUC-HC92 |
| 3685 | RBD | BG6NUC-HC93 |
| 3686 | 2P | BG6NUC-HC94 |
| 3687 | 2P | BG6NUC-HC95 |
| 3688 | 2P | BG6NUC-HC96 |
| 3689 | 2P | BG6NUC-HC97 |
| 3690 | RBD | BG6NUC-HC98 |
| 3691 | 2P | BG6NUC-HC99 |
| 3692 | RBD | BG6NUC-HC100 |
| 3693 | 2P | BG6NUC-HC101 |
| 3694 | 2P | BG6NUC-HC102 |
| 3695 | 2P | BG6NUC-HC103 |
| 3696 | 2P | BG6NUC-HC104 |
| 3697 | 2P | BG6NUC-HC105 |
| 3698 | RBD | BG6NUC-HC106 |
| 3699 | RBD | BG6NUC-HC107 |
| 3700 | RBD | BG6NUC-HC108 |
| 3701 | RBD | BG6NUC-HC109 |
| 3702 | 2P | BG6NUC-HC110 |
| 3703 | 2P | BG6NUC-HC111 |
| 3704 | RBD | BG6NUC-HC112 |
| 3705 | 2P | BG6NUC-HC113 |
| 3706 | RBD | BG6NUC-HC114 |
| 3707 | RBD | BG6NUC-HC115 |
| 3708 | RBD | BG6NUC-HC116 |
| 3709 | RBD | BG6NUC-HC117 |
| 3710 | 2P | BG6NUC-HC118 |
| 3711 | RBD | BG6NUC-HC119 |
| 3712 | 2P | BG6NUC-HC120 |
| 3713 | 2P | BG6NUC-HC121 |
| 3714 | 2P | BG6NUC-HC122 |
| 3715 | 2P | BG6NUC-HC123 |
| 3716 | RBD | BG6NUC-HC124 |
| 3717 | RBD | BG6NUC-HC125 |
| 3718 | 2P | BG6NUC-HC126 |
| 3719 | RBD | BG6NUC-HC127 |
| 3720 | 2P | BG6NUC-HC128 |
| 3721 | 2P | BG6NUC-HC129 |
| 3722 | 2P | BG6NUC-HC130 |
| 3723 | 2P | BG6NUC-HC131 |
| 3724 | RBD | BG6NUC-HC132 |
| 3725 | 2P | BG6NUC-HC133 |
| 3726 | 2P | BG6NUC-HC134 |
| 3727 | RBD | BG6NUC-HC135 |
| 3728 | RBD | BG6NUC-HC136 |
| 3729 | RBD | BG6NUC-HC137 |
| 3730 | 2P | BG6NUC-HC138 |
| 3731 | 2P | BG6NUC-HC139 |
| 3732 | 2P | BG6NUC-HC140 |
| 3733 | 2P | BG6NUC-HC141 |
| 3734 | RBD | BG6NUC-HC142 |
| 3735 | 2P | BG6NUC-HC143 |
| 3736 | 2P | BG6NUC-HC144 |
| 3737 | 2P | BG6NUC-HC145 |
| 3738 | RBD | BG6NUC-HC146 |
| 3739 | RBD | BG6NUC-HC147 |
| 3740 | 2P | BG6NUC-HC148 |
| 3741 | 2P | BG6NUC-HC149 |
| 3742 | RBD | BG6NUC-HC150 |
| 3743 | RBD | BG6NUC-HC151 |
| 3744 | 2P | BG6NUC-HC152 |
| 3745 | 2P | BG6NUC-HC153 |
| 3746 | RBD | BG6NUC-HC154 |
| 3747 | RBD | BG6NUC-HC155 |
| 3748 | RBD | BG6NUC-HC156 |
| 3749 | 2P | BG6NUC-HC157 |
| 3750 | RBD | BG6NUC-HC158 |
| 3751 | 2P | BG6NUC-HC159 |
| 3752 | 2P | BG6NUC-HC160 |
| 3753 | 2P | BG6NUC-HC161 |
| 3754 | 2P | BG6NUC-HC162 |
| 3755 | 2P | BG6NUC-HC163 |
| 3756 | RBD | BG6NUC-HC164 |
| 3757 | 2P | BG6NUC-HC165 |
| 3758 | RBD | BG6NUC-HC166 |
| 3759 | RBD | BG6NUC-HC167 |
| 3760 | 2P | BG6NUC-HC168 |
| 3761 | RBD | BG6NUC-HC169 |
| 3762 | 2P | BG6NUC-HC170 |
| 3763 | 2P | BG6NUC-HC171 |
| 3764 | 2P | BG6NUC-HC172 |
| 3765 | 2P | BG6NUC-HC173 |
| 3766 | RBD | BG6NUC-HC174 |
| 3767 | 2P | BG6NUC-HC175 |
| 3768 | RBD | BG6NUC-HC176 |
| 3769 | RBD | BG6NUC-HC177 |
| 3770 | 2P | BG6NUC-HC178 |
| 3771 | 2P | BG6NUC-HC179 |
| 3772 | 2P | BG6NUC-HC180 |
| 3773 | RBD | BG6NUC-HC181 |
| 3774 | RBD | BG6NUC-HC182 |
| 3775 | 2P | BG6NUC-HC183 |
| 3776 | 2F | BG6NUC-HC184 |
| 3777 | 2P | BG6NUC-HC185 |
| 3778 | 2P | BG6NUC-HC186 |
| 3779 | RBD | BG6NUC-HC187 |
| 3780 | 2P | BG6NUC-HC188 |
| 3781 | RBD | BG6NUC-HC189 |
| 3782 | 2P | BG6NUC-HC190 |
| 3783 | RBD | BG6NUC-HC191 |
| 3784 | RBD | BG6NUC-HC192 |
| 3785 | 2P | BG6NUC-HC193 |
| 3786 | RBD | BG6NUC-HC194 |
| 3787 | 2P | BG6NUC-HC195 |
| 3788 | 2P | BG6NUC-HC196 |
| 3789 | 2P | BG6NUC-HC197 |
| 3790 | 2P | BG6NUC-HC198 |
| 3791 | 2F | BG6NUC-HC199 |
| 3792 | 2P | BG6NUC-HC200 |
| 3793 | RBD | BG6NUC-HC201 |
| 3794 | RBD | BG6NUC-HC202 |
| 3795 | 2P | BG6NUC-HC203 |
| 3796 | RBD | BG6NUC-HC204 |
| 3797 | RBD | BG6NUC-HC205 |
| 3798 | 2P | BG6NUC-HC206 |
| 3799 | 2P | BG6NUC-HC207 |
| 3800 | 2P | BG6NUC-HC208 |
| 3801 | RBD | BG6NUC-HC209 |
| 3802 | 2P | BG6NUC-HC210 |
| 3803 | RBD | BG6NUC-HC211 |
| 3804 | 2P | BG6NUC-HC212 |
| 3805 | 2P | BG6NUC-HC213 |
| 3806 | 2P | BG6NUC-HC214 |
| 3807 | 2P | BG6NUC-HC215 |
| 3808 | 2P | BG6NUC-HC216 |
| 3809 | 2P | BG6NUC-HC217 |
| 3810 | 2P | BG6NUC-HC218 |
| 3811 | RBD | BG6NUC-HC219 |
| 3812 | RBD | BG6NUC-HC220 |
| 3813 | 2P | BG6NUC-HC221 |
| 3814 | 2P | BG6NUC-HC222 |
| 3815 | RBD | BG6NUC-HC223 |
| 3816 | RBD | BG6NUC-HC224 |
| 3817 | RBD | BG6NUC-HC225 |
| 3818 | 2P | BG6NUC-HC226 |
| 3819 | 2P | BG6NUC-HC227 |
| 3820 | RBD | BG6NUC-HC228 |
| 3821 | RBD | BG6NUC-HC229 |
| 3822 | RBD | BG6NUC-HC230 |
| 3823 | RBD | BG6NUC-HC231 |
| 3824 | 2P | BG6NUC-HC232 |
| 3825 | RBD | BG6NUC-HC233 |
| 3826 | 2P | BG6NUC-HC234 |
| 3827 | RBD | BG6NUC-HC235 |
| 3828 | RBD | BG6NUC-HC236 |
| 3829 | RBD | BG6NUC-HC237 |
| 3830 | 2P | BG6NUC-HC238 |
| 3831 | 2P | BG6NUC-HC239 |
| 3832 | RBD | BG6NUC-HC240 |
| 3833 | 2P | BG6NUC-HC241 |
| 3834 | 2P | BG6NUC-HC242 |
| 3835 | RBD | BG6NUC-HC243 |
| 3836 | 2P | BG6NUC-HC244 |
| 3837 | 2P | BG6NUC-HC245 |
| 3838 | 2P | BG6NUC-HC246 |
| 3839 | RBD | BG6NUC-LC1 |
| 3840 | 2P | BG6NUC-LC2 |
| 3841 | RBD | BG6NUC-LC3 |
| 3842 | RBD | BG6NUC-LC4 |
| 3843 | RBD | BG6NUC-LC5 |
| 3844 | RBD | BG6NUC-LC6 |
| 3845 | 2P | BG6NUC-LC7 |
| 3846 | 2P | BG6NUC-LC8 |
| 3847 | RBD | BG6NUC-LC9 |
| 3848 | RBD | BG6NUC-LC10 |
| 3849 | RBD | BG6NUC-LC11 |
| 3850 | 2P | BG6NUC-LC12 |
| 3851 | 2P | BG6NUC-LC13 |
| 3852 | 2P | BG6NUC-LC14 |
| 3853 | 2P | BG6NUC-LC15 |
| 3854 | 2P | BG6NUC-LC16 |
| 3855 | 2P | BG6NUC-LC17 |
| 3856 | 2P | BG6NUC-LC18 |
| 3857 | 2P | BG6NUC-LC19 |
| 3858 | 2P | BG6NUC-LC20 |
| 3859 | 2P | BG6NUC-LC21 |
| 3860 | 2P | BG6NUC-LC22 |
| 3861 | 2P | BG6NUC-LC23 |
| 3862 | 2P | BG6NUC-LC24 |
| 3863 | RBD | BG6NUC-LC25 |
| 3864 | 2P | BG6NUC-LC26 |
| 3865 | 2P | BG6NUC-LC27 |
| 3866 | 2P | BG6NUC-LC28 |
| 3867 | 2P | BG6NUC-LC29 |
| 3868 | RBD | BG6NUC-LC30 |
| 3869 | RBD | BG6NUC-LC31 |
| 3870 | RBD | BG6NUC-LC32 |
| 3871 | RBD | BG6NUC-LC33 |
| 3872 | 2P | BG6NUC-LC34 |
| 3873 | RBD | BG6NUC-LC35 |
| 3874 | RBD | BG6NUC-LC36 |
| 3875 | 2P | BG6NUC-LC37 |
| 3876 | 2P | BG6NUC-LC38 |
| 3877 | 2P | BG6NUC-LC39 |
| 3878 | RBD | BG6NUC-LC40 |
| 3879 | 2P | BG6NUC-LC41 |
| 3880 | RBD | BG6NUC-LC42 |
| 3881 | 2P | BG6NUC-LC43 |
| 3882 | 2P | BG6NUC-LC44 |
| 3883 | RBD | BG6NUC-LC45 |
| 3884 | RBD | BG6NUC-LC46 |
| 3885 | 2P | BG6NUC-LC47 |
| 3886 | 2P | BG6NUC-LC48 |
| 3887 | RBD | BG6NUC-LC49 |
| 3888 | RBD | BG6NUC-LC50 |
| 3889 | 2P | BG6NUC-LC51 |
| 3890 | 2P | BG6NUC-LC52 |
| 3891 | RBD | BG6NUC-LC53 |
| 3892 | 2P | BG6NUC-LC54 |
| 3893 | RBD | BG6NUC-LC55 |
| 3894 | 2F | BG6NUC-LC56 |
| 3895 | 2F | BG6NUC-LC57 |
| 3896 | 2P | BG6NUC-LC58 |
| 3897 | 2P | BG6NUC-LC59 |
| 3898 | 2P | BG6NUC-LC60 |
| 3899 | RBD | BG6NUC-LC61 |
| 3900 | 2F | BG6NUC-LC62 |
| 3901 | RBD | BG6NUC-LC63 |
| 3902 | 2P | BG6NUC-LC64 |
| 3903 | 2P | BG6NUC-LC65 |
| 3904 | RBD | BG6NUC-LC66 |
| 3905 | 2P | BG6NUC-LC67 |
| 3906 | 2P | BG6NUC-LC68 |
| 3907 | RBD | BG6NUC-LC69 |
| 3908 | 2P | BG6NUC-LC70 |
| 3909 | 2P | BG6NUC-LC71 |
| 3910 | 2P | BG6NUC-LC72 |
| 3911 | RBD | BG6NUC-LC73 |
| 3912 | RBD | BG6NUC-LC74 |
| 3913 | RBD | BG6NUC-LC75 |
| 3914 | RBD | BG6NUC-LC76 |
| 3915 | RBD | BG6NUC-LC77 |
| 3916 | RBD | BG6NUC-LC78 |
| 3917 | 2P | BG6NUC-LC79 |
| 3918 | 2P | BG6NUC-LC80 |
| 3919 | 2P | BG6NUC-LC81 |
| 3920 | 2P | BG6NUC-LC82 |
| 3921 | 2P | BG6NUC-LC83 |
| 3922 | RBD | BG6NUC-LC84 |
| 3923 | 2P | BG6NUC-LC85 |
| 3924 | RBD | BG6NUC-LC86 |
| 3925 | 2P | BG6NUC-LC87 |
| 3926 | 2P | BG6NUC-LC88 |
| 3927 | RBD | BG6NUC-LC89 |
| 3928 | 2P | BG6NUC-LC90 |
| 3929 | 2P | BG6NUC-LC91 |
| 3930 | RBD | BG6NUC-LC92 |
| 3931 | RBD | BG6NUC-LC93 |
| 3932 | 2P | BG6NUC-LC94 |
| 3933 | 2P | BG6NUC-LC95 |
| 3934 | 2P | BG6NUC-LC96 |
| 3935 | 2P | BG6NUC-LC97 |
| 3936 | RBD | BG6NUC-LC98 |
| 3937 | 2P | BG6NUC-LC99 |
| 3938 | RBD | BG6NUC-LC100 |
| 3939 | 2P | BG6NUC-LC101 |
| 3940 | 2P | BG6NUC-LC102 |
| 3941 | 2P | BG6NUC-LC103 |
| 3942 | 2P | BG6NUC-LC104 |
| 3943 | 2P | BG6NUC-LC105 |
| 3944 | RBD | BG6NUC-LC106 |
| 3945 | RBD | BG6NUC-LC107 |
| 3946 | RBD | BG6NUC-LC108 |
| 3947 | RBD | BG6NUC-LC109 |
| 3948 | 2P | BG6NUC-LC110 |
| 3949 | 2P | BG6NUC-LC111 |
| 3950 | RBD | BG6NUC-LC112 |
| 3951 | 2F | BG6NUC-LC113 |
| 3952 | RBD | BG6NUC-LC114 |
| 3953 | RBD | BG6NUC-LC115 |
| 3954 | RBD | BG6NUC-LC116 |
| 3955 | RBD | BG6NUC-LC117 |
| 3956 | 2P | BG6NUC-LC118 |
| 3957 | RBD | BG6NUC-LC119 |
| 3958 | 2P | BG6NUC-LC120 |
| 3959 | 2P | BG6NUC-LC121 |
| 3960 | 2P | BG6NUC-LC122 |
| 3961 | 2P | BG6NUC-LC123 |
| 3962 | RBD | BG6NUC-LC124 |
| 3963 | RBD | BG6NUC-LC125 |
| 3964 | 2P | BG6NUC-LC126 |
| 3965 | RBD | BG6NUC-LC127 |
| 3966 | 2P | BG6NUC-LC128 |
| 3967 | 2P | BG6NUC-LC129 |
| 3968 | 2P | BG6NUC-LC130 |
| 3969 | 2P | BG6NUC-LC131 |
| 3970 | RBD | BG6NUC-LC132 |
| 3971 | 2P | BG6NUC-LC133 |
| 3972 | 2P | BG6NUC-LC134 |
| 3973 | RBD | BG6NUC-LC135 |
| 3974 | RBD | BG6NUC-LC136 |
| 3975 | RBD | BG6NUC-LC137 |
| 3976 | 2P | BG6NUC-LC138 |
| 3977 | 2P | BG6NUC-LC139 |
| 3978 | 2P | BG6NUC-LC140 |
| 3979 | 2P | BG6NUC-LC141 |
| 3980 | RBD | BG6NUC-LC142 |
| 3981 | 2P | BG6NUC-LC143 |
| 3982 | 2P | BG6NUC-LC144 |
| 3983 | 2P | BG6NUC-LC145 |
| 3984 | RBD | BG6NUC-LC146 |
| 3985 | RBD | BG6NUC-LC147 |
| 3986 | 2P | BG6NUC-LC148 |
| 3987 | 2P | BG6NUC-LC149 |
| 3988 | RBD | BG6NUC-LC150 |
| 3989 | RBD | BG6NUC-LC151 |
| 3990 | 2P | BG6NUC-LC152 |
| 3991 | 2P | BG6NUC-LC153 |
| 3992 | RBD | BG6NUC-LC154 |
| 3993 | RBD | BG6NUC-LC155 |
| 3994 | RBD | BG6NUC-LC156 |
| 3995 | 2P | BG6NUC-LC157 |
| 3996 | RBD | BG6NUC-LC158 |
| 3997 | 2P | BG6NUC-LC159 |
| 3998 | 2P | BG6NUC-LC160 |
| 3999 | 2P | BG6NUC-LC161 |
| 4000 | 2P | BG6NUC-LC162 |
| 4001 | 2P | BG6NUC-LC163 |
| 4002 | RBD | BG6NUC-LC164 |
| 4003 | 2P | BG6NUC-LC165 |
| 4004 | RBD | BG6NUC-LC166 |
| 4005 | RBD | BG6NUC-LC167 |
| 4006 | 2P | BG6NUC-LC168 |
| 4007 | RBD | BG6NUC-LC169 |
| 4008 | 2P | BG6NUC-LC170 |
| 4009 | 2P | BG6NUC-LC171 |
| 4010 | 2P | BG6NUC-LC172 |
| 4011 | 2P | BG6NUC-LC173 |
| 4012 | RBD | BG6NUC-LC174 |
| 4013 | 2P | BG6NUC-LC175 |
| 4014 | RBD | BG6NUC-LC176 |
| 4015 | RBD | BG6NUC-LC177 |
| 4016 | 2P | BG6NUC-LC178 |
| 4017 | 2P | BG6NUC-LC179 |
| 4018 | 2P | BG6NUC-LC180 |
| 4019 | RBD | BG6NUC-LC181 |
| 4020 | RBD | BG6NUC-LC182 |
| 4021 | 2P | BG6NUC-LC183 |
| 4022 | 2P | BG6NUC-LC184 |
| 4023 | 2P | BG6NUC-LC185 |
| 4024 | 2P | BG6NUC-LC186 |
| 4025 | RBD | BG6NUC-LC187 |
| 4026 | 2F | BG6NUC-LC188 |
| 4027 | RBD | BG6NUC-LC189 |
| 4028 | 2P | BG6NUC-LC190 |
| 4029 | RBD | BG6NUC-LC191 |
| 4030 | RBD | BG6NUC-LC192 |
| 4031 | 2P | BG6NUC-LC193 |
| 4032 | RBD | BG6NUC-LC194 |
| 4033 | 2P | BG6NUC-LC195 |
| 4034 | 2P | BG6NUC-LC196 |
| 4035 | 2P | BG6NUC-LC197 |
| 4036 | 2P | BG6NUC-LC198 |
| 4037 | 2P | BG6NUC-LC199 |
| 4038 | 2P | BG6NUC-LC200 |
| 4039 | RBD | BG6NUC-LC201 |
| 4040 | RBD | BG6NUC-LC202 |
| 4041 | 2P | BG6NUC-LC203 |
| 4042 | RBD | BG6NUC-LC204 |
| 4043 | RBD | BG6NUC-LC205 |
| 4044 | 2P | BG6NUC-LC206 |
| 4045 | 2P | BG6NUC-LC207 |
| 4046 | 2P | BG6NUC-LC208 |
| 4047 | RBD | BG6NUC-LC209 |
| 4048 | 2P | BG6NUC-LC210 |
| 4049 | RBD | BG6NUC-LC211 |
| 4050 | 2P | BG6NUC-LC212 |
| 4051 | 2P | BG6NUC-LC213 |
| 4052 | 2P | BG6NUC-LC214 |
| 4053 | 2P | BG6NUC-LC215 |
| 4054 | 2P | BG6NUC-LC216 |
| 4055 | 2P | BG6NUC-LC217 |
| 4056 | 2P | BG6NUC-LC218 |
| 4057 | RBD | BG6NUC-LC219 |
| 4058 | RBD | BG6NUC-LC220 |
| 4059 | 2P | BG6NUC-LC221 |
| 4060 | 2P | BG6NUC-LC222 |
| 4061 | RBD | BG6NUC-LC223 |
| 4062 | RBD | BG6NUC-LC224 |
| 4063 | RBD | BG6NUC-LC225 |
| 4064 | 2P | BG6NUC-LC226 |
| 4065 | 2P | BG6NUC-LC227 |
| 4066 | RBD | BG6NUC-LC228 |
| 4067 | RBD | BG6NUC-LC229 |
| 4068 | RBD | BG6NUC-LC230 |
| 4069 | RBD | BG6NUC-LC231 |
| 4070 | 2P | BG6NUC-LC232 |
| 4071 | RBD | BG6NUC-LC233 |
| 4072 | 2P | BG6NUC-LC234 |
| 4073 | RBD | BG6NUC-LC235 |
| 4074 | RBD | BG6NUC-LC236 |
| 4075 | RBD | BG6NUC-LC237 |
| 4076 | 2P | BG6NUC-LC238 |
| 4077 | 2P | BG6NUC-LC239 |
| 4078 | RBD | BG6NUC-LC240 |
| 4079 | 2P | BG6NUC-LC241 |
| 4080 | 2P | BG6NUC-LC242 |
| 4081 | RBD | BG6NUC-LC243 |
| 4082 | 2P | BG6NUC-LC244 |
| 4083 | 2P | BG6NUC-LC245 |
| 4084 | 2P | BG6NUC-LC246 |
| 4085 | 2P | BG7NUC-HC1 |
| 4086 | 2P | BG7NUC-HC2 |
| 4087 | 2P | BG7NUC-HC3 |
| 4088 | 2P | BG7NUC-HC4 |
| 4089 | 2P | BG7NUC-HC5 |
| 4090 | 2P | BG7NUC-HC6 |
| 4091 | 2P | BG7NUC-HC7 |
| 4092 | 2P | BG7NUC-HC8 |
| 4093 | 2P | BG7NUC-HC9 |
| 4094 | 2P | BG7NUC-HC10 |
| 4095 | 2P | BG7NUC-HC11 |
| 4096 | 2P | BG7NUC-HC12 |
| 4097 | 2P | BG7NUC-HC13 |
| 4098 | 2P | BG7NUC-HC14 |
| 4099 | 2P | BG7NUC-HC15 |
| 4100 | 2P | BG7NUC-HC16 |
| 4101 | 2P | BG7NUC-HC17 |
| 4102 | 2P | BG7NUC-HC18 |
| 4103 | 2P | BG7NUC-HC19 |
| 4104 | 2P | BG7NUC-HC20 |
| 4105 | 2P | BG7NUC-HC21 |
| 4106 | 2P | BG7NUC-HC22 |
| 4107 | 2P | BG7NUC-HC23 |
| 4108 | 2P | BG7NUC-HC24 |
| 4109 | 2P | BG7NUC-HC25 |
| 4110 | 2P | BG7NUC-HC26 |
| 4111 | 2P | BG7NUC-HC27 |
| 4112 | 2P | BG7NUC-HC28 |
| 4113 | 2P | BG7NUC-HC29 |
| 4114 | 2P | BG7NUC-HC30 |
| 4115 | 2P | BG7NUC-HC31 |
| 4116 | 2P | BG7NUC-HC32 |
| 4117 | RBD | BG7NUC-HC33 |
| 4118 | RBD | BG7NUC-HC34 |
| 4119 | RBD | BG7NUC-HC35 |
| 4120 | RBD | BG7NUC-HC36 |
| 4121 | 2P | BG7NUC-HC37 |
| 4122 | 2P | BG7NUC-HC38 |
| 4123 | 2P | BG7NUC-HC39 |
| 4124 | 2P | BG7NUC-HC40 |
| 4125 | 2P | BG7NUC-HC41 |
| 4126 | 2P | BG7NUC-HC42 |
| 4127 | 2P | BG7NUC-HC43 |
| 4128 | 2P | BG7NUC-HC44 |
| 4129 | 2P | BG7NUC-HC45 |
| 4130 | 2P | BG7NUC-HC46 |
| 4131 | 2P | BG7NUC-HC47 |
| 4132 | 2P | BG7NUC-HC48 |
| 4133 | 2P | BG7NUC-HC49 |
| 4134 | 2P | BG7NUC-HC50 |
| 4135 | 2P | BG7NUC-HC51 |
| 4136 | 2P | BG7NUC-HC52 |
| 4137 | 2P | BG7NUC-HC53 |
| 4138 | 2P | BG7NUC-HC54 |
| 4139 | 2P | BG7NUC-HC55 |
| 4140 | 2P | BG7NUC-HC56 |
| 4141 | 2P | BG7NUC-HC57 |
| 4142 | 2P | BG7NUC-HC58 |
| 4143 | 2P | BG7NUC-HC59 |
| 4144 | 2P | BG7NUC-HC60 |
| 4145 | RBD | BG7NUC-HC61 |
| 4146 | 2P | BG7NUC-HC62 |
| 4147 | 2P | BG7NUC-HC63 |
| 4148 | RBD | BG7NUC-HC64 |
| 4149 | RBD | BG7NUC-HC65 |
| 4150 | RBD | BG7NUC-HC66 |
| 4151 | RBD | BG7NUC-HC67 |
| 4152 | RBD | BG7NUC-HC68 |
| 4153 | 2P | BG7NUC-HC69 |
| 4154 | 2P | BG7NUC-HC70 |
| 4155 | 2P | BG7NUC-HC71 |
| 4156 | 2P | BG7NUC-HC72 |
| 4157 | 2P | BG7NUC-HC73 |
| 4158 | 2P | BG7NUC-HC74 |
| 4159 | 2P | BG7NUC-HC75 |
| 4160 | 2P | BG7NUC-HC76 |
| 4161 | 2P | BG7NUC-HC77 |
| 4162 | 2P | BG7NUC-HC78 |
| 4163 | 2P | BG7NUC-HC79 |
| 4164 | 2P | BG7NUC-HC80 |
| 4165 | 2P | BG7NUC-HC81 |
| 4166 | 2P | BG7NUC-HC82 |
| 4167 | 2P | BG7NUC-HC83 |
| 4168 | 2P | BG7NUC-HC84 |
| 4169 | 2P | BG7NUC-HC85 |
| 4170 | 2P | BG7NUC-HC86 |
| 4171 | 2P | BG7NUC-HC87 |
| 4172 | 2P | BG7NUC-HC88 |
| 4173 | 2P | BG7NUC-HC89 |
| 4174 | 2P | BG7NUC-HC90 |
| 4175 | 2P | BG7NUC-HC91 |
| 4176 | 2P | BG7NUC-HC92 |
| 4177 | 2P | BG7NUC-HC93 |
| 4178 | 2P | BG7NUC-HC94 |
| 4179 | 2P | BG7NUC-HC95 |
| 4180 | 2P | BG7NUC-HC96 |
| 4181 | 2P | BG7NUC-HC97 |
| 4182 | 2P | BG7NUC-HC98 |
| 4183 | 2P | BG7NUC-HC99 |
| 4184 | 2P | BG7NUC-HC100 |
| 4185 | 2P | BG7NUC-HC101 |
| 4186 | 2P | BG7NUC-HC102 |
| 4187 | 2P | BG7NUC-HC103 |
| 4188 | 2P | BG7NUC-HC104 |
| 4189 | 2P | BG7NUC-HC105 |
| 4190 | 2P | BG7NUC-HC106 |
| 4191 | 2P | BG7NUC-HC107 |
| 4192 | 2P | BG7NUC-HC108 |
| 4193 | 2P | BG7NUC-HC109 |
| 4194 | 2P | BG7NUC-HC110 |
| 4195 | 2P | BG7NUC-HC111 |
| 4196 | 2F | BG7NUC-HC112 |
| 4197 | 2P | BG7NUC-HC113 |
| 4198 | 2P | BG7NUC-HC114 |
| 4199 | 2P | BG7NUC-HC115 |
| 4200 | 2P | BG7NUC-HC116 |
| 4201 | 2P | BG7NUC-HC117 |
| 4202 | 2P | BG7NUC-HC118 |
| 4203 | 2P | BG7NUC-HC119 |
| 4204 | 2P | BG7NUC-HC120 |
| 4205 | 2P | BG7NUC-HC121 |
| 4206 | 2P | BG7NUC-HC122 |
| 4207 | 2P | BG7NUC-HC123 |
| 4208 | 2P | BG7NUC-HC124 |
| 4209 | 2P | BG7NUC-HC125 |
| 4210 | 2P | BG7NUC-HC126 |
| 4211 | 2P | BG7NUC-HC127 |
| 4212 | 2P | BG7NUC-HC128 |
| 4213 | 2P | BG7NUC-HC129 |
| 4214 | 2P | BG7NUC-HC130 |
| 4215 | 2P | BG7NUC-HC131 |
| 4216 | 2P | BG7NUC-HC132 |
| 4217 | 2P | BG7NUC-HC133 |
| 4218 | 2P | BG7NUC-HC134 |
| 4219 | 2P | BG7NUC-HC135 |
| 4220 | 2P | BG7NUC-HC136 |
| 4221 | 2P | BG7NUC-HC137 |
| 4222 | 2P | BG7NUC-HC138 |
| 4223 | 2P | BG7NUC-HC139 |
| 4224 | 2P | BG7NUC-HC140 |
| 4225 | 2P | BG7NUC-HC141 |
| 4226 | 2P | BG7NUC-HC142 |
| 4227 | 2P | BG7NUC-HC143 |
| 4228 | 2P | BG7NUC-HC144 |
| 4229 | 2P | BG7NUC-HC145 |
| 4230 | 2P | BG7NUC-HC146 |
| 4231 | 2P | BG7NUC-HC147 |
| 4232 | 2P | BG7NUC-HC148 |
| 4233 | 2P | BG7NUC-HC149 |
| 4234 | 2P | BG7NUC-HC150 |
| 4235 | 2P | BG7NUC-HC151 |
| 4236 | 2P | BG7NUC-HC152 |
| 4237 | 2P | BG7NUC-HC153 |
| 4238 | 2P | BG7NUC-HC154 |
| 4239 | 2P | BG7NUC-HC155 |
| 4240 | 2P | BG7NUC-HC156 |
| 4241 | 2P | BG7NUC-HC157 |
| 4242 | 2P | BG7NUC-HC158 |
| 4243 | 2P | BG7NUC-HC159 |
| 4244 | 2P | BG7NUC-HC160 |
| 4245 | 2P | BG7NUC-HC161 |
| 4246 | 2P | BG7NUC-HC162 |
| 4247 | 2P | BG7NUC-HC163 |
| 4248 | 2P | BG7NUC-HC164 |
| 4249 | 2P | BG7NUC-HC165 |
| 4250 | 2P | BG7NUC-HC166 |
| 4251 | 2P | BG7NUC-HC167 |
| 4252 | 2P | BG7NUC-HC168 |
| 4253 | 2P | BG7NUC-HC169 |
| 4254 | 2P | BG7NUC-HC170 |
| 4255 | 2P | BG7NUC-HC171 |
| 4256 | 2P | BG7NUC-HC172 |
| 4257 | 2P | BG7NUC-HC173 |
| 4258 | 2P | BG7NUC-HC174 |
| 4259 | 2P | BG7NUC-HC175 |
| 4260 | 2F | BG7NUC-HC176 |
| 4261 | 2P | BG7NUC-HC177 |
| 4262 | 2P | BG7NUC-HC178 |
| 4263 | 2P | BG7NUC-HC179 |
| 4264 | 2P | BG7NUC-HC180 |
| 4265 | 2P | BG7NUC-HC181 |
| 4266 | 2P | BG7NUC-HC182 |
| 4267 | 2P | BG7NUC-HC183 |
| 4268 | 2P | BG7NUC-HC184 |
| 4269 | 2P | BG7NUC-HC185 |
| 4270 | 2P | BG7NUC-HC186 |
| 4271 | 2F | BG7NUC-HC187 |
| 4272 | 2P | BG7NUC-HC188 |
| 4273 | 2P | BG7NUC-HC189 |
| 4274 | 2P | BG7NUC-HC190 |
| 4275 | 2P | BG7NUC-HC191 |
| 4276 | 2P | BG7NUC-HC192 |
| 4277 | 2P | BG7NUC-HC193 |
| 4278 | 2P | BG7NUC-HC194 |
| 4279 | 2P | BG7NUC-HC195 |
| 4280 | 2P | BG7NUC-HC196 |
| 4281 | 2P | BG7NUC-HC197 |
| 4282 | 2P | BG7NUC-HC198 |
| 4283 | 2P | BG7NUC-HC199 |
| 4284 | 2P | BG7NUC-HC200 |
| 4285 | 2P | BG7NUC-HC201 |
| 4286 | 2P | BG7NUC-HC202 |
| 4287 | 2P | BG7NUC-HC203 |
| 4288 | 2F | BG7NUC-HC204 |
| 4289 | 2P | BG7NUC-HC205 |
| 4290 | 2P | BG7NUC-HC206 |
| 4291 | 2P | BG7NUC-HC207 |
| 4292 | 2P | BG7NUC-HC208 |
| 4293 | 2F | BG7NUC-HC209 |
| 4294 | 2P | BG7NUC-HC210 |
| 4295 | 2P | BG7NUC-HC211 |
| 4296 | 2P | BG7NUC-HC212 |
| 4297 | 2P | BG7NUC-HC213 |
| 4298 | 2P | BG7NUC-HC214 |
| 4299 | 2P | BG7NUC-HC215 |
| 4300 | 2P | BG7NUC-HC216 |
| 4301 | 2P | BG7NUC-HC217 |
| 4302 | 2P | BG7NUC-HC218 |
| 4303 | 2P | BG7NUC-HC219 |
| 4304 | 2P | BG7NUC-HC220 |
| 4305 | 2F | BG7NUC-HC221 |
| 4306 | 2P | BG7NUC-HC222 |
| 4307 | 2P | BG7NUC-HC223 |
| 4308 | 2P | BG7NUC-HC224 |
| 4309 | 2F | BG7NUC-HC225 |
| 4310 | 2P | BG7NUC-HC226 |
| 4311 | 2P | BG7NUC-HC227 |
| 4312 | 2P | BG7NUC-HC228 |
| 4313 | 2P | BG7NUC-HC229 |
| 4314 | 2P | BG7NUC-HC230 |
| 4315 | 2P | BG7NUC-HC231 |
| 4316 | 2P | BG7NUC-HC232 |
| 4317 | 2P | BG7NUC-HC233 |
| 4318 | 2F | BG7NUC-HC234 |
| 4319 | 2P | BG7NUC-HC235 |
| 4320 | 2P | BG7NUC-HC236 |
| 4321 | 2P | BG7NUC-HC237 |
| 4322 | 2P | BG7NUC-HC238 |
| 4323 | 2P | BG7NUC-HC239 |
| 4324 | 2F | BG7NUC-HC240 |
| 4325 | 2P | BG7NUC-HC241 |
| 4326 | 2P | BG7NUC-HC242 |
| 4327 | 2P | BG7NUC-HC243 |
| 4328 | 2P | BG7NUC-HC244 |
| 4329 | 2P | BG7NUC-HC245 |
| 4330 | 2P | BG7NUC-HC246 |
| 4331 | 2P | BG7NUC-HC247 |
| 4332 | 2P | BG7NUC-HC248 |
| 4333 | 2P | BG7NUC-HC249 |
| 4334 | 2P | BG7NUC-HC250 |
| 4335 | 2P | BG7NUC-HC251 |
| 4336 | 2P | BG7NUC-HC252 |
| 4337 | 2P | BG7NUC-HC253 |
| 4338 | RBD | BG7NUC-HC254 |
| 4339 | RBD | BG7NUC-HC255 |
| 4340 | RBD | BG7NUC-HC256 |
| 4341 | RBD | BG7NUC-HC257 |
| 4342 | RBD | BG7NUC-HC258 |
| 4343 | RBD | BG7NUC-HC259 |
| 4344 | RBD | BG7NUC-HC260 |
| 4345 | RBD | BG7NUC-HC261 |
| 4346 | RBD | BG7NUC-HC262 |
| 4347 | RBD | BG7NUC-HC263 |
| 4348 | RBD | BG7NUC-HC264 |
| 4349 | RBD | BG7NUC-HC265 |
| 4350 | RBD | BG7NUC-HC266 |
| 4351 | RBD | BG7NUC-HC267 |
| 4352 | RBD | BG7NUC-HC268 |
| 4353 | RBD | BG7NUC-HC269 |
| 4354 | RBD | BG7NUC-HC270 |
| 4355 | RBD | BG7NUC-HC271 |
| 4356 | RBD | BG7NUC-HC272 |
| 4357 | RBD | BG7NUC-HC273 |
| 4358 | RBD | BG7NUC-HC274 |
| 4359 | RBD | BG7NUC-HC275 |
| 4360 | RBD | BG7NUC-HC276 |
| 4361 | RBD | BG7NUC-HC277 |
| 4362 | RBD | BG7NUC-HC278 |
| 4363 | RBD | BG7NUC-HC279 |
| 4364 | RBD | BG7NUC-HC280 |
| 4365 | RBD | BG7NUC-HC281 |
| 4366 | RBD | BG7NUC-HC282 |
| 4367 | RBD | BG7NUC-HC283 |
| 4368 | RBD | BG7NUC-HC284 |
| 4369 | RBD | BG7NUC-HC285 |
| 4370 | RBD | BG7NUC-HC286 |
| 4371 | RBD | BG7NUC-HC287 |
| 4372 | RBD | BG7NUC-HC288 |
| 4373 | RBD | BG7NUC-HC289 |
| 4374 | RBD | BG7NUC-HC290 |
| 4375 | RBD | BG7NUC-HC291 |
| 4376 | RBD | BG7NUC-HC292 |
| 4377 | RBD | BG7NUC-HC293 |
| 4378 | RBD | BG7NUC-HC294 |
| 4379 | RBD | BG7NUC-HC295 |
| 4380 | RBD | BG7NUC-HC296 |
| 4381 | RBD | BG7NUC-HC297 |
| 4382 | RBD | BG7NUC-HC298 |
| 4383 | RBD | BG7NUC-HC299 |
| 4384 | RBD | BG7NUC-HC300 |
| 4385 | RBD | BG7NUC-HC301 |
| 4386 | RBD | BG7NUC-HC302 |
| 4387 | RBD | BG7NUC-HC303 |
| 4388 | RBD | BG7NUC-HC304 |
| 4389 | RBD | BG7NUC-HC305 |
| 4390 | RBD | BG7NUC-HC306 |
| 4391 | RBD | BG7NUC-HC307 |
| 4392 | RBD | BG7NUC-HC308 |
| 4393 | RBD | BG7NUC-HC309 |
| 4394 | RBD | BG7NUC-HC310 |
| 4395 | RBD | BG7NUC-HC311 |
| 4396 | RBD | BG7NUC-HC312 |
| 4397 | RBD | BG7NUC-HC313 |
| 4398 | RBD | BG7NUC-HC314 |
| 4399 | RBD | BG7NUC-HC315 |
| 4400 | RBD | BG7NUC-HC316 |
| 4401 | RBD | BG7NUC-HC317 |
| 4402 | RBD | BG7NUC-HC318 |
| 4403 | RBD | BG7NUC-HC319 |
| 4404 | RBD | BG7NUC-HC320 |
| 4405 | RBD | BG7NUC-HC321 |
| 4406 | RBD | BG7NUC-HC322 |
| 4407 | RBD | BG7NUC-HC323 |
| 4408 | RBD | BG7NUC-HC324 |
| 4409 | RBD | BG7NUC-HC325 |
| 4410 | RBD | BG7NUC-HC326 |
| 4411 | RBD | BG7NUC-HC327 |
| 4412 | RBD | BG7NUC-HC328 |
| 4413 | RBD | BG7NUC-HC329 |
| 4414 | RBD | BG7NUC-HC330 |
| 4415 | RBD | BG7NUC-HC331 |
| 4416 | RBD | BG7NUC-HC332 |
| 4417 | RBD | BG7NUC-HC333 |
| 4418 | RBD | BG7NUC-HC334 |
| 4419 | RBD | BG7NUC-HC335 |
| 4420 | RBD | BG7NUC-HC336 |
| 4421 | RBD | BG7NUC-HC337 |
| 4422 | RBD | BG7NUC-HC338 |
| 4423 | RBD | BG7NUC-HC339 |
| 4424 | RBD | BG7NUC-HC340 |
| 4425 | RBD | BG7NUC-HC341 |
| 4426 | RBD | BG7NUC-HC342 |
| 4427 | RBD | BG7NUC-HC343 |
| 4428 | RBD | BG7NUC-HC344 |
| 4429 | RBD | BG7NUC-HC345 |
| 4430 | RBD | BG7NUC-HC346 |
| 4431 | RBD | BG7NUC-HC347 |
| 4432 | RBD | BG7NUC-HC348 |
| 4433 | RBD | BG7NUC-HC349 |
| 4434 | RBD | BG7NUC-HC350 |
| 4435 | RBD | BG7NUC-HC351 |
| 4436 | RBD | BG7NUC-HC352 |
| 4437 | RBD | BG7NUC-HC353 |
| 4438 | RBD | BG7NUC-HC354 |
| 4439 | RBD | BG7NUC-HC355 |
| 4440 | RBD | BG7NUC-HC356 |
| 4441 | RBD | BG7NUC-HC357 |
| 4442 | RBD | BG7NUC-HC358 |
| 4443 | RBD | BG7NUC-HC359 |
| 4444 | RBD | BG7NUC-HC360 |
| 4445 | RBD | BG7NUC-HC361 |
| 4446 | RBD | BG7NUC-HC362 |
| 4447 | RBD | BG7NUC-HC363 |
| 4448 | RBD | BG7NUC-HC364 |
| 4449 | RBD | BG7NUC-HC365 |
| 4450 | RBD | BG7NUC-HC366 |
| 4451 | RBD | BG7NUC-HC367 |
| 4452 | RBD | BG7NUC-HC368 |
| 4453 | RBD | BG7NUC-HC369 |
| 4454 | RBD | BG7NUC-HC370 |
| 4455 | RBD | BG7NUC-HC371 |
| 4456 | RBD | BG7NUC-HC372 |
| 4457 | RBD | BG7NUC-HC373 |
| 4458 | RBD | BG7NUC-HC374 |
| 4459 | RBD | BG7NUC-HC375 |
| 4460 | RBD | BG7NUC-HC376 |
| 4461 | RBD | BG7NUC-HC377 |
| 4462 | RBD | BG7NUC-HC378 |
| 4463 | RBD | BG7NUC-HC379 |
| 4464 | RBD | BG7NUC-HC380 |
| 4465 | RBD | BG7NUC-HC381 |
| 4466 | RBD | BG7NUC-HC382 |
| 4467 | RBD | BG7NUC-HC383 |
| 4468 | RBD | BG7NUC-HC384 |
| 4469 | RBD | BG7NUC-HC385 |
| 4470 | RBD | BG7NUC-HC386 |
| 4471 | RBD | BG7NUC-HC387 |
| 4472 | RBD | BG7NUC-HC388 |
| 4473 | RBD | BG7NUC-HC389 |
| 4474 | RBD | BG7NUC-HC390 |
| 4475 | RBD | BG7NUC-HC391 |
| 4476 | RBD | BG7NUC-HC392 |
| 4477 | RBD | BG7NUC-HC393 |
| 4478 | RBD | BG7NUC-HC394 |
| 4479 | RBD | BG7NUC-HC395 |
| 4480 | RBD | BG7NUC-HC396 |
| 4481 | RBD | BG7NUC-HC397 |
| 4482 | 2P | BG7NUC-LC1 |
| 4483 | 2P | BG7NUC-LC2 |
| 4484 | 2P | BG7NUC-LC3 |
| 4485 | 2P | BG7NUC-LC4 |
| 4486 | 2P | BG7NUC-LC5 |
| 4487 | 2P | BG7NUC-LC6 |
| 4488 | 2P | BG7NUC-LC7 |
| 4489 | 2P | BG7NUC-LC8 |
| 4490 | 2P | BG7NUC-LC9 |
| 4491 | 2P | BG7NUC-LC10 |
| 4492 | 2P | BG7NUC-LC11 |
| 4493 | 2P | BG7NUC-LC12 |
| 4494 | 2P | BG7NUC-LC13 |
| 4495 | 2P | BG7NUC-LC14 |
| 4496 | 2P | BG7NUC-LC15 |
| 4497 | 2P | BG7NUC-LC16 |
| 4498 | 2P | BG7NUC-LC17 |
| 4499 | 2P | BG7NUC-LC18 |
| 4500 | 2P | BG7NUC-LC19 |
| 4501 | 2P | BG7NUC-LC20 |
| 4502 | 2P | BG7NUC-LC21 |
| 4503 | 2P | BG7NUC-LC22 |
| 4504 | 2P | BG7NUC-LC23 |
| 4505 | 2P | BG7NUC-LC24 |
| 4506 | 2P | BG7NUC-LC25 |
| 4507 | 2P | BG7NUC-LC26 |
| 4508 | 2P | BG7NUC-LC27 |
| 4509 | 2P | BG7NUC-LC28 |
| 4510 | 2P | BG7NUC-LC29 |
| 4511 | 2P | BG7NUC-LC30 |
| 4512 | 2P | BG7NUC-LC31 |
| 4513 | 2P | BG7NUC-LC32 |
| 4514 | RBD | BG7NUC-LC33 |
| 4515 | RBD | BG7NUC-LC34 |
| 4516 | RBD | BG7NUC-LC35 |
| 4517 | RBD | BG7NUC-LC36 |
| 4518 | 2P | BG7NUC-LC37 |
| 4519 | 2P | BG7NUC-LC38 |
| 4520 | 2P | BG7NUC-LC39 |
| 4521 | 2P | BG7NUC-LC40 |
| 4522 | 2P | BG7NUC-LC41 |
| 4523 | 2P | BG7NUC-LC42 |
| 4524 | 2P | BG7NUC-LC43 |
| 4525 | 2P | BG7NUC-LC44 |
| 4526 | 2P | BG7NUC-LC45 |
| 4527 | 2P | BG7NUC-LC46 |
| 4528 | 2P | BG7NUC-LC47 |
| 4529 | 2P | BG7NUC-LC48 |
| 4530 | 2P | BG7NUC-LC49 |
| 4531 | 2P | BG7NUC-LC50 |
| 4532 | 2P | BG7NUC-LC51 |
| 4533 | 2P | BG7NUC-LC52 |
| 4534 | 2P | BG7NUC-LC53 |
| 4535 | 2P | BG7NUC-LC54 |
| 4536 | 2P | BG7NUC-LC55 |
| 4537 | 2P | BG7NUC-LC56 |
| 4538 | 2P | BG7NUC-LC57 |
| 4539 | 2P | BG7NUC-LC58 |
| 4540 | 2P | BG7NUC-LC59 |
| 4541 | 2P | BG7NUC-LC60 |
| 4542 | RBD | BG7NUC-LC61 |
| 4543 | 2P | BG7NUC-LC62 |
| 4544 | 2P | BG7NUC-LC63 |
| 4545 | RBD | BG7NUC-LC64 |
| 4546 | RBD | BG7NUC-LC65 |
| 4547 | RBD | BG7NUC-LC66 |
| 4548 | RBD | BG7NUC-LC67 |
| 4549 | RBD | BG7NUC-LC68 |
| 4550 | 2P | BG7NUC-LC69 |
| 4551 | 2P | BG7NUC-LC70 |
| 4552 | 2P | BG7NUC-LC71 |
| 4553 | 2P | BG7NUC-LC72 |
| 4554 | 2P | BG7NUC-LC73 |
| 4555 | 2P | BG7NUC-LC74 |
| 4556 | 2P | BG7NUC-LC75 |
| 4557 | 2P | BG7NUC-LC76 |
| 4558 | 2P | BG7NUC-LC77 |
| 4559 | 2P | BG7NUC-LC78 |
| 4560 | 2P | BG7NUC-LC79 |
| 4561 | 2P | BG7NUC-LC80 |
| 4562 | 2F | BG7NUC-LC81 |
| 4563 | 2P | BG7NUC-LC82 |
| 4564 | 2P | BG7NUC-LC83 |
| 4565 | 2P | BG7NUC-LC84 |
| 4566 | 2P | BG7NUC-LC85 |
| 4567 | 2P | BG7NUC-LC86 |
| 4568 | 2P | BG7NUC-LC87 |
| 4569 | 2P | BG7NUC-LC88 |
| 4570 | 2P | BG7NUC-LC89 |
| 4571 | 2P | BG7NUC-LC90 |
| 4572 | 2P | BG7NUC-LC91 |
| 4573 | 2P | BG7NUC-LC92 |
| 4574 | 2P | BG7NUC-LC93 |
| 4575 | 2P | BG7NUC-LC94 |
| 4576 | 2P | BG7NUC-LC95 |
| 4577 | 2P | BG7NUC-LC96 |
| 4578 | 2P | BG7NUC-LC97 |
| 4579 | 2P | BG7NUC-LC98 |
| 4580 | 2P | BG7NUC-LC99 |
| 4581 | 2P | BG7NUC-LC100 |
| 4582 | 2P | BG7NUC-LC101 |
| 4583 | 2P | BG7NUC-LC102 |
| 4584 | 2P | BG7NUC-LC103 |
| 4585 | 2P | BG7NUC-LC104 |
| 4586 | 2P | BG7NUC-LC105 |
| 4587 | 2P | BG7NUC-LC106 |
| 4588 | 2P | BG7NUC-LC107 |
| 4589 | 2P | BG7NUC-LC108 |
| 4590 | 2P | BG7NUC-LC109 |
| 4591 | 2P | BG7NUC-LC110 |
| 4592 | 2P | BG7NUC-LC111 |
| 4593 | 2P | BG7NUC-LC112 |
| 4594 | 2P | BG7NUC-LC113 |
| 4595 | 2P | BG7NUC-LC114 |
| 4596 | 2P | BG7NUC-LC115 |
| 4597 | 2P | BG7NUC-LC116 |
| 4598 | 2P | BG7NUC-LC117 |
| 4599 | 2P | BG7NUC-LC118 |
| 4600 | 2P | BG7NUC-LC119 |
| 4601 | 2P | BG7NUC-LC120 |
| 4602 | 2P | BG7NUC-LC121 |
| 4603 | 2P | BG7NUC-LC122 |
| 4604 | 2P | BG7NUC-LC123 |
| 4605 | 2P | BG7NUC-LC124 |
| 4606 | 2P | BG7NUC-LC125 |
| 4607 | 2P | BG7NUC-LC126 |
| 4608 | 2F | BG7NUC-LC127 |
| 4609 | 2P | BG7NUC-LC128 |
| 4610 | 2P | BG7NUC-LC129 |
| 4611 | 2P | BG7NUC-LC130 |
| 4612 | 2P | BG7NUC-LC131 |
| 4613 | 2P | BG7NUC-LC132 |
| 4614 | 2P | BG7NUC-LC133 |
| 4615 | 2P | BG7NUC-LC134 |
| 4616 | 2P | BG7NUC-LC135 |
| 4617 | 2P | BG7NUC-LC136 |
| 4618 | 2P | BG7NUC-LC137 |
| 4619 | 2P | BG7NUC-LC138 |
| 4620 | 2P | BG7NUC-LC139 |
| 4621 | 2P | BG7NUC-LC140 |
| 4622 | 2P | BG7NUC-LC141 |
| 4623 | 2P | BG7NUC-LC142 |
| 4624 | 2P | BG7NUC-LC143 |
| 4625 | 2P | BG7NUC-LC144 |
| 4626 | 2P | BG7NUC-LC145 |
| 4627 | 2P | BG7NUC-LC146 |
| 4628 | 2P | BG7NUC-LC147 |
| 4629 | 2P | BG7NUC-LC148 |
| 4630 | 2P | BG7NUC-LC149 |
| 4631 | 2P | BG7NUC-LC150 |
| 4632 | 2P | BG7NUC-LC151 |
| 4633 | 2P | BG7NUC-LC152 |
| 4634 | 2P | BG7NUC-LC153 |
| 4635 | 2P | BG7NUC-LC154 |
| 4636 | 2P | BG7NUC-LC155 |
| 4637 | 2P | BG7NUC-LC156 |
| 4638 | 2P | BG7NUC-LC157 |
| 4639 | 2P | BG7NUC-LC158 |
| 4640 | 2P | BG7NUC-LC159 |
| 4641 | 2P | BG7NUC-LC160 |
| 4642 | 2P | BG7NUC-LC161 |
| 4643 | 2P | BG7NUC-LC162 |
| 4644 | 2P | BG7NUC-LC163 |
| 4645 | 2P | BG7NUC-LC164 |
| 4646 | 2P | BG7NUC-LC165 |
| 4647 | 2P | BG7NUC-LC166 |
| 4648 | 2P | BG7NUC-LC167 |
| 4649 | 2P | BG7NUC-LC168 |
| 4650 | 2P | BG7NUC-LC169 |
| 4651 | 2P | BG7NUC-LC170 |
| 4652 | 2P | BG7NUC-LC171 |
| 4653 | 2P | BG7NUC-LC172 |
| 4654 | 2P | BG7NUC-LC173 |
| 4655 | 2P | BG7NUC-LC174 |
| 4656 | 2P | BG7NUC-LC175 |
| 4657 | 2P | BG7NUC-LC176 |
| 4658 | 2P | BG7NUC-LC177 |
| 4659 | 2P | BG7NUC-LC178 |
| 4660 | 2P | BG7NUC-LC179 |
| 4661 | 2P | BG7NUC-LC180 |
| 4662 | 2P | BG7NUC-LC181 |
| 4663 | 2P | BG7NUC-LC182 |
| 4664 | 2P | BG7NUC-LC183 |
| 4665 | 2P | BG7NUC-LC184 |
| 4666 | 2P | BG7NUC-LC185 |
| 4667 | 2P | BG7NUC-LC186 |
| 4668 | 2P | BG7NUC-LC187 |
| 4669 | 2P | BG7NUC-LC188 |
| 4670 | 2P | BG7NUC-LC189 |
| 4671 | 2P | BG7NUC-LC190 |
| 4672 | 2P | BG7NUC-LC191 |
| 4673 | 2P | BG7NUC-LC192 |
| 4674 | 2P | BG7NUC-LC193 |
| 4675 | 2P | BG7NUC-LC194 |
| 4676 | 2P | BG7NUC-LC195 |
| 4677 | 2P | BG7NUC-LC196 |
| 4678 | 2P | BG7NUC-LC197 |
| 4679 | 2P | BG7NUC-LC198 |
| 4680 | 2P | BG7NUC-LC199 |
| 4681 | 2P | BG7NUC-LC200 |
| 4682 | 2P | BG7NUC-LC201 |
| 4683 | 2P | BG7NUC-LC202 |
| 4684 | 2P | BG7NUC-LC203 |
| 4685 | 2P | BG7NUC-LC204 |
| 4686 | 2P | BG7NUC-LC205 |
| 4687 | 2P | BG7NUC-LC206 |
| 4688 | 2P | BG7NUC-LC207 |
| 4689 | 2P | BG7NUC-LC208 |
| 4690 | 2P | BG7NUC-LC209 |
| 4691 | 2P | BG7NUC-LC210 |
| 4692 | 2P | BG7NUC-LC211 |
| 4693 | 2P | BG7NUC-LC212 |
| 4694 | 2P | BG7NUC-LC213 |
| 4695 | 2P | BG7NUC-LC214 |
| 4696 | 2P | BG7NUC-LC215 |
| 4697 | 2P | BG7NUC-LC216 |
| 4698 | 2P | BG7NUC-LC217 |
| 4699 | 2P | BG7NUC-LC218 |
| 4700 | 2P | BG7NUC-LC219 |
| 4701 | 2P | BG7NUC-LC220 |
| 4702 | 2P | BG7NUC-LC221 |
| 4703 | 2P | BG7NUC-LC222 |
| 4704 | 2P | BG7NUC-LC223 |
| 4705 | 2P | BG7NUC-LC224 |
| 4706 | 2P | BG7NUC-LC225 |
| 4707 | 2P | BG7NUC-LC226 |
| 4708 | 2P | BG7NUC-LC227 |
| 4709 | 2P | BG7NUC-LC228 |
| 4710 | 2P | BG7NUC-LC229 |
| 4711 | 2P | BG7NUC-LC230 |
| 4712 | 2P | BG7NUC-LC231 |
| 4713 | 2P | BG7NUC-LC232 |
| 4714 | 2P | BG7NUC-LC233 |
| 4715 | 2P | BG7NUC-LC234 |
| 4716 | 2P | BG7NUC-LC235 |
| 4717 | 2P | BG7NUC-LC236 |
| 4718 | 2P | BG7NUC-LC237 |
| 4719 | 2P | BG7NUC-LC238 |
| 4720 | 2P | BG7NUC-LC239 |
| 4721 | 2P | BG7NUC-LC240 |
| 4722 | 2P | BG7NUC-LC241 |
| 4723 | 2P | BG7NUC-LC242 |
| 4724 | 2P | BG7NUC-LC243 |
| 4725 | 2P | BG7NUC-LC244 |
| 4726 | 2P | BG7NUC-LC245 |
| 4727 | 2P | BG7NUC-LC246 |
| 4728 | 2P | BG7NUC-LC247 |
| 4729 | 2P | BG7NUC-LC248 |
| 4730 | 2P | BG7NUC-LC249 |
| 4731 | 2P | BG7NUC-LC250 |
| 4732 | 2P | BG7NUC-LC251 |
| 4733 | 2P | BG7NUC-LC252 |
| 4734 | 2P | BG7NUC-LC253 |
| 4735 | RBD | BG7NUC-LC254 |
| 4736 | RBD | BG7NUC-LC255 |
| 4737 | RBD | BG7NUC-LC256 |
| 4738 | RBD | BG7NUC-LC257 |
| 4739 | RBD | BG7NUC-LC258 |
| 4740 | RBD | BG7NUC-LC259 |
| 4741 | RBD | BG7NUC-LC260 |
| 4742 | RBD | BG7NUC-LC261 |
| 4743 | RBD | BG7NUC-LC262 |
| 4744 | RBD | BG7NUC-LC263 |
| 4745 | RBD | BG7NUC-LC264 |
| 4746 | RBD | BG7NUC-LC265 |
| 4747 | RBD | BG7NUC-LC266 |
| 4748 | RBD | BG7NUC-LC267 |
| 4749 | RBD | BG7NUC-LC268 |
| 4750 | RBD | BG7NUC-LC269 |
| 4751 | RBD | BG7NUC-LC270 |
| 4752 | RBD | BG7NUC-LC271 |
| 4753 | RBD | BG7NUC-LC272 |
| 4754 | RBD | BG7NUC-LC273 |
| 4755 | RBD | BG7NUC-LC274 |
| 4756 | RBD | BG7NUC-LC275 |
| 4757 | RBD | BG7NUC-LC276 |
| 4758 | RBD | BG7NUC-LC277 |
| 4759 | RBD | BG7NUC-LC278 |
| 4760 | RBD | BG7NUC-LC279 |
| 4761 | RBD | BG7NUC-LC280 |
| 4762 | RBD | BG7NUC-LC281 |
| 4763 | RBD | BG7NUC-LC282 |
| 4764 | RBD | BG7NUC-LC283 |
| 4765 | RBD | BG7NUC-LC284 |
| 4766 | RBD | BG7NUC-LC285 |
| 4767 | RBD | BG7NUC-LC286 |
| 4768 | RBD | BG7NUC-LC287 |
| 4769 | RBD | BG7NUC-LC288 |
| 4770 | RBD | BG7NUC-LC289 |
| 4771 | RBD | BG7NUC-LC290 |
| 4772 | RBD | BG7NUC-LC291 |
| 4773 | RBD | BG7NUC-LC292 |
| 4774 | RBD | BG7NUC-LC293 |
| 4775 | RBD | BG7NUC-LC294 |
| 4776 | RBD | BG7NUC-LC295 |
| 4777 | RBD | BG7NUC-LC296 |
| 4778 | RBD | BG7NUC-LC297 |
| 4779 | RBD | BG7NUC-LC298 |
| 4780 | RBD | BG7NUC-LC299 |
| 4781 | RBD | BG7NUC-LC300 |
| 4782 | RBD | BG7NUC-LC301 |
| 4783 | RBD | BG7NUC-LC302 |
| 4784 | RBD | BG7NUC-LC303 |
| 4785 | RBD | BG7NUC-LC304 |
| 4786 | RBD | BG7NUC-LC305 |
| 4787 | RBD | BG7NUC-LC306 |
| 4788 | RBD | BG7NUC-LC307 |
| 4789 | RBD | BG7NUC-LC308 |
| 4790 | RBD | BG7NUC-LC309 |
| 4791 | RBD | BG7NUC-LC310 |
| 4792 | RBD | BG7NUC-LC311 |
| 4793 | RBD | BG7NUC-LC312 |
| 4794 | RBD | BG7NUC-LC313 |
| 4795 | RBD | BG7NUC-LC314 |
| 4796 | RBD | BG7NUC-LC315 |
| 4797 | RBD | BG7NUC-LC316 |
| 4798 | RBD | BG7NUC-LC317 |
| 4799 | RBD | BG7NUC-LC318 |
| 4800 | RBD | BG7NUC-LC319 |
| 4801 | RBD | BG7NUC-LC320 |
| 4802 | RBD | BG7NUC-LC321 |
| 4803 | RBD | BG7NUC-LC322 |
| 4804 | RBD | BG7NUC-LC323 |
| 4805 | RBD | BG7NUC-LC324 |
| 4806 | RBD | BG7NUC-LC325 |
| 4807 | RBD | BG7NUC-LC326 |
| 4808 | RBD | BG7NUC-LC327 |
| 4809 | RBD | BG7NUC-LC328 |
| 4810 | RBD | BG7NUC-LC329 |
| 4811 | RBD | BG7NUC-LC330 |
| 4812 | RBD | BG7NUC-LC331 |
| 4813 | RBD | BG7NUC-LC332 |
| 4814 | RBD | BG7NUC-LC333 |
| 4815 | RBD | BG7NUC-LC334 |
| 4816 | RBD | BG7NUC-LC335 |
| 4817 | RBD | BG7NUC-LC336 |
| 4818 | RBD | BG7NUC-LC337 |
| 4819 | RBD | BG7NUC-LC338 |
| 4820 | RBD | BG7NUC-LC339 |
| 4821 | RBD | BG7NUC-LC340 |
| 4822 | RBD | BG7NUC-LC341 |
| 4823 | RBD | BG7NUC-LC342 |
| 4824 | RBD | BG7NUC-LC343 |
| 4825 | RBD | BG7NUC-LC344 |
| 4826 | RBD | BG7NUC-LC345 |
| 4827 | RBD | BG7NUC-LC346 |
| 4828 | RBD | BG7NUC-LC347 |
| 4829 | RBD | BG7NUC-LC348 |
| 4830 | RBD | BG7NUC-LC349 |
| 4831 | RBD | BG7NUC-LC350 |
| 4832 | RBD | BG7NUC-LC351 |
| 4833 | RBD | BG7NUC-LC352 |
| 4834 | RBD | BG7NUC-LC353 |
| 4835 | RBD | BG7NUC-LC354 |
| 4836 | RBD | BG7NUC-LC355 |
| 4837 | RBD | BG7NUC-LC356 |
| 4838 | RBD | BG7NUC-LC357 |
| 4839 | RBD | BG7NUC-LC358 |
| 4840 | RBD | BG7NUC-LC359 |
| 4841 | RBD | BG7NUC-LC360 |
| 4842 | RBD | BG7NUC-LC361 |
| 4843 | RBD | BG7NUC-LC362 |
| 4844 | RBD | BG7NUC-LC363 |
| 4845 | RBD | BG7NUC-LC364 |
| 4846 | RBD | BG7NUC-LC365 |
| 4847 | RBD | BG7NUC-LC366 |
| 4848 | RBD | BG7NUC-LC367 |
| 4849 | RBD | BG7NUC-LC368 |
| 4850 | RBD | BG7NUC-LC369 |
| 4851 | RBD | BG7NUC-LC370 |
| 4852 | RBD | BG7NUC-LC371 |
| 4853 | RBD | BG7NUC-LC372 |
| 4854 | RBD | BG7NUC-LC373 |
| 4855 | RBD | BG7NUC-LC374 |
| 4856 | RBD | BG7NUC-LC375 |
| 4857 | RBD | BG7NUC-LC376 |
| 4858 | RBD | BG7NUC-LC377 |
| 4859 | RBD | BG7NUC-LC378 |
| 4860 | RBD | BG7NUC-LC379 |
| 4861 | RBD | BG7NUC-LC380 |
| 4862 | RBD | BG7NUC-LC381 |
| 4863 | RBD | BG7NUC-LC382 |
| 4864 | RBD | BG7NUC-LC383 |
| 4865 | RBD | BG7NUC-LC384 |
| 4866 | RBD | BG7NUC-LC385 |
| 4867 | RBD | BG7NUC-LC386 |
| 4868 | RBD | BG7NUC-LC387 |
| 4869 | RBD | BG7NUC-LC388 |
| 4870 | RBD | BG7NUC-LC389 |
| 4871 | RBD | BG7NUC-LC390 |
| 4872 | RBD | BG7NUC-LC391 |
| 4873 | RBD | BG7NUC-LC392 |
| 4874 | RBD | BG7NUC-LC393 |
| 4875 | RBD | BG7NUC-LC394 |
| 4876 | RBD | BG7NUC-LC395 |
| 4877 | RBD | BG7NUC-LC396 |
| 4878 | RBD | BG7NUC-LC397 |
| 4879 | 2P | BG9NUC-HC1 |
| 4880 | 2P | BG9NUC-HC2 |
| 4881 | 2P | BG9NUC-HC3 |
| 4882 | 2P | BG9NUC-HC4 |
| 4883 | 2P | BG9NUC-HC5 |
| 4884 | 2P | BG9NUC-HC6 |
| 4885 | 2P | BG9NUC-HC7 |
| 4886 | RBD | BG9NUC-HC8 |
| 4887 | RBD | BG9NUC-HC9 |
| 4888 | RBD | BG9NUC-HC10 |
| 4889 | 2P | BG9NUC-HC11 |
| 4890 | RBD | BG9NUC-HC12 |
| 4891 | RBD | BG9NUC-HC13 |
| 4892 | RBD | BG9NUC-HC14 |
| 4893 | RBD | BG9NUC-HC15 |
| 4894 | 2P | BG9NUC-HC16 |
| 4895 | 2P | BG9NUC-HC17 |
| 4896 | 2P | BG9NUC-HC18 |
| 4897 | 2P | BG9NUC-HC19 |
| 4898 | 2P | BG9NUC-HC20 |
| 4899 | 2P | BG9NUC-HC21 |
| 4900 | 2P | BG9NUC-HC22 |
| 4901 | RBD | BG9NUC-HC23 |
| 4902 | 2P | BG9NUC-HC24 |
| 4903 | RBD | BG9NUC-HC25 |
| 4904 | RBD | BG9NUC-HC26 |
| 4905 | RBD | BG9NUC-HC27 |
| 4906 | RBD | BG9NUC-HC28 |
| 4907 | 2P | BG9NUC-HC29 |
| 4908 | 2P | BG9NUC-HC30 |
| 4909 | RBD | BG9NUC-HC31 |
| 4910 | 2P | BG9NUC-HC32 |
| 4911 | RBD | BG9NUC-HC33 |
| 4912 | RBD | BG9NUC-HC34 |
| 4913 | RBD | BG9NUC-HC35 |
| 4914 | RBD | BG9NUC-HC36 |
| 4915 | 2P | BG9NUC-HC37 |
| 4916 | 2P | BG9NUC-HC38 |
| 4917 | 2P | BG9NUC-HC39 |
| 4918 | RBD | BG9NUC-HC40 |
| 4919 | 2P | BG9NUC-HC41 |
| 4920 | 2P | BG9NUC-HC42 |
| 4921 | RBD | BG9NUC-HC43 |
| 4922 | 2P | BG9NUC-HC44 |
| 4923 | 2P | BG9NUC-HC45 |
| 4924 | RBD | BG9NUC-HC46 |
| 4925 | 2P | BG9NUC-HC47 |
| 4926 | 2P | BG9NUC-HC48 |
| 4927 | RBD | BG9NUC-HC49 |
| 4928 | 2P | BG9NUC-HC50 |
| 4929 | 2P | BG9NUC-HC51 |
| 4930 | RBD | BG9NUC-HC52 |
| 4931 | 2P | BG9NUC-HC53 |
| 4932 | RBD | BG9NUC-HC54 |
| 4933 | RBD | BG9NUC-HC55 |
| 4934 | 2P | BG9NUC-HC56 |
| 4935 | 2P | BG9NUC-HC57 |
| 4936 | RBD | BG9NUC-HC58 |
| 4937 | RBD | BG9NUC-HC59 |
| 4938 | RBD | BG9NUC-HC60 |
| 4939 | 2P | BG9NUC-HC61 |
| 4940 | 2P | BG9NUC-HC62 |
| 4941 | RBD | BG9NUC-HC63 |
| 4942 | 2P | BG9NUC-HC64 |
| 4943 | 2P | BG9NUC-HC65 |
| 4944 | 2P | BG9NUC-HC66 |
| 4945 | 2P | BG9NUC-HC67 |
| 4946 | 2P | BG9NUC-HC68 |
| 4947 | RBD | BG9NUC-HC69 |
| 4948 | 2P | BG9NUC-HC70 |
| 4949 | 2P | BG9NUC-HC71 |
| 4950 | RBD | BG9NUC-HC72 |
| 4951 | 2P | BG9NUC-HC73 |
| 4952 | 2P | BG9NUC-HC74 |
| 4953 | 2P | BG9NUC-HC75 |
| 4954 | RBD | BG9NUC-HC76 |
| 4955 | RBD | BG9NUC-HC77 |
| 4956 | RBD | BG9NUC-HC78 |
| 4957 | 2P | BG9NUC-HC79 |
| 4958 | 2P | BG9NUC-HC80 |
| 4959 | 2P | BG9NUC-HC81 |
| 4960 | 2P | BG9NUC-HC82 |
| 4961 | RBD | BG9NUC-HC83 |
| 4962 | RBD | BG9NUC-HC84 |
| 4963 | RBD | BG9NUC-HC85 |
| 4964 | RBD | BG9NUC-HC86 |
| 4965 | 2P | BG9NUC-HC87 |
| 4966 | 2P | BG9NUC-HC88 |
| 4967 | 2P | BG9NUC-HC89 |
| 4968 | 2P | BG9NUC-HC90 |
| 4969 | 2P | BG9NUC-HC91 |
| 4970 | RBD | BG9NUC-HC92 |
| 4971 | 2P | BG9NUC-HC93 |
| 4972 | 2P | BG9NUC-HC94 |
| 4973 | RBD | BG9NUC-HC95 |
| 4974 | 2P | BG9NUC-HC96 |
| 4975 | 2P | BG9NUC-HC97 |
| 4976 | 2P | BG9NUC-HC98 |
| 4977 | 2P | BG9NUC-HC99 |
| 4978 | RBD | BG9NUC-HC100 |
| 4979 | RBD | BG9NUC-HC101 |
| 4980 | RBD | BG9NUC-HC102 |
| 4981 | 2P | BG9NUC-HC103 |
| 4982 | RBD | BG9NUC-HC104 |
| 4983 | 2P | BG9NUC-HC105 |
| 4984 | 2P | BG9NUC-HC106 |
| 4985 | RBD | BG9NUC-HC107 |
| 4986 | RBD | BG9NUC-HC108 |
| 4987 | RBD | BG9NUC-HC109 |
| 4988 | 2P | BG9NUC-HC110 |
| 4989 | 2P | BG9NUC-HC111 |
| 4990 | 2P | BG9NUC-HC112 |
| 4991 | RBD | BG9NUC-HC113 |
| 4992 | 2P | BG9NUC-HC114 |
| 4993 | 2P | BG9NUC-HC115 |
| 4994 | RBD | BG9NUC-HC116 |
| 4995 | RBD | BG9NUC-HC117 |
| 4996 | RBD | BG9NUC-HC118 |
| 4997 | 2P | BG9NUC-HC119 |
| 4998 | 2P | BG9NUC-HC120 |
| 4999 | RBD | BG9NUC-HC121 |
| 5000 | RBD | BG9NUC-HC122 |
| 5001 | 2P | BG9NUC-HC123 |
| 5002 | 2P | BG9NUC-HC124 |
| 5003 | 2P | BG9NUC-HC125 |
| 5004 | 2P | BG9NUC-HC126 |
| 5005 | RBD | BG9NUC-HC127 |
| 5006 | 2P | BG9NUC-HC128 |
| 5007 | RBD | BG9NUC-HC129 |
| 5008 | RBD | BG9NUC-HC130 |
| 5009 | RBD | BG9NUC-HC131 |
| 5010 | RBD | BG9NUC-HC132 |
| 5011 | 2P | BG9NUC-HC133 |
| 5012 | RBD | BG9NUC-HC134 |
| 5013 | 2P | BG9NUC-HC135 |
| 5014 | RBD | BG9NUC-HC136 |
| 5015 | 2P | BG9NUC-HC137 |
| 5016 | RBD | BG9NUC-HC138 |
| 5017 | 2P | BG9NUC-HC139 |
| 5018 | 2P | BG9NUC-HC140 |
| 5019 | 2P | BG9NUC-HC141 |
| 5020 | 2P | BG9NUC-HC142 |
| 5021 | 2P | BG9NUC-HC143 |
| 5022 | 2P | BG9NUC-HC144 |
| 5023 | 2P | BG9NUC-HC145 |
| 5024 | 2P | BG9NUC-HC146 |
| 5025 | RBD | BG9NUC-HC147 |
| 5026 | RBD | BG9NUC-HC148 |
| 5027 | RBD | BG9NUC-HC149 |
| 5028 | RBD | BG9NUC-HC150 |
| 5029 | 2P | BG9NUC-HC151 |
| 5030 | 2P | BG9NUC-HC152 |
| 5031 | RBD | BG9NUC-HC153 |
| 5032 | 2P | BG9NUC-HC154 |
| 5033 | 2P | BG9NUC-HC155 |
| 5034 | 2P | BG9NUC-HC156 |
| 5035 | 2P | BG9NUC-HC157 |
| 5036 | RBD | BG9NUC-HC158 |
| 5037 | 2P | BG9NUC-HC159 |
| 5038 | 2P | BG9NUC-HC160 |
| 5039 | 2P | BG9NUC-HC161 |
| 5040 | RBD | BG9NUC-HC162 |
| 5041 | 2P | BG9NUC-HC163 |
| 5042 | 2P | BG9NUC-HC164 |
| 5043 | RBD | BG9NUC-HC165 |
| 5044 | 2P | BG9NUC-HC166 |
| 5045 | RBD | BG9NUC-HC167 |
| 5046 | RBD | BG9NUC-HC168 |
| 5047 | RBD | BG9NUC-HC169 |
| 5048 | RBD | BG9NUC-HC170 |
| 5049 | RBD | BG9NUC-HC171 |
| 5050 | 2P | BG9NUC-HC172 |
| 5051 | RBD | BG9NUC-HC173 |
| 5052 | 2P | BG9NUC-HC174 |
| 5053 | RBD | BG9NUC-HC175 |
| 5054 | RBD | BG9NUC-HC176 |
| 5055 | 2P | BG9NUC-HC177 |
| 5056 | RBD | BG9NUC-HC178 |
| 5057 | 2P | BG9NUC-HC179 |
| 5058 | 2P | BG9NUC-HC180 |
| 5059 | 2P | BG9NUC-HC181 |
| 5060 | RBD | BG9NUC-HC182 |
| 5061 | 2P | BG9NUC-HC183 |
| 5062 | RBD | BG9NUC-HC184 |
| 5063 | 2P | BG9NUC-HC185 |
| 5064 | RBD | BG9NUC-HC186 |
| 5065 | 2P | BG9NUC-HC187 |
| 5066 | 2P | BG9NUC-HC188 |
| 5067 | 2P | BG9NUC-HC189 |
| 5068 | 2P | BG9NUC-HC190 |
| 5069 | 2P | BG9NUC-HC191 |
| 5070 | RBD | BG9NUC-HC192 |
| 5071 | 2P | BG9NUC-HC193 |
| 5072 | 2P | BG9NUC-HC194 |
| 5073 | RBD | BG9NUC-HC195 |
| 5074 | RBD | BG9NUC-HC196 |
| 5075 | 2P | BG9NUC-HC197 |
| 5076 | RBD | BG9NUC-HC198 |
| 5077 | 2P | BG9NUC-HC199 |
| 5078 | 2P | BG9NUC-HC200 |
| 5079 | RBD | BG9NUC-HC201 |
| 5080 | 2P | BG9NUC-HC202 |
| 5081 | 2P | BG9NUC-HC203 |
| 5082 | 2P | BG9NUC-HC204 |
| 5083 | 2P | BG9NUC-HC205 |
| 5084 | RBD | BG9NUC-HC206 |
| 5085 | RBD | BG9NUC-HC207 |
| 5086 | 2P | BG9NUC-HC208 |
| 5087 | RBD | BG9NUC-HC209 |
| 5088 | RBD | BG9NUC-HC210 |
| 5089 | 2P | BG9NUC-HC211 |
| 5090 | RBD | BG9NUC-HC212 |
| 5091 | RBD | BG9NUC-HC213 |
| 5092 | 2P | BG9NUC-HC214 |
| 5093 | 2P | BG9NUC-HC215 |
| 5094 | RBD | BG9NUC-HC216 |
| 5095 | 2P | BG9NUC-HC217 |
| 5096 | 2P | BG9NUC-HC218 |
| 5097 | RBD | BG9NUC-HC219 |
| 5098 | RBD | BG9NUC-HC220 |
| 5099 | 2P | BG9NUC-HC221 |
| 5100 | RBD | BG9NUC-HC222 |
| 5101 | 2P | BG9NUC-HC223 |
| 5102 | 2P | BG9NUC-HC224 |
| 5103 | RBD | BG9NUC-HC225 |
| 5104 | 2P | BG9NUC-HC226 |
| 5105 | RBD | BG9NUC-HC227 |
| 5106 | RBD | BG9NUC-HC228 |
| 5107 | 2P | BG9NUC-HC229 |
| 5108 | 2P | BG9NUC-HC230 |
| 5109 | 2P | BG9NUC-HC231 |
| 5110 | RBD | BG9NUC-HC232 |
| 5111 | RBD | BG9NUC-HC233 |
| 5112 | RBD | BG9NUC-HC234 |
| 5113 | 2P | BG9NUC-LC1 |
| 5114 | 2P | BG9NUC-LC2 |
| 5115 | 2P | BG9NUC-LC3 |
| 5116 | 2P | BG9NUC-LC4 |
| 5117 | 2P | BG9NUC-LC5 |
| 5118 | 2P | BG9NUC-LC6 |
| 5119 | 2P | BG9NUC-LC7 |
| 5120 | RBD | BG9NUC-LC8 |
| 5121 | RBD | BG9NUC-LC9 |
| 5122 | RBD | BG9NUC-LC10 |
| 5123 | 2F | BG9NUC-LC11 |
| 5124 | RBD | BG9NUC-LC12 |
| 5125 | RBD | BG9NUC-LC13 |
| 5126 | RBD | BG9NUC-LC14 |
| 5127 | RBD | BG9NUC-LC15 |
| 5128 | 2P | BG9NUC-LC16 |
| 5129 | 2P | BG9NUC-LC17 |
| 5130 | 2P | BG9NUC-LC18 |
| 5131 | 2P | BG9NUC-LC19 |
| 5132 | 2P | BG9NUC-LC20 |
| 5133 | 2P | BG9NUC-LC21 |
| 5134 | 2P | BG9NUC-LC22 |
| 5135 | RBD | BG9NUC-LC23 |
| 5136 | 2F | BG9NUC-LC24 |
| 5137 | RBD | BG9NUC-LC25 |
| 5138 | RBD | BG9NUC-LC26 |
| 5139 | RBD | BG9NUC-LC27 |
| 5140 | RBD | BG9NUC-LC28 |
| 5141 | 2F | BG9NUC-LC29 |
| 5142 | 2P | BG9NUC-LC30 |
| 5143 | RBD | BG9NUC-LC31 |
| 5144 | 2P | BG9NUC-LC32 |
| 5145 | RBD | BG9NUC-LC33 |
| 5146 | RBD | BG9NUC-LC34 |
| 5147 | RBD | BG9NUC-LC35 |
| 5148 | RBD | BG9NUC-LC36 |
| 5149 | 2P | BG9NUC-LC37 |
| 5150 | 2P | BG9NUC-LC38 |
| 5151 | 2P | BG9NUC-LC39 |
| 5152 | RBD | BG9NUC-LC40 |
| 5153 | 2P | BG9NUC-LC41 |
| 5154 | 2P | BG9NUC-LC42 |
| 5155 | RBD | BG9NUC-LC43 |
| 5156 | 2P | BG9NUC-LC44 |
| 5157 | 2F | BG9NUC-LC45 |
| 5158 | RBD | BG9NUC-LC46 |
| 5159 | 2P | BG9NUC-LC47 |
| 5160 | 2P | BG9NUC-LC48 |
| 5161 | RBD | BG9NUC-LC49 |
| 5162 | 2P | BG9NUC-LC50 |
| 5163 | 2P | BG9NUC-LC51 |
| 5164 | RBD | BG9NUC-LC52 |
| 5165 | 2P | BG9NUC-LC53 |
| 5166 | RBD | BG9NUC-LC54 |
| 5167 | RBD | BG9NUC-LC55 |
| 5168 | 2P | BG9NUC-LC56 |
| 5169 | 2F | BG9NUC-LC57 |
| 5170 | RBD | BG9NUC-LC58 |
| 5171 | RBD | BG9NUC-LC59 |
| 5172 | RBD | BG9NUC-LC60 |
| 5173 | 2P | BG9NUC-LC61 |
| 5174 | 2P | BG9NUC-LC62 |
| 5175 | RBD | BG9NUC-LC63 |
| 5176 | 2P | BG9NUC-LC64 |
| 5177 | 2P | BG9NUC-LC65 |
| 5178 | 2P | BG9NUC-LC66 |
| 5179 | 2P | BG9NUC-LC67 |
| 5180 | 2P | BG9NUC-LC68 |
| 5181 | RBD | BG9NUC-LC69 |
| 5182 | 2F | BG9NUC-LC70 |
| 5183 | 2P | BG9NUC-LC71 |
| 5184 | RBD | BG9NUC-LC72 |
| 5185 | 2P | BG9NUC-LC73 |
| 5186 | 2P | BG9NUC-LC74 |
| 5187 | 2P | BG9NUC-LC75 |
| 5188 | RBD | BG9NUC-LC76 |
| 5189 | RBD | BG9NUC-LC77 |
| 5190 | RBD | BG9NUC-LC78 |
| 5191 | 2F | BG9NUC-LC79 |
| 5192 | 2P | BG9NUC-LC80 |
| 5193 | 2P | BG9NUC-LC81 |
| 5194 | 2P | BG9NUC-LC82 |
| 5195 | RBD | BG9NUC-LC83 |
| 5196 | RBD | BG9NUC-LC84 |
| 5197 | RBD | BG9NUC-LC85 |
| 5198 | RBD | BG9NUC-LC86 |
| 5199 | 2P | BG9NUC-LC87 |
| 5200 | 2P | BG9NUC-LC88 |
| 5201 | 2P | BG9NUC-LC89 |
| 5202 | 2P | BG9NUC-LC90 |
| 5203 | 2P | BG9NUC-LC91 |
| 5204 | RBD | BG9NUC-LC92 |
| 5205 | 2P | BG9NUC-LC93 |
| 5206 | 2P | BG9NUC-LC94 |
| 5207 | RBD | BG9NUC-LC95 |
| 5208 | 2P | BG9NUC-LC96 |
| 5209 | 2P | BG9NUC-LC97 |
| 5210 | 2P | BG9NUC-LC98 |
| 5211 | 2P | BG9NUC-LC99 |
| 5212 | RBD | BG9NUC-LC100 |
| 5213 | RBD | BG9NUC-LC101 |
| 5214 | RBD | BG9NUC-LC102 |
| 5215 | 2P | BG9NUC-LC103 |
| 5216 | RBD | BG9NUC-LC104 |
| 5217 | 2P | BG9NUC-LC105 |
| 5218 | 2P | BG9NUC-LC106 |
| 5219 | RBD | BG9NUC-LC107 |
| 5220 | RBD | BG9NUC-LC108 |
| 5221 | RBD | BG9NUC-LC109 |
| 5222 | 2P | BG9NUC-LC110 |
| 5223 | 2P | BG9NUC-LC111 |
| 5224 | 2P | BG9NUC-LC112 |
| 5225 | RBD | BG9NUC-LC113 |
| 5226 | 2P | BG9NUC-LC114 |
| 5227 | 2P | BG9NUC-LC115 |
| 5228 | RBD | BG9NUC-LC116 |
| 5229 | RBD | BG9NUC-LC117 |
| 5230 | RBD | BG9NUC-LC118 |
| 5231 | 2P | BG9NUC-LC119 |
| 5232 | 2P | BG9NUC-LC120 |
| 5233 | RBD | BG9NUC-LC121 |
| 5234 | RBD | BG9NUC-LC122 |
| 5235 | 2P | BG9NUC-LC123 |
| 5236 | 2P | BG9NUC-LC124 |
| 5237 | 2P | BG9NUC-LC125 |
| 5238 | 2P | BG9NUC-LC126 |
| 5239 | RBD | BG9NUC-LC127 |
| 5240 | 2P | BG9NUC-LC128 |
| 5241 | RBD | BG9NUC-LC129 |
| 5242 | RBD | BG9NUC-LC130 |
| 5243 | RBD | BG9NUC-LC131 |
| 5244 | RBD | BG9NUC-LC132 |
| 5245 | 2P | BG9NUC-LC133 |
| 5246 | RBD | BG9NUC-LC134 |
| 5247 | 2P | BG9NUC-LC135 |
| 5248 | RBD | BG9NUC-LC136 |
| 5249 | 2P | BG9NUC-LC137 |
| 5250 | RBD | BG9NUC-LC138 |
| 5251 | 2P | BG9NUC-LC139 |
| 5252 | 2P | BG9NUC-LC140 |
| 5253 | 2P | BG9NUC-LC141 |
| 5254 | 2P | BG9NUC-LC142 |
| 5255 | 2P | BG9NUC-LC143 |
| 5256 | 2P | BG9NUC-LC144 |
| 5257 | 2P | BG9NUC-LC145 |
| 5258 | 2P | BG9NUC-LC146 |
| 5259 | RBD | BG9NUC-LC147 |
| 5260 | RBD | BG9NUC-LC148 |
| 5261 | RBD | BG9NUC-LC149 |
| 5262 | RBD | BG9NUC-LC150 |
| 5263 | 2P | BG9NUC-LC151 |
| 5264 | 2P | BG9NUC-LC152 |
| 5265 | RBD | BG9NUC-LC153 |
| 5266 | 2P | BG9NUC-LC154 |
| 5267 | 2P | BG9NUC-LC155 |
| 5268 | 2P | BG9NUC-LC156 |
| 5269 | 2P | BG9NUC-LC157 |
| 5270 | RBD | BG9NUC-LC158 |
| 5271 | 2P | BG9NUC-LC159 |
| 5272 | 2P | BG9NUC-LC160 |
| 5273 | 2P | BG9NUC-LC161 |
| 5274 | RBD | BG9NUC-LC162 |
| 5275 | 2P | BG9NUC-LC163 |
| 5276 | 2P | BG9NUC-LC164 |
| 5277 | RBD | BG9NUC-LC165 |
| 5278 | 2P | BG9NUC-LC166 |
| 5279 | RBD | BG9NUC-LC167 |
| 5280 | RBD | BG9NUC-LC168 |
| 5281 | RBD | BG9NUC-LC169 |
| 5282 | RBD | BG9NUC-LC170 |
| 5283 | RBD | BG9NUC-LC171 |
| 5284 | 2P | BG9NUC-LC172 |
| 5285 | RBD | BG9NUC-LC173 |
| 5286 | 2P | BG9NUC-LC174 |
| 5287 | RBD | BG9NUC-LC175 |
| 5288 | RBD | BG9NUC-LC176 |
| 5289 | 2P | BG9NUC-LC177 |
| 5290 | RBD | BG9NUC-LC178 |
| 5291 | 2P | BG9NUC-LC179 |
| 5292 | 2P | BG9NUC-LC180 |
| 5293 | 2P | BG9NUC-LC181 |
| 5294 | RBD | BG9NUC-LC182 |
| 5295 | 2P | BG9NUC-LC183 |
| 5296 | RBD | BG9NUC-LC184 |
| 5297 | 2P | BG9NUC-LC185 |
| 5298 | RBD | BG9NUC-LC186 |
| 5299 | 2P | BG9NUC-LC187 |
| 5300 | 2P | BG9NUC-LC188 |
| 5301 | 2P | BG9NUC-LC189 |
| 5302 | 2P | BG9NUC-LC190 |
| 5303 | 2P | BG9NUC-LC191 |
| 5304 | RBD | BG9NUC-LC192 |
| 5305 | 2P | BG9NUC-LC193 |
| 5306 | 2P | BG9NUC-LC194 |
| 5307 | RBD | BG9NUC-LC195 |
| 5308 | RBD | BG9NUC-LC196 |
| 5309 | 2P | BG9NUC-LC197 |
| 5310 | RBD | BG9NUC-LC198 |
| 5311 | 2P | BG9NUC-LC199 |
| 5312 | 2P | BG9NUC-LC200 |
| 5313 | RBD | BG9NUC-LC201 |
| 5314 | 2P | BG9NUC-LC202 |
| 5315 | 2P | BG9NUC-LC203 |
| 5316 | 2P | BG9NUC-LC204 |
| 5317 | 2P | BG9NUC-LC205 |
| 5318 | RBD | BG9NUC-LC206 |
| 5319 | RBD | BG9NUC-LC207 |
| 5320 | 2P | BG9NUC-LC208 |
| 5321 | RBD | BG9NUC-LC209 |
| 5322 | RBD | BG9NUC-LC210 |
| 5323 | 2P | BG9NUC-LC211 |
| 5324 | RBD | BG9NUC-LC212 |
| 5325 | RBD | BG9NUC-LC213 |
| 5326 | 2P | BG9NUC-LC214 |
| 5327 | 2P | BG9NUC-LC215 |
| 5328 | RBD | BG9NUC-LC216 |
| 5329 | 2P | BG9NUC-LC217 |
| 5330 | 2P | BG9NUC-LC218 |
| 5331 | RBD | BG9NUC-LC219 |
| 5332 | RBD | BG9NUC-LC220 |
| 5333 | 2P | BG9NUC-LC221 |
| 5334 | RBD | BG9NUC-LC222 |
| 5335 | 2P | BG9NUC-LC223 |
| 5336 | 2P | BG9NUC-LC224 |
| 5337 | RBD | BG9NUC-LC225 |
| 5338 | 2P | BG9NUC-LC226 |
| 5339 | RBD | BG9NUC-LC227 |
| 5340 | RBD | BG9NUC-LC228 |
| 5341 | 2P | BG9NUC-LC229 |
| 5342 | 2P | BG9NUC-LC230 |
| 5343 | 2P | BG9NUC-LC231 |
| 5344 | RBD | BG9NUC-LC232 |
| 5345 | RBD | BG9NUC-LC233 |
| 5346 | RBD | BG9NUC-LC234 |
| 5347 | RBD | BG10NUC-HC1 |
| 5348 | RBD | BG10NUC-HC2 |
| 5349 | RBD | BG10NUC-HC3 |
| 5350 | RBD | BG10NUC-HC4 |
| 5351 | RBD | BG10NUC-HC5 |
| 5352 | RBD | BG10NUC-HC6 |
| 5353 | RBD | BG10NUC-HC7 |
| 5354 | RBD | BG10NUC-HC8 |
| 5355 | RBD | BG10NUC-HC9 |
| 5356 | RBD | BG10NUC-HC10 |
| 5357 | RBD | BG10NUC-HC11 |
| 5358 | RBD | BG10NUC-HC12 |
| 5359 | RBD | BG10NUC-HC13 |
| 5360 | RBD | BG10NUC-HC14 |
| 5361 | RBD | BG10NUC-HC15 |
| 5362 | RBD | BG10NUC-HC16 |
| 5363 | RBD | BG10NUC-HC17 |
| 5364 | RBD | BG10NUC-HC18 |
| 5365 | RBD | BG10NUC-HC19 |
| 5366 | RBD | BG10NUC-HC20 |
| 5367 | RBD | BG10NUC-HC21 |
| 5368 | RBD | BG10NUC-HC22 |
| 5369 | RBD | BG10NUC-HC23 |
| 5370 | RBD | BG10NUC-HC24 |
| 5371 | RBD | BG10NUC-HC25 |
| 5372 | RBD | BG10NUC-HC26 |
| 5373 | RBD | BG10NUC-HC27 |
| 5374 | 2P | BG10NUC-HC28 |
| 5375 | 2P | BG10NUC-HC29 |
| 5376 | 2P | BG10NUC-HC30 |
| 5377 | 2P | BG10NUC-HC31 |
| 5378 | 2P | BG10NUC-HC32 |
| 5379 | 2P | BG10NUC-HC33 |
| 5380 | 2P | BG10NUC-HC34 |
| 5381 | 2P | BG10NUC-HC35 |
| 5382 | 2P | BG10NUC-HC36 |
| 5383 | RBD | BG10NUC-HC37 |
| 5384 | RBD | BG10NUC-HC38 |
| 5385 | RBD | BG10NUC-HC39 |
| 5386 | RBD | BG10NUC-HC40 |
| 5387 | RBD | BG10NUC-HC41 |
| 5388 | RBD | BG10NUC-HC42 |
| 5389 | RBD | BG10NUC-HC43 |
| 5390 | RBD | BG10NUC-HC44 |
| 5391 | RBD | BG10NUC-HC45 |
| 5392 | RBD | BG10NUC-HC46 |
| 5393 | RBD | BG10NUC-HC47 |
| 5394 | RBD | BG10NUC-HC48 |
| 5395 | RBD | BG10NUC-HC49 |
| 5396 | RBD | BG10NUC-HC50 |
| 5397 | RBD | BG10NUC-HC51 |
| 5398 | RBD | BG10NUC-HC52 |
| 5399 | RBD | BG10NUC-HC53 |
| 5400 | RBD | BG10NUC-HC54 |
| 5401 | 2P | BG10NUC-HC55 |
| 5402 | RBD | BG10NUC-HC56 |
| 5403 | RBD | BG10NUC-HC57 |
| 5404 | 2P | BG10NUC-HC58 |
| 5405 | RBD | BG10NUC-HC59 |
| 5406 | RBD | BG10NUC-HC60 |
| 5407 | RBD | BG10NUC-HC61 |
| 5408 | RBD | BG10NUC-HC62 |
| 5409 | RBD | BG10NUC-HC63 |
| 5410 | RBD | BG10NUC-HC64 |
| 5411 | RBD | BG10NUC-HC65 |
| 5412 | RBD | BG10NUC-HC66 |
| 5413 | 2P | BG10NUC-HC67 |
| 5414 | 2P | BG10NUC-HC68 |
| 5415 | 2P | BG10NUC-HC69 |
| 5416 | RBD | BG10NUC-HC70 |
| 5417 | RBD | BG10NUC-HC71 |
| 5418 | RBD | BG10NUC-HC72 |
| 5419 | RBD | BG10NUC-HC73 |
| 5420 | 2P | BG10NUC-HC74 |
| 5421 | 2P | BG10NUC-HC75 |
| 5422 | 2P | BG10NUC-HC76 |
| 5423 | 2P | BG10NUC-HC77 |
| 5424 | RBD | BG10NUC-HC78 |
| 5425 | RBD | BG10NUC-HC79 |
| 5426 | RBD | BG10NUC-HC80 |
| 5427 | RBD | BG10NUC-HC81 |
| 5428 | 2P | BG10NUC-HC82 |
| 5429 | RBD | BG10NUC-HC83 |
| 5430 | RBD | BG10NUC-HC84 |
| 5431 | RBD | BG10NUC-HC85 |
| 5432 | RBD | BG10NUC-HC86 |
| 5433 | RBD | BG10NUC-HC87 |
| 5434 | 2P | BG10NUC-HC88 |
| 5435 | 2P | BG10NUC-HC89 |
| 5436 | RBD | BG10NUC-HC90 |
| 5437 | RBD | BG10NUC-HC91 |
| 5438 | 2P | BG10NUC-HC92 |
| 5439 | RBD | BG10NUC-HC93 |
| 5440 | RBD | BG10NUC-HC94 |
| 5441 | 2P | BG10NUC-HC95 |
| 5442 | 2P | BG10NUC-HC96 |
| 5443 | 2P | BG10NUC-HC97 |
| 5444 | 2P | BG10NUC-HC98 |
| 5445 | 2P | BG10NUC-HC99 |
| 5446 | RBD | BG10NUC-HC100 |
| 5447 | RBD | BG10NUC-HC101 |
| 5448 | 2P | BG10NUC-HC102 |
| 5449 | 2P | BG10NUC-HC103 |
| 5450 | RBD | BG10NUC-HC104 |
| 5451 | 2P | BG10NUC-HC105 |
| 5452 | 2P | BG10NUC-HC106 |
| 5453 | 2P | BG10NUC-HC107 |
| 5454 | 2P | BG10NUC-HC108 |
| 5455 | 2P | BG10NUC-HC109 |
| 5456 | 2P | BG10NUC-HC110 |
| 5457 | RBD | BG10NUC-HC111 |
| 5458 | 2P | BG10NUC-HC112 |
| 5459 | 2P | BG10NUC-HC113 |
| 5460 | 2P | BG10NUC-HC114 |
| 5461 | RBD | BG10NUC-HC115 |
| 5462 | 2P | BG10NUC-HC116 |
| 5463 | 2P | BG10NUC-HC117 |
| 5464 | 2P | BG10NUC-HC118 |
| 5465 | 2P | BG10NUC-HC119 |
| 5466 | 2P | BG10NUC-HC120 |
| 5467 | 2P | BG10NUC-HC121 |
| 5468 | 2P | BG10NUC-HC122 |
| 5469 | 2P | BG10NUC-HC123 |
| 5470 | 2P | BG10NUC-HC124 |
| 5471 | 2P | BG10NUC-HC125 |
| 5472 | 2P | BG10NUC-HC126 |
| 5473 | RBD | BG10NUC-HC127 |
| 5474 | RBD | BG10NUC-HC128 |
| 5475 | RBD | BG10NUC-HC129 |
| 5476 | 2P | BG10NUC-HC130 |
| 5477 | 2P | BG10NUC-HC131 |
| 5478 | 2P | BG10NUC-HC132 |
| 5479 | 2P | BG10NUC-HC133 |
| 5480 | 2P | BG10NUC-HC134 |
| 5481 | 2P | BG10NUC-HC135 |
| 5482 | 2P | BG10NUC-HC136 |
| 5483 | 2P | BG10NUC-HC137 |
| 5484 | RBD | BG10NUC-HC138 |
| 5485 | 2P | BG10NUC-HC139 |
| 5486 | 2P | BG10NUC-HC140 |
| 5487 | RBD | BG10NUC-HC141 |
| 5488 | RBD | BG10NUC-HC142 |
| 5489 | 2P | BG10NUC-HC143 |
| 5490 | 2P | BG10NUC-HC144 |
| 5491 | 2P | BG10NUC-HC145 |
| 5492 | 2P | BG10NUC-HC146 |
| 5493 | 2P | BG10NUC-HC147 |
| 5494 | 2P | BG10NUC-HC148 |
| 5495 | 2P | BG10NUC-HC149 |
| 5496 | 2P | BG10NUC-HC150 |
| 5497 | RBD | BG10NUC-HC151 |
| 5498 | RBD | BG10NUC-HC152 |
| 5499 | RBD | BG10NUC-HC153 |
| 5500 | RBD | BG10NUC-HC154 |
| 5501 | 2P | BG10NUC-HC155 |
| 5502 | 2P | BG10NUC-HC156 |
| 5503 | 2P | BG10NUC-HC157 |
| 5504 | RBD | BG10NUC-HC158 |
| 5505 | 2P | BG10NUC-HC159 |
| 5506 | RBD | BG10NUC-HC160 |
| 5507 | 2P | BG10NUC-HC161 |
| 5508 | RBD | BG10NUC-HC162 |
| 5509 | RBD | BG10NUC-HC163 |
| 5510 | RBD | BG10NUC-HC164 |
| 5511 | 2P | BG10NUC-HC165 |
| 5512 | 2P | BG10NUC-HC166 |
| 5513 | 2P | BG10NUC-HC167 |
| 5514 | RBD | BG10NUC-HC168 |
| 5515 | RBD | BG10NUC-HC169 |
| 5516 | RBD | BG10NUC-HC170 |
| 5517 | 2P | BG10NUC-HC171 |
| 5518 | 2P | BG10NUC-HC172 |
| 5519 | 2P | BG10NUC-HC173 |
| 5520 | 2P | BG10NUC-HC174 |
| 5521 | 2F | BG10NUC-HC175 |
| 5522 | 2P | BG10NUC-HC176 |
| 5523 | RBD | BG10NUC-HC177 |
| 5524 | 2P | BG10NUC-HC178 |
| 5525 | RBD | BG10NUC-HC179 |
| 5526 | 2P | BG10NUC-HC180 |
| 5527 | 2P | BG10NUC-HC181 |
| 5528 | RBD | BG10NUC-HC182 |
| 5529 | 2P | BG10NUC-HC183 |
| 5530 | 2P | BG10NUC-HC184 |
| 5531 | 2P | BG10NUC-HC185 |
| 5532 | 2P | BG10NUC-HC186 |
| 5533 | 2P | BG10NUC-HC187 |
| 5534 | 2P | BG10NUC-HC188 |
| 5535 | 2P | BG10NUC-HC189 |
| 5536 | 2P | BG10NUC-HC190 |
| 5537 | 2P | BG10NUC-HC191 |
| 5538 | RBD | BG10NUC-HC192 |
| 5539 | 2P | BG10NUC-HC193 |
| 5540 | RBD | BG10NUC-HC194 |
| 5541 | 2P | BG10NUC-HC195 |
| 5542 | RBD | BG10NUC-HC196 |
| 5543 | 2P | BG10NUC-HC197 |
| 5544 | 2P | BG10NUC-HC198 |
| 5545 | RBD | BG10NUC-HC199 |
| 5546 | 2P | BG10NUC-HC200 |
| 5547 | RBD | BG10NUC-HC201 |
| 5548 | 2P | BG10NUC-HC202 |
| 5549 | RBD | BG10NUC-HC203 |
| 5550 | 2P | BG10NUC-HC204 |
| 5551 | RBD | BG10NUC-HC205 |
| 5552 | 2P | BG10NUC-HC206 |
| 5553 | RBD | BG10NUC-HC207 |
| 5554 | RBD | BG10NUC-HC208 |
| 5555 | 2P | BG10NUC-HC209 |
| 5556 | 2P | BG10NUC-HC210 |
| 5557 | 2P | BG10NUC-HC211 |
| 5558 | 2P | BG10NUC-HC212 |
| 5559 | 2P | BG10NUC-HC213 |
| 5560 | 2P | BG10NUC-HC214 |
| 5561 | 2P | BG10NUC-HC215 |
| 5562 | 2P | BG10NUC-HC216 |
| 5563 | 2P | BG10NUC-HC217 |
| 5564 | RBD | BG10NUC-HC218 |
| 5565 | 2P | BG10NUC-HC219 |
| 5566 | 2P | BG10NUC-HC220 |
| 5567 | 2F | BG10NUC-HC221 |
| 5568 | 2F | BG10NUC-HC222 |
| 5569 | RBD | BG10NUC-HC223 |
| 5570 | RBD | BG10NUC-HC224 |
| 5571 | RBD | BG10NUC-HC225 |
| 5572 | 2P | BG10NUC-HC226 |
| 5573 | 2F | BG10NUC-HC227 |
| 5574 | 2P | BG10NUC-HC228 |
| 5575 | 2P | BG10NUC-HC229 |
| 5576 | 2F | BG10NUC-HC230 |
| 5577 | 2P | BG10NUC-HC231 |
| 5578 | RBD | BG10NUC-HC232 |
| 5579 | RBD | BG10NUC-HC233 |
| 5580 | RBD | BG10NUC-HC234 |
| 5581 | RBD | BG10NUC-HC235 |
| 5582 | 2P | BG10NUC-HC236 |
| 5583 | RBD | BG10NUC-HC237 |
| 5584 | RBD | BG10NUC-HC238 |
| 5585 | 2P | BG10NUC-HC239 |
| 5586 | 2P | BG10NUC-HC240 |
| 5587 | 2P | BG10NUC-HC241 |
| 5588 | 2P | BG10NUC-HC242 |
| 5589 | RBD | BG10NUC-HC243 |
| 5590 | 2P | BG10NUC-HC244 |
| 5591 | RBD | BG10NUC-HC245 |
| 5592 | 2P | BG10NUC-HC246 |
| 5593 | 2P | BG10NUC-HC247 |
| 5594 | 2P | BG10NUC-HC248 |
| 5595 | 2P | BG10NUC-HC249 |
| 5596 | 2P | BG10NUC-HC250 |
| 5597 | 2P | BG10NUC-HC251 |
| 5598 | 2F | BG10NUC-HC252 |
| 5599 | 2P | BG10NUC-HC253 |
| 5600 | 2P | BG10NUC-HC254 |
| 5601 | 2P | BG10NUC-HC255 |
| 5602 | 2P | BG10NUC-HC256 |
| 5603 | 2P | BG10NUC-HC257 |
| 5604 | 2P | BG10NUC-HC258 |
| 5605 | RBD | BG10NUC-HC259 |
| 5606 | RBD | BG10NUC-HC260 |
| 5607 | 2P | BG10NUC-HC261 |
| 5608 | RBD | BG10NUC-HC262 |
| 5609 | 2P | BG10NUC-HC263 |
| 5610 | 2P | BG10NUC-HC264 |
| 5611 | RBD | BG10NUC-HC265 |
| 5612 | RBD | BG10NUC-HC266 |
| 5613 | RBD | BG10NUC-HC267 |
| 5614 | RBD | BG10NUC-HC268 |
| 5615 | 2P | BG10NUC-HC269 |
| 5616 | 2P | BG10NUC-HC270 |
| 5617 | RBD | BG10NUC-HC271 |
| 5618 | 2P | BG10NUC-HC272 |
| 5619 | 2P | BG10NUC-HC273 |
| 5620 | RBD | BG10NUC-HC274 |
| 5621 | 2P | BG10NUC-HC275 |
| 5622 | RBD | BG10NUC-HC276 |
| 5623 | RBD | BG10NUC-HC277 |
| 5624 | RBD | BG10NUC-HC278 |
| 5625 | 2P | BG10NUC-HC279 |
| 5626 | 2P | BG10NUC-HC280 |
| 5627 | 2P | BG10NUC-HC281 |
| 5628 | 2F | BG10NUC-HC282 |
| 5629 | 2F | BG10NUC-HC283 |
| 5630 | 2P | BG10NUC-HC284 |
| 5631 | 2P | BG10NUC-HC285 |
| 5632 | 2P | BG10NUC-HC286 |
| 5633 | RBD | BG10NUC-HC287 |
| 5634 | RBD | BG10NUC-HC288 |
| 5635 | RBD | BG10NUC-HC289 |
| 5636 | 2P | BG10NUC-HC290 |
| 5637 | 2P | BG10NUC-HC291 |
| 5638 | RBD | BG10NUC-HC292 |
| 5639 | 2P | BG10NUC-HC293 |
| 5640 | RBD | BG10NUC-HC294 |
| 5641 | RBD | BG10NUC-HC295 |
| 5642 | RBD | BG10NUC-HC296 |
| 5643 | RBD | BG10NUC-HC297 |
| 5644 | 2P | BG10NUC-HC298 |
| 5645 | RBD | BG10NUC-HC299 |
| 5646 | RBD | BG10NUC-HC300 |
| 5647 | RBD | BG10NUC-HC301 |
| 5648 | RBD | BG10NUC-HC302 |
| 5649 | RBD | BG10NUC-HC303 |
| 5650 | RBD | BG10NUC-HC304 |
| 5651 | 2P | BG10NUC-HC305 |
| 5652 | RBD | BG10NUC-HC306 |
| 5653 | RBD | BG10NUC-HC307 |
| 5654 | 2P | BG10NUC-HC308 |
| 5655 | 2P | BG10NUC-HC309 |
| 5656 | RBD | BG10NUC-HC310 |
| 5657 | 2P | BG10NUC-HC311 |
| 5658 | 2P | BG10NUC-HC312 |
| 5659 | 2P | BG10NUC-HC313 |
| 5660 | 2P | BG10NUC-HC314 |
| 5661 | 2P | BG10NUC-HC315 |
| 5662 | 2P | BG10NUC-HC316 |
| 5663 | 2F | BG10NUC-HC317 |
| 5664 | RBD | BG10NUC-HC318 |
| 5665 | 2P | BG10NUC-HC319 |
| 5666 | 2P | BG10NUC-HC320 |
| 5667 | 2P | BG10NUC-HC321 |
| 5668 | 2P | BG10NUC-HC322 |
| 5669 | 2P | BG10NUC-HC323 |
| 5670 | RBD | BG10NUC-HC324 |
| 5671 | RBD | BG10NUC-HC325 |
| 5672 | 2P | BG10NUC-HC326 |
| 5673 | 2P | BG10NUC-HC327 |
| 5674 | 2P | BG10NUC-HC328 |
| 5675 | 2P | BG10NUC-HC329 |
| 5676 | RBD | BG10NUC-HC330 |
| 5677 | 2P | BG10NUC-HC331 |
| 5678 | RBD | BG10NUC-HC332 |
| 5679 | RBD | BG10NUC-HC333 |
| 5680 | RBD | BG10NUC-HC334 |
| 5681 | 2P | BG10NUC-HC335 |
| 5682 | 2P | BG10NUC-HC336 |
| 5683 | 2P | BG10NUC-HC337 |
| 5684 | RBD | BG10NUC-HC338 |
| 5685 | 2P | BG10NUC-HC339 |
| 5686 | 2P | BG10NUC-HC340 |
| 5687 | 2P | BG10NUC-HC341 |
| 5688 | 2P | BG10NUC-HC342 |
| 5689 | RBD | BG10NUC-HC343 |
| 5690 | 2P | BG10NUC-HC344 |
| 5691 | RBD | BG10NUC-HC345 |
| 5692 | 2P | BG10NUC-HC346 |
| 5693 | 2P | BG10NUC-HC347 |
| 5694 | 2P | BG10NUC-HC348 |
| 5695 | 2P | BG10NUC-HC349 |
| 5696 | 2P | BG10NUC-HC350 |
| 5697 | 2P | BG10NUC-HC351 |
| 5698 | RBD | BG10NUC-HC352 |
| 5699 | 2P | BG10NUC-HC353 |
| 5700 | 2P | BG10NUC-HC354 |
| 5701 | 2F | BG10NUC-HC355 |
| 5702 | RBD | BG10NUC-HC356 |
| 5703 | RBD | BG10NUC-HC357 |
| 5704 | 2P | BG10NUC-HC358 |
| 5705 | RBD | BG10NUC-HC359 |
| 5706 | RBD | BG10NUC-HC360 |
| 5707 | 2P | BG10NUC-HC361 |
| 5708 | 2P | BG10NUC-HC362 |
| 5709 | 2P | BG10NUC-HC363 |
| 5710 | RBD | BG10NUC-HC364 |
| 5711 | 2P | BG10NUC-HC365 |
| 5712 | 2P | BG10NUC-HC366 |
| 5713 | RBD | BG10NUC-HC367 |
| 5714 | RBD | BG10NUC-HC368 |
| 5715 | 2P | BG10NUC-HC369 |
| 5716 | 2P | BG10NUC-HC370 |
| 5717 | 2P | BG10NUC-HC371 |
| 5718 | RBD | BG10NUC-HC372 |
| 5719 | RBD | BG10NUC-HC373 |
| 5720 | RBD | BG10NUC-HC374 |
| 5721 | 2P | BG10NUC-HC375 |
| 5722 | 2F | BG10NUC-HC376 |
| 5723 | 2P | BG10NUC-HC377 |
| 5724 | 2P | BG10NUC-HC378 |
| 5725 | 2P | BG10NUC-HC379 |
| 5726 | 2P | BG10NUC-HC380 |
| 5727 | 2P | BG10NUC-HC381 |
| 5728 | RBD | BG10NUC-HC382 |
| 5729 | RBD | BG10NUC-HC383 |
| 5730 | RBD | BG10NUC-HC384 |
| 5731 | RBD | BG10NUC-HC385 |
| 5732 | RBD | BG10NUC-HC386 |
| 5733 | 2P | BG10NUC-HC387 |
| 5734 | 2F | BG10NUC-HC388 |
| 5735 | RBD | BG10NUC-HC389 |
| 5736 | 2P | BG10NUC-HC390 |
| 5737 | 2P | BG10NUC-HC391 |
| 5738 | 2P | BG10NUC-HC392 |
| 5739 | 2P | BG10NUC-HC393 |
| 5740 | 2P | BG10NUC-HC394 |
| 5741 | 2P | BG10NUC-HC395 |
| 5742 | 2P | BG10NUC-HC396 |
| 5743 | RBD | BG10NUC-HC397 |
| 5744 | 2P | BG10NUC-HC398 |
| 5745 | 2P | BG10NUC-HC399 |
| 5746 | RBD | BG10NUC-HC400 |
| 5747 | 2P | BG10NUC-HC401 |
| 5748 | 2P | BG10NUC-HC402 |
| 5749 | 2P | BG10NUC-HC403 |
| 5750 | RBD | BG10NUC-HC404 |
| 5751 | RBD | BG10NUC-HC405 |
| 5752 | 2P | BG10NUC-HC406 |
| 5753 | 2P | BG10NUC-HC407 |
| 5754 | 2P | BG10NUC-HC408 |
| 5755 | 2P | BG10NUC-HC409 |
| 5756 | RBD | BG10NUC-HC410 |
| 5757 | 2P | BG10NUC-HC411 |
| 5758 | 2P | BG10NUC-HC412 |
| 5759 | 2P | BG10NUC-HC413 |
| 5760 | RBD | BG10NUC-HC414 |
| 5761 | 2P | BG10NUC-HC415 |
| 5762 | RBD | BG10NUC-HC416 |
| 5763 | 2P | BG10NUC-HC417 |
| 5764 | RBD | BG10NUC-HC418 |
| 5765 | RBD | BG10NUC-HC419 |
| 5766 | RBD | BG10NUC-HC420 |
| 5767 | 2P | BG10NUC-HC421 |
| 5768 | RBD | BG10NUC-HC422 |
| 5769 | RBD | BG10NUC-HC423 |
| 5770 | RBD | BG10NUC-HC424 |
| 5771 | RBD | BG10NUC-HC425 |
| 5772 | 2P | BG10NUC-HC426 |
| 5773 | RBD | BG10NUC-HC427 |
| 5774 | RBD | BG10NUC-LC1 |
| 5775 | RBD | BG10NUC-LC2 |
| 5776 | RBD | BG10NUC-LC3 |
| 5777 | RBD | BG10NUC-LC4 |
| 5778 | RBD | BG10NUC-LC5 |
| 5779 | RBD | BG10NUC-LC6 |
| 5780 | RBD | BG10NUC-LC7 |
| 5781 | RBD | BG10NUC-LC8 |
| 5782 | RBD | BG10NUC-LC9 |
| 5783 | RBD | BG10NUC-LC10 |
| 5784 | RBD | BG10NUC-LC11 |
| 5785 | RBD | BG10NUC-LC12 |
| 5786 | RBD | BG10NUC-LC13 |
| 5787 | RBD | BG10NUC-LC14 |
| 5788 | RBD | BG10NUC-LC15 |
| 5789 | RBD | BG10NUC-LC16 |
| 5790 | RBD | BG10NUC-LC17 |
| 5791 | RBD | BG10NUC-LC18 |
| 5792 | RBD | BG10NUC-LC19 |
| 5793 | RBD | BG10NUC-LC20 |
| 5794 | RBD | BG10NUC-LC21 |
| 5795 | RBD | BG10NUC-LC22 |
| 5796 | RBD | BG10NUC-LC23 |
| 5797 | RBD | BG10NUC-LC24 |
| 5798 | RBD | BG10NUC-LC25 |
| 5799 | RBD | BG10NUC-LC26 |
| 5800 | RBD | BG10NUC-LC27 |
| 5801 | 2P | BG10NUC-LC28 |
| 5802 | 2P | BG10NUC-LC29 |
| 5803 | 2P | BG10NUC-LC30 |
| 5804 | 2P | BG10NUC-LC31 |
| 5805 | 2P | BG10NUC-LC32 |
| 5806 | 2P | BG10NUC-LC33 |
| 5807 | 2P | BG10NUC-LC34 |
| 5808 | 2P | BG10NUC-LC35 |
| 5809 | 2P | BG10NUC-LC36 |
| 5810 | RBD | BG10NUC-LC37 |
| 5811 | RBD | BG10NUC-LC38 |
| 5812 | RBD | BG10NUC-LC39 |
| 5813 | RBD | BG10NUC-LC40 |
| 5814 | RBD | BG10NUC-LC41 |
| 5815 | RBD | BG10NUC-LC42 |
| 5816 | RBD | BG10NUC-LC43 |
| 5817 | RBD | BG10NUC-LC44 |
| 5818 | RBD | BG10NUC-LC45 |
| 5819 | RBD | BG10NUC-LC46 |
| 5820 | RBD | BG10NUC-LC47 |
| 5821 | RBD | BG10NUC-LC48 |
| 5822 | RBD | BG10NUC-LC49 |
| 5823 | RBD | BG10NUC-LC50 |
| 5824 | RBD | BG10NUC-LC51 |
| 5825 | RBD | BG10NUC-LC52 |
| 5826 | RBD | BG10NUC-LC53 |
| 5827 | RBD | BG10NUC-LC54 |
| 5828 | 2P | BG10NUC-LC55 |
| 5829 | RBD | BG10NUC-LC56 |
| 5830 | RBD | BG10NUC-LC57 |
| 5831 | 2P | BG10NUC-LC58 |
| 5832 | RBD | BG10NUC-LC59 |
| 5833 | RBD | BG10NUC-LC60 |
| 5834 | RBD | BG10NUC-LC61 |
| 5835 | RBD | BG10NUC-LC62 |
| 5836 | RBD | BG10NUC-LC63 |
| 5837 | RBD | BG10NUC-LC64 |
| 5838 | RBD | BG10NUC-LC65 |
| 5839 | RBD | BG10NUC-LC66 |
| 5840 | 2P | BG10NUC-LC67 |
| 5841 | 2F | BG10NUC-LC68 |
| 5842 | 2P | BG10NUC-LC69 |
| 5843 | RBD | BG10NUC-LC70 |
| 5844 | RBD | BG10NUC-LC71 |
| 5845 | RBD | BG10NUC-LC72 |
| 5846 | RBD | BG10NUC-LC73 |
| 5847 | 2P | BG10NUC-LC74 |
| 5848 | 2P | BG10NUC-LC75 |
| 5849 | 2P | BG10NUC-LC76 |
| 5850 | 2P | BG10NUC-LC77 |
| 5851 | RBD | BG10NUC-LC78 |
| 5852 | RBD | BG10NUC-LC79 |
| 5853 | RBD | BG10NUC-LC80 |
| 5854 | RBD | BG10NUC-LC81 |
| 5855 | 2P | BG10NUC-LC82 |
| 5856 | RBD | BG10NUC-LC83 |
| 5857 | RBD | BG10NUC-LC84 |
| 5858 | RBD | BG10NUC-LC85 |
| 5859 | RBD | BG10NUC-LC86 |
| 5860 | RBD | BG10NUC-LC87 |
| 5861 | 2P | BG10NUC-LC88 |
| 5862 | 2P | BG10NUC-LC89 |
| 5863 | RBD | BG10NUC-LC90 |
| 5864 | RBD | BG10NUC-LC91 |
| 5865 | 2P | BG10NUC-LC92 |
| 5866 | RBD | BG10NUC-LC93 |
| 5867 | RBD | BG10NUC-LC94 |
| 5868 | 2P | BG10NUC-LC95 |
| 5869 | 2P | BG10NUC-LC96 |
| 5870 | 2P | BG10NUC-LC97 |
| 5871 | 2P | BG10NUC-LC98 |
| 5872 | 2P | BG10NUC-LC99 |
| 5873 | RBD | BG10NUC-LC100 |
| 5874 | RBD | BG10NUC-LC101 |
| 5875 | 2P | BG10NUC-LC102 |
| 5876 | 2P | BG10NUC-LC103 |
| 5877 | RBD | BG10NUC-LC104 |
| 5878 | 2P | BG10NUC-LC105 |
| 5879 | 2P | BG10NUC-LC106 |
| 5880 | 2P | BG10NUC-LC107 |
| 5881 | 2P | BG10NUC-LC108 |
| 5882 | 2P | BG10NUC-LC109 |
| 5883 | 2P | BG10NUC-LC110 |
| 5884 | RBD | BG10NUC-LC111 |
| 5885 | 2P | BG10NUC-LC112 |
| 5886 | 2P | BG10NUC-LC113 |
| 5887 | 2P | BG10NUC-LC114 |
| 5888 | RBD | BG10NUC-LC115 |
| 5889 | 2P | BG10NUC-LC116 |
| 5890 | 2P | BG10NUC-LC117 |
| 5891 | 2P | BG10NUC-LC118 |
| 5892 | 2P | BG10NUC-LC119 |
| 5893 | 2P | BG10NUC-LC120 |
| 5894 | 2P | BG10NUC-LC121 |
| 5895 | 2P | BG10NUC-LC122 |
| 5896 | 2P | BG10NUC-LC123 |
| 5897 | 2P | BG10NUC-LC124 |
| 5898 | 2P | BG10NUC-LC125 |
| 5899 | 2P | BG10NUC-LC126 |
| 5900 | RBD | BG10NUC-LC127 |
| 5901 | RBD | BG10NUC-LC128 |
| 5902 | RBD | BG10NUC-LC129 |
| 5903 | 2P | BG10NUC-LC130 |
| 5904 | 2P | BG10NUC-LC131 |
| 5905 | 2P | BG10NUC-LC132 |
| 5906 | 2P | BG10NUC-LC133 |
| 5907 | 2P | BG10NUC-LC134 |
| 5908 | 2P | BG10NUC-LC135 |
| 5909 | 2P | BG10NUC-LC136 |
| 5910 | 2P | BG10NUC-LC137 |
| 5911 | RBD | BG10NUC-LC138 |
| 5912 | 2P | BG10NUC-LC139 |
| 5913 | 2P | BG10NUC-LC140 |
| 5914 | RBD | BG10NUC-LC141 |
| 5915 | RBD | BG10NUC-LC142 |
| 5916 | 2F | BG10NUC-LC143 |
| 5917 | 2P | BG10NUC-LC144 |
| 5918 | 2P | BG10NUC-LC145 |
| 5919 | 2P | BG10NUC-LC146 |
| 5920 | 2P | BG10NUC-LC147 |
| 5921 | 2P | BG10NUC-LC148 |
| 5922 | 2P | BG10NUC-LC149 |
| 5923 | 2P | BG10NUC-LC150 |
| 5924 | RBD | BG10NUC-LC151 |
| 5925 | RBD | BG10NUC-LC152 |
| 5926 | RBD | BG10NUC-LC153 |
| 5927 | RBD | BG10NUC-LC154 |
| 5928 | 2P | BG10NUC-LC155 |
| 5929 | 2P | BG10NUC-LC156 |
| 5930 | 2P | BG10NUC-LC157 |
| 5931 | RBD | BG10NUC-LC158 |
| 5932 | 2P | BG10NUC-LC159 |
| 5933 | RBD | BG10NUC-LC160 |
| 5934 | 2P | BG10NUC-LC161 |
| 5935 | RBD | BG10NUC-LC162 |
| 5936 | RBD | BG10NUC-LC163 |
| 5937 | RBD | BG10NUC-LC164 |
| 5938 | 2P | BG10NUC-LC165 |
| 5939 | 2P | BG10NUC-LC166 |
| 5940 | 2P | BG10NUC-LC167 |
| 5941 | RBD | BG10NUC-LC168 |
| 5942 | RBD | BG10NUC-LC169 |
| 5943 | RBD | BG10NUC-LC170 |
| 5944 | 2P | BG10NUC-LC171 |
| 5945 | 2P | BG10NUC-LC172 |
| 5946 | 2P | BG10NUC-LC173 |
| 5947 | 2P | BG10NUC-LC174 |
| 5948 | 2P | BG10NUC-LC175 |
| 5949 | 2P | BG10NUC-LC176 |
| 5950 | RBD | BG10NUC-LC177 |
| 5951 | 2P | BG10NUC-LC178 |
| 5952 | RBD | BG10NUC-LC179 |
| 5953 | 2P | BG10NUC-LC180 |
| 5954 | 2P | BG10NUC-LC181 |
| 5955 | RBD | BG10NUC-LC182 |
| 5956 | 2P | BG10NUC-LC183 |
| 5957 | 2P | BG10NUC-LC184 |
| 5958 | 2P | BG10NUC-LC185 |
| 5959 | 2P | BG10NUC-LC186 |
| 5960 | 2P | BG10NUC-LC187 |
| 5961 | 2P | BG10NUC-LC188 |
| 5962 | 2P | BG10NUC-LC189 |
| 5963 | 2P | BG10NUC-LC190 |
| 5964 | 2P | BG10NUC-LC191 |
| 5965 | RBD | BG10NUC-LC192 |
| 5966 | 2P | BG10NUC-LC193 |
| 5967 | RBD | BG10NUC-LC194 |
| 5968 | 2P | BG10NUC-LC195 |
| 5969 | RBD | BG10NUC-LC196 |
| 5970 | 2P | BG10NUC-LC197 |
| 5971 | 2P | BG10NUC-LC198 |
| 5972 | RBD | BG10NUC-LC199 |
| 5973 | 2P | BG10NUC-LC200 |
| 5974 | RBD | BG10NUC-LC201 |
| 5975 | 2P | BG10NUC-LC202 |
| 5976 | RBD | BG10NUC-LC203 |
| 5977 | 2P | BG10NUC-LC204 |
| 5978 | RBD | BG10NUC-LC205 |
| 5979 | 2P | BG10NUC-LC206 |
| 5980 | RBD | BG10NUC-LC207 |
| 5981 | RBD | BG10NUC-LC208 |
| 5982 | 2P | BG10NUC-LC209 |
| 5983 | 2P | BG10NUC-LC210 |
| 5984 | 2P | BG10NUC-LC211 |
| 5985 | 2P | BG10NUC-LC212 |
| 5986 | 2P | BG10NUC-LC213 |
| 5987 | 2P | BG10NUC-LC214 |
| 5988 | 2P | BG10NUC-LC215 |
| 5989 | 2P | BG10NUC-LC216 |
| 5990 | 2P | BG10NUC-LC217 |
| 5991 | RBD | BG10NUC-LC218 |
| 5992 | 2P | BG10NUC-LC219 |
| 5993 | 2P | BG10NUC-LC220 |
| 5994 | 2P | BG10NUC-LC221 |
| 5995 | 2P | BG10NUC-LC222 |
| 5996 | RBD | BG10NUC-LC223 |
| 5997 | RBD | BG10NUC-LC224 |
| 5998 | RBD | BG10NUC-LC225 |
| 5999 | 2P | BG10NUC-LC226 |
| 6000 | 2P | BG10NUC-LC227 |
| 6001 | 2P | BG10NUC-LC228 |
| 6002 | 2P | BG10NUC-LC229 |
| 6003 | 2P | BG10NUC-LC230 |
| 6004 | 2P | BG10NUC-LC231 |
| 6005 | RBD | BG10NUC-LC232 |
| 6006 | RBD | BG10NUC-LC233 |
| 6007 | RBD | BG10NUC-LC234 |
| 6008 | RBD | BG10NUC-LC235 |
| 6009 | 2P | BG10NUC-LC236 |
| 6010 | RBD | BG10NUC-LC237 |
| 6011 | RBD | BG10NUC-LC238 |
| 6012 | 2P | BG10NUC-LC239 |
| 6013 | 2P | BG10NUC-LC240 |
| 6014 | 2P | BG10NUC-LC241 |
| 6015 | 2P | BG10NUC-LC242 |
| 6016 | RBD | BG10NUC-LC243 |
| 6017 | 2P | BG10NUC-LC244 |
| 6018 | RBD | BG10NUC-LC245 |
| 6019 | 2P | BG10NUC-LC246 |
| 6020 | 2P | BG10NUC-LC247 |
| 6021 | 2P | BG10NUC-LC248 |
| 6022 | 2P | BG10NUC-LC249 |
| 6023 | 2P | BG10NUC-LC250 |
| 6024 | 2P | BG10NUC-LC251 |
| 6025 | 2P | BG10NUC-LC252 |
| 6026 | 2P | BG10NUC-LC253 |
| 6027 | 2P | BG10NUC-LC254 |
| 6028 | 2P | BG10NUC-LC255 |
| 6029 | 2P | BG10NUC-LC256 |
| 6030 | 2P | BG10NUC-LC257 |
| 6031 | 2P | BG10NUC-LC258 |
| 6032 | RBD | BG10NUC-LC259 |
| 6033 | RBD | BG10NUC-LC260 |
| 6034 | 2P | BG10NUC-LC261 |
| 6035 | RBD | BG10NUC-LC262 |
| 6036 | 2P | BG10NUC-LC263 |
| 6037 | 2P | BG10NUC-LC264 |
| 6038 | RBD | BG10NUC-LC265 |
| 6039 | RBD | BG10NUC-LC266 |
| 6040 | RBD | BG10NUC-LC267 |
| 6041 | RBD | BG10NUC-LC268 |
| 6042 | 2P | BG10NUC-LC269 |
| 6043 | 2P | BG10NUC-LC270 |
| 6044 | RBD | BG10NUC-LC271 |
| 6045 | 2P | BG10NUC-LC272 |
| 6046 | 2P | BG10NUC-LC273 |
| 6047 | RBD | BG10NUC-LC274 |
| 6048 | 2P | BG10NUC-LC275 |
| 6049 | RBD | BG10NUC-LC276 |
| 6050 | RBD | BG10NUC-LC277 |
| 6051 | RBD | BG10NUC-LC278 |
| 6052 | 2P | BG10NUC-LC279 |
| 6053 | 2P | BG10NUC-LC280 |
| 6054 | 2P | BG10NUC-LC281 |
| 6055 | 2P | BG10NUC-LC282 |
| 6056 | 2P | BG10NUC-LC283 |
| 6057 | 2P | BG10NUC-LC284 |
| 6058 | 2P | BG10NUC-LC285 |
| 6059 | 2P | BG10NUC-LC286 |
| 6060 | RBD | BG10NUC-LC287 |
| 6061 | RBD | BG10NUC-LC288 |
| 6062 | RBD | BG10NUC-LC289 |
| 6063 | 2P | BG10NUC-LC290 |
| 6064 | 2P | BG10NUC-LC291 |
| 6065 | RBD | BG10NUC-LC292 |
| 6066 | 2P | BG10NUC-LC293 |
| 6067 | RBD | BG10NUC-LC294 |
| 6068 | RBD | BG10NUC-LC295 |
| 6069 | RBD | BG10NUC-LC296 |
| 6070 | RBD | BG10NUC-LC297 |
| 6071 | 2P | BG10NUC-LC298 |
| 6072 | RBD | BG10NUC-LC299 |
| 6073 | RBD | BG10NUC-LC300 |
| 6074 | RBD | BG10NUC-LC301 |
| 6075 | RBD | BG10NUC-LC302 |
| 6076 | RBD | BG10NUC-LC303 |
| 6077 | RBD | BG10NUC-LC304 |
| 6078 | 2P | BG10NUC-LC305 |
| 6079 | RBD | BG10NUC-LC306 |
| 6080 | RBD | BG10NUC-LC307 |
| 6081 | 2P | BG10NUC-LC308 |
| 6082 | 2P | BG10NUC-LC309 |
| 6083 | RBD | BG10NUC-LC310 |
| 6084 | 2P | BG10NUC-LC311 |
| 6085 | 2P | BG10NUC-LC312 |
| 6086 | 2P | BG10NUC-LC313 |
| 6087 | 2P | BG10NUC-LC314 |
| 6088 | 2P | BG10NUC-LC315 |
| 6089 | 2P | BG10NUC-LC316 |
| 6090 | 2P | BG10NUC-LC317 |
| 6091 | RBD | BG10NUC-LC318 |
| 6092 | 2P | BG10NUC-LC319 |
| 6093 | 2P | BG10NUC-LC320 |
| 6094 | 2P | BG10NUC-LC321 |
| 6095 | 2P | BG10NUC-LC322 |
| 6096 | 2P | BG10NUC-LC323 |
| 6097 | RBD | BG10NUC-LC324 |
| 6098 | RBD | BG10NUC-LC325 |
| 6099 | 2P | BG10NUC-LC326 |
| 6100 | 2P | BG10NUC-LC327 |
| 6101 | 2P | BG10NUC-LC328 |
| 6102 | 2P | BG10NUC-LC329 |
| 6103 | RBD | BG10NUC-LC330 |
| 6104 | 2P | BG10NUC-LC331 |
| 6105 | RBD | BG10NUC-LC332 |
| 6106 | RBD | BG10NUC-LC333 |
| 6107 | RBD | BG10NUC-LC334 |
| 6108 | 2P | BG10NUC-LC335 |
| 6109 | 2P | BG10NUC-LC336 |
| 6110 | 2P | BG10NUC-LC337 |
| 6111 | RBD | BG10NUC-LC338 |
| 6112 | 2P | BG10NUC-LC339 |
| 6113 | 2P | BG10NUC-LC340 |
| 6114 | 2P | BG10NUC-LC341 |
| 6115 | 2P | BG10NUC-LC342 |
| 6116 | RBD | BG10NUC-LC343 |
| 6117 | 2P | BG10NUC-LC344 |
| 6118 | RBD | BG10NUC-LC345 |
| 6119 | 2P | BG10NUC-LC346 |
| 6120 | 2P | BG10NUC-LC347 |
| 6121 | 2P | BG10NUC-LC348 |
| 6122 | 2P | BG10NUC-LC349 |
| 6123 | 2P | BG10NUC-LC350 |
| 6124 | 2P | BG10NUC-LC351 |
| 6125 | RBD | BG10NUC-LC352 |
| 6126 | 2P | BG10NUC-LC353 |
| 6127 | 2P | BG10NUC-LC354 |
| 6128 | 2P | BG10NUC-LC355 |
| 6129 | RBD | BG10NUC-LC356 |
| 6130 | RBD | BG10NUC-LC357 |
| 6131 | 2P | BG10NUC-LC358 |
| 6132 | RBD | BG10NUC-LC359 |
| 6133 | RBD | BG10NUC-LC360 |
| 6134 | 2P | BG10NUC-LC361 |
| 6135 | 2P | BG10NUC-LC362 |
| 6136 | 2P | BG10NUC-LC363 |
| 6137 | RBD | BG10NUC-LC364 |
| 6138 | 2P | BG10NUC-LC365 |
| 6139 | 2P | BG10NUC-LC366 |
| 6140 | RBD | BG10NUC-LC367 |
| 6141 | RBD | BG10NUC-LC368 |
| 6142 | 2P | BG10NUC-LC369 |
| 6143 | 2P | BG10NUC-LC370 |
| 6144 | 2F | BG10NUC-LC371 |
| 6145 | RBD | BG10NUC-LC372 |
| 6146 | RBD | BG10NUC-LC373 |
| 6147 | RBD | BG10NUC-LC374 |
| 6148 | 2P | BG10NUC-LC375 |
| 6149 | 2P | BG10NUC-LC376 |
| 6150 | 2P | BG10NUC-LC377 |
| 6151 | 2P | BG10NUC-LC378 |
| 6152 | 2P | BG10NUC-LC379 |
| 6153 | 2P | BG10NUC-LC380 |
| 6154 | 2P | BG10NUC-LC381 |
| 6155 | RBD | BG10NUC-LC382 |
| 6156 | RBD | BG10NUC-LC383 |
| 6157 | RBD | BG10NUC-LC384 |
| 6158 | RBD | BG10NUC-LC385 |
| 6159 | RBD | BG10NUC-LC386 |
| 6160 | 2P | BG10NUC-LC387 |
| 6161 | 2P | BG10NUC-LC388 |
| 6162 | RBD | BG10NUC-LC389 |
| 6163 | 2P | BG10NUC-LC390 |
| 6164 | 2P | BG10NUC-LC391 |
| 6165 | 2P | BG10NUC-LC392 |
| 6166 | 2P | BG10NUC-LC393 |
| 6167 | 2P | BG10NUC-LC394 |
| 6168 | 2P | BG10NUC-LC395 |
| 6169 | 2P | BG10NUC-LC396 |
| 6170 | RBD | BG10NUC-LC397 |
| 6171 | 2P | BG10NUC-LC398 |
| 6172 | 2P | BG10NUC-LC399 |
| 6173 | RBD | BG10NUC-LC400 |
| 6174 | 2P | BG10NUC-LC401 |
| 6175 | 2P | BG10NUC-LC402 |
| 6176 | 2F | BG10NUC-LC403 |
| 6177 | RBD | BG10NUC-LC404 |
| 6178 | RBD | BG10NUC-LC405 |
| 6179 | 2P | BG10NUC-LC406 |
| 6180 | 2P | BG10NUC-LC407 |
| 6181 | 2P | BG10NUC-LC408 |
| 6182 | 2P | BG10NUC-LC409 |
| 6183 | RBD | BG10NUC-LC410 |
| 6184 | 2P | BG10NUC-LC411 |
| 6185 | 2P | BG10NUC-LC412 |
| 6186 | 2P | BG10NUC-LC413 |
| 6187 | RBD | BG10NUC-LC414 |
| 6188 | 2P | BG10NUC-LC415 |
| 6189 | RBD | BG10NUC-LC416 |
| 6190 | 2P | BG10NUC-LC417 |
| 6191 | RBD | BG10NUC-LC418 |
| 6192 | RBD | BG10NUC-LC419 |
| 6193 | RBD | BG10NUC-LC420 |
| 6194 | 2P | BG10NUC-LC421 |
| 6195 | RBD | BG10NUC-LC422 |
| 6196 | RBD | BG10NUC-LC423 |
| 6197 | RBD | BG10NUC-LC424 |
| 6198 | RBD | BG10NUC-LC425 |
| 6199 | 2P | BG10NUC-LC426 |
| 6200 | RBD | BG10NUC-LC427 |
| 6201 | RBD | BG13NUC-HC1 |
| 6202 | RBD | BG13NUC-HC2 |
| 6203 | RBD | BG13NUC-HC3 |
| 6204 | RBD | BG13NUC-HC4 |
| 6205 | RBD | BG13NUC-HC5 |
| 6206 | RBD | BG13NUC-HC6 |
| 6207 | RBD | BG13NUC-HC7 |
| 6208 | RBD | BG13NUC-HC8 |
| 6209 | RBD | BG13NUC-HC9 |
| 6210 | RBD | BG13NUC-HC10 |
| 6211 | RBD | BG13NUC-HC11 |
| 6212 | 2P | BG13NUC-HC12 |
| 6213 | 2P | BG13NUC-HC13 |
| 6214 | 2P | BG13NUC-HC14 |
| 6215 | 2P | BG13NUC-HC15 |
| 6216 | 2P | BG13NUC-HC16 |
| 6217 | 2P | BG13NUC-HC17 |
| 6218 | 2F | BG13NUC-HC18 |
| 6219 | 2P | BG13NUC-HC19 |
| 6220 | RBD | BG13NUC-HC20 |
| 6221 | RBD | BG13NUC-HC21 |
| 6222 | RBD | BG13NUC-HC22 |
| 6223 | RBD | BG13NUC-HC23 |
| 6224 | RBD | BG13NUC-HC24 |
| 6225 | RBD | BG13NUC-HC25 |
| 6226 | RBD | BG13NUC-HC26 |
| 6227 | 2P | BG13NUC-HC27 |
| 6228 | 2F | BG13NUC-HC28 |
| 6229 | 2F | BG13NUC-HC29 |
| 6230 | 2P | BG13NUC-HC30 |
| 6231 | 2P | BG13NUC-HC31 |
| 6232 | 2P | BG13NUC-HC32 |
| 6233 | 2P | BG13NUC-HC33 |
| 6234 | 2P | BG13NUC-HC34 |
| 6235 | RBD | BG13NUC-HC35 |
| 6236 | RBD | BG13NUC-HC36 |
| 6237 | RBD | BG13NUC-HC37 |
| 6238 | RBD | BG13NUC-HC38 |
| 6239 | RBD | BG13NUC-HC39 |
| 6240 | RBD | BG13NUC-HC40 |
| 6241 | RBD | BG13NUC-HC41 |
| 6242 | 2P | BG13NUC-HC42 |
| 6243 | 2P | BG13NUC-HC43 |
| 6244 | 2P | BG13NUC-HC44 |
| 6245 | 2P | BG13NUC-HC45 |
| 6246 | 2P | BG13NUC-HC46 |
| 6247 | RBD | BG13NUC-HC47 |
| 6248 | RBD | BG13NUC-HC48 |
| 6249 | RBD | BG13NUC-HC49 |
| 6250 | RBD | BG13NUC-HC50 |
| 6251 | RBD | BG13NUC-HC51 |
| 6252 | RBD | BG13NUC-HC52 |
| 6253 | RBD | BG13NUC-HC53 |
| 6254 | RBD | BG13NUC-HC54 |
| 6255 | RBD | BG13NUC-HC55 |
| 6256 | RBD | BG13NUC-HC56 |
| 6257 | 2P | BG13NUC-HC57 |
| 6258 | 2P | BG13NUC-HC58 |
| 6259 | RBD | BG13NUC-HC59 |
| 6260 | RBD | BG13NUC-HC60 |
| 6261 | RBD | BG13NUC-HC61 |
| 6262 | RBD | BG13NUC-HC62 |
| 6263 | RBD | BG13NUC-HC63 |
| 6264 | RBD | BG13NUC-HC64 |
| 6265 | RBD | BG13NUC-HC65 |
| 6266 | RBD | BG13NUC-HC66 |
| 6267 | 2P | BG13NUC-HC67 |
| 6268 | 2P | BG13NUC-HC68 |
| 6269 | RBD | BG13NUC-HC69 |
| 6270 | RBD | BG13NUC-HC70 |
| 6271 | RBD | BG13NUC-HC71 |
| 6272 | RBD | BG13NUC-HC72 |
| 6273 | RBD | BG13NUC-HC73 |
| 6274 | 2P | BG13NUC-HC74 |
| 6275 | 2P | BG13NUC-HC75 |
| 6276 | 2F | BG13NUC-HC76 |
| 6277 | 2P | BG13NUC-HC77 |
| 6278 | 2F | BG13NUC-HC78 |
| 6279 | RBD | BG13NUC-HC79 |
| 6280 | RBD | BG13NUC-HC80 |
| 6281 | RBD | BG13NUC-HC81 |
| 6282 | RBD | BG13NUC-HC82 |
| 6283 | RBD | BG13NUC-HC83 |
| 6284 | 2F | BG13NUC-HC84 |
| 6285 | 2P | BG13NUC-HC85 |
| 6286 | 2F | BG13NUC-HC86 |
| 6287 | RBD | BG13NUC-HC87 |
| 6288 | RBD | BG13NUC-HC88 |
| 6289 | RBD | BG13NUC-HC89 |
| 6290 | RBD | BG13NUC-HC90 |
| 6291 | RBD | BG13NUC-HC91 |
| 6292 | 2P | BG13NUC-HC92 |
| 6293 | 2P | BG13NUC-HC93 |
| 6294 | 2P | BG13NUC-HC94 |
| 6295 | RBD | BG13NUC-HC95 |
| 6296 | RBD | BG13NUC-HC96 |
| 6297 | RBD | BG13NUC-HC97 |
| 6298 | RBD | BG13NUC-HC98 |
| 6299 | RBD | BG13NUC-HC99 |
| 6300 | 2P | BG13NUC-HC100 |
| 6301 | 2P | BG13NUC-HC101 |
| 6302 | RBD | BG13NUC-HC102 |
| 6303 | RBD | BG13NUC-HC103 |
| 6304 | 2P | BG13NUC-HC104 |
| 6305 | 2P | BG13NUC-HC105 |
| 6306 | RBD | BG13NUC-HC106 |
| 6307 | RBD | BG13NUC-HC107 |
| 6308 | RBD | BG13NUC-HC108 |
| 6309 | RBD | BG13NUC-HC109 |
| 6310 | RBD | BG13NUC-HC110 |
| 6311 | 2P | BG13NUC-HC111 |
| 6312 | 2P | BG13NUC-HC112 |
| 6313 | RBD | BG13NUC-HC113 |
| 6314 | RBD | BG13NUC-HC114 |
| 6315 | RBD | BG13NUC-HC115 |
| 6316 | RBD | BG13NUC-HC116 |
| 6317 | RBD | BG13NUC-HC117 |
| 6318 | RBD | BG13NUC-HC118 |
| 6319 | RBD | BG13NUC-HC119 |
| 6320 | 2P | BG13NUC-HC120 |
| 6321 | 2P | BG13NUC-HC121 |
| 6322 | 2P | BG13NUC-HC122 |
| 6323 | RBD | BG13NUC-HC123 |
| 6324 | RBD | BG13NUC-HC124 |
| 6325 | RBD | BG13NUC-HC125 |
| 6326 | 2P | BG13NUC-HC126 |
| 6327 | 2P | BG13NUC-HC127 |
| 6328 | 2P | BG13NUC-HC128 |
| 6329 | 2P | BG13NUC-HC129 |
| 6330 | 2P | BG13NUC-HC130 |
| 6331 | 2P | BG13NUC-HC131 |
| 6332 | 2P | BG13NUC-HC132 |
| 6333 | RBD | BG13NUC-HC133 |
| 6334 | RBD | BG13NUC-HC134 |
| 6335 | 2P | BG13NUC-HC135 |
| 6336 | 2P | BG13NUC-HC136 |
| 6337 | RBD | BG13NUC-HC137 |
| 6338 | RBD | BG13NUC-HC138 |
| 6339 | RBD | BG13NUC-HC139 |
| 6340 | 2P | BG13NUC-HC140 |
| 6341 | RBD | BG13NUC-HC141 |
| 6342 | RBD | BG13NUC-HC142 |
| 6343 | RBD | BG13NUC-HC143 |
| 6344 | 2P | BG13NUC-HC144 |
| 6345 | RBD | BG13NUC-HC145 |
| 6346 | RBD | BG13NUC-HC146 |
| 6347 | RBD | BG13NUC-HC147 |
| 6348 | 2P | BG13NUC-HC148 |
| 6349 | RBD | BG13NUC-HC149 |
| 6350 | 2P | BG13NUC-HC150 |
| 6351 | 2P | BG13NUC-HC151 |
| 6352 | 2P | BG13NUC-HC152 |
| 6353 | RBD | BG13NUC-HC153 |
| 6354 | RBD | BG13NUC-HC154 |
| 6355 | 2P | BG13NUC-HC155 |
| 6356 | 2P | BG13NUC-HC156 |
| 6357 | RBD | BG13NUC-HC157 |
| 6358 | RBD | BG13NUC-HC158 |
| 6359 | RBD | BG13NUC-HC159 |
| 6360 | 2P | BG13NUC-HC160 |
| 6361 | 2P | BG13NUC-HC161 |
| 6362 | 2P | BG13NUC-HC162 |
| 6363 | RBD | BG13NUC-HC163 |
| 6364 | 2P | BG13NUC-HC164 |
| 6365 | RBD | BG13NUC-HC165 |
| 6366 | RBD | BG13NUC-HC166 |
| 6367 | RBD | BG13NUC-HC167 |
| 6368 | 2P | BG13NUC-HC168 |
| 6369 | RBD | BG13NUC-HC169 |
| 6370 | 2P | BG13NUC-HC170 |
| 6371 | RBD | BG13NUC-HC171 |
| 6372 | RBD | BG13NUC-HC172 |
| 6373 | RBD | BG13NUC-HC173 |
| 6374 | RBD | BG13NUC-HC174 |
| 6375 | RBD | BG13NUC-HC175 |
| 6376 | RBD | BG13NUC-HC176 |
| 6377 | RBD | BG13NUC-HC177 |
| 6378 | 2P | BG13NUC-HC178 |
| 6379 | 2P | BG13NUC-HC179 |
| 6380 | 2P | BG13NUC-HC180 |
| 6381 | 2P | BG13NUC-HC181 |
| 6382 | 2P | BG13NUC-HC182 |
| 6383 | 2P | BG13NUC-HC183 |
| 6384 | RBD | BG13NUC-HC184 |
| 6385 | RBD | BG13NUC-HC185 |
| 6386 | RBD | BG13NUC-HC186 |
| 6387 | RBD | BG13NUC-HC187 |
| 6388 | 2P | BG13NUC-HC188 |
| 6389 | 2P | BG13NUC-HC189 |
| 6390 | 2P | BG13NUC-HC190 |
| 6391 | RBD | BG13NUC-HC191 |
| 6392 | 2P | BG13NUC-HC192 |
| 6393 | 2P | BG13NUC-HC193 |
| 6394 | 2P | BG13NUC-HC194 |
| 6395 | RBD | BG13NUC-HC195 |
| 6396 | 2P | BG13NUC-HC196 |
| 6397 | RBD | BG13NUC-HC197 |
| 6398 | 2P | BG13NUC-HC198 |
| 6399 | RBD | BG13NUC-HC199 |
| 6400 | RBD | BG13NUC-HC200 |
| 6401 | RBD | BG13NUC-HC201 |
| 6402 | 2P | BG13NUC-HC202 |
| 6403 | 2P | BG13NUC-HC203 |
| 6404 | 2P | BG13NUC-HC204 |
| 6405 | 2P | BG13NUC-HC205 |
| 6406 | 2P | BG13NUC-HC206 |
| 6407 | RBD | BG13NUC-HC207 |
| 6408 | 2P | BG13NUC-HC208 |
| 6409 | RBD | BG13NUC-HC209 |
| 6410 | 2P | BG13NUC-HC210 |
| 6411 | RBD | BG13NUC-HC211 |
| 6412 | 2P | BG13NUC-HC212 |
| 6413 | RBD | BG13NUC-HC213 |
| 6414 | 2P | BG13NUC-HC214 |
| 6415 | RBD | BG13NUC-HC215 |
| 6416 | RBD | BG13NUC-HC216 |
| 6417 | RBD | BG13NUC-HC217 |
| 6418 | 2P | BG13NUC-HC218 |
| 6419 | RBD | BG13NUC-HC219 |
| 6420 | RBD | BG13NUC-HC220 |
| 6421 | 2P | BG13NUC-HC221 |
| 6422 | 2P | BG13NUC-HC222 |
| 6423 | RBD | BG13NUC-HC223 |
| 6424 | 2P | BG13NUC-HC224 |
| 6425 | RBD | BG13NUC-HC225 |
| 6426 | 2P | BG13NUC-HC226 |
| 6427 | 2P | BG13NUC-HC227 |
| 6428 | 2P | BG13NUC-HC228 |
| 6429 | RBD | BG13NUC-HC229 |
| 6430 | RBD | BG13NUC-HC230 |
| 6431 | RBD | BG13NUC-HC231 |
| 6432 | 2P | BG13NUC-HC232 |
| 6433 | 2P | BG13NUC-HC233 |
| 6434 | 2P | BG13NUC-HC234 |
| 6435 | RBD | BG13NUC-HC235 |
| 6436 | 2P | BG13NUC-HC236 |
| 6437 | 2P | BG13NUC-HC237 |
| 6438 | 2P | BG13NUC-HC238 |
| 6439 | RBD | BG13NUC-HC239 |
| 6440 | RBD | BG13NUC-HC240 |
| 6441 | RBD | BG13NUC-HC241 |
| 6442 | RBD | BG13NUC-HC242 |
| 6443 | RBD | BG13NUC-HC243 |
| 6444 | RBD | BG13NUC-HC244 |
| 6445 | RBD | BG13NUC-HC245 |
| 6446 | 2P | BG13NUC-HC246 |
| 6447 | RBD | BG13NUC-HC247 |
| 6448 | 2P | BG13NUC-HC248 |
| 6449 | RBD | BG13NUC-HC249 |
| 6450 | 2P | BG13NUC-HC250 |
| 6451 | 2P | BG13NUC-HC251 |
| 6452 | 2P | BG13NUC-HC252 |
| 6453 | RBD | BG13NUC-HC253 |
| 6454 | 2P | BG13NUC-HC254 |
| 6455 | RBD | BG13NUC-HC255 |
| 6456 | 2P | BG13NUC-HC256 |
| 6457 | RBD | BG13NUC-HC257 |
| 6458 | RBD | BG13NUC-HC258 |
| 6459 | 2P | BG13NUC-HC259 |
| 6460 | 2P | BG13NUC-HC260 |
| 6461 | 2P | BG13NUC-HC261 |
| 6462 | 2P | BG13NUC-HC262 |
| 6463 | RBD | BG13NUC-HC263 |
| 6464 | RBD | BG13NUC-HC264 |
| 6465 | RBD | BG13NUC-HC265 |
| 6466 | 2P | BG13NUC-HC266 |
| 6467 | RBD | BG13NUC-HC267 |
| 6468 | 2P | BG13NUC-HC268 |
| 6469 | RBD | BG13NUC-HC269 |
| 6470 | 2P | BG13NUC-HC270 |
| 6471 | 2P | BG13NUC-HC271 |
| 6472 | 2P | BG13NUC-HC272 |
| 6473 | 2P | BG13NUC-HC273 |
| 6474 | 2P | BG13NUC-HC274 |
| 6475 | 2P | BG13NUC-HC275 |
| 6476 | 2P | BG13NUC-HC276 |
| 6477 | RBD | BG13NUC-HC277 |
| 6478 | 2P | BG13NUC-HC278 |
| 6479 | 2P | BG13NUC-HC279 |
| 6480 | RBD | BG13NUC-HC280 |
| 6481 | RBD | BG13NUC-HC281 |
| 6482 | RBD | BG13NUC-HC282 |
| 6483 | RBD | BG13NUC-HC283 |
| 6484 | RBD | BG13NUC-HC284 |
| 6485 | RBD | BG13NUC-HC285 |
| 6486 | 2P | BG13NUC-HC286 |
| 6487 | 2P | BG13NUC-HC287 |
| 6488 | RBD | BG13NUC-HC288 |
| 6489 | 2P | BG13NUC-HC289 |
| 6490 | 2P | BG13NUC-HC290 |
| 6491 | 2P | BG13NUC-HC291 |
| 6492 | RBD | BG13NUC-HC292 |
| 6493 | 2P | BG13NUC-HC293 |
| 6494 | RBD | BG13NUC-HC294 |
| 6495 | RBD | BG13NUC-HC295 |
| 6496 | RBD | BG13NUC-HC296 |
| 6497 | 2P | BG13NUC-HC297 |
| 6498 | 2P | BG13NUC-HC298 |
| 6499 | RBD | BG13NUC-HC299 |
| 6500 | 2F | BG13NUC-HC300 |
| 6501 | RBD | BG13NUC-HC301 |
| 6502 | 2P | BG13NUC-HC302 |
| 6503 | RBD | BG13NUC-HC303 |
| 6504 | 2P | BG13NUC-HC304 |
| 6505 | RBD | BG13NUC-HC305 |
| 6506 | 2P | BG13NUC-HC306 |
| 6507 | 2P | BG13NUC-HC307 |
| 6508 | RBD | BG13NUC-HC308 |
| 6509 | RBD | BG13NUC-HC309 |
| 6510 | 2P | BG13NUC-HC310 |
| 6511 | RBD | BG13NUC-HC311 |
| 6512 | 2P | BG13NUC-HC312 |
| 6513 | 2P | BG13NUC-HC313 |
| 6514 | RBD | BG13NUC-HC314 |
| 6515 | 2P | BG13NUC-HC315 |
| 6516 | 2P | BG13NUC-HC316 |
| 6517 | RBD | BG13NUC-HC317 |
| 6518 | 2P | BG13NUC-HC318 |
| 6519 | RBD | BG13NUC-HC319 |
| 6520 | RBD | BG13NUC-HC320 |
| 6521 | 2P | BG13NUC-HC321 |
| 6522 | 2P | BG13NUC-HC322 |
| 6523 | 2P | BG13NUC-HC323 |
| 6524 | RBD | BG13NUC-HC324 |
| 6525 | RBD | BG13NUC-HC325 |
| 6526 | RBD | BG13NUC-HC326 |
| 6527 | 2P | BG13NUC-HC327 |
| 6528 | 2P | BG13NUC-HC328 |
| 6529 | 2P | BG13NUC-HC329 |
| 6530 | 2P | BG13NUC-HC330 |
| 6531 | RBD | BG13NUC-HC331 |
| 6532 | 2P | BG13NUC-HC332 |
| 6533 | RBD | BG13NUC-HC333 |
| 6534 | RBD | BG13NUC-HC334 |
| 6535 | 2P | BG13NUC-HC335 |
| 6536 | RBD | BG13NUC-HC336 |
| 6537 | RBD | BG13NUC-HC337 |
| 6538 | RBD | BG13NUC-HC338 |
| 6539 | RBD | BG13NUC-HC339 |
| 6540 | RBD | BG13NUC-HC340 |
| 6541 | 2P | BG13NUC-HC341 |
| 6542 | 2P | BG13NUC-HC342 |
| 6543 | 2P | BG13NUC-HC343 |
| 6544 | RBD | BG13NUC-HC344 |
| 6545 | 2P | BG13NUC-HC345 |
| 6546 | 2P | BG13NUC-HC346 |
| 6547 | RBD | BG13NUC-HC347 |
| 6548 | 2P | BG13NUC-HC348 |
| 6549 | 2P | BG13NUC-HC349 |
| 6550 | 2P | BG13NUC-HC350 |
| 6551 | 2P | BG13NUC-HC351 |
| 6552 | RBD | BG13NUC-HC352 |
| 6553 | 2P | BG13NUC-HC353 |
| 6554 | RBD | BG13NUC-HC354 |
| 6555 | 2P | BG13NUC-HC355 |
| 6556 | RBD | BG13NUC-HC356 |
| 6557 | 2P | BG13NUC-HC357 |
| 6558 | RBD | BG13NUC-HC358 |
| 6559 | 2P | BG13NUC-HC359 |
| 6560 | RBD | BG13NUC-HC360 |
| 6561 | 2P | BG13NUC-HC361 |
| 6562 | 2P | BG13NUC-HC362 |
| 6563 | RBD | BG13NUC-HC363 |
| 6564 | RBD | BG13NUC-HC364 |
| 6565 | RBD | BG13NUC-HC365 |
| 6566 | 2P | BG13NUC-HC366 |
| 6567 | 2P | BG13NUC-HC367 |
| 6568 | 2P | BG13NUC-HC368 |
| 6569 | 2P | BG13NUC-HC369 |
| 6570 | RBD | BG13NUC-HC370 |
| 6571 | 2P | BG13NUC-HC371 |
| 6572 | 2P | BG13NUC-HC372 |
| 6573 | 2P | BG13NUC-HC373 |
| 6574 | RBD | BG13NUC-HC374 |
| 6575 | 2P | BG13NUC-HC375 |
| 6576 | 2P | BG13NUC-HC376 |
| 6577 | RBD | BG13NUC-HC377 |
| 6578 | 2P | BG13NUC-HC378 |
| 6579 | RBD | BG13NUC-HC379 |
| 6580 | RBD | BG13NUC-HC380 |
| 6581 | 2P | BG13NUC-HC381 |
| 6582 | RBD | BG13NUC-HC382 |
| 6583 | RBD | BG13NUC-HC383 |
| 6584 | 2P | BG13NUC-HC384 |
| 6585 | RBD | BG13NUC-HC385 |
| 6586 | RBD | BG13NUC-HC386 |
| 6587 | RBD | BG13NUC-HC387 |
| 6588 | 2P | BG13NUC-HC388 |
| 6589 | 2P | BG13NUC-HC389 |
| 6590 | 2P | BG13NUC-HC390 |
| 6591 | 2P | BG13NUC-HC391 |
| 6592 | RBD | BG13NUC-HC392 |
| 6593 | RBD | BG13NUC-HC393 |
| 6594 | RBD | BG13NUC-HC394 |
| 6595 | 2P | BG13NUC-HC395 |
| 6596 | 2P | BG13NUC-HC396 |
| 6597 | 2P | BG13NUC-HC397 |
| 6598 | 2P | BG13NUC-HC398 |
| 6599 | 2P | BG13NUC-HC399 |
| 6600 | RBD | BG13NUC-HC400 |
| 6601 | 2P | BG13NUC-HC401 |
| 6602 | 2P | BG13NUC-HC402 |
| 6603 | 2P | BG13NUC-HC403 |
| 6604 | 2P | BG13NUC-HC404 |
| 6605 | 2P | BG13NUC-HC405 |
| 6606 | RBD | BG13NUC-HC406 |
| 6607 | 2P | BG13NUC-HC407 |
| 6608 | 2P | BG13NUC-HC408 |
| 6609 | 2P | BG13NUC-HC409 |
| 6610 | 2P | BG13NUC-HC410 |
| 6611 | RBD | BG13NUC-HC411 |
| 6612 | RBD | BG13NUC-HC412 |
| 6613 | RBD | BG13NUC-HC413 |
| 6614 | RBD | BG13NUC-HC414 |
| 6615 | 2P | BG13NUC-HC415 |
| 6616 | 2P | BG13NUC-HC416 |
| 6617 | RBD | BG13NUC-HC417 |
| 6618 | RBD | BG13NUC-HC418 |
| 6619 | 2P | BG13NUC-HC419 |
| 6620 | 2P | BG13NUC-HC420 |
| 6621 | RBD | BG13NUC-HC421 |
| 6622 | 2P | BG13NUC-HC422 |
| 6623 | 2P | BG13NUC-HC423 |
| 6624 | RBD | BG13NUC-HC424 |
| 6625 | RBD | BG13NUC-HC425 |
| 6626 | RBD | BG13NUC-HC426 |
| 6627 | 2P | BG13NUC-HC427 |
| 6628 | 2P | BG13NUC-HC428 |
| 6629 | 2P | BG13NUC-HC429 |
| 6630 | 2P | BG13NUC-HC430 |
| 6631 | 2P | BG13NUC-HC431 |
| 6632 | RBD | BG13NUC-HC432 |
| 6633 | 2P | BG13NUC-HC433 |
| 6634 | 2P | BG13NUC-HC434 |
| 6635 | 2P | BG13NUC-HC435 |
| 6636 | 2P | BG13NUC-HC436 |
| 6637 | 2P | BG13NUC-HC437 |
| 6638 | 2P | BG13NUC-HC438 |
| 6639 | RBD | BG13NUC-HC439 |
| 6640 | RBD | BG13NUC-HC440 |
| 6641 | 2P | BG13NUC-HC441 |
| 6642 | 2P | BG13NUC-HC442 |
| 6643 | 2P | BG13NUC-HC443 |
| 6644 | 2P | BG13NUC-HC444 |
| 6645 | 2P | BG13NUC-HC445 |
| 6646 | 2P | BG13NUC-HC446 |
| 6647 | 2P | BG13NUC-HC447 |
| 6648 | 2P | BG13NUC-HC448 |
| 6649 | RBD | BG13NUC-HC449 |
| 6650 | 2P | BG13NUC-HC450 |
| 6651 | 2P | BG13NUC-HC451 |
| 6652 | 2P | BG13NUC-HC452 |
| 6653 | 2P | BG13NUC-HC453 |
| 6654 | RBD | BG13NUC-HC454 |
| 6655 | RBD | BG13NUC-HC455 |
| 6656 | 2P | BG13NUC-HC456 |
| 6657 | 2P | BG13NUC-HC457 |
| 6658 | 2P | BG13NUC-HC458 |
| 6659 | RBD | BG13NUC-HC459 |
| 6660 | 2P | BG13NUC-HC460 |
| 6661 | RBD | BG13NUC-HC461 |
| 6662 | 2P | BG13NUC-HC462 |
| 6663 | RBD | BG13NUC-HC463 |
| 6664 | RBD | BG13NUC-HC464 |
| 6665 | 2P | BG13NUC-HC465 |
| 6666 | 2P | BG13NUC-HC466 |
| 6667 | 2P | BG13NUC-HC467 |
| 6668 | 2P | BG13NUC-HC468 |
| 6669 | 2P | BG13NUC-HC469 |
| 6670 | 2P | BG13NUC-HC470 |
| 6671 | RBD | BG13NUC-HC471 |
| 6672 | 2P | BG13NUC-HC472 |
| 6673 | RBD | BG13NUC-HC473 |
| 6674 | RBD | BG13NUC-HC474 |
| 6675 | 2P | BG13NUC-HC475 |
| 6676 | 2P | BG13NUC-HC476 |
| 6677 | 2P | BG13NUC-HC477 |
| 6678 | 2P | BG13NUC-HC478 |
| 6679 | 2P | BG13NUC-HC479 |
| 6680 | 2P | BG13NUC-HC480 |
| 6681 | 2P | BG13NUC-HC481 |
| 6682 | 2P | BG13NUC-HC482 |
| 6683 | 2P | BG13NUC-HC483 |
| 6684 | 2P | BG13NUC-HC484 |
| 6685 | 2P | BG13NUC-HC485 |
| 6686 | RBD | BG13NUC-HC486 |
| 6687 | RBD | BG13NUC-HC487 |
| 6688 | 2P | BG13NUC-HC488 |
| 6689 | 2P | BG13NUC-HC489 |
| 6690 | 2P | BG13NUC-HC490 |
| 6691 | 2P | BG13NUC-HC491 |
| 6692 | 2P | BG13NUC-HC492 |
| 6693 | 2P | BG13NUC-HC493 |
| 6694 | 2P | BG13NUC-HC494 |
| 6695 | 2P | BG13NUC-HC495 |
| 6696 | RBD | BG13NUC-HC496 |
| 6697 | RBD | BG13NUC-HC497 |
| 6698 | 2P | BG13NUC-HC498 |
| 6699 | RBD | BG13NUC-HC499 |
| 6700 | 2P | BG13NUC-HC500 |
| 6701 | RBD | BG13NUC-HC501 |
| 6702 | 2P | BG13NUC-HC502 |
| 6703 | 2P | BG13NUC-HC503 |
| 6704 | RBD | BG13NUC-HC504 |
| 6705 | 2P | BG13NUC-HC505 |
| 6706 | RBD | BG13NUC-HC506 |
| 6707 | RBD | BG13NUC-HC507 |
| 6708 | 2P | BG13NUC-HC508 |
| 6709 | 2P | BG13NUC-HC509 |
| 6710 | 2P | BG13NUC-HC510 |
| 6711 | 2P | BG13NUC-HC511 |
| 6712 | RBD | BG13NUC-HC512 |
| 6713 | RBD | BG13NUC-HC513 |
| 6714 | RBD | BG13NUC-HC514 |
| 6715 | 2P | BG13NUC-HC515 |
| 6716 | 2P | BG13NUC-HC516 |
| 6717 | 2P | BG13NUC-HC517 |
| 6718 | RBD | BG13NUC-HC518 |
| 6719 | RBD | BG13NUC-HC519 |
| 6720 | 2P | BG13NUC-HC520 |
| 6721 | 2P | BG13NUC-HC521 |
| 6722 | RBD | BG13NUC-HC522 |
| 6723 | RBD | BG13NUC-HC523 |
| 6724 | RBD | BG13NUC-HC524 |
| 6725 | 2P | BG13NUC-HC525 |
| 6726 | 2P | BG13NUC-HC526 |
| 6727 | 2P | BG13NUC-HC527 |
| 6728 | 2P | BG13NUC-HC528 |
| 6729 | 2P | BG13NUC-HC529 |
| 6730 | RBD | BG13NUC-HC530 |
| 6731 | 2P | BG13NUC-HC531 |
| 6732 | RBD | BG13NUC-HC532 |
| 6733 | RBD | BG13NUC-HC533 |
| 6734 | RBD | BG13NUC-HC534 |
| 6735 | RBD | BG13NUC-HC535 |
| 6736 | 2P | BG13NUC-HC536 |
| 6737 | 2P | BG13NUC-HC537 |
| 6738 | 2P | BG13NUC-HC538 |
| 6739 | 2P | BG13NUC-HC539 |
| 6740 | 2P | BG13NUC-HC540 |
| 6741 | 2P | BG13NUC-HC541 |
| 6742 | RBD | BG13NUC-HC542 |
| 6743 | RBD | BG13NUC-HC543 |
| 6744 | 2P | BG13NUC-HC544 |
| 6745 | 2P | BG13NUC-HC545 |
| 6746 | RBD | BG13NUC-HC546 |
| 6747 | RBD | BG13NUC-HC547 |
| 6748 | 2F | BG13NUC-HC548 |
| 6749 | RBD | BG13NUC-HC549 |
| 6750 | 2P | BG13NUC-HC550 |
| 6751 | 2P | BG13NUC-HC551 |
| 6752 | RBD | BG13NUC-HC552 |
| 6753 | RBD | BG13NUC-HC553 |
| 6754 | RBD | BG13NUC-HC554 |
| 6755 | RBD | BG13NUC-HC555 |
| 6756 | 2P | BG13NUC-HC556 |
| 6757 | 2P | BG13NUC-HC557 |
| 6758 | RBD | BG13NUC-HC558 |
| 6759 | 2F | BG13NUC-HC559 |
| 6760 | RBD | BG13NUC-HC560 |
| 6761 | 2P | BG13NUC-HC561 |
| 6762 | 2P | BG13NUC-HC562 |
| 6763 | 2P | BG13NUC-HC563 |
| 6764 | 2P | BG13NUC-HC564 |
| 6765 | 2F | BG13NUC-HC565 |
| 6766 | 2F | BG13NUC-HC566 |
| 6767 | 2P | BG13NUC-HC567 |
| 6768 | RBD | BG13NUC-HC568 |
| 6769 | RBD | BG13NUC-HC569 |
| 6770 | RBD | BG13NUC-HC570 |
| 6771 | RBD | BG13NUC-HC571 |
| 6772 | 2F | BG13NUC-HC572 |
| 6773 | 2P | BG13NUC-HC573 |
| 6774 | 2P | BG13NUC-HC574 |
| 6775 | 2P | BG13NUC-HC575 |
| 6776 | 2P | BG13NUC-HC576 |
| 6777 | 2P | BG13NUC-HC577 |
| 6778 | 2P | BG13NUC-HC578 |
| 6779 | 2P | BG13NUC-HC579 |
| 6780 | 2P | BG13NUC-HC580 |
| 6781 | 2F | BG13NUC-HC581 |
| 6782 | 2P | BG13NUC-HC582 |
| 6783 | 2P | BG13NUC-HC583 |
| 6784 | 2P | BG13NUC-HC584 |
| 6785 | 2P | BG13NUC-HC585 |
| 6786 | 2P | BG13NUC-HC586 |
| 6787 | 2P | BG13NUC-HC587 |
| 6788 | 2P | BG13NUC-HC588 |
| 6789 | 2P | BG13NUC-HC589 |
| 6790 | 2P | BG13NUC-HC590 |
| 6791 | RBD | BG13NUC-HC591 |
| 6792 | 2P | BG13NUC-HC592 |
| 6793 | RBD | BG13NUC-HC593 |
| 6794 | 2P | BG13NUC-HC594 |
| 6795 | RBD | BG13NUC-HC595 |
| 6796 | 2F | BG13NUC-HC596 |
| 6797 | 2F | BG13NUC-HC597 |
| 6798 | RBD | BG13NUC-HC598 |
| 6799 | 2P | BG13NUC-HC599 |
| 6800 | 2P | BG13NUC-HC600 |
| 6801 | 2P | BG13NUC-HC601 |
| 6802 | 2P | BG13NUC-HC602 |
| 6803 | 2P | BG13NUC-HC603 |
| 6804 | 2P | BG13NUC-HC604 |
| 6805 | 2P | BG13NUC-HC605 |
| 6806 | RBD | BG13NUC-HC606 |
| 6807 | RBD | BG13NUC-HC607 |
| 6808 | RBD | BG13NUC-HC608 |
| 6809 | 2P | BG13NUC-HC609 |
| 6810 | RBD | BG13NUC-HC610 |
| 6811 | 2P | BG13NUC-HC611 |
| 6812 | RBD | BG13NUC-HC612 |
| 6813 | RBD | BG13NUC-HC613 |
| 6814 | RBD | BG13NUC-HC614 |
| 6815 | 2P | BG13NUC-HC615 |
| 6816 | 2P | BG13NUC-HC616 |
| 6817 | RBD | BG13NUC-HC617 |
| 6818 | RBD | BG13NUC-HC618 |
| 6819 | 2P | BG13NUC-HC619 |
| 6820 | RBD | BG13NUC-HC620 |
| 6821 | 2P | BG13NUC-HC621 |
| 6822 | 2P | BG13NUC-HC622 |
| 6823 | RBD | BG13NUC-HC623 |
| 6824 | RBD | BG13NUC-HC624 |
| 6825 | 2P | BG13NUC-HC625 |
| 6826 | 2P | BG13NUC-HC626 |
| 6827 | 2P | BG13NUC-HC627 |
| 6828 | RBD | BG13NUC-HC628 |
| 6829 | RBD | BG13NUC-HC629 |
| 6830 | RBD | BG13NUC-HC630 |
| 6831 | 2P | BG13NUC-HC631 |
| 6832 | 2P | BG13NUC-HC632 |
| 6833 | 2P | BG13NUC-HC633 |
| 6834 | 2P | BG13NUC-HC634 |
| 6835 | 2P | BG13NUC-HC635 |
| 6836 | RBD | BG13NUC-HC636 |
| 6837 | RBD | BG13NUC-HC637 |
| 6838 | RBD | BG13NUC-HC638 |
| 6839 | 2P | BG13NUC-HC639 |
| 6840 | RBD | BG13NUC-HC640 |
| 6841 | RBD | BG13NUC-HC641 |
| 6842 | 2P | BG13NUC-HC642 |
| 6843 | 2P | BG13NUC-HC643 |
| 6844 | RBD | BG13NUC-HC644 |
| 6845 | RBD | BG13NUC-HC645 |
| 6846 | 2P | BG13NUC-HC646 |
| 6847 | RBD | BG13NUC-HC647 |
| 6848 | 2P | BG13NUC-HC648 |
| 6849 | 2P | BG13NUC-HC649 |
| 6850 | RBD | BG13NUC-HC650 |
| 6851 | RBD | BG13NUC-HC651 |
| 6852 | 2P | BG13NUC-HC652 |
| 6853 | 2P | BG13NUC-HC653 |
| 6854 | 2P | BG13NUC-HC654 |
| 6855 | 2P | BG13NUC-HC655 |
| 6856 | RBD | BG13NUC-HC656 |
| 6857 | RBD | BG13NUC-HC657 |
| 6858 | 2P | BG13NUC-HC658 |
| 6859 | 2P | BG13NUC-HC659 |
| 6860 | 2P | BG13NUC-HC660 |
| 6861 | 2P | BG13NUC-HC661 |
| 6862 | 2P | BG13NUC-HC662 |
| 6863 | 2P | BG13NUC-HC663 |
| 6864 | RBD | BG13NUC-HC664 |
| 6865 | 2P | BG13NUC-HC665 |
| 6866 | RBD | BG13NUC-HC666 |
| 6867 | 2P | BG13NUC-HC667 |
| 6868 | RBD | BG13NUC-HC668 |
| 6869 | RBD | BG13NUC-HC669 |
| 6870 | RBD | BG13NUC-HC670 |
| 6871 | 2P | BG13NUC-HC671 |
| 6872 | RBD | BG13NUC-HC672 |
| 6873 | 2P | BG13NUC-HC673 |
| 6874 | RBD | BG13NUC-HC674 |
| 6875 | RBD | BG13NUC-HC675 |
| 6876 | 2P | BG13NUC-HC676 |
| 6877 | 2P | BG13NUC-HC677 |
| 6878 | 2P | BG13NUC-HC678 |
| 6879 | RBD | BG13NUC-HC679 |
| 6880 | 2P | BG13NUC-HC680 |
| 6881 | 2P | BG13NUC-HC681 |
| 6882 | 2P | BG13NUC-HC682 |
| 6883 | 2P | BG13NUC-HC683 |
| 6884 | RBD | BG13NUC-HC684 |
| 6885 | 2P | BG13NUC-HC685 |
| 6886 | 2P | BG13NUC-HC686 |
| 6887 | 2P | BG13NUC-HC687 |
| 6888 | RBD | BG13NUC-HC688 |
| 6889 | 2P | BG13NUC-HC689 |
| 6890 | RBD | BG13NUC-HC690 |
| 6891 | 2P | BG13NUC-HC691 |
| 6892 | RBD | BG13NUC-HC692 |
| 6893 | RBD | BG13NUC-HC693 |
| 6894 | RBD | BG13NUC-HC694 |
| 6895 | 2P | BG13NUC-HC695 |
| 6896 | RBD | BG13NUC-HC696 |
| 6897 | RBD | BG13NUC-HC697 |
| 6898 | RBD | BG13NUC-HC698 |
| 6899 | 2P | BG13NUC-HC699 |
| 6900 | RBD | BG13NUC-HC700 |
| 6901 | RBD | BG13NUC-HC701 |
| 6902 | 2P | BG13NUC-HC702 |
| 6903 | 2P | BG13NUC-HC703 |
| 6904 | 2P | BG13NUC-HC704 |
| 6905 | 2P | BG13NUC-HC705 |
| 6906 | 2P | BG13NUC-HC706 |
| 6907 | 2P | BG13NUC-HC707 |
| 6908 | 2P | BG13NUC-HC708 |
| 6909 | 2P | BG13NUC-HC709 |
| 6910 | 2P | BG13NUC-HC710 |
| 6911 | 2P | BG13NUC-HC711 |
| 6912 | 2P | BG13NUC-HC712 |
| 6913 | 2P | BG13NUC-HC713 |
| 6914 | 2P | BG13NUC-HC714 |
| 6915 | RBD | BG13NUC-HC715 |
| 6916 | RBD | BG13NUC-HC716 |
| 6917 | RBD | BG13NUC-HC717 |
| 6918 | RBD | BG13NUC-HC718 |
| 6919 | RBD | BG13NUC-HC719 |
| 6920 | 2P | BG13NUC-HC720 |
| 6921 | 2P | BG13NUC-HC721 |
| 6922 | 2P | BG13NUC-HC722 |
| 6923 | 2P | BG13NUC-HC723 |
| 6924 | 2P | BG13NUC-HC724 |
| 6925 | 2P | BG13NUC-HC725 |
| 6926 | 2P | BG13NUC-HC726 |
| 6927 | 2P | BG13NUC-HC727 |
| 6928 | 2P | BG13NUC-HC728 |
| 6929 | RBD | BG13NUC-HC729 |
| 6930 | 2P | BG13NUC-HC730 |
| 6931 | 2P | BG13NUC-HC731 |
| 6932 | 2P | BG13NUC-HC732 |
| 6933 | 2P | BG13NUC-HC733 |
| 6934 | 2P | BG13NUC-HC734 |
| 6935 | 2P | BG13NUC-HC735 |
| 6936 | 2P | BG13NUC-HC736 |
| 6937 | RBD | BG13NUC-HC737 |
| 6938 | 2P | BG13NUC-HC738 |
| 6939 | RBD | BG13NUC-HC739 |
| 6940 | RBD | BG13NUC-HC740 |
| 6941 | RBD | BG13NUC-HC741 |
| 6942 | 2P | BG13NUC-HC742 |
| 6943 | 2P | BG13NUC-HC743 |
| 6944 | 2P | BG13NUC-HC744 |
| 6945 | RBD | BG13NUC-HC745 |
| 6946 | 2P | BG13NUC-HC746 |
| 6947 | RBD | BG13NUC-HC747 |
| 6948 | 2F | BG13NUC-HC748 |
| 6949 | 2P | BG13NUC-HC749 |
| 6950 | 2P | BG13NUC-HC750 |
| 6951 | 2P | BG13NUC-HC751 |
| 6952 | 2P | BG13NUC-HC752 |
| 6953 | 2P | BG13NUC-HC753 |
| 6954 | 2P | BG13NUC-HC754 |
| 6955 | 2P | BG13NUC-HC755 |
| 6956 | 2P | BG13NUC-HC756 |
| 6957 | 2P | BG13NUC-HC757 |
| 6958 | RBD | BG13NUC-HC758 |
| 6959 | 2P | BG13NUC-HC759 |
| 6960 | 2P | BG13NUC-HC760 |
| 6961 | 2P | BG13NUC-HC761 |
| 6962 | 2P | BG13NUC-HC762 |
| 6963 | RBD | BG13NUC-HC763 |
| 6964 | 2P | BG13NUC-HC764 |
| 6965 | 2P | BG13NUC-HC765 |
| 6966 | 2P | BG13NUC-HC766 |
| 6967 | 2P | BG13NUC-HC767 |
| 6968 | 2P | BG13NUC-HC768 |
| 6969 | 2P | BG13NUC-HC769 |
| 6970 | 2P | BG13NUC-HC770 |
| 6971 | 2P | BG13NUC-HC771 |
| 6972 | 2P | BG13NUC-HC772 |
| 6973 | RBD | BG13NUC-HC773 |
| 6974 | RBD | BG13NUC-HC774 |
| 6975 | RBD | BG13NUC-HC775 |
| 6976 | RBD | BG13NUC-HC776 |
| 6977 | RBD | BG13NUC-HC777 |
| 6978 | RBD | BG13NUC-HC778 |
| 6979 | 2P | BG13NUC-HC779 |
| 6980 | RBD | BG13NUC-HC780 |
| 6981 | RBD | BG13NUC-HC781 |
| 6982 | 2P | BG13NUC-HC782 |
| 6983 | 2P | BG13NUC-HC783 |
| 6984 | RBD | BG13NUC-HC784 |
| 6985 | RBD | BG13NUC-HC785 |
| 6986 | 2P | BG13NUC-HC786 |
| 6987 | 2P | BG13NUC-HC787 |
| 6988 | 2P | BG13NUC-HC788 |
| 6989 | 2P | BG13NUC-HC789 |
| 6990 | RBD | BG13NUC-HC790 |
| 6991 | 2P | BG13NUC-HC791 |
| 6992 | RBD | BG13NUC-HC792 |
| 6993 | RBD | BG13NUC-HC793 |
| 6994 | 2P | BG13NUC-HC794 |
| 6995 | 2P | BG13NUC-HC795 |
| 6996 | 2P | BG13NUC-HC796 |
| 6997 | 2P | BG13NUC-HC797 |
| 6998 | 2P | BG13NUC-HC798 |
| 6999 | RBD | BG13NUC-HC799 |
| 7000 | RBD | BG13NUC-HC800 |
| 7001 | RBD | BG13NUC-HC801 |
| 7002 | 2P | BG13NUC-HC802 |
| 7003 | 2P | BG13NUC-HC803 |
| 7004 | 2P | BG13NUC-HC804 |
| 7005 | 2P | BG13NUC-HC805 |
| 7006 | 2P | BG13NUC-HC806 |
| 7007 | 2P | BG13NUC-HC807 |
| 7008 | 2P | BG13NUC-HC808 |
| 7009 | 2P | BG13NUC-HC809 |
| 7010 | 2P | BG13NUC-HC810 |
| 7011 | RBD | BG13NUC-HC811 |
| 7012 | RBD | BG13NUC-HC812 |
| 7013 | RBD | BG13NUC-HC813 |
| 7014 | 2P | BG13NUC-HC814 |
| 7015 | 2P | BG13NUC-HC815 |
| 7016 | 2P | BG13NUC-HC816 |
| 7017 | 2P | BG13NUC-HC817 |
| 7018 | 2P | BG13NUC-HC818 |
| 7019 | 2P | BG13NUC-HC819 |
| 7020 | 2P | BG13NUC-HC820 |
| 7021 | 2P | BG13NUC-HC821 |
| 7022 | 2P | BG13NUC-HC822 |
| 7023 | RBD | BG13NUC-HC823 |
| 7024 | RBD | BG13NUC-HC824 |
| 7025 | RBD | BG13NUC-HC825 |
| 7026 | RBD | BG13NUC-HC826 |
| 7027 | RBD | BG13NUC-HC827 |
| 7028 | 2P | BG13NUC-HC828 |
| 7029 | 2P | BG13NUC-HC829 |
| 7030 | 2P | BG13NUC-HC830 |
| 7031 | 2P | BG13NUC-HC831 |
| 7032 | 2P | BG13NUC-HC832 |
| 7033 | RBD | BG13NUC-HC833 |
| 7034 | RBD | BG13NUC-HC834 |
| 7035 | RBD | BG13NUC-HC835 |
| 7036 | 2P | BG13NUC-HC836 |
| 7037 | RBD | BG13NUC-HC837 |
| 7038 | 2P | BG13NUC-HC838 |
| 7039 | RBD | BG13NUC-HC839 |
| 7040 | 2P | BG13NUC-HC840 |
| 7041 | 2P | BG13NUC-HC841 |
| 7042 | RBD | BG13NUC-HC842 |
| 7043 | RBD | BG13NUC-HC843 |
| 7044 | 2P | BG13NUC-HC844 |
| 7045 | RBD | BG13NUC-HC845 |
| 7046 | RBD | BG13NUC-HC846 |
| 7047 | 2P | BG13NUC-HC847 |
| 7048 | 2P | BG13NUC-HC848 |
| 7049 | RBD | BG13NUC-HC849 |
| 7050 | RBD | BG13NUC-HC850 |
| 7051 | RBD | BG13NUC-HC851 |
| 7052 | 2P | BG13NUC-HC852 |
| 7053 | 2P | BG13NUC-HC853 |
| 7054 | 2P | BG13NUC-HC854 |
| 7055 | 2P | BG13NUC-HC855 |
| 7056 | 2P | BG13NUC-HC856 |
| 7057 | RBD | BG13NUC-HC857 |
| 7058 | 2P | BG13NUC-HC858 |
| 7059 | 2P | BG13NUC-HC859 |
| 7060 | 2P | BG13NUC-HC860 |
| 7061 | 2P | BG13NUC-HC861 |
| 7062 | 2P | BG13NUC-HC862 |
| 7063 | RBD | BG13NUC-HC863 |
| 7064 | 2P | BG13NUC-HC864 |
| 7065 | 2P | BG13NUC-HC865 |
| 7066 | 2P | BG13NUC-HC866 |
| 7067 | 2P | BG13NUC-HC867 |
| 7068 | 2P | BG13NUC-HC868 |
| 7069 | 2P | BG13NUC-HC869 |
| 7070 | RBD | BG13NUC-HC870 |
| 7071 | 2P | BG13NUC-HC871 |
| 7072 | RBD | BG13NUC-HC872 |
| 7073 | RBD | BG13NUC-HC873 |
| 7074 | RBD | BG13NUC-HC874 |
| 7075 | RBD | BG13NUC-HC875 |
| 7076 | RBD | BG13NUC-HC876 |
| 7077 | RBD | BG13NUC-HC877 |
| 7078 | 2P | BG13NUC-HC878 |
| 7079 | 2P | BG13NUC-HC879 |
| 7080 | 2P | BG13NUC-HC880 |
| 7081 | 2P | BG13NUC-HC881 |
| 7082 | RBD | BG13NUC-HC882 |
| 7083 | 2P | BG13NUC-HC883 |
| 7084 | RBD | BG13NUC-HC884 |
| 7085 | RBD | BG13NUC-HC885 |
| 7086 | 2P | BG13NUC-HC886 |
| 7087 | RBD | BG13NUC-HC887 |
| 7088 | RBD | BG13NUC-HC888 |
| 7089 | RBD | BG13NUC-HC889 |
| 7090 | RBD | BG13NUC-HC890 |
| 7091 | RBD | BG13NUC-HC891 |
| 7092 | RBD | BG13NUC-HC892 |
| 7093 | 2P | BG13NUC-HC893 |
| 7094 | RBD | BG13NUC-HC894 |
| 7095 | RBD | BG13NUC-HC895 |
| 7096 | RBD | BG13NUC-HC896 |
| 7097 | RBD | BG13NUC-HC897 |
| 7098 | RBD | BG13NUC-HC898 |
| 7099 | RBD | BG13NUC-HC899 |
| 7100 | 2P | BG13NUC-HC900 |
| 7101 | 2P | BG13NUC-HC901 |
| 7102 | 2P | BG13NUC-HC902 |
| 7103 | 2P | BG13NUC-HC903 |
| 7104 | 2P | BG13NUC-HC904 |
| 7105 | RBD | BG13NUC-HC905 |
| 7106 | 2F | BG13NUC-HC906 |
| 7107 | RBD | BG13NUC-HC907 |
| 7108 | 2P | BG13NUC-HC908 |
| 7109 | 2P | BG13NUC-HC909 |
| 7110 | 2P | BG13NUC-HC910 |
| 7111 | 2P | BG13NUC-HC911 |
| 7112 | 2P | BG13NUC-HC912 |
| 7113 | 2P | BG13NUC-HC913 |
| 7114 | 2P | BG13NUC-HC914 |
| 7115 | 2P | BG13NUC-HC915 |
| 7116 | 2P | BG13NUC-HC916 |
| 7117 | 2P | BG13NUC-HC917 |
| 7118 | 2P | BG13NUC-HC918 |
| 7119 | RBD | BG13NUC-HC919 |
| 7120 | 2P | BG13NUC-HC920 |
| 7121 | RBD | BG13NUC-HC921 |
| 7122 | RBD | BG13NUC-HC922 |
| 7123 | RBD | BG13NUC-HC923 |
| 7124 | RBD | BG13NUC-HC924 |
| 7125 | 2F | BG13NUC-HC925 |
| 7126 | 2P | BG13NUC-HC926 |
| 7127 | RBD | BG13NUC-HC927 |
| 7128 | 2P | BG13NUC-HC928 |
| 7129 | 2P | BG13NUC-HC929 |
| 7130 | 2P | BG13NUC-HC930 |
| 7131 | 2P | BG13NUC-HC931 |
| 7132 | 2P | BG13NUC-HC932 |
| 7133 | 2P | BG13NUC-HC933 |
| 7134 | 2P | BG13NUC-HC934 |
| 7135 | RBD | BG13NUC-HC935 |
| 7136 | RBD | BG13NUC-HC936 |
| 7137 | 2P | BG13NUC-HC937 |
| 7138 | 2P | BG13NUC-HC938 |
| 7139 | 2P | BG13NUC-HC939 |
| 7140 | RBD | BG13NUC-HC940 |
| 7141 | 2P | BG13NUC-HC941 |
| 7142 | RBD | BG13NUC-HC942 |
| 7143 | RBD | BG13NUC-HC943 |
| 7144 | RBD | BG13NUC-HC944 |
| 7145 | RBD | BG13NUC-HC945 |
| 7146 | 2P | BG13NUC-HC946 |
| 7147 | RBD | BG13NUC-HC947 |
| 7148 | RBD | BG13NUC-HC948 |
| 7149 | RBD | BG13NUC-HC949 |
| 7150 | 2P | BG13NUC-HC950 |
| 7151 | RBD | BG13NUC-HC951 |
| 7152 | 2F | BG13NUC-HC952 |
| 7153 | 2P | BG13NUC-HC953 |
| 7154 | 2P | BG13NUC-HC954 |
| 7155 | 2P | BG13NUC-HC955 |
| 7156 | 2P | BG13NUC-HC956 |
| 7157 | RBD | BG13NUC-HC957 |
| 7158 | 2P | BG13NUC-HC958 |
| 7159 | RBD | BG13NUC-HC959 |
| 7160 | RBD | BG13NUC-HC960 |
| 7161 | 2P | BG13NUC-HC961 |
| 7162 | RBD | BG13NUC-HC962 |
| 7163 | RBD | BG13NUC-HC963 |
| 7164 | 2P | BG13NUC-HC964 |
| 7165 | RBD | BG13NUC-HC965 |
| 7166 | 2P | BG13NUC-HC966 |
| 7167 | 2P | BG13NUC-HC967 |
| 7168 | 2P | BG13NUC-HC968 |
| 7169 | 2P | BG13NUC-HC969 |
| 7170 | RBD | BG13NUC-HC970 |
| 7171 | 2P | BG13NUC-HC971 |
| 7172 | RBD | BG13NUC-HC972 |
| 7173 | 2P | BG13NUC-HC973 |
| 7174 | RBD | BG13NUC-HC974 |
| 7175 | RBD | BG13NUC-HC975 |
| 7176 | RBD | BG13NUC-HC976 |
| 7177 | 2P | BG13NUC-HC977 |
| 7178 | RBD | BG13NUC-HC978 |
| 7179 | 2P | BG13NUC-HC979 |
| 7180 | 2P | BG13NUC-HC980 |
| 7181 | RBD | BG13NUC-HC981 |
| 7182 | 2P | BG13NUC-HC982 |
| 7183 | 2P | BG13NUC-HC983 |
| 7184 | RBD | BG13NUC-HC984 |
| 7185 | RBD | BG13NUC-HC985 |
| 7186 | RBD | BG13NUC-HC986 |
| 7187 | RBD | BG13NUC-HC987 |
| 7188 | 2P | BG13NUC-HC988 |
| 7189 | 2P | BG13NUC-HC989 |
| 7190 | 2P | BG13NUC-HC990 |
| 7191 | RBD | BG13NUC-HC991 |
| 7192 | 2P | BG13NUC-HC992 |
| 7193 | 2P | BG13NUC-HC993 |
| 7194 | RBD | BG13NUC-HC994 |
| 7195 | RBD | BG13NUC-HC995 |
| 7196 | 2P | BG13NUC-HC996 |
| 7197 | RBD | BG13NUC-HC997 |
| 7198 | 2P | BG13NUC-HC998 |
| 7199 | RBD | BG13NUC-HC999 |
| 7200 | 2P | BG13NUC-HC1000 |
| 7201 | RBD | BG13NUC-HC1001 |
| 7202 | RBD | BG13NUC-HC1002 |
| 7203 | 2P | BG13NUC-HC1003 |
| 7204 | RBD | BG13NUC-HC1004 |
| 7205 | 2P | BG13NUC-HC1005 |
| 7206 | 2P | BG13NUC-HC1006 |
| 7207 | 2P | BG13NUC-HC1007 |
| 7208 | 2P | BG13NUC-HC1008 |
| 7209 | 2P | BG13NUC-HC1009 |
| 7210 | RBD | BG13NUC-HC1010 |
| 7211 | 2P | BG13NUC-HC1011 |
| 7212 | 2P | BG13NUC-HC1012 |
| 7213 | RBD | BG13NUC-HC1013 |
| 7214 | RBD | BG13NUC-HC1014 |
| 7215 | 2P | BG13NUC-HC1015 |
| 7216 | 2P | BG13NUC-HC1016 |
| 7217 | 2P | BG13NUC-HC1017 |
| 7218 | 2P | BG13NUC-HC1018 |
| 7219 | 2P | BG13NUC-HC1019 |
| 7220 | 2P | BG13NUC-HC1020 |
| 7221 | 2P | BG13NUC-HC1021 |
| 7222 | RBD | BG13NUC-HC1022 |
| 7223 | 2P | BG13NUC-HC1023 |
| 7224 | 2P | BG13NUC-HC1024 |
| 7225 | 2P | BG13NUC-HC1025 |
| 7226 | RBD | BG13NUC-HC1026 |
| 7227 | 2P | BG13NUC-HC1027 |
| 7228 | 2P | BG13NUC-HC1028 |
| 7229 | 2P | BG13NUC-HC1029 |
| 7230 | 2P | BG13NUC-HC1030 |
| 7231 | 2P | BG13NUC-HC1031 |
| 7232 | RBD | BG13NUC-HC1032 |
| 7233 | RBD | BG13NUC-HC1033 |
| 7234 | 2P | BG13NUC-HC1034 |
| 7235 | 2P | BG13NUC-HC1035 |
| 7236 | 2P | BG13NUC-HC1036 |
| 7237 | 2P | BG13NUC-HC1037 |
| 7238 | RBD | BG13NUC-HC1038 |
| 7239 | RBD | BG13NUC-HC1039 |
| 7240 | RBD | BG13NUC-HC1040 |
| 7241 | 2P | BG13NUC-HC1041 |
| 7242 | 2F | BG13NUC-HC1042 |
| 7243 | RBD | BG13NUC-HC1043 |
| 7244 | 2P | BG13NUC-HC1044 |
| 7245 | 2P | BG13NUC-HC1045 |
| 7246 | 2P | BG13NUC-HC1046 |
| 7247 | 2P | BG13NUC-HC1047 |
| 7248 | 2P | BG13NUC-HC1048 |
| 7249 | RBD | BG13NUC-HC1049 |
| 7250 | 2P | BG13NUC-HC1050 |
| 7251 | 2P | BG13NUC-HC1051 |
| 7252 | 2P | BG13NUC-HC1052 |
| 7253 | RBD | BG13NUC-HC1053 |
| 7254 | 2P | BG13NUC-HC1054 |
| 7255 | 2P | BG13NUC-HC1055 |
| 7256 | 2P | BG13NUC-HC1056 |
| 7257 | 2F | BG13NUC-HC1057 |
| 7258 | 2P | BG13NUC-HC1058 |
| 7259 | RBD | BG13NUC-HC1059 |
| 7260 | 2P | BG13NUC-HC1060 |
| 7261 | RBD | BG13NUC-HC1061 |
| 7262 | 2P | BG13NUC-HC1062 |
| 7263 | 2P | BG13NUC-HC1063 |
| 7264 | 2P | BG13NUC-HC1064 |
| 7265 | RBD | BG13NUC-HC1065 |
| 7266 | 2P | BG13NUC-HC1066 |
| 7267 | 2P | BG13NUC-HC1067 |
| 7268 | RBD | BG13NUC-HC1068 |
| 7269 | 2P | BG13NUC-HC1069 |
| 7270 | 2P | BG13NUC-HC1070 |
| 7271 | 2P | BG13NUC-HC1071 |
| 7272 | RBD | BG13NUC-HC1072 |
| 7273 | RBD | BG13NUC-HC1073 |
| 7274 | 2P | BG13NUC-HC1074 |
| 7275 | RBD | BG13NUC-HC1075 |
| 7276 | 2P | BG13NUC-HC1076 |
| 7277 | 2P | BG13NUC-HC1077 |
| 7278 | RBD | BG13NUC-HC1078 |
| 7279 | RBD | BG13NUC-HC1079 |
| 7280 | RBD | BG13NUC-HC1080 |
| 7281 | RBD | BG13NUC-HC1081 |
| 7282 | 2P | BG13NUC-HC1082 |
| 7283 | 2P | BG13NUC-HC1083 |
| 7284 | RBD | BG13NUC-HC1084 |
| 7285 | 2P | BG13NUC-HC1085 |
| 7286 | RBD | BG13NUC-HC1086 |
| 7287 | 2P | BG13NUC-HC1087 |
| 7288 | 2P | BG13NUC-HC1088 |
| 7289 | 2P | BG13NUC-HC1089 |
| 7290 | RBD | BG13NUC-HC1090 |
| 7291 | RBD | BG13NUC-HC1091 |
| 7292 | 2P | BG13NUC-HC1092 |
| 7293 | RBD | BG13NUC-HC1093 |
| 7294 | 2P | BG13NUC-HC1094 |
| 7295 | RBD | BG13NUC-HC1095 |
| 7296 | RBD | BG13NUC-HC1096 |
| 7297 | RBD | BG13NUC-HC1097 |
| 7298 | RBD | BG13NUC-HC1098 |
| 7299 | 2P | BG13NUC-HC1099 |
| 7300 | RBD | BG13NUC-HC1100 |
| 7301 | RBD | BG13NUC-HC1101 |
| 7302 | RBD | BG13NUC-HC1102 |
| 7303 | RBD | BG13NUC-HC1103 |
| 7304 | 2P | BG13NUC-HC1104 |
| 7305 | 2P | BG13NUC-HC1105 |
| 7306 | RBD | BG13NUC-HC1106 |
| 7307 | 2P | BG13NUC-HC1107 |
| 7308 | RBD | BG13NUC-HC1108 |
| 7309 | 2P | BG13NUC-HC1109 |
| 7310 | 2F | BG13NUC-HC1110 |
| 7311 | 2P | BG13NUC-HC1111 |
| 7312 | RBD | BG13NUC-HC1112 |
| 7313 | 2P | BG13NUC-HC1113 |
| 7314 | RBD | BG13NUC-HC1114 |
| 7315 | 2P | BG13NUC-HC1115 |
| 7316 | 2P | BG13NUC-HC1116 |
| 7317 | 2P | BG13NUC-HC1117 |
| 7318 | 2P | BG13NUC-HC1118 |
| 7319 | 2P | BG13NUC-HC1119 |
| 7320 | 2P | BG13NUC-HC1120 |
| 7321 | 2P | BG13NUC-HC1121 |
| 7322 | 2P | BG13NUC-HC1122 |
| 7323 | 2P | BG13NUC-HC1123 |
| 7324 | 2P | BG13NUC-HC1124 |
| 7325 | 2P | BG13NUC-HC1125 |
| 7326 | RBD | BG13NUC-HC1126 |
| 7327 | 2P | BG13NUC-HC1127 |
| 7328 | 2P | BG13NUC-HC1128 |
| 7329 | 2P | BG13NUC-HC1129 |
| 7330 | 2P | BG13NUC-HC1130 |
| 7331 | RBD | BG13NUC-HC1131 |
| 7332 | RBD | BG13NUC-HC1132 |
| 7333 | 2P | BG13NUC-HC1133 |
| 7334 | RBD | BG13NUC-HC1134 |
| 7335 | RBD | BG13NUC-HC1135 |
| 7336 | RBD | BG13NUC-HC1136 |
| 7337 | RBD | BG13NUC-LC1 |
| 7338 | RBD | BG13NUC-LC2 |
| 7339 | RBD | BG13NUC-LC3 |
| 7340 | RBD | BG13NUC-LC4 |
| 7341 | RBD | BG13NUC-LC5 |
| 7342 | RBD | BG13NUC-LC6 |
| 7343 | RBD | BG13NUC-LC7 |
| 7344 | RBD | BG13NUC-LC8 |
| 7345 | RBD | BG13NUC-LC9 |
| 7346 | RBD | BG13NUC-LC10 |
| 7347 | RBD | BG13NUC-LC11 |
| 7348 | 2P | BG13NUC-LC12 |
| 7349 | 2P | BG13NUC-LC13 |
| 7350 | 2P | BG13NUC-LC14 |
| 7351 | 2P | BG13NUC-LC15 |
| 7352 | 2P | BG13NUC-LC16 |
| 7353 | 2P | BG13NUC-LC17 |
| 7354 | 2F | BG13NUC-LC18 |
| 7355 | 2P | BG13NUC-LC19 |
| 7356 | RBD | BG13NUC-LC20 |
| 7357 | RBD | BG13NUC-LC21 |
| 7358 | RBD | BG13NUC-LC22 |
| 7359 | RBD | BG13NUC-LC23 |
| 7360 | RBD | BG13NUC-LC24 |
| 7361 | RBD | BG13NUC-LC25 |
| 7362 | RBD | BG13NUC-LC26 |
| 7363 | 2P | BG13NUC-LC27 |
| 7364 | 2P | BG13NUC-LC28 |
| 7365 | 2P | BG13NUC-LC29 |
| 7366 | 2P | BG13NUC-LC30 |
| 7367 | 2P | BG13NUC-LC31 |
| 7368 | 2P | BG13NUC-LC32 |
| 7369 | 2P | BG13NUC-LC33 |
| 7370 | 2P | BG13NUC-LC34 |
| 7371 | RBD | BG13NUC-LC35 |
| 7372 | RBD | BG13NUC-LC36 |
| 7373 | RBD | BG13NUC-LC37 |
| 7374 | RBD | BG13NUC-LC38 |
| 7375 | RBD | BG13NUC-LC39 |
| 7376 | RBD | BG13NUC-LC40 |
| 7377 | RBD | BG13NUC-LC41 |
| 7378 | 2P | BG13NUC-LC42 |
| 7379 | 2P | BG13NUC-LC43 |
| 7380 | 2P | BG13NUC-LC44 |
| 7381 | 2P | BG13NUC-LC45 |
| 7382 | 2P | BG13NUC-LC46 |
| 7383 | RBD | BG13NUC-LC47 |
| 7384 | RBD | BG13NUC-LC48 |
| 7385 | RBD | BG13NUC-LC49 |
| 7386 | RBD | BG13NUC-LC50 |
| 7387 | RBD | BG13NUC-LC51 |
| 7388 | RBD | BG13NUC-LC52 |
| 7389 | RBD | BG13NUC-LC53 |
| 7390 | RBD | BG13NUC-LC54 |
| 7391 | RBD | BG13NUC-LC55 |
| 7392 | RBD | BG13NUC-LC56 |
| 7393 | 2P | BG13NUC-LC57 |
| 7394 | 2P | BG13NUC-LC58 |
| 7395 | RBD | BG13NUC-LC59 |
| 7396 | RBD | BG13NUC-LC60 |
| 7397 | RBD | BG13NUC-LC61 |
| 7398 | RBD | BG13NUC-LC62 |
| 7399 | RBD | BG13NUC-LC63 |
| 7400 | RBD | BG13NUC-LC64 |
| 7401 | RBD | BG13NUC-LC65 |
| 7402 | RBD | BG13NUC-LC66 |
| 7403 | 2P | BG13NUC-LC67 |
| 7404 | 2P | BG13NUC-LC68 |
| 7405 | RBD | BG13NUC-LC69 |
| 7406 | RBD | BG13NUC-LC70 |
| 7407 | RBD | BG13NUC-LC71 |
| 7408 | RBD | BG13NUC-LC72 |
| 7409 | RBD | BG13NUC-LC73 |
| 7410 | 2P | BG13NUC-LC74 |
| 7411 | 2P | BG13NUC-LC75 |
| 7412 | 2P | BG13NUC-LC76 |
| 7413 | 2P | BG13NUC-LC77 |
| 7414 | 2P | BG13NUC-LC78 |
| 7415 | RBD | BG13NUC-LC79 |
| 7416 | RBD | BG13NUC-LC80 |
| 7417 | RBD | BG13NUC-LC81 |
| 7418 | RBD | BG13NUC-LC82 |
| 7419 | RBD | BG13NUC-LC83 |
| 7420 | 2P | BG13NUC-LC84 |
| 7421 | 2P | BG13NUC-LC85 |
| 7422 | 2P | BG13NUC-LC86 |
| 7423 | RBD | BG13NUC-LC87 |
| 7424 | RBD | BG13NUC-LC88 |
| 7425 | RBD | BG13NUC-LC89 |
| 7426 | RBD | BG13NUC-LC90 |
| 7427 | RBD | BG13NUC-LC91 |
| 7428 | 2P | BG13NUC-LC92 |
| 7429 | 2P | BG13NUC-LC93 |
| 7430 | 2P | BG13NUC-LC94 |
| 7431 | RBD | BG13NUC-LC95 |
| 7432 | RBD | BG13NUC-LC96 |
| 7433 | RBD | BG13NUC-LC97 |
| 7434 | RBD | BG13NUC-LC98 |
| 7435 | RBD | BG13NUC-LC99 |
| 7436 | 2P | BG13NUC-LC100 |
| 7437 | 2P | BG13NUC-LC101 |
| 7438 | RBD | BG13NUC-LC102 |
| 7439 | RBD | BG13NUC-LC103 |
| 7440 | 2P | BG13NUC-LC104 |
| 7441 | 2P | BG13NUC-LC105 |
| 7442 | RBD | BG13NUC-LC106 |
| 7443 | RBD | BG13NUC-LC107 |
| 7444 | RBD | BG13NUC-LC108 |
| 7445 | RBD | BG13NUC-LC109 |
| 7446 | RBD | BG13NUC-LC110 |
| 7447 | 2P | BG13NUC-LC111 |
| 7448 | 2P | BG13NUC-LC112 |
| 7449 | RBD | BG13NUC-LC113 |
| 7450 | RBD | BG13NUC-LC114 |
| 7451 | RBD | BG13NUC-LC115 |
| 7452 | RBD | BG13NUC-LC116 |
| 7453 | RBD | BG13NUC-LC117 |
| 7454 | RBD | BG13NUC-LC118 |
| 7455 | RBD | BG13NUC-LC119 |
| 7456 | 2P | BG13NUC-LC120 |
| 7457 | 2P | BG13NUC-LC121 |
| 7458 | 2P | BG13NUC-LC122 |
| 7459 | RBD | BG13NUC-LC123 |
| 7460 | RBD | BG13NUC-LC124 |
| 7461 | RBD | BG13NUC-LC125 |
| 7462 | 2P | BG13NUC-LC126 |
| 7463 | 2P | BG13NUC-LC127 |
| 7464 | 2P | BG13NUC-LC128 |
| 7465 | 2P | BG13NUC-LC129 |
| 7466 | 2P | BG13NUC-LC130 |
| 7467 | 2P | BG13NUC-LC131 |
| 7468 | 2P | BG13NUC-LC132 |
| 7469 | RBD | BG13NUC-LC133 |
| 7470 | RBD | BG13NUC-LC134 |
| 7471 | 2P | BG13NUC-LC135 |
| 7472 | 2P | BG13NUC-LC136 |
| 7473 | RBD | BG13NUC-LC137 |
| 7474 | RBD | BG13NUC-LC138 |
| 7475 | RBD | BG13NUC-LC139 |
| 7476 | 2P | BG13NUC-LC140 |
| 7477 | RBD | BG13NUC-LC141 |
| 7478 | RBD | BG13NUC-LC142 |
| 7479 | RBD | BG13NUC-LC143 |
| 7480 | 2P | BG13NUC-LC144 |
| 7481 | RBD | BG13NUC-LC145 |
| 7482 | RBD | BG13NUC-LC146 |
| 7483 | RBD | BG13NUC-LC147 |
| 7484 | 2P | BG13NUC-LC148 |
| 7485 | RBD | BG13NUC-LC149 |
| 7486 | 2P | BG13NUC-LC150 |
| 7487 | 2P | BG13NUC-LC151 |
| 7488 | 2P | BG13NUC-LC152 |
| 7489 | RBD | BG13NUC-LC153 |
| 7490 | RBD | BG13NUC-LC154 |
| 7491 | 2P | BG13NUC-LC155 |
| 7492 | 2P | BG13NUC-LC156 |
| 7493 | RBD | BG13NUC-LC157 |
| 7494 | RBD | BG13NUC-LC158 |
| 7495 | RBD | BG13NUC-LC159 |
| 7496 | 2P | BG13NUC-LC160 |
| 7497 | 2P | BG13NUC-LC161 |
| 7498 | 2P | BG13NUC-LC162 |
| 7499 | RBD | BG13NUC-LC163 |
| 7500 | 2P | BG13NUC-LC164 |
| 7501 | RBD | BG13NUC-LC165 |
| 7502 | RBD | BG13NUC-LC166 |
| 7503 | RBD | BG13NUC-LC167 |
| 7504 | 2P | BG13NUC-LC168 |
| 7505 | RBD | BG13NUC-LC169 |
| 7506 | 2P | BG13NUC-LC170 |
| 7507 | RBD | BG13NUC-LC171 |
| 7508 | RBD | BG13NUC-LC172 |
| 7509 | RBD | BG13NUC-LC173 |
| 7510 | RBD | BG13NUC-LC174 |
| 7511 | RBD | BG13NUC-LC175 |
| 7512 | RBD | BG13NUC-LC176 |
| 7513 | RBD | BG13NUC-LC177 |
| 7514 | 2P | BG13NUC-LC178 |
| 7515 | 2P | BG13NUC-LC179 |
| 7516 | 2P | BG13NUC-LC180 |
| 7517 | 2P | BG13NUC-LC181 |
| 7518 | 2P | BG13NUC-LC182 |
| 7519 | 2P | BG13NUC-LC183 |
| 7520 | RBD | BG13NUC-LC184 |
| 7521 | RBD | BG13NUC-LC185 |
| 7522 | RBD | BG13NUC-LC186 |
| 7523 | RBD | BG13NUC-LC187 |
| 7524 | 2P | BG13NUC-LC188 |
| 7525 | 2P | BG13NUC-LC189 |
| 7526 | 2P | BG13NUC-LC190 |
| 7527 | RBD | BG13NUC-LC191 |
| 7528 | 2P | BG13NUC-LC192 |
| 7529 | 2P | BG13NUC-LC193 |
| 7530 | 2P | BG13NUC-LC194 |
| 7531 | RBD | BG13NUC-LC195 |
| 7532 | 2P | BG13NUC-LC196 |
| 7533 | RBD | BG13NUC-LC197 |
| 7534 | 2P | BG13NUC-LC198 |
| 7535 | RBD | BG13NUC-LC199 |
| 7536 | RBD | BG13NUC-LC200 |
| 7537 | RBD | BG13NUC-LC201 |
| 7538 | 2P | BG13NUC-LC202 |
| 7539 | 2P | BG13NUC-LC203 |
| 7540 | 2P | BG13NUC-LC204 |
| 7541 | 2P | BG13NUC-LC205 |
| 7542 | 2P | BG13NUC-LC206 |
| 7543 | RBD | BG13NUC-LC207 |
| 7544 | 2P | BG13NUC-LC208 |
| 7545 | RBD | BG13NUC-LC209 |
| 7546 | 2P | BG13NUC-LC210 |
| 7547 | RBD | BG13NUC-LC211 |
| 7548 | 2P | BG13NUC-LC212 |
| 7549 | RBD | BG13NUC-LC213 |
| 7550 | 2P | BG13NUC-LC214 |
| 7551 | RBD | BG13NUC-LC215 |
| 7552 | RBD | BG13NUC-LC216 |
| 7553 | RBD | BG13NUC-LC217 |
| 7554 | 2P | BG13NUC-LC218 |
| 7555 | RBD | BG13NUC-LC219 |
| 7556 | RBD | BG13NUC-LC220 |
| 7557 | 2P | BG13NUC-LC221 |
| 7558 | 2P | BG13NUC-LC222 |
| 7559 | RBD | BG13NUC-LC223 |
| 7560 | 2P | BG13NUC-LC224 |
| 7561 | RBD | BG13NUC-LC225 |
| 7562 | 2P | BG13NUC-LC226 |
| 7563 | 2P | BG13NUC-LC227 |
| 7564 | 2P | BG13NUC-LC228 |
| 7565 | RBD | BG13NUC-LC229 |
| 7566 | RBD | BG13NUC-LC230 |
| 7567 | RBD | BG13NUC-LC231 |
| 7568 | 2P | BG13NUC-LC232 |
| 7569 | 2P | BG13NUC-LC233 |
| 7570 | 2P | BG13NUC-LC234 |
| 7571 | RBD | BG13NUC-LC235 |
| 7572 | 2P | BG13NUC-LC236 |
| 7573 | 2P | BG13NUC-LC237 |
| 7574 | 2P | BG13NUC-LC238 |
| 7575 | RBD | BG13NUC-LC239 |
| 7576 | RBD | BG13NUC-LC240 |
| 7577 | RBD | BG13NUC-LC241 |
| 7578 | RBD | BG13NUC-LC242 |
| 7579 | RBD | BG13NUC-LC243 |
| 7580 | RBD | BG13NUC-LC244 |
| 7581 | RBD | BG13NUC-LC245 |
| 7582 | 2P | BG13NUC-LC246 |
| 7583 | RBD | BG13NUC-LC247 |
| 7584 | 2P | BG13NUC-LC248 |
| 7585 | RBD | BG13NUC-LC249 |
| 7586 | 2P | BG13NUC-LC250 |
| 7587 | 2P | BG13NUC-LC251 |
| 7588 | 2P | BG13NUC-LC252 |
| 7589 | RBD | BG13NUC-LC253 |
| 7590 | 2P | BG13NUC-LC254 |
| 7591 | RBD | BG13NUC-LC255 |
| 7592 | 2P | BG13NUC-LC256 |
| 7593 | RBD | BG13NUC-LC257 |
| 7594 | RBD | BG13NUC-LC258 |
| 7595 | 2P | BG13NUC-LC259 |
| 7596 | 2P | BG13NUC-LC260 |
| 7597 | 2P | BG13NUC-LC261 |
| 7598 | 2P | BG13NUC-LC262 |
| 7599 | RBD | BG13NUC-LC263 |
| 7600 | RBD | BG13NUC-LC264 |
| 7601 | RBD | BG13NUC-LC265 |
| 7602 | 2P | BG13NUC-LC266 |
| 7603 | RBD | BG13NUC-LC267 |
| 7604 | 2P | BG13NUC-LC268 |
| 7605 | RBD | BG13NUC-LC269 |
| 7606 | 2P | BG13NUC-LC270 |
| 7607 | 2P | BG13NUC-LC271 |
| 7608 | 2P | BG13NUC-LC272 |
| 7609 | 2F | BG13NUC-LC273 |
| 7610 | 2P | BG13NUC-LC274 |
| 7611 | 2P | BG13NUC-LC275 |
| 7612 | 2P | BG13NUC-LC276 |
| 7613 | RBD | BG13NUC-LC277 |
| 7614 | 2P | BG13NUC-LC278 |
| 7615 | 2P | BG13NUC-LC279 |
| 7616 | RBD | BG13NUC-LC280 |
| 7617 | RBD | BG13NUC-LC281 |
| 7618 | RBD | BG13NUC-LC282 |
| 7619 | RBD | BG13NUC-LC283 |
| 7620 | RBD | BG13NUC-LC284 |
| 7621 | RBD | BG13NUC-LC285 |
| 7622 | 2P | BG13NUC-LC286 |
| 7623 | 2P | BG13NUC-LC287 |
| 7624 | RBD | BG13NUC-LC288 |
| 7625 | 2P | BG13NUC-LC289 |
| 7626 | 2P | BG13NUC-LC290 |
| 7627 | 2P | BG13NUC-LC291 |
| 7628 | RBD | BG13NUC-LC292 |
| 7629 | 2P | BG13NUC-LC293 |
| 7630 | RBD | BG13NUC-LC294 |
| 7631 | RBD | BG13NUC-LC295 |
| 7632 | RBD | BG13NUC-LC296 |
| 7633 | 2F | BG13NUC-LC297 |
| 7634 | 2P | BG13NUC-LC298 |
| 7635 | RBD | BG13NUC-LC299 |
| 7636 | 2P | BG13NUC-LC300 |
| 7637 | RBD | BG13NUC-LC301 |
| 7638 | 2P | BG13NUC-LC302 |
| 7639 | RBD | BG13NUC-LC303 |
| 7640 | 2P | BG13NUC-LC304 |
| 7641 | RBD | BG13NUC-LC305 |
| 7642 | 2P | BG13NUC-LC306 |
| 7643 | 2P | BG13NUC-LC307 |
| 7644 | RBD | BG13NUC-LC308 |
| 7645 | RBD | BG13NUC-LC309 |
| 7646 | 2P | BG13NUC-LC310 |
| 7647 | RBD | BG13NUC-LC311 |
| 7648 | 2P | BG13NUC-LC312 |
| 7649 | 2P | BG13NUC-LC313 |
| 7650 | RBD | BG13NUC-LC314 |
| 7651 | 2P | BG13NUC-LC315 |
| 7652 | 2P | BG13NUC-LC316 |
| 7653 | RBD | BG13NUC-LC317 |
| 7654 | 2P | BG13NUC-LC318 |
| 7655 | RBD | BG13NUC-LC319 |
| 7656 | RBD | BG13NUC-LC320 |
| 7657 | 2P | BG13NUC-LC321 |
| 7658 | 2P | BG13NUC-LC322 |
| 7659 | 2P | BG13NUC-LC323 |
| 7660 | RBD | BG13NUC-LC324 |
| 7661 | RBD | BG13NUC-LC325 |
| 7662 | RBD | BG13NUC-LC326 |
| 7663 | 2P | BG13NUC-LC327 |
| 7664 | 2P | BG13NUC-LC328 |
| 7665 | 2P | BG13NUC-LC329 |
| 7666 | 2P | BG13NUC-LC330 |
| 7667 | RBD | BG13NUC-LC331 |
| 7668 | 2P | BG13NUC-LC332 |
| 7669 | RBD | BG13NUC-LC333 |
| 7670 | RBD | BG13NUC-LC334 |
| 7671 | 2P | BG13NUC-LC335 |
| 7672 | RBD | BG13NUC-LC336 |
| 7673 | RBD | BG13NUC-LC337 |
| 7674 | RBD | BG13NUC-LC338 |
| 7675 | RBD | BG13NUC-LC339 |
| 7676 | RBD | BG13NUC-LC340 |
| 7677 | 2P | BG13NUC-LC341 |
| 7678 | 2P | BG13NUC-LC342 |
| 7679 | 2P | BG13NUC-LC343 |
| 7680 | RBD | BG13NUC-LC344 |
| 7681 | 2P | BG13NUC-LC345 |
| 7682 | 2P | BG13NUC-LC346 |
| 7683 | RBD | BG13NUC-LC347 |
| 7684 | 2P | BG13NUC-LC348 |
| 7685 | 2P | BG13NUC-LC349 |
| 7686 | 2P | BG13NUC-LC350 |
| 7687 | 2P | BG13NUC-LC351 |
| 7688 | RBD | BG13NUC-LC352 |
| 7689 | 2P | BG13NUC-LC353 |
| 7690 | RBD | BG13NUC-LC354 |
| 7691 | 2P | BG13NUC-LC355 |
| 7692 | RBD | BG13NUC-LC356 |
| 7693 | 2P | BG13NUC-LC357 |
| 7694 | RBD | BG13NUC-LC358 |
| 7695 | 2P | BG13NUC-LC359 |
| 7696 | RBD | BG13NUC-LC360 |
| 7697 | 2P | BG13NUC-LC361 |
| 7698 | 2P | BG13NUC-LC362 |
| 7699 | RBD | BG13NUC-LC363 |
| 7700 | RBD | BG13NUC-LC364 |
| 7701 | RBD | BG13NUC-LC365 |
| 7702 | 2P | BG13NUC-LC366 |
| 7703 | 2P | BG13NUC-LC367 |
| 7704 | 2P | BG13NUC-LC368 |
| 7705 | 2P | BG13NUC-LC369 |
| 7706 | RBD | BG13NUC-LC370 |
| 7707 | 2P | BG13NUC-LC371 |
| 7708 | 2P | BG13NUC-LC372 |
| 7709 | 2P | BG13NUC-LC373 |
| 7710 | RBD | BG13NUC-LC374 |
| 7711 | 2P | BG13NUC-LC375 |
| 7712 | 2P | BG13NUC-LC376 |
| 7713 | RBD | BG13NUC-LC377 |
| 7714 | 2P | BG13NUC-LC378 |
| 7715 | RBD | BG13NUC-LC379 |
| 7716 | RBD | BG13NUC-LC380 |
| 7717 | 2P | BG13NUC-LC381 |
| 7718 | RBD | BG13NUC-LC382 |
| 7719 | RBD | BG13NUC-LC383 |
| 7720 | 2P | BG13NUC-LC384 |
| 7721 | RBD | BG13NUC-LC385 |
| 7722 | RBD | BG13NUC-LC386 |
| 7723 | RBD | BG13NUC-LC387 |
| 7724 | 2P | BG13NUC-LC388 |
| 7725 | 2P | BG13NUC-LC389 |
| 7726 | 2P | BG13NUC-LC390 |
| 7727 | 2P | BG13NUC-LC391 |
| 7728 | RBD | BG13NUC-LC392 |
| 7729 | RBD | BG13NUC-LC393 |
| 7730 | RBD | BG13NUC-LC394 |
| 7731 | 2P | BG13NUC-LC395 |
| 7732 | 2P | BG13NUC-LC396 |
| 7733 | 2P | BG13NUC-LC397 |
| 7734 | 2P | BG13NUC-LC398 |
| 7735 | 2P | BG13NUC-LC399 |
| 7736 | RBD | BG13NUC-LC400 |
| 7737 | 2P | BG13NUC-LC401 |
| 7738 | 2P | BG13NUC-LC402 |
| 7739 | 2P | BG13NUC-LC403 |
| 7740 | 2P | BG13NUC-LC404 |
| 7741 | 2P | BG13NUC-LC405 |
| 7742 | RBD | BG13NUC-LC406 |
| 7743 | 2P | BG13NUC-LC407 |
| 7744 | 2P | BG13NUC-LC408 |
| 7745 | 2P | BG13NUC-LC409 |
| 7746 | 2P | BG13NUC-LC410 |
| 7747 | RBD | BG13NUC-LC411 |
| 7748 | RBD | BG13NUC-LC412 |
| 7749 | RBD | BG13NUC-LC413 |
| 7750 | RBD | BG13NUC-LC414 |
| 7751 | 2P | BG13NUC-LC415 |
| 7752 | 2P | BG13NUC-LC416 |
| 7753 | RBD | BG13NUC-LC417 |
| 7754 | RBD | BG13NUC-LC418 |
| 7755 | 2P | BG13NUC-LC419 |
| 7756 | 2P | BG13NUC-LC420 |
| 7757 | RBD | BG13NUC-LC421 |
| 7758 | 2P | BG13NUC-LC422 |
| 7759 | 2P | BG13NUC-LC423 |
| 7760 | RBD | BG13NUC-LC424 |
| 7761 | RBD | BG13NUC-LC425 |
| 7762 | RBD | BG13NUC-LC426 |
| 7763 | 2P | BG13NUC-LC427 |
| 7764 | 2P | BG13NUC-LC428 |
| 7765 | 2P | BG13NUC-LC429 |
| 7766 | 2P | BG13NUC-LC430 |
| 7767 | 2P | BG13NUC-LC431 |
| 7768 | RBD | BG13NUC-LC432 |
| 7769 | 2P | BG13NUC-LC433 |
| 7770 | 2P | BG13NUC-LC434 |
| 7771 | 2P | BG13NUC-LC435 |
| 7772 | 2P | BG13NUC-LC436 |
| 7773 | 2P | BG13NUC-LC437 |
| 7774 | 2P | BG13NUC-LC438 |
| 7775 | RBD | BG13NUC-LC439 |
| 7776 | RBD | BG13NUC-LC440 |
| 7777 | 2P | BG13NUC-LC441 |
| 7778 | 2P | BG13NUC-LC442 |
| 7779 | 2P | BG13NUC-LC443 |
| 7780 | 2P | BG13NUC-LC444 |
| 7781 | 2P | BG13NUC-LC445 |
| 7782 | 2P | BG13NUC-LC446 |
| 7783 | 2P | BG13NUC-LC447 |
| 7784 | 2P | BG13NUC-LC448 |
| 7785 | RBD | BG13NUC-LC449 |
| 7786 | 2P | BG13NUC-LC450 |
| 7787 | 2P | BG13NUC-LC451 |
| 7788 | 2P | BG13NUC-LC452 |
| 7789 | 2P | BG13NUC-LC453 |
| 7790 | RBD | BG13NUC-LC454 |
| 7791 | RBD | BG13NUC-LC455 |
| 7792 | 2P | BG13NUC-LC456 |
| 7793 | 2P | BG13NUC-LC457 |
| 7794 | 2P | BG13NUC-LC458 |
| 7795 | RBD | BG13NUC-LC459 |
| 7796 | 2P | BG13NUC-LC460 |
| 7797 | RBD | BG13NUC-LC461 |
| 7798 | 2P | BG13NUC-LC462 |
| 7799 | RBD | BG13NUC-LC463 |
| 7800 | RBD | BG13NUC-LC464 |
| 7801 | 2P | BG13NUC-LC465 |
| 7802 | 2P | BG13NUC-LC466 |
| 7803 | 2P | BG13NUC-LC467 |
| 7804 | 2P | BG13NUC-LC468 |
| 7805 | 2P | BG13NUC-LC469 |
| 7806 | 2P | BG13NUC-LC470 |
| 7807 | RBD | BG13NUC-LC471 |
| 7808 | 2P | BG13NUC-LC472 |
| 7809 | RBD | BG13NUC-LC473 |
| 7810 | RBD | BG13NUC-LC474 |
| 7811 | 2P | BG13NUC-LC475 |
| 7812 | 2P | BG13NUC-LC476 |
| 7813 | 2P | BG13NUC-LC477 |
| 7814 | 2P | BG13NUC-LC478 |
| 7815 | 2P | BG13NUC-LC479 |
| 7816 | 2P | BG13NUC-LC480 |
| 7817 | 2P | BG13NUC-LC481 |
| 7818 | 2P | BG13NUC-LC482 |
| 7819 | 2P | BG13NUC-LC483 |
| 7820 | 2P | BG13NUC-LC484 |
| 7821 | 2P | BG13NUC-LC485 |
| 7822 | RBD | BG13NUC-LC486 |
| 7823 | RBD | BG13NUC-LC487 |
| 7824 | 2P | BG13NUC-LC488 |
| 7825 | 2P | BG13NUC-LC489 |
| 7826 | 2P | BG13NUC-LC490 |
| 7827 | 2P | BG13NUC-LC491 |
| 7828 | 2P | BG13NUC-LC492 |
| 7829 | 2P | BG13NUC-LC493 |
| 7830 | 2P | BG13NUC-LC494 |
| 7831 | 2P | BG13NUC-LC495 |
| 7832 | RBD | BG13NUC-LC496 |
| 7833 | RBD | BG13NUC-LC497 |
| 7834 | 2P | BG13NUC-LC498 |
| 7835 | RBD | BG13NUC-LC499 |
| 7836 | 2P | BG13NUC-LC500 |
| 7837 | RBD | BG13NUC-LC501 |
| 7838 | 2P | BG13NUC-LC502 |
| 7839 | 2P | BG13NUC-LC503 |
| 7840 | RBD | BG13NUC-LC504 |
| 7841 | 2P | BG13NUC-LC505 |
| 7842 | RBD | BG13NUC-LC506 |
| 7843 | RBD | BG13NUC-LC507 |
| 7844 | 2P | BG13NUC-LC508 |
| 7845 | 2P | BG13NUC-LC509 |
| 7846 | 2P | BG13NUC-LC510 |
| 7847 | 2P | BG13NUC-LC511 |
| 7848 | RBD | BG13NUC-LC512 |
| 7849 | RBD | BG13NUC-LC513 |
| 7850 | RBD | BG13NUC-LC514 |
| 7851 | 2P | BG13NUC-LC515 |
| 7852 | 2P | BG13NUC-LC516 |
| 7853 | 2P | BG13NUC-LC517 |
| 7854 | RBD | BG13NUC-LC518 |
| 7855 | RBD | BG13NUC-LC519 |
| 7856 | 2P | BG13NUC-LC520 |
| 7857 | 2P | BG13NUC-LC521 |
| 7858 | RBD | BG13NUC-LC522 |
| 7859 | RBD | BG13NUC-LC523 |
| 7860 | RBD | BG13NUC-LC524 |
| 7861 | 2P | BG13NUC-LC525 |
| 7862 | 2P | BG13NUC-LC526 |
| 7863 | 2P | BG13NUC-LC527 |
| 7864 | 2P | BG13NUC-LC528 |
| 7865 | 2P | BG13NUC-LC529 |
| 7866 | RBD | BG13NUC-LC530 |
| 7867 | 2P | BG13NUC-LC531 |
| 7868 | RBD | BG13NUC-LC532 |
| 7869 | RBD | BG13NUC-LC533 |
| 7870 | RBD | BG13NUC-LC534 |
| 7871 | RBD | BG13NUC-LC535 |
| 7872 | 2P | BG13NUC-LC536 |
| 7873 | 2P | BG13NUC-LC537 |
| 7874 | 2P | BG13NUC-LC538 |
| 7875 | 2P | BG13NUC-LC539 |
| 7876 | 2P | BG13NUC-LC540 |
| 7877 | 2P | BG13NUC-LC541 |
| 7878 | RBD | BG13NUC-LC542 |
| 7879 | RBD | BG13NUC-LC543 |
| 7880 | 2P | BG13NUC-LC544 |
| 7881 | 2P | BG13NUC-LC545 |
| 7882 | RBD | BG13NUC-LC546 |
| 7883 | RBD | BG13NUC-LC547 |
| 7884 | 2P | BG13NUC-LC548 |
| 7885 | RBD | BG13NUC-LC549 |
| 7886 | 2P | BG13NUC-LC550 |
| 7887 | 2P | BG13NUC-LC551 |
| 7888 | RBD | BG13NUC-LC552 |
| 7889 | RBD | BG13NUC-LC553 |
| 7890 | RBD | BG13NUC-LC554 |
| 7891 | RBD | BG13NUC-LC555 |
| 7892 | 2P | BG13NUC-LC556 |
| 7893 | 2P | BG13NUC-LC557 |
| 7894 | RBD | BG13NUC-LC558 |
| 7895 | 2P | BG13NUC-LC559 |
| 7896 | RBD | BG13NUC-LC560 |
| 7897 | 2P | BG13NUC-LC561 |
| 7898 | 2P | BG13NUC-LC562 |
| 7899 | 2P | BG13NUC-LC563 |
| 7900 | 2P | BG13NUC-LC564 |
| 7901 | 2P | BG13NUC-LC565 |
| 7902 | 2P | BG13NUC-LC566 |
| 7903 | 2P | BG13NUC-LC567 |
| 7904 | RBD | BG13NUC-LC568 |
| 7905 | RBD | BG13NUC-LC569 |
| 7906 | RBD | BG13NUC-LC570 |
| 7907 | RBD | BG13NUC-LC571 |
| 7908 | 2P | BG13NUC-LC572 |
| 7909 | 2P | BG13NUC-LC573 |
| 7910 | 2P | BG13NUC-LC574 |
| 7911 | 2P | BG13NUC-LC575 |
| 7912 | 2P | BG13NUC-LC576 |
| 7913 | 2P | BG13NUC-LC577 |
| 7914 | 2P | BG13NUC-LC578 |
| 7915 | 2P | BG13NUC-LC579 |
| 7916 | 2P | BG13NUC-LC580 |
| 7917 | 2P | BG13NUC-LC581 |
| 7918 | 2P | BG13NUC-LC582 |
| 7919 | 2P | BG13NUC-LC583 |
| 7920 | 2P | BG13NUC-LC584 |
| 7921 | 2P | BG13NUC-LC585 |
| 7922 | 2P | BG13NUC-LC586 |
| 7923 | 2P | BG13NUC-LC587 |
| 7924 | 2P | BG13NUC-LC588 |
| 7925 | 2P | BG13NUC-LC589 |
| 7926 | 2P | BG13NUC-LC590 |
| 7927 | RBD | BG13NUC-LC591 |
| 7928 | 2P | BG13NUC-LC592 |
| 7929 | RBD | BG13NUC-LC593 |
| 7930 | 2P | BG13NUC-LC594 |
| 7931 | RBD | BG13NUC-LC595 |
| 7932 | 2P | BG13NUC-LC596 |
| 7933 | 2P | BG13NUC-LC597 |
| 7934 | RBD | BG13NUC-LC598 |
| 7935 | 2P | BG13NUC-LC599 |
| 7936 | 2P | BG13NUC-LC600 |
| 7937 | 2P | BG13NUC-LC601 |
| 7938 | 2P | BG13NUC-LC602 |
| 7939 | 2P | BG13NUC-LC603 |
| 7940 | 2P | BG13NUC-LC604 |
| 7941 | 2P | BG13NUC-LC605 |
| 7942 | RBD | BG13NUC-LC606 |
| 7943 | RBD | BG13NUC-LC607 |
| 7944 | RBD | BG13NUC-LC608 |
| 7945 | 2P | BG13NUC-LC609 |
| 7946 | RBD | BG13NUC-LC610 |
| 7947 | 2P | BG13NUC-LC611 |
| 7948 | RBD | BG13NUC-LC612 |
| 7949 | RBD | BG13NUC-LC613 |
| 7950 | RBD | BG13NUC-LC614 |
| 7951 | 2P | BG13NUC-LC615 |
| 7952 | 2P | BG13NUC-LC616 |
| 7953 | RBD | BG13NUC-LC617 |
| 7954 | RBD | BG13NUC-LC618 |
| 7955 | 2P | BG13NUC-LC619 |
| 7956 | RBD | BG13NUC-LC620 |
| 7957 | 2P | BG13NUC-LC621 |
| 7958 | 2P | BG13NUC-LC622 |
| 7959 | RBD | BG13NUC-LC623 |
| 7960 | RBD | BG13NUC-LC624 |
| 7961 | 2P | BG13NUC-LC625 |
| 7962 | 2P | BG13NUC-LC626 |
| 7963 | 2P | BG13NUC-LC627 |
| 7964 | RBD | BG13NUC-LC628 |
| 7965 | RBD | BG13NUC-LC629 |
| 7966 | RBD | BG13NUC-LC630 |
| 7967 | 2P | BG13NUC-LC631 |
| 7968 | 2P | BG13NUC-LC632 |
| 7969 | 2P | BG13NUC-LC633 |
| 7970 | 2P | BG13NUC-LC634 |
| 7971 | 2P | BG13NUC-LC635 |
| 7972 | RBD | BG13NUC-LC636 |
| 7973 | RBD | BG13NUC-LC637 |
| 7974 | RBD | BG13NUC-LC638 |
| 7975 | 2P | BG13NUC-LC639 |
| 7976 | RBD | BG13NUC-LC640 |
| 7977 | RBD | BG13NUC-LC641 |
| 7978 | 2P | BG13NUC-LC642 |
| 7979 | 2P | BG13NUC-LC643 |
| 7980 | RBD | BG13NUC-LC644 |
| 7981 | RBD | BG13NUC-LC645 |
| 7982 | 2P | BG13NUC-LC646 |
| 7983 | RBD | BG13NUC-LC647 |
| 7984 | 2P | BG13NUC-LC648 |
| 7985 | 2P | BG13NUC-LC649 |
| 7986 | RBD | BG13NUC-LC650 |
| 7987 | RBD | BG13NUC-LC651 |
| 7988 | 2P | BG13NUC-LC652 |
| 7989 | 2P | BG13NUC-LC653 |
| 7990 | 2P | BG13NUC-LC654 |
| 7991 | 2P | BG13NUC-LC655 |
| 7992 | RBD | BG13NUC-LC656 |
| 7993 | RBD | BG13NUC-LC657 |
| 7994 | 2P | BG13NUC-LC658 |
| 7995 | 2P | BG13NUC-LC659 |
| 7996 | 2P | BG13NUC-LC660 |
| 7997 | 2P | BG13NUC-LC661 |
| 7998 | 2P | BG13NUC-LC662 |
| 7999 | 2P | BG13NUC-LC663 |
| 8000 | RBD | BG13NUC-LC664 |
| 8001 | 2P | BG13NUC-LC665 |
| 8002 | RBD | BG13NUC-LC666 |
| 8003 | 2P | BG13NUC-LC667 |
| 8004 | RBD | BG13NUC-LC668 |
| 8005 | RBD | BG13NUC-LC669 |
| 8006 | RBD | BG13NUC-LC670 |
| 8007 | 2F | BG13NUC-LC671 |
| 8008 | RBD | BG13NUC-LC672 |
| 8009 | 2P | BG13NUC-LC673 |
| 8010 | RBD | BG13NUC-LC674 |
| 8011 | RBD | BG13NUC-LC675 |
| 8012 | 2P | BG13NUC-LC676 |
| 8013 | 2P | BG13NUC-LC677 |
| 8014 | 2P | BG13NUC-LC678 |
| 8015 | RBD | BG13NUC-LC679 |
| 8016 | 2P | BG13NUC-LC680 |
| 8017 | 2P | BG13NUC-LC681 |
| 8018 | 2P | BG13NUC-LC682 |
| 8019 | 2P | BG13NUC-LC683 |
| 8020 | RBD | BG13NUC-LC684 |
| 8021 | 2P | BG13NUC-LC685 |
| 8022 | 2P | BG13NUC-LC686 |
| 8023 | 2P | BG13NUC-LC687 |
| 8024 | RBD | BG13NUC-LC688 |
| 8025 | 2P | BG13NUC-LC689 |
| 8026 | RBD | BG13NUC-LC690 |
| 8027 | 2F | BG13NUC-LC691 |
| 8028 | RBD | BG13NUC-LC692 |
| 8029 | RBD | BG13NUC-LC693 |
| 8030 | RBD | BG13NUC-LC694 |
| 8031 | 2P | BG13NUC-LC695 |
| 8032 | RBD | BG13NUC-LC696 |
| 8033 | RBD | BG13NUC-LC697 |
| 8034 | RBD | BG13NUC-LC698 |
| 8035 | 2P | BG13NUC-LC699 |
| 8036 | RBD | BG13NUC-LC700 |
| 8037 | RBD | BG13NUC-LC701 |
| 8038 | 2P | BG13NUC-LC702 |
| 8039 | 2P | BG13NUC-LC703 |
| 8040 | 2P | BG13NUC-LC704 |
| 8041 | 2P | BG13NUC-LC705 |
| 8042 | 2P | BG13NUC-LC706 |
| 8043 | 2P | BG13NUC-LC707 |
| 8044 | 2P | BG13NUC-LC708 |
| 8045 | 2P | BG13NUC-LC709 |
| 8046 | 2P | BG13NUC-LC710 |
| 8047 | 2P | BG13NUC-LC711 |
| 8048 | 2P | BG13NUC-LC712 |
| 8049 | 2P | BG13NUC-LC713 |
| 8050 | 2P | BG13NUC-LC714 |
| 8051 | RBD | BG13NUC-LC715 |
| 8052 | RBD | BG13NUC-LC716 |
| 8053 | RBD | BG13NUC-LC717 |
| 8054 | RBD | BG13NUC-LC718 |
| 8055 | RBD | BG13NUC-LC719 |
| 8056 | 2P | BG13NUC-LC720 |
| 8057 | 2P | BG13NUC-LC721 |
| 8058 | 2P | BG13NUC-LC722 |
| 8059 | 2P | BG13NUC-LC723 |
| 8060 | 2P | BG13NUC-LC724 |
| 8061 | 2P | BG13NUC-LC725 |
| 8062 | 2P | BG13NUC-LC726 |
| 8063 | 2P | BG13NUC-LC727 |
| 8064 | 2P | BG13NUC-LC728 |
| 8065 | RBD | BG13NUC-LC729 |
| 8066 | 2P | BG13NUC-LC730 |
| 8067 | 2P | BG13NUC-LC731 |
| 8068 | 2P | BG13NUC-LC732 |
| 8069 | 2P | BG13NUC-LC733 |
| 8070 | 2P | BG13NUC-LC734 |
| 8071 | 2P | BG13NUC-LC735 |
| 8072 | 2P | BG13NUC-LC736 |
| 8073 | RBD | BG13NUC-LC737 |
| 8074 | 2P | BG13NUC-LC738 |
| 8075 | RBD | BG13NUC-LC739 |
| 8076 | RBD | BG13NUC-LC740 |
| 8077 | RBD | BG13NUC-LC741 |
| 8078 | 2P | BG13NUC-LC742 |
| 8079 | 2P | BG13NUC-LC743 |
| 8080 | 2P | BG13NUC-LC744 |
| 8081 | RBD | BG13NUC-LC745 |
| 8082 | 2F | BG13NUC-LC746 |
| 8083 | RBD | BG13NUC-LC747 |
| 8084 | 2P | BG13NUC-LC748 |
| 8085 | 2P | BG13NUC-LC749 |
| 8086 | 2P | BG13NUC-LC750 |
| 8087 | 2P | BG13NUC-LC751 |
| 8088 | 2P | BG13NUC-LC752 |
| 8089 | 2P | BG13NUC-LC753 |
| 8090 | 2P | BG13NUC-LC754 |
| 8091 | 2P | BG13NUC-LC755 |
| 8092 | 2P | BG13NUC-LC756 |
| 8093 | 2P | BG13NUC-LC757 |
| 8094 | RBD | BG13NUC-LC758 |
| 8095 | 2P | BG13NUC-LC759 |
| 8096 | 2P | BG13NUC-LC760 |
| 8097 | 2P | BG13NUC-LC761 |
| 8098 | 2P | BG13NUC-LC762 |
| 8099 | RBD | BG13NUC-LC763 |
| 8100 | 2P | BG13NUC-LC764 |
| 8101 | 2P | BG13NUC-LC765 |
| 8102 | 2P | BG13NUC-LC766 |
| 8103 | 2P | BG13NUC-LC767 |
| 8104 | 2P | BG13NUC-LC768 |
| 8105 | 2P | BG13NUC-LC769 |
| 8106 | 2P | BG13NUC-LC770 |
| 8107 | 2P | BG13NUC-LC771 |
| 8108 | 2P | BG13NUC-LC772 |
| 8109 | RBD | BG13NUC-LC773 |
| 8110 | RBD | BG13NUC-LC774 |
| 8111 | RBD | BG13NUC-LC775 |
| 8112 | RBD | BG13NUC-LC776 |
| 8113 | RBD | BG13NUC-LC777 |
| 8114 | RBD | BG13NUC-LC778 |
| 8115 | 2P | BG13NUC-LC779 |
| 8116 | RBD | BG13NUC-LC780 |
| 8117 | RBD | BG13NUC-LC781 |
| 8118 | 2P | BG13NUC-LC782 |
| 8119 | 2P | BG13NUC-LC783 |
| 8120 | RBD | BG13NUC-LC784 |
| 8121 | RBD | BG13NUC-LC785 |
| 8122 | 2P | BG13NUC-LC786 |
| 8123 | 2P | BG13NUC-LC787 |
| 8124 | 2P | BG13NUC-LC788 |
| 8125 | 2P | BG13NUC-LC789 |
| 8126 | RBD | BG13NUC-LC790 |
| 8127 | 2P | BG13NUC-LC791 |
| 8128 | RBD | BG13NUC-LC792 |
| 8129 | RBD | BG13NUC-LC793 |
| 8130 | 2P | BG13NUC-LC794 |
| 8131 | 2P | BG13NUC-LC795 |
| 8132 | 2P | BG13NUC-LC796 |
| 8133 | 2P | BG13NUC-LC797 |
| 8134 | 2P | BG13NUC-LC798 |
| 8135 | RBD | BG13NUC-LC799 |
| 8136 | RBD | BG13NUC-LC800 |
| 8137 | RBD | BG13NUC-LC801 |
| 8138 | 2P | BG13NUC-LC802 |
| 8139 | 2P | BG13NUC-LC803 |
| 8140 | 2P | BG13NUC-LC804 |
| 8141 | 2P | BG13NUC-LC805 |
| 8142 | 2P | BG13NUC-LC806 |
| 8143 | 2P | BG13NUC-LC807 |
| 8144 | 2P | BG13NUC-LC808 |
| 8145 | 2P | BG13NUC-LC809 |
| 8146 | 2P | BG13NUC-LC810 |
| 8147 | RBD | BG13NUC-LC811 |
| 8148 | RBD | BG13NUC-LC812 |
| 8149 | RBD | BG13NUC-LC813 |
| 8150 | 2P | BG13NUC-LC814 |
| 8151 | 2P | BG13NUC-LC815 |
| 8152 | 2P | BG13NUC-LC816 |
| 8153 | 2P | BG13NUC-LC817 |
| 8154 | 2P | BG13NUC-LC818 |
| 8155 | 2P | BG13NUC-LC819 |
| 8156 | 2P | BG13NUC-LC820 |
| 8157 | 2P | BG13NUC-LC821 |
| 8158 | 2P | BG13NUC-LC822 |
| 8159 | RBD | BG13NUC-LC823 |
| 8160 | RBD | BG13NUC-LC824 |
| 8161 | RBD | BG13NUC-LC825 |
| 8162 | RBD | BG13NUC-LC826 |
| 8163 | RBD | BG13NUC-LC827 |
| 8164 | 2P | BG13NUC-LC828 |
| 8165 | 2P | BG13NUC-LC829 |
| 8166 | 2P | BG13NUC-LC830 |
| 8167 | 2P | BG13NUC-LC831 |
| 8168 | 2P | BG13NUC-LC832 |
| 8169 | RBD | BG13NUC-LC833 |
| 8170 | RBD | BG13NUC-LC834 |
| 8171 | RBD | BG13NUC-LC835 |
| 8172 | 2P | BG13NUC-LC836 |
| 8173 | RBD | BG13NUC-LC837 |
| 8174 | 2P | BG13NUC-LC838 |
| 8175 | RBD | BG13NUC-LC839 |
| 8176 | 2P | BG13NUC-LC840 |
| 8177 | 2P | BG13NUC-LC841 |
| 8178 | RBD | BG13NUC-LC842 |
| 8179 | RBD | BG13NUC-LC843 |
| 8180 | 2P | BG13NUC-LC844 |
| 8181 | RBD | BG13NUC-LC845 |
| 8182 | RBD | BG13NUC-LC846 |
| 8183 | 2P | BG13NUC-LC847 |
| 8184 | 2P | BG13NUC-LC848 |
| 8185 | RBD | BG13NUC-LC849 |
| 8186 | RBD | BG13NUC-LC850 |
| 8187 | RBD | BG13NUC-LC851 |
| 8188 | 2P | BG13NUC-LC852 |
| 8189 | 2P | BG13NUC-LC853 |
| 8190 | 2P | BG13NUC-LC854 |
| 8191 | 2P | BG13NUC-LC855 |
| 8192 | 2P | BG13NUC-LC856 |
| 8193 | RBD | BG13NUC-LC857 |
| 8194 | 2P | BG13NUC-LC858 |
| 8195 | 2P | BG13NUC-LC859 |
| 8196 | 2P | BG13NUC-LC860 |
| 8197 | 2P | BG13NUC-LC861 |
| 8198 | 2P | BG13NUC-LC862 |
| 8199 | RBD | BG13NUC-LC863 |
| 8200 | 2P | BG13NUC-LC864 |
| 8201 | 2P | BG13NUC-LC865 |
| 8202 | 2P | BG13NUC-LC866 |
| 8203 | 2P | BG13NUC-LC867 |
| 8204 | 2F | BG13NUC-LC868 |
| 8205 | 2P | BG13NUC-LC869 |
| 8206 | RBD | BG13NUC-LC870 |
| 8207 | 2P | BG13NUC-LC871 |
| 8208 | RBD | BG13NUC-LC872 |
| 8209 | RBD | BG13NUC-LC873 |
| 8210 | RBD | BG13NUC-LC874 |
| 8211 | RBD | BG13NUC-LC875 |
| 8212 | RBD | BG13NUC-LC876 |
| 8213 | RBD | BG13NUC-LC877 |
| 8214 | 2P | BG13NUC-LC878 |
| 8215 | 2P | BG13NUC-LC879 |
| 8216 | 2P | BG13NUC-LC880 |
| 8217 | 2P | BG13NUC-LC881 |
| 8218 | RBD | BG13NUC-LC882 |
| 8219 | 2P | BG13NUC-LC883 |
| 8220 | RBD | BG13NUC-LC884 |
| 8221 | RBD | BG13NUC-LC885 |
| 8222 | 2P | BG13NUC-LC886 |
| 8223 | RBD | BG13NUC-LC887 |
| 8224 | RBD | BG13NUC-LC888 |
| 8225 | RBD | BG13NUC-LC889 |
| 8226 | RBD | BG13NUC-LC890 |
| 8227 | RBD | BG13NUC-LC891 |
| 8228 | RBD | BG13NUC-LC892 |
| 8229 | 2P | BG13NUC-LC893 |
| 8230 | RBD | BG13NUC-LC894 |
| 8231 | RBD | BG13NUC-LC895 |
| 8232 | RBD | BG13NUC-LC896 |
| 8233 | RBD | BG13NUC-LC897 |
| 8234 | RBD | BG13NUC-LC898 |
| 8235 | RBD | BG13NUC-LC899 |
| 8236 | 2P | BG13NUC-LC900 |
| 8237 | 2P | BG13NUC-LC901 |
| 8238 | 2P | BG13NUC-LC902 |
| 8239 | 2P | BG13NUC-LC903 |
| 8240 | 2P | BG13NUC-LC904 |
| 8241 | RBD | BG13NUC-LC905 |
| 8242 | 2P | BG13NUC-LC906 |
| 8243 | RBD | BG13NUC-LC907 |
| 8244 | 2P | BG13NUC-LC908 |
| 8245 | 2P | BG13NUC-LC909 |
| 8246 | 2P | BG13NUC-LC910 |
| 8247 | 2P | BG13NUC-LC911 |
| 8248 | 2P | BG13NUC-LC912 |
| 8249 | 2P | BG13NUC-LC913 |
| 8250 | 2P | BG13NUC-LC914 |
| 8251 | 2P | BG13NUC-LC915 |
| 8252 | 2P | BG13NUC-LC916 |
| 8253 | 2P | BG13NUC-LC917 |
| 8254 | 2P | BG13NUC-LC918 |
| 8255 | RBD | BG13NUC-LC919 |
| 8256 | 2P | BG13NUC-LC920 |
| 8257 | RBD | BG13NUC-LC921 |
| 8258 | RBD | BG13NUC-LC922 |
| 8259 | RBD | BG13NUC-LC923 |
| 8260 | RBD | BG13NUC-LC924 |
| 8261 | 2P | BG13NUC-LC925 |
| 8262 | 2P | BG13NUC-LC926 |
| 8263 | RBD | BG13NUC-LC927 |
| 8264 | 2P | BG13NUC-LC928 |
| 8265 | 2P | BG13NUC-LC929 |
| 8266 | 2P | BG13NUC-LC930 |
| 8267 | 2P | BG13NUC-LC931 |
| 8268 | 2P | BG13NUC-LC932 |
| 8269 | 2P | BG13NUC-LC933 |
| 8270 | 2P | BG13NUC-LC934 |
| 8271 | RBD | BG13NUC-LC935 |
| 8272 | RBD | BG13NUC-LC936 |
| 8273 | 2P | BG13NUC-LC937 |
| 8274 | 2P | BG13NUC-LC938 |
| 8275 | 2P | BG13NUC-LC939 |
| 8276 | RBD | BG13NUC-LC940 |
| 8277 | 2P | BG13NUC-LC941 |
| 8278 | RBD | BG13NUC-LC942 |
| 8279 | RBD | BG13NUC-LC943 |
| 8280 | RBD | BG13NUC-LC944 |
| 8281 | RBD | BG13NUC-LC945 |
| 8282 | 2P | BG13NUC-LC946 |
| 8283 | RBD | BG13NUC-LC947 |
| 8284 | RBD | BG13NUC-LC948 |
| 8285 | RBD | BG13NUC-LC949 |
| 8286 | 2P | BG13NUC-LC950 |
| 8287 | RBD | BG13NUC-LC951 |
| 8288 | 2P | BG13NUC-LC952 |
| 8289 | 2P | BG13NUC-LC953 |
| 8290 | 2P | BG13NUC-LC954 |
| 8291 | 2P | BG13NUC-LC955 |
| 8292 | 2P | BG13NUC-LC956 |
| 8293 | RBD | BG13NUC-LC957 |
| 8294 | 2P | BG13NUC-LC958 |
| 8295 | RBD | BG13NUC-LC959 |
| 8296 | RBD | BG13NUC-LC960 |
| 8297 | 2P | BG13NUC-LC961 |
| 8298 | RBD | BG13NUC-LC962 |
| 8299 | RBD | BG13NUC-LC963 |
| 8300 | 2P | BG13NUC-LC964 |
| 8301 | RBD | BG13NUC-LC965 |
| 8302 | 2P | BG13NUC-LC966 |
| 8303 | 2P | BG13NUC-LC967 |
| 8304 | 2P | BG13NUC-LC968 |
| 8305 | 2P | BG13NUC-LC969 |
| 8306 | RBD | BG13NUC-LC970 |
| 8307 | 2P | BG13NUC-LC971 |
| 8308 | RBD | BG13NUC-LC972 |
| 8309 | 2P | BG13NUC-LC973 |
| 8310 | RBD | BG13NUC-LC974 |
| 8311 | RBD | BG13NUC-LC975 |
| 8312 | RBD | BG13NUC-LC976 |
| 8313 | 2P | BG13NUC-LC977 |
| 8314 | RBD | BG13NUC-LC978 |
| 8315 | 2P | BG13NUC-LC979 |
| 8316 | 2P | BG13NUC-LC980 |
| 8317 | RBD | BG13NUC-LC981 |
| 8318 | 2P | BG13NUC-LC982 |
| 8319 | 2P | BG13NUC-LC983 |
| 8320 | RBD | BG13NUC-LC984 |
| 8321 | RBD | BG13NUC-LC985 |
| 8322 | RBD | BG13NUC-LC986 |
| 8323 | RBD | BG13NUC-LC987 |
| 8324 | 2P | BG13NUC-LC988 |
| 8325 | 2P | BG13NUC-LC989 |
| 8326 | 2P | BG13NUC-LC990 |
| 8327 | RBD | BG13NUC-LC991 |
| 8328 | 2P | BG13NUC-LC992 |
| 8329 | 2P | BG13NUC-LC993 |
| 8330 | RBD | BG13NUC-LC994 |
| 8331 | RBD | BG13NUC-LC995 |
| 8332 | 2P | BG13NUC-LC996 |
| 8333 | RBD | BG13NUC-LC997 |
| 8334 | 2P | BG13NUC-LC998 |
| 8335 | RBD | BG13NUC-LC999 |
| 8336 | 2P | BG13NUC-LC1000 |
| 8337 | RBD | BG13NUC-LC1001 |
| 8338 | RBD | BG13NUC-LC1002 |
| 8339 | 2P | BG13NUC-LC1003 |
| 8340 | RBD | BG13NUC-LC1004 |
| 8341 | 2P | BG13NUC-LC1005 |
| 8342 | 2P | BG13NUC-LC1006 |
| 8343 | 2P | BG13NUC-LC1007 |
| 8344 | 2P | BG13NUC-LC1008 |
| 8345 | 2P | BG13NUC-LC1009 |
| 8346 | RBD | BG13NUC-LC1010 |
| 8347 | 2P | BG13NUC-LC1011 |
| 8348 | 2P | BG13NUC-LC1012 |
| 8349 | RBD | BG13NUC-LC1013 |
| 8350 | RBD | BG13NUC-LC1014 |
| 8351 | 2P | BG13NUC-LC1015 |
| 8352 | 2P | BG13NUC-LC1016 |
| 8353 | 2P | BG13NUC-LC1017 |
| 8354 | 2P | BG13NUC-LC1018 |
| 8355 | 2P | BG13NUC-LC1019 |
| 8356 | 2P | BG13NUC-LC1020 |
| 8357 | 2P | BG13NUC-LC1021 |
| 8358 | RBD | BG13NUC-LC1022 |
| 8359 | 2P | BG13NUC-LC1023 |
| 8360 | 2P | BG13NUC-LC1024 |
| 8361 | 2P | BG13NUC-LC1025 |
| 8362 | RBD | BG13NUC-LC1026 |
| 8363 | 2P | BG13NUC-LC1027 |
| 8364 | 2P | BG13NUC-LC1028 |
| 8365 | 2P | BG13NUC-LC1029 |
| 8366 | 2P | BG13NUC-LC1030 |
| 8367 | 2P | BG13NUC-LC1031 |
| 8368 | RBD | BG13NUC-LC1032 |
| 8369 | RBD | BG13NUC-LC1033 |
| 8370 | 2P | BG13NUC-LC1034 |
| 8371 | 2P | BG13NUC-LC1035 |
| 8372 | 2P | BG13NUC-LC1036 |
| 8373 | 2P | BG13NUC-LC1037 |
| 8374 | RBD | BG13NUC-LC1038 |
| 8375 | RBD | BG13NUC-LC1039 |
| 8376 | RBD | BG13NUC-LC1040 |
| 8377 | 2P | BG13NUC-LC1041 |
| 8378 | 2F | BG13NUC-LC1042 |
| 8379 | RBD | BG13NUC-LC1043 |
| 8380 | 2P | BG13NUC-LC1044 |
| 8381 | 2P | BG13NUC-LC1045 |
| 8382 | 2P | BG13NUC-LC1046 |
| 8383 | 2P | BG13NUC-LC1047 |
| 8384 | 2P | BG13NUC-LC1048 |
| 8385 | RBD | BG13NUC-LC1049 |
| 8386 | 2P | BG13NUC-LC1050 |
| 8387 | 2P | BG13NUC-LC1051 |
| 8388 | 2P | BG13NUC-LC1052 |
| 8389 | RBD | BG13NUC-LC1053 |
| 8390 | 2P | BG13NUC-LC1054 |
| 8391 | 2P | BG13NUC-LC1055 |
| 8392 | 2P | BG13NUC-LC1056 |
| 8393 | 2P | BG13NUC-LC1057 |
| 8394 | 2P | BG13NUC-LC1058 |
| 8395 | RBD | BG13NUC-LC1059 |
| 8396 | 2P | BG13NUC-LC1060 |
| 8397 | RBD | BG13NUC-LC1061 |
| 8398 | 2P | BG13NUC-LC1062 |
| 8399 | 2P | BG13NUC-LC1063 |
| 8400 | 2P | BG13NUC-LC1064 |
| 8401 | RBD | BG13NUC-LC1065 |
| 8402 | 2P | BG13NUC-LC1066 |
| 8403 | 2P | BG13NUC-LC1067 |
| 8404 | RBD | BG13NUC-LC1068 |
| 8405 | 2P | BG13NUC-LC1069 |
| 8406 | 2P | BG13NUC-LC1070 |
| 8407 | 2P | BG13NUC-LC1071 |
| 8408 | RBD | BG13NUC-LC1072 |
| 8409 | RBD | BG13NUC-LC1073 |
| 8410 | 2P | BG13NUC-LC1074 |
| 8411 | RBD | BG13NUC-LC1075 |
| 8412 | 2P | BG13NUC-LC1076 |
| 8413 | 2F | BG13NUC-LC1077 |
| 8414 | RBD | BG13NUC-LC1078 |
| 8415 | RBD | BG13NUC-LC1079 |
| 8416 | RBD | BG13NUC-LC1080 |
| 8417 | RBD | BG13NUC-LC1081 |
| 8418 | 2P | BG13NUC-LC1082 |
| 8419 | 2P | BG13NUC-LC1083 |
| 8420 | RBD | BG13NUC-LC1084 |
| 8421 | 2P | BG13NUC-LC1085 |
| 8422 | RBD | BG13NUC-LC1086 |
| 8423 | 2P | BG13NUC-LC1087 |
| 8424 | 2P | BG13NUC-LC1088 |
| 8425 | 2P | BG13NUC-LC1089 |
| 8426 | RBD | BG13NUC-LC1090 |
| 8427 | RBD | BG13NUC-LC1091 |
| 8428 | 2P | BG13NUC-LC1092 |
| 8429 | RBD | BG13NUC-LC1093 |
| 8430 | 2P | BG13NUC-LC1094 |
| 8431 | RBD | BG13NUC-LC1095 |
| 8432 | RBD | BG13NUC-LC1096 |
| 8433 | RBD | BG13NUC-LC1097 |
| 8434 | RBD | BG13NUC-LC1098 |
| 8435 | 2P | BG13NUC-LC1099 |
| 8436 | RBD | BG13NUC-LC1100 |
| 8437 | RBD | BG13NUC-LC1101 |
| 8438 | RBD | BG13NUC-LC1102 |
| 8439 | RBD | BG13NUC-LC1103 |
| 8440 | 2P | BG13NUC-LC1104 |
| 8441 | 2P | BG13NUC-LC1105 |
| 8442 | RBD | BG13NUC-LC1106 |
| 8443 | 2P | BG13NUC-LC1107 |
| 8444 | RBD | BG13NUC-LC1108 |
| 8445 | 2P | BG13NUC-LC1109 |
| 8446 | 2P | BG13NUC-LC1110 |
| 8447 | 2P | BG13NUC-LC1111 |
| 8448 | RBD | BG13NUC-LC1112 |
| 8449 | 2P | BG13NUC-LC1113 |
| 8450 | RBD | BG13NUC-LC1114 |
| 8451 | 2P | BG13NUC-LC1115 |
| 8452 | 2P | BG13NUC-LC1116 |
| 8453 | 2P | BG13NUC-LC1117 |
| 8454 | 2P | BG13NUC-LC1118 |
| 8455 | 2P | BG13NUC-LC1119 |
| 8456 | 2P | BG13NUC-LC1120 |
| 8457 | 2P | BG13NUC-LC1121 |
| 8458 | 2P | BG13NUC-LC1122 |
| 8459 | 2P | BG13NUC-LC1123 |
| 8460 | 2P | BG13NUC-LC1124 |
| 8461 | 2F | BG13NUC-LC1125 |
| 8462 | RBD | BG13NUC-LC1126 |
| 8463 | 2P | BG13NUC-LC1127 |
| 8464 | 2P | BG13NUC-LC1128 |
| 8465 | 2P | BG13NUC-LC1129 |
| 8466 | 2P | BG13NUC-LC1130 |
| 8467 | RBD | BG13NUC-LC1131 |
| 8468 | RBD | BG13NUC-LC1132 |
| 8469 | 2P | BG13NUC-LC1133 |
| 8470 | RBD | BG13NUC-LC1134 |
| 8471 | RBD | BG13NUC-LC1135 |
| 8472 | RBD | BG13NUC-LC1136 |
| 8473 | RBD | BG14NUC-HC1 |
| 8474 | RBD | BG14NUC-HC2 |
| 8475 | RBD | BG14NUC-HC3 |
| 8476 | RBD | BG14NUC-HC4 |
| 8477 | RBD | BG14NUC-HC5 |
| 8478 | RBD | BG14NUC-HC6 |
| 8479 | RBD | BG14NUC-HC7 |
| 8480 | RBD | BG14NUC-HC8 |
| 8481 | RBD | BG14NUC-HC9 |
| 8482 | RBD | BG14NUC-HC10 |
| 8483 | RBD | BG14NUC-HC11 |
| 8484 | RBD | BG14NUC-HC12 |
| 8485 | RBD | BG14NUC-HC13 |
| 8486 | RBD | BG14NUC-HC14 |
| 8487 | RBD | BG14NUC-HC15 |
| 8488 | RBD | BG14NUC-HC16 |
| 8489 | RBD | BG14NUC-HC17 |
| 8490 | RBD | BG14NUC-HC18 |
| 8491 | RBD | BG14NUC-HC19 |
| 8492 | RBD | BG14NUC-HC20 |
| 8493 | RBD | BG14NUC-HC21 |
| 8494 | RBD | BG14NUC-HC22 |
| 8495 | RBD | BG14NUC-HC23 |
| 8496 | RBD | BG14NUC-HC24 |
| 8497 | RBD | BG14NUC-HC25 |
| 8498 | 2P | BG14NUC-HC26 |
| 8499 | 2P | BG14NUC-HC27 |
| 8500 | 2P | BG14NUC-HC28 |
| 8501 | 2P | BG14NUC-HC29 |
| 8502 | 2P | BG14NUC-HC30 |
| 8503 | 2P | BG14NUC-HC31 |
| 8504 | 2P | BG14NUC-HC32 |
| 8505 | 2P | BG14NUC-HC33 |
| 8506 | 2P | BG14NUC-HC34 |
| 8507 | 2P | BG14NUC-HC35 |
| 8508 | 2P | BG14NUC-HC36 |
| 8509 | 2P | BG14NUC-HC37 |
| 8510 | 2P | BG14NUC-HC38 |
| 8511 | 2P | BG14NUC-HC39 |
| 8512 | 2P | BG14NUC-HC40 |
| 8513 | 2P | BG14NUC-HC41 |
| 8514 | 2P | BG14NUC-HC42 |
| 8515 | 2P | BG14NUC-HC43 |
| 8516 | 2P | BG14NUC-HC44 |
| 8517 | 2P | BG14NUC-HC45 |
| 8518 | 2P | BG14NUC-HC46 |
| 8519 | 2P | BG14NUC-HC47 |
| 8520 | 2P | BG14NUC-HC48 |
| 8521 | 2P | BG14NUC-HC49 |
| 8522 | RBD | BG14NUC-HC50 |
| 8523 | RBD | BG14NUC-HC51 |
| 8524 | RBD | BG14NUC-HC52 |
| 8525 | RBD | BG14NUC-HC53 |
| 8526 | RBD | BG14NUC-HC54 |
| 8527 | RBD | BG14NUC-HC55 |
| 8528 | RBD | BG14NUC-HC56 |
| 8529 | RBD | BG14NUC-HC57 |
| 8530 | RBD | BG14NUC-HC58 |
| 8531 | 2P | BG14NUC-HC59 |
| 8532 | 2P | BG14NUC-HC60 |
| 8533 | 2P | BG14NUC-HC61 |
| 8534 | 2P | BG14NUC-HC62 |
| 8535 | 2P | BG14NUC-HC63 |
| 8536 | 2P | BG14NUC-HC64 |
| 8537 | 2P | BG14NUC-HC65 |
| 8538 | RBD | BG14NUC-HC66 |
| 8539 | RBD | BG14NUC-HC67 |
| 8540 | RBD | BG14NUC-HC68 |
| 8541 | RBD | BG14NUC-HC69 |
| 8542 | RBD | BG14NUC-HC70 |
| 8543 | 2F | BG14NUC-HC71 |
| 8544 | 2P | BG14NUC-HC72 |
| 8545 | RBD | BG14NUC-HC73 |
| 8546 | RBD | BG14NUC-HC74 |
| 8547 | RBD | BG14NUC-HC75 |
| 8548 | 2P | BG14NUC-HC76 |
| 8549 | RBD | BG14NUC-HC77 |
| 8550 | RBD | BG14NUC-HC78 |
| 8551 | RBD | BG14NUC-HC79 |
| 8552 | RBD | BG14NUC-HC80 |
| 8553 | RBD | BG14NUC-HC81 |
| 8554 | RBD | BG14NUC-HC82 |
| 8555 | RBD | BG14NUC-HC83 |
| 8556 | RBD | BG14NUC-HC84 |
| 8557 | RBD | BG14NUC-HC85 |
| 8558 | 2P | BG14NUC-HC86 |
| 8559 | 2P | BG14NUC-HC87 |
| 8560 | 2P | BG14NUC-HC88 |
| 8561 | 2F | BG14NUC-HC89 |
| 8562 | RBD | BG14NUC-HC90 |
| 8563 | RBD | BG14NUC-HC91 |
| 8564 | RBD | BG14NUC-HC92 |
| 8565 | 2P | BG14NUC-HC93 |
| 8566 | 2P | BG14NUC-HC94 |
| 8567 | 2P | BG14NUC-HC95 |
| 8568 | RBD | BG14NUC-HC96 |
| 8569 | RBD | BG14NUC-HC97 |
| 8570 | RBD | BG14NUC-HC98 |
| 8571 | 2P | BG14NUC-HC99 |
| 8572 | RBD | BG14NUC-HC100 |
| 8573 | RBD | BG14NUC-HC101 |
| 8574 | RBD | BG14NUC-HC102 |
| 8575 | 2P | BG14NUC-HC103 |
| 8576 | RBD | BG14NUC-HC104 |
| 8577 | RBD | BG14NUC-HC105 |
| 8578 | RBD | BG14NUC-HC106 |
| 8579 | RBD | BG14NUC-HC107 |
| 8580 | RBD | BG14NUC-HC108 |
| 8581 | 2P | BG14NUC-HC109 |
| 8582 | 2F | BG14NUC-HC110 |
| 8583 | RBD | BG14NUC-HC111 |
| 8584 | RBD | BG14NUC-HC112 |
| 8585 | 2P | BG14NUC-HC113 |
| 8586 | 2P | BG14NUC-HC114 |
| 8587 | 2P | BG14NUC-HC115 |
| 8588 | RBD | BG14NUC-HC116 |
| 8589 | RBD | BG14NUC-HC117 |
| 8590 | RBD | BG14NUC-HC118 |
| 8591 | RBD | BG14NUC-HC119 |
| 8592 | RBD | BG14NUC-HC120 |
| 8593 | 2P | BG14NUC-HC121 |
| 8594 | 2P | BG14NUC-HC122 |
| 8595 | RBD | BG14NUC-HC123 |
| 8596 | RBD | BG14NUC-HC124 |
| 8597 | RBD | BG14NUC-HC125 |
| 8598 | 2P | BG14NUC-HC126 |
| 8599 | 2P | BG14NUC-HC127 |
| 8600 | RBD | BG14NUC-HC128 |
| 8601 | RBD | BG14NUC-HC129 |
| 8602 | RBD | BG14NUC-HC130 |
| 8603 | 2P | BG14NUC-HC131 |
| 8604 | 2P | BG14NUC-HC132 |
| 8605 | RBD | BG14NUC-HC133 |
| 8606 | RBD | BG14NUC-HC134 |
| 8607 | RBD | BG14NUC-HC135 |
| 8608 | RBD | BG14NUC-HC136 |
| 8609 | RBD | BG14NUC-HC137 |
| 8610 | RBD | BG14NUC-HC138 |
| 8611 | RBD | BG14NUC-HC139 |
| 8612 | RBD | BG14NUC-HC140 |
| 8613 | 2P | BG14NUC-HC141 |
| 8614 | 2P | BG14NUC-HC142 |
| 8615 | RBD | BG14NUC-HC143 |
| 8616 | 2P | BG14NUC-HC144 |
| 8617 | 2P | BG14NUC-HC145 |
| 8618 | 2P | BG14NUC-HC146 |
| 8619 | RBD | BG14NUC-HC147 |
| 8620 | RBD | BG14NUC-HC148 |
| 8621 | 2P | BG14NUC-HC149 |
| 8622 | 2P | BG14NUC-HC150 |
| 8623 | 2P | BG14NUC-HC151 |
| 8624 | 2P | BG14NUC-HC152 |
| 8625 | 2F | BG14NUC-HC153 |
| 8626 | RBD | BG14NUC-HC154 |
| 8627 | 2P | BG14NUC-HC155 |
| 8628 | 2P | BG14NUC-HC156 |
| 8629 | RBD | BG14NUC-HC157 |
| 8630 | 2P | BG14NUC-HC158 |
| 8631 | 2P | BG14NUC-HC159 |
| 8632 | 2P | BG14NUC-HC160 |
| 8633 | 2P | BG14NUC-HC161 |
| 8634 | 2P | BG14NUC-HC162 |
| 8635 | RBD | BG14NUC-HC163 |
| 8636 | RBD | BG14NUC-HC164 |
| 8637 | RBD | BG14NUC-HC165 |
| 8638 | 2P | BG14NUC-HC166 |
| 8639 | 2P | BG14NUC-HC167 |
| 8640 | 2P | BG14NUC-HC168 |
| 8641 | 2P | BG14NUC-HC169 |
| 8642 | RBD | BG14NUC-HC170 |
| 8643 | 2P | BG14NUC-HC171 |
| 8644 | RBD | BG14NUC-HC172 |
| 8645 | 2P | BG14NUC-HC173 |
| 8646 | 2P | BG14NUC-HC174 |
| 8647 | 2P | BG14NUC-HC175 |
| 8648 | RBD | BG14NUC-HC176 |
| 8649 | 2P | BG14NUC-HC177 |
| 8650 | RBD | BG14NUC-HC178 |
| 8651 | 2P | BG14NUC-HC179 |
| 8652 | 2P | BG14NUC-HC180 |
| 8653 | 2P | BG14NUC-HC181 |
| 8654 | 2P | BG14NUC-HC182 |
| 8655 | 2P | BG14NUC-HC183 |
| 8656 | RBD | BG14NUC-HC184 |
| 8657 | 2P | BG14NUC-HC185 |
| 8658 | 2P | BG14NUC-HC186 |
| 8659 | 2P | BG14NUC-HC187 |
| 8660 | RBD | BG14NUC-HC188 |
| 8661 | 2P | BG14NUC-HC189 |
| 8662 | 2P | BG14NUC-HC190 |
| 8663 | 2P | BG14NUC-HC191 |
| 8664 | RBD | BG14NUC-HC192 |
| 8665 | RBD | BG14NUC-HC193 |
| 8666 | RBD | BG14NUC-HC194 |
| 8667 | RBD | BG14NUC-HC195 |
| 8668 | RBD | BG14NUC-HC196 |
| 8669 | 2P | BG14NUC-HC197 |
| 8670 | 2P | BG14NUC-HC198 |
| 8671 | 2P | BG14NUC-HC199 |
| 8672 | 2P | BG14NUC-HC200 |
| 8673 | RBD | BG14NUC-HC201 |
| 8674 | RBD | BG14NUC-HC202 |
| 8675 | 2P | BG14NUC-HC203 |
| 8676 | 2P | BG14NUC-HC204 |
| 8677 | 2P | BG14NUC-HC205 |
| 8678 | 2P | BG14NUC-HC206 |
| 8679 | 2P | BG14NUC-HC207 |
| 8680 | 2P | BG14NUC-HC208 |
| 8681 | 2P | BG14NUC-HC209 |
| 8682 | 2P | BG14NUC-HC210 |
| 8683 | 2P | BG14NUC-HC211 |
| 8684 | RBD | BG14NUC-HC212 |
| 8685 | 2P | BG14NUC-HC213 |
| 8686 | 2P | BG14NUC-HC214 |
| 8687 | RBD | BG14NUC-HC215 |
| 8688 | RBD | BG14NUC-HC216 |
| 8689 | 2P | BG14NUC-HC217 |
| 8690 | 2P | BG14NUC-HC218 |
| 8691 | 2P | BG14NUC-HC219 |
| 8692 | RBD | BG14NUC-HC220 |
| 8693 | 2P | BG14NUC-HC221 |
| 8694 | 2P | BG14NUC-HC222 |
| 8695 | 2P | BG14NUC-HC223 |
| 8696 | RBD | BG14NUC-HC224 |
| 8697 | 2P | BG14NUC-HC225 |
| 8698 | RBD | BG14NUC-HC226 |
| 8699 | 2P | BG14NUC-HC227 |
| 8700 | 2F | BG14NUC-HC228 |
| 8701 | RBD | BG14NUC-HC229 |
| 8702 | RBD | BG14NUC-HC230 |
| 8703 | 2P | BG14NUC-HC231 |
| 8704 | RBD | BG14NUC-HC232 |
| 8705 | 2P | BG14NUC-HC233 |
| 8706 | 2P | BG14NUC-HC234 |
| 8707 | 2P | BG14NUC-HC235 |
| 8708 | 2P | BG14NUC-HC236 |
| 8709 | 2P | BG14NUC-HC237 |
| 8710 | 2P | BG14NUC-HC238 |
| 8711 | 2P | BG14NUC-HC239 |
| 8712 | 2P | BG14NUC-HC240 |
| 8713 | 2P | BG14NUC-HC241 |
| 8714 | 2P | BG14NUC-HC242 |
| 8715 | 2P | BG14NUC-HC243 |
| 8716 | 2P | BG14NUC-HC244 |
| 8717 | 2P | BG14NUC-HC245 |
| 8718 | 2P | BG14NUC-HC246 |
| 8719 | 2P | BG14NUC-HC247 |
| 8720 | 2P | BG14NUC-HC248 |
| 8721 | 2P | BG14NUC-HC249 |
| 8722 | RBD | BG14NUC-HC250 |
| 8723 | 2P | BG14NUC-HC251 |
| 8724 | RBD | BG14NUC-HC252 |
| 8725 | RBD | BG14NUC-HC253 |
| 8726 | RBD | BG14NUC-HC254 |
| 8727 | RBD | BG14NUC-HC255 |
| 8728 | 2P | BG14NUC-HC256 |
| 8729 | RBD | BG14NUC-HC257 |
| 8730 | 2F | BG14NUC-HC258 |
| 8731 | 2P | BG14NUC-HC259 |
| 8732 | RBD | BG14NUC-HC260 |
| 8733 | RBD | BG14NUC-HC261 |
| 8734 | RBD | BG14NUC-HC262 |
| 8735 | 2P | BG14NUC-HC263 |
| 8736 | 2P | BG14NUC-HC264 |
| 8737 | 2P | BG14NUC-HC265 |
| 8738 | 2P | BG14NUC-HC266 |
| 8739 | RBD | BG14NUC-HC267 |
| 8740 | 2P | BG14NUC-HC268 |
| 8741 | RBD | BG14NUC-HC269 |
| 8742 | RBD | BG14NUC-HC270 |
| 8743 | 2P | BG14NUC-HC271 |
| 8744 | RBD | BG14NUC-HC272 |
| 8745 | RBD | BG14NUC-HC273 |
| 8746 | RBD | BG14NUC-HC274 |
| 8747 | RBD | BG14NUC-HC275 |
| 8748 | RBD | BG14NUC-HC276 |
| 8749 | 2P | BG14NUC-HC277 |
| 8750 | RBD | BG14NUC-HC278 |
| 8751 | 2P | BG14NUC-HC279 |
| 8752 | 2F | BG14NUC-HC280 |
| 8753 | RBD | BG14NUC-HC281 |
| 8754 | RBD | BG14NUC-HC282 |
| 8755 | 2P | BG14NUC-HC283 |
| 8756 | RBD | BG14NUC-HC284 |
| 8757 | RBD | BG14NUC-HC285 |
| 8758 | 2P | BG14NUC-HC286 |
| 8759 | RBD | BG14NUC-HC287 |
| 8760 | RBD | BG14NUC-HC288 |
| 8761 | 2P | BG14NUC-HC289 |
| 8762 | RBD | BG14NUC-HC290 |
| 8763 | 2P | BG14NUC-HC291 |
| 8764 | 2P | BG14NUC-HC292 |
| 8765 | 2P | BG14NUC-HC293 |
| 8766 | 2P | BG14NUC-HC294 |
| 8767 | 2P | BG14NUC-HC295 |
| 8768 | 2P | BG14NUC-HC296 |
| 8769 | 2P | BG14NUC-HC297 |
| 8770 | 2P | BG14NUC-HC298 |
| 8771 | RBD | BG14NUC-HC299 |
| 8772 | RBD | BG14NUC-HC300 |
| 8773 | RBD | BG14NUC-HC301 |
| 8774 | 2P | BG14NUC-HC302 |
| 8775 | RBD | BG14NUC-HC303 |
| 8776 | 2P | BG14NUC-HC304 |
| 8777 | RBD | BG14NUC-HC305 |
| 8778 | RBD | BG14NUC-HC306 |
| 8779 | 2P | BG14NUC-HC307 |
| 8780 | 2F | BG14NUC-HC308 |
| 8781 | 2P | BG14NUC-HC309 |
| 8782 | 2P | BG14NUC-HC310 |
| 8783 | 2P | BG14NUC-HC311 |
| 8784 | 2P | BG14NUC-HC312 |
| 8785 | RBD | BG14NUC-HC313 |
| 8786 | 2P | BG14NUC-HC314 |
| 8787 | 2P | BG14NUC-HC315 |
| 8788 | 2P | BG14NUC-HC316 |
| 8789 | RBD | BG14NUC-HC317 |
| 8790 | RBD | BG14NUC-HC318 |
| 8791 | RBD | BG14NUC-HC319 |
| 8792 | RBD | BG14NUC-HC320 |
| 8793 | 2P | BG14NUC-HC321 |
| 8794 | RBD | BG14NUC-HC322 |
| 8795 | RBD | BG14NUC-HC323 |
| 8796 | RBD | BG14NUC-HC324 |
| 8797 | 2P | BG14NUC-HC325 |
| 8798 | 2F | BG14NUC-HC326 |
| 8799 | 2P | BG14NUC-HC327 |
| 8800 | RBD | BG14NUC-HC328 |
| 8801 | RBD | BG14NUC-HC329 |
| 8802 | RBD | BG14NUC-HC330 |
| 8803 | 2P | BG14NUC-HC331 |
| 8804 | RBD | BG14NUC-HC332 |
| 8805 | RBD | BG14NUC-HC333 |
| 8806 | RBD | BG14NUC-HC334 |
| 8807 | 2F | BG14NUC-HC335 |
| 8808 | 2P | BG14NUC-HC336 |
| 8809 | 2P | BG14NUC-HC337 |
| 8810 | 2P | BG14NUC-HC338 |
| 8811 | RBD | BG14NUC-HC339 |
| 8812 | 2P | BG14NUC-HC340 |
| 8813 | RBD | BG14NUC-HC341 |
| 8814 | RBD | BG14NUC-HC342 |
| 8815 | 2F | BG14NUC-HC343 |
| 8816 | 2P | BG14NUC-HC344 |
| 8817 | RBD | BG14NUC-HC345 |
| 8818 | RBD | BG14NUC-HC346 |
| 8819 | RBD | BG14NUC-HC347 |
| 8820 | RBD | BG14NUC-HC348 |
| 8821 | 2P | BG14NUC-HC349 |
| 8822 | 2F | BG14NUC-HC350 |
| 8823 | 2P | BG14NUC-HC351 |
| 8824 | RBD | BG14NUC-HC352 |
| 8825 | RBD | BG14NUC-HC353 |
| 8826 | RBD | BG14NUC-HC354 |
| 8827 | 2F | BG14NUC-HC355 |
| 8828 | 2F | BG14NUC-HC356 |
| 8829 | 2F | BG14NUC-HC357 |
| 8830 | 2P | BG14NUC-HC358 |
| 8831 | 2P | BG14NUC-HC359 |
| 8832 | 2P | BG14NUC-HC360 |
| 8833 | 2P | BG14NUC-HC361 |
| 8834 | 2P | BG14NUC-HC362 |
| 8835 | RBD | BG14NUC-HC363 |
| 8836 | RBD | BG14NUC-HC364 |
| 8837 | 2F | BG14NUC-HC365 |
| 8838 | 2F | BG14NUC-HC366 |
| 8839 | 2P | BG14NUC-HC367 |
| 8840 | 2P | BG14NUC-HC368 |
| 8841 | 2P | BG14NUC-HC369 |
| 8842 | RBD | BG14NUC-HC370 |
| 8843 | 2P | BG14NUC-HC371 |
| 8844 | 2P | BG14NUC-HC372 |
| 8845 | RBD | BG14NUC-HC373 |
| 8846 | 2P | BG14NUC-HC374 |
| 8847 | 2P | BG14NUC-HC375 |
| 8848 | RBD | BG14NUC-HC376 |
| 8849 | RBD | BG14NUC-HC377 |
| 8850 | RBD | BG14NUC-HC378 |
| 8851 | 2P | BG14NUC-HC379 |
| 8852 | RBD | BG14NUC-HC380 |
| 8853 | 2P | BG14NUC-HC381 |
| 8854 | RBD | BG14NUC-HC382 |
| 8855 | RBD | BG14NUC-HC383 |
| 8856 | RBD | BG14NUC-HC384 |
| 8857 | RBD | BG14NUC-HC385 |
| 8858 | RBD | BG14NUC-HC386 |
| 8859 | 2P | BG14NUC-HC387 |
| 8860 | 2F | BG14NUC-HC388 |
| 8861 | 2P | BG14NUC-HC389 |
| 8862 | 2P | BG14NUC-HC390 |
| 8863 | RBD | BG14NUC-HC391 |
| 8864 | 2P | BG14NUC-HC392 |
| 8865 | 2P | BG14NUC-HC393 |
| 8866 | 2P | BG14NUC-HC394 |
| 8867 | 2P | BG14NUC-HC395 |
| 8868 | 2P | BG14NUC-HC396 |
| 8869 | 2P | BG14NUC-HC397 |
| 8870 | 2P | BG14NUC-HC398 |
| 8871 | 2P | BG14NUC-HC399 |
| 8872 | RBD | BG14NUC-HC400 |
| 8873 | 2P | BG14NUC-HC401 |
| 8874 | 2P | BG14NUC-HC402 |
| 8875 | 2P | BG14NUC-HC403 |
| 8876 | 2P | BG14NUC-HC404 |
| 8877 | 2P | BG14NUC-HC405 |
| 8878 | RBD | BG14NUC-HC406 |
| 8879 | 2F | BG14NUC-HC407 |
| 8880 | 2P | BG14NUC-HC408 |
| 8881 | RBD | BG14NUC-HC409 |
| 8882 | RBD | BG14NUC-HC410 |
| 8883 | 2P | BG14NUC-HC411 |
| 8884 | 2P | BG14NUC-HC412 |
| 8885 | 2P | BG14NUC-HC413 |
| 8886 | 2P | BG14NUC-HC414 |
| 8887 | 2P | BG14NUC-HC415 |
| 8888 | RBD | BG14NUC-HC416 |
| 8889 | 2P | BG14NUC-HC417 |
| 8890 | 2P | BG14NUC-HC418 |
| 8891 | RBD | BG14NUC-HC419 |
| 8892 | RBD | BG14NUC-HC420 |
| 8893 | 2P | BG14NUC-HC421 |
| 8894 | 2P | BG14NUC-HC422 |
| 8895 | 2P | BG14NUC-HC423 |
| 8896 | RBD | BG14NUC-HC424 |
| 8897 | 2P | BG14NUC-HC425 |
| 8898 | 2P | BG14NUC-HC426 |
| 8899 | RBD | BG14NUC-HC427 |
| 8900 | RBD | BG14NUC-HC428 |
| 8901 | 2F | BG14NUC-HC429 |
| 8902 | RBD | BG14NUC-HC430 |
| 8903 | 2P | BG14NUC-HC431 |
| 8904 | RBD | BG14NUC-HC432 |
| 8905 | 2P | BG14NUC-HC433 |
| 8906 | RBD | BG14NUC-HC434 |
| 8907 | RBD | BG14NUC-HC435 |
| 8908 | 2P | BG14NUC-HC436 |
| 8909 | RBD | BG14NUC-HC437 |
| 8910 | RBD | BG14NUC-HC438 |
| 8911 | RBD | BG14NUC-HC439 |
| 8912 | RBD | BG14NUC-HC440 |
| 8913 | 2P | BG14NUC-HC441 |
| 8914 | 2P | BG14NUC-HC442 |
| 8915 | RBD | BG14NUC-HC443 |
| 8916 | RBD | BG14NUC-HC444 |
| 8917 | 2P | BG14NUC-HC445 |
| 8918 | RBD | BG14NUC-HC446 |
| 8919 | 2P | BG14NUC-HC447 |
| 8920 | 2P | BG14NUC-HC448 |
| 8921 | 2P | BG14NUC-HC449 |
| 8922 | RBD | BG14NUC-HC450 |
| 8923 | RBD | BG14NUC-HC451 |
| 8924 | RBD | BG14NUC-HC452 |
| 8925 | RBD | BG14NUC-HC453 |
| 8926 | 2P | BG14NUC-HC454 |
| 8927 | RBD | BG14NUC-HC455 |
| 8928 | RBD | BG14NUC-HC456 |
| 8929 | RBD | BG14NUC-HC457 |
| 8930 | 2P | BG14NUC-HC458 |
| 8931 | 2P | BG14NUC-HC459 |
| 8932 | RBD | BG14NUC-HC460 |
| 8933 | 2P | BG14NUC-HC461 |
| 8934 | RBD | BG14NUC-HC462 |
| 8935 | 2P | BG14NUC-HC463 |
| 8936 | RBD | BG14NUC-HC464 |
| 8937 | RBD | BG14NUC-HC465 |
| 8938 | RBD | BG14NUC-HC466 |
| 8939 | RBD | BG14NUC-HC467 |
| 8940 | 2P | BG14NUC-HC468 |
| 8941 | 2P | BG14NUC-HC469 |
| 8942 | RBD | BG14NUC-HC470 |
| 8943 | 2P | BG14NUC-HC471 |
| 8944 | 2P | BG14NUC-HC472 |
| 8945 | RBD | BG14NUC-HC473 |
| 8946 | 2P | BG14NUC-HC474 |
| 8947 | RBD | BG14NUC-HC475 |
| 8948 | RBD | BG14NUC-HC476 |
| 8949 | 2P | BG14NUC-HC477 |
| 8950 | 2P | BG14NUC-HC478 |
| 8951 | RBD | BG14NUC-HC479 |
| 8952 | RBD | BG14NUC-HC480 |
| 8953 | RBD | BG14NUC-HC481 |
| 8954 | 2P | BG14NUC-HC482 |
| 8955 | 2P | BG14NUC-HC483 |
| 8956 | 2P | BG14NUC-HC484 |
| 8957 | 2P | BG14NUC-HC485 |
| 8958 | 2P | BG14NUC-HC486 |
| 8959 | 2P | BG14NUC-HC487 |
| 8960 | 2P | BG14NUC-HC488 |
| 8961 | RBD | BG14NUC-HC489 |
| 8962 | 2P | BG14NUC-HC490 |
| 8963 | RBD | BG14NUC-HC491 |
| 8964 | RBD | BG14NUC-HC492 |
| 8965 | 2P | BG14NUC-HC493 |
| 8966 | 2P | BG14NUC-HC494 |
| 8967 | 2P | BG14NUC-HC495 |
| 8968 | RBD | BG14NUC-HC496 |
| 8969 | RBD | BG14NUC-HC497 |
| 8970 | 2P | BG14NUC-HC498 |
| 8971 | RBD | BG14NUC-HC499 |
| 8972 | RBD | BG14NUC-HC500 |
| 8973 | RBD | BG14NUC-HC501 |
| 8974 | RBD | BG14NUC-HC502 |
| 8975 | RBD | BG14NUC-HC503 |
| 8976 | RBD | BG14NUC-HC504 |
| 8977 | 2P | BG14NUC-HC505 |
| 8978 | 2P | BG14NUC-HC506 |
| 8979 | 2P | BG14NUC-HC507 |
| 8980 | RBD | BG14NUC-HC508 |
| 8981 | RBD | BG14NUC-HC509 |
| 8982 | RBD | BG14NUC-HC510 |
| 8983 | RBD | BG14NUC-HC511 |
| 8984 | 2P | BG14NUC-HC512 |
| 8985 | RBD | BG14NUC-HC513 |
| 8986 | 2P | BG14NUC-HC514 |
| 8987 | 2P | BG14NUC-HC515 |
| 8988 | RBD | BG14NUC-HC516 |
| 8989 | 2P | BG14NUC-HC517 |
| 8990 | RBD | BG14NUC-HC518 |
| 8991 | 2P | BG14NUC-HC519 |
| 8992 | RBD | BG14NUC-HC520 |
| 8993 | RBD | BG14NUC-HC521 |
| 8994 | RBD | BG14NUC-HC522 |
| 8995 | 2P | BG14NUC-HC523 |
| 8996 | RBD | BG14NUC-HC524 |
| 8997 | 2P | BG14NUC-HC525 |
| 8998 | 2P | BG14NUC-HC526 |
| 8999 | 2P | BG14NUC-HC527 |
| 9000 | 2P | BG14NUC-HC528 |
| 9001 | 2P | BG14NUC-HC529 |
| 9002 | 2P | BG14NUC-HC530 |
| 9003 | RBD | BG14NUC-HC531 |
| 9004 | RBD | BG14NUC-HC532 |
| 9005 | RBD | BG14NUC-HC533 |
| 9006 | 2P | BG14NUC-HC534 |
| 9007 | 2P | BG14NUC-HC535 |
| 9008 | RBD | BG14NUC-LC1 |
| 9009 | RBD | BG14NUC-LC2 |
| 9010 | RBD | BG14NUC-LC3 |
| 9011 | RBD | BG14NUC-LC4 |
| 9012 | RBD | BG14NUC-LC5 |
| 9013 | RBD | BG14NUC-LC6 |
| 9014 | RBD | BG14NUC-LC7 |
| 9015 | RBD | BG14NUC-LC8 |
| 9016 | RBD | BG14NUC-LC9 |
| 9017 | RBD | BG14NUC-LC10 |
| 9018 | RBD | BG14NUC-LC11 |
| 9019 | RBD | BG14NUC-LC12 |
| 9020 | RBD | BG14NUC-LC13 |
| 9021 | RBD | BG14NUC-LC14 |
| 9022 | RBD | BG14NUC-LC15 |
| 9023 | RBD | BG14NUC-LC16 |
| 9024 | RBD | BG14NUC-LC17 |
| 9025 | RBD | BG14NUC-LC18 |
| 9026 | RBD | BG14NUC-LC19 |
| 9027 | RBD | BG14NUC-LC20 |
| 9028 | RBD | BG14NUC-LC21 |
| 9029 | RBD | BG14NUC-LC22 |
| 9030 | RBD | BG14NUC-LC23 |
| 9031 | RBD | BG14NUC-LC24 |
| 9032 | RBD | BG14NUC-LC25 |
| 9033 | 2P | BG14NUC-LC26 |
| 9034 | 2P | BG14NUC-LC27 |
| 9035 | 2P | BG14NUC-LC28 |
| 9036 | 2P | BG14NUC-LC29 |
| 9037 | 2P | BG14NUC-LC30 |
| 9038 | 2P | BG14NUC-LC31 |
| 9039 | 2P | BG14NUC-LC32 |
| 9040 | 2P | BG14NUC-LC33 |
| 9041 | 2P | BG14NUC-LC34 |
| 9042 | 2P | BG14NUC-LC35 |
| 9043 | 2P | BG14NUC-LC36 |
| 9044 | 2P | BG14NUC-LC37 |
| 9045 | 2P | BG14NUC-LC38 |
| 9046 | 2P | BG14NUC-LC39 |
| 9047 | 2P | BG14NUC-LC40 |
| 9048 | 2P | BG14NUC-LC41 |
| 9049 | 2P | BG14NUC-LC42 |
| 9050 | 2P | BG14NUC-LC43 |
| 9051 | 2P | BG14NUC-LC44 |
| 9052 | 2P | BG14NUC-LC45 |
| 9053 | 2P | BG14NUC-LC46 |
| 9054 | 2P | BG14NUC-LC47 |
| 9055 | 2P | BG14NUC-LC48 |
| 9056 | 2P | BG14NUC-LC49 |
| 9057 | RBD | BG14NUC-LC50 |
| 9058 | RBD | BG14NUC-LC51 |
| 9059 | RBD | BG14NUC-LC52 |
| 9060 | RBD | BG14NUC-LC53 |
| 9061 | RBD | BG14NUC-LC54 |
| 9062 | RBD | BG14NUC-LC55 |
| 9063 | RBD | BG14NUC-LC56 |
| 9064 | RBD | BG14NUC-LC57 |
| 9065 | RBD | BG14NUC-LC58 |
| 9066 | 2P | BG14NUC-LC59 |
| 9067 | 2P | BG14NUC-LC60 |
| 9068 | 2P | BG14NUC-LC61 |
| 9069 | 2P | BG14NUC-LC62 |
| 9070 | 2P | BG14NUC-LC63 |
| 9071 | 2P | BG14NUC-LC64 |
| 9072 | 2P | BG14NUC-LC65 |
| 9073 | RBD | BG14NUC-LC66 |
| 9074 | RBD | BG14NUC-LC67 |
| 9075 | RBD | BG14NUC-LC68 |
| 9076 | RBD | BG14NUC-LC69 |
| 9077 | RBD | BG14NUC-LC70 |
| 9078 | 2P | BG14NUC-LC71 |
| 9079 | 2P | BG14NUC-LC72 |
| 9080 | RBD | BG14NUC-LC73 |
| 9081 | RBD | BG14NUC-LC74 |
| 9082 | RBD | BG14NUC-LC75 |
| 9083 | 2P | BG14NUC-LC76 |
| 9084 | RBD | BG14NUC-LC77 |
| 9085 | RBD | BG14NUC-LC78 |
| 9086 | RBD | BG14NUC-LC79 |
| 9087 | RBD | BG14NUC-LC80 |
| 9088 | RBD | BG14NUC-LC81 |
| 9089 | RBD | BG14NUC-LC82 |
| 9090 | RBD | BG14NUC-LC83 |
| 9091 | RBD | BG14NUC-LC84 |
| 9092 | RBD | BG14NUC-LC85 |
| 9093 | 2P | BG14NUC-LC86 |
| 9094 | 2P | BG14NUC-LC87 |
| 9095 | 2P | BG14NUC-LC88 |
| 9096 | 2P | BG14NUC-LC89 |
| 9097 | RBD | BG14NUC-LC90 |
| 9098 | RBD | BG14NUC-LC91 |
| 9099 | RBD | BG14NUC-LC92 |
| 9100 | 2P | BG14NUC-LC93 |
| 9101 | 2P | BG14NUC-LC94 |
| 9102 | 2P | BG14NUC-LC95 |
| 9103 | RBD | BG14NUC-LC96 |
| 9104 | RBD | BG14NUC-LC97 |
| 9105 | RBD | BG14NUC-LC98 |
| 9106 | 2P | BG14NUC-LC99 |
| 9107 | RBD | BG14NUC-LC100 |
| 9108 | RBD | BG14NUC-LC101 |
| 9109 | RBD | BG14NUC-LC102 |
| 9110 | 2P | BG14NUC-LC103 |
| 9111 | RBD | BG14NUC-LC104 |
| 9112 | RBD | BG14NUC-LC105 |
| 9113 | RBD | BG14NUC-LC106 |
| 9114 | RBD | BG14NUC-LC107 |
| 9115 | RBD | BG14NUC-LC108 |
| 9116 | 2P | BG14NUC-LC109 |
| 9117 | 2P | BG14NUC-LC110 |
| 9118 | RBD | BG14NUC-LC111 |
| 9119 | RBD | BG14NUC-LC112 |
| 9120 | 2P | BG14NUC-LC113 |
| 9121 | 2P | BG14NUC-LC114 |
| 9122 | 2P | BG14NUC-LC115 |
| 9123 | RBD | BG14NUC-LC116 |
| 9124 | RBD | BG14NUC-LC117 |
| 9125 | RBD | BG14NUC-LC118 |
| 9126 | RBD | BG14NUC-LC119 |
| 9127 | RBD | BG14NUC-LC120 |
| 9128 | 2P | BG14NUC-LC121 |
| 9129 | 2P | BG14NUC-LC122 |
| 9130 | RBD | BG14NUC-LC123 |
| 9131 | RBD | BG14NUC-LC124 |
| 9132 | RBD | BG14NUC-LC125 |
| 9133 | 2P | BG14NUC-LC126 |
| 9134 | 2P | BG14NUC-LC127 |
| 9135 | RBD | BG14NUC-LC128 |
| 9136 | RBD | BG14NUC-LC129 |
| 9137 | RBD | BG14NUC-LC130 |
| 9138 | 2P | BG14NUC-LC131 |
| 9139 | 2P | BG14NUC-LC132 |
| 9140 | RBD | BG14NUC-LC133 |
| 9141 | RBD | BG14NUC-LC134 |
| 9142 | RBD | BG14NUC-LC135 |
| 9143 | RBD | BG14NUC-LC136 |
| 9144 | RBD | BG14NUC-LC137 |
| 9145 | RBD | BG14NUC-LC138 |
| 9146 | RBD | BG14NUC-LC139 |
| 9147 | RBD | BG14NUC-LC140 |
| 9148 | 2P | BG14NUC-LC141 |
| 9149 | 2P | BG14NUC-LC142 |
| 9150 | RBD | BG14NUC-LC143 |
| 9151 | 2P | BG14NUC-LC144 |
| 9152 | 2P | BG14NUC-LC145 |
| 9153 | 2P | BG14NUC-LC146 |
| 9154 | RBD | BG14NUC-LC147 |
| 9155 | RBD | BG14NUC-LC148 |
| 9156 | 2P | BG14NUC-LC149 |
| 9157 | 2P | BG14NUC-LC150 |
| 9158 | 2P | BG14NUC-LC151 |
| 9159 | 2P | BG14NUC-LC152 |
| 9160 | 2P | BG14NUC-LC153 |
| 9161 | RBD | BG14NUC-LC154 |
| 9162 | 2P | BG14NUC-LC155 |
| 9163 | 2P | BG14NUC-LC156 |
| 9164 | RBD | BG14NUC-LC157 |
| 9165 | 2P | BG14NUC-LC158 |
| 9166 | 2P | BG14NUC-LC159 |
| 9167 | 2P | BG14NUC-LC160 |
| 9168 | 2P | BG14NUC-LC161 |
| 9169 | 2P | BG14NUC-LC162 |
| 9170 | RBD | BG14NUC-LC163 |
| 9171 | RBD | BG14NUC-LC164 |
| 9172 | RBD | BG14NUC-LC165 |
| 9173 | 2P | BG14NUC-LC166 |
| 9174 | 2P | BG14NUC-LC167 |
| 9175 | 2P | BG14NUC-LC168 |
| 9176 | 2P | BG14NUC-LC169 |
| 9177 | RBD | BG14NUC-LC170 |
| 9178 | 2P | BG14NUC-LC171 |
| 9179 | RBD | BG14NUC-LC172 |
| 9180 | 2P | BG14NUC-LC173 |
| 9181 | 2P | BG14NUC-LC174 |
| 9182 | 2P | BG14NUC-LC175 |
| 9183 | RBD | BG14NUC-LC176 |
| 9184 | 2P | BG14NUC-LC177 |
| 9185 | RBD | BG14NUC-LC178 |
| 9186 | 2P | BG14NUC-LC179 |
| 9187 | 2P | BG14NUC-LC180 |
| 9188 | 2P | BG14NUC-LC181 |
| 9189 | 2P | BG14NUC-LC182 |
| 9190 | 2P | BG14NUC-LC183 |
| 9191 | RBD | BG14NUC-LC184 |
| 9192 | 2P | BG14NUC-LC185 |
| 9193 | 2P | BG14NUC-LC186 |
| 9194 | 2P | BG14NUC-LC187 |
| 9195 | RBD | BG14NUC-LC188 |
| 9196 | 2P | BG14NUC-LC189 |
| 9197 | 2P | BG14NUC-LC190 |
| 9198 | 2P | BG14NUC-LC191 |
| 9199 | RBD | BG14NUC-LC192 |
| 9200 | RBD | BG14NUC-LC193 |
| 9201 | RBD | BG14NUC-LC194 |
| 9202 | RBD | BG14NUC-LC195 |
| 9203 | RBD | BG14NUC-LC196 |
| 9204 | 2P | BG14NUC-LC197 |
| 9205 | 2P | BG14NUC-LC198 |
| 9206 | 2P | BG14NUC-LC199 |
| 9207 | 2P | BG14NUC-LC200 |
| 9208 | RBD | BG14NUC-LC201 |
| 9209 | RBD | BG14NUC-LC202 |
| 9210 | 2P | BG14NUC-LC203 |
| 9211 | 2P | BG14NUC-LC204 |
| 9212 | 2P | BG14NUC-LC205 |
| 9213 | 2P | BG14NUC-LC206 |
| 9214 | 2P | BG14NUC-LC207 |
| 9215 | 2P | BG14NUC-LC208 |
| 9216 | 2P | BG14NUC-LC209 |
| 9217 | 2P | BG14NUC-LC210 |
| 9218 | 2P | BG14NUC-LC211 |
| 9219 | RBD | BG14NUC-LC212 |
| 9220 | 2P | BG14NUC-LC213 |
| 9221 | 2P | BG14NUC-LC214 |
| 9222 | RBD | BG14NUC-LC215 |
| 9223 | RBD | BG14NUC-LC216 |
| 9224 | 2P | BG14NUC-LC217 |
| 9225 | 2P | BG14NUC-LC218 |
| 9226 | 2P | BG14NUC-LC219 |
| 9227 | RBD | BG14NUC-LC220 |
| 9228 | 2P | BG14NUC-LC221 |
| 9229 | 2P | BG14NUC-LC222 |
| 9230 | 2P | BG14NUC-LC223 |
| 9231 | RBD | BG14NUC-LC224 |
| 9232 | 2P | BG14NUC-LC225 |
| 9233 | RBD | BG14NUC-LC226 |
| 9234 | 2P | BG14NUC-LC227 |
| 9235 | 2P | BG14NUC-LC228 |
| 9236 | RBD | BG14NUC-LC229 |
| 9237 | RBD | BG14NUC-LC230 |
| 9238 | 2P | BG14NUC-LC231 |
| 9239 | RBD | BG14NUC-LC232 |
| 9240 | 2P | BG14NUC-LC233 |
| 9241 | 2P | BG14NUC-LC234 |
| 9242 | 2P | BG14NUC-LC235 |
| 9243 | 2P | BG14NUC-LC236 |
| 9244 | 2P | BG14NUC-LC237 |
| 9245 | 2P | BG14NUC-LC238 |
| 9246 | 2P | BG14NUC-LC239 |
| 9247 | 2P | BG14NUC-LC240 |
| 9248 | 2P | BG14NUC-LC241 |
| 9249 | 2P | BG14NUC-LC242 |
| 9250 | 2P | BG14NUC-LC243 |
| 9251 | 2P | BG14NUC-LC244 |
| 9252 | 2P | BG14NUC-LC245 |
| 9253 | 2P | BG14NUC-LC246 |
| 9254 | 2P | BG14NUC-LC247 |
| 9255 | 2P | BG14NUC-LC248 |
| 9256 | 2P | BG14NUC-LC249 |
| 9257 | RBD | BG14NUC-LC250 |
| 9258 | 2P | BG14NUC-LC251 |
| 9259 | RBD | BG14NUC-LC252 |
| 9260 | RBD | BG14NUC-LC253 |
| 9261 | RBD | BG14NUC-LC254 |
| 9262 | RBD | BG14NUC-LC255 |
| 9263 | 2P | BG14NUC-LC256 |
| 9264 | RBD | BG14NUC-LC257 |
| 9265 | 2P | BG14NUC-LC258 |
| 9266 | 2P | BG14NUC-LC259 |
| 9267 | RBD | BG14NUC-LC260 |
| 9268 | RBD | BG14NUC-LC261 |
| 9269 | RBD | BG14NUC-LC262 |
| 9270 | 2P | BG14NUC-LC263 |
| 9271 | 2P | BG14NUC-LC264 |
| 9272 | 2P | BG14NUC-LC265 |
| 9273 | 2P | BG14NUC-LC266 |
| 9274 | RBD | BG14NUC-LC267 |
| 9275 | 2P | BG14NUC-LC268 |
| 9276 | RBD | BG14NUC-LC269 |
| 9277 | RBD | BG14NUC-LC270 |
| 9278 | 2P | BG14NUC-LC271 |
| 9279 | RBD | BG14NUC-LC272 |
| 9280 | RBD | BG14NUC-LC273 |
| 9281 | RBD | BG14NUC-LC274 |
| 9282 | RBD | BG14NUC-LC275 |
| 9283 | RBD | BG14NUC-LC276 |
| 9284 | 2P | BG14NUC-LC277 |
| 9285 | RBD | BG14NUC-LC278 |
| 9286 | 2P | BG14NUC-LC279 |
| 9287 | 2P | BG14NUC-LC280 |
| 9288 | RBD | BG14NUC-LC281 |
| 9289 | RBD | BG14NUC-LC282 |
| 9290 | 2P | BG14NUC-LC283 |
| 9291 | RBD | BG14NUC-LC284 |
| 9292 | RBD | BG14NUC-LC285 |
| 9293 | 2P | BG14NUC-LC286 |
| 9294 | RBD | BG14NUC-LC287 |
| 9295 | RBD | BG14NUC-LC288 |
| 9296 | 2P | BG14NUC-LC289 |
| 9297 | RBD | BG14NUC-LC290 |
| 9298 | 2P | BG14NUC-LC291 |
| 9299 | 2P | BG14NUC-LC292 |
| 9300 | 2P | BG14NUC-LC293 |
| 9301 | 2P | BG14NUC-LC294 |
| 9302 | 2P | BG14NUC-LC295 |
| 9303 | 2P | BG14NUC-LC296 |
| 9304 | 2P | BG14NUC-LC297 |
| 9305 | 2P | BG14NUC-LC298 |
| 9306 | RBD | BG14NUC-LC299 |
| 9307 | RBD | BG14NUC-LC300 |
| 9308 | RBD | BG14NUC-LC301 |
| 9309 | 2P | BG14NUC-LC302 |
| 9310 | RBD | BG14NUC-LC303 |
| 9311 | 2P | BG14NUC-LC304 |
| 9312 | RBD | BG14NUC-LC305 |
| 9313 | RBD | BG14NUC-LC306 |
| 9314 | 2P | BG14NUC-LC307 |
| 9315 | 2P | BG14NUC-LC308 |
| 9316 | 2P | BG14NUC-LC309 |
| 9317 | 2P | BG14NUC-LC310 |
| 9318 | 2P | BG14NUC-LC311 |
| 9319 | 2P | BG14NUC-LC312 |
| 9320 | RBD | BG14NUC-LC313 |
| 9321 | 2P | BG14NUC-LC314 |
| 9322 | 2P | BG14NUC-LC315 |
| 9323 | 2P | BG14NUC-LC316 |
| 9324 | RBD | BG14NUC-LC317 |
| 9325 | RBD | BG14NUC-LC318 |
| 9326 | RBD | BG14NUC-LC319 |
| 9327 | RBD | BG14NUC-LC320 |
| 9328 | 2P | BG14NUC-LC321 |
| 9329 | RBD | BG14NUC-LC322 |
| 9330 | RBD | BG14NUC-LC323 |
| 9331 | RBD | BG14NUC-LC324 |
| 9332 | 2P | BG14NUC-LC325 |
| 9333 | 2P | BG14NUC-LC326 |
| 9334 | 2P | BG14NUC-LC327 |
| 9335 | RBD | BG14NUC-LC328 |
| 9336 | RBD | BG14NUC-LC329 |
| 9337 | RBD | BG14NUC-LC330 |
| 9338 | 2P | BG14NUC-LC331 |
| 9339 | RBD | BG14NUC-LC332 |
| 9340 | RBD | BG14NUC-LC333 |
| 9341 | RBD | BG14NUC-LC334 |
| 9342 | 2P | BG14NUC-LC335 |
| 9343 | 2P | BG14NUC-LC336 |
| 9344 | 2P | BG14NUC-LC337 |
| 9345 | 2P | BG14NUC-LC338 |
| 9346 | RBD | BG14NUC-LC339 |
| 9347 | 2P | BG14NUC-LC340 |
| 9348 | RBD | BG14NUC-LC341 |
| 9349 | RBD | BG14NUC-LC342 |
| 9350 | 2P | BG14NUC-LC343 |
| 9351 | 2P | BG14NUC-LC344 |
| 9352 | RBD | BG14NUC-LC345 |
| 9353 | RBD | BG14NUC-LC346 |
| 9354 | RBD | BG14NUC-LC347 |
| 9355 | RBD | BG14NUC-LC348 |
| 9356 | 2P | BG14NUC-LC349 |
| 9357 | 2P | BG14NUC-LC350 |
| 9358 | 2P | BG14NUC-LC351 |
| 9359 | RBD | BG14NUC-LC352 |
| 9360 | RBD | BG14NUC-LC353 |
| 9361 | RBD | BG14NUC-LC354 |
| 9362 | 2P | BG14NUC-LC355 |
| 9363 | 2P | BG14NUC-LC356 |
| 9364 | 2P | BG14NUC-LC357 |
| 9365 | 2P | BG14NUC-LC358 |
| 9366 | 2P | BG14NUC-LC359 |
| 9367 | 2P | BG14NUC-LC360 |
| 9368 | 2P | BG14NUC-LC361 |
| 9369 | 2P | BG14NUC-LC362 |
| 9370 | RBD | BG14NUC-LC363 |
| 9371 | RBD | BG14NUC-LC364 |
| 9372 | 2P | BG14NUC-LC365 |
| 9373 | 2P | BG14NUC-LC366 |
| 9374 | 2P | BG14NUC-LC367 |
| 9375 | 2P | BG14NUC-LC368 |
| 9376 | 2P | BG14NUC-LC369 |
| 9377 | RBD | BG14NUC-LC370 |
| 9378 | 2P | BG14NUC-LC371 |
| 9379 | 2P | BG14NUC-LC372 |
| 9380 | RBD | BG14NUC-LC373 |
| 9381 | 2P | BG14NUC-LC374 |
| 9382 | 2P | BG14NUC-LC375 |
| 9383 | RBD | BG14NUC-LC376 |
| 9384 | RBD | BG14NUC-LC377 |
| 9385 | RBD | BG14NUC-LC378 |
| 9386 | 2P | BG14NUC-LC379 |
| 9387 | RBD | BG14NUC-LC380 |
| 9388 | 2P | BG14NUC-LC381 |
| 9389 | RBD | BG14NUC-LC382 |
| 9390 | RBD | BG14NUC-LC383 |
| 9391 | RBD | BG14NUC-LC384 |
| 9392 | RBD | BG14NUC-LC385 |
| 9393 | RBD | BG14NUC-LC386 |
| 9394 | 2P | BG14NUC-LC387 |
| 9395 | 2P | BG14NUC-LC388 |
| 9396 | 2P | BG14NUC-LC389 |
| 9397 | 2P | BG14NUC-LC390 |
| 9398 | RBD | BG14NUC-LC391 |
| 9399 | 2P | BG14NUC-LC392 |
| 9400 | 2P | BG14NUC-LC393 |
| 9401 | 2P | BG14NUC-LC394 |
| 9402 | 2P | BG14NUC-LC395 |
| 9403 | 2P | BG14NUC-LC396 |
| 9404 | 2P | BG14NUC-LC397 |
| 9405 | 2P | BG14NUC-LC398 |
| 9406 | 2P | BG14NUC-LC399 |
| 9407 | RBD | BG14NUC-LC400 |
| 9408 | 2P | BG14NUC-LC401 |
| 9409 | 2P | BG14NUC-LC402 |
| 9410 | 2P | BG14NUC-LC403 |
| 9411 | 2P | BG14NUC-LC404 |
| 9412 | 2P | BG14NUC-LC405 |
| 9413 | RBD | BG14NUC-LC406 |
| 9414 | 2P | BG14NUC-LC407 |
| 9415 | 2P | BG14NUC-LC408 |
| 9416 | RBD | BG14NUC-LC409 |
| 9417 | RBD | BG14NUC-LC410 |
| 9418 | 2P | BG14NUC-LC411 |
| 9419 | 2P | BG14NUC-LC412 |
| 9420 | 2P | BG14NUC-LC413 |
| 9421 | 2P | BG14NUC-LC414 |
| 9422 | 2P | BG14NUC-LC415 |
| 9423 | RBD | BG14NUC-LC416 |
| 9424 | 2P | BG14NUC-LC417 |
| 9425 | 2P | BG14NUC-LC418 |
| 9426 | RBD | BG14NUC-LC419 |
| 9427 | RBD | BG14NUC-LC420 |
| 9428 | 2P | BG14NUC-LC421 |
| 9429 | 2P | BG14NUC-LC422 |
| 9430 | 2P | BG14NUC-LC423 |
| 9431 | RBD | BG14NUC-LC424 |
| 9432 | 2P | BG14NUC-LC425 |
| 9433 | 2P | BG14NUC-LC426 |
| 9434 | RBD | BG14NUC-LC427 |
| 9435 | RBD | BG14NUC-LC428 |
| 9436 | 2P | BG14NUC-LC429 |
| 9437 | RBD | BG14NUC-LC430 |
| 9438 | 2P | BG14NUC-LC431 |
| 9439 | RBD | BG14NUC-LC432 |
| 9440 | 2P | BG14NUC-LC433 |
| 9441 | RBD | BG14NUC-LC434 |
| 9442 | RBD | BG14NUC-LC435 |
| 9443 | 2P | BG14NUC-LC436 |
| 9444 | RBD | BG14NUC-LC437 |
| 9445 | RBD | BG14NUC-LC438 |
| 9446 | RBD | BG14NUC-LC439 |
| 9447 | RBD | BG14NUC-LC440 |
| 9448 | 2P | BG14NUC-LC441 |
| 9449 | 2P | BG14NUC-LC442 |
| 9450 | RBD | BG14NUC-LC443 |
| 9451 | RBD | BG14NUC-LC444 |
| 9452 | 2P | BG14NUC-LC445 |
| 9453 | RBD | BG14NUC-LC446 |
| 9454 | 2P | BG14NUC-LC447 |
| 9455 | 2P | BG14NUC-LC448 |
| 9456 | 2P | BG14NUC-LC449 |
| 9457 | RBD | BG14NUC-LC450 |
| 9458 | RBD | BG14NUC-LC451 |
| 9459 | RBD | BG14NUC-LC452 |
| 9460 | RBD | BG14NUC-LC453 |
| 9461 | 2P | BG14NUC-LC454 |
| 9462 | RBD | BG14NUC-LC455 |
| 9463 | RBD | BG14NUC-LC456 |
| 9464 | RBD | BG14NUC-LC457 |
| 9465 | 2P | BG14NUC-LC458 |
| 9466 | 2P | BG14NUC-LC459 |
| 9467 | RBD | BG14NUC-LC460 |
| 9468 | 2P | BG14NUC-LC461 |
| 9469 | RBD | BG14NUC-LC462 |
| 9470 | 2P | BG14NUC-LC463 |
| 9471 | RBD | BG14NUC-LC464 |
| 9472 | RBD | BG14NUC-LC465 |
| 9473 | RBD | BG14NUC-LC466 |
| 9474 | RBD | BG14NUC-LC467 |
| 9475 | 2P | BG14NUC-LC468 |
| 9476 | 2P | BG14NUC-LC469 |
| 9477 | RBD | BG14NUC-LC470 |
| 9478 | 2P | BG14NUC-LC471 |
| 9479 | 2P | BG14NUC-LC472 |
| 9480 | RBD | BG14NUC-LC473 |
| 9481 | 2P | BG14NUC-LC474 |
| 9482 | RBD | BG14NUC-LC475 |
| 9483 | RBD | BG14NUC-LC476 |
| 9484 | 2P | BG14NUC-LC477 |
| 9485 | 2P | BG14NUC-LC478 |
| 9486 | RBD | BG14NUC-LC479 |
| 9487 | RBD | BG14NUC-LC480 |
| 9488 | RBD | BG14NUC-LC481 |
| 9489 | 2P | BG14NUC-LC482 |
| 9490 | 2P | BG14NUC-LC483 |
| 9491 | 2P | BG14NUC-LC484 |
| 9492 | 2P | BG14NUC-LC485 |
| 9493 | 2P | BG14NUC-LC486 |
| 9494 | 2P | BG14NUC-LC487 |
| 9495 | 2P | BG14NUC-LC488 |
| 9496 | RBD | BG14NUC-LC489 |
| 9497 | 2P | BG14NUC-LC490 |
| 9498 | RBD | BG14NUC-LC491 |
| 9499 | RBD | BG14NUC-LC492 |
| 9500 | 2P | BG14NUC-LC493 |
| 9501 | 2P | BG14NUC-LC494 |
| 9502 | 2P | BG14NUC-LC495 |
| 9503 | RBD | BG14NUC-LC496 |
| 9504 | RBD | BG14NUC-LC497 |
| 9505 | 2P | BG14NUC-LC498 |
| 9506 | RBD | BG14NUC-LC499 |
| 9507 | RBD | BG14NUC-LC500 |
| 9508 | RBD | BG14NUC-LC501 |
| 9509 | RBD | BG14NUC-LC502 |
| 9510 | RBD | BG14NUC-LC503 |
| 9511 | RBD | BG14NUC-LC504 |
| 9512 | 2P | BG14NUC-LC505 |
| 9513 | 2P | BG14NUC-LC506 |
| 9514 | 2P | BG14NUC-LC507 |
| 9515 | RBD | BG14NUC-LC508 |
| 9516 | RBD | BG14NUC-LC509 |
| 9517 | RBD | BG14NUC-LC510 |
| 9518 | RBD | BG14NUC-LC511 |
| 9519 | 2P | BG14NUC-LC512 |
| 9520 | RBD | BG14NUC-LC513 |
| 9521 | 2P | BG14NUC-LC514 |
| 9522 | 2P | BG14NUC-LC515 |
| 9523 | RBD | BG14NUC-LC516 |
| 9524 | 2P | BG14NUC-LC517 |
| 9525 | RBD | BG14NUC-LC518 |
| 9526 | 2P | BG14NUC-LC519 |
| 9527 | RBD | BG14NUC-LC520 |
| 9528 | RBD | BG14NUC-LC521 |
| 9529 | RBD | BG14NUC-LC522 |
| 9530 | 2P | BG14NUC-LC523 |
| 9531 | RBD | BG14NUC-LC524 |
| 9532 | 2P | BG14NUC-LC525 |
| 9533 | 2P | BG14NUC-LC526 |
| 9534 | 2P | BG14NUC-LC527 |
| 9535 | 2P | BG14NUC-LC528 |
| 9536 | 2P | BG14NUC-LC529 |
| 9537 | 2P | BG14NUC-LC530 |
| 9538 | RBD | BG14NUC-LC531 |
| 9539 | RBD | BG14NUC-LC532 |
| 9540 | RBD | BG14NUC-LC533 |
| 9541 | 2P | BG14NUC-LC534 |
| 9542 | 2P | BG14NUC-LC535 |
| 9543 | 2P | BG18NUC-HC1 |
| 9544 | 2P | BG18NUC-HC2 |
| 9545 | RBD | BG18NUC-HC3 |
| 9546 | 2P | BG18NUC-HC4 |
| 9547 | 2P | BG18NUC-HC5 |
| 9548 | RBD | BG18NUC-HC6 |
| 9549 | 2P | BG18NUC-HC7 |
| 9550 | 2P | BG18NUC-HC8 |
| 9551 | RBD | BG18NUC-HC9 |
| 9552 | 2P | BG18NUC-HC10 |
| 9553 | 2P | BG18NUC-HC11 |
| 9554 | 2P | BG18NUC-HC12 |
| 9555 | 2P | BG18NUC-HC13 |
| 9556 | 2P | BG18NUC-HC14 |
| 9557 | 2P | BG18NUC-HC15 |
| 9558 | 2P | BG18NUC-HC16 |
| 9559 | RBD | BG18NUC-HC17 |
| 9560 | 2P | BG18NUC-HC18 |
| 9561 | 2P | BG18NUC-HC19 |
| 9562 | RBD | BG18NUC-HC20 |
| 9563 | 2P | BG18NUC-HC21 |
| 9564 | RBD | BG18NUC-HC22 |
| 9565 | 2P | BG18NUC-HC23 |
| 9566 | 2P | BG18NUC-HC24 |
| 9567 | 2P | BG18NUC-HC25 |
| 9568 | 2P | BG18NUC-HC26 |
| 9569 | 2P | BG18NUC-HC27 |
| 9570 | 2P | BG18NUC-HC28 |
| 9571 | 2P | BG18NUC-HC29 |
| 9572 | 2P | BG18NUC-HC30 |
| 9573 | RBD | BG18NUC-HC31 |
| 9574 | RBD | BG18NUC-HC32 |
| 9575 | RBD | BG18NUC-HC33 |
| 9576 | 2P | BG18NUC-HC34 |
| 9577 | 2P | BG18NUC-HC35 |
| 9578 | 2F | BG18NUC-HC36 |
| 9579 | 2P | BG18NUC-HC37 |
| 9580 | 2P | BG18NUC-HC38 |
| 9581 | 2P | BG18NUC-HC39 |
| 9582 | 2P | BG18NUC-HC40 |
| 9583 | RBD | BG18NUC-HC41 |
| 9584 | RBD | BG18NUC-HC42 |
| 9585 | 2P | BG18NUC-HC43 |
| 9586 | 2P | BG18NUC-HC44 |
| 9587 | 2P | BG18NUC-HC45 |
| 9588 | RBD | BG18NUC-HC46 |
| 9589 | 2P | BG18NUC-HC47 |
| 9590 | 2P | BG18NUC-HC48 |
| 9591 | 2P | BG18NUC-HC49 |
| 9592 | 2P | BG18NUC-HC50 |
| 9593 | 2P | BG18NUC-HC51 |
| 9594 | 2P | BG18NUC-HC52 |
| 9595 | 2P | BG18NUC-HC53 |
| 9596 | RBD | BG18NUC-HC54 |
| 9597 | 2P | BG18NUC-HC55 |
| 9598 | 2P | BG18NUC-HC56 |
| 9599 | 2P | BG18NUC-HC57 |
| 9600 | 2P | BG18NUC-HC58 |
| 9601 | RBD | BG18NUC-HC59 |
| 9602 | 2P | BG18NUC-HC60 |
| 9603 | 2P | BG18NUC-HC61 |
| 9604 | 2P | BG18NUC-HC62 |
| 9605 | RBD | BG18NUC-HC63 |
| 9606 | RBD | BG18NUC-HC64 |
| 9607 | 2P | BG18NUC-HC65 |
| 9608 | 2P | BG18NUC-HC66 |
| 9609 | 2P | BG18NUC-HC67 |
| 9610 | 2P | BG18NUC-HC68 |
| 9611 | RBD | BG18NUC-HC69 |
| 9612 | 2P | BG18NUC-HC70 |
| 9613 | RBD | BG18NUC-HC71 |
| 9614 | 2P | BG18NUC-HC72 |
| 9615 | 2P | BG18NUC-HC73 |
| 9616 | 2P | BG18NUC-HC74 |
| 9617 | 2P | BG18NUC-HC75 |
| 9618 | 2P | BG18NUC-HC76 |
| 9619 | RBD | BG18NUC-HC77 |
| 9620 | RBD | BG18NUC-HC78 |
| 9621 | 2P | BG18NUC-HC79 |
| 9622 | 2P | BG18NUC-HC80 |
| 9623 | 2P | BG18NUC-HC81 |
| 9624 | 2P | BG18NUC-HC82 |
| 9625 | 2P | BG18NUC-HC83 |
| 9626 | 2P | BG18NUC-HC84 |
| 9627 | 2P | BG18NUC-HC85 |
| 9628 | 2P | BG18NUC-HC86 |
| 9629 | 2P | BG18NUC-HC87 |
| 9630 | 2P | BG18NUC-HC88 |
| 9631 | 2P | BG18NUC-HC89 |
| 9632 | 2P | BG18NUC-HC90 |
| 9633 | RBD | BG18NUC-HC91 |
| 9634 | RBD | BG18NUC-HC92 |
| 9635 | 2P | BG18NUC-HC93 |
| 9636 | 2P | BG18NUC-HC94 |
| 9637 | 2P | BG18NUC-HC95 |
| 9638 | RBD | BG18NUC-HC96 |
| 9639 | 2P | BG18NUC-HC97 |
| 9640 | 2P | BG18NUC-HC98 |
| 9641 | 2P | BG18NUC-HC99 |
| 9642 | 2P | BG18NUC-HC100 |
| 9643 | RBD | BG18NUC-HC101 |
| 9644 | 2P | BG18NUC-HC102 |
| 9645 | RBD | BG18NUC-HC103 |
| 9646 | RBD | BG18NUC-HC104 |
| 9647 | 2P | BG18NUC-HC105 |
| 9648 | RBD | BG18NUC-HC106 |
| 9649 | RBD | BG18NUC-HC107 |
| 9650 | 2P | BG18NUC-HC108 |
| 9651 | 2P | BG18NUC-HC109 |
| 9652 | RBD | BG18NUC-HC110 |
| 9653 | 2P | BG18NUC-HC111 |
| 9654 | 2P | BG18NUC-HC112 |
| 9655 | 2P | BG18NUC-HC113 |
| 9656 | 2P | BG18NUC-HC114 |
| 9657 | 2P | BG18NUC-HC115 |
| 9658 | RBD | BG18NUC-HC116 |
| 9659 | 2P | BG18NUC-HC117 |
| 9660 | 2P | BG18NUC-HC118 |
| 9661 | 2P | BG18NUC-HC119 |
| 9662 | 2P | BG18NUC-HC120 |
| 9663 | 2P | BG18NUC-HC121 |
| 9664 | 2P | BG18NUC-HC122 |
| 9665 | 2P | BG18NUC-HC123 |
| 9666 | 2P | BG18NUC-HC124 |
| 9667 | 2P | BG18NUC-HC125 |
| 9668 | 2P | BG18NUC-HC126 |
| 9669 | 2P | BG18NUC-HC127 |
| 9670 | 2P | BG18NUC-HC128 |
| 9671 | 2P | BG18NUC-HC129 |
| 9672 | 2P | BG18NUC-HC130 |
| 9673 | 2P | BG18NUC-HC131 |
| 9674 | RBD | BG18NUC-HC132 |
| 9675 | 2P | BG18NUC-HC133 |
| 9676 | RBD | BG18NUC-HC134 |
| 9677 | 2P | BG18NUC-HC135 |
| 9678 | 2P | BG18NUC-HC136 |
| 9679 | RBD | BG18NUC-HC137 |
| 9680 | 2P | BG18NUC-HC138 |
| 9681 | RBD | BG18NUC-HC139 |
| 9682 | RBD | BG18NUC-HC140 |
| 9683 | RBD | BG18NUC-HC141 |
| 9684 | 2P | BG18NUC-HC142 |
| 9685 | 2P | BG18NUC-HC143 |
| 9686 | 2P | BG18NUC-HC144 |
| 9687 | 2P | BG18NUC-HC145 |
| 9688 | 2P | BG18NUC-HC146 |
| 9689 | 2P | BG18NUC-HC147 |
| 9690 | 2P | BG18NUC-HC148 |
| 9691 | 2P | BG18NUC-HC149 |
| 9692 | 2P | BG18NUC-HC150 |
| 9693 | 2P | BG18NUC-HC151 |
| 9694 | 2P | BG18NUC-HC152 |
| 9695 | 2P | BG18NUC-HC153 |
| 9696 | 2P | BG18NUC-HC154 |
| 9697 | RBD | BG18NUC-HC155 |
| 9698 | 2P | BG18NUC-HC156 |
| 9699 | 2P | BG18NUC-HC157 |
| 9700 | 2P | BG18NUC-HC158 |
| 9701 | 2P | BG18NUC-HC159 |
| 9702 | 2P | BG18NUC-HC160 |
| 9703 | 2P | BG18NUC-HC161 |
| 9704 | 2P | BG18NUC-HC162 |
| 9705 | RBD | BG18NUC-HC163 |
| 9706 | 2P | BG18NUC-HC164 |
| 9707 | RBD | BG18NUC-HC165 |
| 9708 | RBD | BG18NUC-HC166 |
| 9709 | 2P | BG18NUC-HC167 |
| 9710 | 2P | BG18NUC-HC168 |
| 9711 | RBD | BG18NUC-HC169 |
| 9712 | 2P | BG18NUC-HC170 |
| 9713 | 2P | BG18NUC-HC171 |
| 9714 | 2P | BG18NUC-HC172 |
| 9715 | 2P | BG18NUC-HC173 |
| 9716 | 2P | BG18NUC-HC174 |
| 9717 | 2P | BG18NUC-HC175 |
| 9718 | 2P | BG18NUC-HC176 |
| 9719 | 2P | BG18NUC-HC177 |
| 9720 | 2P | BG18NUC-HC178 |
| 9721 | 2P | BG18NUC-HC179 |
| 9722 | RBD | BG18NUC-HC180 |
| 9723 | RBD | BG18NUC-HC181 |
| 9724 | 2P | BG18NUC-HC182 |
| 9725 | 2P | BG18NUC-HC183 |
| 9726 | 2P | BG18NUC-HC184 |
| 9727 | 2P | BG18NUC-HC185 |
| 9728 | RBD | BG18NUC-HC186 |
| 9729 | 2P | BG18NUC-HC187 |
| 9730 | 2P | BG18NUC-HC188 |
| 9731 | 2P | BG18NUC-HC189 |
| 9732 | 2P | BG18NUC-HC190 |
| 9733 | 2P | BG18NUC-HC191 |
| 9734 | 2P | BG18NUC-HC192 |
| 9735 | RBD | BG18NUC-HC193 |
| 9736 | 2P | BG18NUC-HC194 |
| 9737 | 2P | BG18NUC-HC195 |
| 9738 | RBD | BG18NUC-HC196 |
| 9739 | RBD | BG18NUC-HC197 |
| 9740 | RBD | BG18NUC-HC198 |
| 9741 | RBD | BG18NUC-HC199 |
| 9742 | 2P | BG18NUC-HC200 |
| 9743 | RBD | BG18NUC-HC201 |
| 9744 | 2P | BG18NUC-HC202 |
| 9745 | RBD | BG18NUC-HC203 |
| 9746 | 2P | BG18NUC-HC204 |
| 9747 | RBD | BG18NUC-HC205 |
| 9748 | 2P | BG18NUC-HC206 |
| 9749 | 2P | BG18NUC-HC207 |
| 9750 | 2P | BG18NUC-HC208 |
| 9751 | 2P | BG18NUC-HC209 |
| 9752 | 2P | BG18NUC-HC210 |
| 9753 | 2P | BG18NUC-HC211 |
| 9754 | RBD | BG18NUC-HC212 |
| 9755 | 2P | BG18NUC-HC213 |
| 9756 | RBD | BG18NUC-HC214 |
| 9757 | RBD | BG18NUC-HC215 |
| 9758 | RBD | BG18NUC-HC216 |
| 9759 | RBD | BG18NUC-HC217 |
| 9760 | 2P | BG18NUC-HC218 |
| 9761 | RBD | BG18NUC-HC219 |
| 9762 | 2P | BG18NUC-HC220 |
| 9763 | 2P | BG18NUC-HC221 |
| 9764 | 2P | BG18NUC-HC222 |
| 9765 | 2P | BG18NUC-HC223 |
| 9766 | RBD | BG18NUC-HC224 |
| 9767 | RBD | BG18NUC-HC225 |
| 9768 | 2P | BG18NUC-HC226 |
| 9769 | 2P | BG18NUC-HC227 |
| 9770 | 2P | BG18NUC-HC228 |
| 9771 | 2P | BG18NUC-HC229 |
| 9772 | RBD | BG18NUC-HC230 |
| 9773 | 2P | BG18NUC-HC231 |
| 9774 | RBD | BG18NUC-HC232 |
| 9775 | 2P | BG18NUC-HC233 |
| 9776 | 2P | BG18NUC-HC234 |
| 9777 | 2P | BG18NUC-HC235 |
| 9778 | 2P | BG18NUC-HC236 |
| 9779 | 2P | BG18NUC-HC237 |
| 9780 | RBD | BG18NUC-HC238 |
| 9781 | RBD | BG18NUC-HC239 |
| 9782 | RBD | BG18NUC-HC240 |
| 9783 | 2P | BG18NUC-HC241 |
| 9784 | RBD | BG18NUC-HC242 |
| 9785 | 2P | BG18NUC-HC243 |
| 9786 | 2P | BG18NUC-HC244 |
| 9787 | 2P | BG18NUC-HC245 |
| 9788 | 2P | BG18NUC-HC246 |
| 9789 | 2P | BG18NUC-HC247 |
| 9790 | 2P | BG18NUC-HC248 |
| 9791 | 2P | BG18NUC-HC249 |
| 9792 | 2P | BG18NUC-HC250 |
| 9793 | 2P | BG18NUC-HC251 |
| 9794 | RBD | BG18NUC-HC252 |
| 9795 | 2P | BG18NUC-HC253 |
| 9796 | RBD | BG18NUC-HC254 |
| 9797 | RBD | BG18NUC-HC255 |
| 9798 | 2P | BG18NUC-HC256 |
| 9799 | 2P | BG18NUC-HC257 |
| 9800 | 2P | BG18NUC-HC258 |
| 9801 | RBD | BG18NUC-HC259 |
| 9802 | 2P | BG18NUC-HC260 |
| 9803 | RBD | BG18NUC-HC261 |
| 9804 | 2P | BG18NUC-HC262 |
| 9805 | RBD | BG18NUC-HC263 |
| 9806 | 2P | BG18NUC-HC264 |
| 9807 | 2P | BG18NUC-HC265 |
| 9808 | 2P | BG18NUC-HC266 |
| 9809 | RBD | BG18NUC-HC267 |
| 9810 | 2P | BG18NUC-HC268 |
| 9811 | 2P | BG18NUC-HC269 |
| 9812 | 2P | BG18NUC-HC270 |
| 9813 | 2P | BG18NUC-HC271 |
| 9814 | 2P | BG18NUC-HC272 |
| 9815 | 2P | BG18NUC-HC273 |
| 9816 | 2P | BG18NUC-HC274 |
| 9817 | 2P | BG18NUC-HC275 |
| 9818 | 2P | BG18NUC-HC276 |
| 9819 | 2P | BG18NUC-HC277 |
| 9820 | 2P | BG18NUC-HC278 |
| 9821 | RBD | BG18NUC-HC279 |
| 9822 | 2P | BG18NUC-HC280 |
| 9823 | 2P | BG18NUC-HC281 |
| 9824 | RBD | BG18NUC-HC282 |
| 9825 | 2P | BG18NUC-HC283 |
| 9826 | RBD | BG18NUC-HC284 |
| 9827 | 2P | BG18NUC-HC285 |
| 9828 | RBD | BG18NUC-HC286 |
| 9829 | RBD | BG18NUC-HC287 |
| 9830 | 2P | BG18NUC-HC288 |
| 9831 | 2P | BG18NUC-HC289 |
| 9832 | 2P | BG18NUC-HC290 |
| 9833 | RBD | BG18NUC-HC291 |
| 9834 | RBD | BG18NUC-HC292 |
| 9835 | RBD | BG18NUC-HC293 |
| 9836 | 2P | BG18NUC-HC294 |
| 9837 | 2P | BG18NUC-HC295 |
| 9838 | 2P | BG18NUC-HC296 |
| 9839 | 2P | BG18NUC-HC297 |
| 9840 | 2P | BG18NUC-HC298 |
| 9841 | RBD | BG18NUC-HC299 |
| 9842 | 2P | BG18NUC-HC300 |
| 9843 | 2P | BG18NUC-HC301 |
| 9844 | 2P | BG18NUC-HC302 |
| 9845 | 2P | BG18NUC-HC303 |
| 9846 | 2P | BG18NUC-HC304 |
| 9847 | 2P | BG18NUC-HC305 |
| 9848 | 2P | BG18NUC-HC306 |
| 9849 | 2P | BG18NUC-HC307 |
| 9850 | 2P | BG18NUC-HC308 |
| 9851 | RBD | BG18NUC-HC309 |
| 9852 | 2P | BG18NUC-HC310 |
| 9853 | RBD | BG18NUC-HC311 |
| 9854 | 2P | BG18NUC-HC312 |
| 9855 | 2P | BG18NUC-HC313 |
| 9856 | 2P | BG18NUC-HC314 |
| 9857 | RBD | BG18NUC-HC315 |
| 9858 | 2F | BG18NUC-HC316 |
| 9859 | 2P | BG18NUC-HC317 |
| 9860 | 2P | BG18NUC-HC318 |
| 9861 | 2P | BG18NUC-HC319 |
| 9862 | 2P | BG18NUC-HC320 |
| 9863 | 2P | BG18NUC-HC321 |
| 9864 | RBD | BG18NUC-HC322 |
| 9865 | RBD | BG18NUC-HC323 |
| 9866 | RBD | BG18NUC-HC324 |
| 9867 | RBD | BG18NUC-HC325 |
| 9868 | 2P | BG18NUC-HC326 |
| 9869 | 2P | BG18NUC-HC327 |
| 9870 | RBD | BG18NUC-HC328 |
| 9871 | 2P | BG18NUC-HC329 |
| 9872 | 2P | BG18NUC-HC330 |
| 9873 | 2P | BG18NUC-HC331 |
| 9874 | 2P | BG18NUC-HC332 |
| 9875 | 2P | BG18NUC-HC333 |
| 9876 | RBD | BG18NUC-HC334 |
| 9877 | 2P | BG18NUC-HC335 |
| 9878 | RBD | BG18NUC-HC336 |
| 9879 | RBD | BG18NUC-HC337 |
| 9880 | 2P | BG18NUC-HC338 |
| 9881 | 2P | BG18NUC-HC339 |
| 9882 | 2P | BG18NUC-HC340 |
| 9883 | RBD | BG18NUC-HC341 |
| 9884 | 2P | BG18NUC-HC342 |
| 9885 | RBD | BG18NUC-HC343 |
| 9886 | 2P | BG18NUC-HC344 |
| 9887 | 2P | BG18NUC-HC345 |
| 9888 | 2P | BG18NUC-HC346 |
| 9889 | 2P | BG18NUC-HC347 |
| 9890 | 2P | BG18NUC-HC348 |
| 9891 | 2P | BG18NUC-HC349 |
| 9892 | 2P | BG18NUC-HC350 |
| 9893 | RBD | BG18NUC-HC351 |
| 9894 | 2P | BG18NUC-HC352 |
| 9895 | 2P | BG18NUC-HC353 |
| 9896 | 2P | BG18NUC-HC354 |
| 9897 | 2P | BG18NUC-HC355 |
| 9898 | 2P | BG18NUC-HC356 |
| 9899 | 2P | BG18NUC-HC357 |
| 9900 | RBD | BG18NUC-HC358 |
| 9901 | 2P | BG18NUC-HC359 |
| 9902 | 2P | BG18NUC-HC360 |
| 9903 | 2P | BG18NUC-HC361 |
| 9904 | 2P | BG18NUC-HC362 |
| 9905 | 2F | BG18NUC-HC363 |
| 9906 | RBD | BG18NUC-HC364 |
| 9907 | RBD | BG18NUC-HC365 |
| 9908 | 2P | BG18NUC-HC366 |
| 9909 | 2P | BG18NUC-HC367 |
| 9910 | 2P | BG18NUC-HC368 |
| 9911 | 2P | BG18NUC-HC369 |
| 9912 | 2P | BG18NUC-HC370 |
| 9913 | 2P | BG18NUC-HC371 |
| 9914 | 2P | BG18NUC-HC372 |
| 9915 | RBD | BG18NUC-HC373 |
| 9916 | RBD | BG18NUC-HC374 |
| 9917 | RBD | BG18NUC-HC375 |
| 9918 | RBD | BG18NUC-HC376 |
| 9919 | RBD | BG18NUC-HC377 |
| 9920 | 2P | BG18NUC-HC378 |
| 9921 | 2P | BG18NUC-HC379 |
| 9922 | 2P | BG18NUC-HC380 |
| 9923 | RBD | BG18NUC-HC381 |
| 9924 | RBD | BG18NUC-HC382 |
| 9925 | 2P | BG18NUC-HC383 |
| 9926 | RBD | BG18NUC-HC384 |
| 9927 | 2P | BG18NUC-HC385 |
| 9928 | 2P | BG18NUC-HC386 |
| 9929 | 2P | BG18NUC-HC387 |
| 9930 | 2P | BG18NUC-HC388 |
| 9931 | RBD | BG18NUC-HC389 |
| 9932 | 2P | BG18NUC-HC390 |
| 9933 | RBD | BG18NUC-HC391 |
| 9934 | 2P | BG18NUC-HC392 |
| 9935 | 2P | BG18NUC-HC393 |
| 9936 | 2P | BG18NUC-HC394 |
| 9937 | 2P | BG18NUC-HC395 |
| 9938 | 2P | BG18NUC-HC396 |
| 9939 | 2P | BG18NUC-HC397 |
| 9940 | 2P | BG18NUC-HC398 |
| 9941 | 2P | BG18NUC-HC399 |
| 9942 | 2P | BG18NUC-HC400 |
| 9943 | 2P | BG18NUC-HC401 |
| 9944 | 2P | BG18NUC-HC402 |
| 9945 | 2P | BG18NUC-HC403 |
| 9946 | 2P | BG18NUC-HC404 |
| 9947 | RBD | BG18NUC-HC405 |
| 9948 | 2P | BG18NUC-HC406 |
| 9949 | RBD | BG18NUC-HC407 |
| 9950 | RBD | BG18NUC-HC408 |
| 9951 | RBD | BG18NUC-HC409 |
| 9952 | 2P | BG18NUC-HC410 |
| 9953 | 2P | BG18NUC-HC411 |
| 9954 | 2P | BG18NUC-HC412 |
| 9955 | RBD | BG18NUC-HC413 |
| 9956 | RBD | BG18NUC-HC414 |
| 9957 | 2P | BG18NUC-HC415 |
| 9958 | RBD | BG18NUC-HC416 |
| 9959 | 2P | BG18NUC-HC417 |
| 9960 | 2P | BG18NUC-HC418 |
| 9961 | 2P | BG18NUC-HC419 |
| 9962 | RBD | BG18NUC-HC420 |
| 9963 | 2P | BG18NUC-HC421 |
| 9964 | 2P | BG18NUC-HC422 |
| 9965 | 2P | BG18NUC-HC423 |
| 9966 | RBD | BG18NUC-HC424 |
| 9967 | 2P | BG18NUC-HC425 |
| 9968 | 2P | BG18NUC-HC426 |
| 9969 | 2P | BG18NUC-HC427 |
| 9970 | RBD | BG18NUC-HC428 |
| 9971 | 2P | BG18NUC-HC429 |
| 9972 | 2P | BG18NUC-HC430 |
| 9973 | RBD | BG18NUC-HC431 |
| 9974 | 2P | BG18NUC-HC432 |
| 9975 | 2P | BG18NUC-HC433 |
| 9976 | RBD | BG18NUC-HC434 |
| 9977 | RBD | BG18NUC-HC435 |
| 9978 | 2P | BG18NUC-HC436 |
| 9979 | 2P | BG18NUC-HC437 |
| 9980 | 2P | BG18NUC-HC438 |
| 9981 | 2P | BG18NUC-HC439 |
| 9982 | 2P | BG18NUC-HC440 |
| 9983 | 2P | BG18NUC-HC441 |
| 9984 | 2P | BG18NUC-HC442 |
| 9985 | 2P | BG18NUC-HC443 |
| 9986 | 2P | BG18NUC-HC444 |
| 9987 | 2P | BG18NUC-HC445 |
| 9988 | RBD | BG18NUC-HC446 |
| 9989 | 2P | BG18NUC-HC447 |
| 9990 | 2P | BG18NUC-HC448 |
| 9991 | 2P | BG18NUC-HC449 |
| 9992 | 2P | BG18NUC-HC450 |
| 9993 | 2P | BG18NUC-HC451 |
| 9994 | 2P | BG18NUC-HC452 |
| 9995 | 2P | BG18NUC-HC453 |
| 9996 | 2P | BG18NUC-HC454 |
| 9997 | 2P | BG18NUC-HC455 |
| 9998 | 2P | BG18NUC-HC456 |
| 9999 | 2P | BG18NUC-HC457 |
| 10000 | 2P | BG18NUC-HC458 |
| 10001 | 2P | BG18NUC-HC459 |
| 10002 | 2P | BG18NUC-HC460 |
| 10003 | 2P | BG18NUC-HC461 |
| 10004 | RBD | BG18NUC-HC462 |
| 10005 | RBD | BG18NUC-HC463 |
| 10006 | 2P | BG18NUC-HC464 |
| 10007 | 2P | BG18NUC-HC465 |
| 10008 | 2P | BG18NUC-HC466 |
| 10009 | 2P | BG18NUC-HC467 |
| 10010 | RBD | BG18NUC-HC468 |
| 10011 | RBD | BG18NUC-HC469 |
| 10012 | RBD | BG18NUC-HC470 |
| 10013 | 2P | BG18NUC-HC471 |
| 10014 | 2P | BG18NUC-HC472 |
| 10015 | 2P | BG18NUC-HC473 |
| 10016 | 2P | BG18NUC-HC474 |
| 10017 | RBD | BG18NUC-HC475 |
| 10018 | 2P | BG18NUC-HC476 |
| 10019 | RBD | BG18NUC-HC477 |
| 10020 | RBD | BG18NUC-HC478 |
| 10021 | RBD | BG18NUC-HC479 |
| 10022 | RBD | BG18NUC-HC480 |
| 10023 | 2P | BG18NUC-HC481 |
| 10024 | RBD | BG18NUC-HC482 |
| 10025 | 2P | BG18NUC-HC483 |
| 10026 | 2P | BG18NUC-HC484 |
| 10027 | 2P | BG18NUC-HC485 |
| 10028 | 2P | BG18NUC-HC486 |
| 10029 | 2P | BG18NUC-HC487 |
| 10030 | 2P | BG18NUC-HC488 |
| 10031 | 2P | BG18NUC-HC489 |
| 10032 | 2P | BG18NUC-HC490 |
| 10033 | 2P | BG18NUC-HC491 |
| 10034 | RBD | BG18NUC-HC492 |
| 10035 | 2P | BG18NUC-HC493 |
| 10036 | 2P | BG18NUC-HC494 |
| 10037 | 2P | BG18NUC-HC495 |
| 10038 | 2P | BG18NUC-HC496 |
| 10039 | RBD | BG18NUC-HC497 |
| 10040 | 2P | BG18NUC-HC498 |
| 10041 | 2P | BG18NUC-HC499 |
| 10042 | 2P | BG18NUC-HC500 |
| 10043 | 2P | BG18NUC-HC501 |
| 10044 | RBD | BG18NUC-HC502 |
| 10045 | 2P | BG18NUC-HC503 |
| 10046 | 2P | BG18NUC-HC504 |
| 10047 | 2P | BG18NUC-HC505 |
| 10048 | RBD | BG18NUC-HC506 |
| 10049 | 2P | BG18NUC-HC507 |
| 10050 | 2P | BG18NUC-HC508 |
| 10051 | 2P | BG18NUC-HC509 |
| 10052 | 2P | BG18NUC-HC510 |
| 10053 | 2P | BG18NUC-HC511 |
| 10054 | 2P | BG18NUC-HC512 |
| 10055 | 2P | BG18NUC-HC513 |
| 10056 | 2P | BG18NUC-HC514 |
| 10057 | 2P | BG18NUC-HC515 |
| 10058 | RBD | BG18NUC-HC516 |
| 10059 | 2P | BG18NUC-HC517 |
| 10060 | 2P | BG18NUC-HC518 |
| 10061 | 2P | BG18NUC-HC519 |
| 10062 | 2P | BG18NUC-HC520 |
| 10063 | 2P | BG18NUC-HC521 |
| 10064 | RBD | BG18NUC-HC522 |
| 10065 | 2P | BG18NUC-HC523 |
| 10066 | 2P | BG18NUC-HC524 |
| 10067 | 2P | BG18NUC-HC525 |
| 10068 | RBD | BG18NUC-HC526 |
| 10069 | RBD | BG18NUC-HC527 |
| 10070 | 2P | BG18NUC-HC528 |
| 10071 | 2P | BG18NUC-HC529 |
| 10072 | 2P | BG18NUC-HC530 |
| 10073 | 2P | BG18NUC-HC531 |
| 10074 | 2P | BG18NUC-HC532 |
| 10075 | RBD | BG18NUC-HC533 |
| 10076 | 2P | BG18NUC-HC534 |
| 10077 | 2P | BG18NUC-HC535 |
| 10078 | 2P | BG18NUC-HC536 |
| 10079 | 2P | BG18NUC-HC537 |
| 10080 | RBD | BG18NUC-HC538 |
| 10081 | RBD | BG18NUC-HC539 |
| 10082 | 2F | BG18NUC-HC540 |
| 10083 | RBD | BG18NUC-HC541 |
| 10084 | RBD | BG18NUC-HC542 |
| 10085 | RBD | BG18NUC-HC543 |
| 10086 | RBD | BG18NUC-HC544 |
| 10087 | RBD | BG18NUC-HC545 |
| 10088 | RBD | BG18NUC-HC546 |
| 10089 | 2P | BG18NUC-HC547 |
| 10090 | RBD | BG18NUC-HC548 |
| 10091 | RBD | BG18NUC-HC549 |
| 10092 | 2P | BG18NUC-HC550 |
| 10093 | 2P | BG18NUC-HC551 |
| 10094 | 2P | BG18NUC-HC552 |
| 10095 | 2P | BG18NUC-HC553 |
| 10096 | 2P | BG18NUC-HC554 |
| 10097 | 2P | BG18NUC-HC555 |
| 10098 | RBD | BG18NUC-HC556 |
| 10099 | 2P | BG18NUC-HC557 |
| 10100 | RBD | BG18NUC-HC558 |
| 10101 | 2P | BG18NUC-HC559 |
| 10102 | 2P | BG18NUC-HC560 |
| 10103 | 2P | BG18NUC-HC561 |
| 10104 | 2P | BG18NUC-HC562 |
| 10105 | RBD | BG18NUC-HC563 |
| 10106 | 2P | BG18NUC-HC564 |
| 10107 | 2P | BG18NUC-HC565 |
| 10108 | 2P | BG18NUC-HC566 |
| 10109 | 2P | BG18NUC-HC567 |
| 10110 | 2P | BG18NUC-HC568 |
| 10111 | 2P | BG18NUC-HC569 |
| 10112 | 2P | BG18NUC-HC570 |
| 10113 | 2P | BG18NUC-HC571 |
| 10114 | 2P | BG18NUC-HC572 |
| 10115 | 2P | BG18NUC-HC573 |
| 10116 | RBD | BG18NUC-HC574 |
| 10117 | RBD | BG18NUC-HC575 |
| 10118 | 2F | BG18NUC-HC576 |
| 10119 | RBD | BG18NUC-HC577 |
| 10120 | 2P | BG18NUC-HC578 |
| 10121 | 2P | BG18NUC-HC579 |
| 10122 | 2P | BG18NUC-HC580 |
| 10123 | 2P | BG18NUC-HC581 |
| 10124 | 2P | BG18NUC-HC582 |
| 10125 | 2P | BG18NUC-HC583 |
| 10126 | 2P | BG18NUC-HC584 |
| 10127 | 2P | BG18NUC-HC585 |
| 10128 | RBD | BG18NUC-HC586 |
| 10129 | 2P | BG18NUC-HC587 |
| 10130 | 2P | BG18NUC-HC588 |
| 10131 | 2P | BG18NUC-HC589 |
| 10132 | 2P | BG18NUC-HC590 |
| 10133 | 2P | BG18NUC-HC591 |
| 10134 | 2P | BG18NUC-HC592 |
| 10135 | 2P | BG18NUC-HC593 |
| 10136 | 2P | BG18NUC-HC594 |
| 10137 | 2P | BG18NUC-HC595 |
| 10138 | RBD | BG18NUC-HC596 |
| 10139 | 2P | BG18NUC-HC597 |
| 10140 | RBD | BG18NUC-HC598 |
| 10141 | RBD | BG18NUC-HC599 |
| 10142 | RBD | BG18NUC-HC600 |
| 10143 | 2P | BG18NUC-HC601 |
| 10144 | 2P | BG18NUC-HC602 |
| 10145 | 2P | BG18NUC-HC603 |
| 10146 | 2P | BG18NUC-HC604 |
| 10147 | 2P | BG18NUC-HC605 |
| 10148 | RBD | BG18NUC-HC606 |
| 10149 | RBD | BG18NUC-HC607 |
| 10150 | 2P | BG18NUC-HC608 |
| 10151 | RBD | BG18NUC-HC609 |
| 10152 | 2P | BG18NUC-HC610 |
| 10153 | 2P | BG18NUC-HC611 |
| 10154 | 2P | BG18NUC-HC612 |
| 10155 | 2P | BG18NUC-HC613 |
| 10156 | RBD | BG18NUC-HC614 |
| 10157 | 2P | BG18NUC-HC615 |
| 10158 | RBD | BG18NUC-HC616 |
| 10159 | 2P | BG18NUC-HC617 |
| 10160 | 2P | BG18NUC-HC618 |
| 10161 | 2P | BG18NUC-HC619 |
| 10162 | RBD | BG18NUC-HC620 |
| 10163 | 2P | BG18NUC-HC621 |
| 10164 | 2P | BG18NUC-HC622 |
| 10165 | 2P | BG18NUC-HC623 |
| 10166 | 2P | BG18NUC-HC624 |
| 10167 | 2P | BG18NUC-HC625 |
| 10168 | RBD | BG18NUC-HC626 |
| 10169 | 2P | BG18NUC-HC627 |
| 10170 | RBD | BG18NUC-HC628 |
| 10171 | 2P | BG18NUC-HC629 |
| 10172 | 2P | BG18NUC-HC630 |
| 10173 | RBD | BG18NUC-HC631 |
| 10174 | RBD | BG18NUC-HC632 |
| 10175 | 2P | BG18NUC-HC633 |
| 10176 | 2P | BG18NUC-HC634 |
| 10177 | 2P | BG18NUC-HC635 |
| 10178 | 2P | BG18NUC-HC636 |
| 10179 | 2P | BG18NUC-HC637 |
| 10180 | 2P | BG18NUC-HC638 |
| 10181 | RBD | BG18NUC-HC639 |
| 10182 | 2P | BG18NUC-HC640 |
| 10183 | RBD | BG18NUC-HC641 |
| 10184 | 2P | BG18NUC-HC642 |
| 10185 | 2P | BG18NUC-HC643 |
| 10186 | 2P | BG18NUC-HC644 |
| 10187 | 2P | BG18NUC-HC645 |
| 10188 | 2P | BG18NUC-HC646 |
| 10189 | 2P | BG18NUC-HC647 |
| 10190 | RBD | BG18NUC-HC648 |
| 10191 | 2P | BG18NUC-HC649 |
| 10192 | 2P | BG18NUC-HC650 |
| 10193 | 2P | BG18NUC-HC651 |
| 10194 | RBD | BG18NUC-HC652 |
| 10195 | 2P | BG18NUC-HC653 |
| 10196 | RBD | BG18NUC-HC654 |
| 10197 | 2P | BG18NUC-HC655 |
| 10198 | 2P | BG18NUC-HC656 |
| 10199 | 2P | BG18NUC-HC657 |
| 10200 | RBD | BG18NUC-HC658 |
| 10201 | 2P | BG18NUC-HC659 |
| 10202 | 2P | BG18NUC-HC660 |
| 10203 | 2P | BG18NUC-HC661 |
| 10204 | 2P | BG18NUC-HC662 |
| 10205 | RBD | BG18NUC-HC663 |
| 10206 | RBD | BG18NUC-HC664 |
| 10207 | RBD | BG18NUC-HC665 |
| 10208 | RBD | BG18NUC-HC666 |
| 10209 | RBD | BG18NUC-HC667 |
| 10210 | RBD | BG18NUC-HC668 |
| 10211 | RBD | BG18NUC-HC669 |
| 10212 | RBD | BG18NUC-HC670 |
| 10213 | 2P | BG18NUC-HC671 |
| 10214 | 2P | BG18NUC-HC672 |
| 10215 | 2P | BG18NUC-HC673 |
| 10216 | RBD | BG18NUC-HC674 |
| 10217 | 2P | BG18NUC-HC675 |
| 10218 | 2P | BG18NUC-HC676 |
| 10219 | 2P | BG18NUC-HC677 |
| 10220 | RBD | BG18NUC-HC678 |
| 10221 | 2P | BG18NUC-HC679 |
| 10222 | 2P | BG18NUC-HC680 |
| 10223 | 2P | BG18NUC-HC681 |
| 10224 | RBD | BG18NUC-HC682 |
| 10225 | 2P | BG18NUC-HC683 |
| 10226 | 2P | BG18NUC-HC684 |
| 10227 | RBD | BG18NUC-HC685 |
| 10228 | 2P | BG18NUC-HC686 |
| 10229 | 2P | BG18NUC-HC687 |
| 10230 | 2P | BG18NUC-HC688 |
| 10231 | 2P | BG18NUC-HC689 |
| 10232 | 2P | BG18NUC-HC690 |
| 10233 | RBD | BG18NUC-HC691 |
| 10234 | RBD | BG18NUC-HC692 |
| 10235 | RBD | BG18NUC-HC693 |
| 10236 | 2P | BG18NUC-HC694 |
| 10237 | RBD | BG18NUC-HC695 |
| 10238 | 2P | BG18NUC-HC696 |
| 10239 | 2P | BG18NUC-HC697 |
| 10240 | 2P | BG18NUC-HC698 |
| 10241 | 2P | BG18NUC-HC699 |
| 10242 | 2P | BG18NUC-HC700 |
| 10243 | 2P | BG18NUC-HC701 |
| 10244 | 2P | BG18NUC-HC702 |
| 10245 | 2P | BG18NUC-HC703 |
| 10246 | 2P | BG18NUC-HC704 |
| 10247 | 2P | BG18NUC-HC705 |
| 10248 | 2P | BG18NUC-HC706 |
| 10249 | RBD | BG18NUC-HC707 |
| 10250 | 2P | BG18NUC-HC708 |
| 10251 | 2P | BG18NUC-HC709 |
| 10252 | 2P | BG18NUC-HC710 |
| 10253 | RBD | BG18NUC-HC711 |
| 10254 | 2P | BG18NUC-HC712 |
| 10255 | RBD | BG18NUC-HC713 |
| 10256 | RBD | BG18NUC-HC714 |
| 10257 | RBD | BG18NUC-HC715 |
| 10258 | RBD | BG18NUC-HC716 |
| 10259 | RBD | BG18NUC-HC717 |
| 10260 | 2P | BG18NUC-HC718 |
| 10261 | 2P | BG18NUC-HC719 |
| 10262 | RBD | BG18NUC-HC720 |
| 10263 | RBD | BG18NUC-HC721 |
| 10264 | RBD | BG18NUC-HC722 |
| 10265 | 2P | BG18NUC-HC723 |
| 10266 | RBD | BG18NUC-HC724 |
| 10267 | 2P | BG18NUC-HC725 |
| 10268 | 2P | BG18NUC-HC726 |
| 10269 | 2P | BG18NUC-HC727 |
| 10270 | 2P | BG18NUC-HC728 |
| 10271 | 2P | BG18NUC-HC729 |
| 10272 | 2P | BG18NUC-HC730 |
| 10273 | RBD | BG18NUC-HC731 |
| 10274 | RBD | BG18NUC-HC732 |
| 10275 | 2P | BG18NUC-HC733 |
| 10276 | RBD | BG18NUC-HC734 |
| 10277 | 2P | BG18NUC-HC735 |
| 10278 | 2P | BG18NUC-HC736 |
| 10279 | 2P | BG18NUC-HC737 |
| 10280 | 2P | BG18NUC-HC738 |
| 10281 | RBD | BG18NUC-HC739 |
| 10282 | 2P | BG18NUC-HC740 |
| 10283 | 2P | BG18NUC-HC741 |
| 10284 | 2P | BG18NUC-HC742 |
| 10285 | 2F | BG18NUC-HC743 |
| 10286 | RBD | BG18NUC-HC744 |
| 10287 | 2P | BG18NUC-HC745 |
| 10288 | RBD | BG18NUC-HC746 |
| 10289 | RBD | BG18NUC-HC747 |
| 10290 | RBD | BG18NUC-HC748 |
| 10291 | 2P | BG18NUC-HC749 |
| 10292 | 2P | BG18NUC-HC750 |
| 10293 | 2P | BG18NUC-HC751 |
| 10294 | 2P | BG18NUC-LC1 |
| 10295 | 2P | BG18NUC-LC2 |
| 10296 | RBD | BG18NUC-LC3 |
| 10297 | 2P | BG18NUC-LC4 |
| 10298 | 2P | BG18NUC-LC5 |
| 10299 | RBD | BG18NUC-LC6 |
| 10300 | 2P | BG18NUC-LC7 |
| 10301 | 2P | BG18NUC-LC8 |
| 10302 | RBD | BG18NUC-LC9 |
| 10303 | 2P | BG18NUC-LC10 |
| 10304 | 2P | BG18NUC-LC11 |
| 10305 | 2P | BG18NUC-LC12 |
| 10306 | 2P | BG18NUC-LC13 |
| 10307 | 2P | BG18NUC-LC14 |
| 10308 | 2P | BG18NUC-LC15 |
| 10309 | 2P | BG18NUC-LC16 |
| 10310 | RBD | BG18NUC-LC17 |
| 10311 | 2P | BG18NUC-LC18 |
| 10312 | 2P | BG18NUC-LC19 |
| 10313 | RBD | BG18NUC-LC20 |
| 10314 | 2P | BG18NUC-LC21 |
| 10315 | RBD | BG18NUC-LC22 |
| 10316 | 2P | BG18NUC-LC23 |
| 10317 | 2P | BG18NUC-LC24 |
| 10318 | 2P | BG18NUC-LC25 |
| 10319 | 2P | BG18NUC-LC26 |
| 10320 | 2P | BG18NUC-LC27 |
| 10321 | 2P | BG18NUC-LC28 |
| 10322 | 2P | BG18NUC-LC29 |
| 10323 | 2P | BG18NUC-LC30 |
| 10324 | RBD | BG18NUC-LC31 |
| 10325 | RBD | BG18NUC-LC32 |
| 10326 | RBD | BG18NUC-LC33 |
| 10327 | 2P | BG18NUC-LC34 |
| 10328 | 2P | BG18NUC-LC35 |
| 10329 | 2P | BG18NUC-LC36 |
| 10330 | 2P | BG18NUC-LC37 |
| 10331 | 2P | BG18NUC-LC38 |
| 10332 | 2P | BG18NUC-LC39 |
| 10333 | 2P | BG18NUC-LC40 |
| 10334 | RBD | BG18NUC-LC41 |
| 10335 | RBD | BG18NUC-LC42 |
| 10336 | 2P | BG18NUC-LC43 |
| 10337 | 2P | BG18NUC-LC44 |
| 10338 | 2P | BG18NUC-LC45 |
| 10339 | RBD | BG18NUC-LC46 |
| 10340 | 2P | BG18NUC-LC47 |
| 10341 | 2P | BG18NUC-LC48 |
| 10342 | 2P | BG18NUC-LC49 |
| 10343 | 2P | BG18NUC-LC50 |
| 10344 | 2P | BG18NUC-LC51 |
| 10345 | 2P | BG18NUC-LC52 |
| 10346 | 2P | BG18NUC-LC53 |
| 10347 | RBD | BG18NUC-LC54 |
| 10348 | 2P | BG18NUC-LC55 |
| 10349 | 2P | BG18NUC-LC56 |
| 10350 | 2P | BG18NUC-LC57 |
| 10351 | 2P | BG18NUC-LC58 |
| 10352 | RBD | BG18NUC-LC59 |
| 10353 | 2P | BG18NUC-LC60 |
| 10354 | 2P | BG18NUC-LC61 |
| 10355 | 2P | BG18NUC-LC62 |
| 10356 | RBD | BG18NUC-LC63 |
| 10357 | RBD | BG18NUC-LC64 |
| 10358 | 2P | BG18NUC-LC65 |
| 10359 | 2P | BG18NUC-LC66 |
| 10360 | 2P | BG18NUC-LC67 |
| 10361 | 2P | BG18NUC-LC68 |
| 10362 | RBD | BG18NUC-LC69 |
| 10363 | 2P | BG18NUC-LC70 |
| 10364 | RBD | BG18NUC-LC71 |
| 10365 | 2P | BG18NUC-LC72 |
| 10366 | 2P | BG18NUC-LC73 |
| 10367 | 2P | BG18NUC-LC74 |
| 10368 | 2P | BG18NUC-LC75 |
| 10369 | 2P | BG18NUC-LC76 |
| 10370 | RBD | BG18NUC-LC77 |
| 10371 | RBD | BG18NUC-LC78 |
| 10372 | 2P | BG18NUC-LC79 |
| 10373 | 2P | BG18NUC-LC80 |
| 10374 | 2P | BG18NUC-LC81 |
| 10375 | 2P | BG18NUC-LC82 |
| 10376 | 2P | BG18NUC-LC83 |
| 10377 | 2P | BG18NUC-LC84 |
| 10378 | 2P | BG18NUC-LC85 |
| 10379 | 2P | BG18NUC-LC86 |
| 10380 | 2P | BG18NUC-LC87 |
| 10381 | 2P | BG18NUC-LC88 |
| 10382 | 2P | BG18NUC-LC89 |
| 10383 | 2P | BG18NUC-LC90 |
| 10384 | RBD | BG18NUC-LC91 |
| 10385 | RBD | BG18NUC-LC92 |
| 10386 | 2P | BG18NUC-LC93 |
| 10387 | 2P | BG18NUC-LC94 |
| 10388 | 2P | BG18NUC-LC95 |
| 10389 | RBD | BG18NUC-LC96 |
| 10390 | 2P | BG18NUC-LC97 |
| 10391 | 2P | BG18NUC-LC98 |
| 10392 | 2P | BG18NUC-LC99 |
| 10393 | 2P | BG18NUC-LC100 |
| 10394 | RBD | BG18NUC-LC101 |
| 10395 | 2P | BG18NUC-LC102 |
| 10396 | RBD | BG18NUC-LC103 |
| 10397 | RBD | BG18NUC-LC104 |
| 10398 | 2P | BG18NUC-LC105 |
| 10399 | RBD | BG18NUC-LC106 |
| 10400 | RBD | BG18NUC-LC107 |
| 10401 | 2P | BG18NUC-LC108 |
| 10402 | 2P | BG18NUC-LC109 |
| 10403 | RBD | BG18NUC-LC110 |
| 10404 | 2P | BG18NUC-LC111 |
| 10405 | 2P | BG18NUC-LC112 |
| 10406 | 2P | BG18NUC-LC113 |
| 10407 | 2P | BG18NUC-LC114 |
| 10408 | 2P | BG18NUC-LC115 |
| 10409 | RBD | BG18NUC-LC116 |
| 10410 | 2P | BG18NUC-LC117 |
| 10411 | 2P | BG18NUC-LC118 |
| 10412 | 2P | BG18NUC-LC119 |
| 10413 | 2P | BG18NUC-LC120 |
| 10414 | 2P | BG18NUC-LC121 |
| 10415 | 2P | BG18NUC-LC122 |
| 10416 | 2P | BG18NUC-LC123 |
| 10417 | 2P | BG18NUC-LC124 |
| 10418 | 2P | BG18NUC-LC125 |
| 10419 | 2P | BG18NUC-LC126 |
| 10420 | 2P | BG18NUC-LC127 |
| 10421 | 2P | BG18NUC-LC128 |
| 10422 | 2P | BG18NUC-LC129 |
| 10423 | 2P | BG18NUC-LC130 |
| 10424 | 2P | BG18NUC-LC131 |
| 10425 | RBD | BG18NUC-LC132 |
| 10426 | 2P | BG18NUC-LC133 |
| 10427 | RBD | BG18NUC-LC134 |
| 10428 | 2P | BG18NUC-LC135 |
| 10429 | 2P | BG18NUC-LC136 |
| 10430 | RBD | BG18NUC-LC137 |
| 10431 | 2P | BG18NUC-LC138 |
| 10432 | RBD | BG18NUC-LC139 |
| 10433 | RBD | BG18NUC-LC140 |
| 10434 | RBD | BG18NUC-LC141 |
| 10435 | 2P | BG18NUC-LC142 |
| 10436 | 2P | BG18NUC-LC143 |
| 10437 | 2P | BG18NUC-LC144 |
| 10438 | 2P | BG18NUC-LC145 |
| 10439 | 2P | BG18NUC-LC146 |
| 10440 | 2P | BG18NUC-LC147 |
| 10441 | 2P | BG18NUC-LC148 |
| 10442 | 2P | BG18NUC-LC149 |
| 10443 | 2P | BG18NUC-LC150 |
| 10444 | 2P | BG18NUC-LC151 |
| 10445 | 2P | BG18NUC-LC152 |
| 10446 | 2P | BG18NUC-LC153 |
| 10447 | 2P | BG18NUC-LC154 |
| 10448 | RBD | BG18NUC-LC155 |
| 10449 | 2P | BG18NUC-LC156 |
| 10450 | 2P | BG18NUC-LC157 |
| 10451 | 2P | BG18NUC-LC158 |
| 10452 | 2P | BG18NUC-LC159 |
| 10453 | 2P | BG18NUC-LC160 |
| 10454 | 2P | BG18NUC-LC161 |
| 10455 | 2P | BG18NUC-LC162 |
| 10456 | RBD | BG18NUC-LC163 |
| 10457 | 2P | BG18NUC-LC164 |
| 10458 | RBD | BG18NUC-LC165 |
| 10459 | RBD | BG18NUC-LC166 |
| 10460 | 2P | BG18NUC-LC167 |
| 10461 | 2P | BG18NUC-LC168 |
| 10462 | RBD | BG18NUC-LC169 |
| 10463 | 2P | BG18NUC-LC170 |
| 10464 | 2P | BG18NUC-LC171 |
| 10465 | 2P | BG18NUC-LC172 |
| 10466 | 2P | BG18NUC-LC173 |
| 10467 | 2P | BG18NUC-LC174 |
| 10468 | 2P | BG18NUC-LC175 |
| 10469 | 2P | BG18NUC-LC176 |
| 10470 | 2P | BG18NUC-LC177 |
| 10471 | 2P | BG18NUC-LC178 |
| 10472 | 2P | BG18NUC-LC179 |
| 10473 | RBD | BG18NUC-LC180 |
| 10474 | RBD | BG18NUC-LC181 |
| 10475 | 2P | BG18NUC-LC182 |
| 10476 | 2P | BG18NUC-LC183 |
| 10477 | 2P | BG18NUC-LC184 |
| 10478 | 2P | BG18NUC-LC185 |
| 10479 | RBD | BG18NUC-LC186 |
| 10480 | 2P | BG18NUC-LC187 |
| 10481 | 2P | BG18NUC-LC188 |
| 10482 | 2P | BG18NUC-LC189 |
| 10483 | 2P | BG18NUC-LC190 |
| 10484 | 2P | BG18NUC-LC191 |
| 10485 | 2P | BG18NUC-LC192 |
| 10486 | RBD | BG18NUC-LC193 |
| 10487 | 2P | BG18NUC-LC194 |
| 10488 | 2P | BG18NUC-LC195 |
| 10489 | RBD | BG18NUC-LC196 |
| 10490 | RBD | BG18NUC-LC197 |
| 10491 | RBD | BG18NUC-LC198 |
| 10492 | RBD | BG18NUC-LC199 |
| 10493 | 2P | BG18NUC-LC200 |
| 10494 | RBD | BG18NUC-LC201 |
| 10495 | 2P | BG18NUC-LC202 |
| 10496 | RBD | BG18NUC-LC203 |
| 10497 | 2P | BG18NUC-LC204 |
| 10498 | RBD | BG18NUC-LC205 |
| 10499 | 2P | BG18NUC-LC206 |
| 10500 | 2P | BG18NUC-LC207 |
| 10501 | 2P | BG18NUC-LC208 |
| 10502 | 2P | BG18NUC-LC209 |
| 10503 | 2P | BG18NUC-LC210 |
| 10504 | 2P | BG18NUC-LC211 |
| 10505 | RBD | BG18NUC-LC212 |
| 10506 | 2P | BG18NUC-LC213 |
| 10507 | RBD | BG18NUC-LC214 |
| 10508 | RBD | BG18NUC-LC215 |
| 10509 | RBD | BG18NUC-LC216 |
| 10510 | RBD | BG18NUC-LC217 |
| 10511 | 2P | BG18NUC-LC218 |
| 10512 | RBD | BG18NUC-LC219 |
| 10513 | 2P | BG18NUC-LC220 |
| 10514 | 2P | BG18NUC-LC221 |
| 10515 | 2P | BG18NUC-LC222 |
| 10516 | 2P | BG18NUC-LC223 |
| 10517 | RBD | BG18NUC-LC224 |
| 10518 | RBD | BG18NUC-LC225 |
| 10519 | 2P | BG18NUC-LC226 |
| 10520 | 2P | BG18NUC-LC227 |
| 10521 | 2P | BG18NUC-LC228 |
| 10522 | 2P | BG18NUC-LC229 |
| 10523 | RBD | BG18NUC-LC230 |
| 10524 | 2P | BG18NUC-LC231 |
| 10525 | RBD | BG18NUC-LC232 |
| 10526 | 2P | BG18NUC-LC233 |
| 10527 | 2P | BG18NUC-LC234 |
| 10528 | 2P | BG18NUC-LC235 |
| 10529 | 2P | BG18NUC-LC236 |
| 10530 | 2P | BG18NUC-LC237 |
| 10531 | RBD | BG18NUC-LC238 |
| 10532 | RBD | BG18NUC-LC239 |
| 10533 | RBD | BG18NUC-LC240 |
| 10534 | 2P | BG18NUC-LC241 |
| 10535 | RBD | BG18NUC-LC242 |
| 10536 | 2P | BG18NUC-LC243 |
| 10537 | 2P | BG18NUC-LC244 |
| 10538 | 2P | BG18NUC-LC245 |
| 10539 | 2P | BG18NUC-LC246 |
| 10540 | 2P | BG18NUC-LC247 |
| 10541 | 2P | BG18NUC-LC248 |
| 10542 | 2P | BG18NUC-LC249 |
| 10543 | 2P | BG18NUC-LC250 |
| 10544 | 2P | BG18NUC-LC251 |
| 10545 | RBD | BG18NUC-LC252 |
| 10546 | 2P | BG18NUC-LC253 |
| 10547 | RBD | BG18NUC-LC254 |
| 10548 | RBD | BG18NUC-LC255 |
| 10549 | 2P | BG18NUC-LC256 |
| 10550 | 2P | BG18NUC-LC257 |
| 10551 | 2F | BG18NUC-LC258 |
| 10552 | RBD | BG18NUC-LC259 |
| 10553 | 2P | BG18NUC-LC260 |
| 10554 | RBD | BG18NUC-LC261 |
| 10555 | 2P | BG18NUC-LC262 |
| 10556 | RBD | BG18NUC-LC263 |
| 10557 | 2P | BG18NUC-LC264 |
| 10558 | 2P | BG18NUC-LC265 |
| 10559 | 2P | BG18NUC-LC266 |
| 10560 | RBD | BG18NUC-LC267 |
| 10561 | 2P | BG18NUC-LC268 |
| 10562 | 2P | BG18NUC-LC269 |
| 10563 | 2P | BG18NUC-LC270 |
| 10564 | 2F | BG18NUC-LC271 |
| 10565 | 2P | BG18NUC-LC272 |
| 10566 | 2P | BG18NUC-LC273 |
| 10567 | 2P | BG18NUC-LC274 |
| 10568 | 2P | BG18NUC-LC275 |
| 10569 | 2P | BG18NUC-LC276 |
| 10570 | 2P | BG18NUC-LC277 |
| 10571 | 2P | BG18NUC-LC278 |
| 10572 | RBD | BG18NUC-LC279 |
| 10573 | 2P | BG18NUC-LC280 |
| 10574 | 2P | BG18NUC-LC281 |
| 10575 | RBD | BG18NUC-LC282 |
| 10576 | 2P | BG18NUC-LC283 |
| 10577 | RBD | BG18NUC-LC284 |
| 10578 | 2P | BG18NUC-LC285 |
| 10579 | RBD | BG18NUC-LC286 |
| 10580 | RBD | BG18NUC-LC287 |
| 10581 | 2P | BG18NUC-LC288 |
| 10582 | 2P | BG18NUC-LC289 |
| 10583 | 2P | BG18NUC-LC290 |
| 10584 | RBD | BG18NUC-LC291 |
| 10585 | RBD | BG18NUC-LC292 |
| 10586 | RBD | BG18NUC-LC293 |
| 10587 | 2P | BG18NUC-LC294 |
| 10588 | 2P | BG18NUC-LC295 |
| 10589 | 2P | BG18NUC-LC296 |
| 10590 | 2P | BG18NUC-LC297 |
| 10591 | 2P | BG18NUC-LC298 |
| 10592 | RBD | BG18NUC-LC299 |
| 10593 | 2P | BG18NUC-LC300 |
| 10594 | 2P | BG18NUC-LC301 |
| 10595 | 2P | BG18NUC-LC302 |
| 10596 | 2P | BG18NUC-LC303 |
| 10597 | 2P | BG18NUC-LC304 |
| 10598 | 2P | BG18NUC-LC305 |
| 10599 | 2P | BG18NUC-LC306 |
| 10600 | 2P | BG18NUC-LC307 |
| 10601 | 2P | BG18NUC-LC308 |
| 10602 | RBD | BG18NUC-LC309 |
| 10603 | 2P | BG18NUC-LC310 |
| 10604 | RBD | BG18NUC-LC311 |
| 10605 | 2P | BG18NUC-LC312 |
| 10606 | 2P | BG18NUC-LC313 |
| 10607 | 2P | BG18NUC-LC314 |
| 10608 | RBD | BG18NUC-LC315 |
| 10609 | 2P | BG18NUC-LC316 |
| 10610 | 2P | BG18NUC-LC317 |
| 10611 | 2P | BG18NUC-LC318 |
| 10612 | 2P | BG18NUC-LC319 |
| 10613 | 2P | BG18NUC-LC320 |
| 10614 | 2P | BG18NUC-LC321 |
| 10615 | RBD | BG18NUC-LC322 |
| 10616 | RBD | BG18NUC-LC323 |
| 10617 | RBD | BG18NUC-LC324 |
| 10618 | RBD | BG18NUC-LC325 |
| 10619 | 2P | BG18NUC-LC326 |
| 10620 | 2P | BG18NUC-LC327 |
| 10621 | RBD | BG18NUC-LC328 |
| 10622 | 2P | BG18NUC-LC329 |
| 10623 | 2P | BG18NUC-LC330 |
| 10624 | 2P | BG18NUC-LC331 |
| 10625 | 2P | BG18NUC-LC332 |
| 10626 | 2P | BG18NUC-LC333 |
| 10627 | RBD | BG18NUC-LC334 |
| 10628 | 2P | BG18NUC-LC335 |
| 10629 | RBD | BG18NUC-LC336 |
| 10630 | RBD | BG18NUC-LC337 |
| 10631 | 2P | BG18NUC-LC338 |
| 10632 | 2P | BG18NUC-LC339 |
| 10633 | 2P | BG18NUC-LC340 |
| 10634 | RBD | BG18NUC-LC341 |
| 10635 | 2P | BG18NUC-LC342 |
| 10636 | RBD | BG18NUC-LC343 |
| 10637 | 2P | BG18NUC-LC344 |
| 10638 | 2P | BG18NUC-LC345 |
| 10639 | 2P | BG18NUC-LC346 |
| 10640 | 2P | BG18NUC-LC347 |
| 10641 | 2P | BG18NUC-LC348 |
| 10642 | 2P | BG18NUC-LC349 |
| 10643 | 2P | BG18NUC-LC350 |
| 10644 | RBD | BG18NUC-LC351 |
| 10645 | 2P | BG18NUC-LC352 |
| 10646 | 2P | BG18NUC-LC353 |
| 10647 | 2P | BG18NUC-LC354 |
| 10648 | 2P | BG18NUC-LC355 |
| 10649 | 2P | BG18NUC-LC356 |
| 10650 | 2P | BG18NUC-LC357 |
| 10651 | RBD | BG18NUC-LC358 |
| 10652 | 2P | BG18NUC-LC359 |
| 10653 | 2P | BG18NUC-LC360 |
| 10654 | 2P | BG18NUC-LC361 |
| 10655 | 2P | BG18NUC-LC362 |
| 10656 | 2P | BG18NUC-LC363 |
| 10657 | RBD | BG18NUC-LC364 |
| 10658 | RBD | BG18NUC-LC365 |
| 10659 | 2P | BG18NUC-LC366 |
| 10660 | 2P | BG18NUC-LC367 |
| 10661 | 2P | BG18NUC-LC368 |
| 10662 | 2P | BG18NUC-LC369 |
| 10663 | 2P | BG18NUC-LC370 |
| 10664 | 2P | BG18NUC-LC371 |
| 10665 | 2P | BG18NUC-LC372 |
| 10666 | RBD | BG18NUC-LC373 |
| 10667 | RBD | BG18NUC-LC374 |
| 10668 | RBD | BG18NUC-LC375 |
| 10669 | RBD | BG18NUC-LC376 |
| 10670 | RBD | BG18NUC-LC377 |
| 10671 | 2P | BG18NUC-LC378 |
| 10672 | 2P | BG18NUC-LC379 |
| 10673 | 2P | BG18NUC-LC380 |
| 10674 | RBD | BG18NUC-LC381 |
| 10675 | RBD | BG18NUC-LC382 |
| 10676 | 2P | BG18NUC-LC383 |
| 10677 | RBD | BG18NUC-LC384 |
| 10678 | 2P | BG18NUC-LC385 |
| 10679 | 2P | BG18NUC-LC386 |
| 10680 | 2P | BG18NUC-LC387 |
| 10681 | 2P | BG18NUC-LC388 |
| 10682 | RBD | BG18NUC-LC389 |
| 10683 | 2P | BG18NUC-LC390 |
| 10684 | RBD | BG18NUC-LC391 |
| 10685 | 2P | BG18NUC-LC392 |
| 10686 | 2P | BG18NUC-LC393 |
| 10687 | 2P | BG18NUC-LC394 |
| 10688 | 2P | BG18NUC-LC395 |
| 10689 | 2P | BG18NUC-LC396 |
| 10690 | 2P | BG18NUC-LC397 |
| 10691 | 2P | BG18NUC-LC398 |
| 10692 | 2P | BG18NUC-LC399 |
| 10693 | 2P | BG18NUC-LC400 |
| 10694 | 2P | BG18NUC-LC401 |
| 10695 | 2P | BG18NUC-LC402 |
| 10696 | 2P | BG18NUC-LC403 |
| 10697 | 2F | BG18NUC-LC404 |
| 10698 | RBD | BG18NUC-LC405 |
| 10699 | 2P | BG18NUC-LC406 |
| 10700 | RBD | BG18NUC-LC407 |
| 10701 | RBD | BG18NUC-LC408 |
| 10702 | RBD | BG18NUC-LC409 |
| 10703 | 2P | BG18NUC-LC410 |
| 10704 | 2P | BG18NUC-LC411 |
| 10705 | 2P | BG18NUC-LC412 |
| 10706 | RBD | BG18NUC-LC413 |
| 10707 | RBD | BG18NUC-LC414 |
| 10708 | 2P | BG18NUC-LC415 |
| 10709 | RBD | BG18NUC-LC416 |
| 10710 | 2P | BG18NUC-LC417 |
| 10711 | 2P | BG18NUC-LC418 |
| 10712 | 2P | BG18NUC-LC419 |
| 10713 | RBD | BG18NUC-LC420 |
| 10714 | 2P | BG18NUC-LC421 |
| 10715 | 2P | BG18NUC-LC422 |
| 10716 | 2P | BG18NUC-LC423 |
| 10717 | RBD | BG18NUC-LC424 |
| 10718 | 2P | BG18NUC-LC425 |
| 10719 | 2P | BG18NUC-LC426 |
| 10720 | 2P | BG18NUC-LC427 |
| 10721 | RBD | BG18NUC-LC428 |
| 10722 | 2P | BG18NUC-LC429 |
| 10723 | 2F | BG18NUC-LC430 |
| 10724 | RBD | BG18NUC-LC431 |
| 10725 | 2P | BG18NUC-LC432 |
| 10726 | 2P | BG18NUC-LC433 |
| 10727 | RBD | BG18NUC-LC434 |
| 10728 | RBD | BG18NUC-LC435 |
| 10729 | 2P | BG18NUC-LC436 |
| 10730 | 2P | BG18NUC-LC437 |
| 10731 | 2P | BG18NUC-LC438 |
| 10732 | 2P | BG18NUC-LC439 |
| 10733 | 2P | BG18NUC-LC440 |
| 10734 | 2P | BG18NUC-LC441 |
| 10735 | 2P | BG18NUC-LC442 |
| 10736 | 2P | BG18NUC-LC443 |
| 10737 | 2F | BG18NUC-LC444 |
| 10738 | 2P | BG18NUC-LC445 |
| 10739 | RBD | BG18NUC-LC446 |
| 10740 | 2P | BG18NUC-LC447 |
| 10741 | 2P | BG18NUC-LC448 |
| 10742 | 2F | BG18NUC-LC449 |
| 10743 | 2P | BG18NUC-LC450 |
| 10744 | 2P | BG18NUC-LC451 |
| 10745 | 2P | BG18NUC-LC452 |
| 10746 | 2P | BG18NUC-LC453 |
| 10747 | 2P | BG18NUC-LC454 |
| 10748 | 2F | BG18NUC-LC455 |
| 10749 | 2P | BG18NUC-LC456 |
| 10750 | 2P | BG18NUC-LC457 |
| 10751 | 2P | BG18NUC-LC458 |
| 10752 | 2P | BG18NUC-LC459 |
| 10753 | 2P | BG18NUC-LC460 |
| 10754 | 2P | BG18NUC-LC461 |
| 10755 | RBD | BG18NUC-LC462 |
| 10756 | RBD | BG18NUC-LC463 |
| 10757 | 2P | BG18NUC-LC464 |
| 10758 | 2F | BG18NUC-LC465 |
| 10759 | 2F | BG18NUC-LC466 |
| 10760 | 2F | BG18NUC-LC467 |
| 10761 | RBD | BG18NUC-LC468 |
| 10762 | RBD | BG18NUC-LC469 |
| 10763 | RBD | BG18NUC-LC470 |
| 10764 | 2P | BG18NUC-LC471 |
| 10765 | 2P | BG18NUC-LC472 |
| 10766 | 2P | BG18NUC-LC473 |
| 10767 | 2P | BG18NUC-LC474 |
| 10768 | RBD | BG18NUC-LC475 |
| 10769 | 2P | BG18NUC-LC476 |
| 10770 | RBD | BG18NUC-LC477 |
| 10771 | RBD | BG18NUC-LC478 |
| 10772 | RBD | BG18NUC-LC479 |
| 10773 | RBD | BG18NUC-LC480 |
| 10774 | 2P | BG18NUC-LC481 |
| 10775 | RBD | BG18NUC-LC482 |
| 10776 | 2P | BG18NUC-LC483 |
| 10777 | 2P | BG18NUC-LC484 |
| 10778 | 2P | BG18NUC-LC485 |
| 10779 | 2P | BG18NUC-LC486 |
| 10780 | 2P | BG18NUC-LC487 |
| 10781 | 2P | BG18NUC-LC488 |
| 10782 | 2P | BG18NUC-LC489 |
| 10783 | 2P | BG18NUC-LC490 |
| 10784 | 2P | BG18NUC-LC491 |
| 10785 | RBD | BG18NUC-LC492 |
| 10786 | 2P | BG18NUC-LC493 |
| 10787 | 2F | BG18NUC-LC494 |
| 10788 | 2P | BG18NUC-LC495 |
| 10789 | 2P | BG18NUC-LC496 |
| 10790 | RBD | BG18NUC-LC497 |
| 10791 | 2F | BG18NUC-LC498 |
| 10792 | 2F | BG18NUC-LC499 |
| 10793 | 2P | BG18NUC-LC500 |
| 10794 | 2P | BG18NUC-LC501 |
| 10795 | RBD | BG18NUC-LC502 |
| 10796 | 2P | BG18NUC-LC503 |
| 10797 | 2F | BG18NUC-LC504 |
| 10798 | 2P | BG18NUC-LC505 |
| 10799 | RBD | BG18NUC-LC506 |
| 10800 | 2P | BG18NUC-LC507 |
| 10801 | 2P | BG18NUC-LC508 |
| 10802 | 2F | BG18NUC-LC509 |
| 10803 | 2P | BG18NUC-LC510 |
| 10804 | 2P | BG18NUC-LC511 |
| 10805 | 2P | BG18NUC-LC512 |
| 10806 | 2P | BG18NUC-LC513 |
| 10807 | 2P | BG18NUC-LC514 |
| 10808 | 2P | BG18NUC-LC515 |
| 10809 | RBD | BG18NUC-LC516 |
| 10810 | 2P | BG18NUC-LC517 |
| 10811 | 2P | BG18NUC-LC518 |
| 10812 | 2P | BG18NUC-LC519 |
| 10813 | 2P | BG18NUC-LC520 |
| 10814 | 2P | BG18NUC-LC521 |
| 10815 | RBD | BG18NUC-LC522 |
| 10816 | 2P | BG18NUC-LC523 |
| 10817 | 2P | BG18NUC-LC524 |
| 10818 | 2P | BG18NUC-LC525 |
| 10819 | RBD | BG18NUC-LC526 |
| 10820 | RBD | BG18NUC-LC527 |
| 10821 | 2P | BG18NUC-LC528 |
| 10822 | 2P | BG18NUC-LC529 |
| 10823 | 2P | BG18NUC-LC530 |
| 10824 | 2P | BG18NUC-LC531 |
| 10825 | 2P | BG18NUC-LC532 |
| 10826 | RBD | BG18NUC-LC533 |
| 10827 | 2P | BG18NUC-LC534 |
| 10828 | 2P | BG18NUC-LC535 |
| 10829 | 2P | BG18NUC-LC536 |
| 10830 | 2P | BG18NUC-LC537 |
| 10831 | RBD | BG18NUC-LC538 |
| 10832 | RBD | BG18NUC-LC539 |
| 10833 | 2P | BG18NUC-LC540 |
| 10834 | RBD | BG18NUC-LC541 |
| 10835 | RBD | BG18NUC-LC542 |
| 10836 | RBD | BG18NUC-LC543 |
| 10837 | RBD | BG18NUC-LC544 |
| 10838 | RBD | BG18NUC-LC545 |
| 10839 | RBD | BG18NUC-LC546 |
| 10840 | 2P | BG18NUC-LC547 |
| 10841 | RBD | BG18NUC-LC548 |
| 10842 | RBD | BG18NUC-LC549 |
| 10843 | 2P | BG18NUC-LC550 |
| 10844 | 2P | BG18NUC-LC551 |
| 10845 | 2P | BG18NUC-LC552 |
| 10846 | 2P | BG18NUC-LC553 |
| 10847 | 2P | BG18NUC-LC554 |
| 10848 | 2P | BG18NUC-LC555 |
| 10849 | RBD | BG18NUC-LC556 |
| 10850 | 2P | BG18NUC-LC557 |
| 10851 | RBD | BG18NUC-LC558 |
| 10852 | 2P | BG18NUC-LC559 |
| 10853 | 2P | BG18NUC-LC560 |
| 10854 | 2P | BG18NUC-LC561 |
| 10855 | 2P | BG18NUC-LC562 |
| 10856 | RBD | BG18NUC-LC563 |
| 10857 | 2P | BG18NUC-LC564 |
| 10858 | 2P | BG18NUC-LC565 |
| 10859 | 2P | BG18NUC-LC566 |
| 10860 | 2P | BG18NUC-LC567 |
| 10861 | 2P | BG18NUC-LC568 |
| 10862 | 2P | BG18NUC-LC569 |
| 10863 | 2P | BG18NUC-LC570 |
| 10864 | 2P | BG18NUC-LC571 |
| 10865 | 2P | BG18NUC-LC572 |
| 10866 | 2P | BG18NUC-LC573 |
| 10867 | RBD | BG18NUC-LC574 |
| 10868 | RBD | BG18NUC-LC575 |
| 10869 | 2P | BG18NUC-LC576 |
| 10870 | RBD | BG18NUC-LC577 |
| 10871 | 2P | BG18NUC-LC578 |
| 10872 | 2P | BG18NUC-LC579 |
| 10873 | 2P | BG18NUC-LC580 |
| 10874 | 2P | BG18NUC-LC581 |
| 10875 | 2P | BG18NUC-LC582 |
| 10876 | 2P | BG18NUC-LC583 |
| 10877 | 2P | BG18NUC-LC584 |
| 10878 | 2P | BG18NUC-LC585 |
| 10879 | RBD | BG18NUC-LC586 |
| 10880 | 2P | BG18NUC-LC587 |
| 10881 | 2P | BG18NUC-LC588 |
| 10882 | 2P | BG18NUC-LC589 |
| 10883 | 2P | BG18NUC-LC590 |
| 10884 | 2P | BG18NUC-LC591 |
| 10885 | 2P | BG18NUC-LC592 |
| 10886 | 2P | BG18NUC-LC593 |
| 10887 | 2P | BG18NUC-LC594 |
| 10888 | 2P | BG18NUC-LC595 |
| 10889 | RBD | BG18NUC-LC596 |
| 10890 | 2P | BG18NUC-LC597 |
| 10891 | RBD | BG18NUC-LC598 |
| 10892 | RBD | BG18NUC-LC599 |
| 10893 | RBD | BG18NUC-LC600 |
| 10894 | 2P | BG18NUC-LC601 |
| 10895 | 2P | BG18NUC-LC602 |
| 10896 | 2P | BG18NUC-LC603 |
| 10897 | 2P | BG18NUC-LC604 |
| 10898 | 2P | BG18NUC-LC605 |
| 10899 | RBD | BG18NUC-LC606 |
| 10900 | RBD | BG18NUC-LC607 |
| 10901 | 2P | BG18NUC-LC608 |
| 10902 | RBD | BG18NUC-LC609 |
| 10903 | 2P | BG18NUC-LC610 |
| 10904 | 2P | BG18NUC-LC611 |
| 10905 | 2P | BG18NUC-LC612 |
| 10906 | 2P | BG18NUC-LC613 |
| 10907 | RBD | BG18NUC-LC614 |
| 10908 | 2P | BG18NUC-LC615 |
| 10909 | RBD | BG18NUC-LC616 |
| 10910 | 2P | BG18NUC-LC617 |
| 10911 | 2P | BG18NUC-LC618 |
| 10912 | 2P | BG18NUC-LC619 |
| 10913 | RBD | BG18NUC-LC620 |
| 10914 | 2P | BG18NUC-LC621 |
| 10915 | 2P | BG18NUC-LC622 |
| 10916 | 2P | BG18NUC-LC623 |
| 10917 | 2P | BG18NUC-LC624 |
| 10918 | 2P | BG18NUC-LC625 |
| 10919 | RBD | BG18NUC-LC626 |
| 10920 | 2P | BG18NUC-LC627 |
| 10921 | RBD | BG18NUC-LC628 |
| 10922 | 2P | BG18NUC-LC629 |
| 10923 | 2P | BG18NUC-LC630 |
| 10924 | RBD | BG18NUC-LC631 |
| 10925 | RBD | BG18NUC-LC632 |
| 10926 | 2P | BG18NUC-LC633 |
| 10927 | 2P | BG18NUC-LC634 |
| 10928 | 2P | BG18NUC-LC635 |
| 10929 | 2P | BG18NUC-LC636 |
| 10930 | 2P | BG18NUC-LC637 |
| 10931 | 2P | BG18NUC-LC638 |
| 10932 | RBD | BG18NUC-LC639 |
| 10933 | 2P | BG18NUC-LC640 |
| 10934 | RBD | BG18NUC-LC641 |
| 10935 | 2P | BG18NUC-LC642 |
| 10936 | 2P | BG18NUC-LC643 |
| 10937 | 2P | BG18NUC-LC644 |
| 10938 | 2P | BG18NUC-LC645 |
| 10939 | 2P | BG18NUC-LC646 |
| 10940 | 2P | BG18NUC-LC647 |
| 10941 | RBD | BG18NUC-LC648 |
| 10942 | 2P | BG18NUC-LC649 |
| 10943 | 2P | BG18NUC-LC650 |
| 10944 | 2F | BG18NUC-LC651 |
| 10945 | RBD | BG18NUC-LC652 |
| 10946 | 2P | BG18NUC-LC653 |
| 10947 | RBD | BG18NUC-LC654 |
| 10948 | 2P | BG18NUC-LC655 |
| 10949 | 2P | BG18NUC-LC656 |
| 10950 | 2P | BG18NUC-LC657 |
| 10951 | RBD | BG18NUC-LC658 |
| 10952 | 2P | BG18NUC-LC659 |
| 10953 | 2P | BG18NUC-LC660 |
| 10954 | 2P | BG18NUC-LC661 |
| 10955 | 2P | BG18NUC-LC662 |
| 10956 | RBD | BG18NUC-LC663 |
| 10957 | RBD | BG18NUC-LC664 |
| 10958 | RBD | BG18NUC-LC665 |
| 10959 | RBD | BG18NUC-LC666 |
| 10960 | RBD | BG18NUC-LC667 |
| 10961 | RBD | BG18NUC-LC668 |
| 10962 | RBD | BG18NUC-LC669 |
| 10963 | RBD | BG18NUC-LC670 |
| 10964 | 2P | BG18NUC-LC671 |
| 10965 | 2P | BG18NUC-LC672 |
| 10966 | 2P | BG18NUC-LC673 |
| 10967 | RBD | BG18NUC-LC674 |
| 10968 | 2P | BG18NUC-LC675 |
| 10969 | 2P | BG18NUC-LC676 |
| 10970 | 2P | BG18NUC-LC677 |
| 10971 | RBD | BG18NUC-LC678 |
| 10972 | 2P | BG18NUC-LC679 |
| 10973 | 2P | BG18NUC-LC680 |
| 10974 | 2P | BG18NUC-LC681 |
| 10975 | RBD | BG18NUC-LC682 |
| 10976 | 2P | BG18NUC-LC683 |
| 10977 | 2P | BG18NUC-LC684 |
| 10978 | RBD | BG18NUC-LC685 |
| 10979 | 2P | BG18NUC-LC686 |
| 10980 | 2P | BG18NUC-LC687 |
| 10981 | 2P | BG18NUC-LC688 |
| 10982 | 2P | BG18NUC-LC689 |
| 10983 | 2P | BG18NUC-LC690 |
| 10984 | RBD | BG18NUC-LC691 |
| 10985 | RBD | BG18NUC-LC692 |
| 10986 | RBD | BG18NUC-LC693 |
| 10987 | 2P | BG18NUC-LC694 |
| 10988 | RBD | BG18NUC-LC695 |
| 10989 | 2P | BG18NUC-LC696 |
| 10990 | 2P | BG18NUC-LC697 |
| 10991 | 2P | BG18NUC-LC698 |
| 10992 | 2P | BG18NUC-LC699 |
| 10993 | 2P | BG18NUC-LC700 |
| 10994 | 2P | BG18NUC-LC701 |
| 10995 | 2P | BG18NUC-LC702 |
| 10996 | 2P | BG18NUC-LC703 |
| 10997 | 2P | BG18NUC-LC704 |
| 10998 | 2P | BG18NUC-LC705 |
| 10999 | 2P | BG18NUC-LC706 |
| 11000 | RBD | BG18NUC-LC707 |
| 11001 | 2P | BG18NUC-LC708 |
| 11002 | 2P | BG18NUC-LC709 |
| 11003 | 2P | BG18NUC-LC710 |
| 11004 | RBD | BG18NUC-LC711 |
| 11005 | 2P | BG18NUC-LC712 |
| 11006 | RBD | BG18NUC-LC713 |
| 11007 | RBD | BG18NUC-LC714 |
| 11008 | RBD | BG18NUC-LC715 |
| 11009 | RBD | BG18NUC-LC716 |
| 11010 | RBD | BG18NUC-LC717 |
| 11011 | 2P | BG18NUC-LC718 |
| 11012 | 2P | BG18NUC-LC719 |
| 11013 | RBD | BG18NUC-LC720 |
| 11014 | RBD | BG18NUC-LC721 |
| 11015 | RBD | BG18NUC-LC722 |
| 11016 | 2P | BG18NUC-LC723 |
| 11017 | RBD | BG18NUC-LC724 |
| 11018 | 2P | BG18NUC-LC725 |
| 11019 | 2P | BG18NUC-LC726 |
| 11020 | 2P | BG18NUC-LC727 |
| 11021 | 2P | BG18NUC-LC728 |
| 11022 | 2P | BG18NUC-LC729 |
| 11023 | 2P | BG18NUC-LC730 |
| 11024 | RBD | BG18NUC-LC731 |
| 11025 | RBD | BG18NUC-LC732 |
| 11026 | 2P | BG18NUC-LC733 |
| 11027 | RBD | BG18NUC-LC734 |
| 11028 | 2P | BG18NUC-LC735 |
| 11029 | 2P | BG18NUC-LC736 |
| 11030 | 2P | BG18NUC-LC737 |
| 11031 | 2P | BG18NUC-LC738 |
| 11032 | RBD | BG18NUC-LC739 |
| 11033 | 2P | BG18NUC-LC740 |
| 11034 | 2P | BG18NUC-LC741 |
| 11035 | 2P | BG18NUC-LC742 |
| 11036 | 2P | BG18NUC-LC743 |
| 11037 | RBD | BG18NUC-LC744 |
| 11038 | 2P | BG18NUC-LC745 |
| 11039 | RBD | BG18NUC-LC746 |
| 11040 | RBD | BG18NUC-LC747 |
| 11041 | RBD | BG18NUC-LC748 |
| 11042 | 2P | BG18NUC-LC749 |
| 11043 | 2P | BG18NUC-LC750 |
| 11044 | 2P | BG18NUC-LC751 |
| 11045 | 2P | BG19NUC-HC1 |
| 11046 | RBD | BG19NUC-HC2 |
| 11047 | RBD | BG19NUC-HC3 |
| 11048 | RBD | BG19NUC-HC4 |
| 11049 | 2P | BG19NUC-HC5 |
| 11050 | 2P | BG19NUC-HC6 |
| 11051 | RBD | BG19NUC-HC7 |
| 11052 | RBD | BG19NUC-HC8 |
| 11053 | 2P | BG19NUC-HC9 |
| 11054 | 2P | BG19NUC-HC10 |
| 11055 | 2P | BG19NUC-HC11 |
| 11056 | RBD | BG19NUC-HC12 |
| 11057 | RBD | BG19NUC-HC13 |
| 11058 | 2P | BG19NUC-HC14 |
| 11059 | RBD | BG19NUC-HC15 |
| 11060 | RBD | BG19NUC-HC16 |
| 11061 | 2P | BG19NUC-HC17 |
| 11062 | 2P | BG19NUC-HC18 |
| 11063 | 2P | BG19NUC-HC19 |
| 11064 | 2P | BG19NUC-HC20 |
| 11065 | 2P | BG19NUC-HC21 |
| 11066 | 2P | BG19NUC-HC22 |
| 11067 | RBD | BG19NUC-HC23 |
| 11068 | 2P | BG19NUC-HC24 |
| 11069 | 2P | BG19NUC-HC25 |
| 11070 | RBD | BG19NUC-HC26 |
| 11071 | 2P | BG19NUC-HC27 |
| 11072 | RBD | BG19NUC-HC28 |
| 11073 | 2P | BG19NUC-HC29 |
| 11074 | RBD | BG19NUC-HC30 |
| 11075 | 2P | BG19NUC-HC31 |
| 11076 | 2P | BG19NUC-HC32 |
| 11077 | 2P | BG19NUC-HC33 |
| 11078 | RBD | BG19NUC-HC34 |
| 11079 | 2P | BG19NUC-HC35 |
| 11080 | RBD | BG19NUC-HC36 |
| 11081 | RBD | BG19NUC-HC37 |
| 11082 | 2P | BG19NUC-HC38 |
| 11083 | 2P | BG19NUC-HC39 |
| 11084 | RBD | BG19NUC-HC40 |
| 11085 | 2P | BG19NUC-HC41 |
| 11086 | 2P | BG19NUC-HC42 |
| 11087 | 2P | BG19NUC-HC43 |
| 11088 | 2P | BG19NUC-HC44 |
| 11089 | 2P | BG19NUC-HC45 |
| 11090 | 2P | BG19NUC-HC46 |
| 11091 | RBD | BG19NUC-HC47 |
| 11092 | RBD | BG19NUC-HC48 |
| 11093 | RBD | BG19NUC-HC49 |
| 11094 | 2P | BG19NUC-HC50 |
| 11095 | 2P | BG19NUC-HC51 |
| 11096 | 2P | BG19NUC-HC52 |
| 11097 | 2F | BG19NUC-HC53 |
| 11098 | RBD | BG19NUC-HC54 |
| 11099 | 2P | BG19NUC-HC55 |
| 11100 | 2P | BG19NUC-HC56 |
| 11101 | 2P | BG19NUC-HC57 |
| 11102 | 2P | BG19NUC-HC58 |
| 11103 | RBD | BG19NUC-HC59 |
| 11104 | RBD | BG19NUC-HC60 |
| 11105 | RBD | BG19NUC-HC61 |
| 11106 | 2P | BG19NUC-HC62 |
| 11107 | 2P | BG19NUC-HC63 |
| 11108 | RBD | BG19NUC-HC64 |
| 11109 | 2P | BG19NUC-HC65 |
| 11110 | 2P | BG19NUC-HC66 |
| 11111 | 2P | BG19NUC-HC67 |
| 11112 | 2P | BG19NUC-HC68 |
| 11113 | 2P | BG19NUC-HC69 |
| 11114 | 2P | BG19NUC-HC70 |
| 11115 | 2F | BG19NUC-HC71 |
| 11116 | 2P | BG19NUC-HC72 |
| 11117 | 2P | BG19NUC-HC73 |
| 11118 | 2P | BG19NUC-HC74 |
| 11119 | 2P | BG19NUC-HC75 |
| 11120 | RBD | BG19NUC-HC76 |
| 11121 | 2P | BG19NUC-HC77 |
| 11122 | RBD | BG19NUC-HC78 |
| 11123 | 2P | BG19NUC-HC79 |
| 11124 | RBD | BG19NUC-HC80 |
| 11125 | 2P | BG19NUC-HC81 |
| 11126 | 2P | BG19NUC-HC82 |
| 11127 | 2P | BG19NUC-HC83 |
| 11128 | 2P | BG19NUC-HC84 |
| 11129 | 2P | BG19NUC-HC85 |
| 11130 | 2P | BG19NUC-HC86 |
| 11131 | 2P | BG19NUC-HC87 |
| 11132 | 2P | BG19NUC-HC88 |
| 11133 | 2P | BG19NUC-HC89 |
| 11134 | 2P | BG19NUC-HC90 |
| 11135 | 2P | BG19NUC-HC91 |
| 11136 | RBD | BG19NUC-HC92 |
| 11137 | 2P | BG19NUC-HC93 |
| 11138 | 2P | BG19NUC-HC94 |
| 11139 | 2P | BG19NUC-HC95 |
| 11140 | 2P | BG19NUC-HC96 |
| 11141 | 2P | BG19NUC-HC97 |
| 11142 | 2P | BG19NUC-HC98 |
| 11143 | 2P | BG19NUC-HC99 |
| 11144 | 2P | BG19NUC-HC100 |
| 11145 | 2P | BG19NUC-HC101 |
| 11146 | 2P | BG19NUC-HC102 |
| 11147 | 2P | BG19NUC-HC103 |
| 11148 | 2P | BG19NUC-HC104 |
| 11149 | 2P | BG19NUC-HC105 |
| 11150 | RBD | BG19NUC-HC106 |
| 11151 | RBD | BG19NUC-HC107 |
| 11152 | RBD | BG19NUC-HC108 |
| 11153 | 2P | BG19NUC-HC109 |
| 11154 | RBD | BG19NUC-HC110 |
| 11155 | 2P | BG19NUC-HC111 |
| 11156 | 2F | BG19NUC-HC112 |
| 11157 | 2F | BG19NUC-HC113 |
| 11158 | RBD | BG19NUC-HC114 |
| 11159 | 2P | BG19NUC-HC115 |
| 11160 | 2P | BG19NUC-HC116 |
| 11161 | 2P | BG19NUC-HC117 |
| 11162 | RBD | BG19NUC-HC118 |
| 11163 | RBD | BG19NUC-HC119 |
| 11164 | RBD | BG19NUC-HC120 |
| 11165 | RBD | BG19NUC-HC121 |
| 11166 | 2P | BG19NUC-HC122 |
| 11167 | 2P | BG19NUC-HC123 |
| 11168 | 2P | BG19NUC-HC124 |
| 11169 | 2P | BG19NUC-HC125 |
| 11170 | RBD | BG19NUC-HC126 |
| 11171 | RBD | BG19NUC-HC127 |
| 11172 | 2P | BG19NUC-HC128 |
| 11173 | 2P | BG19NUC-HC129 |
| 11174 | 2P | BG19NUC-HC130 |
| 11175 | 2P | BG19NUC-HC131 |
| 11176 | RBD | BG19NUC-HC132 |
| 11177 | 2P | BG19NUC-HC133 |
| 11178 | 2P | BG19NUC-HC134 |
| 11179 | RBD | BG19NUC-HC135 |
| 11180 | RBD | BG19NUC-HC136 |
| 11181 | 2P | BG19NUC-HC137 |
| 11182 | 2P | BG19NUC-HC138 |
| 11183 | RBD | BG19NUC-HC139 |
| 11184 | 2P | BG19NUC-HC140 |
| 11185 | RBD | BG19NUC-HC141 |
| 11186 | 2P | BG19NUC-HC142 |
| 11187 | 2P | BG19NUC-HC143 |
| 11188 | 2P | BG19NUC-HC144 |
| 11189 | 2P | BG19NUC-HC145 |
| 11190 | RBD | BG19NUC-HC146 |
| 11191 | 2P | BG19NUC-HC147 |
| 11192 | 2P | BG19NUC-HC148 |
| 11193 | 2P | BG19NUC-HC149 |
| 11194 | 2P | BG19NUC-HC150 |
| 11195 | 2P | BG19NUC-HC151 |
| 11196 | RBD | BG19NUC-HC152 |
| 11197 | 2P | BG19NUC-HC153 |
| 11198 | 2P | BG19NUC-HC154 |
| 11199 | 2P | BG19NUC-HC155 |
| 11200 | RBD | BG19NUC-HC156 |
| 11201 | 2P | BG19NUC-HC157 |
| 11202 | 2P | BG19NUC-HC158 |
| 11203 | 2P | BG19NUC-HC159 |
| 11204 | 2P | BG19NUC-HC160 |
| 11205 | 2P | BG19NUC-HC161 |
| 11206 | 2P | BG19NUC-HC162 |
| 11207 | 2P | BG19NUC-HC163 |
| 11208 | RBD | BG19NUC-HC164 |
| 11209 | 2P | BG19NUC-HC165 |
| 11210 | 2P | BG19NUC-HC166 |
| 11211 | RBD | BG19NUC-HC167 |
| 11212 | 2P | BG19NUC-HC168 |
| 11213 | 2P | BG19NUC-HC169 |
| 11214 | 2P | BG19NUC-HC170 |
| 11215 | 2P | BG19NUC-HC171 |
| 11216 | 2P | BG19NUC-HC172 |
| 11217 | 2P | BG19NUC-HC173 |
| 11218 | RBD | BG19NUC-HC174 |
| 11219 | RBD | BG19NUC-HC175 |
| 11220 | 2P | BG19NUC-HC176 |
| 11221 | RBD | BG19NUC-HC177 |
| 11222 | RBD | BG19NUC-HC178 |
| 11223 | 2P | BG19NUC-HC179 |
| 11224 | 2P | BG19NUC-HC180 |
| 11225 | 2P | BG19NUC-HC181 |
| 11226 | 2P | BG19NUC-HC182 |
| 11227 | RBD | BG19NUC-HC183 |
| 11228 | RBD | BG19NUC-HC184 |
| 11229 | RBD | BG19NUC-HC185 |
| 11230 | RBD | BG19NUC-HC186 |
| 11231 | RBD | BG19NUC-HC187 |
| 11232 | 2P | BG19NUC-HC188 |
| 11233 | 2P | BG19NUC-HC189 |
| 11234 | RBD | BG19NUC-HC190 |
| 11235 | RBD | BG19NUC-HC191 |
| 11236 | 2P | BG19NUC-HC192 |
| 11237 | 2P | BG19NUC-HC193 |
| 11238 | 2P | BG19NUC-HC194 |
| 11239 | RBD | BG19NUC-HC195 |
| 11240 | RBD | BG19NUC-HC196 |
| 11241 | 2P | BG19NUC-HC197 |
| 11242 | RBD | BG19NUC-HC198 |
| 11243 | 2P | BG19NUC-HC199 |
| 11244 | RBD | BG19NUC-HC200 |
| 11245 | RBD | BG19NUC-HC201 |
| 11246 | RBD | BG19NUC-HC202 |
| 11247 | RBD | BG19NUC-HC203 |
| 11248 | 2P | BG19NUC-HC204 |
| 11249 | 2P | BG19NUC-HC205 |
| 11250 | 2P | BG19NUC-HC206 |
| 11251 | 2P | BG19NUC-HC207 |
| 11252 | 2P | BG19NUC-HC208 |
| 11253 | 2P | BG19NUC-HC209 |
| 11254 | 2P | BG19NUC-HC210 |
| 11255 | 2P | BG19NUC-HC211 |
| 11256 | 2P | BG19NUC-HC212 |
| 11257 | 2P | BG19NUC-HC213 |
| 11258 | RBD | BG19NUC-HC214 |
| 11259 | RBD | BG19NUC-HC215 |
| 11260 | 2P | BG19NUC-HC216 |
| 11261 | 2P | BG19NUC-HC217 |
| 11262 | RBD | BG19NUC-HC218 |
| 11263 | 2P | BG19NUC-HC219 |
| 11264 | 2P | BG19NUC-HC220 |
| 11265 | 2P | BG19NUC-HC221 |
| 11266 | RBD | BG19NUC-HC222 |
| 11267 | RBD | BG19NUC-HC223 |
| 11268 | 2P | BG19NUC-HC224 |
| 11269 | 2P | BG19NUC-HC225 |
| 11270 | 2P | BG19NUC-HC226 |
| 11271 | 2P | BG19NUC-HC227 |
| 11272 | 2P | BG19NUC-HC228 |
| 11273 | RBD | BG19NUC-HC229 |
| 11274 | 2P | BG19NUC-HC230 |
| 11275 | 2P | BG19NUC-HC231 |
| 11276 | RBD | BG19NUC-HC232 |
| 11277 | RBD | BG19NUC-HC233 |
| 11278 | 2P | BG19NUC-HC234 |
| 11279 | 2P | BG19NUC-HC235 |
| 11280 | 2P | BG19NUC-HC236 |
| 11281 | RBD | BG19NUC-HC237 |
| 11282 | RBD | BG19NUC-HC238 |
| 11283 | RBD | BG19NUC-HC239 |
| 11284 | 2P | BG19NUC-HC240 |
| 11285 | 2P | BG19NUC-HC241 |
| 11286 | 2P | BG19NUC-HC242 |
| 11287 | 2P | BG19NUC-HC243 |
| 11288 | 2P | BG19NUC-HC244 |
| 11289 | RBD | BG19NUC-HC245 |
| 11290 | RBD | BG19NUC-HC246 |
| 11291 | 2P | BG19NUC-HC247 |
| 11292 | RBD | BG19NUC-HC248 |
| 11293 | 2P | BG19NUC-HC249 |
| 11294 | 2P | BG19NUC-HC250 |
| 11295 | 2P | BG19NUC-HC251 |
| 11296 | 2P | BG19NUC-HC252 |
| 11297 | 2P | BG19NUC-HC253 |
| 11298 | RBD | BG19NUC-HC254 |
| 11299 | RBD | BG19NUC-HC255 |
| 11300 | 2P | BG19NUC-HC256 |
| 11301 | 2P | BG19NUC-HC257 |
| 11302 | RBD | BG19NUC-HC258 |
| 11303 | 2P | BG19NUC-HC259 |
| 11304 | 2P | BG19NUC-HC260 |
| 11305 | RBD | BG19NUC-HC261 |
| 11306 | 2P | BG19NUC-HC262 |
| 11307 | 2P | BG19NUC-HC263 |
| 11308 | RBD | BG19NUC-HC264 |
| 11309 | 2P | BG19NUC-HC265 |
| 11310 | 2P | BG19NUC-HC266 |
| 11311 | 2P | BG19NUC-HC267 |
| 11312 | 2P | BG19NUC-HC268 |
| 11313 | RBD | BG19NUC-HC269 |
| 11314 | 2P | BG19NUC-HC270 |
| 11315 | RBD | BG19NUC-HC271 |
| 11316 | RBD | BG19NUC-HC272 |
| 11317 | RBD | BG19NUC-HC273 |
| 11318 | 2P | BG19NUC-HC274 |
| 11319 | RBD | BG19NUC-HC275 |
| 11320 | 2P | BG19NUC-LC1 |
| 11321 | RBD | BG19NUC-LC2 |
| 11322 | RBD | BG19NUC-LC3 |
| 11323 | RBD | BG19NUC-LC4 |
| 11324 | 2F | BG19NUC-LC5 |
| 11325 | 2P | BG19NUC-LC6 |
| 11326 | RBD | BG19NUC-LC7 |
| 11327 | RBD | BG19NUC-LC8 |
| 11328 | 2P | BG19NUC-LC9 |
| 11329 | 2P | BG19NUC-LC10 |
| 11330 | 2F | BG19NUC-LC11 |
| 11331 | RBD | BG19NUC-LC12 |
| 11332 | RBD | BG19NUC-LC13 |
| 11333 | 2P | BG19NUC-LC14 |
| 11334 | RBD | BG19NUC-LC15 |
| 11335 | RBD | BG19NUC-LC16 |
| 11336 | 2P | BG19NUC-LC17 |
| 11337 | 2P | BG19NUC-LC18 |
| 11338 | 2P | BG19NUC-LC19 |
| 11339 | 2F | BG19NUC-LC20 |
| 11340 | 2F | BG19NUC-LC21 |
| 11341 | 2P | BG19NUC-LC22 |
| 11342 | RBD | BG19NUC-LC23 |
| 11343 | 2P | BG19NUC-LC24 |
| 11344 | 2P | BG19NUC-LC25 |
| 11345 | RBD | BG19NUC-LC26 |
| 11346 | 2P | BG19NUC-LC27 |
| 11347 | RBD | BG19NUC-LC28 |
| 11348 | 2P | BG19NUC-LC29 |
| 11349 | RBD | BG19NUC-LC30 |
| 11350 | 2P | BG19NUC-LC31 |
| 11351 | 2P | BG19NUC-LC32 |
| 11352 | 2P | BG19NUC-LC33 |
| 11353 | RBD | BG19NUC-LC34 |
| 11354 | 2P | BG19NUC-LC35 |
| 11355 | RBD | BG19NUC-LC36 |
| 11356 | RBD | BG19NUC-LC37 |
| 11357 | 2P | BG19NUC-LC38 |
| 11358 | 2P | BG19NUC-LC39 |
| 11359 | RBD | BG19NUC-LC40 |
| 11360 | 2P | BG19NUC-LC41 |
| 11361 | 2P | BG19NUC-LC42 |
| 11362 | 2P | BG19NUC-LC43 |
| 11363 | 2P | BG19NUC-LC44 |
| 11364 | 2P | BG19NUC-LC45 |
| 11365 | 2P | BG19NUC-LC46 |
| 11366 | RBD | BG19NUC-LC47 |
| 11367 | RBD | BG19NUC-LC48 |
| 11368 | RBD | BG19NUC-LC49 |
| 11369 | 2P | BG19NUC-LC50 |
| 11370 | 2P | BG19NUC-LC51 |
| 11371 | 2P | BG19NUC-LC52 |
| 11372 | 2P | BG19NUC-LC53 |
| 11373 | RBD | BG19NUC-LC54 |
| 11374 | 2P | BG19NUC-LC55 |
| 11375 | 2P | BG19NUC-LC56 |
| 11376 | 2P | BG19NUC-LC57 |
| 11377 | 2P | BG19NUC-LC58 |
| 11378 | RBD | BG19NUC-LC59 |
| 11379 | RBD | BG19NUC-LC60 |
| 11380 | RBD | BG19NUC-LC61 |
| 11381 | 2P | BG19NUC-LC62 |
| 11382 | 2P | BG19NUC-LC63 |
| 11383 | RBD | BG19NUC-LC64 |
| 11384 | 2P | BG19NUC-LC65 |
| 11385 | 2P | BG19NUC-LC66 |
| 11386 | 2P | BG19NUC-LC67 |
| 11387 | 2P | BG19NUC-LC68 |
| 11388 | 2P | BG19NUC-LC69 |
| 11389 | 2P | BG19NUC-LC70 |
| 11390 | 2P | BG19NUC-LC71 |
| 11391 | 2P | BG19NUC-LC72 |
| 11392 | 2P | BG19NUC-LC73 |
| 11393 | 2P | BG19NUC-LC74 |
| 11394 | 2P | BG19NUC-LC75 |
| 11395 | RBD | BG19NUC-LC76 |
| 11396 | 2P | BG19NUC-LC77 |
| 11397 | RBD | BG19NUC-LC78 |
| 11398 | 2P | BG19NUC-LC79 |
| 11399 | RBD | BG19NUC-LC80 |
| 11400 | 2P | BG19NUC-LC81 |
| 11401 | 2P | BG19NUC-LC82 |
| 11402 | 2P | BG19NUC-LC83 |
| 11403 | 2P | BG19NUC-LC84 |
| 11404 | 2P | BG19NUC-LC85 |
| 11405 | 2P | BG19NUC-LC86 |
| 11406 | 2P | BG19NUC-LC87 |
| 11407 | 2P | BG19NUC-LC88 |
| 11408 | 2P | BG19NUC-LC89 |
| 11409 | 2P | BG19NUC-LC90 |
| 11410 | 2P | BG19NUC-LC91 |
| 11411 | RBD | BG19NUC-LC92 |
| 11412 | 2P | BG19NUC-LC93 |
| 11413 | 2P | BG19NUC-LC94 |
| 11414 | 2P | BG19NUC-LC95 |
| 11415 | 2P | BG19NUC-LC96 |
| 11416 | 2P | BG19NUC-LC97 |
| 11417 | 2P | BG19NUC-LC98 |
| 11418 | 2P | BG19NUC-LC99 |
| 11419 | 2P | BG19NUC-LC100 |
| 11420 | 2P | BG19NUC-LC101 |
| 11421 | 2P | BG19NUC-LC102 |
| 11422 | 2P | BG19NUC-LC103 |
| 11423 | 2P | BG19NUC-LC104 |
| 11424 | 2F | BG19NUC-LC105 |
| 11425 | RBD | BG19NUC-LC106 |
| 11426 | RBD | BG19NUC-LC107 |
| 11427 | RBD | BG19NUC-LC108 |
| 11428 | 2P | BG19NUC-LC109 |
| 11429 | RBD | BG19NUC-LC110 |
| 11430 | 2P | BG19NUC-LC111 |
| 11431 | 2P | BG19NUC-LC112 |
| 11432 | 2P | BG19NUC-LC113 |
| 11433 | RBD | BG19NUC-LC114 |
| 11434 | 2P | BG19NUC-LC115 |
| 11435 | 2P | BG19NUC-LC116 |
| 11436 | 2P | BG19NUC-LC117 |
| 11437 | RBD | BG19NUC-LC118 |
| 11438 | RBD | BG19NUC-LC119 |
| 11439 | RBD | BG19NUC-LC120 |
| 11440 | RBD | BG19NUC-LC121 |
| 11441 | 2P | BG19NUC-LC122 |
| 11442 | 2P | BG19NUC-LC123 |
| 11443 | 2P | BG19NUC-LC124 |
| 11444 | 2P | BG19NUC-LC125 |
| 11445 | RBD | BG19NUC-LC126 |
| 11446 | RBD | BG19NUC-LC127 |
| 11447 | 2P | BG19NUC-LC128 |
| 11448 | 2P | BG19NUC-LC129 |
| 11449 | 2P | BG19NUC-LC130 |
| 11450 | 2P | BG19NUC-LC131 |
| 11451 | RBD | BG19NUC-LC132 |
| 11452 | 2P | BG19NUC-LC133 |
| 11453 | 2P | BG19NUC-LC134 |
| 11454 | RBD | BG19NUC-LC135 |
| 11455 | RBD | BG19NUC-LC136 |
| 11456 | 2P | BG19NUC-LC137 |
| 11457 | 2P | BG19NUC-LC138 |
| 11458 | RBD | BG19NUC-LC139 |
| 11459 | 2P | BG19NUC-LC140 |
| 11460 | RBD | BG19NUC-LC141 |
| 11461 | 2P | BG19NUC-LC142 |
| 11462 | 2P | BG19NUC-LC143 |
| 11463 | 2P | BG19NUC-LC144 |
| 11464 | 2P | BG19NUC-LC145 |
| 11465 | RBD | BG19NUC-LC146 |
| 11466 | 2P | BG19NUC-LC147 |
| 11467 | 2P | BG19NUC-LC148 |
| 11468 | 2P | BG19NUC-LC149 |
| 11469 | 2P | BG19NUC-LC150 |
| 11470 | 2P | BG19NUC-LC151 |
| 11471 | RBD | BG19NUC-LC152 |
| 11472 | 2P | BG19NUC-LC153 |
| 11473 | 2P | BG19NUC-LC154 |
| 11474 | 2P | BG19NUC-LC155 |
| 11475 | RBD | BG19NUC-LC156 |
| 11476 | 2P | BG19NUC-LC157 |
| 11477 | 2P | BG19NUC-LC158 |
| 11478 | 2P | BG19NUC-LC159 |
| 11479 | 2P | BG19NUC-LC160 |
| 11480 | 2P | BG19NUC-LC161 |
| 11481 | 2P | BG19NUC-LC162 |
| 11482 | 2P | BG19NUC-LC163 |
| 11483 | RBD | BG19NUC-LC164 |
| 11484 | 2P | BG19NUC-LC165 |
| 11485 | 2P | BG19NUC-LC166 |
| 11486 | RBD | BG19NUC-LC167 |
| 11487 | 2P | BG19NUC-LC168 |
| 11488 | 2P | BG19NUC-LC169 |
| 11489 | 2P | BG19NUC-LC170 |
| 11490 | 2P | BG19NUC-LC171 |
| 11491 | 2P | BG19NUC-LC172 |
| 11492 | 2P | BG19NUC-LC173 |
| 11493 | RBD | BG19NUC-LC174 |
| 11494 | RBD | BG19NUC-LC175 |
| 11495 | 2P | BG19NUC-LC176 |
| 11496 | RBD | BG19NUC-LC177 |
| 11497 | RBD | BG19NUC-LC178 |
| 11498 | 2P | BG19NUC-LC179 |
| 11499 | 2P | BG19NUC-LC180 |
| 11500 | 2P | BG19NUC-LC181 |
| 11501 | 2P | BG19NUC-LC182 |
| 11502 | RBD | BG19NUC-LC183 |
| 11503 | RBD | BG19NUC-LC184 |
| 11504 | RBD | BG19NUC-LC185 |
| 11505 | RBD | BG19NUC-LC186 |
| 11506 | RBD | BG19NUC-LC187 |
| 11507 | 2P | BG19NUC-LC188 |
| 11508 | 2P | BG19NUC-LC189 |
| 11509 | RBD | BG19NUC-LC190 |
| 11510 | RBD | BG19NUC-LC191 |
| 11511 | 2P | BG19NUC-LC192 |
| 11512 | 2P | BG19NUC-LC193 |
| 11513 | 2P | BG19NUC-LC194 |
| 11514 | RBD | BG19NUC-LC195 |
| 11515 | RBD | BG19NUC-LC196 |
| 11516 | 2P | BG19NUC-LC197 |
| 11517 | RBD | BG19NUC-LC198 |
| 11518 | 2P | BG19NUC-LC199 |
| 11519 | RBD | BG19NUC-LC200 |
| 11520 | RBD | BG19NUC-LC201 |
| 11521 | RBD | BG19NUC-LC202 |
| 11522 | RBD | BG19NUC-LC203 |
| 11523 | 2P | BG19NUC-LC204 |
| 11524 | 2P | BG19NUC-LC205 |
| 11525 | 2P | BG19NUC-LC206 |
| 11526 | 2P | BG19NUC-LC207 |
| 11527 | 2P | BG19NUC-LC208 |
| 11528 | 2P | BG19NUC-LC209 |
| 11529 | 2P | BG19NUC-LC210 |
| 11530 | 2P | BG19NUC-LC211 |
| 11531 | 2P | BG19NUC-LC212 |
| 11532 | 2P | BG19NUC-LC213 |
| 11533 | RBD | BG19NUC-LC214 |
| 11534 | RBD | BG19NUC-LC215 |
| 11535 | 2P | BG19NUC-LC216 |
| 11536 | 2P | BG19NUC-LC217 |
| 11537 | RBD | BG19NUC-LC218 |
| 11538 | 2P | BG19NUC-LC219 |
| 11539 | 2P | BG19NUC-LC220 |
| 11540 | 2P | BG19NUC-LC221 |
| 11541 | RBD | BG19NUC-LC222 |
| 11542 | RBD | BG19NUC-LC223 |
| 11543 | 2P | BG19NUC-LC224 |
| 11544 | 2P | BG19NUC-LC225 |
| 11545 | 2P | BG19NUC-LC226 |
| 11546 | 2P | BG19NUC-LC227 |
| 11547 | 2P | BG19NUC-LC228 |
| 11548 | RBD | BG19NUC-LC229 |
| 11549 | 2P | BG19NUC-LC230 |
| 11550 | 2P | BG19NUC-LC231 |
| 11551 | RBD | BG19NUC-LC232 |
| 11552 | RBD | BG19NUC-LC233 |
| 11553 | 2P | BG19NUC-LC234 |
| 11554 | 2P | BG19NUC-LC235 |
| 11555 | 2P | BG19NUC-LC236 |
| 11556 | RBD | BG19NUC-LC237 |
| 11557 | RBD | BG19NUC-LC238 |
| 11558 | RBD | BG19NUC-LC239 |
| 11559 | 2P | BG19NUC-LC240 |
| 11560 | 2P | BG19NUC-LC241 |
| 11561 | 2P | BG19NUC-LC242 |
| 11562 | 2P | BG19NUC-LC243 |
| 11563 | 2P | BG19NUC-LC244 |
| 11564 | RBD | BG19NUC-LC245 |
| 11565 | RBD | BG19NUC-LC246 |
| 11566 | 2P | BG19NUC-LC247 |
| 11567 | RBD | BG19NUC-LC248 |
| 11568 | 2P | BG19NUC-LC249 |
| 11569 | 2P | BG19NUC-LC250 |
| 11570 | 2P | BG19NUC-LC251 |
| 11571 | 2P | BG19NUC-LC252 |
| 11572 | 2P | BG19NUC-LC253 |
| 11573 | RBD | BG19NUC-LC254 |
| 11574 | RBD | BG19NUC-LC255 |
| 11575 | 2P | BG19NUC-LC256 |
| 11576 | 2P | BG19NUC-LC257 |
| 11577 | RBD | BG19NUC-LC258 |
| 11578 | 2P | BG19NUC-LC259 |
| 11579 | 2P | BG19NUC-LC260 |
| 11580 | RBD | BG19NUC-LC261 |
| 11581 | 2P | BG19NUC-LC262 |
| 11582 | 2P | BG19NUC-LC263 |
| 11583 | RBD | BG19NUC-LC264 |
| 11584 | 2P | BG19NUC-LC265 |
| 11585 | 2P | BG19NUC-LC266 |
| 11586 | 2P | BG19NUC-LC267 |
| 11587 | 2P | BG19NUC-LC268 |
| 11588 | RBD | BG19NUC-LC269 |
| 11589 | 2P | BG19NUC-LC270 |
| 11590 | RBD | BG19NUC-LC271 |
| 11591 | RBD | BG19NUC-LC272 |
| 11592 | RBD | BG19NUC-LC273 |
| 11593 | 2P | BG19NUC-LC274 |
| 11594 | RBD | BG19NUC-LC275 |
| 11595 | 2P | BG20NUC-HC1 |
| 11596 | 2P | BG20NUC-HC2 |
| 11597 | 2P | BG20NUC-HC3 |
| 11598 | RBD | BG20NUC-HC4 |
| 11599 | 2P | BG20NUC-HC5 |
| 11600 | 2P | BG20NUC-HC6 |
| 11601 | 2P | BG20NUC-HC7 |
| 11602 | 2P | BG20NUC-HC8 |
| 11603 | 2P | BG20NUC-HC9 |
| 11604 | 2P | BG20NUC-HC10 |
| 11605 | 2P | BG20NUC-HC11 |
| 11606 | 2P | BG20NUC-HC12 |
| 11607 | RBD | BG20NUC-HC13 |
| 11608 | 2P | BG20NUC-HC14 |
| 11609 | 2P | BG20NUC-HC15 |
| 11610 | 2P | BG20NUC-HC16 |
| 11611 | 2P | BG20NUC-HC17 |
| 11612 | RBD | BG20NUC-HC18 |
| 11613 | RBD | BG20NUC-HC19 |
| 11614 | RBD | BG20NUC-HC20 |
| 11615 | 2P | BG20NUC-HC21 |
| 11616 | 2P | BG20NUC-HC22 |
| 11617 | 2P | BG20NUC-HC23 |
| 11618 | 2F | BG20NUC-HC24 |
| 11619 | 2P | BG20NUC-HC25 |
| 11620 | 2F | BG20NUC-HC26 |
| 11621 | 2P | BG20NUC-HC27 |
| 11622 | 2F | BG20NUC-HC28 |
| 11623 | 2P | BG20NUC-HC29 |
| 11624 | 2P | BG20NUC-HC30 |
| 11625 | RBD | BG20NUC-HC31 |
| 11626 | 2P | BG20NUC-HC32 |
| 11627 | 2P | BG20NUC-HC33 |
| 11628 | RBD | BG20NUC-HC34 |
| 11629 | 2P | BG20NUC-HC35 |
| 11630 | 2P | BG20NUC-HC36 |
| 11631 | 2P | BG20NUC-HC37 |
| 11632 | 2P | BG20NUC-HC38 |
| 11633 | RBD | BG20NUC-HC39 |
| 11634 | 2P | BG20NUC-HC40 |
| 11635 | 2P | BG20NUC-HC41 |
| 11636 | 2P | BG20NUC-HC42 |
| 11637 | 2P | BG20NUC-HC43 |
| 11638 | 2P | BG20NUC-HC44 |
| 11639 | RBD | BG20NUC-HC45 |
| 11640 | 2P | BG20NUC-HC46 |
| 11641 | 2P | BG20NUC-HC47 |
| 11642 | RBD | BG20NUC-HC48 |
| 11643 | RBD | BG20NUC-HC49 |
| 11644 | 2P | BG20NUC-HC50 |
| 11645 | 2P | BG20NUC-HC51 |
| 11646 | 2P | BG20NUC-HC52 |
| 11647 | RBD | BG20NUC-HC53 |
| 11648 | 2P | BG20NUC-HC54 |
| 11649 | 2P | BG20NUC-HC55 |
| 11650 | 2P | BG20NUC-HC56 |
| 11651 | RBD | BG20NUC-HC57 |
| 11652 | 2P | BG20NUC-HC58 |
| 11653 | 2F | BG20NUC-HC59 |
| 11654 | 2P | BG20NUC-HC60 |
| 11655 | 2P | BG20NUC-HC61 |
| 11656 | 2P | BG20NUC-HC62 |
| 11657 | RBD | BG20NUC-HC63 |
| 11658 | 2P | BG20NUC-HC64 |
| 11659 | 2P | BG20NUC-HC65 |
| 11660 | 2P | BG20NUC-HC66 |
| 11661 | 2P | BG20NUC-HC67 |
| 11662 | 2P | BG20NUC-HC68 |
| 11663 | 2P | BG20NUC-HC69 |
| 11664 | 2P | BG20NUC-HC70 |
| 11665 | RBD | BG20NUC-HC71 |
| 11666 | 2P | BG20NUC-HC72 |
| 11667 | 2P | BG20NUC-HC73 |
| 11668 | 2P | BG20NUC-HC74 |
| 11669 | 2P | BG20NUC-HC75 |
| 11670 | 2P | BG20NUC-HC76 |
| 11671 | 2P | BG20NUC-HC77 |
| 11672 | 2P | BG20NUC-HC78 |
| 11673 | 2P | BG20NUC-HC79 |
| 11674 | 2P | BG20NUC-HC80 |
| 11675 | 2P | BG20NUC-HC81 |
| 11676 | 2P | BG20NUC-HC82 |
| 11677 | 2P | BG20NUC-HC83 |
| 11678 | 2P | BG20NUC-HC84 |
| 11679 | RBD | BG20NUC-HC85 |
| 11680 | RBD | BG20NUC-HC86 |
| 11681 | 2P | BG20NUC-HC87 |
| 11682 | RBD | BG20NUC-HC88 |
| 11683 | RBD | BG20NUC-HC89 |
| 11684 | 2P | BG20NUC-HC90 |
| 11685 | RBD | BG20NUC-HC91 |
| 11686 | RBD | BG20NUC-HC92 |
| 11687 | 2P | BG20NUC-HC93 |
| 11688 | 2P | BG20NUC-HC94 |
| 11689 | 2P | BG20NUC-HC95 |
| 11690 | 2P | BG20NUC-HC96 |
| 11691 | 2P | BG20NUC-HC97 |
| 11692 | 2P | BG20NUC-HC98 |
| 11693 | 2P | BG20NUC-HC99 |
| 11694 | 2P | BG20NUC-HC100 |
| 11695 | 2F | BG20NUC-HC101 |
| 11696 | RBD | BG20NUC-HC102 |
| 11697 | 2P | BG20NUC-HC103 |
| 11698 | 2P | BG20NUC-HC104 |
| 11699 | RBD | BG20NUC-HC105 |
| 11700 | RBD | BG20NUC-HC106 |
| 11701 | RBD | BG20NUC-HC107 |
| 11702 | 2P | BG20NUC-HC108 |
| 11703 | 2P | BG20NUC-HC109 |
| 11704 | 2P | BG20NUC-HC110 |
| 11705 | 2P | BG20NUC-HC111 |
| 11706 | 2F | BG20NUC-HC112 |
| 11707 | 2P | BG20NUC-HC113 |
| 11708 | RBD | BG20NUC-HC114 |
| 11709 | 2P | BG20NUC-HC115 |
| 11710 | 2P | BG20NUC-HC116 |
| 11711 | 2P | BG20NUC-HC117 |
| 11712 | RBD | BG20NUC-HC118 |
| 11713 | 2P | BG20NUC-HC119 |
| 11714 | 2P | BG20NUC-HC120 |
| 11715 | 2P | BG20NUC-HC121 |
| 11716 | 2P | BG20NUC-HC122 |
| 11717 | 2P | BG20NUC-HC123 |
| 11718 | 2P | BG20NUC-HC124 |
| 11719 | 2F | BG20NUC-HC125 |
| 11720 | RBD | BG20NUC-HC126 |
| 11721 | 2P | BG20NUC-HC127 |
| 11722 | 2P | BG20NUC-HC128 |
| 11723 | 2P | BG20NUC-HC129 |
| 11724 | RBD | BG20NUC-HC130 |
| 11725 | RBD | BG20NUC-HC131 |
| 11726 | RBD | BG20NUC-HC132 |
| 11727 | 2P | BG20NUC-HC133 |
| 11728 | RBD | BG20NUC-HC134 |
| 11729 | 2P | BG20NUC-HC135 |
| 11730 | 2P | BG20NUC-HC136 |
| 11731 | RBD | BG20NUC-HC137 |
| 11732 | RBD | BG20NUC-HC138 |
| 11733 | RBD | BG20NUC-HC139 |
| 11734 | 2P | BG20NUC-HC140 |
| 11735 | RBD | BG20NUC-HC141 |
| 11736 | 2P | BG20NUC-HC142 |
| 11737 | 2P | BG20NUC-HC143 |
| 11738 | 2P | BG20NUC-HC144 |
| 11739 | 2P | BG20NUC-HC145 |
| 11740 | 2P | BG20NUC-HC146 |
| 11741 | 2P | BG20NUC-HC147 |
| 11742 | RBD | BG20NUC-HC148 |
| 11743 | 2P | BG20NUC-HC149 |
| 11744 | 2F | BG20NUC-HC150 |
| 11745 | RBD | BG20NUC-HC151 |
| 11746 | 2P | BG20NUC-HC152 |
| 11747 | RBD | BG20NUC-HC153 |
| 11748 | RBD | BG20NUC-HC154 |
| 11749 | 2P | BG20NUC-HC155 |
| 11750 | RBD | BG20NUC-HC156 |
| 11751 | RBD | BG20NUC-HC157 |
| 11752 | RBD | BG20NUC-HC158 |
| 11753 | 2P | BG20NUC-HC159 |
| 11754 | 2P | BG20NUC-HC160 |
| 11755 | 2P | BG20NUC-HC161 |
| 11756 | 2P | BG20NUC-HC162 |
| 11757 | RBD | BG20NUC-HC163 |
| 11758 | 2P | BG20NUC-HC164 |
| 11759 | RBD | BG20NUC-HC165 |
| 11760 | 2P | BG20NUC-HC166 |
| 11761 | 2P | BG20NUC-HC167 |
| 11762 | 2P | BG20NUC-HC168 |
| 11763 | 2P | BG20NUC-HC169 |
| 11764 | 2P | BG20NUC-HC170 |
| 11765 | 2P | BG20NUC-HC171 |
| 11766 | RBD | BG20NUC-HC172 |
| 11767 | 2P | BG20NUC-HC173 |
| 11768 | RBD | BG20NUC-HC174 |
| 11769 | 2P | BG20NUC-HC175 |
| 11770 | 2P | BG20NUC-HC176 |
| 11771 | 2P | BG20NUC-LC1 |
| 11772 | 2F | BG20NUC-LC2 |
| 11773 | 2P | BG20NUC-LC3 |
| 11774 | RBD | BG20NUC-LC4 |
| 11775 | 2P | BG20NUC-LC5 |
| 11776 | 2P | BG20NUC-LC6 |
| 11777 | 2P | BG20NUC-LC7 |
| 11778 | 2P | BG20NUC-LC8 |
| 11779 | 2P | BG20NUC-LC9 |
| 11780 | 2P | BG20NUC-LC10 |
| 11781 | 2F | BG20NUC-LC11 |
| 11782 | 2F | BG20NUC-LC12 |
| 11783 | RBD | BG20NUC-LC13 |
| 11784 | 2P | BG20NUC-LC14 |
| 11785 | 2P | BG20NUC-LC15 |
| 11786 | 2P | BG20NUC-LC16 |
| 11787 | 2P | BG20NUC-LC17 |
| 11788 | RBD | BG20NUC-LC18 |
| 11789 | RBD | BG20NUC-LC19 |
| 11790 | RBD | BG20NUC-LC20 |
| 11791 | 2P | BG20NUC-LC21 |
| 11792 | 2F | BG20NUC-LC22 |
| 11793 | 2F | BG20NUC-LC23 |
| 11794 | 2P | BG20NUC-LC24 |
| 11795 | 2P | BG20NUC-LC25 |
| 11796 | 2P | BG20NUC-LC26 |
| 11797 | 2P | BG20NUC-LC27 |
| 11798 | 2P | BG20NUC-LC28 |
| 11799 | 2P | BG20NUC-LC29 |
| 11800 | 2P | BG20NUC-LC30 |
| 11801 | RBD | BG20NUC-LC31 |
| 11802 | 2P | BG20NUC-LC32 |
| 11803 | 2F | BG20NUC-LC33 |
| 11804 | RBD | BG20NUC-LC34 |
| 11805 | 2P | BG20NUC-LC35 |
| 11806 | 2P | BG20NUC-LC36 |
| 11807 | 2P | BG20NUC-LC37 |
| 11808 | 2P | BG20NUC-LC38 |
| 11809 | RBD | BG20NUC-LC39 |
| 11810 | 2P | BG20NUC-LC40 |
| 11811 | 2P | BG20NUC-LC41 |
| 11812 | 2P | BG20NUC-LC42 |
| 11813 | 2P | BG20NUC-LC43 |
| 11814 | 2F | BG20NUC-LC44 |
| 11815 | RBD | BG20NUC-LC45 |
| 11816 | 2P | BG20NUC-LC46 |
| 11817 | 2P | BG20NUC-LC47 |
| 11818 | RBD | BG20NUC-LC48 |
| 11819 | RBD | BG20NUC-LC49 |
| 11820 | 2P | BG20NUC-LC50 |
| 11821 | 2P | BG20NUC-LC51 |
| 11822 | 2P | BG20NUC-LC52 |
| 11823 | RBD | BG20NUC-LC53 |
| 11824 | 2P | BG20NUC-LC54 |
| 11825 | 2P | BG20NUC-LC55 |
| 11826 | 2P | BG20NUC-LC56 |
| 11827 | RBD | BG20NUC-LC57 |
| 11828 | 2P | BG20NUC-LC58 |
| 11829 | 2P | BG20NUC-LC59 |
| 11830 | 2P | BG20NUC-LC60 |
| 11831 | 2P | BG20NUC-LC61 |
| 11832 | 2P | BG20NUC-LC62 |
| 11833 | RBD | BG20NUC-LC63 |
| 11834 | 2P | BG20NUC-LC64 |
| 11835 | 2P | BG20NUC-LC65 |
| 11836 | 2P | BG20NUC-LC66 |
| 11837 | 2P | BG20NUC-LC67 |
| 11838 | 2P | BG20NUC-LC68 |
| 11839 | 2P | BG20NUC-LC69 |
| 11840 | 2F | BG20NUC-LC70 |
| 11841 | RBD | BG20NUC-LC71 |
| 11842 | 2P | BG20NUC-LC72 |
| 11843 | 2P | BG20NUC-LC73 |
| 11844 | 2P | BG20NUC-LC74 |
| 11845 | 2P | BG20NUC-LC75 |
| 11846 | 2P | BG20NUC-LC76 |
| 11847 | 2P | BG20NUC-LC77 |
| 11848 | 2P | BG20NUC-LC78 |
| 11849 | 2P | BG20NUC-LC79 |
| 11850 | 2P | BG20NUC-LC80 |
| 11851 | 2P | BG20NUC-LC81 |
| 11852 | 2P | BG20NUC-LC82 |
| 11853 | 2P | BG20NUC-LC83 |
| 11854 | 2P | BG20NUC-LC84 |
| 11855 | RBD | BG20NUC-LC85 |
| 11856 | RBD | BG20NUC-LC86 |
| 11857 | 2P | BG20NUC-LC87 |
| 11858 | RBD | BG20NUC-LC88 |
| 11859 | RBD | BG20NUC-LC89 |
| 11860 | 2P | BG20NUC-LC90 |
| 11861 | RBD | BG20NUC-LC91 |
| 11862 | RBD | BG20NUC-LC92 |
| 11863 | 2P | BG20NUC-LC93 |
| 11864 | 2P | BG20NUC-LC94 |
| 11865 | 2P | BG20NUC-LC95 |
| 11866 | 2P | BG20NUC-LC96 |
| 11867 | 2P | BG20NUC-LC97 |
| 11868 | 2P | BG20NUC-LC98 |
| 11869 | 2P | BG20NUC-LC99 |
| 11870 | 2P | BG20NUC-LC100 |
| 11871 | 2P | BG20NUC-LC101 |
| 11872 | RBD | BG20NUC-LC102 |
| 11873 | 2P | BG20NUC-LC103 |
| 11874 | 2F | BG20NUC-LC104 |
| 11875 | RBD | BG20NUC-LC105 |
| 11876 | RBD | BG20NUC-LC106 |
| 11877 | RBD | BG20NUC-LC107 |
| 11878 | 2P | BG20NUC-LC108 |
| 11879 | 2P | BG20NUC-LC109 |
| 11880 | 2P | BG20NUC-LC110 |
| 11881 | 2P | BG20NUC-LC111 |
| 11882 | 2P | BG20NUC-LC112 |
| 11883 | 2P | BG20NUC-LC113 |
| 11884 | RBD | BG20NUC-LC114 |
| 11885 | 2P | BG20NUC-LC115 |
| 11886 | 2P | BG20NUC-LC116 |
| 11887 | 2P | BG20NUC-LC117 |
| 11888 | RBD | BG20NUC-LC118 |
| 11889 | 2P | BG20NUC-LC119 |
| 11890 | 2P | BG20NUC-LC120 |
| 11891 | 2P | BG20NUC-LC121 |
| 11892 | 2P | BG20NUC-LC122 |
| 11893 | 2P | BG20NUC-LC123 |
| 11894 | 2P | BG20NUC-LC124 |
| 11895 | 2P | BG20NUC-LC125 |
| 11896 | RBD | BG20NUC-LC126 |
| 11897 | 2P | BG20NUC-LC127 |
| 11898 | 2P | BG20NUC-LC128 |
| 11899 | 2P | BG20NUC-LC129 |
| 11900 | RBD | BG20NUC-LC130 |
| 11901 | RBD | BG20NUC-LC131 |
| 11902 | RBD | BG20NUC-LC132 |
| 11903 | 2P | BG20NUC-LC133 |
| 11904 | RBD | BG20NUC-LC134 |
| 11905 | 2P | BG20NUC-LC135 |
| 11906 | 2P | BG20NUC-LC136 |
| 11907 | RBD | BG20NUC-LC137 |
| 11908 | RBD | BG20NUC-LC138 |
| 11909 | RBD | BG20NUC-LC139 |
| 11910 | 2P | BG20NUC-LC140 |
| 11911 | RBD | BG20NUC-LC141 |
| 11912 | 2P | BG20NUC-LC142 |
| 11913 | 2P | BG20NUC-LC143 |
| 11914 | 2P | BG20NUC-LC144 |
| 11915 | 2P | BG20NUC-LC145 |
| 11916 | 2P | BG20NUC-LC146 |
| 11917 | 2P | BG20NUC-LC147 |
| 11918 | RBD | BG20NUC-LC148 |
| 11919 | 2P | BG20NUC-LC149 |
| 11920 | 2P | BG20NUC-LC150 |
| 11921 | RBD | BG20NUC-LC151 |
| 11922 | 2P | BG20NUC-LC152 |
| 11923 | RBD | BG20NUC-LC153 |
| 11924 | RBD | BG20NUC-LC154 |
| 11925 | 2P | BG20NUC-LC155 |
| 11926 | RBD | BG20NUC-LC156 |
| 11927 | RBD | BG20NUC-LC157 |
| 11928 | RBD | BG20NUC-LC158 |
| 11929 | 2P | BG20NUC-LC159 |
| 11930 | 2P | BG20NUC-LC160 |
| 11931 | 2P | BG20NUC-LC161 |
| 11932 | 2P | BG20NUC-LC162 |
| 11933 | RBD | BG20NUC-LC163 |
| 11934 | 2P | BG20NUC-LC164 |
| 11935 | RBD | BG20NUC-LC165 |
| 11936 | 2P | BG20NUC-LC166 |
| 11937 | 2P | BG20NUC-LC167 |
| 11938 | 2P | BG20NUC-LC168 |
| 11939 | 2P | BG20NUC-LC169 |
| 11940 | 2P | BG20NUC-LC170 |
| 11941 | 2P | BG20NUC-LC171 |
| 11942 | RBD | BG20NUC-LC172 |
| 11943 | 2P | BG20NUC-LC173 |
| 11944 | RBD | BG20NUC-LC174 |
| 11945 | 2P | BG20NUC-LC175 |
| 11946 | 2P | BG20NUC-LC176 |
| 11947 | 2P | BG21NUC-HC1 |
| 11948 | 2P | BG21NUC-HC2 |
| 11949 | RBD | BG21NUC-HC3 |
| 11950 | 2P | BG21NUC-HC4 |
| 11951 | 2P | BG21NUC-HC5 |
| 11952 | 2P | BG21NUC-HC6 |
| 11953 | 2P | BG21NUC-HC7 |
| 11954 | 2P | BG21NUC-HC8 |
| 11955 | 2P | BG21NUC-HC9 |
| 11956 | 2P | BG21NUC-HC10 |
| 11957 | 2P | BG21NUC-HC11 |
| 11958 | RBD | BG21NUC-HC12 |
| 11959 | 2P | BG21NUC-HC13 |
| 11960 | 2P | BG21NUC-HC14 |
| 11961 | 2P | BG21NUC-HC15 |
| 11962 | 2P | BG21NUC-HC16 |
| 11963 | 2P | BG21NUC-HC17 |
| 11964 | 2P | BG21NUC-HC18 |
| 11965 | 2P | BG21NUC-HC19 |
| 11966 | 2P | BG21NUC-HC20 |
| 11967 | 2P | BG21NUC-HC21 |
| 11968 | RBD | BG21NUC-HC22 |
| 11969 | 2P | BG21NUC-HC23 |
| 11970 | 2P | BG21NUC-HC24 |
| 11971 | 2P | BG21NUC-HC25 |
| 11972 | 2P | BG21NUC-HC26 |
| 11973 | RBD | BG21NUC-HC27 |
| 11974 | 2P | BG21NUC-HC28 |
| 11975 | 2P | BG21NUC-HC29 |
| 11976 | 2P | BG21NUC-HC30 |
| 11977 | 2P | BG21NUC-HC31 |
| 11978 | 2P | BG21NUC-HC32 |
| 11979 | RBD | BG21NUC-HC33 |
| 11980 | 2P | BG21NUC-HC34 |
| 11981 | 2P | BG21NUC-HC35 |
| 11982 | RBD | BG21NUC-HC36 |
| 11983 | 2P | BG21NUC-HC37 |
| 11984 | 2P | BG21NUC-HC38 |
| 11985 | 2P | BG21NUC-HC39 |
| 11986 | 2P | BG21NUC-HC40 |
| 11987 | 2P | BG21NUC-HC41 |
| 11988 | RBD | BG21NUC-HC42 |
| 11989 | 2P | BG21NUC-HC43 |
| 11990 | 2P | BG21NUC-HC44 |
| 11991 | RBD | BG21NUC-HC45 |
| 11992 | 2P | BG21NUC-HC46 |
| 11993 | 2P | BG21NUC-HC47 |
| 11994 | 2P | BG21NUC-HC48 |
| 11995 | 2F | BG21NUC-HC49 |
| 11996 | 2P | BG21NUC-HC50 |
| 11997 | RBD | BG21NUC-HC51 |
| 11998 | RBD | BG21NUC-HC52 |
| 11999 | 2P | BG21NUC-HC53 |
| 12000 | RBD | BG21NUC-HC54 |
| 12001 | 2F | BG21NUC-HC55 |
| 12002 | RBD | BG21NUC-HC56 |
| 12003 | 2P | BG21NUC-HC57 |
| 12004 | RBD | BG21NUC-HC58 |
| 12005 | RBD | BG21NUC-HC59 |
| 12006 | RBD | BG21NUC-HC60 |
| 12007 | RBD | BG21NUC-HC61 |
| 12008 | RBD | BG21NUC-HC62 |
| 12009 | RBD | BG21NUC-HC63 |
| 12010 | 2P | BG21NUC-HC64 |
| 12011 | 2P | BG21NUC-HC65 |
| 12012 | RBD | BG21NUC-HC66 |
| 12013 | RBD | BG21NUC-HC67 |
| 12014 | RBD | BG21NUC-HC68 |
| 12015 | 2P | BG21NUC-HC69 |
| 12016 | RBD | BG21NUC-HC70 |
| 12017 | RBD | BG21NUC-HC71 |
| 12018 | 2P | BG21NUC-HC72 |
| 12019 | RBD | BG21NUC-HC73 |
| 12020 | 2P | BG21NUC-HC74 |
| 12021 | 2P | BG21NUC-HC75 |
| 12022 | 2P | BG21NUC-HC76 |
| 12023 | 2P | BG21NUC-HC77 |
| 12024 | 2P | BG21NUC-HC78 |
| 12025 | 2P | BG21NUC-HC79 |
| 12026 | 2P | BG21NUC-HC80 |
| 12027 | RBD | BG21NUC-HC81 |
| 12028 | 2P | BG21NUC-HC82 |
| 12029 | 2P | BG21NUC-HC83 |
| 12030 | 2P | BG21NUC-HC84 |
| 12031 | 2P | BG21NUC-HC85 |
| 12032 | 2P | BG21NUC-HC86 |
| 12033 | 2P | BG21NUC-HC87 |
| 12034 | 2P | BG21NUC-HC88 |
| 12035 | RBD | BG21NUC-HC89 |
| 12036 | 2P | BG21NUC-HC90 |
| 12037 | 2P | BG21NUC-HC91 |
| 12038 | 2P | BG21NUC-HC92 |
| 12039 | 2P | BG21NUC-HC93 |
| 12040 | 2P | BG21NUC-HC94 |
| 12041 | RBD | BG21NUC-HC95 |
| 12042 | 2P | BG21NUC-HC96 |
| 12043 | 2P | BG21NUC-HC97 |
| 12044 | 2P | BG21NUC-HC98 |
| 12045 | 2P | BG21NUC-HC99 |
| 12046 | 2P | BG21NUC-HC100 |
| 12047 | 2P | BG21NUC-HC101 |
| 12048 | 2P | BG21NUC-HC102 |
| 12049 | RBD | BG21NUC-HC103 |
| 12050 | RBD | BG21NUC-HC104 |
| 12051 | RBD | BG21NUC-HC105 |
| 12052 | RBD | BG21NUC-HC106 |
| 12053 | 2P | BG21NUC-HC107 |
| 12054 | 2P | BG21NUC-HC108 |
| 12055 | 2P | BG21NUC-HC109 |
| 12056 | 2P | BG21NUC-HC110 |
| 12057 | 2P | BG21NUC-HC111 |
| 12058 | 2P | BG21NUC-HC112 |
| 12059 | 2P | BG21NUC-HC113 |
| 12060 | 2P | BG21NUC-HC114 |
| 12061 | 2P | BG21NUC-HC115 |
| 12062 | 2P | BG21NUC-HC116 |
| 12063 | 2P | BG21NUC-HC117 |
| 12064 | 2P | BG21NUC-HC118 |
| 12065 | 2P | BG21NUC-HC119 |
| 12066 | RBD | BG21NUC-HC120 |
| 12067 | 2P | BG21NUC-HC121 |
| 12068 | 2P | BG21NUC-HC122 |
| 12069 | 2P | BG21NUC-HC123 |
| 12070 | 2P | BG21NUC-HC124 |
| 12071 | RBD | BG21NUC-HC125 |
| 12072 | 2P | BG21NUC-HC126 |
| 12073 | 2P | BG21NUC-HC127 |
| 12074 | 2P | BG21NUC-HC128 |
| 12075 | 2P | BG21NUC-HC129 |
| 12076 | RBD | BG21NUC-HC130 |
| 12077 | RBD | BG21NUC-HC131 |
| 12078 | RBD | BG21NUC-HC132 |
| 12079 | 2P | BG21NUC-HC133 |
| 12080 | 2P | BG21NUC-HC134 |
| 12081 | RBD | BG21NUC-HC135 |
| 12082 | 2P | BG21NUC-HC136 |
| 12083 | 2P | BG21NUC-HC137 |
| 12084 | RBD | BG21NUC-HC138 |
| 12085 | 2P | BG21NUC-HC139 |
| 12086 | 2P | BG21NUC-HC140 |
| 12087 | 2P | BG21NUC-HC141 |
| 12088 | RBD | BG21NUC-HC142 |
| 12089 | 2P | BG21NUC-HC143 |
| 12090 | 2P | BG21NUC-HC144 |
| 12091 | 2P | BG21NUC-HC145 |
| 12092 | 2F | BG21NUC-HC146 |
| 12093 | 2P | BG21NUC-HC147 |
| 12094 | RBD | BG21NUC-HC148 |
| 12095 | RBD | BG21NUC-HC149 |
| 12096 | RBD | BG21NUC-HC150 |
| 12097 | 2P | BG21NUC-HC151 |
| 12098 | 2P | BG21NUC-HC152 |
| 12099 | 2P | BG21NUC-HC153 |
| 12100 | 2P | BG21NUC-HC154 |
| 12101 | 2P | BG21NUC-HC155 |
| 12102 | RBD | BG21NUC-HC156 |
| 12103 | RBD | BG21NUC-HC157 |
| 12104 | RBD | BG21NUC-HC158 |
| 12105 | RBD | BG21NUC-HC159 |
| 12106 | RBD | BG21NUC-HC160 |
| 12107 | 2P | BG21NUC-HC161 |
| 12108 | 2P | BG21NUC-HC162 |
| 12109 | RBD | BG21NUC-HC163 |
| 12110 | 2P | BG21NUC-HC164 |
| 12111 | 2P | BG21NUC-HC165 |
| 12112 | RBD | BG21NUC-HC166 |
| 12113 | 2P | BG21NUC-HC167 |
| 12114 | 2P | BG21NUC-HC168 |
| 12115 | 2P | BG21NUC-HC169 |
| 12116 | 2P | BG21NUC-HC170 |
| 12117 | 2P | BG21NUC-HC171 |
| 12118 | 2P | BG21NUC-HC172 |
| 12119 | 2P | BG21NUC-HC173 |
| 12120 | 2P | BG21NUC-HC174 |
| 12121 | 2P | BG21NUC-HC175 |
| 12122 | 2P | BG21NUC-HC176 |
| 12123 | 2P | BG21NUC-HC177 |
| 12124 | 2P | BG21NUC-HC178 |
| 12125 | 2P | BG21NUC-HC179 |
| 12126 | 2P | BG21NUC-HC180 |
| 12127 | 2P | BG21NUC-HC181 |
| 12128 | 2P | BG21NUC-HC182 |
| 12129 | 2P | BG21NUC-HC183 |
| 12130 | RBD | BG21NUC-HC184 |
| 12131 | 2P | BG21NUC-HC185 |
| 12132 | 2P | BG21NUC-HC186 |
| 12133 | RBD | BG21NUC-HC187 |
| 12134 | RBD | BG21NUC-HC188 |
| 12135 | RBD | BG21NUC-HC189 |
| 12136 | 2P | BG21NUC-HC190 |
| 12137 | 2P | BG21NUC-HC191 |
| 12138 | RBD | BG21NUC-HC192 |
| 12139 | RBD | BG21NUC-HC193 |
| 12140 | 2P | BG21NUC-HC194 |
| 12141 | 2P | BG21NUC-HC195 |
| 12142 | 2P | BG21NUC-HC196 |
| 12143 | 2P | BG21NUC-HC197 |
| 12144 | 2P | BG21NUC-HC198 |
| 12145 | 2P | BG21NUC-HC199 |
| 12146 | RBD | BG21NUC-HC200 |
| 12147 | RBD | BG21NUC-HC201 |
| 12148 | 2P | BG21NUC-HC202 |
| 12149 | RBD | BG21NUC-HC203 |
| 12150 | 2P | BG21NUC-HC204 |
| 12151 | 2P | BG21NUC-HC205 |
| 12152 | 2P | BG21NUC-HC206 |
| 12153 | 2P | BG21NUC-HC207 |
| 12154 | 2P | BG21NUC-HC208 |
| 12155 | 2P | BG21NUC-HC209 |
| 12156 | 2P | BG21NUC-HC210 |
| 12157 | RBD | BG21NUC-HC211 |
| 12158 | 2P | BG21NUC-HC212 |
| 12159 | 2P | BG21NUC-HC213 |
| 12160 | 2P | BG21NUC-HC214 |
| 12161 | 2P | BG21NUC-HC215 |
| 12162 | 2P | BG21NUC-HC216 |
| 12163 | 2P | BG21NUC-HC217 |
| 12164 | 2P | BG21NUC-HC218 |
| 12165 | RBD | BG21NUC-HC219 |
| 12166 | 2P | BG21NUC-HC220 |
| 12167 | RBD | BG21NUC-HC221 |
| 12168 | 2P | BG21NUC-HC222 |
| 12169 | RBD | BG21NUC-HC223 |
| 12170 | 2P | BG21NUC-HC224 |
| 12171 | 2P | BG21NUC-HC225 |
| 12172 | 2P | BG21NUC-HC226 |
| 12173 | 2P | BG21NUC-HC227 |
| 12174 | 2P | BG21NUC-HC228 |
| 12175 | 2P | BG21NUC-HC229 |
| 12176 | 2P | BG21NUC-HC230 |
| 12177 | 2P | BG21NUC-HC231 |
| 12178 | 2P | BG21NUC-HC232 |
| 12179 | 2P | BG21NUC-HC233 |
| 12180 | 2P | BG21NUC-HC234 |
| 12181 | 2P | BG21NUC-HC235 |
| 12182 | 2P | BG21NUC-HC236 |
| 12183 | 2P | BG21NUC-HC237 |
| 12184 | 2P | BG21NUC-HC238 |
| 12185 | 2P | BG21NUC-HC239 |
| 12186 | RBD | BG21NUC-HC240 |
| 12187 | 2P | BG21NUC-HC241 |
| 12188 | 2P | BG21NUC-HC242 |
| 12189 | RBD | BG21NUC-HC243 |
| 12190 | RBD | BG21NUC-HC244 |
| 12191 | 2P | BG21NUC-HC245 |
| 12192 | RBD | BG21NUC-HC246 |
| 12193 | RBD | BG21NUC-HC247 |
| 12194 | RBD | BG21NUC-HC248 |
| 12195 | 2P | BG21NUC-HC249 |
| 12196 | 2P | BG21NUC-HC250 |
| 12197 | RBD | BG21NUC-HC251 |
| 12198 | 2P | BG21NUC-HC252 |
| 12199 | 2P | BG21NUC-HC253 |
| 12200 | 2P | BG21NUC-HC254 |
| 12201 | 2P | BG21NUC-HC255 |
| 12202 | 2P | BG21NUC-HC256 |
| 12203 | RBD | BG21NUC-HC257 |
| 12204 | 2P | BG21NUC-HC258 |
| 12205 | 2P | BG21NUC-HC259 |
| 12206 | 2P | BG21NUC-HC260 |
| 12207 | 2P | BG21NUC-HC261 |
| 12208 | 2P | BG21NUC-HC262 |
| 12209 | RBD | BG21NUC-HC263 |
| 12210 | 2P | BG21NUC-HC264 |
| 12211 | 2P | BG21NUC-HC265 |
| 12212 | RBD | BG21NUC-HC266 |
| 12213 | 2P | BG21NUC-HC267 |
| 12214 | 2P | BG21NUC-HC268 |
| 12215 | 2P | BG21NUC-HC269 |
| 12216 | 2P | BG21NUC-HC270 |
| 12217 | 2P | BG21NUC-HC271 |
| 12218 | 2P | BG21NUC-HC272 |
| 12219 | 2P | BG21NUC-HC273 |
| 12220 | 2P | BG21NUC-HC274 |
| 12221 | 2P | BG21NUC-HC275 |
| 12222 | 2P | BG21NUC-HC276 |
| 12223 | 2P | BG21NUC-HC277 |
| 12224 | 2P | BG21NUC-HC278 |
| 12225 | 2P | BG21NUC-HC279 |
| 12226 | RBD | BG21NUC-HC280 |
| 12227 | 2P | BG21NUC-HC281 |
| 12228 | RBD | BG21NUC-HC282 |
| 12229 | 2P | BG21NUC-HC283 |
| 12230 | 2P | BG21NUC-HC284 |
| 12231 | RBD | BG21NUC-HC285 |
| 12232 | 2P | BG21NUC-HC286 |
| 12233 | RBD | BG21NUC-HC287 |
| 12234 | RBD | BG21NUC-HC288 |
| 12235 | 2P | BG21NUC-HC289 |
| 12236 | 2P | BG21NUC-HC290 |
| 12237 | 2P | BG21NUC-HC291 |
| 12238 | RBD | BG21NUC-HC292 |
| 12239 | 2P | BG21NUC-HC293 |
| 12240 | 2P | BG21NUC-HC294 |
| 12241 | RBD | BG21NUC-HC295 |
| 12242 | 2P | BG21NUC-HC296 |
| 12243 | 2P | BG21NUC-HC297 |
| 12244 | 2P | BG21NUC-HC298 |
| 12245 | 2P | BG21NUC-HC299 |
| 12246 | 2P | BG21NUC-HC300 |
| 12247 | 2P | BG21NUC-HC301 |
| 12248 | 2P | BG21NUC-HC302 |
| 12249 | 2P | BG21NUC-HC303 |
| 12250 | 2P | BG21NUC-HC304 |
| 12251 | RBD | BG21NUC-HC305 |
| 12252 | 2P | BG21NUC-HC306 |
| 12253 | 2P | BG21NUC-HC307 |
| 12254 | RBD | BG21NUC-HC308 |
| 12255 | RBD | BG21NUC-HC309 |
| 12256 | RBD | BG21NUC-HC310 |
| 12257 | 2P | BG21NUC-HC311 |
| 12258 | 2P | BG21NUC-HC312 |
| 12259 | 2P | BG21NUC-HC313 |
| 12260 | 2P | BG21NUC-HC314 |
| 12261 | RBD | BG21NUC-HC315 |
| 12262 | 2P | BG21NUC-HC316 |
| 12263 | RBD | BG21NUC-HC317 |
| 12264 | 2P | BG21NUC-HC318 |
| 12265 | 2P | BG21NUC-HC319 |
| 12266 | 2P | BG21NUC-HC320 |
| 12267 | RBD | BG21NUC-HC321 |
| 12268 | 2F | BG21NUC-HC322 |
| 12269 | 2P | BG21NUC-HC323 |
| 12270 | 2P | BG21NUC-HC324 |
| 12271 | 2P | BG21NUC-HC325 |
| 12272 | RBD | BG21NUC-HC326 |
| 12273 | 2P | BG21NUC-HC327 |
| 12274 | RBD | BG21NUC-HC328 |
| 12275 | 2P | BG21NUC-HC329 |
| 12276 | 2P | BG21NUC-HC330 |
| 12277 | 2P | BG21NUC-HC331 |
| 12278 | 2P | BG21NUC-HC332 |
| 12279 | 2P | BG21NUC-HC333 |
| 12280 | 2P | BG21NUC-HC334 |
| 12281 | RBD | BG21NUC-HC335 |
| 12282 | 2P | BG21NUC-HC336 |
| 12283 | RBD | BG21NUC-HC337 |
| 12284 | RBD | BG21NUC-HC338 |
| 12285 | RBD | BG21NUC-HC339 |
| 12286 | 2P | BG21NUC-HC340 |
| 12287 | 2P | BG21NUC-HC341 |
| 12288 | 2P | BG21NUC-HC342 |
| 12289 | 2P | BG21NUC-HC343 |
| 12290 | 2P | BG21NUC-HC344 |
| 12291 | RBD | BG21NUC-HC345 |
| 12292 | 2P | BG21NUC-HC346 |
| 12293 | 2P | BG21NUC-HC347 |
| 12294 | 2P | BG21NUC-HC348 |
| 12295 | 2P | BG21NUC-HC349 |
| 12296 | 2P | BG21NUC-HC350 |
| 12297 | 2P | BG21NUC-HC351 |
| 12298 | 2P | BG21NUC-HC352 |
| 12299 | RBD | BG21NUC-HC353 |
| 12300 | 2P | BG21NUC-HC354 |
| 12301 | 2P | BG21NUC-HC355 |
| 12302 | 2P | BG21NUC-HC356 |
| 12303 | 2P | BG21NUC-HC357 |
| 12304 | 2P | BG21NUC-HC358 |
| 12305 | 2P | BG21NUC-HC359 |
| 12306 | 2P | BG21NUC-HC360 |
| 12307 | RBD | BG21NUC-HC361 |
| 12308 | 2F | BG21NUC-HC362 |
| 12309 | 2P | BG21NUC-HC363 |
| 12310 | 2P | BG21NUC-LC1 |
| 12311 | 2P | BG21NUC-LC2 |
| 12312 | RBD | BG21NUC-LC3 |
| 12313 | 2P | BG21NUC-LC4 |
| 12314 | 2P | BG21NUC-LC5 |
| 12315 | 2P | BG21NUC-LC6 |
| 12316 | 2P | BG21NUC-LC7 |
| 12317 | 2P | BG21NUC-LC8 |
| 12318 | 2P | BG21NUC-LC9 |
| 12319 | 2P | BG21NUC-LC10 |
| 12320 | 2F | BG21NUC-LC11 |
| 12321 | RBD | BG21NUC-LC12 |
| 12322 | 2P | BG21NUC-LC13 |
| 12323 | 2P | BG21NUC-LC14 |
| 12324 | 2P | BG21NUC-LC15 |
| 12325 | 2P | BG21NUC-LC16 |
| 12326 | 2P | BG21NUC-LC17 |
| 12327 | 2P | BG21NUC-LC18 |
| 12328 | 2P | BG21NUC-LC19 |
| 12329 | 2P | BG21NUC-LC20 |
| 12330 | 2P | BG21NUC-LC21 |
| 12331 | RBD | BG21NUC-LC22 |
| 12332 | 2P | BG21NUC-LC23 |
| 12333 | 2F | BG21NUC-LC24 |
| 12334 | 2P | BG21NUC-LC25 |
| 12335 | 2P | BG21NUC-LC26 |
| 12336 | RBD | BG21NUC-LC27 |
| 12337 | 2P | BG21NUC-LC28 |
| 12338 | 2P | BG21NUC-LC29 |
| 12339 | 2P | BG21NUC-LC30 |
| 12340 | 2P | BG21NUC-LC31 |
| 12341 | 2P | BG21NUC-LC32 |
| 12342 | RBD | BG21NUC-LC33 |
| 12343 | 2P | BG21NUC-LC34 |
| 12344 | 2P | BG21NUC-LC35 |
| 12345 | RBD | BG21NUC-LC36 |
| 12346 | 2P | BG21NUC-LC37 |
| 12347 | 2P | BG21NUC-LC38 |
| 12348 | 2P | BG21NUC-LC39 |
| 12349 | 2P | BG21NUC-LC40 |
| 12350 | 2P | BG21NUC-LC41 |
| 12351 | RBD | BG21NUC-LC42 |
| 12352 | 2P | BG21NUC-LC43 |
| 12353 | 2P | BG21NUC-LC44 |
| 12354 | RBD | BG21NUC-LC45 |
| 12355 | 2P | BG21NUC-LC46 |
| 12356 | 2P | BG21NUC-LC47 |
| 12357 | 2P | BG21NUC-LC48 |
| 12358 | 2P | BG21NUC-LC49 |
| 12359 | 2P | BG21NUC-LC50 |
| 12360 | RBD | BG21NUC-LC51 |
| 12361 | RBD | BG21NUC-LC52 |
| 12362 | 2P | BG21NUC-LC53 |
| 12363 | RBD | BG21NUC-LC54 |
| 12364 | 2P | BG21NUC-LC55 |
| 12365 | RBD | BG21NUC-LC56 |
| 12366 | 2P | BG21NUC-LC57 |
| 12367 | RBD | BG21NUC-LC58 |
| 12368 | RBD | BG21NUC-LC59 |
| 12369 | RBD | BG21NUC-LC60 |
| 12370 | RBD | BG21NUC-LC61 |
| 12371 | RBD | BG21NUC-LC62 |
| 12372 | RBD | BG21NUC-LC63 |
| 12373 | 2P | BG21NUC-LC64 |
| 12374 | 2P | BG21NUC-LC65 |
| 12375 | RBD | BG21NUC-LC66 |
| 12376 | RBD | BG21NUC-LC67 |
| 12377 | RBD | BG21NUC-LC68 |
| 12378 | 2P | BG21NUC-LC69 |
| 12379 | RBD | BG21NUC-LC70 |
| 12380 | RBD | BG21NUC-LC71 |
| 12381 | 2P | BG21NUC-LC72 |
| 12382 | RBD | BG21NUC-LC73 |
| 12383 | 2P | BG21NUC-LC74 |
| 12384 | 2P | BG21NUC-LC75 |
| 12385 | 2P | BG21NUC-LC76 |
| 12386 | 2P | BG21NUC-LC77 |
| 12387 | 2P | BG21NUC-LC78 |
| 12388 | 2P | BG21NUC-LC79 |
| 12389 | 2P | BG21NUC-LC80 |
| 12390 | RBD | BG21NUC-LC81 |
| 12391 | 2P | BG21NUC-LC82 |
| 12392 | 2P | BG21NUC-LC83 |
| 12393 | 2P | BG21NUC-LC84 |
| 12394 | 2P | BG21NUC-LC85 |
| 12395 | 2P | BG21NUC-LC86 |
| 12396 | 2P | BG21NUC-LC87 |
| 12397 | 2P | BG21NUC-LC88 |
| 12398 | RBD | BG21NUC-LC89 |
| 12399 | 2P | BG21NUC-LC90 |
| 12400 | 2P | BG21NUC-LC91 |
| 12401 | 2P | BG21NUC-LC92 |
| 12402 | 2P | BG21NUC-LC93 |
| 12403 | 2P | BG21NUC-LC94 |
| 12404 | RBD | BG21NUC-LC95 |
| 12405 | 2P | BG21NUC-LC96 |
| 12406 | 2P | BG21NUC-LC97 |
| 12407 | 2P | BG21NUC-LC98 |
| 12408 | 2P | BG21NUC-LC99 |
| 12409 | 2P | BG21NUC-LC100 |
| 12410 | 2P | BG21NUC-LC101 |
| 12411 | 2P | BG21NUC-LC102 |
| 12412 | RBD | BG21NUC-LC103 |
| 12413 | RBD | BG21NUC-LC104 |
| 12414 | RBD | BG21NUC-LC105 |
| 12415 | RBD | BG21NUC-LC106 |
| 12416 | 2P | BG21NUC-LC107 |
| 12417 | 2P | BG21NUC-LC108 |
| 12418 | 2P | BG21NUC-LC109 |
| 12419 | 2P | BG21NUC-LC110 |
| 12420 | 2P | BG21NUC-LC111 |
| 12421 | 2P | BG21NUC-LC112 |
| 12422 | 2P | BG21NUC-LC113 |
| 12423 | 2P | BG21NUC-LC114 |
| 12424 | 2P | BG21NUC-LC115 |
| 12425 | 2P | BG21NUC-LC116 |
| 12426 | 2P | BG21NUC-LC117 |
| 12427 | 2P | BG21NUC-LC118 |
| 12428 | 2P | BG21NUC-LC119 |
| 12429 | RBD | BG21NUC-LC120 |
| 12430 | 2P | BG21NUC-LC121 |
| 12431 | 2P | BG21NUC-LC122 |
| 12432 | 2P | BG21NUC-LC123 |
| 12433 | 2P | BG21NUC-LC124 |
| 12434 | RBD | BG21NUC-LC125 |
| 12435 | 2P | BG21NUC-LC126 |
| 12436 | 2P | BG21NUC-LC127 |
| 12437 | 2P | BG21NUC-LC128 |
| 12438 | 2P | BG21NUC-LC129 |
| 12439 | RBD | BG21NUC-LC130 |
| 12440 | RBD | BG21NUC-LC131 |
| 12441 | RBD | BG21NUC-LC132 |
| 12442 | 2P | BG21NUC-LC133 |
| 12443 | 2P | BG21NUC-LC134 |
| 12444 | RBD | BG21NUC-LC135 |
| 12445 | 2P | BG21NUC-LC136 |
| 12446 | 2P | BG21NUC-LC137 |
| 12447 | RBD | BG21NUC-LC138 |
| 12448 | 2P | BG21NUC-LC139 |
| 12449 | 2P | BG21NUC-LC140 |
| 12450 | 2P | BG21NUC-LC141 |
| 12451 | RBD | BG21NUC-LC142 |
| 12452 | 2P | BG21NUC-LC143 |
| 12453 | 2P | BG21NUC-LC144 |
| 12454 | 2P | BG21NUC-LC145 |
| 12455 | 2P | BG21NUC-LC146 |
| 12456 | 2F | BG21NUC-LC147 |
| 12457 | RBD | BG21NUC-LC148 |
| 12458 | RBD | BG21NUC-LC149 |
| 12459 | RBD | BG21NUC-LC150 |
| 12460 | 2P | BG21NUC-LC151 |
| 12461 | 2P | BG21NUC-LC152 |
| 12462 | 2P | BG21NUC-LC153 |
| 12463 | 2P | BG21NUC-LC154 |
| 12464 | 2P | BG21NUC-LC155 |
| 12465 | RBD | BG21NUC-LC156 |
| 12466 | RBD | BG21NUC-LC157 |
| 12467 | RBD | BG21NUC-LC158 |
| 12468 | RBD | BG21NUC-LC159 |
| 12469 | RBD | BG21NUC-LC160 |
| 12470 | 2P | BG21NUC-LC161 |
| 12471 | 2P | BG21NUC-LC162 |
| 12472 | RBD | BG21NUC-LC163 |
| 12473 | 2P | BG21NUC-LC164 |
| 12474 | 2P | BG21NUC-LC165 |
| 12475 | RBD | BG21NUC-LC166 |
| 12476 | 2P | BG21NUC-LC167 |
| 12477 | 2P | BG21NUC-LC168 |
| 12478 | 2P | BG21NUC-LC169 |
| 12479 | 2P | BG21NUC-LC170 |
| 12480 | 2P | BG21NUC-LC171 |
| 12481 | 2P | BG21NUC-LC172 |
| 12482 | 2P | BG21NUC-LC173 |
| 12483 | 2P | BG21NUC-LC174 |
| 12484 | 2F | BG21NUC-LC175 |
| 12485 | 2F | BG21NUC-LC176 |
| 12486 | 2P | BG21NUC-LC177 |
| 12487 | 2P | BG21NUC-LC178 |
| 12488 | 2F | BG21NUC-LC179 |
| 12489 | 2F | BG21NUC-LC180 |
| 12490 | 2F | BG21NUC-LC181 |
| 12491 | 2P | BG21NUC-LC182 |
| 12492 | 2P | BG21NUC-LC183 |
| 12493 | RBD | BG21NUC-LC184 |
| 12494 | 2P | BG21NUC-LC185 |
| 12495 | 2P | BG21NUC-LC186 |
| 12496 | RBD | BG21NUC-LC187 |
| 12497 | RBD | BG21NUC-LC188 |
| 12498 | RBD | BG21NUC-LC189 |
| 12499 | 2P | BG21NUC-LC190 |
| 12500 | 2P | BG21NUC-LC191 |
| 12501 | RBD | BG21NUC-LC192 |
| 12502 | RBD | BG21NUC-LC193 |
| 12503 | 2P | BG21NUC-LC194 |
| 12504 | 2P | BG21NUC-LC195 |
| 12505 | 2P | BG21NUC-LC196 |
| 12506 | 2F | BG21NUC-LC197 |
| 12507 | 2P | BG21NUC-LC198 |
| 12508 | 2P | BG21NUC-LC199 |
| 12509 | RBD | BG21NUC-LC200 |
| 12510 | RBD | BG21NUC-LC201 |
| 12511 | 2P | BG21NUC-LC202 |
| 12512 | RBD | BG21NUC-LC203 |
| 12513 | 2P | BG21NUC-LC204 |
| 12514 | 2F | BG21NUC-LC205 |
| 12515 | 2P | BG21NUC-LC206 |
| 12516 | 2P | BG21NUC-LC207 |
| 12517 | 2P | BG21NUC-LC208 |
| 12518 | 2F | BG21NUC-LC209 |
| 12519 | 2P | BG21NUC-LC210 |
| 12520 | RBD | BG21NUC-LC211 |
| 12521 | 2P | BG21NUC-LC212 |
| 12522 | 2F | BG21NUC-LC213 |
| 12523 | 2P | BG21NUC-LC214 |
| 12524 | 2P | BG21NUC-LC215 |
| 12525 | 2P | BG21NUC-LC216 |
| 12526 | 2P | BG21NUC-LC217 |
| 12527 | 2P | BG21NUC-LC218 |
| 12528 | RBD | BG21NUC-LC219 |
| 12529 | 2P | BG21NUC-LC220 |
| 12530 | RBD | BG21NUC-LC221 |
| 12531 | 2P | BG21NUC-LC222 |
| 12532 | RBD | BG21NUC-LC223 |
| 12533 | 2P | BG21NUC-LC224 |
| 12534 | 2F | BG21NUC-LC225 |
| 12535 | 2P | BG21NUC-LC226 |
| 12536 | 2F | BG21NUC-LC227 |
| 12537 | 2F | BG21NUC-LC228 |
| 12538 | 2F | BG21NUC-LC229 |
| 12539 | 2F | BG21NUC-LC230 |
| 12540 | 2P | BG21NUC-LC231 |
| 12541 | 2P | BG21NUC-LC232 |
| 12542 | 2P | BG21NUC-LC233 |
| 12543 | 2P | BG21NUC-LC234 |
| 12544 | 2P | BG21NUC-LC235 |
| 12545 | 2P | BG21NUC-LC236 |
| 12546 | 2P | BG21NUC-LC237 |
| 12547 | 2P | BG21NUC-LC238 |
| 12548 | 2P | BG21NUC-LC239 |
| 12549 | RBD | BG21NUC-LC240 |
| 12550 | 2P | BG21NUC-LC241 |
| 12551 | 2P | BG21NUC-LC242 |
| 12552 | RBD | BG21NUC-LC243 |
| 12553 | RBD | BG21NUC-LC244 |
| 12554 | 2P | BG21NUC-LC245 |
| 12555 | RBD | BG21NUC-LC246 |
| 12556 | RBD | BG21NUC-LC247 |
| 12557 | RBD | BG21NUC-LC248 |
| 12558 | 2P | BG21NUC-LC249 |
| 12559 | 2P | BG21NUC-LC250 |
| 12560 | RBD | BG21NUC-LC251 |
| 12561 | 2P | BG21NUC-LC252 |
| 12562 | 2P | BG21NUC-LC253 |
| 12563 | 2P | BG21NUC-LC254 |
| 12564 | 2P | BG21NUC-LC255 |
| 12565 | 2P | BG21NUC-LC256 |
| 12566 | RBD | BG21NUC-LC257 |
| 12567 | 2P | BG21NUC-LC258 |
| 12568 | 2P | BG21NUC-LC259 |
| 12569 | 2P | BG21NUC-LC260 |
| 12570 | 2P | BG21NUC-LC261 |
| 12571 | 2P | BG21NUC-LC262 |
| 12572 | RBD | BG21NUC-LC263 |
| 12573 | 2P | BG21NUC-LC264 |
| 12574 | 2P | BG21NUC-LC265 |
| 12575 | RBD | BG21NUC-LC266 |
| 12576 | 2P | BG21NUC-LC267 |
| 12577 | 2P | BG21NUC-LC268 |
| 12578 | 2P | BG21NUC-LC269 |
| 12579 | 2P | BG21NUC-LC270 |
| 12580 | 2P | BG21NUC-LC271 |
| 12581 | 2P | BG21NUC-LC272 |
| 12582 | 2P | BG21NUC-LC273 |
| 12583 | 2P | BG21NUC-LC274 |
| 12584 | 2P | BG21NUC-LC275 |
| 12585 | 2P | BG21NUC-LC276 |
| 12586 | 2P | BG21NUC-LC277 |
| 12587 | 2P | BG21NUC-LC278 |
| 12588 | 2P | BG21NUC-LC279 |
| 12589 | RBD | BG21NUC-LC280 |
| 12590 | 2P | BG21NUC-LC281 |
| 12591 | RBD | BG21NUC-LC282 |
| 12592 | 2P | BG21NUC-LC283 |
| 12593 | 2P | BG21NUC-LC284 |
| 12594 | RBD | BG21NUC-LC285 |
| 12595 | 2F | BG21NUC-LC286 |
| 12596 | RBD | BG21NUC-LC287 |
| 12597 | RBD | BG21NUC-LC288 |
| 12598 | 2P | BG21NUC-LC289 |
| 12599 | 2P | BG21NUC-LC290 |
| 12600 | 2P | BG21NUC-LC291 |
| 12601 | RBD | BG21NUC-LC292 |
| 12602 | 2P | BG21NUC-LC293 |
| 12603 | 2P | BG21NUC-LC294 |
| 12604 | RBD | BG21NUC-LC295 |
| 12605 | 2P | BG21NUC-LC296 |
| 12606 | 2P | BG21NUC-LC297 |
| 12607 | 2P | BG21NUC-LC298 |
| 12608 | 2P | BG21NUC-LC299 |
| 12609 | 2P | BG21NUC-LC300 |
| 12610 | 2P | BG21NUC-LC301 |
| 12611 | 2P | BG21NUC-LC302 |
| 12612 | 2P | BG21NUC-LC303 |
| 12613 | 2P | BG21NUC-LC304 |
| 12614 | RBD | BG21NUC-LC305 |
| 12615 | 2P | BG21NUC-LC306 |
| 12616 | 2P | BG21NUC-LC307 |
| 12617 | RBD | BG21NUC-LC308 |
| 12618 | RBD | BG21NUC-LC309 |
| 12619 | RBD | BG21NUC-LC310 |
| 12620 | 2P | BG21NUC-LC311 |
| 12621 | 2P | BG21NUC-LC312 |
| 12622 | 2P | BG21NUC-LC313 |
| 12623 | 2P | BG21NUC-LC314 |
| 12624 | RBD | BG21NUC-LC315 |
| 12625 | 2P | BG21NUC-LC316 |
| 12626 | RBD | BG21NUC-LC317 |
| 12627 | 2P | BG21NUC-LC318 |
| 12628 | 2P | BG21NUC-LC319 |
| 12629 | 2P | BG21NUC-LC320 |
| 12630 | RBD | BG21NUC-LC321 |
| 12631 | 2P | BG21NUC-LC322 |
| 12632 | 2F | BG21NUC-LC323 |
| 12633 | 2P | BG21NUC-LC324 |
| 12634 | 2F | BG21NUC-LC325 |
| 12635 | RBD | BG21NUC-LC326 |
| 12636 | 2F | BG21NUC-LC327 |
| 12637 | RBD | BG21NUC-LC328 |
| 12638 | 2F | BG21NUC-LC329 |
| 12639 | 2P | BG21NUC-LC330 |
| 12640 | 2F | BG21NUC-LC331 |
| 12641 | 2P | BG21NUC-LC332 |
| 12642 | 2F | BG21NUC-LC333 |
| 12643 | 2F | BG21NUC-LC334 |
| 12644 | RBD | BG21NUC-LC335 |
| 12645 | 2P | BG21NUC-LC336 |
| 12646 | RBD | BG21NUC-LC337 |
| 12647 | RBD | BG21NUC-LC338 |
| 12648 | RBD | BG21NUC-LC339 |
| 12649 | 2F | BG21NUC-LC340 |
| 12650 | 2P | BG21NUC-LC341 |
| 12651 | 2F | BG21NUC-LC342 |
| 12652 | 2P | BG21NUC-LC343 |
| 12653 | 2F | BG21NUC-LC344 |
| 12654 | RBD | BG21NUC-LC345 |
| 12655 | 2P | BG21NUC-LC346 |
| 12656 | 2P | BG21NUC-LC347 |
| 12657 | 2F | BG21NUC-LC348 |
| 12658 | 2P | BG21NUC-LC349 |
| 12659 | 2F | BG21NUC-LC350 |
| 12660 | 2P | BG21NUC-LC351 |
| 12661 | 2F | BG21NUC-LC352 |
| 12662 | RBD | BG21NUC-LC353 |
| 12663 | 2F | BG21NUC-LC354 |
| 12664 | 2F | BG21NUC-LC355 |
| 12665 | 2F | BG21NUC-LC356 |
| 12666 | 2P | BG21NUC-LC357 |
| 12667 | 2P | BG21NUC-LC358 |
| 12668 | 2P | BG21NUC-LC359 |
| 12669 | 2P | BG21NUC-LC360 |
| 12670 | RBD | BG21NUC-LC361 |
| 12671 | 2F | BG21NUC-LC362 |
| 12672 | 2P | BG21NUC-LC363 |

TABLE 8B

| SEQ | BAIT | | Produced | SEQ | BAIT | | Produced |
|---|---|---|---|---|---|---|---|
| ID NO | USED | SEQUENCE NAME | Antibody Name | ID NO | USED | SEQUENCE NAME | Antibody Name |
| 447 | RBD | BG1NUC-HC1 | BG1-1 | 2271 | 2P | BG4NUC-LC40 | BG4-12 |
| 456 | RBD | BG1NUC-HC10 | BG1-3 | 2273 | RBD | BG4NUC-LC42 | BG4-13 |
| 459 | RBD | BG1NUC-HC13 | BG1-4 | 2275 | 2P | BG4NUC-LC44 | BG4-14 |
| 462 | RBD | BG1NUC-HC16 | BG1-5 | 2277 | 2P | BG4NUC-LC46 | BG4-15 |
| 466 | RBD | BG1NUC-HC20 | BG1-6 | 2279 | RBD | BG4NUC-LC48 | BG4-16 |
| 467 | 2P | BG1NUC-HC21 | BG1-7 | 2281 | 2P | BG4NUC-LC50 | BG4-17 |
| 469 | 2P | BG1NUC-HC23 | BG1-8 | 2283 | 2P | BG4NUC-LC52 | BG4-18 |
| 471 | RBD | BG1NUC-HC25 | BG1-9 | 2285 | RBD | BG4NUC-LC54 | BG4-19 |
| 473 | RBD | BG1NUC-HC27 | BG1-10 | 2288 | 2P | BG4NUC-LC57 | BG4-20 |
| 475 | RBD | BG1NUC-HC29 | BG1-11 | 2289 | RBD | BG4NUC-LC58 | BG4-21 |
| 477 | RBD | BG1NUC-HC31 | BG1-12 | 2364 | 2P | BG4NUC-LC133 | BG4-22 |
| 479 | 2P | BG1NUC-HC33 | BG1-13 | 2389 | RBD | BG4NUC-LC158 | BG4-23 |
| 481 | RBD | BG1NUC-HC35 | BG1-14 | 2448 | RBD | BG4NUC-LC217 | BG4-24 |
| 483 | RBD | BG1NUC-HC37 | BG1-15 | 2460 | 2P | BG4NUC-LC229 | BG4-25 |
| 485 | 2P | BG1NUC-HC39 | BG1-16 | 2537 | RBD | BG4NUC-LC306 | BG4-26 |
| 487 | RBD | BG1NUC-HC41 | BG1-17 | 2614 | 2P | BG4NUC-LC383 | BG4-27 |
| 489 | 2F | BG1NUC-HC43 | BG1-18 | 4085 | 2P | BG7NUC-HC1 | BG7-1 |
| 514 | RBD | BG1NUC-HC68 | BG1-19 | 4097 | 2P | BG7NUC-HC13 | BG7-2 |
| 528 | 2P | BG1NUC-HC82 | BG1-20 | 4106 | 2P | BG7NUC-HC22 | BG7-3 |
| 536 | RBD | BG1NUC-HC90 | BG1-21 | 4115 | 2P | BG7NUC-HC31 | BG7-4 |
| 542 | RBD | BG1NUC-HC96 | BG1-22 | 4121 | 2P | BG7NUC-HC37 | BG7-5 |
| 548 | RBD | BG1NUC-HC102 | BG1-23 | 4126 | 2P | BG7NUC-HC42 | BG7-6 |
| 571 | RBD | BG1NUC-HC125 | BG1-24 | 4129 | 2P | BG7NUC-HC45 | BG7-8 |
| 602 | RBD | BG1NUC-HC156 | BG1-25 | 4132 | 2P | BG7NUC-HC48 | BG7-9 |
| 634 | RBD | BG1NUC-HC188 | BG1-26 | 4134 | 2P | BG7NUC-HC50 | BG7-10 |
| 690 | RBD | BG1NUC-HC244 | BG1-27 | 4136 | 2P | BG7NUC-HC52 | BG7-11 |
| 701 | RBD | BG1NUC-HC255 | BG1-28 | 4138 | 2P | BG7NUC-HC54 | BG7-12 |
| 755 | RBD | BG1NUC-LC1 | BG1-1 | 4140 | 2P | BG7NUC-HC56 | BG7-13 |
| 764 | RBD | BG1NUC-LC10 | BG1-3 | 4346 | RBD | BG7NUC-HC262 | BG7-14 |
| 767 | RBD | BG1NUC-LC13 | BG1-4 | 4369 | RBD | BG7NUC-HC285 | BG7-15 |
| 770 | RBD | BG1NUC-LC16 | BG1-5 | 4372 | RBD | BG7NUC-HC288 | BG7-16 |
| 774 | RBD | BG1NUC-LC20 | BG1-6 | 4386 | RBD | BG7NUC-HC302 | BG7-17 |
| 775 | 2P | BG1NUC-LC21 | BG1-7 | 4393 | RBD | BG7NUC-HC309 | BG7-18 |
| 777 | 2P | BG1NUC-LC23 | BG1-8 | 4402 | RBD | BG7NUC-HC318 | BG7-19 |
| 779 | RBD | BG1NUC-LC25 | BG1-9 | 4414 | RBD | BG7NUC-HC330 | BG7-20 |
| 781 | RBD | BG1NUC-LC27 | BG1-10 | 4482 | 2P | BG7NUC-LC1 | BG7-1 |
| 783 | RBD | BG1NUC-LC29 | BG1-11 | 4494 | 2P | BG7NUC-LC13 | BG7-2 |
| 785 | RBD | BG1NUC-LC31 | BG1-12 | 4503 | 2P | BG7NUC-LC22 | BG7-3 |
| 787 | 2P | BG1NUC-LC33 | BG1-13 | 4512 | 2P | BG7NUC-LC31 | BG7-4 |
| 789 | RBD | BG1NUC-LC35 | BG1-14 | 4518 | 2P | BG7NUC-LC37 | BG7-5 |
| 791 | RBD | BG1NUC-LC37 | BG1-15 | 4523 | 2P | BG7NUC-LC42 | BG7-6 |
| 793 | 2P | BG1NUC-LC39 | BG1-16 | 4526 | 2P | BG7NUC-LC45 | BG7-8 |
| 795 | RBD | BG1NUC-LC41 | BG1-17 | 4529 | 2P | BG7NUC-LC48 | BG7-9 |
| 797 | 2P | BG1NUC-LC43 | BG1-18 | 4531 | 2P | BG7NUC-LC50 | BG7-10 |
| 822 | RBD | BG1NUC-LC68 | BG1-19 | 4533 | 2P | BG7NUC-LC52 | BG7-11 |
| 836 | 2P | BG1NUC-LC82 | BG1-20 | 4535 | 2P | BG7NUC-LC54 | BG7-12 |
| 844 | RBD | BG1NUC-LC90 | BG1-21 | 4537 | 2P | BG7NUC-LC56 | BG7-13 |
| 850 | RBD | BG1NUC-LC96 | BG1-22 | 4743 | RBD | BG7NUC-LC262 | BG7-14 |
| 856 | RBD | BG1NUC-LC102 | BG1-23 | 4766 | RBD | BG7NUC-LC285 | BG7-15 |
| 879 | RBD | BG1NUC-LC125 | BG1-24 | 4769 | RBD | BG7NUC-LC288 | BG7-16 |
| 910 | RBD | BG1NUC-LC156 | BG1-25 | 4783 | RBD | BG7NUC-LC302 | BG7-17 |
| 942 | RBD | BG1NUC-LC188 | BG1-26 | 4790 | RBD | BG7NUC-LC309 | BG7-18 |
| 998 | RBD | BG1NUC-LC244 | BG1-27 | 4799 | RBD | BG7NUC-LC318 | BG7-19 |
| 1009 | RBD | BG1NUC-LC255 | BG1-28 | 4811 | RBD | BG7NUC-LC330 | BG7-20 |
| 1823 | 2F | BG4NUC-HC1 | BG4-1 | 5347 | RBD | BG10NUC-HC1 | BG10-1 |
| 1834 | 2P | BG4NUC-HC12 | BG4-2 | 5383 | RBD | BG10NUC-HC37 | BG10-2 |
| 1838 | 2P | BG4NUC-HC16 | BG4-3 | 5398 | RBD | BG10NUC-HC52 | BG10-3 |
| 1843 | 2F | BG4NUC-HC21 | BG4-4 | 5407 | RBD | BG10NUC-HC61 | BG10-4 |
| 1845 | RBD | BG4NUC-HC23 | BG4-5 | 5416 | RBD | BG10NUC-HC70 | BG10-5 |
| 1847 | RBD | BG4NUC-HC25 | BG4-6 | 5424 | RBD | BG10NUC-HC78 | BG10-6 |
| 1850 | RBD | BG4NUC-HC28 | BG4-7 | 5431 | RBD | BG10NUC-HC85 | BG10-7 |
| 1853 | RBD | BG4NUC-HC31 | BG4-8 | 5436 | RBD | BG10NUC-HC90 | BG10-8 |
| 1856 | RBD | BG4NUC-HC34 | BG4-9 | 5441 | 2P | BG10NUC-HC95 | BG10-9 |
| 1859 | RBD | BG4NUC-HC37 | BG4-10 | 5446 | RBD | BG10NUC-HC100 | BG10-10 |
| 1860 | RBD | BG4NUC-HC38 | BG4-11 | 5450 | RBD | BG10NUC-HC104 | BG10-11 |
| 1862 | 2P | BG4NUC-HC40 | BG4-12 | 5453 | 2P | BG10NUC-HC107 | BG10-12 |
| 1864 | RBD | BG4NUC-HC42 | BG4-13 | 5457 | RBD | BG10NUC-HC111 | BG10-13 |
| 1866 | 2P | BG4NUC-HC44 | BG4-14 | 5459 | 2P | BG10NUC-HC113 | BG10-14 |
| 1868 | 2F | BG4NUC-HC46 | BG4-15 | 5461 | RBD | BG10NUC-HC115 | BG10-15 |
| 1870 | RBD | BG4NUC-HC48 | BG4-16 | 5467 | 2P | BG10NUC-HC121 | BG10-16 |
| 1872 | 2F | BG4NUC-HC50 | BG4-17 | 5471 | 2P | BG10NUC-HC125 | BG10-17 |
| 1874 | 2P | BG4NUC-HC52 | BG4-18 | 5473 | RBD | BG10NUC-HC127 | BG10-18 |
| 1876 | RBD | BG4NUC-HC54 | BG4-19 | 5475 | RBD | BG10NUC-HC129 | BG10-19 |
| 1879 | 2P | BG4NUC-HC57 | BG4-20 | 5774 | RBD | BG10NUC-LC1 | BG10-1 |
| 1880 | RBD | BG4NUC-HC58 | BG4-21 | 5810 | RBD | BG10NUC-LC37 | BG10-2 |
| 1955 | 2P | BG4NUC-HC133 | BG4-22 | 5825 | RBD | BG10NUC-LC52 | BG10-3 |
| 1980 | RBD | BG4NUC-HC158 | BG4-23 | 5834 | RBD | BG10NUC-LC61 | BG10-4 |
| 2039 | RBD | BG4NUC-HC217 | BG4-24 | 5843 | RBD | BG10NUC-LC70 | BG10-5 |
| 2051 | 2P | BG4NUC-HC229 | BG4-25 | 5851 | RBD | BG10NUC-LC78 | BG10-6 |
| 2128 | RBD | BG4NUC-HC306 | BG4-26 | 5858 | RBD | BG10NUC-LC85 | BG10-7 |
| 2205 | 2P | BG4NUC-HC383 | BG4-27 | 5863 | RBD | BG10NUC-LC90 | BG10-8 |
| 2232 | 2P | BG4NUC-LC1 | BG4-1 | 5868 | 2P | BG10NUC-LC95 | BG10-9 |
| 2243 | 2P | BG4NUC-LC12 | BG4-2 | 5873 | RBD | BG10NUC-LC100 | BG10-10 |
| 2247 | 2P | BG4NUC-LC16 | BG4-3 | 5877 | RBD | BG10NUC-LC104 | BG10-11 |
| 2252 | 2P | BG4NUC-LC21 | BG4-4 | 5880 | 2P | BG10NUC-LC107 | BG10-12 |
| 2254 | RBD | BG4NUC-LC23 | BG4-5 | 5884 | RBD | BG10NUC-LC111 | BG10-13 |
| 2256 | RBD | BG4NUC-LC25 | BG4-6 | 5886 | 2P | BG10NUC-LC113 | BG10-14 |
| 2259 | RBD | BG4NUC-LC28 | BG4-7 | 5888 | RBD | BG10NUC-LC115 | BG10-15 |
| 2262 | RBD | BG4NUC-LC31 | BG4-8 | 5894 | 2P | BG10NUC-LC121 | BG10-16 |
| 2265 | RBD | BG4NUC-LC34 | BG4-9 | 5898 | 2P | BG10NUC-LC125 | BG10-17 |
| 2268 | RBD | BG4NUC-LC37 | BG4-10 | 5900 | RBD | BG10NUC-LC127 | BG10-18 |
| 2269 | RBD | BG4NUC-LC38 | BG4-11 | 5902 | RBD | BG10NUC-LC129 | BG10-19 |

### REFERENCES

[0216] Adams, P. D., Afonine, P. V., Bunkoczi, G., Chen, V. B., Davis, I. W., Echols, N., Headd, J. J., Hung, L. W., Kapral, G. J., Grosse-Kunstleve, R. W., et al. (2010). PHENIX: a comprehensive Python-based system for macromolecular structure solution. Acta Crystallogr D Biol Crystallogr 66, 213-221.
[0217] Barnes, C. O., Jette, C. A., Abernathy, M. E., Dam, K.-M. A., Esswein, S. R., Gristick, H. B., Malyutin, A. G., Sharaf, N. G., Huey-Tubman, K. E., Lee, Y. E., et al. (2020a). SARS-COV-2 neutralizing antibody structures inform therapeutic strategies. Nature.
[0218] Barnes, C. O., West, A. P., Jr., Huey-Tubman, K. E., Hoffmann, M. A. G., Sharaf, N. G., Hoffman, P. R., Koranda, N., Gristick, H. B., Gaebler, C., Muecksch, F., et al. (2020b). Structures of Human Antibodies Bound to SARS-COV-2 Spike Reveal Common Epitopes and Recurrent Features of Antibodies. Cell 182, 828-842 e816.
[0219] Baum, A., Fulton, B. O., Wloga, E., Copin, R., Pascal, K. E., Russo, V., Giordano, S., Lanza, K., Negron, N., Ni, M., et al. (2020). Antibody cocktail to SARS-COV-2 spike protein prevents rapid mutational escape seen with individual antibodies. Science 369, 1014-1018.
[0220] Bournazos, S., Gupta, A., and Ravetch, J. V. (2020). The role of IgG Fc receptors in antibody-dependent enhancement. Nat Rev Immunol 20, 633-643.
[0221] Brouwer, P. J. M., Caniels, T. G., van der Straten, K., Snitselaar, J. L., Aldon, Y., Bangaru, S., Torres, J. L., Okba, N. M. A., Claireaux, M., Kerster, G., et al. (2020). Potent neutralizing antibodies from COVID-19 patients define multiple targets of vulnerability. Science 369, 643-650.
[0222] Butler, A., Hoffman, P., Smibert, P., Papalexi, E., and Satija, R. (2018). Integrating single-cell transcriptomic data across different conditions, technologies, and species. Nat Biotechnol 36, 411-420.
[0223] Cao, Y., Su, B., Guo, X., Sun, W., Deng, Y., Bao, L., Zhu, Q., Zhang, X., Zheng, Y., Geng, C., et al. (2020a). Potent neutralizing antibodies against SARS-COV-2 identified by high-throughput single-cell sequencing of convalescent patients' B cells. Cell.
[0224] Cao, Y., Su, B., Guo, X., Sun, W., Deng, Y., Bao, L., Zhu, Q., Zhang, X., Zheng, Y., Geng, C., et al. (2020b). Potent Neutralizing Antibodies against SARS-COV-2 Identified by High-Throughput Single-Cell Sequencing of Convalescent Patients' B Cells. Cell 182, 73-84 e16.
[0225] Caskey, M., Klein, F., and Nussenzweig, M. C. (2019). Broadly neutralizing anti-HIV-1 monoclonal antibodies in the clinic. Nat Med 25, 547-553.
[0226] Chao, A., Gotelli, N. J., Hsieh, T. C., Sander, E. L., Ma, K. H., Colwell, R. K., and Ellison, A. M. (2014). Rarefaction and extrapolation with Hill numbers: a framework for sampling and estimation in species diversity studies. Ecological Monographs 84, 45-67.
[0227] Chao, A., Hsieh, T. C., Chazdon, R. L., Colwell, R. K., and Gotelli, N. J. (2015). Unveiling the species-rank abundance distribution by generalizing the Good-Turing sample coverage theory. Ecology 96, 1189-1201.
[0228] Chen, F., Tzarum, N., Wilson, I. A., and Law, M. (2019). VH1-69 antiviral broadly neutralizing antibodies: genetics, structures, and relevance to rational vaccine design. Curr Opin Virol 34, 149-159.
[0229] Chen, P., Nirula, A., Heller, B., Gottlieb, R. L., Boscia, J., Morris, J., Huhn, G., Cardona, J., Mocherla, B., Stosor, V., et al. (2020). SARS-COV-2 Neutralizing Antibody LY-CoV555 in Outpatients with Covid-19. N Engl J Med.
[0230] Chen, V. B., Arendall, W. B., 3rd, Headd, J. J., Keedy, D. A., Immormino, R. M., Kapral, G. J., Murray, L. W., Richardson, J. S., and Richardson, D. C. (2010). MolProbity: all-atom structure validation for macromolecular crystallography. Acta Crystallogr D Biol Crystallogr 66, 12-21.
[0231] Chen, Y. Q., Wohlbold, T. J., Zheng, N. Y., Huang, M., Huang, Y., Neu, K. E., Lee, J., Wan, H., Rojas, K. T., Kirkpatrick, E., et al. (2018). Influenza Infection in Humans Induces Broadly Cross-Reactive and Protective Neuraminidase-Reactive Antibodies. Cell 173, 417-429 e410.
[0232] Chi, X., Yan, R., Zhang, J., Zhang, G., Zhang, Y., Hao, M., Zhang, Z., Fan, P., Dong, Y., Yang, Y., et al. (2020). A neutralizing human antibody binds to the N-terminal domain of the Spike protein of SARS-COV-2. Science 369, 650-655.
[0233] Cohen, A. A., Gnanapragasam, P. N. P., Lee, Y. E., Hoffman, P. R., Ou, S., Kakutani, L. M., Keeffe, J. R., Barnes, C. O., Nussenzweig, M. C., and Bjorkman, P. J. (2020). Mosaic RBD nanoparticles elicit neutralizing antibodies against SARS-COV-2 and zoonotic coronaviruses. bioRxiv.
[0234] Corti, D., and Lanzavecchia, A. (2013). Broadly neutralizing antiviral antibodies. Annu Rev Immunol 31, 705-742.
[0235] Corti, D., Zhao, J., Pedotti, M., Simonelli, L., Agnihothram, S., Fett, C., Fernandez-Rodriguez, B., Foglierini, M., Agatic, G., Vanzetta, F., et al. (2015). Prophylactic and postexposure efficacy of a potent human monoclonal antibody against MERS coronavirus. Proc Natl Acad Sci USA 112, 10473-10478.
[0236] Crawford, K. H. D., Dingens, A. S., Eguia, R., Wolf, C. R., Wilcox, N., Logue, J. K., Shuey, K., Casto, A. M., Fiala, B., Wrenn, S., et al. (2020a). Dynamics of neutralizing antibody titers in the months after SARS-COV-2 infection. J Infect Dis.
[0237] Crawford, K. H. D., Eguia, R., Dingens, A. S., Loes, A. N., Malone, K. D., Wolf, C. R., Chu, H. Y., Tortorici, M. A., Veesler, D., Murphy, M., et al. (2020b). Protocol and Reagents for Pseudotyping Lentiviral Particles with SARS-COV-2 Spike Protein for Neutralization Assays. Viruses 12.
[0238] Davies, N. G., Abbott, S., Barnard, R. C., Jarvis, C. I., Kucharski, A. J., Munday, J., Pearson, C. A. B., Russell, T. W., Tully, D. C., Washburne, A. D., et al. (2021). Estimated transmissibility and severity of novel SARS-COV-2 Variant of Concern 202012/01 in England. medRxiv, 2020.2012.2024.20248822.
[0239] de Wit, E., van Doremalen, N., Falzarano, D., and Munster, V. J. (2016). SARS and MERS: recent insights into emerging coronaviruses. Nat Rev Microbiol 14, 523-534.
[0240] Diskin, R., Klein, F., Horwitz, J. A., Halper-Stromberg, A., Sather, D. N., Marcovecchio, P. M., Lee, T., West, A. P., Jr., Gao, H., Seaman, M. S., et al. (2013). Restricting HIV-1 pathways for escape using rationally designed anti-HIV-1 antibodies. J Exp Med 210, 1235-1249.
[0241] Dunbar, J., Krawczyk, K., Leem, J., Baker, T., Fuchs, A., Georges, G., Shi, J., and Deane, C. M. (2014). SAbDab: the structural antibody database. Nucleic Acids Res 42, D1140-1146.
[0242] Ellebedy, A. H., Jackson, K. J., Kissick, H. T., Nakaya, H. I., Davis, C. W., Roskin, K. M., McElroy, A. K., Oshansky, C. M., Elbein, R., Thomas, S., et al. (2016). Defining antigen-specific plasmablast and memory B cell subsets in human blood after viral infection or vaccination. Nat Immunol 17, 1226-1234.
[0243] Emsley, P., Lohkamp, B., Scott, W. G., and Cowtan, K. (2010). Features and development of Coot. Acta Crystallogr D Biol Crystallogr 66, 486-501.
[0244] Goddard, T. D., Huang, C. C., Meng, E. C., Pettersen, E. F., Couch, G. S., Morris, J. H., and Ferrin, T. E. (2018). UCSF ChimeraX: Meeting modern challenges in visualization and analysis. Protein Sci 27, 14-25.
[0245] Greaney, A. J., Starr, T. N., Gilchuk, P., Zost, S. J., Binshtein, E., Loes, A. N., Hilton, S. K., Huddleston, J., Eguia, R., Crawford, K. H. D., et al. (2020). Complete Mapping of Mutations to the SARS-COV-2 Spike Receptor-Binding Domain that Escape Antibody Recognition. Cell Host Microbe.
[0246] Gristick, H. B., von Boehmer, L., West, A. P., Jr., Schamber, M., Gazumyan, A., Golijanin, J., Seaman, M. S., Fatkenheuer, G., Klein, F., Nussenzweig, M. C., et al. (2016). Natively glycosylated HIV-1 Env structure reveals new mode for antibody recognition of the CD4-binding site. Nat Struct Mol Biol 23, 906-915.
[0247] Gupta, N. T., Vander Heiden, J. A., Uduman, M., Gadala-Maria, D., Yaari, G., and Kleinstein, S. H. (2015). Change-O: a toolkit for analyzing large-scale B cell immunoglobulin repertoire sequencing data. Bioinformatics 31, 3356-3358.
[0248] Guthmiller, J. J., Lan, L. Y., Fernandez-Quintero, M. L., Han, J., Utset, H. A., Bitar, D. J., Hamel, N. J., Stovicek, O., Li, L., Tepora, M., et al. (2020). Polyreactive Broadly Neutralizing B cells Are Selected to Provide Defense against Pandemic Threat Influenza Viruses. Immunity 53, 1230-1244 e1235.
[0249] Hansen, J., Baum, A., Pascal, K. E., Russo, V., Giordano, S., Wloga, E., Fulton, B. O., Yan, Y., Koon, K., Patel, K., et al. (2020). Studies in humanized mice and convalescent humans yield a SARS-COV-2 antibody cocktail. Science.
[0250] Hill, M. O. (1973). Diversity and Evenness: A Unifying Notation and Its Consequences. Ecology 54, 427-432.
[0251] Horns, F., Dekker, C. L., and Quake, S. R. (2020). Memory B Cell Activation, Broad Anti-influenza Antibodies, and Bystander Activation Revealed by Single-Cell Transcriptomics. Cell Rep 30, 905-913 e906.
[0252] Horwitz, J. A., Halper-Stromberg, A., Mouquet, H., Gitlin, A. D., Tretiakova, A., Eisenreich, T. R., Malbec, M., Gravemann, S., Billerbeck, E., Dorner, M., et al. (2013). HIV-1 suppression and durable control by combining single broadly neutralizing antibodies and antiretroviral drugs in humanized mice. Proc Natl Acad Sci USA 110, 16538-16543.
[0253] Hotzel, I., Theil, F. P., Bernstein, L. J., Prabhu, S., Deng, R., Quintana, L., Lutman, J., Sibia, R., Chan, P., Bumbaca, D., et al. (2012). A strategy for risk mitigation of antibodies with fast clearance. MAbs 4, 753-760.
[0254] Hsieh, C. L., Goldsmith, J. A., Schaub, J. M., DiVenere, A. M., Kuo, H. C., Javanmardi, K., Le, K. C., Wrapp, D., Lee, A. G., Liu, Y., et al. (2020). Structure-based design of prefusion-stabilized SARS-COV-2 spikes. Science 369, 1501-1505.
[0255] Hurlburt, N. K., Seydoux, E., Wan, Y. H., Edara, V. V., Stuart, A. B., Feng, J., Suthar, M. S., McGuire, A. T., Stamatatos, L., and Pancera, M. (2020). Structural basis for potent neutralization of SARS-COV-2 and role of antibody affinity maturation. Nat Commun 11, 5413.
[0256] Izawa, K., Martin, E., Soudais, C., Bruneau, J., Boutboul, D., Rodriguez, R., Lenoir, C., Hislop, A. D., Besson, C., Touzot, F., et al. (2017). Inherited CD70 deficiency in humans reveals a critical role for the CD70-CD27 pathway in immunity to Epstein-Barr virus infection. J Exp Med 214, 73-89.
[0257] Johnson, W. E., Li, C., and Rabinovic, A. (2007). Adjusting batch effects in microarray expression data using empirical Bayes methods. Biostatistics 8, 118-127.
[0258] Ju, B., Zhang, Q., Ge, J., Wang, R., Sun, J., Ge, X., Yu, J., Shan, S., Zhou, B., Song, S., et al. (2020). Human neutralizing antibodies elicited by SARS-COV-2 infection. Nature 584, 115-119
[0259] Kabsch, W. (2010). XDS. Acta Crystallogr D Biol Crystallogr 66, 125-132.
[0260] Klein, J. S., and Bjorkman, P. J. (2010). Few and far between: how HIV may be evading antibody avidity. PLOS Pathog 6, e1000908.
[0261] Kremmidiotis, G., and Zola, H. (1995). Changes in CD44 expression during B cell differentiation in the human tonsil. Cell Immunol 161, 147-157.
[0262] Krissinel, E., and Henrick, K. (2007). Inference of macromolecular assemblies from crystalline state. Journal of molecular biology 372, 774-797.
[0263] Kulkarni, P. S., Hurwitz, J. L., Simoes, E. A. F., and Piedra, P. A. (2018). Establishing Correlates of Protection for Vaccine Development: Considerations for the Respiratory Syncytial Virus Vaccine Field. Viral Immunol 31, 195-203.
[0264] Kyte, J., and Doolittle, R. F. (1982). A simple method for displaying the hydropathic character of a protein. Journal of molecular biology 157, 105-132.
[0265] Lam, J. H., and Baumgarth, N. (2019). The Multifaceted B Cell Response to Influenza Virus. J Immunol 202, 351-359.
[0266] Lefranc, M. P., Giudicelli, V., Duroux, P., Jabado-Michaloud, J., Folch, G., Aouinti, S., Carillon, E., Duvergey, H., Houles, A., Paysan-Lafosse, T., et al. (2015). IMGT(R), the international ImMunoGeneTics information system(R) 25 years on. Nucleic Acids Res 43, D413-422.
[0267] Leyendeckers, H., Odendahl, M., Lohndorf, A., Irsch, J., Spangfort, M., Miltenyi, S., Hunzelmann, N., Assenmacher, M., Radbruch, A., and Schmitz, J. (1999). Correlation analysis between frequencies of circulating antigen-specific IgG-bearing memory B cells and serum titers of antigen-specific IgG. Eur J Immunol 29, 1406-1417.
[0268] Li, B., Gould, J., Yang, Y., Sarkizova, S., Tabaka, M., Ashenberg, O., Rosen, Y., Slyper, M., Kowalczyk, M. S., Villani, A. C., et al. (2020). Cumulus provides cloud-based data analysis for large-scale single-cell and single-nucleus RNA-seq. Nat Methods 17, 793-798.
[0269] Li, W., Moore, M. J., Vasilieva, N., Sui, J., Wong, S. K., Berne, M. A., Somasundaran, M., Sullivan, J. L., Luzuriaga, K., Greenough, T. C., et al. (2003). Angiotensin-converting enzyme 2 is a functional receptor for the SARS coronavirus. Nature 426, 450-454.
[0270] Liu, L., Wang, P., Nair, M. S., Yu, J., Rapp, M., Wang, Q., Luo, Y., Chan, J. F., Sahi, V., Figueroa, A., et al. (2020). Potent neutralizing antibodies against multiple epitopes on SARS-COV-2 spike. Nature 584, 450-456.
[0271] Liu, Y., Liu, J., Xia, H., Zhang, X., Fontes-Garfias, C. R., Swanson, K. A., Cai, H., Sarkar, R., Chen, W., Cutler, M., et al. (2021). Neutralizing Activity of BNT162b2-Elicited Serum—Preliminary Report. N Engl J Med.
[0272] Lv, Z., Deng, Y. Q., Ye, Q., Cao, L., Sun, C. Y., Fan, C., Huang, W., Sun, S., Sun, Y., Zhu, L., et al. (2020). Structural basis for neutralization of SARS-COV-2 and SARS-COV by a potent therapeutic antibody. Science 369, 1505-1509.
[0273] Mastronarde, D. N. (2005). Automated electron microscope tomography using robust prediction of specimen movements. J Struct Biol 152, 36-51.
[0274] Mathew, N. R., Jayanthan, J. K., Smirnov, I., Robinson, J. L., Axelsson, H., Nakka, S. S., Emmanouilidi, A., Czarnewski, P., Yewdell, W. T., Lebrero-Fernández, C., et al. (2020). Single cell BCR and transcriptome analysis after respiratory virus infection reveals spatiotemporal dynamics of antigen-specific B cell responses. bioRxiv, 2020.2008.2024.264069.
[0275] McCoy, A. J., Grosse-Kunstleve, R. W., Adams, P. D., Winn, M. D., Storoni, L. C., and Read, R. J. (2007). Phaser crystallographic software. J Appl Crystallogr 40, 658-674.
[0276] Moir, S., Ho, J., Malaspina, A., Wang, W., DiPoto, A. C., O'Shea, M. A., Roby, G., Kottilil, S., Arthos, J., Proschan, M. A., et al. (2008). Evidence for HIV-associated B cell exhaustion in a dysfunctional memory B cell compartment in HIV-infected viremic individuals. J Exp Med 205, 1797-1805.
[0277] Moore, D. S. (1985). Amino acid and peptide net charges: A simple calculational procedure. Biochemical Education 13, 10-11.
[0278] Moroney, J. B., Vasudev, A., Pertsemlidis, A., Zan, H., and Casali, P. (2020). Integrative transcriptome and chromatin landscape analysis reveals distinct epigenetic regulations in human memory B cells. Nat Commun 11, 5435.
[0279] Mouquet, H., Scheid, J. F., Zoller, M. J., Krogsgaard, M., Ott, R. G., Shukair, S., Artyomov, M. N., Pietzsch, J., Connors, M., Pereyra, F., et al. (2010). Polyreactivity increases the apparent affinity of anti-HIV antibodies by heteroligation. Nature 467, 591-595.
[0280] Muehlinghaus, G., Cigliano, L., Huehn, S., Peddinghaus, A., Leyendeckers, H., Hauser, A. E., Hiepe, F., Radbruch, A., Arce, S., and Manz, R. A. (2005). Regulation of CXCR3 and CXCR4 expression during terminal differentiation of memory B cells into plasma cells. Blood 105, 3965-3971.
[0281] Mulangu, S., Dodd, L. E., Davey, R. T., Jr., Tshiani Mbaya, O., Proschan, M., Mukadi, D., Lusakibanza Manzo, M., Nzolo, D., Tshomba Oloma, A., Ibanda, A., et al. (2019). A Randomized, Controlled Trial of Ebola Virus Disease Therapeutics. N Engl J Med 381, 2293-2303.
[0282] Nagasawa, T., Nakajima, T., Tachibana, K., Iizasa, H., Bleul, C. C., Yoshie, O., Matsushima, K., Yoshida, N., Springer, T. A., and Kishimoto, T. (1996). Molecular cloning and characterization of a murine pre-B-cell growth-stimulating factor/stromal cell-derived factor 1 receptor, a murine homolog of the human immunodeficiency virus 1 entry coreceptor fusin. Proc Natl Acad Sci USA 93, 14726-14729.
[0283] Neu, K. E., Guthmiller, J. J., Huang, M., La, J., Vieira, M. C., Kim, K., Zheng, N. Y., Cortese, M., Tepora, M. E., Hamel, N. J., et al. (2019). Spec-seq unveils transcriptional subpopulations of antibody-secreting cells following influenza vaccination. J Clin Invest 129, 93-105.
[0284] Nie, Y., Waite, J., Brewer, F., Sunshine, M. J., Littman, D. R., and Zou, Y. R. (2004). The role of CXCR4 in maintaining peripheral B cell compartments and humoral immunity. J Exp Med 200, 1145-1156.
[0285] Nouri, N., and Kleinstein, S. H. (2018). A spectral clustering-based method for identifying clones from high-throughput B cell repertoire sequencing data. Bioinformatics 34, 1341-1349.
[0286] Piccoli, L., Park, Y.-J., Tortorici, M. A., Czudnochowski, N., Walls, A. C., Beltramello, M., Silacci-Fregni, C., Pinto, D., Rosen, L. E., Bowen, J. E., et al. (2020). Mapping neutralizing and immunodominant sites on the SARS-COV-2 spike receptor-binding domain by structure-guided high-resolution serology. Cell.
[0287] Pinto, D., Park, Y.-J., Beltramello, M., Walls, A. C., Tortorici, M. A., Bianchi, S., Jaconi, S., Culap, K., Zatta, F., De Marco, A., et al. (2020a). Cross-neutralization of SARS-COV-2 by a human monoclonal SARS-COV antibody. Nature 583, 290-295.
[0288] Pinto, D., Park, Y. J., Beltramello, M., Walls, A. C., Tortorici, M. A., Bianchi, S., Jaconi, S., Culap, K., Zatta, F., De Marco, A., et al. (2020b). Cross-neutralization of SARS-COV-2 by a human monoclonal SARS-COV antibody. Nature 583, 290-295.
[0289] Prabakaran, P., Gan, J., Feng, Y., Zhu, Z., Choudhry, V., Xiao, X., Ji, X., and Dimitrov, D. S. (2006). Structure of severe acute respiratory syndrome coronavirus receptor-binding domain complexed with neutralizing antibody. J Biol Chem 281, 15829-15836.
[0290] Prigent, J., Jarossay, A., Planchais, C., Eden, C., Dufloo, J., Kok, A., Lorin, V., Vratskikh, O., Couderc, T., Bruel, T., et al. (2018). Conformational Plasticity in Broadly Neutralizing HIV-1 Antibodies Triggers Polyreactivity. Cell Rep 23, 2568-2581.
[0291] Punjani, A., Rubinstein, J. L., Fleet, D. J., and Brubaker, M. A. (2017). cryoSPARC: algorithms for rapid unsupervised cryo-EM structure determination. Nat Methods 14, 290-296.
[0292] Robbiani, D. F., Bozzacco, L., Keeffe, J. R., Khouri, R., Olsen, P. C., Gazumyan, A., Schaefer-Babajew, D., Avila-Rios, S., Nogueira, L., Patel, R., et al. (2017). Recurrent Potent Human Neutralizing Antibodies to Zika Virus in Brazil and Mexico. Cell 169, 597-609 e511.
[0293] Robbiani, D. F., Gaebler, C., Muecksch, F., Lorenzi, J. C. C., Wang, Z., Cho, A., Agudelo, M., Barnes, C. O., Gazumyan, A., Finkin, S., et al. (2020). Convergent antibody responses to SARS-COV-2 in convalescent individuals. Nature 584, 437-442.
[0294] Rockx, B., Corti, D., Donaldson, E., Sheahan, T., Stadler, K., Lanzavecchia, A., and Baric, R. (2008). Structural basis for potent cross-neutralizing human monoclonal antibody protection against lethal human and zoonotic severe acute respiratory syndrome coronavirus challenge. J Virol 82, 3220-3235.
[0295] Rogers, T. F., Zhao, F., Huang, D., Beutler, N., Burns, A., He, W. T., Limbo, O., Smith, C., Song, G., Woehl, J., et al. (2020). Isolation of potent SARS-COV-2 neutralizing antibodies and protection from disease in a small animal model. Science 369, 956-963.
[0296] Roy, V., Fischinger, S., Atyeo, C., Slein, M., Loos, C., Balazs, A., Luedemann, C., Astudillo, M. G., Yang, D., Wesemann, D. R., et al. (2020). SARS-COV-2-specific ELISA development. J Immunol Methods 484-485, 112832.
[0297] Rubelt, F., Sievert, V., Knaust, F., Diener, C., Lim, T. S., Skriner, K., Klipp, E., Reinhardt, R., Lehrach, H., and Konthur, Z. (2012). Onset of immune senescence defined by unbiased pyrosequencing of human immunoglobulin mRNA repertoires. PLOS One 7, e49774.
[0298] Scheid, J. F., Horwitz, J. A., Bar-On, Y., Kreider, E. F., Lu, C. L., Lorenzi, J. C., Feldmann, A., Braunschweig, M., Nogueira, L., Oliveira, T., et al. (2016). HIV-1 antibody 3BNC117 suppresses viral rebound in humans during treatment interruption. Nature 535, 556-560.
[0299] Scheid, J. F., Mouquet, H., Feldhahn, N., Seaman, M. S., Velinzon, K., Pietzsch, J., Ott, R. G., Anthony, R. M., Zebroski, H., Hurley, A., et al. (2009a). Broad diversity of neutralizing antibodies isolated from memory B cells in HIV-infected individuals. Nature 458, 636-640.
[0300] Scheid, J. F., Mouquet, H., Feldhahn, N., Walker, B. D., Pereyra, F., Cutrell, E., Seaman, M. S., Mascola, J. R., Wyatt, R. T., Wardemann, H., et al. (2009b). A method for identification of HIV gp140 binding memory B cells in human blood. J Immunol Methods 343, 65-67.
[0301] Scheid, J. F., Mouquet, H., Ueberheide, B., Diskin, R., Klein, F., Oliveira, T. Y., Pietzsch, J., Fenyo, D., Abadir, A., Velinzon, K., et al. (2011). Sequence and structural convergence of broad and potent HIV antibodies that mimic CD4 binding. Science 333, 1633-1637.
[0302] Schmidt, F., Weisblum, Y., Muecksch, F., Hoffmann, H. H., Michailidis, E., Lorenzi, J. C. C., Mendoza, P., Rutkowska, M., Bednarski, E., Gaebler, C., et al. (2020). Measuring SARS-CoV-2 neutralizing antibody activity using pseudotyped and chimeric viruses. J Exp Med 217.
[0303] Shi, R., Shan, C., Duan, X., Chen, Z., Liu, P., Song, J., Song, T., Bi, X., Han, C., Wu, L., et al. (2020). A human neutralizing antibody targets the receptor-binding site of SARS-COV-2. Nature 584, 120-124.
[0304] Shingai, M., Donau, O. K., Plishka, R. J., Buckler-White, A., Mascola, J. R., Nabel, G. J., Nason, M. C., Montefiori, D., Moldt, B., Poignard, P., et al. (2014). Passive transfer of modest titers of potent and broadly neutralizing anti-HIV monoclonal antibodies block SHIV infection in macaques. J Exp Med 211, 2061-2074.
[0305] Stuart, T., Butler, A., Hoffman, P., Hafemeister, C., Papalexi, E., Mauck, W. M., 3rd, Hao, Y., Stoeckius, M., Smibert, P., and Satija, R. (2019). Comprehensive Integration of Single-Cell Data. Cell 177, 1888-1902 e1821.
[0306] Sui, J., Li, W., Murakami, A., Tamin, A., Matthews, L. J., Wong, S. K., Moore, M. J., Tallarico, A. S., Olurinde, M., Choe, H., et al. (2004). Potent neutralization of severe acute respiratory syndrome (SARS) coronavirus by a human mAb to S1 protein that blocks receptor association. Proc Natl Acad Sci USA 101, 2536-2541.
[0307] Tada, T., Fan, C., Chen, J. S., Kaur, R., Stapleford, K. A., Gristick, H., Dcosta, B. M., Wilen, C. B., Nimigean, C. M., and Landau, N. R. (2020). An ACE2 Microbody Containing a Single Immunoglobulin Fc Domain Is a Potent Inhibitor of SARS-COV-2. Cell Rep 33, 108528.
[0308] Tan, T. J. C., Yuan, M., Kuzelka, K., Padron, G. C., Beal, J. R., Chen, X., Wang, Y., Rivera-Cardona, J., Zhu, X., Stadtmueller, B. M., et al. (2021). Sequence signatures of two IGHV3-53/3-66 public clonotypes to SARS-COV-2 receptor binding domain. bioRxiv.
[0309] Tang, X. C., Agnihothram, S. S., Jiao, Y., Stanhope, J., Graham, R. L., Peterson, E. C., Avnir, Y., Tallarico, A. S., Sheehan, J., Zhu, Q., et al. (2014). Identification of human neutralizing antibodies against MERS-COV and their role in virus adaptive evolution. Proc Natl Acad Sci USA III, E2018-2026.
[0310] Tegally, H., Wilkinson, E., Giovanetti, M., Iranzadeh, A., Fonseca, V., Giandhari, J., Doolabh, D., Pillay, S., San, E. J., Msomi, N., et al. (2020). Emergence and rapid spread of a new severe acute respiratory syndrome-related coronavirus 2 (SARS-COV-2) lineage with multiple spike mutations in South Africa. medRxiv, 2020.2012.2021.20248640.
[0311] Terwilliger, T. C., Adams, P. D., Afonine, P. V., and Sobolev, O. V. (2018). A fully automatic method yielding initial models from high-resolution cryo-electron microscopy maps. Nat Methods 15, 905-908.
[0312] Tian, X., Li, C., Huang, A., Xia, S., Lu, S., Shi, Z., Lu, L., Jiang, S., Yang, Z., Wu, Y., et al. (2020). Potent binding of 2019 novel coronavirus spike protein by a SARS coronavirus-specific human monoclonal antibody. Emerg Microbes Infect 9, 382-385.
[0313] Tiller, T., Meffre, E., Yurasov, S., Tsuiji, M., Nussenzweig, M. C., and Wardemann, H. (2008). Efficient generation of monoclonal antibodies from single human B cells by single cell RT-PCR and expression vector cloning. J Immunol Methods 329, 112-124.
[0314] Tiller, T., Tsuiji, M., Yurasov, S., Velinzon, K., Nussenzweig, M. C., and Wardemann, H. (2007). Autoreactivity in human IgG+ memory B cells. Immunity 26, 205-213.
[0315] Tirosh, I., Izar, B., Prakadan, S. M., Wadsworth, M. H., 2^{nd}, Treacy, D., Trombetta, J. J., Rotem, A., Rodman, C., Lian, C., Murphy, G., et al. (2016). Dissecting the multicellular ecosystem of metastatic melanoma by single-cell RNA-seq. Science 352, 189-196.
[0316] Tortorici, M. A. (2020). Ultrapotent human antibodies protect against SARS-COV-2 challenge via multiple mechanisms.
[0317] Traag, V. A., Waltman, L., and van Eck, N. J. (2019). From Louvain to Leiden: guaranteeing well-connected communities. Sci Rep 9, 5233.
[0318] Traggiai, E., Becker, S., Subbarao, K., Kolesnikova, L., Uematsu, Y., Gismondo, M. R., Murphy, B. R., Rappuoli, R., and Lanzavecchia, A. (2004). An efficient method to make human monoclonal antibodies from memory B cells: potent neutralization of SARS coronavirus. Nat Med 10, 871-875.
[0319] Triller, G., Scally, S. W., Costa, G., Pissarev, M., Kreschel, C., Bosch, A., Marois, E., Sack, B. K., Murugan, R., Salman, A. M., et al. (2017). Natural Parasite Exposure Induces Protective Human Anti-Malarial Antibodies. Immunity 47, 1197-1209 e1110.
[0320] van Gisbergen, K. P., Klarenbeek, P. L., Kragten, N. A., Unger, P. P., Nieuwenhuis, M. B., Wensveen, F. M., ten Brinke, A., Tak, P. P., Eldering, E., Nolte, M. A., et al. (2011). The costimulatory molecule CD27 maintains clonally diverse CD8(+) T cell responses of low antigen affinity to protect against viral variants. Immunity 35, 97-108.
[0321] Verschoor, C. P., Singh, P., Russell, M. L., Bowdish, D. M., Brewer, A., Cyr, L., Ward, B. J., and Loeb, M. (2015). Microneutralization assay titres correlate with protection against seasonal influenza H1N1 and H3N2 in children. PLOS One 10, e0131531.
[0322] Victora, G. D., and Nussenzweig, M. C. (2012). Germinal centers. Annu Rev Immunol 30, 429-457.
[0323] Waickman, A. T., Gromowski, G. D., Rutvisuttinunt, W., Li, T., Siegfried, H., Victor, K., Kuklis, C., Gomootsukavadee, M., McCracken, M. K., Gabriel, B., et al. (2020). Transcriptional and clonal characterization of B cell plasmablast diversity following primary and secondary natural DENV infection. EBioMedicine 54, 102733.
[0324] Wan, J., Xing, S., Ding, L., Wang, Y., Gu, C., Wu, Y., Rong, B., Li, C., Wang, S., Chen, K., et al. (2020). Human-IgG-Neutralizing Monoclonal Antibodies Block the SARS-COV-2 Infection. Cell Rep 32, 107918.
[0325] Wang, Q., Michailidis, E., Yu, Y., Wang, Z., Hurley, A. M., Oren, D. A., Mayer, C. T., Gazumyan, A., Liu, Z., Zhou, Y., et al. (2020a). A Combination of Human Broadly Neutralizing Antibodies against Hepatitis B Virus HBsAg with Distinct Epitopes Suppresses Escape Mutations. Cell Host Microbe 28, 335-349 e336.
[0326] Wang, Z., Lorenzi, J. C. C., Muecksch, F., Finkin, S., Viant, C., Gaebler, C., Cipolla, M., Hoffman, H. H., Oliveira, T. Y., Oren, D. A., et al. (2020b). Enhanced SARS-COV-2 Neutralization by Secretory IgA in vitro. bioRxiv.
[0327] Wang, Z., Schmidt, F., Weisblum, Y., Muecksch, F., Barnes, C. O., Finkin, S., Schaefer-Babajew, D., Cipolla, M., Gaebler, C., Lieberman, J. A., et al. (2021). mRNA vaccine-elicited antibodies to SARS-COV-2 and circulating variants. Nature.
[0328] Wardemann, H., Yurasov, S., Schaefer, A., Young, J. W., Meffre, E., and Nussenzweig, M. C. (2003). Predominant autoantibody production by early human B cell precursors. Science 301, 1374-1377.
[0329] Weisblum, Y., Schmidt, F., Zhang, F., DaSilva, J., Poston, D., Lorenzi, J. C., Muecksch, F., Rutkowska, M., Hoffmann, H. H., Michailidis, E., et al. (2020). Escape from neutralizing antibodies by SARS-COV-2 spike protein variants. Elife 9.
[0330] West, A. P., Jr., Galimidi, R. P., Foglesong, C. P., Gnanapragasam, P. N., Klein, J. S., and Bjorkman, P. J. (2010). Evaluation of CD4-CD4i antibody architectures yields potent, broadly cross-reactive anti-human immunodeficiency virus reagents. J Virol 84, 261-269.
[0331] West, A. P., Jr., Scharf, L., Horwitz, J., Klein, F., Nussenzweig, M. C., and Bjorkman, P. J. (2013). Computational analysis of anti-HIV-1 antibody neutralization panel data to identify potential functional epitope residues. Proc Natl Acad Sci USA 110, 10598-10603.
[0332] Wibmer, C. K., Ayres, F., Hermanus, T., Madzivhandila, M., Kgagudi, P., Lambson, B. E., Vermeulen, M., van den Berg, K., Rossouw, T., Boswell, M., et al. (2021). SARS-COV-2 501Y. V2 escapes neutralization by South African COVID-19 donor plasma. bioRxiv.
[0333] Winn, M. D., Ballard, C. C., Cowtan, K. D., Dodson, E. J., Emsley, P., Evans, P. R., Keegan, R. M., Krissinel, E. B., Leslie, A. G., McCoy, A., et al. (2011). Overview of the CCP4 suite and current developments. Acta Crystallogr D Biol Crystallogr 67, 235-242.
[0334] Wrammert, J., Smith, K., Miller, J., Langley, W. A., Kokko, K., Larsen, C., Zheng, N. Y., Mays, I., Garman, L., Helms, C., et al. (2008). Rapid cloning of high-affinity human monoclonal antibodies against influenza virus. Nature 453, 667-671.
[0335] Wrapp, D., Wang, N., Corbett, K. S., Goldsmith, J. A., Hsieh, C. L., Abiona, O., Graham, B. S., and Mclellan, J. S. (2020). Cryo-EM structure of the 2019-nCOV spike in the prefusion conformation. Science 367, 1260-1263.
[0336] Wu, K., Werner, A. P., Koch, M., Choi, A., Narayanan, E., Stewart-Jones, G. B. E., Colpitts, T., Bennett, H., Boyoglu-Barnum, S., Shi, W., et al. (2021). Serum Neutralizing Activity Elicited by mRNA-1273 Vaccine-Preliminary Report. N Engl J Med.
[0337] Wu, N. C., Yuan, M., Liu, H., Lee, C. D., Zhu, X., Bangaru, S., Torres, J. L., Caniels, T. G., Brouwer, P. J. M., van Gils, M. J., et al. (2020a). An Alternative Binding Mode of IGHV3-53 Antibodies to the SARS-COV-2 Receptor Binding Domain. Cell Rep 33, 108274.
[0338] Wu, Y., Wang, F., Shen, C., Peng, W., Li, D., Zhao, C., Li, Z., Li, S., Bi, Y., Yang, Y., et al. (2020b). A noncompeting pair of human neutralizing antibodies block COVID-19 virus binding to its receptor ACE2. Science.
[0339] Yaari, G., Uduman, M., and Kleinstein, S. H. (2012). Quantifying selection in high-throughput Immunoglobulin sequencing data sets. Nucleic Acids Res 40, e134.
[0340] Yan, R., Zhang, Y., Li, Y., Xia, L., Guo, Y., and Zhou, Q. (2020). Structural basis for the recognition of the SARS-COV-2 by full-length human ACE2. Science.
[0341] Yuan, M., Liu, H., Wu, N. C., Lee, C.-C. D., Zhu, X., Zhao, F., Huang, D., Yu, W., Hua, Y., Tien, H., et al. (2020). Structural basis of a shared antibody response to SARS-COV-2. Science, eabd2321.
[0342] Zost, S. J., Gilchuk, P., Case, J. B., Binshtein, E., Chen, R. E., Nkolola, J. P., Schafer, A., Reidy, J. X., Trivette, A., Nargi, R. S., et al. (2020). Potently neutralizing and protective human antibodies against SARS-COV-2. Nature 584, 443-449.
[0343] Zuccarino-Catania, G. V., Sadanand, S., Weisel, F. J., Tomayko, M. M., Meng, H., Kleinstein, S. H., Good-Jacobson, K. L., and Shlomchik, M. J. (2014). CD80 and PD-L2 define functionally distinct memory B cell subsets that are independent of antibody isotype. Nat Immunol 15, 631-637.

[0344] Various modifications and variations of the described methods, pharmaceutical compositions, and kits of the invention will be apparent to those skilled in the art without departing from the scope and spirit of the invention. Although the invention has been described in connection with specific embodiments, it will be understood that it is capable of further modifications and that the invention as claimed should not be unduly limited to such specific embodiments. Indeed, various modifications of the described modes for carrying out the invention that are obvious to those skilled in the art are intended to be within the scope of the invention. This application is intended to cover any variations, uses, or adaptations of the invention following, in general, the principles of the invention and including such departures from the present disclosure come within known customary practice within the art to which the invention pertains and may be applied to the essential features herein before set forth.

The application's sequence listing, which the Patent Office published only in electronic form, follows.

SEQUENCE LISTING (12672 sequences)

SEQ ID NO: 1 - protein, 13 aa, Homo sapiens
CAKQWLANWFDPW

SEQ ID NO: 2 - protein, 25 aa, Homo sapiens
CARGRAGYYDFWSTSSLDNGGMDVW

SEQ ID NO: 3 - protein, 20 aa, Homo sapiens
CVKDVPSMYYIFWSGQGTYW

SEQ ID NO: 4 - protein, 20 aa, Homo sapiens
CAKDLPSRYYDFWSGQGNYW

SEQ ID NO: 5 - protein, 14 aa, Homo sapiens
CAREMATITGLDYW

SEQ ID NO: 6 - protein, 14 aa, Homo sapiens
CARVPPTDYHFDSW

SEQ ID NO: 7 - protein, 18 aa, Homo sapiens
CARDTSGYRNPGYGMDVW

SEQ ID NO: 8 - protein, 15 aa, Homo sapiens
CATGTFLAVPGFDFW

SEQ ID NO: 9 - protein, 22 aa, Homo sapiens
CARDLQRYGSGSSLGPNYFDYW

SEQ ID NO: 10 - protein, 21 aa, Homo sapiens
CARRAQYYYDSSGYYDAFDIW

SEQ ID NO: 11 - protein, 21 aa, Homo sapiens
CARDVFRYDSSGRPRYAFDIW

SEQ ID NO: 12 - protein, 13 aa, Homo sapiens
CARETRWNWIDSW

SEQ ID NO: 13 - protein, 13 aa, Homo sapiens
CARDLVDYGMDVW

SEQ ID NO: 14 - protein, 17 aa, Homo sapiens
CAKDGRRDGYNHALDNW

SEQ ID NO: 15 - protein, 17 aa, Homo sapiens
CAKGRESTSIGGWFDPW

SEQ ID NO: 16 - protein, 16 aa, Homo sapiens
CARTIVGGTNWYFDLW

SEQ ID NO: 17 - protein, 14 aa, Homo sapiens
CARRVMGSGWLDSW

SEQ ID NO: 18 - protein, 18 aa, Homo sapiens
CAKDMGNGFYYYYGLDVW

SEQ ID NO: 19 - protein, 23 aa, Homo sapiens
CAKDAPDVVLVPVPYYHYGLEVW

SEQ ID NO: 20 - protein, 18 aa, Homo sapiens
CARERSGSYYARVELGYW

SEQ ID NO: 21 - protein, 23 aa, Homo sapiens
CASSRPPIGQLVPGLDLDWFDPW

SEQ ID NO: 22 - protein, 12 aa, Homo sapiens
CARDSYRGGGIW

SEQ ID NO: 23 - protein, 18 aa, Homo sapiens
CARGPYYYDSGGYYLDYW

SEQ ID NO: 24 - protein, 13 aa, Homo sapiens
CARDMGGDVFDIW

SEQ ID NO: 25 - protein, 19 aa, Homo sapiens
CAAHITVFGIITGNWFDPW

SEQ ID NO: 26 - protein, 15 aa, Homo sapiens
CARESAAAWGWLDPW

SEQ ID NO: 27 - protein, 17 aa, Homo sapiens
CAKDLGYSYGSEIFDYW

SEQ ID NO: 28 - protein, 16 aa, Homo sapiens
CARARSGSYYSAIDYW

SEQ ID NO: 29 - protein, 18 aa, Homo sapiens
CAKEAYFTAWLHFPFDPW

SEQ ID NO: 30 - protein, 17 aa, Homo sapiens
CARDRDDYGDPYGMDVW

SEQ ID NO: 31 - protein, 14 aa, Homo sapiens
CTTGPTVRGVSVYW

SEQ ID NO: 32 - protein, 13 aa, Homo sapiens
CARSVGYDAFDVW

SEQ ID NO: 33 - protein, 20 aa, Homo sapiens
CARDLMDYDILTGYYPAGYW

SEQ ID NO: 34 - protein, 21 aa, Homo sapiens
CARGPPPPAITMIVVTTVWTS

SEQ ID NO: 35 - protein, 16 aa, Homo sapiens
CARLETTVTTDWFDPW

SEQ ID NO: 36 - protein, 18 aa, Homo sapiens
CTIGNWHGSGNNIMHDYW

SEQ ID NO: 37 - protein, 17 aa, Homo sapiens
CARDRWFGKLEGSFDVW

SEQ ID NO: 38 - protein, 17 aa, Homo sapiens
CARDTVVVVGAHAFDIW

SEQ ID NO: 39 - protein, 22 aa, Homo sapiens
CARPQVLYYYGSGSYSHWFDPW

SEQ ID NO: 40 - protein, 14 aa, Homo sapiens
CARGSGWYVGFDYW

SEQ ID NO: 41 - protein, 24 aa, Homo sapiens
CARVTTIPQYDYGDYYYYYGMDVW

SEQ ID NO: 42 - protein, 9 aa, Homo sapiens
CARDLGQDW

SEQ ID NO: 43 - protein, 20 aa, Homo sapiens
CARDIFGSGSPPSGVAFDYW

SEQ ID NO: 44 - protein, 11 aa, Homo sapiens [sequence omitted]

SEQ ID NO: 45 - protein, 25 aa, Homo sapiens
CARVKEWGSYYSDSGSHGKNYFDYW

SEQ ID NO: 46 - protein, 23 aa, Homo sapiens
CARDGYSSSFIPGPRNYYGMDVW

SEQ ID NO: 47 - protein, 28 aa, Homo sapiens
CARPRGRLITFGGLIVTTLDYYYGMGVW

SEQ ID NO: 48 - protein, 16 aa, Homo sapiens
CATDKADTSWWEFDPW

SEQ ID NO: 49 - protein, 15 aa, Homo sapiens
CARFSKLYQWSFDIW

SEQ ID NO: 50 - protein, 15 aa, Homo sapiens
CARGTHYGSGSYYHW

SEQ ID NO: 51 - protein, 13 aa, Homo sapiens
CVRDLDYYGMDVW

SEQ ID NO: 52 - protein, 14 aa, Homo sapiens
CARDLEVVGAMDVW

SEQ ID NO: 53 - protein, 12 aa, Homo sapiens
CAREGPHGMDVW

SEQ ID NO: 54 - protein, 16 aa, Homo sapiens
CARGPVRGVITHFDYW

SEQ ID NO: 55 - protein, 15 aa, Homo sapiens
CVKSSSGWYLRLGYW

SEQ ID NO: 56 - protein, 16 aa, Homo sapiens
CAREGRRGQWSWFDPW

SEQ ID NO: 57 - protein, 16 aa, Homo sapiens
CAGSPVRGVITHFDYW

SEQ ID NO: 58 - protein, 20 aa, Homo sapiens
CARVDRRYCIITSCYIFDYW

SEQ ID NO: 59 - protein, 15 aa, Homo sapiens
CARGRDGYYYGMDVW

SEQ ID NO: 60 - protein, 17 aa, Homo sapiens
CARAPPFSSSSIGVDYW

SEQ ID NO: 61 - protein, 22 aa, Homo sapiens
CAKDHCATTNCFEYLYFGMGVW

SEQ ID NO: 62 - protein, 16 aa, Homo sapiens
CARDLTYYGSNGYTNW

SEQ ID NO: 63 - protein, 16 aa, Homo sapiens
CASSPVRGVITQFDYW

SEQ ID NO: 64 - protein, 15 aa, Homo sapiens
CARHDGSKVTTNDYW

SEQ ID NO: 65 - protein, 15 aa, Homo sapiens
CARDRSGSYYRPGYW

SEQ ID NO: 66 - protein, 15 aa, Homo sapiens
CAQTGGSYFGPFDYW

SEQ ID NO: 67 - protein, 17 aa, Homo sapiens
CAKDILYGDYVGGFAYW

SEQ ID NO: 68 - protein, 13 aa, Homo sapiens
CAIPYSSVTFDCW

SEQ ID NO: 69 - protein, 16 aa, Homo sapiens
CARDSQPHYYYGVDVW

SEQ ID NO: 70 - protein, 16 aa, Homo sapiens
CAKKKDDRAEAVFDYW

SEQ ID NO: 71 - protein, 15 aa, Homo sapiens
CARGAAMVKELFDYW

SEQ ID NO: 72 - protein, 14 aa, Homo sapiens
CARVRWLQGGIDYW

SEQ ID NO: 73 - protein, 22 aa, Homo sapiens
CARGGRYCSSTTCYSGVGMDVW

SEQ ID NO: 74 - protein, 15 aa, Homo sapiens
CAKSNSSGLTPFDHW

SEQ ID NO: 75 - protein, 12 aa, Homo sapiens
CARRDGSYFDYW

SEQ ID NO: 76 - protein, 20 aa, Homo sapiens
CARHVSDGQSIGWLYYFDCW

SEQ ID NO: 77 - protein, 21 aa, Homo sapiens
CARLAPFGERRVDQYYLMDVW

SEQ ID NO: 78 - protein, 13 aa, Homo sapiens [sequence omitted]

SEQ ID NO: 79 - protein, 20 aa, Homo sapiens
CARADRGYCTITDCFIFNYW

SEQ ID NO: 80 - protein, 24 aa, Homo sapiens
CTRGAHYDFWRGYYTDDHHYMDVW

SEQ ID NO: 81 - protein, 15 aa, Homo sapiens
CVRGEGGPHDAFDIW

SEQ ID NO: 82 - protein, 14 aa, Homo sapiens
CVRCGYDDWYFDVW

SEQ ID NO: 83 - protein, 18 aa, Homo sapiens
CGRGPTTAKSGVEWFDPW

SEQ ID NO: 84 - protein, 16 aa, Homo sapiens
CAKDMGWNVFQGLDVW

SEQ ID NO: 85 - protein, 15 aa, Homo sapiens
CARSWSAYYNWFDPW

SEQ ID NO: 86 - protein, 23 aa, Homo sapiens
CTTDRHVRGTYWGAYYYYGMDVW

SEQ ID NO: 87 - protein, 23 aa, Homo sapiens
CARAVRISSGYGLYGDSDYFDYW

SEQ ID NO: 88 - protein, 12 aa, Homo sapiens [sequence omitted]

SEQ ID NO: 89 - protein, 18 aa, Homo sapiens
CARPLFYCSGGSCLTGYW

SEQ ID NO: 90 - protein, 16 aa, Homo sapiens
CARGRRDGNDLAPDYW

SEQ ID NO: 91 - protein, 16 aa, Homo sapiens
CVKDLGAYASGRLADW

SEQ ID NO: 92 - protein, 20 aa, Homo sapiens
CARTQWGYNYGSHFFYMDVW

SEQ ID NO: 93 - protein, 11 aa, Homo sapiens
CQQSESSPYTF

SEQ ID NO: 94 - protein, 13 aa, Homo sapiens [sequence omitted]

SEQ ID NO: 95 - protein, 12 aa, Homo sapiens
CQQYNTYSPITF

SEQ ID NO: 96 - protein, 12 aa, Homo sapiens [sequence omitted]

SEQ ID NO: 97 - protein, 11 aa, Homo sapiens
CQQSYSTPRTF

SEQ ID NO: 98 - protein, 12 aa, Homo sapiens [sequence omitted]

SEQ ID NO: 99 - protein, 12 aa, Homo sapiens [sequence omitted]

SEQ ID NO: 100 - protein, 12 aa, Homo sapiens
CQSYDSGRQGVF

SEQ ID NO: 101 - protein, 10 aa, Homo sapiens
CQQLDTYPRF

SEQ ID NO: 102 - protein, 10 aa, Homo sapiens [sequence omitted]

SEQ ID NO: 103 - protein, 11 aa, Homo sapiens [sequence omitted]

SEQ ID NO: 104 - protein, 11 aa, Homo sapiens [sequence omitted]

SEQ ID NO: 105 - protein, 12 aa, Homo sapiens [sequence omitted]

SEQ ID NO: 106 - protein, 10 aa, Homo sapiens [sequence omitted]

SEQ ID NO: 107 - protein, 11 aa, Homo sapiens
CQHYNAYPDHL

SEQ ID NO: 108 - protein, 12 aa, Homo sapiens
CASWDDSVNGVF

SEQ ID NO: 109 - protein, 12 aa, Homo sapiens [sequence omitted]

SEQ ID NO: 110 - protein, 12 aa, Homo sapiens
CMQTIHLPRVTF

SEQ ID NO: 111 - protein, 11 aa, Homo sapiens [sequence omitted]

SEQ ID NO: 112 - protein, 12 aa, Homo sapiens [sequence omitted]

SEQ ID NO: 113 - protein, 13 aa, Homo sapiens [sequence omitted]

SEQ ID NO: 114 - protein, 11 aa, Homo sapiens [sequence omitted]

SEQ ID NO: 115 - protein, 11 aa, Homo sapiens [sequence omitted]

SEQ ID NO: 116 - protein, 13 aa, Homo sapiens
CQQLNSSPPKLTF

SEQ ID NO: 117 - protein, 14 aa, Homo sapiens
CQSYASSLSVHVVF

SEQ ID NO: 118 - protein, 11 aa, Homo sapiens [sequence omitted]

SEQ ID NO: 119 - protein, 10 aa, Homo sapiens [sequence omitted]

SEQ ID NO: 120 - protein, 11 aa, Homo sapiens [sequence omitted]

SEQ ID NO: 121 - protein, 10 aa, Homo sapiens [sequence omitted]

SEQ ID NO: 122 - protein, 11 aa, Homo sapiens
CYSVADNMGVF

SEQ ID NO: 123 - protein, 11 aa, Homo sapiens [sequence omitted]

SEQ ID NO: 124 - protein, 12 aa, Homo sapiens [sequence omitted]

SEQ ID NO: 125 - protein, 12 aa, Homo sapiens
CQQYFSTPPSTF

SEQ ID NO: 126 - protein, 11 aa, Homo sapiens [sequence omitted]

SEQ ID NO: 127 - protein, 11 aa, Homo sapiens
CSSYTRGNYVF

SEQ ID NO: 128 - protein, 11 aa, Homo sapiens
CHQYYLVPFTF

SEQ ID NO: 129 - protein, 12 aa, Homo sapiens
CCSYATGSSVVF

SEQ ID NO: 130 - protein, 11 aa, Homo sapiens [sequence omitted]

SEQ ID NO: 131 - protein, 14 aa, Homo sapiens
CQSYDSSLSAVWVF

SEQ ID NO: 132 - protein, 13 aa, Homo sapiens [sequence omitted]

SEQ ID NO: 133 - protein, 12 aa, Homo sapiens [sequence omitted]

SEQ ID NO: 134 - protein, 11 aa, Homo sapiens [sequence omitted]

SEQ ID NO: 135 - protein, 14 aa, Homo sapiens
CSSHTSSSSPHVVF

SEQ ID NO: 136 - protein, 11 aa, Homo sapiens [sequence omitted]

SEQ ID NO: 137 - protein, 12 aa, Homo sapiens [sequence omitted]

SEQ ID NO: 138 - protein, 12 aa, Homo sapiens
CQQFNNWPRGTF

SEQ ID NO: 139 - protein, 11 aa, Homo sapiens [sequence omitted]

SEQ ID NO: 140 - protein, 11 aa, Homo sapiens [sequence omitted]

SEQ ID NO: 141 - protein, 13 aa, Homo sapiens [sequence omitted]

SEQ ID NO: 142 - protein, 15 aa, Homo sapiens
CQQYNNWPPGLKITF

SEQ ID NO: 143 - protein, 13 aa, Homo sapiens
CQQLNSSPGSLTF

SEQ ID NO: 144 - protein, 11 aa, Homo sapiens [sequence omitted]

SEQ ID NO: 145 - protein, 11 aa, Homo sapiens [sequence omitted]

SEQ ID NO: 146 - protein, 13 aa, Homo sapiens
CSSYTSSSTSSVF

SEQ ID NO: 147 - protein, 10 aa, Homo sapiens [sequence omitted]

SEQ ID NO: 148 - protein, 12 aa, Homo sapiens [sequence omitted]

SEQ ID NO: 149 - protein, 12 aa, Homo sapiens [sequence omitted]

SEQ ID NO: 150 - protein, 11 aa, Homo sapiens [sequence omitted]

SEQ ID NO: 151 - protein, 10 aa, Homo sapiens [sequence omitted]

SEQ ID NO: 152 - protein, 11 aa, Homo sapiens [sequence omitted]

SEQ ID NO: 153 - protein, 10 aa, Homo sapiens [sequence omitted]

SEQ ID NO: 154 - protein, 11 aa, Homo sapiens
CQQYNTYFWTF

SEQ ID NO: 155 - protein, 12 aa, Homo sapiens
CSSYTSRSPWVF

SEQ ID NO: 156 - protein, 11 aa, Homo sapiens
CQQRRDWPGTF

SEQ ID NO: 157 - protein, 12 aa, Homo sapiens
CQQYGNLPPLTF

SEQ ID NO: 158 - protein, 13 aa, Homo sapiens
CYSYTTSSTPYVF

SEQ ID NO: 159 - protein, 12 aa, Homo sapiens [sequence omitted]

SEQ ID NO: 160 - protein, 11 aa, Homo sapiens
CQQYGSSRPTF

SEQ ID NO: 161 - protein, 13 aa, Homo sapiens
CSSYTKTRTLYVF

SEQ ID NO: 162 - protein, 13 aa, Homo sapiens [sequence omitted]

SEQ ID NO: 163 - protein, 11 aa, Homo sapiens [sequence omitted]

SEQ ID NO: 164 - protein, 11 aa, Homo sapiens [sequence omitted]

SEQ ID NO: 165 - protein, 13 aa, Homo sapiens [sequence omitted]

SEQ ID NO: 166 - protein, 11 aa, Homo sapiens [sequence omitted]

SEQ ID NO: 167 - protein, 11 aa, Homo sapiens
CQAGDSDTVLF

SEQ ID NO: 168 - protein, 10 aa, Homo sapiens
CQVWDRSSVF

SEQ ID NO: 169 - protein, 11 aa, Homo sapiens
CMQSTQLPWTF

SEQ ID NO: 170 - protein, 13 aa, Homo sapiens [sequence omitted]

SEQ ID NO: 171 - protein, 11 aa, Homo sapiens [sequence omitted]

SEQ ID NO: 172 - protein, 13 aa, Homo sapiens [sequence omitted]

SEQ ID NO: 173 - protein, 13 aa, Homo sapiens
CQVWDSSRDLRVF

SEQ ID NO: 174 - protein, 11 aa, Homo sapiens [sequence omitted]

SEQ ID NO: 175 - protein, 14 aa, Homo sapiens
CQSFDSSLSGFYVF

SEQ ID NO: 176 - protein, 13 aa, Homo sapiens
CTSYRSSSLQGVF

SEQ ID NO: 177 - protein, 12 aa, Homo sapiens [sequence omitted]

SEQ ID NO: 178 - protein, 14 aa, Homo sapiens [sequence omitted]

SEQ ID NO: 179 - protein, 13 aa, Homo sapiens [sequence omitted]

SEQ ID NO: 180 - protein, 13 aa, Homo sapiens [sequence omitted]

SEQ ID NO: 181 - protein, 12 aa, Homo sapiens [sequence omitted]

SEQ ID NO: 182 - protein, 13 aa, Homo sapiens [sequence omitted]

SEQ ID NO: 183 - protein, 11 aa, Homo sapiens [sequence omitted]

SEQ ID NO: 184 - protein, 13 aa, Homo sapiens
CAAWDASLSGYVF

SEQ ID NO: 185 - protein, 129 aa, Homo sapiens
TGVHSQVQLQQSGPGLVKPSQTLSLTCAISGDSVSSKNAAWNWIRQSPSRGLEWLGTTYYRSKWYNDYAVSVKGRIAINPDTSKNQFSLQLHSVTPEDTAVYYCAKQWLANWFDPWGQGTQVTVSSAST

SEQ ID NO: 186 - protein, 138 aa, Homo sapiens
TGVHSQVQLVQSGAEVKKPGASVKVSCKASGYTFTSYDINWVRQATGQGLEWMGWMNPNSGNTGYAQKFQGRVTMTRNTSISTAYMELSSLTSEDTAVYYCARGRAGYYDFWSTSSLDNGGMDVWGQGTTVTVSSAST

SEQ ID NO: 187 - protein, 133 aa, Homo sapiens
TGVHSEVHLVESGGDLVHPGGSLRLSCVASGFTFTDYAMTWVRQAPGKGLEWVSTISGNGGTTNTADSVKGRFTISRDNSKNTLYLEMSSLSDEDTAIYYCVKDVPSMYYIFWSGQGTYWGQGTLVTVSSAST

SEQ ID NO: 188 - protein, 133 aa, Homo sapiens
TGVHSEVQLVESGGGLVQPGGSLRLSCAASGFTFSSYAMSWVRQAPGKGLEWVSTISNSGGTTNYADSVKGRFTISRDNSKNTLFLQMNSLRAEDTAVYYCAKDLPSRYYDFWSGQGNYWGQGTLVTVSSAST

SEQ ID NO: 189 - protein, 128 aa, Homo sapiens
TGVHSQVTLRESGPALVKPTQTLTLTCTFSGFSLSTSGMCVSWIRQPPGKALEWLARIDWDDDKYYSTSLRTRLTISKDTSKNQVVLTMTNMDPVDTATYYCAREMATITGLDYWGQGTLVTVSSAST

SEQ ID NO: 190 - protein, 128 aa, Homo sapiens
TGVHSQVTLRESGPALVKPTQTLTLTCTFSGFSLSTSGMCVSWIRQPPGKALEWLALIDWTDDKYYSTSLKTRLTISKDSSKNEVVLTMTNMDPVDTATYYCARVPPTDYHFDSWGQGTLVTVSSAST

SEQ ID NO: 191 - protein, 131 aa, Homo sapiens
TGVHSQVQLVQSGAEVKKPGASVKVSCKASGYTFTSYGISWVRQAPGQGLEWMGWISAYNGNTNYAQKLQGRVTMTTDTSTSTAYMELRSLRSDDTAVYYCARDTSGYRNPGYGMDVWGQGTTVTVSSAST

SEQ ID NO: 192 - protein, 128 aa, Homo sapiens
TGVHSEVQLVQSGAEVKKPGESLKISCKTSGYSFASYWIGWVRQMPGKGLEWMGIIYPGDSDTIYTPPFQGQVTISADTSTRTASLEWRSLRASDSAIYYCATGTFLAVPGFDFWGQGTLVSVSSAST

SEQ ID NO: 193 - protein, 135 aa, Homo sapiens
TGVHSEVQLVESGGGLAQPGGSLRLSCAASGFTFSTYSMNWVRQAPGKGLEWVSFISRSSNTIYYADSVKGRFTISRDNAKNSLYLQMNSLRDEDTAVYYCARDLQRYGSGSSLGPNYFDYWGQGTVVTVSSAST

SEQ ID NO: 194 - protein, 135 aa, Homo sapiens
TGVHSQLHLQESGPGLVKPSETLSLTCTASGGSISSSSYYWGWIRQPPGKGLEWIGSVYYSGRTYYNPSLKSRVTISVDTSKNQFSLKLSSVTAADTAVYYCARRAQYYYDSSGYYDAFDIWGQGTTVTVSSAST

SEQ ID NO: 195 - protein, 133 aa, Homo sapiens
TGVHSEVQLVESGGGLVQPGGSLRLSCAASGFTFSTYDMHWVRQATGKGLEWVSAIGTAGDTYYPGSVQGRFTISRENAKNSLYLQMNSLRAGDTAVYYCARDVFRYDSSGRPRYAFDIWGQGTMVTVSSAST

SEQ ID NO: 196 - protein, 125 aa, Homo sapiens
TGVHSQVQLQESGPGLVKPSETLSLTCTVSGGSMSSDYWSWIRQPPGKGLEWIGYIYYRGSTNLNPSLQSRLTMSVDTSKNQFSLKLSSVTAADTAVYYCARETRWNWIDSWGQGTPVTVSSAST

SEQ ID NO: 197 - protein, 125 aa, Homo sapiens
TGVHSEVQLVESGGGLIQPGGSLRLSCAASGLTVNSNYMTWVRQAPGKGLEWVSVIYSGGSTFYADSVKGRFTISRDNSKNTLYLQMNSLRAEDTAVYYCARDLVDYGMDVWGQGTTVTVSSAST

SEQ ID NO: 198 - protein, 130 aa, Homo sapiens
TGVHSDVQLVESGGVVVQPGGSLRLACAASGFTFDDYAMHWVRQAPGKGLEWVSLITRDGGSTHYADSVKGRFTISRDNSKNSLYLQMNSLRLEDTAFYYCAKDGRRDGYNHALDNWGQGTLVTVSSAST

SEQ ID NO: 199 - protein, 130 aa, Homo sapiens
TGVHSQVQLVESGGGVVQPGRSLRLSCAASGFSFSSHVMHWVRQAPGKGLEWVAVISYDGSNKFYADSVKGRFTISRDSSKNTVFLQMNSLRDEDTAMYYCAKGRESTSIGGWFDPWGQGTLVTVSSAST

SEQ ID NO: 200 - protein, 130 aa, Homo sapiens
TGVHSQVTLRESGPSLVKPTQTLTLTCTFSGFSLSTSGMCVSWIRQPPGKALEWLARIDWDDDKFYSTSLKTRLTISKGTSRNQVVLTMTNMGPVDTATYYCARTIVGGTNWYFDLWGRGTLVTVSSAST

SEQ ID NO: 201 - protein, 128 aa, Homo sapiens
TGVHSQLQLQESGPGLVKPSETLSLTCTVSGGSISSSSYYWGWIRQPPGKGLEWIGNFYYIGSTNYNPSLKSRVTISVDTSRNQFSLKLTSVTAADTAVYYCARRVMGSGWLDSWGQGTLVTVSSAST

SEQ ID NO: 202 - protein, 131 aa, Homo sapiens
TGVHSEVQLVESGGGLVQPGGSLRLACAVSGLILDDYALHWVRLAPGKGLEWVSGINWNSGTIHYADSVRGRFTTSRDNAKRSLYLQMNSLRPEDTALYYCAKDMGNGFYYYYGLDVWGQGTSVTVSSAST

SEQ ID NO: 203 - protein, 136 aa, Homo sapiens
TGVHSEVLLLESGGGLVQPGGSLRLSCAASGFPFGSYAMSWVRQAPGKGLEWVSVISGSADTTYYADSVKGRFTISRDNSKNTLYLQMNSLGAEDTAVYYCAKDAPDVVLVPVPYYHYGLEVWGQGTTVTVSSAST

SEQ ID NO: 204 - protein, 131 aa, Homo sapiens
TGVHSQVQLVESGGGVVQPGRSLRLSCAASGFTFRTYDMHWVRQAPGKGLEWVAVISYDGSIKYFADSVKDRFTISRDNSQSTLYLQMNSLRAEDTAVYYCARERSGSYYARVELGYWGQGTLVTVSSAST

SEQ ID NO: 205 - protein, 135 aa, Homo sapiens
TGVHSEVQLVESGGGLVQPGGSLRLSCSVSGFTVSSNYMNWVRQAPGKGLEWVSVIYPGGSTFYPDSVKGRFTISRDDSKNTLYLQMNSLRPEDTAAYYCASSRPPIGQLVPGLDLDWFDPWGQGTLVIVSSAST

SEQ ID NO: 206 - protein, 124 aa, Homo sapiens
TGVHSEVQLVESGGGLIQPGGSLRLSCAASGLTVSSNYMSWVRQAPGKGLEWVSVMYPGGSTYYADSVKGRFTISRDNSKNTLYLQMNSLRAEDTAVYYCARDSYRGGGIWGQGTMVTVSSAST

SEQ ID NO: 207 - protein, 131 aa, Homo sapiens
TGVHSQVQLVQSGAEVKKPGSSVKVSCKASGGTFSSYAISWVRQAPGQGLEWMGRIISMFGIANNAQKFQGRLTITADTSTSTAYMELSSLRSEDTAVYYCARGPYYYDSGGYYLDYWGQGTLVTVSSAST

SEQ ID NO: 208 - protein, 125 aa, Homo sapiens
TGVHSEVQLVESGGGLIQPGGSLRLSCAASGFIVSRNYMSWVRQAPGKGLEWVSVIYSGGSTFYADAVKGRFTISRDNSKNTLYLQMNSLRAEDTAVYYCARDMGGDVFDIWGQGTMVTVSSAST

SEQ ID NO: 209 - protein, 133 aa, Homo sapiens
TGVHSQLQLQESGPGLVKPSETLSLTCTVSGGSIYSSDYYWGWIRQPPGKGLEWIGSMHYSGSTYHSPSLNSRVTISVDPSTNQLSLRLSSATAADTAVYYCAAHITVFGIITGNWFDPWGQGTLVTVSSAST

SEQ ID NO: 210 - protein, 127 aa, Homo sapiens
TGVHSEVQLVESGGGLIQPGGSLRLSCAASGFNLSGNYMSWVRQAPGQGLEWVSLIYAGGYAYYADSVKGRFTISRDNSKNMFYLQMNSLRAEDTAIYYCARESAAAWGWLDPWGQGTLVTVSSAST

SEQ ID NO: 211 - protein, 130 aa, Homo sapiens
TGVHSEVQLVESGGGLVQPGGSQRLSCAASGFTFSSYVINWVRQAPGKGLEWVSAISGSGDITYYADSVKGRFTMSRDNSKKTLYLQMNSLRAEDTAVYYCAKDLGYSYGSEIFDYWGQGTLVTVSSAST

SEQ ID NO: 212 - protein, 130 aa, Homo sapiens
ATGVHSQVRLVESGGGVVQPGRSLRLSCAVSGFTFSSYAMNWVRQAPGKGLEWVTVISYDGSNKYYADSVKGRFTISRDNSKNTLYLQMNSLRPDDTAVYYCARARSGSYYSAIDYWGQGTLVTVSSAST

SEQ ID NO: 213 - protein, 132 aa, Homo sapiens
ATGVHSEVQLLESGGSLVQPGGSLRLSCAASGFTFSSYAMSWVRQAPGKGLEWVSAISGSGGSTYYADSVKGRFTISRDNSKNTLYLQMNSLRAEDTAVYYCAKEAYFTAWLHFPFDPWGQGTLVTVSSAST

SEQ ID NO: 214 - protein, 137 aa, Homo sapiens
ATGVHSHVQLVESGGGVVQPGRSLRISCAASGFTFSSYTMHWVRQAPGKGLEWVAVISKEADISYDGNNKYYADSVKGRFTISRDNSKNTLYLQLNSLRTEDTAVYYCARDRDDYGDPYGMDVWGQGTTVTVSSAST

SEQ ID NO: 215 - protein, 130 aa, Homo sapiens
ATGVHSEVQLVESGGGLVKPGGSLRLSCAASEFTFSNVWMSWVRQAPGKGLEWVGRIKSKTDGGTTDYAAPVKGRFTISRDDSKNTLYLQMNSLKTEDTGVYYCTTGPTVRGVSVYWGQGTLVTVSSAST

SEQ ID NO: 216 - protein, 127 aa, Homo sapiens
ATGVHSQVQLMQSGAEVKKPGASVKVSCKASGDSFTDYYVHWVRQAPGQGLEWMGWISPYSGGTNYAPKFRGRVTMTRDTSITTAHMELGRLRSDDTAVYFCARSVGYDAFDVWGPGTMVTVSSAST

SEQ ID NO: 217 - protein, 134 aa, Homo sapiens
ATGVHSEVQLVESGGGLVKPGGSLRLSCAASGFTFSSYTMNWVRQAPGKGLEWVSSISGAPNYIYYADSVKGRFTISRDNAKNSLSLQMNSLRAEDTAVYYCARDLMDYDILTGYYPAGYWGQGTLVTVSSAST

SEQ ID NO: 218 - protein, 136 aa, Homo sapiens
ATGVHSQVQLVQSGAEVKKPGASVKVSCKASGYTFTGYYMHWVRQAPGQGLEWMGWINLNSGGTNYAQKFQGRVTMTRDTSISTAYMELSRLRSDDTAVYYCARGPPPPAITMIVVTTVWTSWGQGTTVTVSSAST

SEQ ID NO: 219 - protein, 130 aa, Homo sapiens
ATGVHSEVQLVQSGAEVKKPGESLRISCKGSGYSFTSYWISWVRQMPGKGLEWMGRIDPSDSYTNYSPSFQGHVTISADKSISTAYLQWSSLKASDTAMYYCARLETTVTTDWFDPWGQGTLVTVSSAST

SEQ ID NO: 220 - protein, 134 aa, Homo sapiens
ATGVHSEVQLVESGGGLAQPGRSLRLSCRCSGFRFGDYAVNWVRQFPGKGPEWIGFIRTKTFGAATQYAASVKGRFTISRDDSQSVAYLQMNRLITDDTAVYYCTIGNWHGSGNNIMHDYWGQGTLVSVSSAST

SEQ ID NO: 221 - protein, 131 aa, Homo sapiens
ATGVHSQVQLVQSGAEVKKPGASVKVSCKASGYIFTGYYIHWVRQAPGQGLEWMGWINPISGGTNYAQKFQGRVTATRDTSITTAYMELTSLTSDDTAVFYCARDRWFGKLEGSFDVWGQGTMVTVSSAST

SEQ ID NO: 222 - protein, 130 aa, Homo sapiens
ATGVHSQVQLQQWGAGLLKPSETLSLTCAVYDESFSDYYWTWIRQPPGKGLEWIGEINHSGSTNYNPSLKSRVTISVDTSKNQFSLRLSSVTAADTAVYYCARDTVVVVGAHAFDIWGQGTMVTVSSAST

SEQ ID NO: 223 - protein, 137 aa, Homo sapiens
ATGVHSQLQLQESGPGLVKPSETLSLTCIVSGGSISSSSYYWGWIRQPPGKGLEWIGTIYNSGSTHYNPSLRSRVTISVDTSKSHFSLKLSSVTAADTAVYYCARPQVLYYYGSGSYSHWFDPWGQGTLVTVSSAST

SEQ ID NO: 224 - protein, 128 aa, Homo sapiens
ATGVHSEVQLVESGGGLVQPGGSLRLSCAASGFTFSSYEMNWVRQAPGKGLEWVSYISSSGSTIYYADSVKGRFTISRDNAKNSLYLQVNSLRAEDTAVYYCARGSGWYVGFDYWGQGTLVTVSSAST

SEQ ID NO: 225 - protein, 138 aa, Homo sapiens
ATGVHSQVQLVQSGAEVKKPGASVKVSCKASGYTFTGYYIHWVRQAPGQGLEWMGWINPNSGGTNYAQKFQGRVTMTRDTSISTAYMELSRLRSDDTAVYFCARVTTIPQYDYGDYYYYYGMDVWGQGTTVTVSSAST

SEQ ID NO: 226 - protein, 122 aa, Homo sapiens
ATGVHSQVQLQESGPGLVKPSETLSLTCTVSGGSISSYYWSWIRQPPGKGLDWIGYIYYSGSTNYNPSLKSRVTISVDTSKNQFSLKLSSVTAADTAVYYCARDLGQDWGQGTLVTVSSAST

SEQ ID NO: 227 - protein, 135 aa, Homo sapiens
ATGVHSQVQLQESGPGLVKPSQTLSLTCTVSGGSISSGSSYWSWIRQPAGKGLEWIGRIYTSGSTNYNPSLKSRVTISVDTSKNQFSLKLSSVTAADTAVYYCARDIFGSGSPPSGVAFDYWGQGTLVTVSSAST

SEQ ID NO: 228 - protein, 124 aa, Homo sapiens
ATGVHSEVQLVESGGGLIQPGGFLRLSCAASGLTVSSNYMNWVRQAPGKGLEWVSVIYSGGSTYYADSVKGRFTISRDNSKNTLYLQMNSLRAEDTAVYYCARESYGMDVWGQGTTVTVSSAST

SEQ ID NO: 229 - protein, 139 aa, Homo sapiens
ATGVHSQVQLVQSGAEVKKPGSSVKVSCKASGGTFSNYAVSWVRQAPGQGLEWMGGIISIFATANYAQKFQGRVTITADESTSTAYMELSSLRSEDTAVYYCARVKEWGSYYSDSGSHGKNYFDYWGQGTLVTVSSAST

SEQ ID NO: 230 - protein, 137 aa, Homo sapiens
ATGVHSQVQLVQSGAEVKKPGASVKVSCKASGYTFTGYSMHWVRQAPGQGLEWMGWINPNSGGTNYAQKFQGRVTMTRDTSISTTYMELSRLRSDDTAVYYCARDGYSSSFIPGPRNYYGMDVWGQGTTVTVSSAST

SEQ ID NO: 231 - protein, 142 aa, Homo sapiens
ATGVHSQVHLVQSGAEVKKPGASVKVSCKASGYTFTSYGINWVRQAPGQGLEWMGWISAYNGNTNYAQKLQGRVTMTTDTSTSTAYMELRSLRSDDTAVYYCARPRGRLITFGGLIVTTLDYYYGMGVWGQGTTVTVSSAST

SEQ ID NO: 232 - protein, 130 aa, Homo sapiens
ATGVHSQVQLVQSGPEVKKPGASVRVSCKTSGHTFTDYWIQWVRQAPGQGLEWMGWIELSTGGTNYAPKFQGRVAMSSDTSIRTAYMDLWSLTSDDTALYYCATDKADTSWWEFDPWGQGTLVTVSSAST

SEQ ID NO: 233 - protein, 128 aa, Homo sapiens
ATGVHSEVQLVESGGGLVQPGASLRLSCAASGFTVSNNYMSWVRQAPGKGLEWVSVIYSGGSTYYADSVKGRFTISRHNSENTLYLQMNSLRAEDTAVYYCARFSKLYQWSFDIWGQGTMVTVSSAST

SEQ ID NO: 234 - protein, 128 aa, Homo sapiens
ATGVHSEVQLVESGGGLVQPGGSLRLSCAASGFTVSSNYMSWVRQAPGKGLEWVSVIYSGGSTYYADSVKGRFTISRHNSKNTLYLQMNSLRAEDTAVYYCARGTHYGSGSYYHWGQGTLVTVSSAST

SEQ ID NO: 235 - protein, 126 aa, Homo sapiens
ATGVHSEVQLVESGGGLIQPGGSLRLSCAASGLTVSSNYMNWVRQAPGKGLEWVSVIYSGGSTFYADSVKGRFTISRDNSKNTLFLQMNSLRAEDTAVYYCVRDLDYYGMDVWGQGTTVTVSSAST

SEQ ID NO: 236 - protein, 127 aa, Homo sapiens
ATGVHSEVQLVESGGGLIQPGGSLRLSCAASGITVVRNYMTWVRQAPGKGLEWVSVIYSGGTTYYADSVKGRFTISRDNSKNTMYLQMNSLRAEDTAIYYCARDLEVVGAMDVWGQGTTVTVSSAST

SEQ ID NO: 237 - protein, 125 aa, Homo sapiens
ATGVHSEVQLVESGGGLIQPGGSLRLSCAASGVIVSSNYMSWVRQAPGKGLEWVSVIYSGGSTYYADSVKGRFTISRDKSKNTLYLQMNSLRAEDTAVYYCAREGPHGMDVWGQGTTVTVSSAST

SEQ ID NO: 238 - protein, 129 aa, Homo sapiens
ATGVHSEVQLVESGGGLVQPGGSLRLSCAASGFTILSNYMSWVRQAPGKGLEWVSVIYSGGSTYYADSVKGRFTISRHNSKNTLFLQMNSLRVEDTAVYYCARGPVRGVITHFDYWGQGTLVTVSSAST

SEQ ID NO: 239 - protein, 129 aa, Homo sapiens
ATGVHSQVQLVESGGGVVRPGRSLRLSCAASGFTFSTYGMHWVRQAPGKGLEWVAIISYDGNNKYYTDSVKGRFTISRDNSKNMVYLQMNSLRAEDTAVYYCVKSSSGWYLRLGYWGRGTLVTVSSAST

SEQ ID NO: 240 - protein, 129 aa, Homo sapiens
ATGVHSEVQLVESGGGLIQAGGSLRLSCTASGFSVSGNYMNWVRQAPGQGLEWVSVIYTDDTTYYPDSVKGRFTISRDNSKNTLYLQMNSLRAEDTAVYYCAREGRRGQWSWFDPWGQGTLVTVSSAST

SEQ ID NO: 241 - protein, 129 aa, Homo sapiens
ATGVHSEVQLVESGGGLIQPGGSLRLSCTASTFTVSSNYMSWVRQAPGKGLEWVSVIYTGGSTYYADSVKGRFTISRDNSKNTLYLQVNSLRAEDTAVYYCAGSPVRGVITHFDYWGQGTLVTVSSAST

SEQ ID NO: 242 - protein, 135 aa, Homo sapiens
ATGVHSQVQLQESGPGLVKPSETLSLTCIVSGGSVSSSSYYWSWIRQPPGKGLEWIGYVDYSGSTNYNPSLKSRVTMSVDTSKNQFSLRLSSVTAADTAMYYCARVDRRYCIITSCYIFDYWGQGTLVTVSSAST

SEQ ID NO: 243 - protein, 129 aa, Homo sapiens
ATGVHSQVQLVESGGGVVQPGRSLRLSCAASGFTFSSYAMNWVRQAPGKGLEWVAVISYDGGNKYYADSVKGRFTISRDNSKNTLYLQMNSLRAEDTAVYYCARGRDGYYYGMDVWGQGTTVTVSSAST

SEQ ID NO: 244 - protein, 131 aa, Homo sapiens
ATGVHSQVQLVQSGAEVKKPGASVKVSCKASGYTFTGYSIHWVRQAPGQGLEWMGWINPYTGDTSYVQKFQGCVTMTRDTSISTAYMELSRLTSDDTAVYYCARAPPFSSSSIGVDYWGQGTLVTVSSAST

SEQ ID NO: 245 - protein, 136 aa, Homo sapiens
ATGVHSQVQLVQSGAEVKKPGASVKVSCKASGYSFSDYYLQWVRQAPGQGLEWMGWINPKSGGTHYAQKFQGRVTVTRDTSISTTYMELSSLRSDDTAVYYCAKDHCATTNCFEYLYFGMGVWGQGTTVTVSSAST

SEQ ID NO: 246 - protein, 129 aa, Homo sapiens
ATGVHSQVQLQESGPKQVKPSETLSLTCTVSGASMSSYYWFWLRQPAGKGLEWIGRIYSGGSTNYNPSFKSRVTMSVDTSKNQFFLELSSVTAADTAVYYCARDLTYYGSNGYTNWGQGTLVTVSSAST

SEQ ID NO: 247 - protein, 129 aa, Homo sapiens
ATGVHSEVQLVESGGGLIHPGGSLRLSCAASGFTVTSNYMSWVRQAPGKGLEWVSVIYSGGSTYYADSVKGRFTISRDNSKNTLYLQMNSLRAEDTAVYYCASSPVRGVITQFDYWGQGTLVTVSSAST

SEQ ID NO: 248 - protein, 129 aa, Homo sapiens
ATGVHSEVQLVQSGAEVKKPGESLKISCKGSGYTFTNYWIAWVRQMPGKGLEWMGAIYPGDSDTRYSPSFQGQVTISADKSISTAYLQWSSLKASDTAMYFCARHDGSKVTTNDYWGQGTLVTVSSAST

SEQ ID NO: 249 - protein, 129 aa, Homo sapiens
ATGVHSQVQLVESGGGVVQPGRSLRLSCAASGFTFSIYAMHWVRQAPGKGLEWVAVISYDGSNKYYADSVKGRFTISRDNSKNTLYLQMNSLRVEDTAVYYCARDRSGSYYRPGYWGQGTLVTVSSAST

SEQ ID NO: 250 - protein, 129 aa, Homo sapiens
ATGVHSQVQLVESGGGVVQPGRSLRLSCAASGFTFSSYGMHWVRQAPGKGLEWVAVISYDGNNKYYADSVKGRFTISRDNSKNTLYLQMNSLRPEDTAVYYCAQTGGSYFGPFDYWGQGTLVTVSSAST

SEQ ID NO: 251 - protein, 131 aa, Homo sapiens
ATGVHSEVQLVESGGGLVQPGRSLRLSCAASGFTFEDYAMHWVRQTPGKGLEWVSGISWNGGIIGYADSVKGRFTISRDNAKNSLYLQMIRLRAEDTALYYCAKDILYGDYVGGFAYWGQGTLVTVSSAST

SEQ ID NO: 252 - protein, 127 aa, Homo sapiens
ATGVHSQVQLVQSGAEVKKPGASVKVSCKASGYTFTSYAISWVRQAPGQGLEWMGWVSAYNGNTNYAQKLQGRVTMTTDTSTNTAYMELRSLRSDDTAIYYCAIPYSSVTFDCWGQGTLVTVSSAST

SEQ ID NO: 253 - protein, 129 aa, Homo sapiens
ATGVHSEVQLVESGGGLVQPGGSLRLSCVASGFTVTNNFMNWIRQAPGMGLEWVAVVYPGGGSDYSDSVKGRFIISRDNSKNTVYLQMNSLRSEDTAIYYCARDSQPHYYYGVDVWGQGATVTVSSAST

SEQ ID NO: 254 - protein, 130 aa, Homo sapiens
ATGVHSEVQLVQSGAEVKKPGESLKISCKVSGYRFTSYWIGWVRQMPGKGLEWMGMIYLSDSDSRVGPSFRGQVTISADKSISTAYLQWSSLKTSDSAVYYCAKKKDDRAEAVFDYWGQGTLVTVSSAST

SEQ ID NO: 255 - protein, 128 aa, Homo sapiens
ATGVHSEVQLMESGGGLIQPGGSLRLSCAASGFIVSSNYMSWVRQAPGKGLEWVSVIYSGGGTDYADSVKGRFTISRDNSKNTLFLQMNSLRAEDTAVYYCARGAAMVKELFDYWGQGTQVTVSSAST

SEQ ID NO: 256 - protein, 129 aa, Homo sapiens
ATGVHSEVQLVESGGGLVQPGGGSLRLSCAASGFTFSTYWMSWVRQAPGKGLEWVANIKEDGSEKYYVDSVKGRVTISRDNAKNSLYLQMNSLRVEDTAVYYCARVRWLQGGIDYWGQGTLVTVSSAST

SEQ ID NO: 257 - protein, 136 aa, Homo sapiens
ATGVHSQVQLVQSGAEVKKAGASVKVSCKASGYTFTSYDINWVRQASGQGLEWMGWMNPISGNTGYAQKFQGRVTMTRNTSITTAYMELSSLRSEDTAVYFCARGGRYCSSTTCYSGVGMDVWGQGTTVTVPSAST

SEQ ID NO: 258 - protein, 129 aa, Homo sapiens
ATGVHSEVQLVESGGGLVQPGRSLRLSCAASGFTFDEYAMHWVRQAPGKGLEWVSGISWSSVSIAYADSVKGRFTISRDKAKNSLYLQMNSLRAEDTALYYCAKSNSSGLTPFDHWGQGLLVTVSSAST

SEQ ID NO: 259 - protein, 127 aa, Homo sapiens
ATGVHSQLQLQESGPGLVKPSETLSLTCTVSGGSISGSSYQWGWVRQPPGKGLAWIAGIHYSGSTYYNPSLKSRVTISVETSKNQFSLRLYSVTATDTSLYYCARRDGSYFDYWGQGALVTVSSAST

SEQ ID NO: 260 - protein, 135 aa, Homo sapiens
ATGVHSQLQLQESGPGLVKPSETLSLTCTVSGDSMSSRSYYWGWIRQPPGKGLEWIGSIYYSGDTYYDPSLKSRVTISVDTSKIQFTLNLSSVTAADTAVYYCARHVSDGQSIGWLYYFDCWGQGTLVTVSSAST

SEQ ID NO: 261 - protein, 136 aa, Homo sapiens
ATGVHSQVQLQESGPGFVKPSQTLSLTCTVSGGSLSSGGYYWTWIRQHPGKGLEWIGYISSSGSTFYNPSLKSRITISIDTSENQFSLKVSSVTAADTAVYYCARLAPFGERRVDQYYLMDVWGQGTTVTVSSAST

SEQ ID NO: 262 - protein, 127 aa, Homo sapiens
ATGVHSQVQLQESGPGLVRPSGTLSLTCGVSGGSISSNNWWSWVRQPPGKGLEWIGEIHYSGGTNYNPSLKSRVTISLDRSTNQFSLRLTSVTAADTAVYYCARAYYYYYMDVWAEGTTVTVASAST

SEQ ID NO: 263 - protein, 135 aa, Homo sapiens
ATGVHSQVQLQESGPGLVKPSETLSLTCTVSGGSISSTSYYWSWVRQPPGKGLEWIGYIYYSGNTNYNPSLKSRVTMSVDTSKNQFSLKLSSVTAADTAVYYCARADRGYCTITDCFIFNYWGQGTLVTVSSAST

SEQ ID NO: 264 - protein, 137 aa, Homo sapiens
ATGVHSEVQLVESGGGLVQPGESLRLSCTASAFSVNTYDMYWVRQPTGKGLEWVSTIRVTGDTYYPDSVKGRFTISRESATNSLYLQMNSLRAGDTAIYYCTRGAHYDFWRGYYTDDHHYMDVWGKGTTVTVSSAST

SEQ ID NO: 265 - protein, 129 aa, Homo sapiens
ATGVHSQMELVESGGGLVKPGGSLRLSCASSGFSLGDYYMTWIRQAPGKGLEWVSYISRSDGKTFYADSVKGRFTLSTDDGKKSLYLQMNSLRAEDTAVYYCVRGEGGPHDAFDIWGQGTMVTVSSAST

SEQ ID NO: 266 - protein, 128 aa, Homo sapiens
ATGVHSEVQLVESGGGLVQPGGSLRLSCAASGFTFRNYWMSWVRQAPGKGLEWVANIKQDGSEKYYVDSVKGRFTISRDNAKNSLYLQMNSLRAEDTAVYYCVRCGYDDWYFDVWGRGTLVTVSSAST

SEQ ID NO: 267 - protein, 132 aa, Homo sapiens
ATGVHSQVQLVQSGAEVKKPGASVKVSCKASGYIFTNYDINWVRQATGQGLEWMGWMNPNSGNAGYAQKFQGRVTMTRNTSITTAYMELSSLRSEDTAVYYCGRGPTTAKSGVEWFDPWGQGTLVTVSSAST

SEQ ID NO: 268 - protein, 130 aa, Homo sapiens
ATGVHSEVQLEESGGGLVQPGRSLRLSCVASGFSFDDYAVHWVRQAPGKGLEWVSGINWNSDSTDYADSVEGRFTISRDNAKKSVYLQMRSLRAEDSALYYCAKDMGWNVFQGLDVWGQGTTVTVSSAST

SEQ ID NO: 269 - protein, 129 aa, Homo sapiens
ATGVHSQVQLVQSGAEVKKPGASVKVSCMASGFSFTSFVISWVRQAPGQGLEWMGWISAYNGNTDYAQKFQGRVTMTTDTSTSTAYMELRSLRSDDTAIYYCARSWSAYYNWFDPWGQGTLVTVSSAST

SEQ ID NO: 270 - protein, 139 aa, Homo sapiens
ATGVHSEVQLVESGGDLVKPGGSLRLSCTVSRFTFKNAWMSWVRQAPGKGLEWVGRIKSKADGGTTDYAAPVRTRFTISRDDSKNTLYLQMNSLTSEDTAVYYCTTDRHVRGTYWGAYYYYGMDVWGQGTTVTVSSAST

SEQ ID NO: 271 - protein, 137 aa, Homo sapiens
ATGVHSEVQLVESGGGLVQPGGSLRLSCAASGFTFSSYWMHWVRQAPGKGLVWVSRINNDGSSTSYADSVKGRFTISRDNAKNTLYLQMNSLRAEDTAVYYCARAVRISSGYGLYGDSDYFDYWGQGTLVTVSSAST

SEQ ID NO: 272 - protein, 126 aa, Homo sapiens
ATGVHSEVQLVESGGGSVQPGGSLRLSCAASGFTFSPYSMTWVRQAPGKGLEWVSYISSSSSTIHYAESVKGRFTISRDNARDSLYLQMNSLKDEDTAVYYCARARGDAFDIWGQGTMVTVSSAST

SEQ ID NO: 273 - protein, 132 aa, Homo sapiens
ATGVHSEVQLVQSGAEVKKPGESLRISCKGFGYYFPSYWIAWVRQMPGKGLEWMGIIYPGDSGTRYSPSFRGQVTISADRSISTAYLQWSSLKASDTAIYYCARPLFYCSGGSCLTGYWGQGTLVTVSSAST

SEQ ID NO: 274 - protein, 130 aa, Homo sapiens
ATGVHSEVQLVESGGGLVQPGGSLRLSCAASGFTFSSYCMHWVRQAPGKGLVWVSRIKSDGSGTTYADSVQGRFTISRDNAKNALFLQMNSLRAEDTAVYYCARGRRDGNDLAPDYWGQGTLVTVSSAST

SEQ ID NO: 275 - protein, 130 aa, Homo sapiens
ATGVHSQVQLVESGGGVVQPGRSLRLSCAASGFPFIISGMHWVRQAPGKGLEWVAVLSFDGSNEYYADSVKGRFTISRDNSKNTLYLQIDSLGPEDTAVYYCVKDLGAYASGRLADWGQGTLVTVSSAST

SEQ ID NO: 276 - protein, 134 aa, Homo sapiens
ATGVHSEVQLVQSGAEVKKPGESLKISCKGSGYSFTSYWIGWVRQMPGKGLEWMGVIYPGDSDTRYSPSFQGQVTISADKSISTAYLQWSSLKASDTAMYYCARTQWGYNYGSHFFYMDVWGKGTTVTVSSAST

SEQ ID NO: 277 - protein, 115 aa, Homo sapiens
TGVHSEIVLTQSPGTLSLSPGEGTTLSCRASQSVSSSYLAWYQQKPGQAPRLLIYGASGRATGIPDRFSGSGSGTDFTLTISRLEPEDFAVYYCQQSESSPYTFGQGTKLEIKRT

SEQ ID NO: 278 - protein, 115 aa, Homo sapiens
TGVHSDIQMTQSPSTMSASVGDRVTITCRASQSISNWLAWYQQKPGKAPNLLIYKASSLESGVPSRFSGSGSGTEFTLTISSLQPDDFATYYCQQYNTYSPITFGQGTRLEIKRT

SEQ ID NO: 279 - protein, 115 aa, Homo sapiens
TGVHSDIQMTQSPSTLSASVGDRVTITCRASQNINSRLAWYQQKSGKAPKPLIYKASSLESGVPSRFSGGGSGTEFTLTISSLQPDDFATYYCQQYNSYSSITFGQGTRLEIKRT

SEQ ID NO: 280 - protein, 114 aa, Homo sapiens
TGVHSDIQMTQSPSSLSASVGDRVTITCRASQNIRRYLNWYQQKPGNAPKLLIYAASSLQSGVPSRFSGSGSGTDFTLTISSLQPDDFATYSCQQSYSTPRTFGQGTKVEIKRT

SEQ ID NO: 281 - protein, 116 aa, Homo sapiens
TGVHSEIVLTQSPGTLSLSPGERAALSCRASLPISARYLAWYQQKPGQTPRLLIYGASSRATGIPDRFSGSGSGTDFTLTISRLDPEDFAVYYCQHYGSSPPLTFGGGTKVEIKRT

SEQ ID NO: 282 - protein, 115 aa, Homo sapiens
TGVHSEIVLTQSPATLSLSPGERATLSCRASQSVSSYLAWYQQKPGQAPRLLIYDASNRATGIPARFSGSGSGTDFTLTISSLEPEDFAVYYCQQRSNWPPWTFGQGTKVEIKRT

SEQ ID NO: 283 - protein, 113 aa, Homo sapiens
TGVHSDIQLTQSPSFLSASVGDRVTITCRASQGISSYLAWYQQKPGKAPKLLIYAASTLQSGVPSRFSGSGSGTEFTLTISSLQPEDFATYYCQQLDTYPRFGGGTKVDIQRT

SEQ ID NO: 284 - protein, 114 aa, Homo sapiens
TGVHSEIVLTQSPGTLSLSPGERATLSCRASQSVNSRFLAWYQQKPGQAPRLLIYAASSRATGIPDRFSGSGSGTDFTLTISSLQPDDFATYYCQQYNSYSTFGQGTKVEIKRT

SEQ ID NO: 285 - protein, 119 aa, Homo sapiens
TGVHGDIVMTQSPLSLPVTPGEPASISCRSSQSLLHSNGYNYLDWYLQKPGQSPQLLIYLGSNRASGVPDRFSGSGSGTDFTLKISRVEAEDVGVYYCMQALQTPLTFGPGTKVDIKRT

SEQ ID NO: 286 - protein, 120 aa, Homo sapiens
TGVHSDIVMTQSPDSLAVSLGERATISCKSSQSVSYTSNNKSYLAWYQQKAGQPPKLLIYWASTRESGVPDRFSGSGSGTDFSLTISSLQAEDVAVYYCQQYHNTPWTFGQGTKVEIKRT

SEQ ID NO: 287 - protein, 115 aa, Homo sapiens
TGVHSDIQLTQSPSFLSASVGDRVTITCRASQGISSYLAWYQQKPGKAPKLLIYAASTLQSGVPSRFSGSGSGTEFTLTIRSLQPEDFATYYCQQLNSYPPYTFGQGTKLEIKRT

SEQ ID NO: 288 - protein, 113 aa, Homo sapiens
TGVHSDIQMTQSPSTLSASVGDRVTITCRASQSISSWLAWYQQKPGKAPKLLINRASSLESGVPSRFSGSGSGTEFTLTISSLQPDDFATYYCQQYSSYPTFGQGTKVEIKRT

SEQ ID NO: 289 - protein, 115 aa, Homo sapiens
TGVHSDIQMTQSPSSLSASVGDRVTITCRASQGIGNYLAWFQQKPGKAPKSLIYVASSLQSGVPSKFSGSGSGTDFILSISSLQPEDFATYYCQHYNAYPITFGQGTRLEIKRTV

SEQ ID NO: 290 - protein, 120 aa, Homo sapiens
TGVHGDVVLTQTPLSLSVTPGQPASISCKSNQSLLHSDGKTYLYWYFQRPGQPPQLLIYEVSNPFSGVPYRFSGSGSGTDFTLKISRVEAEDVGVYYCMQTIHLPRVTFGQGTRLDIKRT

SEQ ID NO: 291 - protein, 115 aa, Homo sapiens
TGVHSEIVLTQSPGTLSLSPGERATLSCRASQSVTGNFLSWYQQKPGQAPRLLIYGASSRATGIPDRFSGSGSGTDFTLTISRLEPEDFAVYYCQHYGSSRRTFGQGTKVEIKRT

SEQ ID NO: 292 - protein, 114 aa, Homo sapiens
TGVHSDIQMTQSPSSLSASVGDRVTITCQASQDISNYLNWYQQKPGKAPKLLIYDASNLQIGVPSRFSGSGSGTDFTFTISSLQPEDIATYYCQQYDNLPQTFGGGTKVEIKRT

SEQ ID NO: 293 - protein, 115 aa, Homo sapiens
TGVHSEIVLTQSPGTLSLSPGERATLSCRASQSVGSGYLAWYQQRPGQAPRLLIYGASSRATGIPDRFSGSGSGTDFTLTISRLEPEDFAVYYCQQYAGSPRTFGQGTRLEIKRT

SEQ ID NO: 294 - protein, 116 aa, Homo sapiens
TGVHSDIQLTQSPSFLSASVGDRVTITCRASQGISSYLAWYQQKPGKAPKLLIYAASTLQSGVPSRFSGSGSGTEFTLTISSLQPEDFATYYCQQLNSSPPKLTFGGGTKVEIKRT

SEQ ID NO: 295 - protein, 114 aa, Homo sapiens
TGVHSDIQMTQSPSSLSASVGDRVTITCRASQSMSTYLNWYQQKAEKAPKLLIYAASSLQSGVPSRFSGSGSGTDFTLTISSLQPEDFATYYCQQSYSMPYTFGQGTKLEVKRT

SEQ ID NO: 296 - protein, 113 aa, Homo sapiens
TGVHSDIQMTQSPSSLSASVGDRVTITCRASQSISGYLNWYQHKAGKAPKLLIYAASSLQSGVPSRFSGSGSGTDFTLTISSLQPEDFATYYCQQSYSTPVFGQGTKLEIKRT

SEQ ID NO: 297 - protein, 114 aa, Homo sapiens
TGVHSDIQMTQSPSSLSASVGDRVTITCQASQDISNYLNWYQQKPGKAPKLLIYDASNLETGVPSRFSGSGSGTDFTFTISSLQPEDIATYYCQQYDYLPLTFGGGTKVEIKRT

SEQ ID NO: 298 - protein, 114 aa, Homo sapiens
TGVHSEIVLTQSPGTLSLSPGERATLSCRASQSVSSSYFAWYQQRPGQAPRLLIYGASSRATGIPDRFSGSGSGTDFTLTISRLEPEDFAVYYCQQYGSSLTFGGGTKVEIKRT

SEQ ID NO: 299 - protein, 121 aa, Homo sapiens
TGVHSDIVMTQSPDSLAVSLGERATINCKSSQSVLYSSNNKNYLAWYQQKPGQPPKLLIYWASTRESGVPDRFSGSGSGTDFTLTISRLQAEDVAVYYCQQYFSTPPSTFGGGTKVEIKRT

SEQ ID NO: 300 - protein, 119 aa, Homo sapiens
TGVHGDIVMTQSPLSLPVTPGEPASISCRSSQSLLHSNGYNYLDWYLQKPGQSPQLLIYLGSNRASGVPDRFSGSGSGTDFTLKISRVEAEDVGVYYCMQALQTPYTFGQGTKLEIKRT

SEQ ID NO: 301 - protein, 120 aa, Homo sapiens
TGVHSDIVLTQSPDSLGVSLGERATINCRATETVLYSPHNRNYLAWYQQKAGQPPKLLFYWATTRENGVPDRFSATGSATDFTLTVNSLQAEDVAVYYCHQYYLVPFTFGPGTRVDIKRT

SEQ ID NO: 302 - protein, 120 aa, Homo sapiens
TGVHSDIVMTQSPDSLAVSLGERATINCKSSQSVLYSSNNKNYLGWYQQKPGQPPKLLIYWASTRESGVPDRFSGSGSGTDFTLTISSLQAEDVAVYYCQQYYTTPLTFGGGTKVEIKRT

SEQ ID NO: 303 - protein, 115 aa, Homo sapiens
TGVHSEIVLTQSPGTLSLSPGERATLSCRASQSVSTIYLAWYQQKPGQAPRLLIYAASSRATGIPDRFSGSGSGTDFTLTISRLEPEDFAVYYCQQYGSSPWTFGQGTKVEIKRT

SEQ ID NO: 304 - protein, 115 aa, Homo sapiens
TGVHSEIVLTQSPGTLSLSPGERATLSCRASQSISSTYLAWYQQKLGQAPRLLMYGASSRATGIPDRFSGSGSGSDFTLTISRLEPEDFAVYFCQQYGSSPGTFGQGTKLEIKRT

SEQ ID NO: 305 - protein, 115 aa, Homo sapiens
TGVHSEIVMTQSPAALSVSPGERATLSCRASQSVTSNLAWYQQKPGQAPRLLIYGASTRATGIPARFSGSGSGTEFTLTISSLQSEDFAVYYCQQFNNWPRGTFGQGTKVEVKRT

SEQ ID NO: 306 - protein, 119 aa, Homo sapiens
TGVHGDIVMTQSPLSLPVTPGEPASISCRSSQSLLHSNGYNYLDWYLQKPGQSPQLLIYLGSDRAFGVPDRFSGSGSGTDFTLKISRVEAEDVGVYYCMQALQTPVTFGGGTKVEIKRT

SEQ ID NO: 307 - protein, 118 aa, Homo sapiens
TGVHSEIVMTQSPATLSVSPGERATLSCRASQSVSSNLAWYQQKPGQAPRLLIYGASTRATGIPARFSGSGSGTEFTLTISSLQSEDFAVYYCQQYNNWPPGLKITFGQGTRLEIKRT

SEQ ID NO: 308 - protein, 116 aa, Homo sapiens
TGVHSDIQLTQSPAFLSASVGDRVTITCRASQGISSYLAWYQQRPGKAPKLLIYAASTLQSGVPSRFSGSGSGTEFTLTISSLQPEDFATYYCQQLNSSPGSLTFGGGTKVEIKRT

SEQ ID NO: 309 - protein, 115 aa, Homo sapiens
TGVHSEIVLTQSPGTLSLSPGERATLSCRASQSVPSSYLAWYQQKPGQAPRLLIYGASSRATGIPDRFSGSGSGTDFTLTISRLEPEDFAVYYCQQYGSPMYTFGQGTKLEIKRT

SEQ ID NO: 310 - protein, 114 aa, Homo sapiens
TGVHSDIQMTQSPSSLSASVGDRVTITCQASQDISNYLNWYQQKPGKAPKLLIFDASNSETGVPSRFSGSGSGTDFTFTISSLQPEDIATYYCQQYDNLPPTFGQGTKLQIKRT

SEQ ID NO: 311 - protein, 119 aa, Homo sapiens
ATGVHGDIVMTQSPLSLPVTPGEPASISCRSSQSLLQSNGYNYLDWYLQKPGQSPQLLIYLGSNRASGVPDRFSGSGSGTDFTLKISRVEADDVGVYYCMQALQTPTFGGGTKVEIKRT

SEQ ID NO: 312 - protein, 117 aa, Homo sapiens
ATGVHSEIVLTQSPGTLSLSPGERATLSCRASQSVSSTYLAWYQQKPGQAPSLLIYGASHRATGIPDRFSGSGSGTDFTLTISRLEPEDFAVYYCQQFGSSPLYTFGQGTKLEIKRT

SEQ ID NO: 313 - protein, 121 aa, Homo sapiens
ATGVHSDIVMTQSPDSLAVSLGERATINCKSSLSVLYSSNNKNYLAWYQQKPGQPPKLLIYWASTRESGVPDRFSGSGSGTDFTLTISGLQAEDVAVYYCQQYYSTPITFGQGTRLEIKRT

SEQ ID NO: 314 - protein, 114 aa, Homo sapiens
ATGVHSDIQLTQSPSFLSASVGDRVTITCRASQGINSYLAWYQQKPGKAPKLLIYAASTLQSGVPSRFSGSGSGTEFTLTISSLQPEDFATYYCQQLNSLFTFGPGTKVDIKRT

SEQ ID NO: 315 - protein, 115 aa, Homo sapiens
ATGVHSDIQMTQSPSSLSASVGDRVTITCRASQAISNYLAWFQQKPGKAPKSLIYAASSLQSGVPSKFSGSGSGTDFTLTISSLQPEDFATYYCQQYNSYPLTFGGGTKVEIKRT

SEQ ID NO: 316 - protein, 119 aa, Homo sapiens
ATGVHGDIVVTQSPLSLPVAPGEPASISCRSSQSLLHSNGYNYLDWYLQKPGQSPQLLIYLGSNRASGVPDRFSGSGSGTDFTLKISRVEAEDVGIYYCMQSLQTRTFGQGTKVEIKRT

SEQ ID NO: 317 - protein, 115 aa, Homo sapiens
ATGVHSDIQMTQSPSTLSASVGDRVTITCRASQSISRWLAWYQQTPGKAPKLLIYKASSLESGVPSRFSGSGSGTEFTLTISSLQPDDFATYYCQQYNTYFWTFGQGTKVEVKRT

SEQ ID NO: 318 - protein, 115 aa, Homo sapiens
ATGVHSEIVLTQSPATLSLSPGERATLSCRASQSVPTYLAWYQQKPGQAPRLLIYDASNRATGVPARFSGSGSGTDFTLTISSLEPEDFAVYYCQQRRDWPGTFGQGTKLEIKRT

SEQ ID NO: 319 - protein, 116 aa, Homo sapiens
ATGVHSDIQMTQSPSSLSASVGDRVTITCQASQDISNYLNWYQQKPGKAPKLLIYDASNLETGVPSRFSGSGSGTDFTFTISSLQPEDIATYYCQQYGNLPPLTFGQGTRLEIKRT

SEQ ID NO: 320 - protein, 116 aa, Homo sapiens
ATGVHSEIVLTQSPGTLSLSPGERATLSCRASQSVSGTFLAWYQQKPGQAPRLLISGASSRATGIPDRFSGSGSGTDFTLTISRLEPEDFAVYYCQQYGSSRPTFGQGTKLEIKRT

SEQ ID NO: 321 - protein, 121 aa, Homo sapiens
ATGVHSDIVMTQSPDSLAVSLGERATINCKSSQSVLYSSNNKNYLAWYQQKPGQPPKLLIYWASTRESGVPDRFSGSGSGTDFTLTITSLQAEDVAVYYCQQYYSTPLTFGPGTKVDIKRT

SEQ ID NO: 322 - protein, 115 aa, Homo sapiens
ATGVHSDIQMTQSPSSLSASVGDRVTITCRASHSISDYLNWYQQKPGKAPKLLIYAASSLQSGVPSRFSGSGSGTDFTLTISSLQPKDFATYYCQQSYSNPFTFGPGTKVDIKRT

SEQ ID NO: 323 - protein, 120 aa, Homo sapiens
ATGVHGDIVMTQTPLSLSVTPGQPASFSCRSSESLLYSDGKTYLHWYLRKPGQPPQLLIYEVSKRFSGVPDRFSGSGSGTDFTLKISRVEAEDVGVYYCMQSTQLPWTFGQGTKVEIQRT

SEQ ID NO: 324 - protein, 121 aa, Homo sapiens
ATGVHSDIVMTQSPDSLAVSLGDRATINCKSSQNLLFSSNNKNYLAWYQQKPGQPPKLLIYWASTRESGVPDRFSGSGSGTDFTLTITSLQAEDVAVYYCQQYYSTPLTFGGGTKVEIKRT

SEQ ID NO: 325 - protein, 117 aa, Homo sapiens
ATGVHSEIVLTQSPGTLSLSPGERATLSCRASQSVSSIYLAWYQQKPGQAPRLLIYGASSRATGIPDRFSGSGSGTDFTLTISRLEPEDFAVYYCQHYGSSPPVTFGQGTKLEIKRT

SEQ ID NO: 326 - protein, 115 aa, Homo sapiens
ATGVHSDIQMTQTPSSLSASVGDRVSITCRASQNIHTFLIWYLQRPGKAPNFLIYAASSLQSGVPSRFSGSGSETDFTLTISSLQPEDFGTYYCQQSYTTPYTFGQGTKLEIKRT

SEQ ID NO: 327 - protein, 130 aa, Homo sapiens
TGSWAQSVLTQPPSASGTPGQRVTISCSGSSSNIGSNYVYWYQQLPGTAPKLLIYRNNQRPSGVPDRFSGSKSGTSASLAISGLRSEDEADYYCAAWDDSLSGVVFGGGTKLTVLGQPKAAPSVTLFPPS

SEQ ID NO: 328 - protein, 131 aa, Homo sapiens
TGSWANFMLTQPHSVSDSPGRTVTISCTRSSGDIASSYVQWYQQRPGSVPTTVIHENSERPSGVPDRFSGSIDTSSNSASLTISGLQTEDEAVYYCQSYDSGRQGVFGGGTKLTVLGQPKAAPSVTLFPPS

SEQ ID NO: 329 - protein, 129 aa, Homo sapiens
TGSWAQSVLTQSPSASGTPGQRVTISCSGSSSNIGGNTVNWYQQLPGTAPKLLIYSNNQRPSGVPDRFSGSKSGTSASLAISGLQSEDEADYYCASWDDSVNGVFGGGTKLTVLGQPKAAPSVTLFPPS

SEQ ID NO: 330 - protein, 130 aa, Homo sapiens
TGSWAQSALTQPASVSGSPGQSITISCTGTSSDVGGYNYVSWYQQHPGKAPKVMIYDVRNRPSGVSNRFSGSKSGNTASLTISGLQAEDEADYYCSSYTSSSTWVFGGGTKLTVLGQPKAAPSVTLFPPS

SEQ ID NO: 331 - protein, 130 aa, Homo sapiens
TGSWAQSALTQPASVSGSPGQSITISCTGTSSDVGGYNYVSWYQQHPGKAPKLMIYEVSNRPSGVSNRFSGSKSGNTASLTISGLQAEDEADYYCSSYTSSITGVFGGGTKLTVLGQPKAAPSVTLFPPS

SEQ ID NO: 332 - protein, 131 aa, Homo sapiens
TGSWAQSVLTQPPSVSGAPGQRVTISCTGSSSNIGAGYYVHWYQQHPGTAPKLLIYGNSNRPSGVPDRFSGSKSGTSASLAITGLQAEDEADYYCQSYDSRLSGWVFGGGTKLTVLGQPKAAPSVTLFPPS

SEQ ID NO: 333 - protein, 132 aa, Homo sapiens
TGSWAQSVLTQPPSVSGAPGQRVTISCTGSSSNIGAGYDVHWYQQLPGTAPKLLIYGNNNRPSGVPDRFSGSKSGTSASLAITGLQAEDEADYYCQSYASSLSVHVVFGGGTKLTVLGQPKAAPSVTLFPPS

SEQ ID NO: 334 - protein, 126 aa, Homo sapiens
TGSVTSFELTQPSSVSVSPGQTVTITCSGDVLEKKYVRWFQQRPGQAPILVIYKDTERPSRIPERFSGSSSGTTVSLIITGAQVEDEADYYCYSVADNMGVFGGGTKLTVLGQPKAAPSVTLFPPS

SEQ ID NO: 335 - protein, 129 aa, Homo sapiens
TGSNSQAVVTQEPSLTVSPGGTVTLTCGSTTGAVTSGHYPYWFQQKPGQAPRTLIYDTNNKHSWTPARFSGSLLGGKAALTLSGAQPEDEAEYYCLLSYSGAWVFGGGTKLTVLGQPKAAPSVTLFPPS

SEQ ID NO: 336 - protein, 129 aa, Homo sapiens
TGSWAQSVLTQPPSASGTPGQRVTVSCSGSSSNILNNYVYWYQQLPGTAPKLLIYRNNQRPSGVPDRFSGSKSGTSASLAISGLRSEDEADYYCAAWDDSLFVVFGGGTKLTVLGQPKAAPSVTLFPPS

SEQ ID NO: 337 - protein, 129 aa, Homo sapiens
TGSWAQSALTQPASVSGSPGQSITISCTGTSSDVGGYNYVSWYQQHPGKAPKLMIYDVSNRPSGVSNRFSGSKSGNTASLTISGLQAEDEADYYCSSYTRGNYVFGTGTKVTVLGQPKANPTVTLFPPS

SEQ ID NO: 338 - protein, 130 aa, Homo sapiens
TGSWAQSALTQPASVSGSPGQSITISCTGTSDDVGGYNLVSWYQQHPSKAPKLMIYAANKRPSGVSNRFSGSKSGNTASLTISGLQAEDEAHYYCCSYATGSSVVFGGGTKLTVLGQPKAAPSVTLFPPS

SEQ ID NO: 339 - protein, 132 aa, Homo sapiens
TGSWAQSVLTQPPSVSGAPGQRITISCTGSTSNIGAGYDVHWYQQLPGTAPKLLIYANSNRPSGVPDRFSGSKSGTSASLAITGLQAEDEADYYCQSYDSSLSAVWVFGTGTKVTVLRQPKANPTVTLFPPS

SEQ ID NO: 340 - protein, 130 aa, Homo sapiens
TGSWAQSVLTQPPSASGTPGQRVTISCSGSNSNIGSNYVYWYQQLPGTAPKLLIYRNNQRPSGVPDRFSGSKSGTSASLAISGLRSEDEADYYCAAWDDSLSALVFGGGTKLTVLGQPKAAPSVTLFPPS

SEQ ID NO: 341 - protein, 130 aa, Homo sapiens
TGSWAQSALTQPASVSGSPGQSITISCTGTSSDVGSYNLVSWYQHHPGKAPKLMIYEVSKRPSGVSNRFSGSKSGNTASLTISGLQAEDETDYYCCSYAGSSTLVFGGGTKLTVLGQPKAAPSVTLFPPS

SEQ ID NO: 342 - protein, 132 aa, Homo sapiens
TGSWAQSALTQPASVSGSPGQSITISCTGTSSDVGGYNYVSWYQQHPGKAPKIMIYDVSNRPSGVSNRFSGSKSGNTASLTISGLQAEDEADYYCSSHTSSSSPHVVFGGGTKLTVLGQPKAAPSVTLFPPS

SEQ ID NO: 343 - protein, 130 aa, Homo sapiens
TGSWAQSALTQPRSVSGSPGQSVTISCTGTSSDVGGYNYVSWYQQHPGKAPKLMIYDVSQRPSGVPDRFSGSKSGNTASLTISGLQAEDEADYYCCSYAGTYTVIFGGGTKLTVLGQPKAAPSVTLFPPS

SEQ ID NO: 344 - protein, 129 aa, Homo sapiens
TGSNSQAVVTQEPSLTVSPGGTVTLTCGSSTGTVTSYHYAYWFQQKPGQVPRVLIYDTSDKPSWTPARFSGFLLGDKAALTLSGAQPEDEADYYCLLSYSGVVVFGGGTKLTVLGQPRSAPSVTLFPPS

SEQ ID NO: 345 - protein, 131 aa, Homo sapiens
TGSWAQSALTQPRSVSGSPGQSVTISCTGSSTDVGVYNYVSWYQQHPGNAPKLMIFDVSKRPSGVPDRFSGSKSGNTASLTISGLQAEDEADYYCCSYAGTYTPVVFGGGTKLTVLGQPKAAPSVTLFPPS

SEQ ID NO: 346 - protein, 131 aa, Homo sapiens
TGSWAQSALTQPASVSGSPGQSITISCTGTSSDVGGYDFVSWYQQHPGKAPKLMIYDDINRPSGVSNRFSGSKSGNTASLTISGLQAEDEADYYCSSYTSSSTSSVFGGGTKLTVLGQPKAAPSVTLFPPS

SEQ ID NO: 347 - protein, 131 aa, Homo sapiens
ATGSWAQSALTQPASVSGSPGQSITISCTGTSSDVGGYNYVSWYQQHPGKAPKLMIYDVSNRPSGVSNRFSGSKSGNTASLTISGLQAEDEADYYCSSYTSSSTQVFGGGTKLTVLGQPKAAPSVTLFPPS

SEQ ID NO: 348 - protein, 131 aa, Homo sapiens
ATGSWAQSALTQPASVSGSPGQSITISCTGTSSDVGGYNYVSWYQQHPGKAPKLMIYDVSNRPSGVSNRFSGSKSGNTASLTISGLQAEDEADYYCSSYTSRSPWVFGGGTKLTVLGQPKAAPSVTLFPPS

SEQ ID NO: 349 - protein, 132 aa, Homo sapiens
ATGSWAQSALTQPASVSGSPGQSITISCTGTSSDVGGYNYVSWYQQHPGKAPKLMIYEVSNRPSGVSSRFSGSKSGNTASLTISGLQAEDEADYYCYSYTTSSTPYVFGTGTKVTVLGQPKANPTVTLFPPS

SEQ ID NO: 350 - protein, 131 aa, Homo sapiens
ATGSWAQSALTQPASVSGSPGQSITISCTGTSSDVGGYNYVSWYQQHPGKAPKLMIYDVSNRPSGVSNRFSGSKSGNTASLTISGLQAEDEADYYCSSYTTSSTLVFGTGTKVTVLGQPKANPTVTLFPPS

SEQ ID NO: 351 - protein, 132 aa, Homo sapiens
ATGSWAQSGPTQPASVSGSPGQSITISCTGTSTDVGGYHYVSWHQQHPGEAPKLIIYEVSNRPSGVSHRFSGSKSGNTASLTISGLQAEDEADYYCSSYTKTRTLYVFGTGTMVTVLGQPKANPTVTLFPPS

SEQ ID NO: 352 - protein, 131 aa, Homo sapiens
ATGSWAQSVLTQPPSASGTPGQRVTISCSGSSSNIGGNTVTWYRQLPGTAPKLLISTNNQRPSGVPDRFSGSKSGTSASLAISGLQSEDEADYYCATWDDSLNTYVFGTGTKVTVLGQPKANPTVTLFPPS

SEQ ID NO: 353 - protein, 131 aa, Homo sapiens
ATGSWANFMLTQPRSVSESPGKTVTISCTRTSGSIAINYVQWYQQRPGSSPTTVIYEDSQRPSGVPDRFSGSIDSSSNSASLTISGLKTEDEADYYCQSYDSGSWVFGGGTKLTVLGQPKAAPSVTLFPPS

SEQ ID NO: 354 - protein, 132 aa, Homo sapiens
ATGSWAQSVLTQPPSVSGAPGQRVTISCTGSSSNIGAGYDVHWYHQLPGTAPKFLIYGNSNRPSGVPDRFSGSKSGTSASLAITRLQAEDEADYYCQSYDSSLSGWVFGGGTKLTVLGQPKAAPSVTLFPPS

SEQ ID NO: 355 - protein, 127 aa, Homo sapiens
ATGSVTSYELTQPPSVSVSPGQTATITCSGDKLGDQFVSWYRQRPGQSPVVVIYQDIKRPSGIPERFSGSNSGNRATLTIRGTQALDEADYYCQAGDSDTVLFGGGTQLTVLGQPKAAPSVTLFPPS

SEQ ID NO: 356 - protein, 126 aa, Homo sapiens
ATGSVTSYVLTQPPSVSVAPGQTARISCGGDKIGSKNVHWYQQKPGQAPVLVVYDDSDRPSGIPERFSGSNSGNTATLTITRVEARDEADYYCQVWDRSSVFGTGTKVSVLGQPKANPTVTLFPPS

SEQ ID NO: 357 - protein, 131 aa, Homo sapiens
ATGSWAQSLLTQPPSASGTPGQRVTISCSGGSSNIGSNSVCWYQQLPGTAPKLLIYRSNQRPSGVPDRFSGSKSGTSASLAISGLWSEDEADYYCSAWDDSLRGPVFGGGTKLTVLGQPKAAPSVTLFPPS

SEQ ID NO: 358 - protein, 132 aa, Homo sapiens
ATGSWAQSVLTQPPSVSGAPGQRVTISCTGSTSNIGAGYDVHWYQQLPGTAPKLLIYANTNRPSGVPDRFSGSKSGTSASLAISGLQAEDEADYFCQSYDSRLSAWVFGGGTKLTVLGQPKAAPSVTLFPPS

SEQ ID NO: 359 - protein, 129 aa, Homo sapiens
ATGSVTSYVLTQPPSVSVAPGQTARISCGGNNIESKTVHWYQQKPGQAPILVVYDDNDRPSGIPERFSGSNSGNTATLSISRAEAGDEADYYCQVWDSSRDLRVFGGGTKLSVLGQPKAAPSVTLFPPS

SEQ ID NO: 360 - protein, 127 aa, Homo sapiens
ATGSVTSYELTQPPSVSVSPGQTASITCSVDKLGNKYVCWYQQKPGQSPVLVIYQDSKRPSGIPERFSGSNSGNTATLTISGTQAMDEADYYCQAWDSSTGVFGGGTKLTVLGQPKAAPSVTLFPPS

SEQ ID NO: 361 - protein, 133 aa, Homo sapiens
ATGSWAQSVLTQPPSVSGAPGQRVTISCTGSSSDIGAGYNVHWYQQLPGTAPKLLIYGNNNRPSGVPDRFSGSKSGASASLAISGLQAEDEADYYCQSFDSSLSGFYVFGTGTKVTVLGQPKANPTVTLFPPS

SEQ ID NO: 362 - protein, 132 aa, Homo sapiens
ATGSWAQSALTQPASVSGSPGQSITISCTGTTSDVGGYNYVSWYQQHPGKAPKLMIFEVSNRPSGVSDRFSGSKSGNTASLTISGLQAEDEADYYCTSYRSSSLQGVFGTGTKVTVLGQPKANPTVTLFPPS

SEQ ID NO: 363 - protein, 132 aa, Homo sapiens
ATGSWAQSVLTQPPSASGTPGQRVTISCSGSSSNIGSNTVNWYQQLPGTAPKLLIYTNNQRPSGVPDRFSGSKSGTSASLAISGLQSEDEADYYCAAWDDSLNGLYVFGTGTKVTVLGQPKANPTVTLFPPS

SEQ ID NO: 364 - protein, 129 aa, Homo sapiens
ATGSVTSYVLTQPPSVSVAPGQTARITCGGNNIGSKSVHWYQQKPGQAPVLVVYDDSDRPSGIPERFSGSNSGNTATLTISRVEAGDEADYYCQVWDSSSDPWVFGGGTKVTVLGQPKAAPSVTLFPPS

SEQ ID NO: 365 - protein, 131 aa, Homo sapiens
ATGSWAQSVLTQPPSVSAAPGQKVTISCSGNSSNIGNNYVSWYHQLPGTAPKLLIYDNNKRPSGIPDRFSGSKSGTSATLGITGLQTGDEADYYCGTWDNSLSVGVFGGGTKLTVLGQPKAAPSVTLFPPS

SEQ ID NO: 366 - protein, 131 aa, Homo sapiens
ATGSWAQSALTQPPSASGSPGQSVTISCTGTSSDIGAYNYVSWYQQHPDKAPKLMIYEVNNRPSGVSDRFSGSKSGNTASLTVSGLQAEDEADYYCSSYAGSDNWVFGGGTKLAVLGQPKAAPSVTLFPPS

SEQ ID NO: 367 - protein, 129 aa, Homo sapiens
ATGSVTSYALTQPPSVSVSPGQTARITCSGDALPRRYAYWYQQKSGQAPVLVIYEDTKRPSGIPERFSGSSSGTMATLTISGAQVEDEADYYCYSTDSSDNHRVFGGGTKLTVLGQPKAAPSVTLFPPS

SEQ ID NO: 368 - protein, 131 aa, Homo sapiens
ATGSWAQSVLTQPPSASGTPGQRVTISCSGSSSNIGSDHVYWYQQLPGTAPKLFIYRNNQRPSGVPDRFSGSKSGTSASLAISGLRSEDEADYYCAAWDASLSGYVFGTGTKVTVLGQPKANPTVTLFPPS

SEQ ID NO: 369 - protein, 24 aa, Homo sapiens
CARHWRDCSGGVCQASQYSSMDVW

SEQ ID NO: 370 - protein, 24 aa, Homo sapiens
CARHWRDCTGGVCRASQYSSMDVW

SEQ ID NO: 371 - protein, 24 aa, Homo sapiens
CARHWRDCSGGVCRASQYSSMDVW

SEQ ID NO: 372 - protein, 24 aa, Homo sapiens
CARHWRDCSGGVCRASQYSSMDVW

SEQ ID NO: 373 - protein, 24 aa, Homo sapiens
CARHWRDCNRGVCRASQYSSMDVW

SEQ ID NO: 374 - protein, 24 aa, Homo sapiens
CARHWRECSGGVCRASQYSSMDVW

SEQ ID NO: 375 - protein, 24 aa, Homo sapiens
CARHWRDCNGGVCRASQYASMDVW

SEQ ID NO: 376 - protein, 24 aa, Homo sapiens
CARHWRECSGGVCRTSQYSSMDVW

SEQ ID NO: 377 - protein, 24 aa, Homo sapiens
CARHWRDCSGGVCRASQYSAMDVW

SEQ ID NO: 378 - protein, 20 aa, Homo sapiens
CAHVRPLTGYHVGHDPFDIW

SEQ ID NO: 379 - protein, 20 aa, Homo sapiens
CAHVRPLTGYHVGHDPFDIW

SEQ ID NO: 380 - protein, 20 aa, Homo sapiens
CAHVRPLTGYHVGHDPFDIW

SEQ ID NO: 381 - protein, 20 aa, Homo sapiens
CAHVRPLTGYHVGHDPFDIW

SEQ ID NO: 382 - protein, 20 aa, Homo sapiens
CAHVRPLTGYHVGRDPFDIW

SEQ ID NO: 383 - protein, 20 aa, Homo sapiens
CAHVRPLTGYHVGRDPFDVW

SEQ ID NO: 384 - protein, 8 aa, Homo sapiens [sequence omitted]

SEQ ID NO: 385 - protein, 8 aa, Homo sapiens [sequence omitted]

SEQ ID NO: 386 - protein, 8 aa, Homo sapiens [sequence omitted]

SEQ ID NO: 387 - protein, 8 aa, Homo sapiens [sequence omitted]

SEQ ID NO: 388 - protein, 8 aa, Homo sapiens [sequence omitted]

SEQ ID NO: 389 - protein, 14 aa, Homo sapiens
CARRIYGGDGFDIW

SEQ ID NO: 390 - protein, 14 aa, Homo sapiens
CARRIYGGDGFDIW

SEQ ID NO: 391 - protein, 14 aa, Homo sapiens
CARRIYGGDGFDIW

SEQ ID NO: 392 - protein, 16 aa, Homo sapiens
CARSRGGSYYYGMDVW

SEQ ID NO: 393 - protein, 16 aa, Homo sapiens
CARSRGGSYYYGMDVW

SEQ ID NO: 394 - protein, 16 aa, Homo sapiens
CARAAGGGYYYGMDVW

SEQ ID NO: 395 - protein, 16 aa, Homo sapiens
CARAAGGNYYYGMDVW

SEQ ID NO: 396 - protein, 20 aa, Homo sapiens
CARSVAALTWELNKLAFDVW

SEQ ID NO: 397 - protein, 20 aa, Homo sapiens
CARSVAALTWELNKLAFDVW

SEQ ID NO: 398 - protein, 17 aa, Homo sapiens
CAQTTPYDSSGYYRSYW

SEQ ID NO: 399 - protein, 17 aa, Homo sapiens
CAETTPYDSSGYYRSYW

SEQ ID NO: 400 - protein, 15 aa, Homo sapiens
CARWEAGGTSPLDYW

SEQ ID NO: 401 - protein, 15 aa, Homo sapiens
CARWEAGGTSPLDSW

SEQ ID NO: 402 - protein, 13 aa, Homo sapiens [sequence omitted]

SEQ ID NO: 403 - protein, 13 aa, Homo sapiens [sequence omitted]

SEQ ID NO: 404 - protein, 19 aa, Homo sapiens
CARHPKGYGLRLPNWFDPW

SEQ ID NO: 405 - protein, 19 aa, Homo sapiens
CARHPKGYGLRLPNWFDPW

SEQ ID NO: 406 - protein, 23 aa, Homo sapiens
CAKDLLPYRCSGGSCFGLYFDYW

SEQ ID NO: 407 - protein, 23 aa, Homo sapiens
CAKDLLPYRCSGGSCFGFYFDYW

SEQ ID NO: 408 - protein, 14 aa, Homo sapiens
CQSYDGSLSESAVF

SEQ ID NO: 409 - protein, 14 aa, Homo sapiens
CHSYDGSLSESAVF

SEQ ID NO: 410 - protein, 14 aa, Homo sapiens
CQSYDGSLSESAVF

SEQ ID NO: 411 - protein, 14 aa, Homo sapiens
CQSYDGSLSESAVF

SEQ ID NO: 412 - protein, 14 aa, Homo sapiens
CHSYDGTLSESAVF

SEQ ID NO: 413 - protein, 14 aa, Homo sapiens
CQSYDGSLSESAVF

SEQ ID NO: 414 - protein, 14 aa, Homo sapiens
CQSYDGSLSESAVF

SEQ ID NO: 415 - protein, 14 aa, Homo sapiens
CQSYDGSLSESAVF

SEQ ID NO: 416 - protein, 14 aa, Homo sapiens
CHSYDGSLSESAVF

SEQ ID NO: 417 - protein, 13 aa, Homo sapiens
CGTWDTSLSIGVF

SEQ ID NO: 418 - protein, 13 aa, Homo sapiens
CGTWDTSLRIGVF

SEQ ID NO: 419 - protein, 13 aa, Homo sapiens
CGTWDTSLSIGVF

SEQ ID NO: 420 - protein, 13 aa, Homo sapiens [sequence omitted]

SEQ ID NO: 421 - protein, 13 aa, Homo sapiens [sequence omitted]

SEQ ID NO: 422 - protein, 11 aa, Homo sapiens
CQAWNNNNVVF

SEQ ID NO: 423 - protein, 11 aa, Homo sapiens [sequence omitted]

SEQ ID NO: 424 - protein, 11 aa, Homo sapiens
CLQYGGSGWTF

SEQ ID NO: 425 - protein, 11 aa, Homo sapiens [sequence omitted]

SEQ ID NO: 426 - protein, 11 aa, Homo sapiens [sequence omitted]

SEQ ID NO: 427 - protein, 11 aa, Homo sapiens [sequence omitted]

SEQ ID NO: 428 - protein, 13 aa, Homo sapiens
CQVWHGTGDQYVF

SEQ ID NO: 429 - protein, 13 aa, Homo sapiens
CQVWPGSSDHYVF

SEQ ID NO: 430 - protein, 13 aa, Homo sapiens
CQVWHGTSDHYVF

SEQ ID NO: 431 - protein, 11 aa, Homo sapiens [sequence omitted]

SEQ ID NO: 432 - protein, 13 aa, Homo sapiens
CQHYNSFSPTWTF

SEQ ID NO: 433 - protein, 10 aa, Homo sapiens [sequence omitted]

SEQ ID NO: 434 - protein, 11 aa, Homo sapiens [sequence omitted]

SEQ ID NO: 435 - protein, 11 aa, Homo sapiens [sequence omitted]

SEQ ID NO: 436 - protein, 11 aa, Homo sapiens [sequence omitted]

SEQ ID NO: 437 - protein, 13 aa, Homo sapiens
CQQRTNWPPRLTF

SEQ ID NO: 438 - protein, 13 aa, Homo sapiens
CQQRTNWPPRLTF

SEQ ID NO: 439 - protein, 12 aa, Homo sapiens
CQRYNSYSQNTF

SEQ ID NO: 440 - protein, 12 aa, Homo sapiens
CQQYSSYSQITF

SEQ ID NO: 441 - protein, 10 aa, Homo sapiens
CQHFGSSPLF

SEQ ID NO: 442 - protein, 7 aa, Homo sapiens [sequence omitted]

SEQ ID NO: 443 - protein, 11 aa, Homo sapiens [sequence omitted]

SEQ ID NO: 444 - protein, 11 aa, Homo sapiens
CSSYTTSSTFF

SEQ ID NO: 445 - protein, 13 aa, Homo sapiens [sequence omitted]

SEQ ID NO: 446 - protein, 13 aa, Homo sapiens [sequence omitted]

SEQ ID NO: 447 - DNA, 364 bp, Homo sapiens
caggtacagctgcagcagtcaggtccaggactggtgaagccctcgcagaccctctcactcacctgtgccatctccggggacagtgtctctagcaaaaatgctgcttggaactggatcaggcagtccccatcgagaggccttgagtggctgggaacgacatactacaggtccaagtggtataatgattatgcagtttctgtgaaaggtcgaatagccatcaacccagacacatccaagaaccaattctccctccagctgcactctgtgactcccgaggacacggctgtgtattactgtgccaagcagtggctggcaaactggttcgacccctggggccagggaacccaggtcaccgtctcctcag

SEQ ID NO: 448 - DNA, 364 bp, Homo sapiens
caggtacagctgcagcagtcaggtccaggactggtgaagccctcgcagaccctctcactcacctgtgccatctccggggacagtgtctctagcaaaaatgctgcttggaactggatcaggcagtccccatcgagaggccttgagtggctgggaacgacatactacaggtccaagtggtataatgattatgcagtatctgtgaaaggtcgaatagccatcaacccagacacatccaagaaccaattctccctccagctgcactctgtgactcccgaggacacggctgtgtattactgtgccaagcagtggctggcaaactggttcgacccctggggccagggaacccaggtcaccgtctcctcag

SEQ ID NO: 449 - DNA, 364 bp, Homo sapiens; identical to SEQ ID NO: 448

SEQ ID NO: 450 - DNA, 364 bp, Homo sapiens
caggtacagctgcagcagtcaggtccaggactggtgaagccctcgcagaccctctcactcacctgtgccatctccggggacagtgtctctagcaaaaatgctgcttggaactggatcaggcagtccccatcgagaggccttgagtggctgggaacgacatactacaggtccaagtggtataatgattatgcagtatctgtgaaaggtcgaatcgccatcaacccagacacatccaagaaccaattctccctccagctgcactctgtgactcccgaggacacggctgtgtattactgtgccaagcagtggctggcaaactggttcgacccctggggccagggaacccaggtcaccgtctcctcag

SEQ ID NO: 451 - DNA, 364 bp, Homo sapiens; identical to SEQ ID NO: 450

SEQ ID NO: 452 - DNA, 367 bp, Homo sapiens
caggtcaccttgagggagtctggtcctgcgctggtggaacccacacagaccctcacactgacctgcaccttctctgggttctcactcagcactagtggaatgtgtgtgagctggatccgtcagcccccagggaaggccctggagtggcttggacgcattgattgggatgatgatgaattctacatcacatctctgaagaccaggctcaccatctccaaggacacctccaaaaaccaggtggtccttacaatgaccaacatggaccctgtggacacagccacgtattactgtgcacggaccttactgggaggtatgaattggtacttcgatttctggggccgtggcaccctggtcactgtctcctcag

SEQ ID NO: 453 - DNA, 367 bp, Homo sapiens
caggtcaccttgagggagtctggtcctgcgctggtggaacccacacagaccctcacactgacctgcaccttctctgggttctcactcagcactggtggaatgtgtgtgagctggatccgtcagccccccgggaaggccctggagtggcttggacgcattgattgggatgatgataaattctacatcacatctctgaagaccaggctcaccatctccaaggacacctccgaaaaccaggtggtccttacaatgaccaacatggaccctgtggacacagccacgtattactgtgcacggaccttagtgggaggtatgaattggtacttcgatttctggggccgtggcaccctggtcactgtctcctcag

SEQ ID NO: 454 - DNA, 367 bp, Homo sapiens
caggtcaccttgagggagtctggtcctgcgctggtggaacccacacagaccctcacactgacctgcaccttctctgggttctcactcagcactagtggaatgtgtgtgagctggatccgtcagcccccagggaaggccctggagtggcttggacgcattgattgggatgatgataaatactacatcacatctctgaagaccaggctcaccatctccaaggacacctccaaaaaccaggtggtccttacaatgaccaacatggaccctgtggacacagccacgtattactgtgcacggaccttagtgggaggtatgaattggtacttcgatctctggggccgtggcaccctggtcactgtctcctcag

SEQ ID NO: 455 - DNA, 367 bp, Homo sapiens
caggtcaccttgagggagtctggtcctgcgctggtggaacccacacagaccctcacactgacctgcaccttctctgggttctcactcagcactagtggaatgtgtgtgagctggatccgtcagcccccagggaaggccctggagtggcttggacgcattgattgggatgatgataaatactacatcacatctctgaagaccaggctcaccatctccaaggacacctccaaaaaccaggtggtccttacaatgaccaacatggaccctgtggacacagccacgtattactgtgcacggaccttagtgggagctatgaattggtacttcgatctctggggccgtggcaccctggtcactgtctcctcag

SEQ ID NO: 456 - DNA, 390 bp, Homo sapiens
caggtgcagctggtgcagtctggggctgaggtgaagaagcctggggcctcagtgaaggtctcctgcaaggcttctggatacaccttcaccagttatgatatcaactgggtgcgacaggccactggacaagggcttgagtggatgggatggatgaaccctaacagtggtaacacaggctatgcacagaagttccagggcagagtcaccatgaccaggaacacctccataagcacagcctacatggagctgagcagcctgacatctgaggacacggccgtatattactgtgcgagaggccgggcggggtattacgatttttggagtacttctagcctggacaatgggggtatggacgtctggggccaagggaccacggtcaccgtctcctca

SEQ ID NO: 457 - DNA, 390 bp, Homo sapiens; identical to SEQ ID NO: 456

SEQ ID NO: 458 - DNA, 390 bp, Homo sapiens; identical to SEQ ID NO: 456

SEQ ID NO: 459 - DNA, 374 bp, Homo sapiens
gaggtgcacctggtggagtctgggggagacttggtacaccctggggggtccctgagactctcctgtgtggcctctggattcacctttactgactatgccatgacctgggtccgccaggctccagggaaggggctggagtgggtctcaactatcagtggaaatggtggtaccacgaacacggcggactccgtgaagggccggttcaccatctccagagacaattccaagaacacgttgtatctggaaatgagcagcctgagcgacgaggacacggccatatattactgtgtgaaagatgttccttcgatgtattacattttttggagtggccaggggacctactggggccagggaaccctggtcaccgtctcctc

SEQ ID NO: 460 - DNA, 374 bp, Homo sapiens; identical to SEQ ID NO: 459

SEQ ID NO: 461 - DNA, 374 bp, Homo sapiens; identical to SEQ ID NO: 459

SEQ ID NO: 462 - DNA, 376 bp, Homo sapiens
gaggtgcagctggtggagtctgggggagggttggtacagcctggggggtccctgagactctcctgtgcagcctctggattcacctttagcagctatgccatgagctgggtccgccaggctccagggaaggggctggagtgggtctcaactattagtaatagtggtggtacgacaaactacgcagactccgtgaagggccggttcaccatctccagagacaattccaagaacacgctgtttctgcaaatgaacagcctgagagccgaggacacggccgtatattactgtgcgaaagatttaccttcgaggtattacgatttttggagtggccaggggaactactggggccagggaaccctggtcaccgtctcctcag

SEQ ID NO: 463 - DNA, 376 bp, Homo sapiens
gaggtgcacctggtggagtctgggggaggcttggtacagcctggggggtccctgagactctcctgtgcagcctctggattcacctttagcagctatgccatgagctgggtccgccaggctccagggaaggggctggagtgggtctcaactattagtggtagtggtggtaccacaaattccgcagactccgtgaagggccggttcaccatctccagagacaattccaagaacacgctgtatctgcaaatgaacagccttagagtcgaggacacggccgtatattactgtgcgaaagatttaccttcgaggtattacgatttttggagtggccaggggaactactggggccagggaaccctggtcaccgtctcctcag

SEQ ID NO: 464 - DNA, 376 bp, Homo sapiens; identical to SEQ ID NO: 462

SEQ ID NO: 465 - DNA, 361 bp, Homo sapiens
caggtcaccttgagggagtctggtcctgcgctggtgaaacccacacagaccctcacactgacctgcaccttctctgggttctcactcagcactagtggaatgtgtgtgagctggatccgtcagcccccagggaaggccctggagtggcttgcacgcattgattgggatgatgataaatactacagcacatctctgcagaccaggctcaccatctccaaggacacctccaagaatcaggtggcccttataatgaccaacatggaccctatggacacagccacgtattactgtgcacgggagatggctacaattacgggtcttgactactggggccagggagccctggtcaccgtctcctcag

SEQ ID NO: 466 - DNA, 361 bp, Homo sapiens
caggtcaccttgagggagtctggtcctgcgctggtgaaacccacacagaccctcacactgacctgcaccttctctgggttctcactcagcactagtggaatgtgtgtgagctggatccgtcagcccccagggaaggccctggagtggcttgcacgcattgattgggatgatgataaatactacagcacatctctgaggaccaggctcaccatctccaaggacacctccaaaaaccaggtggtccttacaatgaccaacatggaccctgtggacacagccacgtattactgtgcacgggagatggctacaattacgggtcttgactactggggccagggaaccctggtcaccgtctcctcag

SEQ ID NO: 467 - DNA, 361 bp, Homo sapiens
caggtcaccttgagggagtctggtcctgcgctggtgaaacccacacagaccctcacactgacctgcaccttctctgggttctcactcagcactagtggaatgtgtgtgagttggatccgtcagcccccagggaaggccctggagtggcttgcactcattgattggactgatgataaatactacagcacgtctctgaagaccaggctcaccatctccaaggactcctccaaaaacgaggtggtccttacaatgaccaacatggaccctgtggacacggccacgtattactgtgcacgggttccccctaccgattatcactttgactcctggggccagggaaccctggtcaccgtctcctcag

SEQ ID NO: 468 - DNA, 361 bp, Homo sapiens; identical to SEQ ID NO: 467

SEQ ID NO: 469 - DNA, 369 bp, Homo sapiens
caggttcagctggtgcagtctggagctgaggtgaagaagcctggggcctcagtgaaggtctcctgcaaggcttctggttacacctttaccagctatggtatcagctgggtgcgacaggcccctggacaagggcttgagtggatgggatggatcagcgcttacaatggtaacacaaactatgcacagaagctccagggcagagtcaccatgaccacagacacatccacgagcacagcctacatggagctgaggagcctgagatctgacgacacggccgtgtattactgtgcgagagatacgagtggctaccgcaatccaggctacggtatggacgtctggggccaagggaccacggtcaccgtctcctca

SEQ ID NO: 470 - DNA, 369 bp, Homo sapiens; identical to SEQ ID NO: 469

SEQ ID NO: 471 - DNA, 361 bp, Homo sapiens
gaggtgcagctggtgcagtctggagcagaggtgaaaaagcccggtgagtctctgaagatctcctgtaagacttctggatatagcttcgccagttactggatcggctgggtgcgccagatgcccgggaaaggcctggagtggatgggcatcatctatccaggtgactccgataccatatacactccgcccttccaaggccaggtcaccatctcagccgacacgtccaccagaactgcctccttggagtggaggagcctgagggcctcggacagcgccatatattactgtgcgaccgggacctttctggcagtgcctggttttgatttctggggccagggaaccctggtcagcgtctcctcag

SEQ ID NO: 472 - DNA, 361 bp, Homo sapiens
gaggtgcagctggtgcagtctggagcagaggtgaaaaagcccggtgagtctctgaagatctcctgtaagacttctggatacagttttaccagctactggatcggctgggtgcgccagatgcccgggaaaggcctggagtggatgggcatcatctatcctggtgactccgataccatatacagcccgcccttccaaggccaggtcaccatctcagccgacacgtccaccagaactgcctacttggagtggaggagcctgaaggcctcggacagcgccatgtattactgtgcgaccgggacctttctggcagtgcctggttttgatttctggggccagggaaccctggtcagcgtctcctcag

SEQ ID NO: 473 - DNA, 382 bp, Homo sapiens
gaagtgcagctggtggagtctgggggaggcttggcacagcctggggggtccctgagactctcctgtgcagcctctggattcaccttcagtacctatagcatgaactgggtccgccaggctccagggaaggggctggagtgggtttcattcattagtagaagtagtaataccatatactacgcagactctgtgaagggccgattcaccatctccagagacaatgccaagaactcactgtatctgcaaatgaacagcctgagagacgaggacacggctgtgtattactgtgcgagagatctccaacggtatggttcggggagttctctgggtccgaactactttgactactggggccagggaaccgtggtcaccgtctcctcag

SEQ ID NO: 474 - DNA, 382 bp, Homo sapiens; identical to SEQ ID NO: 473

SEQ ID NO: 475 - DNA, 382 bp, Homo sapiens
cagctgcacctgcaggagtcgggcccaggactggtgaagccttcggagaccctgtccctcacctgcactgcctctggtggctccatcagcagtagtagttactactggggctggatccgccagcccccagggaaggggctggagtggattgggagcgtctattatagtgggagaacctactacaacccgtccctcaagagtcgagtcaccatctccgtagacacgtccaagaaccagttctccctgaagctgagctctgtgaccgccgcagacacggctgtgtattactgtgcgagacgggcgcagtattactatgatagtagtggttattatgatgcttttgatatctggggccaagggacaacggtcaccgtctcttcag

SEQ ID NO: 476 - DNA, 382 bp, Homo sapiens
cagctgcagctgcaggagtcgggcccaggactggtgaagccttcggagaccctgtccctcacctgcactgtctctggtggctccatcaccagtactacttactactggggctggatccgccagcccccagggaaggggctggagtggattgggagtgtctattatagtgggagaacctactacaacccgtccctcaagagtcgagtcaccatatccgtagacacgtccaagaaccagttctccctgaagctgagctctgtgaccgccgcagacacggctgtgtattactgtgcgagacgggcgcagtattactatgatagtagtggttattatgatgcttttgatatctggggccaagggacaacggtcaccgtctcttcag

SEQ ID NO: 477 - DNA, 376 bp, Homo sapiens
gaggtgcagctggtggagtctgggggaggcttggtacagcctggggggtccctgagactctcctgtgcagcctctggattcaccttcagtacctacgacatgcactgggtccgccaagctacaggaaaaggtctggagtgggtctcagctattggtactgctggtgacacatactatccaggctccgtgcagggccgattcaccatctccagagaaaatgccaagaactccttgtatcttcaaatgaacagcctgagagccggggacacggctgtgtattactgtgcaagagatgtatttcgctatgatagtagtggtcgaccccggtatgcttttgatatctggggccaagggacaatggtcaccgtctcttcag

SEQ ID NO: 478 - DNA, 376 bp, Homo sapiens
gaggtgcagctggtggagtctgggggaggcttggtacagcctggggggtccctgagactctcctgtgcagcctctggattccccttcagtacgtacgacatgcactgggtccgccaacctacaggaaaaggtctggagtgggtctcaagtattggtactgctggtgagacggactatccaggctccgtgaagggccgattcaccatctccagagaaaatgtcaagagctccttgtatcttcagatgaacagcctgagagccggggacacggctgtgtattactgtgcaagagatgcatttcgctatgatagtagtggtcgaccccgatatgcttttgatatctggggccaagggacagtggtcaccgtctcttcag

SEQ ID NO: 479 - DNA, 352 bp, Homo sapiens
caggtgcagcttcaggagtcgggcccaggattggtgaagccttcggagaccctgtccctcacctgcacagtgtctggtggctccatgagtagtgactattggagctggatccggcagcccccagggaagggactggagtggattggatatatctattacagggggagtaccaatctcaacccctccctccagagtcgactcaccatgtcagtagacacgtccaagaaccagttctccctgaagctgagctcagtgaccgctgcggacacggccgtctactactgtgcgagagaaacgcgctggaactggatcgactcctggggccagggaaccccggtcaccgtctcctcag

SEQ ID NO: 480 - DNA, 352 bp, Homo sapiens
caggtgcagcttcaggagtcgggcccaggattggtgaagccctcggagaccctgtccctcacctgcacagtctctggtggctccatgagtcgtgactattggagctggatccggcagtccccagggaagggactggagtggattggctatatctattacagggggagtaccaactacaacccctccctccagagtcgagttaccatgtcagtggacacgtccaagaatcagttctccctgaagctgagctcagtgaccgctgcggacacggccgtctattactgtgcgagagagacgcgctggaactggttcgactcctggggccagggaaccccggtcaccgtctcctcag

SEQ ID NO: 481 - DNA, 351 bp, Homo sapiens
gaggtgcagctggtggagtctggaggaggcttgatccagcctggggggtccctgagactctcctgtgcagcctctgggttgaccgtcaatagcaactacatgacttgggtccgccaggctccagggaaggggctggagtgggtctcagttatttatagcggtggtagcacattctacgcagactccgtgaagggccgattcaccatctccagagacaattccaagaacacgctgtatcttcaaatgaacagcctgagagccgaggacacggccgtgtattactgtgcgagagatttggtcgactacggtatggacgtctggggccaagggaccacggtcaccgtctcctca

SEQ ID NO: 482 - DNA, 351 bp, Homo sapiens
gaggtgcagctggtggagtctggaggaggcttgatccagcctggggggtccctgagactctcctgtgcagcctctgggttaaccgtcagtagcaactacatgagctgggtccgccaggctccagggaaggggctggagtgggtctcaattatttatagcggtggtagcacattctacacagactccgtgaagggccgattcaccatctccagagacaattccaagaacacgctatatcttcaaatgaacagcctgagagccgaggacacggccgtgtattactgtgcgagagatttagtggtctacggtatggacgtctggggccgagggaccacggtcaccgtctcctca

SEQ ID NO: 483 - DNA, 367 bp, Homo sapiens
gacgtgcagttggtagagtctgggggagtcgtggttcagcctggggggtccctgagactcgcctgtgcagcctctggattcacctttgatgattatgccatgcactgggtccgtcaggcgccggggaagggtctggagtgggtctctcttattactagggatggtggtagcacccactatgcagactctgtgaagggtcgattcaccatctccagagacaacagcaaaaactccctctatctgcaaatgaacagtctgagactggaggacaccgccttctattactgtgcaaaagatggccgtagagatggctacaatcacgctctggacaattggggccagggaaccctggtcaccgtctcctcag

SEQ ID NO: 484 - DNA, 367 bp, Homo sapiens; identical to SEQ ID NO: 483

SEQ ID NO: 485 - DNA, 367 bp, Homo sapiens
caggtgcagctggtggagtctgggggaggcgtggtccagcctgggaggtccctgagactctcctgtgcagcctctggattcagcttcagtagtcatgtcatgcactgggtccgccaggctccaggcaagggactggaatgggtggcagttatatcgtatgatggaagtaataaattttatgcagactccgtgaagggccgattcaccatctccagagacagttccaagaacacggtgtttctgcaaatgaacagccttagagatgaggacacggctatgtattactgtgcgaaagggagagagtcgacttcaataggggggtggttcgacccctggggccagggaaccctggtcaccgtctcctcag

SEQ ID NO: 486 - DNA, 367 bp, Homo sapiens
caggtgcagctggtggagtctgggggaggcgtggtccagcctgggaggtccctgagactctcctgtgcagcctctggattcagcttcagtagtcatgtcatgcactgggtccgccaggctccaggcaagggactggaatgggtggcagttatatcgtatgatggaagtaataaatattatgcagactccgtgaagggccgattcaccatctccagagacaattccaagaacacgctgtttttgcaaatgaacagcctgagagatgaggacacggctatgtattactgtgcgaaagggagagaatcgacctcaataggggggtggttcgacccctggggccagggaaccctggtcaccgtctcctcag

SEQ ID NO: 487 - DNA, 367 bp, Homo sapiens
caggtcaccttgagggagtctggtccttcgctggtgaaacccacgcagaccctcacactgacctgcaccttctctgggttctcactcagcacgagtggaatgtgtgtgagctggatccgtcagcccccagggaaggccctggagtggcttgcacgcattgattgggatgatgataaattttacagcacatctctgaagaccaggctcaccatctccaagggcacctccagaaaccaggtggtccttacaatgaccaacatgggccctgtggacacagccacgtattactgtgcacggaccatagtgggaggtactaattggtacttcgatctctggggccgtggcaccctggtcactgtctcctcag

SEQ ID NO: 488 - DNA, 367 bp, Homo sapiens
caggtcaccttgagggagtctggtcctgcgctggtgaaacccacacagaccctcacactgacctgcaccttctctgggttctcactcagcactagtggaatgtgtgtgagctggatccgtcagcccccagggaaggccctggagtggcttgcacgcattgattgggatgatgataaatactacagcacatctctgaagaccaggctcaccatctccaaggacacctccaaaaaccaggtggtccttacaatgaccaacatggaccctgtggacacagccacgtattactgtgcacggaccatagtgggaggtactaactggtacttcgatctctggggccgtggcaccctggtcactgtctcctcag

SEQ ID NO: 489 - DNA, 361 bp, Homo sapiens
cagctgcagctgcaggagtcgggcccaggactggtgaagccttcggagaccctgtccctcacctgcactgtctctggtggctccatcagcagtagtagttactactggggctggatccgccagcccccagggaaggggctggagtggattgggaatttctattatattgggagtaccaactacaacccgtccctcaagagtcgagtcaccatatccgttgacacgtccaggaaccagttctccctgaagctcacctctgtgaccgccgcagacacggctgtgtattactgtgcgagacgggtcatgggcagtggctggcttgactcctggggccagggaaccctggtcaccgtctcctcag

SEQ ID NO: 490 - DNA, 361 bp, Homo sapiens; identical to SEQ ID NO: 489

SEQ ID NO: 491 - DNA, 360 bp, Homo sapiens
caggtccagctggtgcagtctggggctgaggtgaagaagcctgggtcctcggtgaaggtctcctgcaaggcttctggaggcaccttcagcagctatgctatcagctgggtgcgacaggcccctggacaagggcttgagtggatgggagggatcatccctatctttggtacagcaaactacgcacagaagttccagggcagagtcacgattaccgcggacgaatccacgagcacagcctacatggagctgagcagcctgagatctgaggacacggccgtgtattactgtgcgagagattacagctatggttcctacggtatggacgtctggggccaagggaccacggtcaccgtctcctca

SEQ ID NO: 492 - DNA, 361 bp, Homo sapiens
gaggtgcagctggtggagtccgggggaggcttagttcagcctggggggtccctgagactctcctgtgcagcctctggattcaccttcagtagctactggatgcactgggtccgccaagctccagggaaggggctggtgtgggtctcacgtattaatagtgatgggagtagtacaacctacgcggactccgtgaagggccgattcaccatctccagagacaacgccaagaacacgctgtatctgcaaatgaacagtctgagagccgaggacacggctgtgtattactgtgcaagaaattccgatgactacggtgacccctttgactactggggccagggaaccctggtcaccgtctcctcag

SEQ ID NO: 493 - DNA, 364 bp, Homo sapiens
caggtgcagctggttgagtctgggggaggcgtggtccagcctgggaggtccctgagactctcctgtgcagcgtctggattcaccttcagtaactatggcatgcactgggtccgccaggctccaggcaaggggctggagtgggtggcagttatatggtatgatggaagtaataaatactatacagactccgtgaagggccgattcaccatctccagagacaactccaagaacacgctgtatctgcaaatgaacagtttgagagtcgaggacacggctgtgtattactgtgcgagagaaggtatggtgggagctactacgggatttgacttctggggccagggaaccctggtcaccgtctcctcag

SEQ ID NO: 494 - DNA, 382 bp, Homo sapiens
gacgtgcagctggtggagtctgggggaggcctggtcaagcctggggggtccctgagactctcctgtgcagcctctggattcaccttcagtagttataccatgaactgggtccgccaggctccagggaaggggctggagtgggcctcatccattagtagcagtagttattacatatactatgcagactcagtgaagggccgattcaccatctccagagacaatgccaagaactcactgtatctgcaaatgaacagcctgagagccgaggacacgggtgtgtattactgtgcgagagataatgcacgaggatattgtagtagtaccttctgccccgtgacctttgactcctggggccagggaaccctggtcaccgtctcctcag

SEQ ID NO: 495 - DNA, 367 bp, Homo sapiens
gaggtgcagctggtggagtctgggggaggtgtggtacggcctggggggtccctgagactctcctgtgcagcctctggattcacctttgatgattatggcatgagctgggtccgccaagctccagggaaggggctggagtgggtctctggtattaattggaatggtggtagcacaggttatgcagactctgtgaagggccgattcaccatctccagagacaacgccaagaactccctgtatctgcaaatgaacagtctgagagccgaggacacggccttgtattactgtgcgagagatccccatagcagtggctggcatgatgcttttgatatctggggccaagggacaatggtcaccgtctcttcag

SEQ ID NO: 496 - DNA, 361 bp, Homo sapiens
caggtcaccttgagggagtctggtcctgcgctggtgaaacccacacagaccctcacactgacctgcaccttctctgggttctcactcagcactagtggaatgagtgtgagctggatccgtcagcccccagggaaggccctggagtggcttgcacgcattgattgggatgatgataaatactacagcacatctctgaacaccaggctcaccatttccaaggacacctccaaaaaccaggtggtccttacaatgaccaacatgaaccctgtggacacagccacgtattactgtgcacggatgaccgctagtattgtagcgtttgactactggggccagggaaccctggtcaccgtctcctcag

SEQ ID NO: 497 - DNA, 361 bp, Homo sapiens
caggtcaccttgagggagtctggtcctgcgctggtgaaacccacacagaccctcacactgacctgcaccttctctgggttctcactcagcactagtggaatgtgtgtgagctggatccgtcagcccccagggaaggccctggagtggcttgcacgcattgattgggatgatgataaatactacagcacatctctggagaccaggctcaccatctccaaggacacctccaaaaaccaggtggtccttacaatgaccaacatggaccctgtggacacagccacttattactgtgcacggaccctagcggcagctactacgtccgactactggggccagggaaccctggtcaccgtctcctcag

SEQ ID NO: 498 - DNA, 361 bp, Homo sapiens
caggtcaccttgagggagtctggtcctgcgctggtgaaacccacacagaccctcacactgacctgcaccttctctgggttctcactcagcactagtggaatgtgtgtgagctggatccgtcagcccccagggaaggccctggagtggcttgcactcattgattgggatgatgataaatactacagcacatctctgaagaccaggctcaccatctccaaggacacctccaaaaaccaggtggtccttacaatgaccaacatggaccctgtggacacagccacgtattactgtgcacggataggggcagcagctggacattttgactactggggccagggaaccctggtcaccgtctcctcag

SEQ ID NO: 499 - DNA, 379 bp, Homo sapiens
gaggtgcagctggtggagtctggaggaggcttgatccagcctggggggtccctgagactctcctgtgcagcctctgggttcaccgtcagtagcaactacatgagctgggtccgccaggctccagggaaggggctggagtgggtctcagttatttatagcggtggtagcacatactacgcagactccgtgaagggccgattcaccatctccagagacaattccaagaacacgctgtatcttcaaatgaacagcctgagagccgaggacacggccgtgtattactgtgcgagagagcgatattgtagtggtggtagctgctactccggagtgggctactttgactactggggccagggaaccctggtcaccgtctcctcag

SEQ ID NO: 500 - DNA, 381 bp, Homo sapiens
caggtccagctggtgcagtctggggctgaggtgaagaagcctgggtcctcggtgaaggtctcctgcaaggcttctggaggcaccttcagcagctatgctatcagctgggtgcgacaggcccctggacaagggcttgagtggatgggagggatcatccctatctttggtacagcaaactacgcacagaagttccagggcagagtcacgattaccgcggacgaatccacgagcacagcctacatggagctgagcagcctgagatctgaggacacggccgtgtattactgtgctggagctctgtgccccggtggtggtagctgctactactactactacggtatggacgtctggggccaagggaccacggtcaccgtctcctca

SEQ ID NO: 501 - DNA, 360 bp, Homo sapiens
gaggtgcagctggtggagtccgggggaggcttagttcagcctggggggtccctgagactctcctgtgcagcctctggattcaccttcagtacgtactggatgcactgggtccgccaagctccagggaagggtctggtgtgggtctcacgtattaatagtgatgggagtagcacaacctacgcggactccgtgaagggccgattcaccatctccagagacaacgccaagaacacgctgtatttgcaaatgaacagtctgagagccgaggacacggctgtatattactgtgcaagagaggttagagtggctacgattgggatggacgtctggggccaagggaccacggtcaccgtctcctca

SEQ ID NO: 502 - DNA, 382 bp, Homo sapiens
caggtgcagctggtggagtctgggggaggcgtggtccagcctgggaggtccctgagactctcctgtgcagcctctggattcaccttcagtagctatggcatgaactgggtccgccaggctccaggcaaggggctggagtgggtggcagttatatcatatgatggaagtaataaatactatgcagactccgtgaagggccgatccaccatctccagagacaattccaagaacacgctgtatctgcaaatgaacagcctgagagctgaggacacggctgtgtattactgtgcgaaaattgggggactatattgtagtggtggtaactgctactcgggttactttgactactggggccagggaaccctggtcaccgtctcctcag

SEQ ID NO: 503 - DNA, 382 bp, Homo sapiens
caggtgcagctggtggagtctgggggaggcgtggtccagcctgggaggtccctgagactctcctgtgcagcctctggattcaccttcagtagctatgctatgcactgggtccgccaggctccaggcaaggggctggagtgggtggcagttatatcatatgatggaagtagtaaatattacgcagactccgtgaagggccgattcaccatctccagagacaattccaagaacacgctgtatctgcaaatgaacagcctgagagctgaggacacggctgtgtattactgtgcgagagatggccacacattactatggttcggggaggaccctctaaactactttgactactggggccagggaaccctggtcaccgtctcctcag

SEQ ID NO: 504 - DNA, 378 bp, Homo sapiens
gaggtgcagctggtggagtctggaggaggcttgatccagcctggggggtccctgagactctcctgtgcagcctctgggttcaccgtcagtagcaactacatgaactgggtccgccaggctccagggaaggggctggagtgggtctcagtaatttatagcggtggtagcacatactacgcagactccgtgaagggccgattcaccatctccagagacagttccaagaacacgctgtatcttcaaatgaacagcctgagagccgaggacacggccgtgtattactgtgcgacctttgcacctccaggtatggttcggggagttattgtctactacggcatggacgtctggggccaagggaccacggtcaccgtctcctca

SEQ ID NO: 505 - DNA, 361 bp, Homo sapiens
caggtcaccttgaaggagtctggtcctgtgctggtgaaccccacagagaccctcacgctgacctgcaccgtctctgggttctcactcagcgatgctagaatgggtgtgagctggatccgtcagaccccagggaaggccctggagtggcttgcagacattttttcgaatgacgaaaaatcgtacaacacatccctgataagcagactcagcatctccagggacaccacccagagtcacgtggtccttaccatgaccaacatggaccctgtggacacaggcacatattactgtgcgcggatgcaacggccgatttcgtggttcgacccctggggtcagggagccctggtcaccgtctcctcag

SEQ ID NO: 506 - DNA, 378 bp, Homo sapiens
caggtgcagctgcaggagtcgggcccaggactggtgaagccttcggagaccctgtccctcacctgcactgtctctggtggctccatcagtagttactactggagctggatccggcagcccccagggaagggactggagtggattgggtatatctattacagtgggagcaccaactacaacccctccctcaagagtcgagtcaccatatcagtagacacgtccaagaaccagttctccctgaagctgagctctgtgaccgctgcggacacggccgtgtattactgtgcgaggatttacgatttttggagtggttattatgctggtggcccctccggtatggacgtctggggccaagggaccacggtcaccgtctcctca

SEQ ID NO: 507 - DNA, 385 bp, Homo sapiens
cagctgcagctgcaggagtcgggcccaggactggtgaagccttcggagaccctgtccctcacctgcactgtctctggtggctccatcaggagtagtagttactactggggctggatccgccagcccccagggaaggggctggagtggattgggagtatcttttatagtgggagcacctactacaacccgtccctcaagagtcgagtcaccttatccgtagacacgtccaagaatcagttctccctgaagctgaactcagtgaccgccgcagacacggctgtatattactgtgcgagcccttattgtgatagtaccagctgctatgtaggctccgtgggatatttccagcactggggccagggcaccctgatcaccgtctcctcag

SEQ ID NO: 508 - DNA, 382 bp, Homo sapiens
caggtgcagctggtgcaatctgggcctgagttgaagaagcctggggcctcagtgaaggtttcctgcaaggcttctggatacaccttcactagctatgctatgaattgggtgcgacaggcccctggacaaggacttgagtggatgggagggatcaacaccaacactgggaacccaacgtatgcccagggcttcacaggacggtttgtcttctccttggacacctctgtcagcacggcatatctgcagatcagcagcctaaaggctgaggacactgccgtgtattattgtgcgagagatcccacctattgtactagtaccaggtgctatcccaaacactggttcgacccctggggccagggaaccctggtcaccgtctcctcag

SEQ ID NO: 509 - DNA, 361 bp, Homo sapiens
gaggtgcagctggtggagtcggggggaggcttggtacagcctggggggtccctgagactctcctgtgcagtctctggattcaccgtcagtacctacgacatgcactgggtccgccaagttacaggaaaaggtctggagtgggtctcagttattggtactgctggtgacacatactatctaggctccgtgaagggccgattcaccatctccagagaaaatgccaagaactccttatatcttcaaatgaacagcctgagcgccggggacacggctgtttattactgtgcaagaggggcctctggaacccccaccgtggtcttggactactggggccagggaaccctggtcaccgtctcctcag

SEQ ID NO: 510 - DNA, 369 bp, Homo sapiens
gaggtgcagctggtggagtccgggggaggcttagttcagcctggggggtccctgagactctcctgtgcaggctctggattcaccttcagtagcttctggatgcactgggtccgccaagctccagggaaggggctggtgtgggtctcacgtgttgatagtgatgggagtagcacaacctacgcggactccgtgaagggccgattcaccatctccagagacaacgccaagaacacgctgtatctgcaaatcaacagtctgagagccgaggacacggctgtgtattattgtgcaagaggcgaggacagtatctacgggagaattgacggtatggacgtctggggccaagggaccacggttaccgtctcctca

SEQ ID NO: 511 - DNA, 360 bp, Homo sapiens
gaggtgcagctggtggagtccgggggaggcttagttcagcctggggggtccctgagactctcctgtgcagcctctggattcaccttcagtagctactggatgcactgggtccgccaagctccagggaaggggctggtgtgggtctcacgtattaatagtgatgggagtagcacaagctacgcggactccgtgaagggccgattcaccatctccagagacaacgccaagaacacgctgtatctgcaaatgaacagtctgagagccgaggacacggctgtgtattactgtgcaagagttgggatatactactactacggtatggacgtctggggccaagggaccacggtcaccgtctcctca

SEQ ID NO: 512 - DNA, 369 bp, Homo sapiens
gaggtgcagttggtggaatccgggggaggcttagtgcagccgggggggtccctgagactctcgtgtgcagcctctggattcaacttcggtcgtcactggatgcactgggtccgccaaactgcagggaaggggctggagtgggtctcacgtctcagcgatgatggcaccaccaccagttatgcggactccgtgaagggccgattcaccatctccagagacaacggcaggaacacggtgtctttgcaaatgaatagcctgagagtcgaagacacggctgtgtattactgtgcaagaggggccggggagaacatactggtgaagggggctatggacgtctggggccaagggaccacggtcaccgtctcttca

SEQ ID NO: 513 - DNA, 369 bp, Homo sapiens
gaagtgcagctggtggagtctgggggaggcttggtacagcctggcaggtccctgagactctcctgtgcagcctctggattcacctttgatgattatgccatgcactgggtccggcaagctccagggaagggcctggagtgggtctcaggtgttagtcggaatagtgataaaataggctatgcggactctgtgaagggccgattcaccatctccagagacaacgccaagaactccctgtatctgcaaatgaacagtctgagagctgaggacacggccttgtattattgtgcaaaagatatagttcactggcacttccctggctacggtatggacgtctggggccaagggaccacggtcaccgtctcctca

SEQ ID NO: 514 - DNA, 369 bp, Homo sapiens
gaagtgcagctggtggagtctgggggaggcttggtacagcctggcgggtctctgagactggcctgtgcagtctctggactcatccttgacgactatgccttgcactgggtccggctagctccagggaagggcctggagtgggtctcaggtattaattggaatagtggtactatacactatgcggactctgtgaggggccgattcaccacctccagagacaacgccaagagatccctgtatctgcaaatgaacagtctcagacctgaagacacggccttgtactactgtgcgaaagatatggggaacggattttattactactatggtctagacgtctggggccaagggaccagtgtcactgtctcctca

SEQ ID NO: 515 - DNA, 364 bp, Homo sapiens
caggtccacctgcaggagtcgggcccaggactcgtgaagccgtcggagaccctgtccctcatctgcactgtcgctggagacaccatgactaatttctactggagttggattcgacagtccccagggaaggcactggagtggattggatttgtgttttccagggggaccaccaggcagaatccgtccctcagcagtcgagtcgccttgtcaatagacacagccaggagtcaattttacctgaagttgacctctgtgacccccgctgacacggccatttatttctgtgcgaggggagtcggtaggcggtgggaggtacccggcttcttcgactcctggggccagggagccctggtcaccgtctcct

SEQ ID NO: 516 - DNA, 370 bp, Homo sapiens
gaggtgcagctgttggagtctgggggaggcttggtacagcctggggggtccctgagactctcctgtgcagcctctggattcacctttagcagctatgccatgagctgggtccgccaggctccagggaaggggctggagtgggtctcagctattagtggtagtggtggtagcacatactacgcagactccgtgaagggccggttcaccatctccagagacaattccaagaacacgctgtatctgcaaatgaacagcctgagagccgaggacacggccgtatattactgtgcgaaatatttcgtggggaccgagggaacaaataactggttcgacccctggggccagggaaccctggtcaccgtctcctcag

SEQ ID NO: 517 - DNA, 370 bp, Homo sapiens
caggtgcagctggtgcagtctggggctgaggtgaagaagcctggggcctcagtgaaggtctcctgcaaggcttctggatacaccttcaccggctactatatgcactgggtgcgacaggcccctggacaagggcttgagtggatgggatggatcaaccctaacagtggtggcacaaactatgcacagaagtttcagggcagggtcaccatgaccagggacacgtccatcagcacagcctacatggagctgagcaggctgagatctgacgacacggccgtgtattactgtgcgagaggcaatgattacgtttgggaaacgaacaactggttcgacccctggggccagggaaccctggtcaccgtctcctcag

SEQ ID NO: 518 - DNA, 358 bp, Homo sapiens
caggtgcaggtggtgcagtctggggctgaggagaagaagcctggggcctcagtgaaggtctcctgcaaggcttctggatacaccttcaccggctactatatacactgggtgcgacaggcccctggacaagggcttgagtggatggggtggatcaatcctaacagtggtgccacaaactatggacagatgtttaagggcagggtcaccttgaccagggacacgaccatcagcacagcctacatggagctcagcggactgagatctgacgacacggccgtgtattactgtgcgagagtagacgcagctgactggggactctcgtactggggccagggaaccctggtcaccgtctcctcag

SEQ ID NO: 519 - DNA, 370 bp, Homo sapiens
caggtgcagctggtggagtctgggggaggcgtggtccagcctgggaggtccctgagactctcctgtgcagcctctggattcaccttcagtagctatggcatacactgggtccgccaggctccaggcaaggggctggagtgggtggcagttatatcagatgatggaagttttaaatactatgcagactccgtgaagggccgattcaccatctccagagacaatcccaagaacacgctgtatctgcaaatgaacagcctgagagctgaggacacggctatgtattactgtgcgagagattcgtcaactgatacatctttggtttcctggttcgacccctggggccagggaaccctggtcaccgtctcctcag

SEQ ID NO: 520 - DNA, 370 bp, Homo sapiens
caggtccagctggtgcagtctggggctgaggtgaagaagcctgggtcctcggtgaaggtctcctgcaaggcttctggaggcaccttcagcagctatgctatcagctgggtgcgacaggcccctggacaagggcttgagtggatgggagggatcatccctatctttggtacagcaaactacgcacagaagttccagggcagagtcacgattaccgcggacgaatccacgagcacagcctacatggagctgagcagcctgagatctgaggacacggccgtgtattactgtgcgagagggtgtatggtttaccagctgtcacacaactggttcgacccctggggccagggaaccctggtcaccgtctcctcag

SEQ ID NO: 521 - DNA, 363 bp, Homo sapiens
caggtgcagctggtggagtctgggggaggcgtggtccagcctgggaggtccctgagactctcctgtgcagcctctggattcaccttcaatagctatgctatgcactgggtccgccaggctccaggcaaggggctggagtgggtggcacttatatcatatgatggaattaataaatactacgcagactccgtgaggggccgattcaccatctccagagacaattccaagaacacactgtatctccaaatgaacagcctgagagctgacgacacggctgtgtattactgtgcgagatccaaccaggggagttactactacggtatggacgtctggggccaagggaccacggtcaccgtctcctca

SEQ ID NO: 522 - DNA, 358 bp, Homo sapiens
caggtgcagctgcaggagtcgggcccaggactggtgaagccttcggagaccctgtccctcacctgcactgtctctggtggctccatcagtagttactactggagctggatccggcagcccccagggaagggactggagtggattgggtatatctattacagtgggagcaccaactacaacccctccctcaagagtcgagtcaccatatcagtagacacgtccaagaaccagttctccctgaagctgagctctgtgaccgctgcggacacggccgtgtattactgtgcgagagagggagaccgcccaggtgatgcttttgatatctggggccaagggacaatggtcaccgtctcttcag

SEQ ID NO: 523 - DNA, 370 bp, Homo sapiens
gaggtgcagctggtggagtctgggggaggcctggtcaagcctggggggtccctgagactctcctgtgcagcctctggattcaccttcagtagctatagcatgaactgggtccgccaggctccagggaaggggctggagtgggtctcatccattagtagtagtagtagttacatatactacgcagactcagtgaagggccgattcaccatctccagagacaacgccaagaactcactgtatctgcaaatgaacagcctgagagccgaggacacggctgtgtattactgtgcgagagacctacgatttttggagtggttcttaaactactttgactactggggccagggaaccctggtcaccgtctcctcag

SEQ ID NO: 524 - DNA, 367 bp, Homo sapiens
gaggtgcagctggtggagtctggaggaggcttgatccagcctggggggtccctgagactctcctgtgcagcctctgggttcaccgtcagtagcaactacatgacctgggtccgccaggctccagggaaggggctggagtgggtctcagttatttatagcggtggtagcacatactacgcagactccgtgaagggccgattcaccatctccagagacaattccaagaacacgctgtatcttcaaatgaacagcctgagagccgaggacacggccgtgtattactgtgcgagaggaggcggatattgtagtggtggtagctgcgttgtcggctactggggccagggaaccctggtcaccgtctcctcag

SEQ ID NO: 525 - DNA, 370 bp, Homo sapiens
caggtgcagctggtggagtctgggggaggcgtggtccagcctgggaggtccctgagactctcctgtgcagcgtctggattcaccttcagtaactatggcatgcactgggtccgccaggctccaggcaaggggctggagtgggtggcagttatttggtatgatggaactaaaaaatactacacagactccgtgaagggccgattcaccatctccagagacaattccaagaacacgctgtatctgcaaatgaacagcctgagagccgaggacacggctgtgtattattgtgcgagagattttcccccccttaacagtggcacagaaccctttgactcctggggccagggaaccctggtcaccgtctcctcag

SEQ ID NO: 526 - DNA, 370 bp, Homo sapiens
gaggtgcagctggtggagtctgggggaggcttggtacagcctggggggtccctgagactctcctgtgcagcctctggattcaccttcagtagctatagcatgaactgggtccgccaggctccagggaaggggctggagtgggtttcatacattagtagtagtagtagtaccatatactacgcagactctgtgaagggccgattcaccatctccagagacaatgccaagaactcactgtatctgcaaatgaacagcctgagagacgaggacacggctgtgtattactgtgcgagagtcccacggggtgactacggtgactccctctactttgagtactggggccagggaaccctggtcaccgtctcctcag

SEQ ID NO: 527 - DNA, 370 bp, Homo sapiens
caggttcagctggtgcagtctggagctgaggtgaagaagcctggggcctcagtgaaggtctcctgcaaggcttctggttacacctttaccagctatggtatcagctgggtgcgacaggcccctggacaagggcttgagtggatgggatggatcagcgcttacaatggtaacacaaactatgcacagaagctccagggcagagtcaccatgaccacagacacatccacgagcacagcctacatggagctgaggagcctgagatctgacgacacggccgtgtattactgtgcgagagcccccttctcgtatagcagcagctggcatcttcatgactactggggccagggaaccctggtcaccgtctcctcag

SEQ ID NO: 528 - DNA, 384 bp, Homo sapiens
gaggtgcttctgttggagtctgggggaggcttggtacagcctggcgggtccctgagactctcgtgtgcagcctctggattcccctttggcagctatgccatgagctgggtccgccaggctccagggaaggggctggagtgggtctcagttattagtggtagtgcagatactacatactacgcagactccgtgaagggccggttcaccatatccagagacaattccaagaacacgctgtatctccaaatgaacagcctaggagccgaggacacggccgtatattactgtgcgaaggacgcccccgatgttgttctcgtaccagttccatactaccactacggtttggaggtctggggccaagggaccacggtcaccgtctcctca

SEQ ID NO: 529 - DNA, 384 bp, Homo sapiens
caggtgcagctgcaggagtcgggcccaggactggtgaagccttcacagaccctgtccctcacctgcactgtctctggtggctccatcagcagtggtggttactactggagctggatccgccagcacccagggaagggcctggagtggattgggtacatctattacagtgggagcacctactacaacccgtccctcaagagtcgagttaccatatcagtagacacgtctaagaaccagttctccctgaagctgagctctgtgactgccgcggacacggccgtgtattactgtgcgagagatccgagctacgatattttgactggttatgtgcctcatgggggtatggacgtctggggccaagggaccacggtcaccgtctcctca

SEQ ID NO: 530 - DNA, 384 bp, Homo sapiens
gacgtgcagctggtggagtctgggggaggcttggtccagcctggggggtccctgagactctcctgttcagcctctggattcacatttagtaactattggatgagctgggtccgccaggctccagggaaggggctggagtgggtggccaacataaggcaagatggaagtgagaaatactatgtgcactctgtgaggggccgattcaccatctccagagacaacgccaagaattcactgtatctgcaaatgaacagtctgggagccgaggacacggctgtctattactgtgcgagcttgtattatggttcggggagttttagtacggattactactactacggtatggacgtctggggccaagggaccacggtcaccgtctcctca

SEQ ID NO: 531 - DNA, 387 bp, Homo sapiens
caggtcaccttgagggagtctggtcctgcgctggtgaaacccacacagaccctcacactgacctgcaccttctctgggttctcactcagcactagtggaatgtgtgtgagctggatccgtcagcccccagggaaggccctggagtggcttgcactcattgattgggatgatgataaatactacagcacatctctgaagaccaggctcaccatctccaaggacacctccaaaaaccaggtggtccttacaatgaccaacatggaccctgtggacacagccacgtattactgtgcacggatgagggttacgatttttggagtggcatcttactactactactacggtatggacgtctggggccaagggaccacggtcaccgtctcctca

SEQ ID NO: 532 - DNA, 361 bp, Homo sapiens
cagatcaccttgaaggagtctggtcctacgctggtgaaacccacacagaccctcacgctgacctgcaccttctctgggttctcactcagcactagtggagtgggtgtgggctggatccgtcagcccccaggaaaggccctggagtggcttgcactcatttattgggatgatgataagcgctacagcccatctctgaagagcaggctcaccatcaccaaggacacctccaaaaaccaggtggtccttacaatgaccaacatggaccctgtggacacagccacatattactgtgcacacagacggaacgcggtggtacaatttgactactggggccagggaaccctggtcaccgtctcctcag

SEQ ID NO: 533 - DNA, 364 bp, Homo sapiens
cagatcaccttgaaggagtctggtcctgcgctggtgaaacccacacagaccctcacgctgacctgcaccttctctgggttctcactcagcactagtggagtgggtgtgggctggatccgtcagcccccaggaaaggccctggagtggcttgcactcatttattgggatgatgataagtactacagcccatctctgaagagcaggctcgccatcaccaaggacacctccaaaaaccaggtggtccttacaatgaccaacatggaccctgtggacacagccacatattactgtgcataccgaacacccgggtatagcagtggctggtacttctggggccagggaaccctggtcaccgtctcctcag

SEQ ID NO: 534 - DNA, 361 bp, Homo sapiens
cagatcaccttgagggagtctggtcctacgctggtgaaacccacacagaccctcacgctgacctgcaccttctctgggttctcactcagcactagtggagtgggtgtgggctggatccgtcagccccccggaaaggccctggagtggcttgcactcatttattgggatgatgataagcgctacagcccatctctgaagagcaggctcaccatcaccaaggacacctccaaaaaccagctggtccttacattgaccaacatggaccctgtggacacagccacctattactgtgcacaccgaaatacgatttttgacggatttgactactggggccagggaaccctggtcaccgtctcctcag

SEQ ID NO: 535 - DNA, 370 bp, Homo sapiens
caggtgcagctggtggagtctgggggaggcgtggtccagcctgggaggtccctgagactctcctgtgcagcctctggattcaccttcagtagctatgctatgcactgggtccgccaggctccaggcaaggcgctggagtgggtgacagttatttcatatgatggaagtaatacattgtccgcagactccgtgaagggccgattcaccatctccagagacaattccaacaacacgctgtatctgcaaatgaacagcctgagaaatgaggacacggctgtctattggtgtgcgagagacgacgacccttatagtgggtactcggcggggtttgactactggggccagggaaccctggtcaccgtctcctcag

SEQ ID NO: 536 - DNA, 370 bp, Homo sapiens
caggtgcagctggtggagtccgggggaggcgtggtccagcctgggaggtccctgagactctcctgtgcagcctctggattcacctttaggacctatgacatgcactgggtccgccaggctccaggcaaggggctggagtgggtggcagttatatcttatgatggaagtattaaatactttgcagactccgtgaaggaccgtttcaccatctccagagacaattcccagagcacgctgtatctgcagatgaacagcctgagagctgaggacacggctgtgtattactgtgcgagagaacgcagtgggagctactatgcccgagtggagttgggctactggggccagggaaccctggtcaccgtctcctcag

SEQ ID NO: 537 - DNA, 370 bp, Homo sapiens
caggtgcagctggtggagtctgggggaggcgtggtccagtctgggaggtccctgagactctcctgtgcagcctctggattcaccttcagcaactatgccatgcactgggtccgccaggctccaggcaaggggctggagtgggtggcggttatagcatatgatgaagattataaatactatgcagactccgtgaagggccgattcaccatctccagagacaatcccaagaatacgctgtatctgcaaatgaacagcctgagagctgaggacacggctgtgtattactgtgcgaaagggggatggtactatgatagtagtcaggggtactttgaatactggggccagggagccctggtcaccgtctcctcag

SEQ ID NO: 538 - DNA, 381 bp, Homo sapiens
caggtgcagctacagcagtggggcgcaggactgttgaagccttcggagaccctgtccctcacctgcgctgtctatggtgggtccttcagaggttactactggagctggatccgccagcccccagggaaggggctggagtggattggggaaatcattcatagtggaagcaccaactacaacccgtccctcaagagtcgagtcaccatatcagtagacacgtccaagaaccagttctccctgaagctgagttctgtgaccgccgcggacacggctgtgtattactctacgaggggtcgacggaggacacagctatggtcggataactactactactacggtatggacgtctggggccaagggaccacggtcaccgtctcctca

SEQ ID NO: 539 - DNA, 387 bp, Homo sapiens
caggtgcagctgcaggagtcgggcccaggactggtgaagccttcacagaccctgtccctcacctgcactgtctctggtggctccatcagcagtggtggttactactggagctggatccgccagcacccagggaagggcctggagtggattgggtacatctattacagtgggagcacctactacaacccgtccctcaagagtcgagttaccatatcagtagacacgtctaagaaccagttctccctgaagctgagctctgtgactgccgcggacacggccgtgtattactgtgcgagaggtctcggagggcgtggatacagctatggtcccgtctaccttctcggtatggacgtctggggccaagggaccacggtcaccgtctcctca

SEQ ID NO: 540 - DNA, 367 bp, Homo sapiens
gaggtgcagctggtggagtctgggggaggcttggtacagcctggggggtccctgagactctcctgtgcagcctctggattcaccttcagtacctacgacatgcactgggtccgccaacctacaggaaaaggtctggagtgggtctcaactattggtactgctggtgatacatactatcaaggctccgtgaagggccgattcaccatctccagagaaaatgccaagaactccttgtatcttcaaatgagcgacctgagagacggggacacggctgtgtattactgtgcacgagccctttatgatagtagtaatcttcgcaactggttcgacccctggggccagggaaccctggtcaccgtctcttcag

SEQ ID NO: 541 - DNA, 385 bp, Homo sapiens
caggtgcagctggtgcagtctggggctgaggtgaagaagcctggggcctcagtgaaggtctcctgcaaggcttctggatacaccttcaccggctactatatgcactgggtgcgacaggcccctggacaagggcttgagtggatgggatggatcaaccctaacagtggtggcacaaactatgcacagaagtttcagggcagggtcaccatgaccagggacacgtccatcagcacagcctacatggagctgagcaggctgagatctgacgacacggccgtgtattactgtgcgagaggcacatcgcctgattacgtttgggggagttatcgttatgggggtagctttgactactggggccagggaaccctggtcaccgtctcctcag

SEQ ID NO: 542 - DNA, 382 bp, Homo sapiens
gaggttcaactggtggagtctgggggaggcttggtccagcctggggggtccctgagactctcctgttcagtctctggattcaccgtcagtagcaactacatgaactgggtccgccaggctcctgggaaggggctggagtgggtctcagttatttatcccggtggtagcacattttacccagactccgtgaagggcagattcaccatctccagagacgattccaagaacacgctttatcttcaaatgaacagcctgagacccgaagacacggctgcgtattactgtgcgagctcccgtccccccatagggcagctcgtcccgggtttagatcttgactggttcgacccctggggccagggaaccctggtcatcgtctcctcag

SEQ ID NO: 543 - DNA, 355 bp, Homo sapiens
caggtgcagctgcaggagtcgggcccaggactggtgaagccttcacagaccctgtccctcacctgcactgtctctggtggctccatcagcagtggtggttactactggagctggatccgccagcacccagggaagggcctggagtggattgggtacatctattacagtgggagcacctactacaacccgtccctcaagagtcgagttaccatatcagtagacacgtctaagaaccagttctccctgaagctgagctctgtgactgccgcggacacggccgtgtattactgtgcgagatacacgatttttggagtgatcgactggggccagggaaccctggtcaccgtctcctcag

SEQ ID NO: 544 - DNA, 352 bp, Homo sapiens
caggtgcagctggtgcagtctggggctgaggtgaagaagcctggggcctcagtgaaggtttcctgcaaggcatctggatttaccttcaccagcttctatttccactgggtgcgacaggcccctggacaagggcttgagtggatggggataatcaaccctggtggtgatagcacaggctacgcacagaagttccagggcagagtcaccatgaccagggacacgtccacgagcacagtctacatggagctgagcagcctgagatctgaggacacggccgtgtattactgtgcgagacacgactacggtggtttctcacactggggccagggaaccctcgtcaccgtctcctcag

SEQ ID NO: 545 - DNA, 349 bp, Homo sapiens
caggtgcagctgcaggagtcgggcccaggactggtgaagccttcggagaccctgtccctcacctgcactgtctctggtggctccatcagtagttactactggagctggatccggcagcccccagggaagggactggagtggattgggtatatctattacagtgggagcaccaactacaacccctccctcaagagtcgagtcaccatatcagtagacacgtccaagaaccagttctccctgaagctgagctctgtgaccgctgcggacacggccgtgtattactgtgcgagagggggatacgtttatgttgactactggggccagggaaccctggtcaccgtctcctcag

SEQ ID NO: 546 - DNA, 355 bp, Homo sapiens
caggtcaccttgagggagtctggtcctgcgctggtgaaacccacacagaccctcacactgacctgcaccttctctgggttctcactcagcactagtggaatgtgtgtgaagtggatccgtcagcccccagggaaggccctggagtggcttgcacgcattgattgggatgatgctaaatactacagcacatctctgcagaccaggctcaccatctccaaggacacctccaaaaaccaggtggtccttacaatgaccaacatggaccctgtggacacaggcacgtattactgtgcacggagtttggctacagtcattgactactggggccagggaaccctggtcaccgtctcctcag

SEQ ID NO: 547 - DNA, 352 bp, Homo sapiens
gaggtgcagctggtggagtccgggggaggcttagttcagcctggggggtccctgagactctcctgtgcagcctctggattcaccttcagtagctactggatgcactgggtccgccaagctccagggaaggggctggtgtgggtctcacgtattaatagtgatgggagtagcacaagctacgcggactccgtgaagggccgattcaccatctccagagacaacgccaagaacacgctgtatctgcaaatgaacagtctgagagccgaggacacggctgtgtattactgtgcaagatctgttaggaggtggtttgacctttggggccagggaaccctggtcaccgtctcctcag

SEQ ID NO: 548 - DNA, 349 bp, Homo sapiens
gaggtgcagctggtggagtctggaggaggcttgatccagcctggggggtccctgagactctcctgtgcagcctctgggctcaccgtcagtagcaactacatgagctgggtccgccaggctccagggaaggggctggagtgggtctcagttatgtatcccggtggtagtacatactacgcagactccgtgaagggccgattcaccatctccagagacaattccaagaacacgctgtatcttcaaatgaacagcctgagagccgaggacacggccgtgtattactgtgcgagagacagctaccggggcggggggatctggggccaagggacaatggtcaccgtctcttcag

SEQ ID NO: 549 - DNA, 387 bp, Homo sapiens
gaagtgcagctggtggagtctgggggaggcttggtacagcctggcaggtccctgagactctcctgtgcagcctctggattcacctttgatgattatgccatgcactgggtccggcaagctccagggaagggcctggagtgggtctcaggtattagttggaatagtggtagcataggctatgcggactctgtgaagggccgattcaccatctccagagacaacgccaagaactccctgtatctgcaaatgaacagtctgagagctgaggacacggccttgtattactgtgcaaaagcgcttaccagctgctatttgattgggtgtttttcaatgtactactacggtatggacgtctggggccaagggaccacggtcaccgtctcctca

SEQ ID NO: 550 - DNA, 384 bp, Homo sapiens
caggtccaactggtacagtctggggctgaggtgaagaagcctggggcctcagtgaaggtctcctgcaaggtttccggatacaccctcactgaattatccatgcactgggtgcgacaggctcctggaaaagggcttgagtggatgggaggttttgagcctgaagatggtgaaacagtctacgcacagaagttccagggcagagtcaccatgaccgaggacacatctacagacacagcctacatggagctgagcagcctgagatcggaggacacggccgtgtattactgtgcaacaggtttcgtaataactggaacgtcagacaactactactactattacggtatggacgtctggggccaagggaccacagtcaccgtctcctca

SEQ ID NO: 551 - DNA, 384 bp, Homo sapiens
caggtccagctggtacagtctggggctgaggtgaagaagcctggggcctcagtgaaggtctcctgcaaggtttccggatacaccctcactgaattatccatgcactgggtgcgacaggctcctggaaaagggcttgagtggatgggaggttttgatcctgaagatggtgaaacaatctacgcacagaagttccagggcagagtcaccatgaccgaggacacatctacagacacagcctacatggagctgagcagcctgagatctgaggacacggccgtgtattactgtgcaacagctataccgattactatggttcggggagttattaactactactacggtatggacgtctggggccaagggaccacggtcaccgtctcctca

SEQ ID NO: 552 - DNA, 384 bp, Homo sapiens
caggtccagctggtacagtctggggctgaggtgaagaagcctggggcctcagtgaaggtctcctgcaaggtttccggatacaccctcattgaattatccatgcactgggtgcgacaggctcctggaaaagggcttgaatggatgggaggttttgatcctgaagagggtgaaacagtctacgcacagaagtttcagggcagagtcaccatgaccgaggacacatctacagacacagcctacatggagctgagcagcctgagatctgaggacacggccgtgtattactgtgcaacagcggttgcagtggctggtaccccttcgtcttggttttactactacggtatggacgtctggggccaagggaccacggtcaccgtctcctca

SEQ ID NO: 553 - DNA, 361 bp, Homo sapiens
caggtccagcttgtgcagtctggggctgaggtgaagaagcctggggcctcagtgaaggtttcctgcaaggcttctggatacaccttcactagctatgctatgcattgggtgcgccaggcccccggacaaaggcttgagtggatgggatggatcaacgctggcaatggtaacacaaaatattcacagaagttccagggcagagtcaccattaccagggacacatccgcgagcacagcctacatggagctgagcagcctgagatctgaagacacggctgtgtattactgtgcgagagccccctatggtggctacgactcctttgactactggggccagggaaccctggtcaccgtctcctcag

SEQ ID NO: 554 - DNA, 384 bp, Homo sapiens
caggtgcagctacagcagtggggcgcaggactgttgaagccttcggagaccctgtccctcacctgcgctgtctatggtgggtccttcagtggttactactggagctggatccgccagcccccagggaaggggctggagtggattggggaaatcaatcatagtggaagcaccaactacaacccgtccctcaagagtcgagtcaccatatcagtagacacgtccaagaaccagttctccctgaagctgagctctgtgaccgccgcggacacggctgtgtattactgtgcgaccaaccggggatattgtagtagtaccagctgctatcgctactactactacggtatggacgtctggggccaagggaccacggtcaccgtctcctca

SEQ ID NO: 555 - DNA, 390 bp, Homo sapiens
cagctgcagctgcaggagtcgggcccaggactggtgaagccttcggagaccctgtccctcacctgcactgtctctggtggctccatcagcagtagtagttactactggggctggatccgccagcccccagggaaggggctggagtggattgggactatctattatagtgggagcacctactataatccgtccctcaagagtcgagtcaccatatccgtagacacgtccaagaaccagttctccctgatgctgaactctgtgaccgccgcagacacggctgtgtattactgtgcgggggagggggttacgatttttggagtggcacattcctcctactaccactacgctatggacgtctggggccaagggaccacggtcaccgtctcctca

SEQ ID NO: 556 - DNA, 390 bp, Homo sapiens
cagctgcagctgcaggagtcgggcccagggctggtgaagccttcggagaccctgtccctcacctgcactgtctctggtggctccatcagcagtagtagttactactggggctggatccgccagcccccagggaaggggctggtgtggattgggaatatctattatagtgggagcacctactacaacccgtccctcaagagtcgagtcaccatatccgtagacacgtccaagaaccagttctccctgaacctgagctctgtgaccgccgcagacacggctgtgtattactgtgcgagcgaattggtggtgactgctttcggccgcggctatcgcaaaaacaactacggtatggacgtctggggccaagggaccacggtcaccgtctcctca

SEQ ID NO: 557 - DNA, 391 bp, Homo sapiens
caggtgcagctgctggagtcgggcccaggactggtgaagccttcacagaccctgtccctcacctgcactgtctctggtggctccatcagcagtggtaatcactactggacctggatccgccagcacccagggaagggcctggagtggattggatacatctattacagtggggccacctactacaacccgtccctcaagagtcgagttaccatattagtagacacgtctaagaaccagttctccctgaagctgagctctgtgagtgccgcggacacggccgtgtattactgtgcgagactccggacgtggggtagtacctgctataggggtaactccgtgtgtgatgcttttgatatctggggccaagggacaatggtcaccgtctcttcag

SEQ ID NO: 558 - DNA, 385 bp, Homo sapiens
gaggtgcagctggtggagtctgggggaggcttggtacagcctggggggtccctgagactctcctgtgcagcctctggattcaccttcagtagctacgacatgcactgggtccgccaagctacaggaaaaggtctggagtgggtctcagttattggtactgctggtgacacatactatccaggctccgtgaagggccgattcaccatttccagagaaaatgccaagaactccttgtatcttcaaatgaacagcctgagagccggggacacggctgtgtattactgtgcaagaggggggtattactatgatagtagtggttattaccaccgctcctactggtacttcgatctctggggccgtggcaccctggtcactgtctcctcag

SEQ ID NO: 559 - DNA, 369 bp, Homo sapiens
gaggtgcagctggtggagtctgggggaggcctggtcaagcctggggggtccctgagactctcctgtgcagcctctggattcaccttcagtagcttcagcatgaactgggtccgcctggctccagggaaggggctgcagtgggtctcattcattagtagcagtagtggttacatatactacgcagactcagtgaagggccgattcaccatctccagagacaacgccaagaactcactgtatctgcaaatgaacagcctgagagccgaggacacggctgtgtattattgtgcggggtctcaaagtgatattgtggtggtgggctacggtatggacgtctggggccaagggaccacggtcaccgtctcctca

SEQ ID NO: 560 - DNA, 387 bp, Homo sapiens
caggtgcagctggtggagtctgggggaggcgtggtccagcctgggaggtccctgagactctcctgtgcagcctctggattcaccttcagtagctatggcatgcactgggtccgccaggctccaggcaaggggctggagtgggtggcagttatatcatatgatggaagtaataaatactatgcagactccgtgaagggccgattcaccatctccagagacaattccaagaacacgctgtatctgcaaatgaacagcctgagagctgaggacacggctgtgtattactgtgcgaaagatcccgggaaagatttttggagtggttattatacttactactactacggtatggacgtctggggccaagggaccacggtcaccgtctcctca

SEQ ID NO: 561 - DNA, 387 bp, Homo sapiens
caggtgcagctggtggagtctgggggaggcgtggtccagcctgggaggtccctgagactctcctgtgcagcctctggattcaccttcagtagctatggcatgcactgggtccgccaggctccaggcaaggggctggagtgggtggcagttatatcatatgatggaagtaataaatactatgcagactccgtgaagggccgattcaccatctccagagacaattccaagaacacgctgtatctgcaaatgaacagcctgagagctgaggatacggctgtgtattactgtgcgaaagatcccgccggggggcattgtaggagtaccagctgctataatttctacggtatggacgtctggggccaagggaccacggtcaccgtctcctca

SEQ ID NO: 562 - DNA, 388 bp, Homo sapiens
caggtgcagctggtgcagtctggggctgaggtgaagaagcctggggcctcagtgaaggtctcctgcaaggcttctggatacaccttcaccgcttactatatgcactgggtgcgacaggcccctggacaagggcttgagtggatgggatggatcaaccctaacagtggtgacacaaactatgcacagaagtttcagggcagggtcaccatgaccagggacacgtccatcagcacagcctacatggagctgagcagactgagatttgtcgacacggccgtgtattactgtgcgagagatctagaggatacactaaattactatgatggtagtgggtcccggggctactttgactactggggccagggaaccctggtcaccgtctcctcag

SEQ ID NO: 563 - DNA, 388 bp, Homo sapiens
gaggtgcagctggtggagtctgggggaggcttggtacagcctggggggtccctgagactctcctgtgcagcctctggattcaccttcagtagctatagcatgaactgggtccgccaggctccagggaaggggctggagtgggtttcatacattagtagtagtagtagtaccatatactacgcagactctgtgaagggccgattcaccatctccagagacaatgccaagaactcactgtatctgcaaatgaacagcctgagagacgaggacacggctgtgtattactgtgcgagaccctcccgtgggtactatgatagtagtggttattacaacgccgctgggtacttccagcactggggccagggcaccctggtcaccgtctcctcag

SEQ ID NO: 564 - DNA, 361 bp, Homo sapiens
caggtccagcttgtgcagtctggggctgaggtgaagaagcctggggcctcagtgaaggtttcctgcaaggcttctggatacaccttcactagctatgctatgcattgggtgcgccaggcccccggacaaaggcttgagtggatgggatggatcaacgctggcaatggtaacacaaaatattcacagaagttccagggcagagtcaccattaccagggacacatccgcgagcacagcctacatggagctgagcagcctgagatctgaagacacggctgtgtattactgtgcgagaatcactcggtatagtgggagtcactttgactactggggccagggaaccctggtcaccgtctcctcag

SEQ ID NO: 565 - DNA, 387 bp, Homo sapiens
cagattcagttggtgcaatctggaggagacgtgaagaaccctggggcctcagtgaaggtctcctgtaaggcctcgggttatattttcactaattttggaatgagctgggtgcgacaggcccccggacaaggacttgagtggatgggatggatcagcggctacggtggtgacacagagtatgcacgggagtttcaggacagactcagattgaccacggagacatccacgaggacagcttatatggaattgaggagcctgaggtcagacgacacggccatatatttttgtgtaagggattatcgcggtcgctctttgcagtggttgcccaggggctaccgctaccacatggacgtgtggggccgagggaccacggtcatcgtctcgtca

SEQ ID NO: 566 - DNA, 379 bp, Homo sapiens
gaggtgcagctggtgcagtctggagcagaggtgaaaaagcccggggagtctctgaagatctcctgtaagggttctggatacagctttaccagctactggatcggctgggtgcgccagatgcccgggaaaggcctggagtggatggggatcatctatcctggtgactctgataccagatacagcccgtccttccaaggccaggtcaccatctcagccgacaagtccatcagcaccgcctacctgcagtggagcagcctgaaggcctcggacaccgccatgtattactgtgcgagacaggcaaaattccgtattactatggttcggggaatagatgcttttgatatctggggccaagggacaatggtcaccgtctcttcag

SEQ ID NO: 567 - DNA, 379 bp, Homo sapiens
gaggtgcagctggtgcagtctggagcagaggtgaaaaagcccggggagtctctgaagatctcctgtaagggttctggatacagctttaccagttattggatcggctgggtgcgccagatgcccgggaaaggcctggagtggatggggattatcgatcctgatgactctgataccagatacagcccgtccttccaaggccaggtcaccatctcagccgacaagtccatcagcaccgcctacctgcagtggagcagcctgaaggcctcggacaccgccacgtattactgtgcgagacccgggcactatgatattagtgcttattacgtacccgatacttttgatatctggggccgagggacaatggtcaccgtctcttcag

SEQ ID NO: 568 - DNA, 376 bp, Homo sapiens
caggtgcagctgcaggagtcgggcccaggactggtgaagccttcggagaccctgtccctcacctgcactatctctggtggctccatcagtggttactcctgcagctggatccggcagcccccagggaagggactggagtggattgggtatatctcttacagtgggagcaccaactacaacccctccctcaacagtcgagtcaccatatcattagacacgtccaagaaccagttctccctgaagctgagctctgtgaccgctgcggacacggccgtgtattactgtgcgagaggcggctactatgatagtagtggttattatcatgagggaggatttgactactggggccagggaaccctggtcaccgtctcctcag

SEQ ID NO: 569 - DNA, 380 bp, Homo sapiens
caggtgcagctgcaggagtcgggcccaggactggtgaagccttcggagaccctgtccctcacctgctctgtctctggtggctccgtcagaggtgctacttactactggagctggatccgggagcccccagggaagggactggagtggattgggtatatctctgacagtgggagcaccaattacaacccctctctcaagagtcgagtcaccatatcagtagacacgtccaagaaccagttctccctgaagctgagctctgtgaccgctgcggacacggccgtgtattactgtgcgagagggggatattatgataggagtggttatttttcgtacggaggctttgactactggggccagggaaccctggtcaccgtctcctc

SEQ ID NO: 570 - DNA, 379 bp, Homo sapiens
caggtccagctggtgcagtctggggctgaggtgaagaagcctgggtcctcggtgaaggtctcctgcaaggcttctggaggcaccttcagcagttatggtatcagttgggtgcgacaggcccctggacaagggcttgagtggatgggagggatcatccctatatttggtacagtaaactacgcacagaagttccagggcagagtcacgattaccgcggacgaatccacgagcacagcctacatggagctgagcagcctgagatctgaggacacggccgtgtattactgtgcgagagatctgtggcgttgtagtggtggtagctgctactccgggtcctttgactactggggccagggaaccctggtcaccgtctcctcag

SEQ ID NO: 571 - DNA, 370 bp, Homo sapiens
caggtgcagctggtgcagtctggggctgaggtgaagaagcctgggtcctcggtgaaggtctcctgcaaggcttctggaggcaccttcagcagctatgccatcagctgggtgcgacaggcccctggacaagggcttgagtggatgggaaggatcatctctatgtttggtatagcaaacaacgcacagaagttccagggcagactcacgattaccgcggacacatccacgagcacagcctatatggagctgagcagcctgagatctgaggacacggccgtgtattactgtgcgagaggcccatattactatgatagtggtggttattaccttgactactggggccagggaaccctggtcaccgtctcctcag

SEQ ID NO: 572 - DNA, 370 bp, Homo sapiens
caggtgcagctggtgcagtctggggctgaggtgaagaagcctgggtcctcggtgaaggtctcctgcaaggcttctggaggcaccttcagtagttatgctatcagctgggtgcgacaggcccctggacaaggccttgagtggatgggaaggatcatccctatgtttggtatagcaaactacgcacagaagttccagggcagagtcacgattaccgcggacaaatccacgagtacagcctacatggagctgagcagcctgagatctgaggacacggccgtgtattactgtgcgagaggcgcatattactataatagtagcggttatcaccttgactactggggccagggaaccctggtcaccgtctcctcag

SEQ ID NO: 573 - DNA, 361 bp, Homo sapiens
gaagtgcagctggtggagtctgggggagtcgtggtacagcctggggggtccctgagactctcctgtgcagcctctggattcacctttgatgattataccatgcactgggtccgtcaagctccggggaagggtctggagtgggtctctcttattagttgggatggtggtagcacatactatgcagactctgtgaagggccgattcaccatctccagagacaacagcaaaaactccctgtatctgcaaatgaacagtctgagaactgaggacaccgccttgtattactgtgcaaaagatataggggcctacggtggtaaccctgactactggggccagggaaccctggtcaccgtctcctcag

SEQ ID NO: 574 - DNA, 370 bp, Homo sapiens
caggtgcagctggtgcagtctggggctgaggtgaagaagcctgggtcctcggtgaaggtctcctgcaaggcttctggagacaccttcagcagctatgctatcaactgggtgcggcaggcccctggacaaggacttgagtggatgggaaggatcatccctatgtttggtataacaaactacgtacagaagttccagggcagagtcacgattaccgcggacaaatccacgagcacagcctacatggagctgagcagcctgagatctgaggacacggccgtgtattactgtgcgagagccgcgttttattatgatagtcgtggttatttttttgactactggggccagggaactctggtcagcgtctcctcag

SEQ ID NO: 575 - DNA, 370 bp, Homo sapiens
caggtgcagctggtgcagtctggggctgaggtgaagaagcctgggtcctcggtgaaggtctcctgcaaggcttctggaggcaccttcagcagctatgctatcagctgggtgcgacaggcccctggacaagggcttgagtggatgggaaggatcatccctatccttggtatagcaaactacgcacagaagttccagggcagagtcacgattaccgcggacaaatccacgagcacagcctacatggagctgagcagcctgagatctgaggacacggccgtgtattactgtgcgagatcgtattgtagtagtaccagctgctcctactactttgactactggggccagggaaccctggtcaccgtctcctcag

SEQ ID NO: 576 - DNA, 379 bp, Homo sapiens
gaagtgcagctggtggagtctgggggaggcttggtacagcctggcaggtccctgagactctcctgtgtagcctctggaatcacctttgatgattatggcatgcactgggtccggcaagctccagggaagggcctggagtgggtctcaggtattagttggaatagtggtagcgtaggctatgcggactctgtgaagggccgattcaccatttccagagacaacgccaagaactccctgtatctgcaaatgaacagtctgagacctgaggacacggccttgtattactgtgcaaaagatcttattcggaggacttattatctgatggttagaaactactttgactactggggccagggaattctggtcaccgtctcctcag

SEQ ID NO: 577 - DNA, 379 bp, Homo sapiens
gaggtgcagctggtggagtctgggggaggcttggtacagcctggggggtccctgagactctcctgtgcagcctctggattcaccttgagcagctatgccatgagctgggtccgccaggctccagggaaggggctggagtgggtctcaggtattagtggtagtggtacttactcatactacgcagactccgtgaagggccggttcaccatctccagagacacttccaagaacacgctgtatctgcaaatgaacagcctgagagccgaggacacggccgtatattactgtgcgaaagagatcgaggtggggggatattttgactggttatctcctatctttcactactggggccagggaaccctggtcaccgtctcctcag

SEQ ID NO: 578 - DNA, 379 bp, Homo sapiens
gaggtgcagctgttggagtctgggggaggcttggtacagcctggggggtccctgagactctcctgtgcagcctctggattcacctttagcagctatgccatgagctgggtccgccaggctccagggaaggggctggagtgggtctcagctattagtggtagtggtggtagcacatactacgcagactccgtgaagggccggttcaccatctccagagacaattccaagaacacgctgtatctgcaaatgaacagcctgagagccgaggacacggccgtatattactgtgcgaaagaagcccggggttgtagtggtggtagctgctactcctcttactttgactactggggccagggaaccctggtcaccgtctcctcag

SEQ ID NO: 579 - DNA, 376 bp, Homo sapiens
gaggtgcagctggtggagtctggaggaggcttgatccagcctggggggtccctgagactctcctgtgcagcctctgggttcaccgtcagtagcaactacatgagctgggtccgccaggctccagggaaggggctggagtgggtctcagttatttatagcggtggtagcacatactacgcagactccgtgaagggccgattcaccatctccagagacaattccaagaacacgctgtatcttcaaatgaacagcctgagagccgaggacacggccgtgtattactgtgcgagatggggcagttactatgatagtagtggttcccgacgatcaaattttgactactggggccagggaaccctggtcaccgtctcctcag

SEQ ID NO: 580 - DNA, 384 bp, Homo sapiens
gaggtgcagctggtggagtccgggggaggcttggtccagcctggggggtccctgaaactctcctgtgcagcctctgggttcaccttcagtggctctgctatgcactgggtccgccaggcttccgggaaagggctggagtgggttggccgtattagaagcaaagctaacagttacgcgacagcatatgctgcgtcggtgaaaggcaggttcaccatctccagagatgattcaaagaacacggcgtatctgcaaatgaacagcctgaaaaccgaggacacggccgtgtattactgtactagactaatggggtattacgatttttggaggaccaactactacggtatggacgtctggggccaagggaccacggtcaccgtctcctca

SEQ ID NO: 581 - DNA, 382 bp, Homo sapiens
caggtcaccttgagggagtctggtcctgcgctggtgagacccacacagaccctcacactgacctgcaccttctctggattctcactcaccactactggagtgtgtgtgagttggatccgtcagcccccagggaaggccctggagtggcttgcacgcattgattgggatgatgataagttctacaggccatctctgaggaccaggctcaccatctccaaggacacctccagaaaccaggtggtccttgctatggccaacatggaccctgtggacacagccacgtattactgtgcacggacccgccgaacctatcactatggcaatagtggttattacaactctgactactggggccagggaaccctggtcaccgtctcctcag

SEQ ID NO: 582 - DNA, 378 bp, Homo sapiens
caggtgcagctggtggagtctgggggaggcttggtcaagcctggagggtccctgagactctcctgtgcagcctctggattcaccttcagtgactactacatgagctggatccgccaggctccagggaaggggctggagtgggtttcatacattagtagtagtggtagtaccatatactacgcagactctgtgaagggccgattcaccatctccagggacaacgccaagaactcactgtatctgcaaatgaacagcctgagagccgaggacacggccgtgtattactgtgcgagagattttatgtgggagttcggggagttatattttttaggcggtatggacgtctggggccaagggaccacggtcaccgtctcctca

SEQ ID NO: 583 - DNA, 375 bp, Homo sapiens
gaggtgcagctggtggagtctggaggaggcttgatccagcctggggggtccctgagactctcctgtgcagcctctgggttcaccgtcagtagcaactacatgagctgggtccgccaggctccagggaaggggctggagtgggtctcagttatttatagcggtggtagcacatactacgcagactccgtgaagggccgattcaccatctccagagacaattccaagaacacgctgtatcttcaaatgaacagcctgagagccgaggacacggccgtgtattactgtgcgagagcctccccggcgggcagctcgctctactactactactacggtatggacgtctggggccaagggaccacggtcaccgtctcctca

SEQ ID NO: 584 - DNA, 370 bp, Homo sapiens
cagatcaccttgaaggagtctggtcctacgctggtgaaacccacacagaccctcacgctgacctgcaccttctctgggttctcactcaccactagtggagtgggtgtgggctggatccgtcagcccccaggaaaggccctggagtggcttgcactcatttattgggatgatgataagcgctacagcccatctctgaagagcaggctcaccatcaccaaggacacctccaaaaaccaggtggtccttacaatgaccaacatggaccctgtggacacagccacatattactgtgcacacgggtattactatgatagtagtggttattcatttgactactggggccagggaaccctggtcaccgtctcctcag

SEQ ID NO: 585 - DNA, 378 bp, Homo sapiens
caggtgcaactggtgcagtctggggctgaggtgaagaagcctggggcctcagtgaaggtttcctgcaaggcatctggatacaccttcagcagctactatatgcactgggtgcgacaggcccctggacaagggcttgagtggatgggaataatcaaccctagtggtggtagcacaaactacgcacagaagttgcagggcagagtcaccatgaccagtgacacgtccacgagcacagtctacatggagctgagcagcctgagatctgaggacacggccgtgtattattgtccgagagatgttatatggcagctaggcggtgggggtaccaactttcgtatggacgtctggggccaagggaccacggtcaccgtctcctca

SEQ ID NO: 586 - DNA, 378 bp, Homo sapiens
caggtgcagctggtgcagtctggggctgaggtgaagaagcctggggcctcagtgaaggtttcctgcaaggcatctggatacaccttcaccagctactatatgcactgggtgcgacaggcccctggacaagggcttgagtggatgggaataatcaaccctagtggtggtagcacaagctacgcacagaagttccagggcagagtcaccatgaccagggacacgtccacgagcacagtctacatggagctgagcagcctgagatctgaggacacggccgtgtattactgtgcgagagatcggggtttgaaagcagctctttactactactactacggtatggacgtctggggccaagggaccacggtcaccgtctcctca

SEQ ID NO: 587 - DNA, 379 bp, Homo sapiens
gaggtgcagctggtggagtccgggggaggcttagttcagcctggggggtccctgagactctcctgtgcagcctctggattcaccttcagtagctactggatgcactgggtccgccaagctccagggaaggggctggtgtgggtctcacgtattaatagtgatgggagtagcacaagctacgcggactccgtgaagggccgattcaccatctccagagacaacgccaagaacacgctgtatctgcaaatgaacagtctgagagccgaggacacggctgtgtattactgtgcaagagagggggtggctcaaactaaaggaggctggtacgctggctggttcgacccctggggccagggaaccctggtcaccgtctcctcag

SEQ ID NO: 588 - DNA, 379 bp, Homo sapiens
gaggtgcagctggtggagtctgggggaggcttggtccagcctggggggtccctgagactctcctgtgcagcctctggattcacctttagtagctattggatgacctgggtccgccaggctccacggaaggggctggagtgggtggccaacataaaccaagatggaagtgagacatactatgtggactctgtgaagggccgattcaccgtctccagagacaacgccaagaactcactgtatctgcaaatgaacagcctgagagccgaggacacggctgtgtattactgtgcgagagatcgtccggagtattacgaattatggagtggttattggtggttcgacccctggggccagggaaccctggtcaccgtctcctcag

SEQ ID NO: 589 - DNA, 378 bp, Homo sapiens
gaggtgcagctggtggagtctgggggaggcttggtacagcctggggggtccctgagactctcctgtgcagcctctggattcaccttcagtagctatagcatgaactgggtccgccaggctccagggaaggggctggagtgggtttcatacattagtagtagtagtagtaccatatactacgcagactctgtgaagggccgattcaccatctccagagacaatgccaagaactcactgtatctgcaaatgaacagcctgagagacgaggacacggctgtgtattactgtgcgagagatcgggggttaccagctgccgactactactactactacggtatggacgtctggggccaagggaccacggtcaccgtctcctca

SEQ ID NO: 590 - DNA, 378 bp, Homo sapiens
gaggtgcagctggtggagtctgggggaggcttggtacagcctggggggtccctgagactctcctgtgcagcctctggattcaccttcagtagctatagcatgaactgggtccgccaggctccagggaaggggctggagtgggtttcatacattagtagtagtagtagtaccatatactacgcagactctgtgaagggccgattcaccatctccagagacaatgccaagaactcactgtatctgcaaatgaacagcctgagagacgaggacacggctgtgtattactgtgcgagagatacgtacgatttttggagtggttattcctactactacggtatggacgtctggggccaagggaccacggtcaccgtctcctca

SEQ ID NO: 591 - DNA, 378 bp, Homo sapiens
gaggtgcagctggtggagtctgggggaggcttggtacagcctggggggtccctgagactctcctgtgcagcctctggattcaccttcagtagctatagcatgaactgggtccgccaggctccagggaaggggctggagtgggtttcatacattagtagtagtagtagtaccatatactacgcagactctgtgaagggccgattcaccatctccagagacaatgccaagaactcactgtatctgcaaatgaacagcctgagagacgaggacacggctgtgtattactgtgcgagaggtatagtggctacgagggagaatctgtactactactacggtatggacgtctggggccaagggaccacggtcaccgtctcctca

SEQ ID NO: 592 - DNA, 378 bp, Homo sapiens
gaggtgcagctggtggagtctgggggaggcttggtacagcctggggggtccctgagactctcctgtgcagcctctggattcaccttcagtagctatagcatgaactgggtccgccaggctccagggaaggggctggagtgggtttcatacattagtagtagtagtagtaccatatactacgcagactctgtgaagggccgattcaccatctccagagacaatgccaagaactcactgtatctgcaaatgaacagcctgagagacgaggacacggctgtgtattactgtgcgagagatagtgacagtggctggcccccacactactactactacggtatggacgtctggggccaagggaccacggtcaccgtctcctca

SEQ ID NO: 593 - DNA, 352 bp, Homo sapiens
gaggtgcagctgttggagtctgggggaggcttggtacagcctggggggtccctgagactctcctgtgcagcctctggattcacctttagcagctatgccatgagctgggtccgccaggctccagggaaggggctggagtgggtctcaactattagtactagtggtggtagcacatactacgcagactccgtgaagggccggttcaccatctccagagacaattccaagaactcgctgtatctgcaaatgagcagcctgagagccgaggacacggccgtatattactgtgcgcacttgggcgactggttccctgactactggggccagggaaccctggtcaccgtctcctcag

SEQ ID NO: 594 - DNA, 379 bp, Homo sapiens
caggttcagctggtgcagtctggagctgaggtgaagaagcctggggcctcagtgaaggtctcctgcaaggcttctggttacacctttaccagctatggtatcagctgggtgcgacaggcccctggacaagggcttgagtggatgggatggatcagcgcttacaatggtaacacaaactatgcacagaagctccagggcagagtcaccatgaccacagacacatccacgagcacagcctacatggagctgaggagcctgagatctgacgacacggccgtgtattactgtgcgagagattggaaacgtggatatagtggctacgatcgcctacggtggttcgacccctggggccagggaaccctggtcaccgtctcctcag

SEQ ID NO: 595 - DNA, 357 bp, Homo sapiens
caggtgcagctacagcagtggggcgcaggactgttgaagccttcggagaccctgtccctcacctgcgctgtctatggtgggtccttcagtggttactactggagctggatccgccagcccccagggaaggggctggagtggattggggaaatcaatcatagtggaagcaccaactacaacccgtccctcaagagtcgagtcaccatatcagtagacacgtccaagaaccagttctccctgaagctgagctctgtgaccgccgcggacacggctgtgtattactgtgcgggtcgtatcgctacggcccgggggggtatggacgtctggggccaagggaccacggtcaccgtctcctca

SEQ ID NO: 596 - DNA, 358 bp, Homo sapiens
gaggtgcagctggtggagtctgggggaggcttggtacagcctggggggtccctgagactctcctgtgcagcctctggattcatcgtcagtagcaactacatgagctgggtccgccaggctccagggaaggggctggagtgggtctcagttatttatagcggtggtagcacagattacgcagactccgtgaagggcagattcaccatctccagagacaattccaagaacacgctgtatcttcaaatgaacagcctgagagccgaggacacggctgtgtattactgtgcgaggggggggaggggtgcctacgatcaatttgactactggggccagggaaccctggtcaccgtctcctcag

SEQ ID NO: 597 - DNA, 379 bp, Homo sapiens
caggtgcagctggtgcagtctggggctgaggtgaagaagcctggggcctcagtgaaggtttcctgcaaggcatctggatacaccttcaccagctactatatgcactgggtgcgacaggcccctggacaagggcttgagtggatgggaataatcaaccctagtggtggtagcacaagctacgcacagaagttccagggcagagtcaccatgaccagggacacgtccacgagcacagtctacatggagctgagcagcctgagatctgaggacacggccgtgtattactgtgcgagagatagcccgtattactatgatagtagtggttatgggagctacttccagcactggggccagggcaccctggtcaccgtctcctcag

SEQ ID NO: 598 - DNA, 379 bp, Homo sapiens
caggtgcagctgcaggagtcgggcccaggactggtgaagccttcggagaccctgtccctcacctgcactgtctctggttactccatcagcagtggttactactggggctggatccggcagcccccagggaaggggctggagtggattgggagtatctatcatagtgggagcacctactacaacccgtccctcaagagtcgagtcaccatatcagtagacacgtccaagaaccagttctccctgaagctgagctctgtgaccgccgcagacacggccgtgtattactgtgcgagagttgaattttactatgatagtagtggttatcgcctcggctggttcgacccctggggccagggaaccctggtcaccgtctcctcag

SEQ ID NO: 599 - DNA, 381 bp, Homo sapiens
caggtgcagctgcaggagtcgggcccaggactggtgaagccttcacagaccctgtccctcacctgcactgtctctggtgcctccatcagcactgctaattactactggagctggatccgccagcacccagggaagggcctggagtggattgggtacatcttttacaatgggagtacctactacaatttgtccctcaagagtcgagttaccatctcagtagacacgtctaagaaccagttctccctgaagctgagctctgtgactgccgcggacacggccgtctattattgtgcgagagatcggggggttcggcacagaccaacctactcctactacggtatggacgtctggggccaagggaccacggtcaccgtctcctca

SEQ ID NO: 600 - DNA, 355 bp, Homo sapiens
gaggtgcagctggtgcagtctggagcagaggtgaaaaagcccggggagtctctgaagatctcctgtaagggttctggatacagctttaccaactactggatcgcctgggtgcgccagatgcccgggaaaggcctggagtggatggggaacatctatcctggtgactctgataccaggtacagcccgtccttccaaggtcaggtcaccatctccgccgacagctccatcagcaccgcctacctgcagtggagcagcctgaaggcctcggacaccgccatgtattactgtgcgagacaagatgcgatttttggagcgggaccctggggccagggaaccctggtcaccgtctcctcag

SEQ ID NO: 601 - DNA, 352 bp, Homo sapiens
gaggtgcagctggtggagtctgggggaggcttggtccagccgggggggtccctgagactctcctgtgcagcctctggactcatcgtcagcagaaactacatgagctgggtccgccaggctccggggaaggggctggagtgggtttcagttatttatagcggtggtagtacattctacgcagactccgtgaagggcagattcaccatctccagagacaattccaagaatacgctgtatcttcaaatgaacagcatgagagccgaggacacggctgtgtattactgtgcgagagatcaggggatggacgcttttgatatctggggccaagggacactggtcaccgtctcttcag

SEQ ID NO: 602 - DNA, 352 bp, Homo sapiens
gaggtgcagctggtggagtctggaggaggcttgatccagcctggggggtccctgagactctcctgtgcagcctctgggttcatcgtcagtaggaactacatgagttgggtccgccaggctccagggaagggactggagtgggtctcagttatttatagcggaggtagcacattctacgcagacgccgtgaagggccgattcaccatctccagagacaattccaagaacacgctgtatcttcaaatgaacagcctgagagccgaggacacggccgtgtattactgtgcgagagatatggggggggatgtttttgatatctggggccaagggacaatggtcaccgtctcttcag

SEQ ID NO: 603 - DNA, 354 bp, Homo sapiens
caggtgcagctggtgcagtctggggctgagatgaagaagcctggggcctcagtgaaaatttcctgcaaggcatctggacacaccttcaccaacgactacatgcactgggtgcgacaggccccgggacaagggcttgagtggatgggattaatcaaccccagtggtactggcacaagctacgcacagaagttccagggcagagtcgccatgaccagggccacgtccacgagcgcagtctacatggagctgagcagcctgagatccgaggacacggccgtatactactgtgcgagaatgacagcagctggcacttttgactattggggccagggaaccctaatcaccgtctcctca

SEQ ID NO: 604 - DNA, 358 bp, Homo sapiens
cagatcaccttgaaggagtctggtcctacgctggtgaaacccacacagaccctcacgctgacctgcaccttctctgggttctcactcagtactactggagtgggtgtgggctggatccgtcagcccccaggaaaggccctggagtggcttgcactcatttattgggatgatgataagcgctacagcccatctctgaagagcaggctcaccatcaccaaggacacctccaaaaaccaggtggtcgttacaatgaccaacatggaccctgtggacacagccacatattactgtgcacaccggcataacgtccggggatttgactactggggccagggaaccctggtcaccgtctcctcag

SEQ ID NO: 605 - DNA, 358 bp, Homo sapiens
cagatcaccttgaaggagtctggtcctacgctggtgaaacccacacagatcctcacgctgacctgcaccttctctgggttctcactcagcactggtggagtggctgtgggctggatccgtcagcccccaggaaaggccctggagtggcttgcactcatttattgggatgatgataagcgctacaacccatctctaaaaaacagcctcaccatcaccaaggacacctccaaaaaccaggtggtccttacaatgaccaacatggaccctgtggacacagccacatattactgtgcacactcgactacggtgactatctttgactactggggccagggaaccctggtcaccgtctcctcag

SEQ ID NO: 606 - DNA, 358 bp, Homo sapiens
gaggtgcagctggtggagtctgggggaggcttggtccagcctggggggtccctgagactctcctgtgcagcctctggattcaccgtcagtagcaactacatgaactgggtccgccaggctccagggaaggggctggagtgggtctcagttatttatagcggtggtagtacatactacgcagactccgtgaagggcagattcaccatctccagagacaattccaacaacacggtgtatcttcaaatgaacagcctgagagccgaggacacggctgtgtatttctgtgcgagtccccattacgatttttggagtggtggtgactactggggccagggaaccctggtcaccgtctcctcag

SEQ ID NO: 607 - DNA, 388 bp, Homo sapiens
caggtccagctggtgcagtctggggctgaggtgaagaggcctgggtcctcggtgaaggtctcctgcaaggcttctggaggcaccttcaccaactatggtatcagctgggtgcgacaggcccctggacaagggcttgagtggatgggagggatcatccctatgttcgatacatcaacctacgcacagaagttccagggcagagtcaggcttaccgcggacgagtctacgagcacagcctacatggaactgagcagcctgacatatgaggatatggccgtatattattgtgccagggccttaggatattgtagtactactacctgctcccactggggccttaactggttcgacccctggggccagggaaccctggtcaccgtctcctcag

SEQ ID NO: 608 - DNA, 355 bp, Homo sapiens
caggtgcagctggtggagtctgggggaggcgtggtccagcctgggaggtccctgagactctcctgtgcagcctctggattcaccttcagtatctatgctattcactgggtccgccaggctccaggcaaggggctggagtgggtggcagttatatcatatgatggaagtaataaatactacgcagactccttgaagggccgattcaccatctccagagacaattccaagaacacgctgtatctgcaaatgaacagcctgagagctgaggacacggctgtgtattactgtgcgagagtcgaaaactactactactttgactactggggccagggaaccctggtcaccgtctcctcag

SEQ ID NO: 609 - DNA, 355 bp, Homo sapiens
caggtgcagctggtgcaatctgggtctgagttgaagaagcctggggcctcagtggaggtttcctgcaaggcttctggatacaccttcactagctatgccatgaattgggtgcgacaggcccctggacaagggcttgagtggatgggatggatcaacaccaacactgggaacccaacgtatgcccagggcttcacaggacggtttgtcttctccttggacacctctgtcagcacggcaaatctgcagatcagcagcctaaaggctgaggacactgccgtgtattactgtgcgagagaagttgataccagtggccgtttctactggggccagggaaccctggtcaccgtctcctcag

SEQ ID NO: 610 - DNA, 358 bp, Homo sapiens
caggtgcagctgcaggagtcgggcccaggactggtgaagccttcacagaccctgtccctcacctgcactgtctctggtggctccatcagcagtggtggttactactggagctggatccgccagcacccagggaagggcctggagtggattgggtacatctattacagtgggagcacctactacaacccgtccctcaagagtcgagttaccatatcagtagacacgtctaagaaccagttctccctgaagctgagctctgtgactgccgcggacacggccgtgtattactgtgccagggcagagggagctattcaatttgactactggggccagggaaccctggtcaccgtctcctcag

SEQ ID NO: 611 - DNA, 361 bp, Homo sapiens
gaggtgcagctggtggagtctgggggaggcttggtaaagcctggggggtcccttagactctcctgtgcagcctctggattcactttcagtaacgcctggatgagctgggtccgccaggctccagggaaggggctggagtgggttggccgtattaaaagcaaaactgatggtgggacaacagactacgctgcacccgtgaaaggcagattcaccatctcaagagatgattcaaaaaacacgctgtatctgcaaatgaacagcctgaaaaccgaggacacagccgtgtattactgtaccacagtaggtagggcagctcgtcgtgactactggggccagggaaccctggtcaccgtctcctcag

SEQ ID NO: 612 - DNA, 352 bp, Homo sapiens
gaggtgcagctggtggagtctggaggaggcttgatccagcctggggggtccctgagactctcctgtgcagcctctgggttcaccgtcagtagcaactacatgagctgggtccgccaggctccagggaaggggctggagtgggtctcagttatttatagcggtggtagcacatactacgcagactccgtgaagggccgattcaccatctccagagacaattccaagaacacgctgtatcttcaaatgaacagcctgagagccgaggacacggccgtgtattactgtgcgagagccaattactatggttcggggagttactggggccagggaaccctggtcaccgtctcctcag

SEQ ID NO: 613 - DNA, 376 bp, Homo sapiens
cagctgcagctgcaggagtcgggcccaggactggtgaagccttcggagaccctgtccctcacctgcactgtctctggtggctccatcagcagtagtagttactactggggctggatccgccagcccccagggaaggggctggagtggattgggagtatctattatagtgggagcacctactacaacccgtccctcaagagtcgagtcaccatatccgtagacacgtccaagaaccagttctccctgaagctgagctctgtgaccgccgcagacacggctgtgtattactgtgcgagactcgtcccacgttggagtacggtgactacgagaggagttgactactggggccagggaaccctggtcaccgtctcctcag

SEQ ID NO: 614 - DNA, 351 bp, Homo sapiens
gaggtgcagctggtggagtctggaggaggcttgatccagcctggggggtccctgagactctcctgtgcagcctctggggtcaccgtcagtagcaattacatgacctgggtccgccaggctccagggaaggggctggagtgggtctcagttttttatagcggtggtagcacattctacgcagactccgtgaagggccggttcaccatctccagagacaattccaagaacacgctgtatcttcaaatgaacagcctgagagccgaggacacggccgtgtattactgtgcgagagatttggtcaactacggtttggacgtctggggccaagggaccacggtcaccgtctcctca

SEQ ID NO: 615 - DNA, 367 bp, Homo sapiens
gaggtgcagctggtggagtctgggggaggcctggtcaagcctggggggtccctgagactctcctgtgcagcctctggattcaccttcagtagctatagcatgaactgggtccgccaggctccaggaaaggggctggagtgggtctcatccattagtagtagtagtagttacatatactacgcagactcagtgaagggccgattcaccatctccagagacaacgccaagaactcactgtatctgcaaatgaacagcctgagagccgaggacacggctgtgtattactgtgcgagggtggatacaactatggttaattgggatgcttttgatatctggggccaagggacaatggtcaccgtctcttcag

SEQ ID NO: 616 - DNA, 351 bp, Homo sapiens
gaggtgcagctggtggagtctggaggaggcttgatccagcctggggggtccctgagactctcctgtgcagcctctgggttcaccgtcattagaaactacatgagctgggtccgccaggctccagggaaggggctggagtgggtctcaattatttatagcggtggtagcacattctacgcagactccgtgaagggccgattcaccatctccagagacaattccaagaacacgctgtatcttcaaatgaacagcctgagagccgaggacacggccgtgtattactgtgcgagagatgtagtggttcggggagttagcaactggggccaagggaccacggtcaccgtctcctca

SEQ ID NO: 617 - DNA, 373 bp, Homo sapiens
caggttcagctggtgcagtctggagctgaggtgaagaagcctggggcctcagtgaaggtctcctgcaaggcttctggttacacctttaccagctatggtatcagctgggtgcgacaggcccctggacaagggcttgagtggatgggatggatcagcgcttacaatggtaacacaaactatgcacagaagctccagggcagagtcaccatgaccacagacacatccacgagcacagcctacatggagctgaggagcctgagatctgacgacacggccgtgtattactgtgcgagagcctcggccgggtactatgatagtagtggttattactatggctactggggccagggaaccctggtcaccgtctcctcag

SEQ ID NO: 618 - DNA, 381 bp, Homo sapiens
cagctgcagctgcaggagtcgggcccaggactggtgaagccttcggagaccctgtccctcacctgcactgtctctggtggctccatcagcagtagtagttactactggggctggatccgccagcccccagggaaggggctggagtggattgggagtatctattatagtgggagcacctactacaacccgtccctcaagagtcgagtcaccatatccgtagacacgtccaagaaccagttctccctgaagctgagctctgtgaccgccgcagacacggctgtgtattactgtgcgagactcggagcttactatgatagcccatcggactactactacggtatggacgtctggggccaagggaccacggtcaccgtctcctca

SEQ ID NO: 619 - DNA, 373 bp, Homo sapiens
caggtgcagctggtgcagtctggggctgaggtgaagaagcctggggcctcagtgaaggtctcctgcaaggcttctggatacaccttcaccagttatgatatcaactgggtgcgacaggccactggacaagggcttgagtggatgggatggatgaaccctaacagtggtaacacaggctatgcacagaagttccagggcagagtcaccatgaccaggaacacctccataagcacagcctacatggagctgagcagcctgagatctgaggacacggccgtgtattactgtgcgagaatccattatagcagtggctggtcaggactggggacctatgactactggggccagggaaccctggtcaccgtctcctcag

SEQ ID NO: 620 - DNA, 373 bp, Homo sapiens
caggtgcagctggtggagtctgggggaggcgtggtccagcctgggaggtccctgagactctcctgtgcagcctctggattcaccttcagtaactatgctatgcactgggtccgccaggctccaggcaaggggctggagtgggtggcagttatatcatatgatggaagtaataaatactacgcagactccgtgaagggccgattcaccatctccagagacaattccaagaacacgctgtatctgcaaatgaacagcctgagagctgaggacacggctgtgtattactgtgcggtattcagtagagatggctacaattactgggttgcgccgattgactactggggccagggaaccctggtcaccgtctcctcag

SEQ ID NO: 621 - DNA, 370 bp, Homo sapiens
caggtgcagctacagcagtggggcgcaggactgttgaagccttcggagaccctgtccctcacctgcgctgtctatggtgggtccttcagtggttactactggagctggatccgccagcccccagggaaggggctggagtggattggggaaatcaatcatagtggaagcaccaactacaacccgtccctcaagagtcgagtcaccatatcagtagacacgtccaagaaccagttctccctgaagctgagctctgtgaccgccgcggacacggctgtgtattactgtgcgagagtcccgtataataaatatagcagctcgtcgaaatcctttgactactggggccagggaaccctggtcaccgtctcctcag

SEQ ID NO: 622 - DNA, 370 bp, Homo sapiens
caggtgcagctacagcagtggggcgcaggactgttgaagccttcggagaccctgtccctcacctgcgctgtctatggtgggtccttcagtggttactactggagctggatccgccagcccccagggaaggggctggagtggattggggaaatcaatcatagtggaagcaccaactacaacccgtccctcaagagtcgagtcaccatatcagtagacacgtccaagaaccagttctccctgaagctgagctctgtgaccgccgcggacacggctgtgtattactgtgcgagacaacgcgggtatagcagcagctggtgggggaactactttgactactggggccagggaaccctggtcaccgtctcctcag

SEQ ID NO: 623 - DNA, 373 bp, Homo sapiens
caggtgcagctggtgcagtctggggctgaggtgaagaagcctggggcctcagtgaaggtctcctgcaaggcttctggatacaccttcaccggctactatatgcactgggtgcgacaggcccctggacaagggcttgagtggatgggatggatcaaccctaacagtggtggcacaaactatgcacagaagtttcagggcagggtcaccatgaccagggacacgtccatcagcacagcctacatggagctgagcaggctgagatctgacgacacggccgtgtattactgtgcgagagaacttccctcctatttgggggagttatcgctaccccttgactactggggccagggaaccctggtcaccgtctcctcag

SEQ ID NO: 624 - DNA, 373 bp, Homo sapiens
gaggtgcagctggtggagtctgggggaggcctggtcaagcctggggggtccctgagactctcctgtgcagcctctggattcaccttcagtagctatagcatgaactgggtccgccaggctccagggaaggggctggagtgggtctcatccattagtagtagtagtagttacatatactacgcagactcagtgaagggccgattcaccatctccagagacaacgccaagaactcactgtatctgcaaatgaacagcctgagagccgaggacacggctgtgtattactgtgcgagagccccccagtattacgatttttggagtggtccctactttgactactggggccagggaaccctggtcaccgtctcctcag

SEQ ID NO: 625 - DNA, 378 bp, Homo sapiens
gaggtgcagctggtggagtctgggggaggcttggtaaagcctggggggtcccttagactctcctgtgcagcctctggattcactttcagtaacgcctggatgagctgggtccgccaggctccagggaaggggctggagtgggttggccgtattaaaagcaaaactgatggtgggacaacagactacgctgcacccgtgaaaggcagattcaccatctcaagagatgattcaaaaaacacgctgtatctgcaaatgaacagcctgaaaaccgaggacacagccgtgtattactgtaccacaggtcccgcattacgatttttggagtggttagtcggtatggacgtctggggccaagggaccacggtcaccgtctcctca

SEQ ID NO: 626 - DNA, 370 bp, Homo sapiens
cagctgcagctgcgggagtcgggcccaggactggtgaagcctgcggagaccctgtccctcatctgcactgtctctggtggctccatcagcagtaataatgactactggggctggatccgccagcccccagggaaggggctggagtggattgggagtatctattatattgggggcacctactacaacccgtccctcaagagtcgagtcaccatatccgtagacgtgtctaagaaccagttctccctgaggctgagctctgtgaccgccgcagacacggctgtctattactgtgcgcgcgaacaagtggttccagctgctaacaactggttcgacccctggggccagggaaccctggtcaccgtctcctcag

SEQ ID NO: 627 - DNA, 351 bp, Homo sapiens
gaggtgcagctggtggagtctgggggaggcttggtccagcctggggggtccctgagactctcctgtgcagcctctggattcaccgtcagtagcaactacatgagctgggtccgccaggctccagggaaggggctggagtgggtctcacttatttatagcggtggtagcacatactacgcagactccgtgaagggcagattcaccatctccagagacaattccaagaacacgctgtatcttcaaatgaacagcctgagagccgaggacacggctgtgtattactgtgcgagagacctcatcgactacggtatggacgtctggggccaagggaccacggtcaccgtctcctca

SEQ ID NO: 628 - DNA, 351 bp, Homo sapiens
gaggtgcagctggtggagtctgggggaggcttggtccagcctggggggtccctgagactctcctgtgcagcctctggactcatcgtcagtagcaactacatgagctgggtccgccaggctccagggaaggggctggagtgggtctcacttatttatagcggtggtagtacattctacgcagactccgtgaagggcagattcaccgtctccagagacaattccaagaacacactttatcttcaaatgaacagcctgagagccgaggacacggctgtgtattattgtgcgagagacctcgtcgactacggtgtggacgtctggggccaagggaccacggtcaccgtctcctca

SEQ ID NO: 629 - DNA, 351 bp, Homo sapiens
gaggtgcagctggtggagtctgggggaaacttggtccagcctggggggtccctgagactctcctgtgcagcctctggactcaccgtcagtagcaactacatgagctgggtccgccaggctccagggaaggggctggagtgggtctcacttatgtatagcggtggtagcacattctatgcagacgccgtgaagggcagattcaccatctccagagacaattccaagaacactctgtatcttcaaatgaacagcctgagagccgaggacacggctgtgtattactgtgcgagagatttggtttactacggtatggacgtctggggccaagggaccacggtcaccgtctcctca

SEQ ID NO: 630 - DNA, 369 bp, Homo sapiens
gaggtgcagctggtggagtctgggggaggcttggtacagcctggggggtccctgagactctcctgtgcagcctctggattcaccttcagtagctacgacatgcactgggtccgccaagctacaggaaaaggtctggagtgggtctcagctattggtactgctggtgacacatactatccaggctccgtgaagggccgattcaccatctccagagaaaatgccaagaactccttgtatcttcaaatgaacagcctgagagccggggacacggctgtgtattactgtgcaagagaggctcctcgcggctcccagaaattcgggtacggtatggacgtctggggccaagggaccacggtcaccgtctcctca

SEQ ID NO: 631 - DNA, 375 bp, Homo sapiens
caggtcaccttgagggagtctggtcctgcgctggtgaaacccacacagaccctcacactgacctgcaccttctctgggttctcactcagcactagtggaatgtgtgtgagctggatccgtcagcccccagggaaggccctggagtggcttgcacgcattgattgggatgatgataaatactacagcacatctctgaagaccaggctcaccatctccaaggacacctccaaaaaccaggtggtccttacaatgaccaacatggaccctgtggacacagccacgtattactgtgcacggtctttttggagtggttacctcaaaagagtaaacggtatggacgtctggggccaagggaccacggtcaccgtctcctca

SEQ ID NO: 632 - DNA, 370 bp, Homo sapiens
caggtgcagctgcaggagtcgggcccaggactggtgaagccttcggagaccctgtccctcacctgcactgtctctggtggctccatcagtagttactactggagctggatccggcagcccccagggaagggactggagtggattgggtatatctattacagtgggagcaccaactacaacccctccctcaagagtcgagtcaccatatcagtagacacgtccaagaaccagttctccctgaagctgagctctgtgaccgctgcggacacggccgtgtattactgtgcgagacactatgatagtagtggttattacccgtacaactggttcgacccctggggccagggaaccctggtcaccgtctcctcag

SEQ ID NO: 633 - DNA, 376 bp, Homo sapiens
cagctgcagctgcaggagtcgggcccaggactggtgaagccttcggagaccctgtccctcacctgcactgtctctggtggctccatcagcagtgaaagttactactggggctggatccgccagtccccagggaaggggctggagtggattgggagtatgtcttatagtgggagcacctaccacaacccgtccctccagagtcgagtcaccatatccgtagacacgtccaagaaccagttctccctgaacctgagctctgtgaccgccgcagacacggctgtctattactgtgcggctcatgttacgatttttggagtgatcactgggaagtggttcgacccctggggccagggaaccctggtcaccgtctcctcag

SEQ ID NO: 634 - DNA, 376 bp, Homo sapiens
cagctgcagctgcaggagtcgggcccaggactggtgaagccttcggagaccctgtccctcacctgcactgtctctggtggctccatctacagtagtgattattactgggggtggatccgccagcccccagggaaggggctggagtggattgggagtatgcattatagtgggagcacctaccacagcccgtccctcaacagtcgagtcaccatatccgtagacccgtccacgaaccagttgtccctgaggctgagctctgcgaccgccgcagacaccgctgtgtattactgtgcggctcatatcactgtttttggaataattactgggaactggttcgacccctggggccagggaaccctggtcaccgtctcctcag

SEQ ID NO: 635 - DNA, 358 bp, Homo sapiens
cagctgcagctgcaggagtcgggcccaggactggtgaagccttcggagaccctgtccctcacctgcactgtctctggtggctccatcagcagtagtagttactactggggctggatccgccagcccccagggaaggggctggagtggattgggagtatctattatagtgggagcacctactacaacccgtccctcaagagtcgagtcaccatatccgtagacacgtccaagaaccagttctccctgaagctgagctctgtgaccgccgcagacacggctgtgtattactgtgcgagacattcccaactatggttcggggaggcctggggccagggaaccctggtcaccgtctcctcag

SEQ ID NO: 636 - DNA, 370 bp, Homo sapiens
gaggtgcagctggtggagtctgggggaggcttggtccagcctggggggtccctgagactctcctgtgcagcctctggattcaccgtcagtagcaactacatgagctgggtccgccaggctccagggaaggggctggagtgggtctcagttatttatagcggtggtagcacatactacgcagactccgtgaagggcagattcaccatctccagagacaattccaagaacacgctgtatcttcaaatgaacagcctgagagccgaggacacggctgtgtattactgtgcgagaaaggactatagcagcagctggtacggggaaggcgcttttgatatctggggccaagggacaatggtcaccgtctcttcag

SEQ ID NO: 637 - DNA, 364 bp, Homo sapiens
caggtgcagctgcaggagtcgggcccaggactggtgaagccttcggagaccctgtccctcacctgcactgtctctggtggctccatcagtagttactactggagctggatccggcagcccgccgggaagggactggagtggattgggcgtatctataccagtgggagcaccaactacaacccctccctcaagagtcgagtcaccatgtcagtagacacgtccaagaaccagttctccctgaagctgagctctgtgaccgccgcggacacggccgtgtattactgtgcgagagattcgagcggggtagtaccaccctactactttgactactggggccagggaaccctggtcaccgtctcctcag

SEQ ID NO: 638 - DNA, 390 bp, Homo sapiens
caggtccagctggtacagtctggggctgaggtgaagaagcctggggcctcagtgagggtctcctgcaaggtttccggatacaccctcactgaattatccatgcactgggtgcgacaggctcctggaaaagggcttgagtggatgggaggttttgatcctgaagatgctgaaacaatctacgcacagaagttccagggcagagtcaccatgaccgaggacacatcttcagacacagcctacatggagctgagcagcctgagatctgaggacacggccgtgtattattgtgcaacagcttttcctatcgttggcagtgcctggtcggcgcaatactcctactactacggtgtggacgtctggggccaagggaccacggtcaccgtctcctca

SEQ ID NO: 639 - DNA, 391 bp, Homo sapiens
caggtgcagctgcaggagtcgggcccaggactggtgaagccttcggagaccctgtccctcacctgcactgtctctggttactccatcagcagtggttactactggggctggatccggcagcccccagggaaggggctggagtggattgggagtatctatcatagtgggagcacctactacaacccgtccctcaagagtcgagtcaccatatcagtagacacgtccaagaaccagttctccctgaagctgagctctgtgaccgccgcagacacggccgtgtattactgtgcgagagagagggggtctacatattactatgatagtagtggttatcttatggggggtctatttgactactggggccagggaaccctggtcaccgtctcctcag

SEQ ID NO: 640 - DNA, 391 bp, Homo sapiens
gaggtgcagctggtggagtctgggggaggcttggtccagcctggggggtccctgagactctcctgtgcagcctctggattcacctttagtagctattggatgagctgggtccgccaggctccagggaagaggctggagtgggtggccaacataaagcaagatggaagtgagagatactatgtggactctgtgaagggccgattcaccatctccagagacaacgccaagaactcactgtatctgcaaatgaacagcctgagagccgaggacacggctgtgtattactgtgcgagatcgccgctgacccattactatgatagtagtgctgaacccacgtatatatactactttgactactggggccagggaaccctggtcaccgtctcctcag

SEQ ID NO: 641 - DNA, 195 bp, Homo sapiens
ctgaagagcaggctcaccatctccaaggacacctccaaaagccaggtggtccttaccatgaccaacgtggaccctgtggacacaggcacatattactgtgcacgtatgggtaattagtgtatgcgtttgggggagttgtcgcaacagaccactttgactactggggccagggaaccctggtcaccgtctcctcag

SEQ ID NO: 642 - DNA, 373 bp, Homo sapiens
gaggtgcatctgttggagtctgggggaggcttggtacaggctggggggtccctgagactctcctgtgtagcctctggattcacctttagaagatatggcatgggctgggtccgccaggctccagggaaggggctggagtgggtctcatacataactgacagtggtggtagtaaatattacgcagactccgtgaagggccggttcaccatctccagggacaattccaagaacacggtctatctgcaaatgaacagcctgagagccgaggacacggccgtttatttctgtgcgaaagaattacgcgttttggagtggcagtacggcgactggttcgaccgctggggccagggaaccctggtctccatctccccag

SEQ ID NO: 643 - DNA, 373 bp, Homo sapiens
gaggtgcagctgttggagtctgggggaggcttggtacagcctggggggtccctgagactctcctgtgcagcctctggattcacctttagcagctatgccatgagctgggtccgccaggctccagggaaggggctggagtgggtctcaactattggtggtgatggtgatagcacatactacgcagactccgtgaagggccggttcaccatctccagagacaattccaagaacacgctgtctctgcaaatgaacagcctgagagccgacgacacggccgtatattactgtgcgaaagccggatacacctatggttatggcttatttgactggttcgacccctggggccagggaaccctggtcaccgtctcctcag

SEQ ID NO: 644 - DNA, 346 bp, Homo sapiens
gaggtgcagctggtggagtctggaggaggcttgatccagcctggggggtccctgagactctcctgtgcagcctctgggttcaccgtcagtagcaactacatgagctgggtccgccaggctccagggaaggggctggagtgggtctcagttatttatagcggtggtagcacatactacgcagactccgtgaagggccgattcaccatctccagagacaattccaagaacacgctgtatcttcaaatgaacagcctgagagccgaggacacggccgtgtattactgtgcgagagattggttcaggggtgctgtctggggccagggaaccctggtcaccgtctcctcag

SEQ ID NO: 645 - DNA, 349 bp, Homo sapiens
caggtgcagctggtggagtctgggggaggcgtggtccagcctgggaggtccctgagactctcctgtgcagcctctggattcaccttcagtagctatgctatgcactgggtccgccaggctccaggcaaggggctggactgggtggcacttatatcatttgatgggagtaataaatacttcgcagactccgtgaagggccgattcaccatctccagagacaattccaagaacacgctgtatctgcaaatgaacagcctgagagctgaggacacggctgtgtattactgtgcgagagtaactcctgcttttgatatctggggccaagggacaatggtcaccgtctcttcag

SEQ ID NO: 646 - DNA, 345 bp, Homo sapiens
gaggtgcagctggtggagtctggaggaggcttgatccagcctggggggtccctgagactctcctgtgcagcctctgggttcaccgtcagtagcaactacatgagctgggtccgccaggctccagggaaggggctggagtgggtctcagttatttatagcggtggtagcacatactacgcagactccgtgaagggccgattcaccatctccagagacaattccaagaacacgctgtatcttcaaatgaacagcctgagagccgaggacacggccgtgtattactgtgcgagagaagggtacggtatggacgtctggggccaagggaccacggtcaccgtctcctca

SEQ ID NO: 647 - DNA, 367 bp, Homo sapiens
gaagtgcagctggtggagtctgggggaggcttggtacagcctggcaggtccctgagactctcctgtgcagcctctggattcacctttgatgattatgccatgcactgggtccggcaagctccagggaagggcctggagtgggtctcaggtattagttggaatagtggtagcataggctatgcggactctgtgaagggccgattcaccatctccagagacaacgccaagaactccctgtatctgcaaatgaacagtctgagagctgaggacacggccttgtattactgtgcaaaagaccggggttcgatttttggagtggtgcccctagggtactggggccagggaaccctggtcaccgtctcctcag

SEQ ID NO: 648 - DNA, 355 bp, Homo sapiens
caggtgcaactggtggagtctgggggaggcttggtcaagcctggagggtccctgagactctcctgtgcagccgctggattcaccttcagtgactactacatgagttggatccgccaggctccagggaaggggctggagtggctttcatacattaccagtagtggtagtaacacatactacgcagactctgtgaagggccgattcaccatctccagggacaacgccaagaactcactgattctgcaaatgcacagcctgggcgccgaggacacggccgtgtattactgtgcgagagatagaggctttgaaggctttgactcctggggccagggaaccctggtcaccgtctcctcag

SEQ ID NO: 649 - DNA, 421 bp, Homo sapiens
caggtgcagctacagcagtggggcgcaggactgttgaagccttcggagaccctgtccctcacctgcgctgtctatggtgggtccttcagtggttactagtggagctggatccgccagcccccagggaaggggctggagtggattggggaaatcaatcatagtggaagcaccaactacaacccgtcgctcaagagtcgagtcaccatatcagtagacacgtccaagaaccagttctccctgaagctgagctctgtgaccgccgcggacacggctgtgtattactgtgcgagaggccgagcgaggagggaaacctacggatattgtagtagtaccagctgccataatcaggagtcgcgactgtcggtaccagtactacggtatggacgtctgtggccaagggaccacggtcaccgtctcctca

SEQ ID NO: 650 - DNA, 376 bp, Homo sapiens
caggtgcacctggtgcagcctggggctgaggtgaagaagcctggggcctcagtgaaggtctcctgcaaggcttctggatacagcttcaccgactactatgtccactgggtgcgacaggcccctggacaagggcttgagtggatggggtggatcaaccctatcagtggtggcacaaactatgcacagaaatttcagggcagggtcaccatgaccagggacacgtccatcagaacagcctacatggagctgagcaggctgagatctgacgacacggccgtgtatttctgtgcgagagttccgtattactatgatactagtgcttatttggggggctttgactactggggccagggaaccctggtcaccgtctcctcag

SEQ ID NO: 651 - DNA, 376 bp, Homo sapiens
caggtccagctggtacagtctggggctgaggtggagaagcctggggcctcagtgaaggtctcctgcaaggtttccggatacaccctcactgaattatccatacactgggtgcgacaggctcctggaaaagggcttgagtggatgggaggttttgatcctgaacatggtgaaacgatctacgcacagaagttccagggcagagtcaccatgaccgaggacacatctacagacacagcctacatggagctgagcagcctgagatctgaggacacggccgtgtattactgtgcaacaggtccgccatattgtactgaaaccagctgcttaaggtggttccacccctggggccagggaaccctggtcaccgtctcctcag

SEQ ID NO: 652 - DNA, 376 bp, Homo sapiens
gaagtgcagctggtggagtctgggggaggcttggtacagcctggcaggtccctgagactctcctgtgcagcctctggattcacctttgatgattatgccatgcactgggtccggcaagctccagggaagggcctggaatgggtctcaggtattagttggaataatggtggcataggctatgcggactctgtgaagggccgattcaccatctccagagacaacgccgagaactccctgtatctgtatatgaacagtctgagagctgaggacacggccttgtatttctgtgcaaaagctaggggctcccacgtggaaatagcagtgtccggttactttgactactggggccagggaactctggtcaccgtctcctcag

SEQ ID NO: 653 - DNA, 376 bp, Homo sapiens
gaagtgcagctggtggagtctgggggaggcttggtacagcctggcaggtccctgagactctcctgtgcagcctctggattcaggtttgatgattatgccatgcactgggtccggcaagctccagggaagggcctggagtgggtctcaggtattagttggaatagtggtagcataggctatgcggactctgtgaggggccgattcaccatctccagagacaacgccaagaactccctgtatctgcaaatgaacagtctgagaggtgaggacacggccttttattactgtgcaaaagatccgaatcccggatataggactggctggtctgcaaagttcgactactggggccagggaaccctggtcaccgtctcctcag

SEQ ID NO: 654 - DNA, 376 bp, Homo sapiens
gaagtgcagctggtggagtctgggggaggcttggtacagcctggcaggtccctaagactctcctgtgcagcctctggattcacctttgatgattatgccatgcactgggtccggcaagctccagggaagggcctggagtgggtctcaggtattagttggaatagtgttagcataggctatgcggactctgtgaagggccgattctccatctccagagacaacgccaagaactctttgtatctgcaaatgaacagtctgagagctgacgacacggccttgtattactgtgcaaaagatacccactatgatagtagtggttatctaccgaatgcttttgactactggggccagggaaccctggtcaccgtctcctcag

SEQ ID NO: 655 - DNA, 376 bp, Homo sapiens
caggtgcagctgcaggagtcgggcccaggactggtgaagccttcggagaccctgtccctcacctgcactgtctctggttactccatcagcagtggttactactggggctggatccggcagcccccagggaaggggctggagtggattgggagtatctatcatagtgggagcacctactacaacccgtccctcaagagtcgagtcaccatatcagtagacacgtccaagaaccagttctccctgaagctgagctctgtgaccgccgcagacacggccgtgtattactgtgcgagagattcacgaggatatagtggctacgatccgatcgggtggttcgacccctggggccagggaaccctggtcaccgtctcctcag

SEQ ID NO: 656 - DNA, 361 bp, Homo sapiens
gaggtacagctgttggagtctgggggagacttggtacagcctggggggtccctgagactctcctgtgcagcctctggattcacctttagcacctatgccatgggctgggtccgccaggctccagggcaggggctggagtgggtctcatctattactgctagtggtgctaacacatactacgcagactccgtgaagggccggttcaccatctccagagacacttccaagaacactctgtttctgcaaatgaacagcctgggaggcgaggacacggccgtatattactgcacgatgaatactggaaaaactccaatcaaccccaactactggggccagggaaccctagtcaccgtctcctcag

SEQ ID NO: 657 - DNA, 376 bp, Homo sapiens
gaggtgcagctggtggagtctgggggaggcttggtccagcctggggggtccctgagactctcctgtgcagcctctggattcacctttagtagctattggatgagctgggtccgccaggctccagggaaggggctggagtgggtggccaacataaagcaagatggaagtgagaaatactatgtggactctgtgaagggccgattcaccatctccagagacaacgccaagaactcactgtatctgcaaatgaacagcctgagagccgaggacacggctgtgtattactgtgcgagagatatctattccccctttttttggagtggtctcaactggttcgacccctggggccagggaaccctggtcaccgtctcctcag

SEQ ID NO: 658 - DNA, 379 bp, Homo sapiens
caggttcagctgttgcagcctggggctgaggtgaagaagcctgcgtcctcagtgaaggtctcctgccaggcttccagatacaccttcaccaaatactttacacagtgggtgcgacagggccctggacaagggcatagtggttgggatgcatcaacccttacaataataacacacactacgcacagaagttccggggcagagtcaccattagcagtgacaggtccgtgagcacagcctacatggagctgagcagcctgagatctgaagacatggtcgtgtgttcctgtgtgagagattacgccgagaaacggtgtaattacgatttttggagtggtcggtcactcctggggccagggaaccctggtcaccgtctcctcag

SEQ ID NO: 659 - DNA, 375 bp, Homo sapiens
caggtgcagctggtggagtctgggggaggcgtggtccagcctgggaggtccctgagactctcctgtgcagcgtctggattcaccttcagtagctatggcatgcactgggtccgccaggctccaggcaaggggctggagtgggtggcagttatatggtatgatggaagtaataaatactatgcagactccgtgaagggccgattcaccatctccagagacaattccaagaacacgctgtatctgcaaatgaacagcctgagagccgaggacacggctgtgtattactgtgcgaccgactacggtgatcacaccaattactactactactacggtatggacgtctggggccaagggaccacggtcaccgtctcctca

SEQ ID NO: 660 - DNA, 372 bp, Homo sapiens
gaggtgcagctggtggagtctgggggaggcttggtccagcctggggggtccctgagactctcctgtgcagcctccggattcaccgtcagtagcaattacatgacctgggtccgccaggctccagggaaggggctggagtgggtctcaattatttatagcggtggtagtatatactacgcagactccgtgaagggcagattcaccatctccagagacaattccaagaacatcatatatcttcaaatgaacagcctgagagccgaggacacgggtgtgtattactgtgcgagagaccataatagtgggttctactccggctactactacggtatggacgtctggggccaagggaccacggtcaccgtctcctca

SEQ ID NO: 661 - DNA, 372 bp, Homo sapiens
gaagtgcagctggtggagtctgggggaggcttggtacagcctggcaggtccctgagactctcctgtgcagcctctggattcacctttgatgattatgccatgcactgggtccggcaagctccagggaagggcctggagtgggtctcaggtattagttggaatagtggtagcataggctatgcggactctgtgaagggccgattcaccatctccagagacaacgccaagaactccctgtatctgcaaatgaacagtctgagagctgaggacacggccttgtattactgtgcaaaagatatggggataatggatacagctatggcgggcggtatggacgtctggggccaagggaccacggtcaccgtctcctca

SEQ ID NO: 662 - DNA, 375 bp, Homo sapiens
gaggtgcagctgttggagtctgggggaggcttggtacagcctggggggtccctgagactctcctgtgcagcctctggattcacctttagcagctatgccatgagctgggtccgccaggctccagggaaggggctggagtgggtctcagctattagtggtagtggtggtagcacatactacgcagactccgtgaagggccggttcaccatctccagagacaattccaagaacacgctgtatctgcaaatgaacagcctgagagccgaggacacggccgtatattactgtgcgatagatagcagtggctggacggcgtactactactactacggtatggacgtctggggccaagggaccacggtcaccgtctcctca

SEQ ID NO: 663 - DNA, 376 bp, Homo sapiens
caggtgcagctggtgcagtctggggctgaggtgaagaagcctggggcctcagtgaaggtctcctgcaaggcttctggatacaccttcaccggctactatgtgcactgggtgcgacaggtccctggacaagggcttgagtggatggcatggatcaaccctaacagtggtggcacaaagtatgcacagaagtttcagggcagggtcaccatgaccagggacacgtccatcagcacagcctacatggaggtgagcaggctgagatctgacgacacggccatgtattactgtgttgcaagaggaggggatgaggatataactggaactccgagggcctttgatatctggggccaagggacaatggtcaccgtctcttcag

SEQ ID NO: 664 - DNA, 376 bp, Homo sapiens
gaggtgcagctgttggagtctgggggaggcttggtacagcctggggggtccctgagactctcctgtgcagcctctggattcacctttagcagctatgccatgagctgggtccgccaggctccagggaaggggctggagtgggtctcagctattagtggtagtggtggtagcacatactacgcagactccgtgaagggccggttcaccatctccagagacaattccaagaacacgctgtatctgcaaatgaacagcctgagagccgaggacacggccgtatattactgtgcgaaagatctgccgccccagaagtgggagctacaaacgggtgcttttgatatctggggccaagggacaatggtcaccgtctcttcag

SEQ ID NO: 665 - DNA, 373 bp, Homo sapiens
gaggtgcagctggtggagtctgggggaggcttggtacagcctggggggtccctgagactctcctgtgcagcctctggattcaccttcagtagttacgacatgcactgggtccgccaagctacaggaaaaggtctggagtgggtctcaggtataggtactgctggtgacacatactatccaggctccgtgaagggccgattcaccatctccagagaaaatgccaagaactccttgtatcttcaaatgaacagcctgagagccggggacacggctgtgtattactgtgcaggagtaagccacactactcgtaatggttatatgtactggtacttcgatctctggggccgtggcaccctggtcactgtctcctcag

SEQ ID NO: 666 - DNA, 385 bp, Homo sapiens
caggtgcagctgcaggagtcgggcccaggactggtgaagccttcggagaccctgtccctcacctgcactgtctctggttactccatcggcagtggttactactggggctgaatccggcacccccagggaaggggctggagtggattgggagtatctatcatagtgggagcacctactacaacccgtccctcaagagtcgagtcaccatatcagtagacacgtccaagaacctgttctccctgaagctgagctctgtgaccgccacagacacggccgtgcattactgtgcgagagatcctccattgcgttcccgctgctatccctctactactactactacggtatggacgtctggggccaagggaccacggtcaccgtctcctca

SEQ ID NO: 667 - DNA, 359 bp, Homo sapiens
gaggtgcagctgttggaatctgggggaggcttggtacagcctggggggtccctgagactctcctgtgtagcctctggattcaccttcagaagctatgccatgatctgggtccgccaggctccagggaaggggctggagtgggtctcaggtattagtgatgatggtgcttacacatactacgcacactccgtgaaggaccggttcaccatctccagagacaattctaagaacacggtgtatctgcaaatgaacagcctgagagacgaagacacggccatctattactgtgcgaaatcgtcaggatataccagtggctggtacggctattggggccagggatccctggtcaccgtctcctc

SEQ ID NO: 668 - DNA, 363 bp, Homo sapiens
caggtgcagctggtggagtctgggggaggcgtggtccagcctgggaggtccctgagactctcctgtgcagcctctggattcaccttcagtagctatgctatgcactgggtccgccaggctccaggcaaggggctggagtgggtggcagttatatcatatgatggaagtaataaatactacgcagactccgtgaagggccgattcaccatctccagagacaattccaagaacacgctgtatctgcaaatgaacagcctgagagctgaggacacggctgtgtattactgtgcgagagacgttagtgggagctactacgggggggggactactggggccagggaaccctggtcaccgtctcctcag

SEQ ID NO: 669 - DNA, 343 bp, Homo sapiens
gaggtgcagctggtggagtctgggggaggcttggtccagcctggggggtccctgagactctcctgtgcagcctctggattcaccgtcagtagcaactacatgagctgggtccgccaggctccagggaaggggctggagtgggtctcacttatttatagcggtggtagtacattctacgcagactccgtgaagggccgattcaccatctccagcgacaattccaagaacacgctgtatcttcaaatgaacagcctgagagccgaggacacggctgtgtattactgtgcgagagatgtccgggggtggctatggggccagggaaccctggtcaccgtctcctcag

SEQ ID NO: 670 - DNA, 346 bp, Homo sapiens
gaggtgcagctggtgcagtctggagcagaggtgaaaaagcccggggagtctctgaagatctcctgtaagggttctggatacagttttaccagtcactggatcgcctgggtgcgccagatgcccgggaaaggcctggagtggatggggatgatctatcctggtgactctgataccagatacagcccgtccttccaaggccaggtcaccatctcagccgacaagtccatcagcaccgcctacctgcagtggagtagcctgaaggcctcggacaccgccatgtattattgtgcgagacaagcgagtattgactactggggccagggaaccctggtcaccgtctcctcag

SEQ ID NO: 671 - DNA, 375 bp, Homo sapiens
caggttcagctggtgcagtctggagctgaggtgaagaagcctggggcctcagtgaaggtctcctgcaaggcttctggttacacctttaccagctatggtatcagctgggtgcgacaggcccctggacaagggcttgagtggatgggatggatcagcgcttacaatggtaacacaaactatgcacagaagttccagggcagagtcaccgtgaccacagacacatccacgagcacagcctacatggagctgaggagcctgagatctgacgacacggccatgtattactgtgcgagagaatctggctacagtaactacgactactactactacggtttggacgtctggggccaagggaccacggtcatcgtctcctca

SEQ ID NO: 672 - DNA, 371 bp, Homo sapiens
caggtgcagctggtgcagtctggggctgaggtgaagaagcctggggcctcagtgaaggtctcctgcaaggcttctggatacaccttcaccagttatgatatcaattgggtgcgacaggccactggacaagggcttgagtggatgggatggatgaaccctaaaaatactaacacaggctatgcacagaagttccagggcagagtcaccatgaccaggaacacctccataagctcagcctacatggagctgagcagcctgagatctgaggacacggccgtgtattactgtgcgagaggcttgattgtagtggtagtagctgctctctcgttttgactactggggccagggaaccctggtcaccgtctcctcag

SEQ ID NO: 673 - DNA, 396 bp, Homo sapiens
cagctgcagctgcaggagtcgggcccaggactggtgaagccttcggagaccctgtccctcacctgcactgtctctggtggctccatcagcagtagtagttactactggggctggatccgccagcccccagggaaggggctggagtggattgggagtatctattatagtgggagcacctactacaacccgtccctcaagagtcgagtcaccatatccgtagacacgtccaagaaccagttctccctgaagctgagctctgtgaccgccgcagacacggctgtgtattactgtgcgagacattttaagaggtattactatggttcggggagttatgggacacttcttgactacggtatggacgtctggggccaagggaccacggtcaccgtctcctca

SEQ ID NO: 674 - DNA, 349 bp, Homo sapiens
caggtgcagctggtgcagtctggggctgaggtgaagaagcctggggcctcagtgagggtttcctgcaaggcatctggatacaccttcagcagctactatatgcactgggtgcgacaggcccctggacaagggcttgagtggatgggaataatcaaccctagtggtggtagtacaggctacgcacagaagttccagggcagagtcaccatgaccagggacacgtccacgagcacagtctacatggagctgagcagcctgagatctgaggacacggccgtgtattactgtgcgacgcatacaggggctttagggtactggggccagggaaccctggtcaccgtctcctcag

SEQ ID NO: 675 - DNA, 393 bp, Homo sapiens
gaggtgcagctggtggagtctgggggaggcttggtacagccgggggggtccctgagactctcctgtgcagcctctggattcaccttcagtatctatagcatgaactgggtccgccaggctccagggaaggggctggagtggctttcctatattactagtagaagtagcaccatatactacacagactctgtgaagggccgattcaccatctccagagacaatgccaagaactcactgtatctgcaaatgaacagcctgagagacgaggacacggctgtgtattactgtgcgagaggatattgtactaatggtgtatgccatcaggggctcgccctctactactattacagtatggacgtctggggccaagggaccacggtcaccgtctcctca

SEQ ID NO: 676 - DNA, 399 bp, Homo sapiens
caggtgcacctggtggagtctgggggaggcgtggtccagcctgggaggtccctgagactctcctgtgcagcgtctggattcaccttcagtagctatggcatgcactgggtccgccaggctccaggcaaggggctggagtgggtggcagttatatggtatgatggaagtaataaatactatgcagactccgtgaagggccgattcaccatctccagagacaattccaagaacacgctgtatctgcaaatgaacagcctgagagccgaggacacggctgtgtattactgtgcgagagtccccgccgtgaattactatgatagaagtggttatctccgggtggactactactactacggtatggacgtctggggccaagggaccacggtcaccgtctcctca

SEQ ID NO: 677 - DNA, 402 bp, Homo sapiens
cagatcaccttgaaggagtctggtcctacgcgggtgaaacccacacagaccctcacgctgacctgcaccttctctgggttctcactcagcactagtggagtgggtgtgggctggatccgtcagcccccaggaaaggccctggagtggcttccactcatttattgggatgatgataagtgctacagcccatctctgaagagcaggttcaccatcaccaaggacacgtccaaaaaccaggtggtccttacaatgaccaacatggaccctgtggacacagtcacatattacagctgaaataggaaccgaatcgcgtggttcggggagttattagccgaggggatacccaggtaactccttctgtaggctactggggccagggaaccctggtcaccgtctcctcag

SEQ ID NO: 678 - DNA, 361 bp, Homo sapiens
caggtgcagctggtggagtctgggggaggcgtggtccagcctgggaggtccctgagagtctcctgtgcagcgtctggattcaccttcagtacctatggcatgcactgggtccgccaggctccaggcaaggggctggagtgggtggcagttatatggtatgatggaagtaaaaaatactatgcagactccgtgaagggccgattcaccatctccagagacaattccaagaacacgctgtatctgcaaatgaacagcctgagagccgaggacacggctgtgtattactgtgcgagagaaacaatagcagcagctgctcattttgactactggggccagggaaccctggtcaccgtctcctcag

SEQ ID NO: 679 - DNA, 396 bp, Homo sapiens
caggtgcagctggtggagtctgggggaggcgtggtccagcctgggaggtccctgagactctcctgtgcagcctctggattcaccttcagtagctatggcatgcactgggtccgccaggctccaggcaaggggctggagtgggtggcagttatatcatatgatggaagtaataaatactatgcagactccgtgaagggccgattcaccatctccagagacaattccaagaacacgctgtatctgcaaatgaacagcctgagagctgaggacacggctgtgtattactgtgcgaaagatcgtcactactgtagtagtaccagctgctatccgtacgccctctactactactacggtatggacgtctggggccaagggaccacggtcaccgtctcctca

SEQ ID NO: 680 - DNA, 376 bp, Homo sapiens
cagatcaccttgaaggagtctggtcctacgctggtgaaacccacacagaccctcacgctgacctgcaccttctctgggttctcactcaacactagtggagtgggtgtggtctggatccgtcagcccccaggaaaggccctggagtggcttgcactcatttattgggatgatgatgaacgctacagcccatctctgaagagcaggctcaccatcaccaaggacacctccaaaaaccaggtggtcctgacaatgaccaacatggaccccgtggacacaggcacatattactgtgcacacagacggcaaggggccgggcagatgatacatgtgaactggttcgacccctggggccagggaaccctggtcaccgtctcct

SEQ ID NO: 681 - DNA, 191 bp, Homo sapiens
cattttctttgaagagcaagcaagattcagtcattgggtgagaataacttgtctaagtaatagcttcagaaatgtcctggggaacataacatgttctggacagagccttggtcaattgtcagaaagggagtttttgtataggagggaagttaagaggaaccattgtgtgtacacttttggccaggggacca

SEQ ID NO: 682 - DNA, 361 bp, Homo sapiens
caggtgcagctggtggagtctgggggaggcgtggtccagcctgggaggtccctgagactctcctgtgcagcgtctggattcaccttcaataactatggcatgcactgggtccgccaggctccaggcaaggggctggagtgggtggcagttatatggtatgatggaagtaataaatactatacagactccgtgaagggccgattcaccatctccagagacaattccaacaacacgttgtatctgcaaatgaacagcctgagagccgaggacacggctgtctattactgtgcgagagatcgtcccttcggtgactacgacgaggactactggggccagggaaccctggtcaccgtctcctcag

SEQ ID NO: 683 - DNA, 361 bp, Homo sapiens
caggtgcaggtggtggagtctgggggaggcgtggtccagcctgggaggtccctgagactctcctgtgcagcctccggattcaccttcaataaccatgctatacactgggtccgccaggctccaggcaaggggctggagtgggtgtcagttatatcatatgatggaagtgataaatactacggagactccgtgaagggccgattcaccatctccagagacaattccaagaacacggtgtatctgcaaatgaacagcctgagagttgaggacacggctgtgtattactgtgcgagagatccgaccagctggtataactggttcgactcctggggccagggaaccctggtcaccgtctcctcag

SEQ ID NO: 684 - DNA, 361 bp, Homo sapiens
caggtgcagctggtggagtctgggggaggcgtggtccagcctgggaggtccctgagactctcctgtgcagcgtctggattcaccttcagtaactatggcatgcactgggtccgccaggctccaggcaaggggctggagtgggtggcagttatatattatgatggaagtaataaatactatgcagactccgtgaagggccgattcaccatctccagagacaattccaacaacacgctgtatctgcaaatgaacagcctgagagtcgaggacacggctgtgtattactgtgcgagagatttttcgttcggggagcctccgggggactactggggccagggaaccctggtcatcgtctcctcag

SEQ ID NO: 685 - DNA, 361 bp, Homo sapiens
caggtgcagctggtggagtctgggggaggcgtggtccagcctgggaggtccctgagactctcctgtgcagcctctggattcaccttcaataagtatggcatgcactgggtccgccaggctccaggcaaggggctggagtgggtggcagttatatcatatgatgcaactgataaatactatgcagactccgtgaagggccgattcaccatctccagagacaattccaagaacatattgtatctgcaaatgaacagcctgagagctgaggacacggctgtgtattactgtgggactagtggttattactctctatactattttgactactggggccagggaaccctggtcaccgtctcctcag

SEQ ID NO: 686 - DNA, 361 bp, Homo sapiens
caggtgcagctggtggagtctgggggaggcgtggtccagcctgggaggtccctgagactctcctgtgcagcctctggattcaccttcagtatctatgctatgcactgggtccgccaggctccaggcaaggggctggagtgggtgtcagtgatatcatatgatggaagtaataaatactacgcagagtccgtgaagggccgattcaccatctccagagacaattccaagaacacgctgtatctgcaaatgaacagcctgagagctgaggacacggctgtgtatttctgtgcgagagataatcgtagtggctatgatttttgtgactactggggccagggaaccctggtcaccgtctcctcag

SEQ ID NO: 687 - DNA, 361 bp, Homo sapiens
caggtgcagctggtggagtcggggggaggcgtggtccggcctgggaggtccctgagactctcctgtgcagcctctggattcaccttcagtacctatgctatgcactgggtccgccaggctccaggcaaggggctggagtgggtggcagttatatcatatgatggagataataaatactacggagactccgtgaagggccgattcaccatctccagagacaattccaagaacacgctgaatctgcaaatgaacagtatgagagctgaggacacggctgtgtattactgtgcgagagctttgggtgggacctaccgctactttgactactggggccagggaaccctggtcaccgtctcctcag

SEQ ID NO: 688 - DNA, 367 bp, Homo sapiens
caggtgcagctggtgcaatctgggtctgagttgaagaagcctggggcctcagtgaaggtttcctgcaaggcttctggatacaccttcactagctatgctatcaattgggtgcgacaggcccctggacaagggcttgagtggatgggatggatcaacaccaacactgggaacccaacgtatgcccagggcttcacaggacggtttgtcttctccttggatacctctgtcagcacggcatatctgcagatcagcagcctaaaggctgaggacactgccacgtattactgtgcgagagagggttgtagtagtaccagctgctatccgttcgacccctggggccagggaaccctggtcaccgtctcctcag

SEQ ID NO: 689 - DNA, 367 bp, Homo sapiens
cacgtgcagctggtgcaatctgggtctgagttgaagaagcctggggcctcagtgaaggtttcctgcaaggcttctggatacaccttcactaactatgctgtgaattgggtgcggcaggcccctggacaagggcttgagtggatggggtggatcgacaccagcactgggaacccaacgtatggccagggcttcacaggacggtttgtcttctccttggacacctctgtcagcacggcatatctgcagatcagcagcctaaaggctgaggacactgccgtttatttctgtgcgagaggagggtactatgataatagtggttatcttttcttatcgtggggccagggagccctggtcaccgtctcctcag

SEQ ID NO: 690 - DNA, 358 bp, Homo sapiens
gaggtgcagctggtggagtctggaggaggcttgatccagcctggggggtccctgagactctcctgtgcagcctctgggttcaacctaagtgggaactacatgagctgggtccgccaggctccagggcaggggctggagtgggtctcacttatttatgccggtggttacgcatactacgcagactccgtgaagggccgattcaccatctccagagacaattccaagaatatgttctatcttcaaatgaacagcctgagagccgaggacacggccatttattactgtgcgagagaatcggcagcagcttggggatggctcgacccctggggccagggaaccctggtcaccgtctcctcag

SEQ ID NO: 691 - DNA, 358 bp, Homo sapiens
gaggtgcagctggtggagtctggaggaggcttgatccagcctggggggtccctgagactctcctgtgcagcctctgggttcaccgtcagtagcaactacatgagctgggtccgccaggctccagggaaggggctggagtgggtctcagttatttatagcggtggtagcacatactacgcagactccgtgaagggccgattcaccatctccagagacaattccaagaacacgctgtatcttcaaatgaacagcctgagagccgaggacacggccgtgtattactgtgcgagagattctccctggaacgaccccggggttgactactggggccagggaaccctggtcaccgtctcctcag

SEQ ID NO: 692 - DNA, 358 bp, Homo sapiens
gaggtgcagctggtggagtctggaggaggcttgatccagcctggggggtccctgagactctcctgtgcagcctctgggttcaccgtcagtagcaactacatgacctgggtccgccaggctccagggaaggggctggagtgggtctcactgatttatagcggtggtagcacattctacgcagactccgtgaagggccgattcaccatctccagagacaattccaagaacacgctgtatcttcaaatgaacagcctgagagccgaggacacggccgtgtattactgtgcgagaccaataatgggtatagcagcagctcgtgagttctggggccagggaaccctggtcaccgtctcctcag

SEQ ID NO: 693 - DNA, 358 bp, Homo sapiens
gaggtgcagctggtggagtctggaggaggcttgatccagcctggggggtccctgagactctcctgtgcagcctctgggttcaccgtcagtagcaactacatgagctgggtccgccaggctccagggaaggggctggagtgggtctcagttatttacagcggtggtaacacatactccgcagactccgtgaagggccgattcaccatctccagagacaattccaagaacacgctgtatcttcaaatgaacagcctgagagccgaggacacggccgtgtattactgtgcgagagaaggggtagctgctacccattactttgactactggggccagggaaccctggtcaccgtctcctcag

SEQ ID NO: 694 - DNA, 360 bp, Homo sapiens
gaggtgcagctggtggagtctgggggaggcttggtccagccgggggggtccctgagactctcctgtgcagcctctggattcacctttagtatctattggatgacctgggtccgccaggctccagggaaggggctggagtgggtggccaacataaagcaagatggaagtgagaaatactatgtggactctgtgaagggccgattcaccatctccagagacaacgccaagaactcactgtctctgcaaatgaacagcctgagagccgaggacacggctgtgtattactgtgcgagagatggtatagcagtggctggaggtttggacgtctggggccaagggaccacggtcaccgtctcctca

SEQ ID NO: 695 - DNA, 364 bp, Homo sapiens
caggttcagctggtgcagtctggagctgaggtgaagaagcctggggcctcagtgaaggtctcctgcaaggcttctggttacacctttaccagctatggtatcagctgggtgcgacaggcccctggacaagggcttgagtggatgggatggatcagcgcttacaatggtaacacaaactatgcacagaagctccagggcagagtcaccatgaccacagacacatccacgagcacagcctacatggagctgaggagcctgagatctgacgacacggccgtgtattactgtgcgagagaaatatgggatagcagtggcaacaacattgactactggggccagggaaccctggtcaccgtctcctcag

SEQ ID NO: 696 - DNA, 367 bp, Homo sapiens
caggtgcagctggtgcagtctggggctgaggtgaagaagcctggggcctcagtgaaggtctcctgcaaggcttctggatacaccttcaccggctactatatgcactgggtgcgacaggcccctggacaagggcttgagtggatgggatggatcaaccctaacagtggtggcacaaactatgcacagaagtttcagggcagggtcaccatgaccagggacacgtccatcagcacagcctacatggagctgagcaggctgagatctgacgacacggccgtatattactgtgcgcgagatttggacttttctatggttcggggtagtatcttatactggggccagggaaccctggtcaccgtctcctcag

SEQ ID NO: 697 - DNA, 367 bp, Homo sapiens
caggtgcagctggtggagtctgggggaggcgtggtccagcctgggaggtccctgagactctcctgtgcagcctctggattcaccttcagtacctgggctatgcactgggtccgccaggctccaggcaaggggctggagtgggtggcacttatatcatatgatggaagtactaaatactactcagactccgtgaagggccgattctccatctccagagacaattccaagaacacgctatatctgcaaatgaacagcctgagagctgaggacacggctgtgttttactgtgcgagagatctgtcggggagtggttaccacaactggttcgacccctggggccagggaaccctggtcaccgtctcctcag

SEQ ID NO: 698 - DNA, 364 bp, Homo sapiens
gaggtgcagctggtggagtccgggggaggcttagttcagcctggggggtccctgagactctcctgtgcagcctctggattcaccttcagtagctactggatgcactgggtccgccaagctccagggaaggggctggtgtgggtctcacgtattaatagtgatgggagtagcacaagctacgcggactccgtgaagggccgattcaccatctccagagacaacgccaagaacacgctgtatctgcaaatgaacagtctgagagccgaggacacggctgtgtattactgtgcaaggggagccgtgggagctactagggactactttgactactggggccagggaaccctggtcaccgtctcctcag

SEQ ID NO: 699 - DNA, 367 bp, Homo sapiens
gaggtgcagctgttggagtctgggggaggcttggtacagcctggggggtccctgagactctcctgtgcagcctctggattcacctttagcagctatgccatgagctgggtccgccaggctccagggaaggggctggagtgggtctcagctattagtggtagtggtggtagcacatactacgcagactccgtgaagggccggttcaccatctccagagacaattccaagaacacgctgtatctgcaaatgaacagcctgagagccgaggacacggccgtatattactgtgcgaaagatacagatagcagtggctggtacgcccactttgactactggggccagggaaccctggtcaccgtctcctcag

SEQ ID NO: 700 - DNA, 367 bp, Homo sapiens
gaggtgcagctgttggagtctgggggaggcttggtacagcctggggggtccctgagactctcctgtgcagcctctggattcacctttagcagctatgccatgagctgggtccgccaggctccagggaaggggctggagtgggtctcagctattagtggtagtggtggtagcacatactacgcagactccgtgaagggccggttcaccatctccagagacaattccaagaacacgctgtatctgcaaatgaacagcctgagagccgaggacacggccgtatattactgtgcgaaagcgaaccggtatagtgggagctacaactggttcgacccctggggccagggaaccctggtcaccgtctcctcag

SEQ ID NO: 701 - DNA, 367 bp, Homo sapiens
gaggtgcagctagtggagtctgggggaggcttggtacagcctggggggtcccagagactctcctgtgcagcctctggattcacctttagcagctatgtcataaactgggtccgccaggctccagggaaggggctggagtgggtctcagctattagtggtagtggtgatatcacatactacgcagactccgtgaagggccggttcaccatgtccagagacaattccaagaaaacgctatatctgcaaatgaacagcctgagagccgaggacacggccgtatattactgtgcgaaagatcttggatacagctatggttccgagatttttgactactggggccagggaaccctggtcaccgtctcctcag

SEQ ID NO: 702 - DNA, 367 bp, Homo sapiens
gaggtgcagctgttggagtctgggggaggcttggtacagcctggggggtccctgagactctcctgtgcagcctctggattcacctttagcagctatgccatgagctgggtccgccaggctccagggaaggggctggagtgggtctcagctattagtggtagtggtggtatcacatactacgcagactccgtgaagggccggttcaccatctccagagacaattccaagaacacgctgtatctgcaaatgaacagcctgagagccgaggacacggccgtatattactgtgcgaaagattcgatagcagcagctggtactacttactttgactactggggccagggaaccctggtcaccgtctcctcag

SEQ ID NO: 703 - DNA, 358 bp, Homo sapiens
gaggtgcagctggtggagtctgggggaggcttggtccagcctggggggtccctgagactctcctgtgcagcctctggattcaccgtcagtagcaactacatgagctgggtccgccaggctccagggaaggggctggagtgggtctcagttatttatagcggtggtagcacatactacgcagactccgtgaagggcagattcaccatctccagagacaattccaagaacacgctgtatcttcaaatgaacagcctgagagccgaggacacggctgtgtattactgtgcgagagatctacccaattattatcatgcttttgatatctggggccaagggacaatggtcaccgtctcttcag

SEQ ID NO: 704 - DNA, 365 bp, Homo sapiens
cagatcaccttgaaggagtctggtcctatgctggtgaaacccacacagaccctcacgctgacctgcaccttctctgggttctcactcagcactgttggagtgggtgtgggctggatccgtcagcccccaggaaaggccctagagtggcttgcagtcatttattgggatgatgataaacgttactggccatctctgaagagcagggtcaccatcaccaaggacacctccaaaaactcggtggtccttacaatgaccaacatggaccctgtggacacagccacatattactgtggacacctccttggcgctggtaactccgcgttcggtgaccactggggccagggaaccctggtcaccgtctcctc

SEQ ID NO: 705 - DNA, 367 bp, Homo sapiens
cagatcaccttgaaggagtctggtcctacgctggtgaaacccacacagaccctcacgctgacctgcaccttctctgggttctcactcagcactagtggagtgggtgtgggctggatccgtcagcccccaggaaaggccctggagtggcttgcactcatttattgggatgatgataagcgctacagcccatctctgaagagcaggctcaccatcaccaaggacacctccaaaaaccaggtggtccttacaatgaccaacatggaccctgtggacacagccacatattactgtgcacgacggagctactatgatagtagcggggactttgactactggggccagggaaccctggtcaccgtctcctcag

SEQ ID NO: 706 - DNA, 364 bp, Homo sapiens
caggtgcagctggtgcagtctggggctgaggtgaagaagcctggggcctcagtgaaggtctcctgcaaggcttctggatacaccttcaccggctactatatgcactgggtgcgacaggcccctggacaagggcttgagtggatgggatggatcaaccctaacagtggtggcacaaactatgcacagaagtttcagggcagggtcaccatgaccagggacacgtccatcagcacagcctacatggagctgagcaggctgagatctgacgacacggccgtgtattactgtgcgagatattactatgatagtagtggttatcactttgactactggggccagggaaccctggtcaccgtctcctcag

SEQ ID NO: 707 - DNA, 364 bp, Homo sapiens
gaagtgcagctggtggagtctgggggaggcttggtacagcctggcaggtccctgagactctcctgtgcagcctctggattcacctttgatgattatgccatgcactgggtccggcaagctccagggaagggcctggagtgggtctcaggtattagttggaatagtggtagcataggctatgcggactctgtgaagggccgattcaccatctccagagacaacgccaagaactccctgtatctgcaaatgaacagtctgagagctgaggacacggccttgtattactgtgcaaaagatagtatagcagcagctggtaactactttgactactggggccagggaaccctggtcaccgtctcctcag

SEQ ID NO: 708 - DNA, 364 bp, Homo sapiens
gaagtgcagctggtggagtctgggggaggcttggtacagcctggcaggtccctgagactctcctgtgcagcctctggattcacctttgatgattatgccatacactgggtccggcaagctccagggaagggcctggagtgggtctcaggtattagttggaatagtggtagaacagcctatgcggactctgtgaagggccgattcaccatctccagagacaatgtcaagaactccctgtatctgcaaatgaatagtctgagagttgaggacacggccttgtattactgtgcaaaagatcgttatacatctatggccaaagactttgagtactggggccagggaaccctggtcaccgtctcctcag

SEQ ID NO: 709 - DNA, 364 bp, Homo sapiens
gaagtgcagctggtggagtctgggggaggcttggtacagcctggcaggtccctgagactctcctgtgcagcctctggattcacctttgatgattatgccatgcactgggtccggcaagctccagggaagggcctggagtgggtctcaggtattagttggaatagtggtaacataggctatgcggactctgtgaagggccgattcaccatctccagagacaacggcaagaactccctgtatctgcaaatgaacagtctgagagctgaggacacggccgtgtattactgtgcaaaagatatattcccaggaactacgtttcagtttggctactggggccagggaaccctggtcaccgtctcctcag

SEQ ID NO: 710 - DNA, 366 bp, Homo sapiens
gaggtgcagctggtggagtccgggggaggcttagatcagcctggggggtccctgagactctcctgcgcagcctctggattcaccttcagtagctactggatgcactgggtccgccaagctccagggaaggggctggtgtgggtctcacgtattaatagtgatgggagtagcacaagctacgcggactccgtgaagggccgattcaccatctccagagacaacgccaagaacacgttgtatctgcaaatgaacagtctgagagccgaggacacggctgtgtattattgtgcaagaggtattacgacttttggagtggcgtgcggtatggacgtctggggccaagggaccacggtcaccgtctcctca

SEQ ID NO: 711 - DNA, 367 bp, Homo sapiens
caggtcaccttgagggagtctagtcctgcactggtgaaacccacacagaccctcacactgacctgcaccttctctgggttctcactcagcactagtggaatgtgtgtgagctggatccgtcagcccccagggaaggccctggagtggcttgcacgcattgattgggatgatgataaatactacagcacatctctgaagaccaggctcaccatctccaaggacacctctaataatcaggtggtccttacaatgagcaacatggaccctgtggacacagccacgtattactgtgcacggacccgagtgggaggtttcacatactaccttgactattggggccagggaaccctggtcaccgtctcctcag

SEQ ID NO: 712 - DNA, 367 bp, Homo sapiens
caggtcaccttgagggagtctggtcctgcgctggtgaaacccacacagaccctcacactgacctgcaccttctctgggttctcactcagcactagtggaatgtgtgtgagctggatccgtcagcccccagggaaggccctggagtggcttgcacgcattgattgggatgatgataaatactacagcacatctctgaagaccaggctcaccatctccaaggacacctccaaaaatcaggtggtccttacaatgagcaacatggaccctgtggacacagccacgtattactgtgcacggacccgagtgggaggtaccgcatactaccttgactattggggccagggaaccctggtcaccgtctcctcag

SEQ ID NO: 713 - DNA, 364 bp, Homo sapiens
gaggtgcagctggtggagtctgggggaggcttggtacagcctggggggtccctgagactctcctgtgcagcctctggattcaccttcagtagctatagcatgaactgggtccgccaggctccagggaaggggctggagtgggtttcatacattagtagtagtagtagtaccatatactacgcagactctgtgaagggccgattcaccatctccagagacaatgccaagaactcactgtatctgcaaatgaacagcctgagagacgaggacacggctgtgtattactgtgcgagagatttatatttgcagcagctggtaccctttgactactggggccagggaaccctggtcaccgtctcctcag

SEQ ID NO: 714 - DNA, 367 bp, Homo sapiens
gaggtgcagctggtggagtctgggggaggcttggtaaagcctggggggtcccttagactctcctgtgtagcctctggattcactttcaataacgcctggatgacctgggtccgccaggctccagggaaggggctggagtgggttggccggattaaaagcaaaactgatggtgggacgacagactacgctgcacccgtgaaaggcagattcagcatctcaagagatgattcggcaaacacactatatctgcaaatgaacagcctgaaaaccgaggacacagccgtgtattactgtatcagtttggggagttatatcgtttactactttgaccagtggggccagggaaccctggtcaccgtctcctcag

SEQ ID NO: 715 - DNA, 364 bp, Homo sapiens
gaggtgcagctggtggaatctgggggaggcttggtacagcctggggggtccctgagagtctcctgtgcagtctctggattcacctttagcagctatgccatgagctgggtccgccaggctccagggaaggggctggagtgggtctcaggtattagtggtactggtggtgccacatattacgcagactccgtgaagggccggttcaccgtctccagagacaattccaagaacacactgtatctgcaaatgaacagcctgagagccgaggacacggccgtatattactgtgcgaaacttgttacagtgggagctaccaatagacttgactactggggccagggaaccctggtcaccgtctcctcag

SEQ ID NO: 716 - DNA, 364 bp, Homo sapiens
gaggtgcagctgttggagtctgggggaggcttggtacagcctggggggtccctgagactctcctgtgcagcctctggattcacctttagcagctatgccatgagctgggtccgccaggctccagggaaggggctggagtgggtctcagctattagtggtagtggtggtagcacatactacgcagactccgtgaagggccggttcaccatctccagagacaattccaagaacacgctgtatctgcaaatgaacagcctgagagccgaggacacggccgtatattactgtgcgaaagatgtggtagtagtaccagctgctacctttgactactggggccagggaaccctggtcaccgtctcctcag

SEQ ID NO: 717 - DNA, 364 bp, Homo sapiens
gaggtgcaactggttgactctgggggaggcttggttcagccgggggggtccctgagactctcctgtgtcgcctctggatttaccttttccaattatgccatgacgtgggtccgccaggctccagggaaggggctggagtgggtctcagctcttagtggtagtggtcggagcacatactacgcagcctccgtgaagggccggttcaccatctccagggacaattccaagaacacactgtttctgcaaatgaacagcctgagagccgaggacacggccacatattactgcgcgaaagtcgctacggaaatggtttattctataaatgacttctggggccagggaaccctggtcatcgtctcctcag

SEQ ID NO: 718 - DNA, 364 bp, Homo sapiens
gaggtgcagctgttggagtctgggggaggcttggtacagcctggggggtccctgagactctcctgtgcagcctctggattcacctttagcagctatgccatgagctgggtccgccaggctccagggaaggggctggagtgggtctcagctattgttgctcgtggtggtagcacatactacgcagactccgtgaagggccggttcaccatctccagagacaattccaagaacacgctgtatctgcaaatgaacagcctgagagccgaggacacggccgtatattactgtgcgaaagattgggcagcagctggtaccgagtactttgactactggggccagggaaccctggtcaccgtctcctcag

SEQ ID NO: 719 - DNA, 364 bp, Homo sapiens
gaggtgcagctggtggagtctggaggaggcttgatccagcctggggggtccctgagactctcctgtgcagcctctgggttcaccgtcagcagcaactacatgagctgggtccgccaggctccagggaaggggctggagtgggtctcagttatttatagcggtggtagcacattctacgcagactccgtgaagggccgattcaccatctccagagacaattccaacaacactctgtatcttcaaatgaacagcctgagagccgaggacacggccgtgtattactgtgcgagagattacccatttgtaagtggatatagtggctacggctactggggccagggaaccctggtcaccgtctcctcag

SEQ ID NO: 720 - DNA, 360 bp, Homo sapiens
gaggtgcagctggtggagtctgggggaggcttggtccagcctggggggtccctgagactctcctgtgcagcctctggattcaccgtcagtagcaactacatgagctgggtccgccaggctccagggaaggggctggagtgggtctcagttatttatagcggtggtagcacatactacgcagactccgtgaagggcagattcaccatctccagagacaattccaagaacacgctgtatcttcaaatgaacagcctgagagccgaggacacggctgtgtattactgtgcgaacggagcaggggactggtactactacggtatggacgtctggggccaagggaccacggtcaccgtctcctca

SEQ ID NO: 721 - DNA, 364 bp, Homo sapiens
caggtccagctggtacagtctggggctgaggtgaagaagcctggggcctcagtgaaggtctcctgcaaggtttccggatacaccctcactgaattatccatgcactgggtgcgacaggctcctggaaaagggcttgagtggatgggaggttttgatcctgaagatggtgaaacaatctacgcacagaagttccagggcagagtcaccatgaccgaggacacatctacagacacagcctacatggagctgagcagcctgagatctgaggacacggccgtgtattactgtgcaacaggttcagcagtggctgtgtcgggatggttcgacccctggggccagggaaccctggtcaccgtctcctcag

SEQ ID NO: 722 - DNA, 361 bp, Homo sapiens
gaggtgcagctggtggagtctgggggaggcttggtacagccgggggggtccctgagactctcctgtgcagcctctggattcaccttcagtagctacgacatgcactgggtccgccaacctacaggaaaaggtctggagtgggtctcagctattggtactgctggtgacacatactatccaggctccgtgaagggccgattcaccatctccagagaaaatgccaagaactccttgtatcttcaaatgaacagcctgagagccggggacacggctgtatattactgtgcaagagggacatttagtggctacgttaactggttcgacccctggggccagggaaccctagtcaccgtctcctcag

SEQ ID NO: 723 - DNA, 364 bp, Homo sapiens
caggtgcagctggtggagtctgggggaggcgtggtccagcctgggaggtccctgagactctcctgtgcagcctctggattcaccttcagtagctatgctatgcactgggtccgccaggctccaggcaaggggctggagtgggtggcagttatatcatatgatggaagtaataaatactacgcagactccgtgaagggccgattcaccatctccagagacaattccaagaacacgctgtatctgcaaatgaacagcctgagagctgaggacacggctgtgtattactgtgcgagaggctatggttcggggagttattaccccccggactactggggccagggaaccctggtcaccgtctcctcag

SEQ ID NO: 724 - DNA, 364 bp, Homo sapiens
caggtgcaactggtggagtctgggggaggcgtggtccagcctgggaggtccctgagactctcctgtgcagcctctggattcaccttcagtagctatgctatgttctggttccgccaggctccaggcaaggggctggagtgggtggcagttatatcatatgatggaactaataaatactacgcagactccgtgaagggccgattcaccttctccagagacaattccaagaacacgctgtatctgcagatggacagcctgagaactgaggacacggctatgtattactgtgcgaaagccgctggtgggaactacaaggcacactttgactactggggccagggaaccctggtcaccgtctcctcag

SEQ ID NO: 725 - DNA, 364 bp, Homo sapiens
cagctgcagctgcaggagtcgggcccaggactggtgaggccttcggagaccctgtccctcacctgcgctgtctctggtggctccatcagcagtagtacttactactgggtctggatccgccagcccccagggaaggggctggagtggattgggaatatctattatactgggagcacctactacaacccgtccctccagagtcgagtcaccatgtccgtagacacgtccaagaaccacttctccctgaagctgagctctgtgaccgccgcagacacggctgtgtattactgtgcgaggctctttagcagtggctctacaccgtttgaccaatggggccagggaaccctggtcaccgtctcctcag

SEQ ID NO: 726 - DNA, 364 bp, Homo sapiens
caggtgcagctggtggagtctgggggaggcgtggtccagcctgggaggtccctgagactctcctgtgcagcctctggattcatcttcaatacctatgctatgtactgggtccgccaggctccaggcaaggggctggagtgggtggcagttatatcatatgatggaagtaatcaatactatgcagactccgtgaagggccgattcaccatctccagagacagttccaagaacaccctgtttctgcaaatgagcagcctgagagctgaagacacggctgtgtattactgtacgagaccggcctctgggagctacttcggattccttgactactggggccagggaaccctggtcaccgtctcctcag

SEQ ID NO: 727 - DNA, 364 bp, Homo sapiens
caggtgcagctggtggagtctgggggaggcgtggtccagcctgggaggtccctgagactctcctgtgcagcctctggattcaccttcagtacctctgctatgcactgggtccgccaggctccaggcaaggggctggagtgggtggcagttatatcatatgatggaagtaataaatacttcgcagactccgtgaagggccgattcaccatctccagagacaattccaagaacacgctgtatctgcaaatgaacagcctgagagctgaggacacggctgtgtattactgtgcgggagcatatagggggacctacatagcgccctttgactactggggccagggaaccctggtcaccgtctcctcag

SEQ ID NO: 728 - DNA, 364 bp, Homo sapiens
caggtgcagctggtggagtctgggggaggcgtggtccagcctgggaggtccctgagactctcctgtgcagcctctggattcaccttcagtatctatgctatgcactgggtccgccaggctccaggcaaggggctggagtggctggcagttatatcatatgatgaaagtaataaatattacgcagactccgtgaagggccgattcaccatctccagagacaattccaagaacacgctgtatctgcaaatgaacagcctgagacctgaggacgcggctgtgtattactgtgcgagagcgcgaggtgggagctaccgagcggcctttgacttctggggccagggaaccctggtcaccgtctcctcag

SEQ ID NO: 729 - DNA, 367 bp, Homo sapiens
caggtgcagctgcaggagtcgggcccaggactggtgaagccttcggagaccctgtccctcacctgcactgtctctggttactccatcagcagtggttactactggggctggatccggcagcccccagggaaggggctggagtggattgggagtatctatcatagtgggagcacctactacaacccgtccctcaagagtcgagtcaccatatcagtagacacgtccaagaaccagttctccctgaagctgagctctgtgaccgccgcagacacggccgtgtattactgtgcgagagagggcgatagtagtggttactatgaggtttttgatatctggggccaagggacaatggtcaccgtctcttcag

SEQ ID NO: 730 - DNA, 364 bp, Homo sapiens
gaagtgcagctggtggagtctgggggaggcttggtacagcctggcaggtccctgagactctcctgtgcagcctctggattcacctttgatgattatgccatgcactgggtccggcaagctccagggaggggcctggagtgggtctcaggtattagttggagtggtggtagcataacctatgcggactctgtgaagggccgattcaccatctccagagacaacgccaaggactccctgtatctgcaaatgaacagtctgagagctgaggacacggccttatattactgtgcaaaagatcaagagtatggcaattggaaagcttttgatgtctggggccaagggacaatggtcaccgtctcttcag

SEQ ID NO: 731 - DNA, 361 bp, Homo sapiens
gaggtgaacctggtgcagtctgggggaggcttggtccagcctggagggtccctgagactctcctgtgcaggctctggattcaccgtcagttccagttacatgagctggatccgccaggctccagggaagggcctggaatgggtctcaattatttatagcactggcaccagattctactcagactccgtacagggcagattcaccatctccagagacaaatcgaccaacaccctttatctagagatggacagcctgagagtcgaagacacggctgtttattactgtgcgagagatcccagtgggacttacacaccggcctgggagtcctggggccagggaaccctggtcaccgtctcgtcag

SEQ ID NO: 732 - DNA, 364 bp, Homo sapiens
caggtgcagctggtggagtctgggggaggcgtggtccagcctgggaggtccctgagactctcctgtgcagcctctggattcaccttcagtacctatgctatgcactgggtccgccaggctccaggcaaggggctggagtgggtggcagttatatcatatgatggaagtaataaatactacgcagactccgtgaagggccgattcaccatctccagagacaattccaagaacacgctgtatctgcaaatgaacagcctgagagctgaggacgcggctgtatattactgtgcgagagctacgagggggggttaccgcgatgcttttgatatctggggccaagggacaatggtcaccgtctcttcag

SEQ ID NO: 733 - DNA, 364 bp, Homo sapiens
caggtgcagctggtggagtctgggggaggcgtggtccagcctgggaggtccctgagactctcctgtgcagcctctggattcaccttcagtagctatgctatgcactgggtccgccaggctccaggcaaggggctggagtgggtggcagttatatcatatgatggaagtaataaatactacgcagactccgtgaagggccgattcaccatctccagagacaattccaagaacacgctgtatctgcaaatgaacagcctgagagctgaggacacggctgtgtattactgtgcgaggtcgtatagtgggagctacttgagtgcttttgatatctggggccaagggacaatggtcaccgtctcttcag

SEQ ID NO: 734 - DNA, 358 bp, Homo sapiens
caggtgcagctggtggagtctgggggaggcgtggtccagcctgggaggtccctgagactctcctgtgcagcgtctggattcaccttcagtagctatggcatgcactgggtccgccaggctccaggcaaggggctggagtgggtggcagttatatggtatgatggaagtaataaatactatgcagactccgtgaagggccgattcaccatctccagagacaattccaagaacacgctgtatctgcaaatgaacagcctgagagccgaggacacggctgtgtattactgtgcgagtagtcggcagtggctggcccattttgactactggggccagggaaccctggtcaccgtctcctcag

SEQ ID NO: 735 - DNA, 366 bp, Homo sapiens
caggtgcagctggtggagtctgggggaggcgtggtccagcctgggaggtccctgagactctcctgtgcagcctctggattcaccttcagtacctatgctatgcactgggtccgccaggctccaggcaaggggctggagtgggtggcagttatatcatatgatggaagtaataaatactacgcagactccgtgaagggccgattcaccatttccagagacaattccaagaatacgctgtatctgcaattgaacagcctgagagctgaggacacggctgtgttttactgtgcgagacgaagtggcagctactaccactactacggcatggacgtctggggccacgggaccacggtcaccgtctcctca

SEQ ID NO: 736 - DNA, 361 bp, Homo sapiens
caggtgcagctggtgcagtctggggctgaggtgaagaagcctggggcctcagtgaagctttcctgcaaggcatctggatacaccttcaccacctactatatgcactgggtgcgacaggcccctggacaagggcttgagtggatgggaataatcaaccctagtggtggtagcacaacctacgcacagaagttccagggcagagtcaccatgaccagggacacgtccacgagcacagtctacatggagttgagcagcctgagatctgaggacacggccgtgtattactgtgcgagagagtattgtggtggtgactgctatcctgactactggggccagggaaccctggtcaccgtctcctcag

SEQ ID NO: 737 - DNA, 361 bp, Homo sapiens
cagatcaccttgaaggagtctggtcctacgctggtgaaacccacacagaccctcacgctgacctgcaccttctctgggttctcactcagcactagtggagtgggtgtgggctggatccgtcagcccccaggaaaggccctggagtggcttgcactcatttattgggatgatgataagcgctacagcccatctctgaagagcaggctcaccatcaccaaggacacctccaaaaaccaggtggtccttacaatgaccaacatggaccctgtggacacagccacatattactgtgcacacagggaagcattgtgggatgcgttcgacccctggggccagggaaccctggtcaccgtctcctcag

SEQ ID NO: 738 - DNA, 360 bp, Homo sapiens
caggtcaccttgagggagtctggtcctgcgctggtgaaacccacacagaccctcacactgacctgcacgttctctgggttctcactcagcactagtggaatgtgtgtgagctggatccgtcagcccccagggaaggccctggagtggcttgcacgcattgattgggatgatgataaatactacagcacatctctggagaccaggctcaccatctccaaggacacctccaaaaaccaggtggtccttacaatgaccaacatggaccctgtggacacagccacgtattactgtgcacggatggtagcagcgtttgtggcgatggacgtctggggccaagggaccacggtcaccgtctcctca

SEQ ID NO: 739 - DNA, 357 bp, Homo sapiens
caggtgcagctggtgcagtctggggctgaggtgaagaagcctggggcctcagtgaaggtctcctgcaaggcttctggatacaccttcaccggctactatatgcactgggtgcgacaggcccctggacaagggcttgagtggatgggatggatcaaccctaacagtggtggcacaaactatgcacagaagtttcagggcagggtcaccatgaccagggacacgtccatcagcacagcctacatggagctgagcaggctgagatctgacgacacggccgtgtattactgtgcgagggtgaccaattattggtacggtatggacgtctggggccaagggaccacggtcaccgtctcctca

SEQ ID NO: 740 - DNA, 364 bp, Homo sapiens
gaggtgcagctggtggagtctgggggaggcttggtacagcctggggggtccctgagactctcctgtgcagcctctggattcaccttcagtagctacgacatgcactgggtccgccaagctacaggaaaaggtctggagtgggtctcagctattggtactgctggtgacacatactatccagactccgtgaagggccgattcaccatctccagagaaaatgccaacaactccttgtatcttcaaatgaacagcctgagagccggggacacggctgtttattactgtgcaaggaggggcagcagctggtacggggactggtacttcgatctctggggccgtggcaccctggtcactgtctcctcag

SEQ ID NO: 741 - DNA, 354 bp, Homo sapiens
gaggtgcagctggtggagtctggaggaggcttgatccagcctggggggtccctgagactctcctgtgcagcctctgggttcaccgtcagtagcaactacatgagctgggtccgccaggctccagggaaggggctggagtgggtctcagttatttatagcggtggtagcacatactacgcagactccgtgaagggccgattcaccatctccagagacaattccaagaacacgctgtatcttcaaatgaacagcctgagagccgaggacacggccgtgtattactgtgcgagagacctgctggggtctggcggtatggacgtctggggccaagggaccacggtcaccgtctcctca

SEQ ID NO: 742 - DNA, 358 bp, Homo sapiens
gaggtgcagctggtggagtctgggggaggcttggtccagcctggggggtccctgagactctcctgtgcagcctctggattcacctttagtagctattggatgagctgggtccgccaggctccagggaaggggctggagtgggtggccaacataaagcaagatggaagtgagaaatactatgtggactctgtgaagggccgattcaccatctccagagacaacgccaagaactcactgtatctgcaaatgaacagcctgagagccgaggacacggctgtgtattactgtgcgagaaagttacgatttttggagtggttcgacccctggggccagggaaccctggtcaccgtctcctcag

SEQ ID NO: 743 - DNA, 364 bp, Homo sapiens
gaggtgcagctggtggagtctgggggaggcttggtaaagcctggggggtcccttagactctcctgtgcagcctctgaattcactttcagtaacgcctggatgagctgggtccgccaggctccagggaaggggctggagtgggttggccgtattaaaaccaaaaatgatggtgggacaacagactacgctgcacccgtgaaaggcagattcaccatctcaagagatgattcagaaaatacgctgtatctgcaaatgaacagcctgaaaaccgaggacacagccgtgtattactgtaccacagacccagattatagcaggtcgccacctttctggggccagggaaccctggtcaccgtctcctcag

SEQ ID NO: 744 - DNA, 366 bp, Homo sapiens
gaagtgcagctggtggagtctgggggagtcgtggtacagccgggggggtccctgagactctcctgcgcagcctctggattcacctttgataattatgccatgcactgggtccgtcaggctccggggaagggtctggagtgggtctctctcattacttgggatggtgatagcatctactatgcagactctgtgaggggtcgattcaccatctccagagacaacagcaaaaactccctgtttctgcaaatgaacagtctgagacctgaggacaccgccttatattattgtgcaaaggaattagtagcagtccgttactactacggtatggacgtctggggccaagggaccacggtcaccgtctcctca

SEQ ID NO: 745 - DNA, 361 bp, Homo sapiens
caggttcagctggtgcagtctggagctgaggtgaagaagcctggggcctcagtgaaggtctcctgcaaggcttctggttacacctttaccagctatggtatcagctgggtgcgacaggcccctggacaagggcttgagtggatgggatggatcagcgcttacaatggtaacacaaactatgcacagaagctccagggcagagtcaccatgaccacagacacatccacgagcacagcctacatggagctgaggagcctgagatctgacgacacggccgtgtattactgtgcgagatggcctatggttcggggagccgcgattgactactggggccagggaaccctggtcaccgtctcctcag

SEQ ID NO: 746 - DNA, 361 bp, Homo sapiens
caggtgcagctgcaggagtcgggcccaggactggtgaagccttcacagaccctgtccctcacctgcactgtctctggtggctccatcagcagtggtggttactactggagctggatccgccagcacccagggaagggcctggagtggattgggtacatctattacagtgggagcacctactacaacccgtccctcaagagtcgagttaccatatcagtagacacgtctaagaaccagttctccctgaagctgagctctgtgactgccgcggacacggccgtgtattactgtgcgagagatttgttcggggagttattcgctctggtctggggccagggaaccctggtcaccgtctcctcag

SEQ ID NO: 747 - DNA, 358 bp, Homo sapiens
caggttcagctggtgcagtctggagctgaggtgaagaagcctggggcctcagtgaaggtctcctgcaaggcttctggttacacctttaccagctatggtatcagctgggtgcgacaggcccctggacaagggcttgagtggatgggatggatcagcgcttacaatggtaacacaaactatgcacagaagctccagggcagagtcaccatgaccacagacacatccacgagcacagcctacatggagctgaggagcctgagatctgacgacacggccgtgtattactgtgcgagatctggcgatttttggagtggtatcgggtactggggccagggaaccctggtcaccgtctcctcag

SEQ ID NO: 748 - DNA, 355 bp, Homo sapiens
gaggtgcaggtggtggagtctggaggaggcttgatccagccgggggggtccctgagactctcctgtgcagcctctgggttcaccgtcagtagcaactacatgagctgggtccgccaggctccagggaagggactggagtgggtctcagttatttatagaggtggtagcacatactacgcagactccgtgaagggccgattcaccatctccagagacagttccaagaacacgctgcatcttcaaatgaacagcctgagagccgaggactcggccgtgtattactgtgcgagaaggattcctacagactggagccttgactactggggccagggaaccctggtcaccgtctccacag

SEQ ID NO: 749 - DNA, 355 bp, Homo sapiens
gaggtgcagctggtggagtctggaggaggcttgatccagcctggggggtccctgagactctcctgtgcagcctctgggttcatcgtcagtagaaactacatgagctgggtccgccaggctccagggaaggggctggagtgggtctcagttatttatagtggtggtaccacatactacgcagactccgtgaagggccgcttcaccatctccagagacaattccaagaacacgctgtatcttcaaatgaacagcctgagagccgaggacacggccgtgtattactgtgcgagatcgctactagtaccagctgcagatcaggtctggggccagggaaccctggtcaccgtctcctcag

SEQ ID NO: 750 - DNA, 355 bp, Homo sapiens
gaggtgcagctggtggagtctggaggaggcttgatccagcctggggggtccctgagactctcctgtgcagcctctgggatcatcgtcagtaggaactacatgagctgggtccgccaggctccagggaaggggctggagtgggtctcactgatttatagcggtggtagcacattctacgcagactccgtgaagggccgattcaccatctccagagacaattccaagaacacgctgtatcttcaaatgaacagcctgagagccgaggacacggccgtgtattactgtgcgagagatggtatggggtttgcagcagctgaccactggggccagggaaccctggtcaccgtctcctcag

SEQ ID NO: 751 - DNA, 355 bp, Homo sapiens
gaggtgcagctggtggagtctggaggaggcttgatccagcctggggggtccctgagactctcctgtgcagcctctgggttcaccgtcagtagcaactacatgagctgggtccgccaggctccagggaaggggctggagtgggtctcagttatttatagcggtggtagcacatactacgcagactccgtgaagggccgattcaccatctccagagacaattccaagaacacgctgtatcttcaaatgaacagcctgagagccgaggacacggccgtgtattactgtgcgaggaatatagcagtggctggacgagataactactggggccagggaaccctggtcaccgtctcctcag

SEQ ID NO: 752 - DNA, 355 bp, Homo sapiens
gaggtgcagctggtggagtctgggggaggcttggtccagcctggggggtccctgagactctcctgtgcagcctctggattcatcgtcagtagcaactacatgagctgggtccgccaggctccagggaaggggctggagtgggtctcacttatttatagcggtggtagcacatactacgcagactccgtgaagggcagattcaccatctccagagacaattccaagaacacgctgtatcttcaaatgaacagcctgagagccgaagacacggctgtgtattactgtgcgagagatttcgccccccgggatggctacagtatttggggccaagggacaatggtcaccgtctctgcag

SEQ ID NO: 753 - DNA, 358 bp, Homo sapiens
caggtgcagctggtgcagtctggggctgaggtgaagaagcctggggcctcagtgaaggtctcctgcaaggcttctggatacaccttcaccggctactatatgcactgggtgcgacaggcccctggacaagggcttgagtggatgggatggatcaaccctaacagtggtggcacaaactatgcacagaagtttcagggcagggtcaccatgaccagggacacgtccatcagcacagcctacatggagctgagcaggctgagatctgacgacacggccgtgtattactgtgcgagagagggtgacgtagcccaatgcttccagcactggggccagggcaccctggtcaccgtctcctcag

SEQ ID NO: 754 - DNA, 364 bp, Homo sapiens
caggtgcagctggtggagtctgggggaggcgtggtccagcctgggaggtccctgagactctcctgtgcagcgtctggattcaccttcagtagctatggcatgcactgggtccgccaggctccaggcaaggggctggagtgggtggcagttatatggtatgatggaagcaataaatactatgcagagtccgtgaagggccgattcaccatctccagagacaattccaagaacacgcagtatctgcaaatgaacagcctgagagccgaggacacggctgtgtattactgtgcgagagagggccaagtgggagctactactggacttgactactggggccagggaaccctggtcaccgtctcctcag

SEQ ID NO: 755 - DNA, 325 bp, Homo sapiens
gaaattgtgttgacgcagtctccaggcaccctgtctttgtctccaggggaaggaaccaccctctcctgcagggccagtcagagtgttagcagcagctacttagcctggtaccagcagaaacctggccaggctcccaggctcctcatctatggtgcatccggcagggccactggcatcccagacaggttcagtggcagtgggtctgggacagacttcactctcaccatcagcagactggagcctgaagattttgcagtgtattactgtcagcagtctgaaagctcaccgtacacttttggccaggggaccaagctggagatcaaac

SEQ ID NO: 756 - DNA, 325 bp, Homo sapiens; identical to SEQ ID NO: 755

SEQ ID NO: 757 - DNA, 325 bp, Homo sapiens; identical to SEQ ID NO: 755

SEQ ID NO: 758 - DNA, 325 bp, Homo sapiens
gaaattgtgttgacgcagtctccaggcaccctgtctttgtctccaggggaaggaaccaccctctcctgcagggccagtcagagtgttagcagcagctatttagcctggtaccagcagaaacctggccaggctcccaggctcctcatctatggtgcatccggcagggccactggcatcccagacaggttcagtggcagtgggtctgggacagacttcactctcaccatcagcagactggagcctgaagattttgcagtgtattactgtcagcagtctgaaagctcaccgtacacttttggccaggggaccaagctggagatcaaac

SEQ ID NO: 759 - DNA, 325 bp, Homo sapiens; identical to SEQ ID NO: 755

SEQ ID NO: 760 - DNA, 331 bp, Homo sapiens
cagtctgtgttgacgcagccgccctcagtgtctgcggccccaggacagaaggtcaccgtctcctgctctggaagcagctccaacattgggaatcattatgtgtcctggtaccagcaactcccaggaacagcccccaaactcctcatttatgacaataataagcgaccctcagggattcctgaccgattctctggctccaagtctggcacgtcagccaccctggccatcaccggactccagactggagacgaggccgattattactgcggaacatgggatagccgcctgagtgctggggtgttcggcggagggaccaagctgaccgtcctag

SEQ ID NO: 761 - DNA, 331 bp, Homo sapiens
cagtctgtgttgacgcagccgccctcagtgtctgcggccccaggacagaaggtcaccatctcctgctctggaagcagctccaacattgggaatcattatgtatcctggtaccagcagctcccaggaacagcccccaaactcctcatttatgacaataataagcgaccctcagggattcctgaccgattctctggctccaagtctggcacgtcagccaccctggccatcaccggactccagactggagacgaggccgattattactgcggaacatgggatagccgcctgagtgctggggtgttcggcggagggaccaaggtgaccgtcctag

SEQ ID NO: 762 - DNA, 330 bp, Homo sapiens
gacatcgtgatgacccagtctctagactccctggctgtgtctctgggcgagagggccaccatcaactgcaggtccagccagagttttttatacagctccaacaataaagactatttagcttcgtaccaccagacagcctcctaagctgctcatttactgggcatctacccgggaatccggggtccctgaccgattcagtggcagcgggtctgggacagatttcactctcaccatcagcagcctgcaggctgaagatgtggcagtttattactgtcagcaatattatagtactcctcactttcggcggagggaccaaggtggagatcaaac

SEQ ID NO: 763 - DNA, 331 bp, Homo sapiens
cagtctgtgttgacgcagccgccctcagtgtctgcggccccaggacagaaggtcaccatctcctgctctggaagcagctccaacattgggaataattatgtatcctggtaccagcagctcccaggaacagcccccaaactcctcatttatgacaataataagcgaccctcagggattcctgaccgattctctggctccaagtctggcacgtcagccaccctggccatcaccggactccagactggagacgaggccgattattactgcggaacatgggatagccgcctgagtgctggggtgttcggcggagggaccaagctgaccgtcctag

SEQ ID NO: 764 - DNA, 331 bp, Homo sapiens
cagtctgtgctgactcagccaccctcagcgtctgggacccccgggcagagggtcaccatctcttgttctggaagcagctccaacatcggaagtaattatgtatactggtaccagcagctcccaggaacggcccccaaactcctcatctataggaataatcagcggccctcaggggtccctgaccgattctctggctccaagtctggcacctcagcctccctggccatcagtgggctccggtccgaggatgaggctgattattactgtgcagcatgggatgacagcctgagtggtgtggtattcggcggagggaccaagctgaccgtcctag

SEQ ID NO: 765 - DNA, 331 bp, Homo sapiens; identical to SEQ ID NO: 764

SEQ ID NO: 766 - DNA, 331 bp, Homo sapiens; identical to SEQ ID NO: 764

SEQ ID NO: 767 - DNA, 325 bp, Homo sapiens
gacatccagatgacccagtctccttccactatgtctgcatctgtaggagaccgagtcaccatcacttgccgggccagtcagagtattagtaattggttggcctggtatcagcagaaaccaggaaaagcccctaacctcctaatctataaggcgtctagtttagaaagcggggtcccctcaaggttcagcggcagtggatctgggacagaattcactctcaccatcagcagcctgcagcctgatgattttgcaacttattactgtcaacagtataatacttattcgccgatcaccttcggccaagggacacgactggagattaaac

SEQ ID NO: 768 - DNA, 325 bp, Homo sapiens; identical to SEQ ID NO: 767

SEQ ID NO: 769 - DNA, 325 bp, Homo sapiens; identical to SEQ ID NO: 767

SEQ ID NO: 770 - DNA, 325 bp, Homo sapiens
gacatccagatgacccagtctccttccaccctgtctgcatctgtaggagacagagtcaccatcacttgccgggccagtcagaatattaatagtaggttggcctggtatcagcagaaatcagggaaagcccctaagcccctgatttataaggcgtctagtttagaaagtggagtcccatcaaggttcagcggcggtggatctgggacagaattcactctcaccatcagcagcctgcagcctgatgattttgcaacttattattgtcaacagtataatagttattcgtcgatcaccttcggccaagggacacgactggagattaaac

SEQ ID NO: 771 - DNA, 325 bp, Homo sapiens
gacatccagatgacccagtctccttccaccctgtctgcatctgtaggagacagagtcaccatcacttgccgggccagtcagagtattagtagctggttggcctggtatcagctgaaaccagggaaagcccctaagctcctgatctataaggcgtctagtttagaaagtggggtcccatcaaggttcagcggcagtggatctgggacagaattcactctcaccatcagcagcctgcagcctgaagattttgcaacttattactgtcaacagtataatagttattcgtcgatcaccttcggccaagggacacgactggagattaaac

SEQ ID NO: 772 - DNA, 325 bp, Homo sapiens; identical to SEQ ID NO: 770

SEQ ID NO: 773 - DNA, 322 bp, Homo sapiens
gacatccagatgacccagtctccatcctccctgtctgcatctgtaggagacagagtcaccatcacttgccgggcaagtcagagcattaggaggtatttaaattggtatcagcagaaaccagggaaagcccctaagctcctgatctatgctgcatccagtttgcaaagtggggtcccatcaagcttcagtggcagtggatctgggacagatttcactctcaccatcagcagtctgcaacctgaagattttgcaacttactactgtcaacagagttacagtaccccgaggacgttcggccaagggaccaaggtggaaatcaaac

SEQ ID NO: 774 - DNA, 322 bp, Homo sapiens
gacatccagatgacccagtctccatcctccctgtctgcatctgtaggagacagagtcaccatcacttgccgggcaagtcagaacattaggaggtatttaaattggtatcagcagaaaccagggaatgcccctaagctcctgatctatgctgcatccagtttgcaaagtggggtcccatcaaggttcagtggcagtggatctgggacagatttcactctcaccatcagcagtctgcaacctgacgattttgcaacttactcctgtcaacagagttacagtaccccgaggacgttcggccaagggaccaaggtggaaatcaaac

SEQ ID NO: 775 - DNA, 328 bp, Homo sapiens
gaaattgtgttgacgcagtctccaggcaccctgtctttgtctccaggggaaagagccgccctctcctgcagggccagtctacctattagcgccaggtacttagcctggtaccagcagaaacctggccagactcccaggctcctcatttatggtgcatccagtagggccactggcatcccagacaggttcagtggcagtgggtctgggacagacttcactctcaccatcagcagactggaccctgaagattttgcagtgtattactgtcagcattatggtagctcacctccgctcactttcggcggagggaccaaggtggagatcaaac

SEQ ID NO: 776 - DNA, 328 bp, Homo sapiens
gaaattgtgttgacgcagtctccaggcaccctgtctttgtctccaggggaaagagccaccctctcctgcagggccagtctacctattagcgccaggtacttagcctggtaccagcagaaacctggccagactcccaggctcctcatttatggtgcatccagtagggccactggcatcccagacaggttcagtggcagtgggtctgggacagacttcactctcaccatcagcagactggaccctgaagattttgcagtgtattactgtcagcattatggtagctcacctccgctcactttcggcggagggaccaaggtggagatcaaac

SEQ ID NO: 777 - DNA, 325 bp, Homo sapiens
gaaattgtgttgacacagtctccagccaccctgtctttgtctccaggggaaagagccaccctctcctgcagggccagtcagagtgttagcagctacttagcctggtaccaacagaaacctggccaggctcccaggctcctcatctatgatgcatccaacagggccactggcatcccagccaggttcagtggcagtgggtctgggacagacttcactctcaccatcagcagcctagagcctgaagattttgcagtttattactgtcagcagcgtagcaactggcctccgtggacgttcggccaagggaccaaggtggaaatcaaac

SEQ ID NO: 778 - DNA, 325 bp, Homo sapiens; identical to SEQ ID NO: 777

SEQ ID NO: 779 - DNA, 332 bp, Homo sapiens
ttttatgctgactcagccgcactctgtgtcggactctccggggaggacggtcaccatctcctgcacccgcagcagtggcgacattgccagcagttatgtgcagtggtatcagcagcgcccgggcagtgtccccacaactgtgatccatgaaaatagcgaaaggccctctggggtccctgatcggttctctggctccatcgacacctcctccaactctgcctccctcaccatctctggcctgcagactgaggacgaggctgtctactactgtcagtcttatgatagtggccgtcagggagtcttcggcggagggaccaagctgaccgtcctag

SEQ ID NO: 780 - DNA, 334 bp, Homo sapiens
aattttatgctgactcagccgcactctgtgtcggactctccggggaggacggtcaccatctcctgcacccgcagcagtggcgacattgccagcagttatgtgcagtggtaccagcagcgcccgggcagtgtccccacaactgtgatctatgaaaataacgaaagaccctctggggtccctgatcggttctctggctccatcgacagctcctccaactctgcctccctcaccatctctggcctgaagactgaggacgaggctgactactactgtcagtcttatgatagtggccgtcagggagtgttcggcggagggaccaagctgaccgtcctag

SEQ ID NO: 781 - DNA, 319 bp, Homo sapiens
gacatccagttgacccagtctccatccttcctgtctgcatctgtaggagacagagtcaccatcacttgccgggccagtcagggcattagcagttatttagcctggtatcagcaaaaaccagggaaagcccctaagctcctgatctatgctgcatccactttacaaagtggggtcccatcaaggttcagtggcagtggatctgggacagaattcactctcacaatcagcagcctgcagcctgaagattttgcaacttattactgtcaacagcttgatacttaccctcgattcggcggagggaccaaggtggacatccaac

SEQ ID NO: 782 - DNA, 319 bp, Homo sapiens; identical to SEQ ID NO: 781

SEQ ID NO: 783 - DNA, 357 bp, Homo sapiens
ttgtgctgcaaccggtgtacattcagaaattgtgttgacgcagtctccaggcaccctgtctttgtctccaggggaaagagccaccctctcctgcagggccagtcagagtgttaacagcaggttcttagcctggtaccagcagaaacctggccaggctcccaggctcctcatctatgctgcatccagcagggccactggcatcccagacaggttcagtggcagtgggtctgggacagacttcactctcaccatcagcagcctgcagcctgatgattttgcaacttattactgccaacagtataatagttattctacgttcggccaagggaccaaggtggaaatcaaacgtacggtggc

SEQ ID NO: 784 - DNA, 322 bp, Homo sapiens
gacatccagatgacccagtctccatcctccctgtctgcatctgtaggagacagagtcaccatcacttgccgggcaagtcagagcattagcagctatttaaattggtatcagcagaaaccagggaaagcccctaagctcctgatctatgctgcatccagtttgcaaagtggggtcccatcaaggttcagtggcagtagatctgggacagatttcactctcaccatcagcagtctgcaacctgaagattttgcaacttactactgtcaacagagttacagtactctattcactttcggccctgggaccaaagtggatatcaaac

SEQ ID NO: 785 - DNA, 337 bp, Homo sapiens
gatattgtgatgactcagtctccactctccctgcccgtcacccctggagagccggcctccatctcctgcaggtctagtcagagcctcctgcatagtaatggatacaactatttggattggtacctgcagaagccagggcagtctccacagctcctgatctatttgggttctaatcgggcctccggggtccctgacaggttcagtggcagtggatcaggcacagattttacactgaaaatcagcagagtggaggctgaggatgttggggtttattactgcatgcaagctctacaaactcctctcactttcggccctgggaccaaagtggatatcaaac

SEQ ID NO: 786 - DNA, 337 bp, Homo sapiens; identical to SEQ ID NO: 785

SEQ ID NO: 787 - DNA, 340 bp, Homo sapiens
gacatcgtgatgacccagtctccagactccctggctgtgtctctgggcgagagggccaccatcagctgcaagtccagccagagtgtttcatacacctccaacaataagagctacttagcttggtaccaacagaaagcaggacagcctcctaagttgctcatttactgggcatctacccgggagtcaggggtccctgaccgattcagtggcagcgggtctgggacagatttcagtctcacaatcagcagcctgcaggctgaagatgtggcagtgtattactgtcagcaatatcacaatactccgtggacgttcggccaagggaccaaggtggaaatcaaac

SEQ ID NO: 788 - DNA, 337 bp, Homo sapiens
gacatcgtgatgacccagtctccagacgccctggctgtgtctctgggcgagagggccaccatcagctgcaagtccagccagagtgtttcatacattttcaacaataagacctacttagcttggtaccagcagaaaccaggacagcctcctaagttgctcatttactgggcatctacccgggagtcaggggtccctgaccgattcagtggcagcgggtctgggacagatttcagtctcaccatcagcagcctgcaggctgaagatgtggcagtgtattactgtcagcaatatcacaatactccgtggacgttcggccaagggaccaaggtggaaatca

SEQ ID NO: 789 - DNA, 325 bp, Homo sapiens
gacatccagttgacccagtctccatccttcctgtctgcatctgtaggagacagagtcaccatcacttgccgggccagtcagggcattagcagttatttagcctggtatcagcaaaaaccagggaaagcccctaagctcctgatctatgctgcatccactttgcaaagtggggtcccatcaaggttcagcggcagtggatctgggacagaattcactctcacaatcagaagcctgcagcctgaagattttgcaacttattactgtcaacagcttaatagttaccctccgtacacttttggccaggggaccaagctggagatcaaac

SEQ ID NO: 790 - DNA, 313 bp, Homo sapiens
gaaattgtgttgacgcagtctccaggcaccctgtctttgtctccaggggaaagagccaccctctcctgcagggccagtcagagtgttagcagcagctacttagcctggtaccagcagaaacctggccaggctcccaggctcctcatctatggtgcatccagcagggccactggcatcccagacaggttcagtggcagtgggtctgggacagacttcactctcaccatcagcagactggagcctgaagattttgcagtgtatttctgtcagcagttagagacgttcggccaagggaccaaggtggaaatcaaac

SEQ ID NO: 791 - DNA, 319 bp, Homo sapiens
gacatccagatgacccagtctccttccaccctgtctgcatctgtaggagacagagtcaccatcacctgccgggccagtcagagtattagtagctggttggcctggtatcagcagaaaccagggaaagcccctaaactcctgatcaatagggcgtctagtttagaaagtggggtcccatcaaggttcagcggcagtggatctgggacagaattcactctcaccatcagcagcctgcagcctgatgattttgccacttattactgccaacaatatagtagttatccaacgttcggccaggggaccaaggtggaaatcaaac

SEQ ID NO: 792 - DNA, 319 bp, Homo sapiens; identical to SEQ ID NO: 791

SEQ ID NO: 793 - DNA, 352 bp, Homo sapiens
ctgcaaccggtgtacattctgacatccagatgacccagtctccatcctcactgtctgcatctgtaggagacagagtcaccatcacttgtcgggcgagtcagggcattggcaattatttagcctggtttcagcagaaaccagggaaagcccctaagtccctgatctatgttgcatccagtttgcaaagtggggtcccatcaaagttcagcggcagtggatctgggacagatttcattctcagcatcagcagcctgcagcctgaagattttgcaacttattactgccaacactataatgcttacccgatcaccttcggccaggggacacgactggagattaaacgtacggtggc

SEQ ID NO: 794 - DNA, 331 bp, Homo sapiens
cagactgtggtgacccaggagccatcgttctcagtgtcccctggaggggcagtcacactcacttgtggcttgagctctggctcagtctctactaattactaccccagctggtaccagcagaccccaggccaggctccacgcacgctcatctacagcacaaacactcgctcttctggggtccctgatcgcttctctggctccatccttgggaacaaagctgccctcaccatcacgggggcccaggcagatgatgaatctgattattactgtgtgctctataggggtggtggcatttgggtgttcggcggagggaccaagctgaccgtcctag

SEQ ID NO: 795 - DNA, 328 bp, Homo sapiens
cagtctgtgctgactcagtcaccctcagcgtctgggacccccgggcagagggtcaccatctcttgttctggaagcagctccaacatcggaggtaatactgtaaactggtaccagcagctcccaggaacggcccccaaactcctcatctatagtaataatcagcggccctcaggggtccctgaccgattctctggctccaagtctggcacctcagcctccctggccatcagtgggctccagtctgaggatgaggctgattattactgtgcatcatgggatgacagcgtgaatggggtgttcggcggagggaccaagctgaccgtcctag

SEQ ID NO: 796 - DNA, 328 bp, Homo sapiens
cagtctgtgctgactcagccaccctcagcgtctgggacccccgggcagagggtcaccatctcttgttctggaagcagctccaacatcggaagtaatactgtaaactggtaccagcagctcccaggaacggcccccaaactcctcatctatagtaataatcagcggccctcaggggtccctgaccgattctctggctccaagtctggcacctcagcctccctggccatcagtgggctccagtctgaggatgaggctgattattactgtgcatcatgggatgacagcctgaatggggtgttcggcggagggaccaagctgaccgtcctag

SEQ ID NO: 797 - DNA, 331 bp, Homo sapiens
cagtctgccctgactcagcctgcctccgtgtctgggtctcctggacagtcgatcaccatctcctgcactggaaccagcagtgacgttggtggttataactatgtctcctggtaccaacaacacccaggcaaagcccccaaagtcatgatttatgatgtcaggaatcggccctcaggggtttctaatcgcttctctggctccaagtctggcaacacggcctccctgaccatctctgggctccaggctgaggacgaggctgattattactgcagctcatatacaagcagcagtacttgggtgttcggcggagggaccaagctgaccgtcctag

SEQ ID NO: 798 - DNA, 331 bp, Homo sapiens; identical to SEQ ID NO: 797

SEQ ID NO: 799 - DNA, 340 bp, Homo sapiens
gatattgtgatgacccagactccactctcctcacctgtcacccttggacagccggcctccatctcctgcaggtctagtcaaagcctcgtacacagtgatggaaacacctacttgagttggcttcagcagaggccaggccagcctccaagactcctaatttataagatttctaaccggttctctggggtcccagacagattcagtggcagtggggcagggacagatttcacactgaaaatcagcagggtggaagctgaggatgtcggggtttattactgcatgcaagctacacaatttccccagtacacttttggccaggggaccaagctggagatcaaac

SEQ ID NO: 800 - DNA, 322 bp, Homo sapiens
gacatccagatgacccagtctccatcctccctgtctgcatctgtaggagacagagtcaccatcgcttgccgggcaagtcagagcattagcagttatttaaattggtatcagcagaaaccagggaaagcccctaagttcctgatctatgctgcatccagtttgcaaagtggggtcccatcaaggttcagtggcagtggatctgggacagatttcactctcaccatcagcagtctgcaacctgaagattttgcaacttactactgtcaacagagttacagtacccctcaaaccttcggccaagggacacgactggagattaaac

SEQ ID NO: 801 - DNA, 325 bp, Homo sapiens
tcctatgagctgacacagccaccctcggtgtcagtgtccccaggacaaacggccaggatcacctgctctggagatgcattgccaaaaaaatatgcttattggtaccagcagaagtcaggccaggcccctgtgttggtcatctatgaggacagcaaacgaccctccgggatccctgagagattctctggctccagctcagggacaatggccaccttgactatcagtggggcccaggtggaggatgaagctgactactactgttactcaacagacagcagtggtaatcatggggtattcggcggagggaccaagctgaccgtcctag

SEQ ID NO: 802 - DNA, 331 bp, Homo sapiens
cagtctgccctgactcagcctgcctccgtgtctgggtctcctggacagtcgatcaccatctcctgcactggaaccagcagtgacgttggtggttataactatgtctcctggtaccaacaacacccaggcaaagcccccaaactcatgatttatgaggtcaataatcggccctcaggggtttctaatcgcttctctggctccaagtctggcaacacggcctccctgaccatctctgggctccaggctgaggacgaggctggttattactgcagctcatatacaagcagcatcactgtggtcttcggcggagggaccaaggtgaccgtcctag

SEQ ID NO: 803 - DNA, 340 bp, Homo sapiens
gacatcgtgatgacccagtctccagactccctggctgtgtctctgggcgagagggccaccatcaactgcaagtccagccagagtgttttatacagctccaacaataagaactacttagcttggtaccagcagaaaccaggacagcctcctaagctgctcatttactgggcatctacccgggaatccggggtccctgaccgattcagtggcagcgggtctgggacagatttcactctcaccatcagcagcctgcaggctgaagatgtggcagtttattactgtcagcaatattatagtactccgctcactttcggcggagggaccaaggtggagatcaaac

SEQ ID NO: 804 - DNA, 322 bp, Homo sapiens
gacatccagatgacccagtctccatcctccctgtctgcatctgtaggagacacagtcaccatcacttgccgggcaagtcagagcattaacatctatttaaattggtatcagcagaaaccagggaaagcccctaacctcctgatctatgctgcatccagtgtgcaaagtggggtcccatcaaggttcagtggcagtggatctgggacagatttcactctcaccatcagcagtctgcaacctgaagattttgcaacttactactgtcaacagagttacagtacccctcggaccttcggccaagggaccaaggtggaaatcaaac

SEQ ID NO: 805 - DNA, 322 bp, Homo sapiens
gacatccagatgacccagtctccatcctccctgtctgcatctgtaggagacagagtcaccatcacttgccgggcaagtcagagcattagcagctatttaaattggtatcagcagaaaccagggaaagcccctgaactcctgatctatactacatccagtctacatagtggggtcccatcaaggttcagtggcagtggatctgggacagatttcactctcaccatcagcagtctgcagcctgaagattttgcaacttactactgtcaacagagttacagtaccccttggacgttcggccaagggaccaaggtggaaatcaaac

SEQ ID NO: 806 - DNA, 322 bp, Homo sapiens
gccatccagttgacccagtctccatcctccctgtctgcatctgtaggagacagagtcaccatcacttgccgggcaagtcagggcattagcagtgctttagcctggtatcagcagaaaccagggaaagctcctaagctcctgatctatgatgcctccagtttggaaagtggggtcccatcaaggttcagcggcagtggatctgggacagatttcactctcaccatcagcagcctgcagcctgaagattttgcaacttattactgtcaacagtttaataattacccgatcaccttcggccaagggacacgactggagattaaac

SEQ ID NO: 807 - DNA, 340 bp, Homo sapiens
cagtctgtgctgacgcagccgccctcagtgtctggggccccagggcagagggtcaccatctcctgcactgggagcagctccaacatcggggcaggttatgatgtacactggtaccagcagcttccaggaacagcccccaaactcctcatctatggtaacagcaatcggccctcaggggtccctgaccgattctctggctccaagtctggcacctcagcctccctggccatcactgggctccaggctgaggatgaggctgattattactgccagtcctatgacagcagcctgagtggttcggatgtggtattcggcggagggaccaagctgaccgtcctag

SEQ ID NO: 808 - DNA, 322 bp, Homo sapiens
gacatccagatgacccagtctccatcctccctgtctgcatctgtaggagacagagtcaccatcacttgccgggcaagtcagggcattagaaatgatttaggctggtatcagcagaaaccagggaaagcccctaagcgcctgatctatgctgcatccagtttgcaaagtggggtcccatcaaggttcagcggcagtggatctgggacagaattcactctcacaatcagcagcctgcagcctgaagattttgcaacttattactgtctacagcataatagttacccgtggacgttcggccaagggaccaaggtggaaatcaaac

SEQ ID NO: 809 - DNA, 319 bp, Homo sapiens
tcctatgagctgactcagccaccctcagtgtccgtgtccccaggacagacagccagcatcacctgctctggagataaattgggggataaatatgcttgctggtatcagcagaagccaggccagtcccctgtgctggtcatctatcaagataacaagcggccctcagggatccctgagcgattctctggctccaactctgggaacacagccactctgaccatcagcgggccccaggctatggatgaggctgactattactgtcagacgtgggacagcagcacgggggtattcggcggagggaccaagctgaccgtcctag

SEQ ID NO: 810 - DNA, 319 bp, Homo sapiens
gacatccagatgacccagtctccatcctccctgtctgcatctgtaggagacagagtcaccatcacttgccaggcgagtcaggacattagcaactctttaaattggtatcagcagaaaccagggaaagcccctaagctcctgatctacgatgcatccaatttggaaacaggggtcccatcaaggttcagtggaagtggatctgggacagattttactttcaccatcagcagcctgcagcctgaagatattgcaacatattactgtcaacagtatgataatctccctactttcggcggagggaccaaggtggagatcaaac

SEQ ID NO: 811 - DNA, 322 bp, Homo sapiens
gaaattgtgttgacgcagtctccaggcaccctgtctttgtctccaggggaaagagccaccctctcctgcagggccagtcagagtgttagcagcagctacttagcctggtaccagcagaaacctggccaggctcccaggctcctcatctatggtgcatccagcagggccactggcatcccagacaggttcagtggcagtgggtctgggacagacttcactctcaccatcagcagactggagcctgaagattttgcagtgtattactgtcagcagtatggtagcttgtggacgttcggccaagggaccaaggtggaaatcaaac

SEQ ID NO: 812 - DNA, 320 bp, Homo sapiens
gacatccagttgacccagtctccatcctccctgtctgcatctgtaggagacagagtcaccatcacttgccgggtgagtcagggcattagcagttatttaaattggtatcggcagaaaccagggaaagttcctaaggtcctgatctatagtgcatccaatttgcaatctggagtcccatctcggttcagtggcagtggatctgggacagatttcactctcactatcagcagcctgcagcctgaagatgttgcaacttattacggtcaacggacttacactgcccctctgcttcggccaagggacacgactggagattaaac

SEQ ID NO: 813 - DNA, 338 bp, Homo sapiens
gacatcgtgatgacgcagtctccagagtccctggctgtgtctctgggcgagagggccaccatcagctgcaagtccagccgggatgttttatacaactccaacaataagaactacttagcttggtaccagcagaagccaggacagcctcctagacttctcctgtactgggcatctacccgggcatccggggtccctgaccgattcagtggcagcgggtctgagacagatttcactctcagcatcagcaacctgcaggctgaggatgtggcagtttattactgtcagcaatattatggtactccctacacttttggccaggggaccaagctggagatcaa

SEQ ID NO: 814 - DNA, 321 bp, Homo sapiens
gtcatctggatgacccagtctccatccttactctctgcatctacaggagacagagtcaccatcagttgtcggatgagtcagggcattagcagttatttagcctggtatcagcaaaaaccagggaaagcccctgagctcctgatctatgctgcatccactttgcaaagtggggtcccatcaaggttcagtggcagtggatctgggacagatttcactctcaccatcagttgcctgcagtctgaagattttgcaacttattactgtcaacagtattatagtttcccgccctttttggccaggggaccaagctggagatcaaac

SEQ ID NO: 815 - DNA, 322 bp, Homo sapiens
gaaattgtgttgacacagtctccagccaccctgtctttgtctccaggggaaagagccaccctctcctgcagggccagtcagagtgttagcagctacttagcctggtaccaacagaaacctggccaggctcccaggctcctcatctatgatgcatccaacagggccactggcatcccagccaggttcagtggcagtgggtctgggacagacttcactctcaccatcagcagcctagagcctgaagattttgcagtttattactgtcagcagcgtagcaactggcctgagactttcggccctgggaccaaagtggatatcaaac

SEQ ID NO: 816 - DNA, 328 bp, Homo sapiens
tcctatgtgctgactcagccaccctcggtgtcagtggccccaggacagacggccaggattacctgtgggggaaacaacattggaagtaaaaatgtacactggtatcagcagaagccaggccaggcccctgtgctggtcgtctatgatgatagcgaccggccctcagggatccctgagcgattctctggttccaactctgggaacacggccaccctgaccatcagcagggtcgaagccggggatgaggccgactatttctgtcaggtgtgggatagtagtagtgatcgttattatgtcttcggaactgggaccaaggtcaccgtcctag

SEQ ID NO: 817 - DNA, 325 bp, Homo sapiens
gacatccagatgacccagtctccatcctccctgtctgcatctgtaggagacagagtcaccatcacttgccgggcaagtcagagcattagcaggtatttaaattggtatcagcagcaagcagggaaagcccctaaactcctgatccatgctgcatccagtttgcaaagtggagtcccatcaaggttcagtggcagtggatctgggacagatttcactctcaccatcagcagtctgcaacctgaagattttgcaacttactactgtcaacagagttacagtacccctcagatcaccttcggccaagggacacgactggagattaaac

SEQ ID NO: 818 - DNA, 334 bp, Homo sapiens
cagcctgtgctgactcaatcatcctctgcctctgcttccctgggatcctcggtcaagctcacctgcactctgagcagtgggcacagtacctacatcatcgcatggcatcagcagcagccagggaaggcccctcggtacttgatgaaccttgaaggtagtggaagctacaacaaggtgagcggagttcctgatcgcttctcaggctccagctctggggctgaccgctacctcaccatctccaacctccagtctgaggatgaggctgattattactgtgagacctgggacattaacactcatgtcttcggaactgggaccaaggtcaccgtcctag

SEQ ID NO: 819 - DNA, 328 bp, Homo sapiens
cagtctgccctgactcagcctccctccgcgtccgggtctcctggacagtcagtcaccatctcctgcactggaaccagcagtgacgttggtggttataactatgtctcctggtaccaacagcacccaggcaaagcccccaaactcatgatttatgaggtcagtaagcggccctcaggggtccctgatcgcttctctggctccaagtctggcaacacggcctccctgaccgtctctgggctccaggctgaggatgaggctgattattactgcagctcatatgcaggcagcaacatcttattcggcggagggaccaagctgaccgtcctag

SEQ ID NO: 820 - DNA, 321 bp, Homo sapiens
gacatccaggtgacccaatctccatcttccctgtctgcatctgttggagacagcgtctccatcacttgccgggcaagtcagaccattagtacctatttaagttggtatcaacaacaatcagggaaagcccctaggctcctgatctatggtgcatccactttacacagtggggtcccttcaaggttcagtggcagtggatctcggacagatttcactctcaccatcaacagtctgcaacccgaagattttgccacttactactgtcaacagagttacagtaccccgtacacttttggccaggggaccaagctggagatcaaa

SEQ ID NO: 821 - DNA, 333 bp, Homo sapiens
cagtctgccctgactcagcctgcctccgtgtctgggtctcctggacagtcgatcaccatttcctgcactgcaaccagcagtgacgttggtggttatacctctgtctcctggtaccaacagcacccagacaaagcccccaaactcatgatttatgatgtcactaatcggccctcaggggtttctgatcgcttctctggctccaagtctggcgacacggcctccctgaccatctctgggctccaggctgaggacgaggctgattattactgcagctcatatacaagcggcagcactctttgggtgttcggcggagggaccaagctgaccgtccta

SEQ ID NO: 822 - DNA, 340 bp, Homo sapiens
gatgttgtgctgacccagactccactctctctgtccgtcacccctggacagccggcctccatatcctgcaagtctaatcagagcctcctacatagtgatggaaagacctatttatattggtattttcagaggccaggccagcctccacagctcctgatctatgaagtttccaacccgttttctggagtgccatataggttcagtggcagcgggtcagggacagatttcacactgaaaatcagccgggtggaggctgaggatgttggagtttattactgcatgcaaactatacaccttcccagagtcaccttcggccaagggacacgactggacattaaac

SEQ ID NO: 823 - DNA, 322 bp, Homo sapiens
gacatccagatgacccagtctccatccaccctgtccgcatctgtaggagacagagtcaccatcacttgccgggccagccagactattagtacttacttggcctggtatcaacaaaaacccgggaaagcccctaaactcctgatctataaggcgtctcttttacaaaatggcgtcccatcacgatttagcggcagtggatctgggacagagttcactctcaccatcagcggcctgcagcctgatgactttggaacttatcactgccaacaatactatgcctcttcgtggacgtttggccgagggaccaaggtggacctcaaac

SEQ ID NO: 824 - DNA, 322 bp, Homo sapiens
gacatccagatgacccagtctccatcctccctgtctgcatctgtaggagacagagtcaccatcacttgccgggcaagtcagagcattagcagctatttaaattggtatcagcagaaaccagggaaagcccctaagctcctgatctatgctgcatccagtttgcaaagtggggtcccatcaaggttcagtggcagtggatctgggacagatttcactctcaccatcagcagtctgcaacctgaagattttgcaacttactactgtcaacagagttacagtacccctcggacttttggccaggggaccaagctggagatcaaac

SEQ ID NO: 825 - DNA, 331 bp, Homo sapiens
cagtctgccctgactcagcctgcctccgtgtctgggtctcctggacagtcgatcaccatctcctgcactggaaccagcagtgacgttggtggttataactatgtctcctggtaccaacagcacccaggcaaagcccccaaactcatgatttatgaggtcagtaatcggccctcaggggtttctaatcgcttctctggctccaagtctggcaacacggcctccctgaccatctctgggctccaggctgaggacgaggctgattattactgcagctcatatacaagcagcagcactgtggtattcggcggagggaccaagctgaccgtcctag

SEQ ID NO: 826 - DNA, 328 bp, Homo sapiens
cagtctgccctgactcagcctgcctccgtgtctgggtctcctggacagtcgatcaccatctcctgcactggaattagtgatgttggaagttataaccttgtctcctggtaccaacagcacccaggcaaagtccccaaactcatgatttatgaggccaataagcggccctcaggggtgtctaatcgcttctctggctccaagtctggcagcacggcctccctgacaatctctgggctccaggctgaggacgaggctgattattactgctgctcatatgcaggtagtagcaacttagtattcggcggagggaccaagctgaccgtcctag

SEQ ID NO: 827 - DNA, 325 bp, Homo sapiens
gacatccagatgacccagtctccatcctccctgtctgcatctgtaggagacagagtcaccatcacttgccgggcaagtcagagcattagcaggtatttaaattggtatcagcagaaaccagggaaagcccctaagctcctgatctatactgcatccagtttgcaaagtggggtcccatcaaggttcagtggcagtggatctgggacagatttcactctcaccatcagcagtctgcaacctgaagattttgcaacttactactgtcaacagagttacagtacccctccgtggacgttcggccaagggaccaaggtggaaatcaaac

SEQ ID NO: 828 - DNA, 331 bp, Homo sapiens
cagtctgccctgactcagcctcgctcagtgtccgggtctcctggacagtcagtcaccatctcctgcactggaaccagcagtgatgttggtggttataactatgtctcctggtaccaacagcacccaggcaaagcccccaaactcatgatttatgatgtcagtaagcggccctcaggggtccctgatcgcttctctggctccaagtctggcaacacggcctccctgaccatctctgggctccaggctgaggatgaggctgattattactgctgctcatatgcaggcagctacacttatgtcttcggaactgggaccaaggtcaccgtcctag

SEQ ID NO: 829 - DNA, 325 bp, Homo sapiens
gacatccagatgacccagtctccatcctccctgtctgcatctgtaggagacagagtcaccatcacttgccgggcaagtcagagcattagtagatatttaaattggtatcagcagaaaccagggaaagcccctaacctcctgatctatgctgcatccagtttgcaaagtggggtcccatcaaggttcagtggcagtggatctgggacagatttcactctcaccatcagcagtctgcaacctgaagattttgcaacttactactgtcaacagagttacagtagtccttcgctcactttcggcggagggaccaaggtggagatcaaac

SEQ ID NO: 830 - DNA, 331 bp, Homo sapiens
cagtctgccctgactcagcctccctccgcgtccgggtctcctggacagtcagtcaccatctcctgcactggaaccagcagtgacgttggtggttataactatgtctcctggtaccaacagcacccaggcaaagcccccaaactcatgatttatgaggtcagtaagcggccctcaggggtccctgatcgcttctctggctccaagtctggcaacacggcctccctgaccgtctctgggctccaggctgaggatgaggctgattattactgcagctcatatgcaggcagcaacaatgtggtattcggcggagggaccaagctgaccgtcctag

SEQ ID NO: 831 - DNA, 328 bp, Homo sapiens
gaaattgtgttgacgcagtctccaggcaccctgtctttgtctccaggggaaagagccaccctctcctgcagggccagtcagagtgttagcagcagctacttagcctggtaccagcagaaacctggccaggctcccaggctcctcatctatggtgcatccagcagggccactggcatcccagacaggttcagtggcagtgggtctgggacagacttcactctcaccatcagcagactggagcctgaagattttgcagtgtattactgtcagcagtatggtagctcacctttgtacacttttggccaggggaccaagctggagatcaaac

SEQ ID NO: 832 - DNA, 319 bp, Homo sapiens
gacatccagatgacccagtctccatcctccctgtctgcatctgtaggagacagagtcaccatcacttgccaggcgagtcaggacattagcaactatttaaattggtatcagcagaaaccagggaaagcccctaagctcctgatctacgatgcatccaatttggaaacaggggtcccatcaaggttcagtggaagtggatctgggacagattttactttcaccatcagcagcctgcagcctgaagatattgcaacatattactgtcaacagtatgataatctcatcactttcggccctgggaccaaagtggatatcaaac

SEQ ID NO: 833 - DNA, 328 bp, Homo sapiens
tcctatgagctgacacagccaccctcggtgtcagtgtccccaggacaaacggccaggatcacctgctctggagatgcattgccaaaaaaatatgcttattggtaccagcagaagtcaggccaggcccctgtgcaggtcatctttgaggacgacaaacgaccctccgggatccctgagagattctctggctccagctcagggacaatggccaccttgactatcagtggggcccaggtggaggatgaagctgactactactgttcctcaacagacagcagtggtaatctccgttgggtgttcggcggagggaccaagctgaccgtcctag

SEQ ID NO: 834 - DNA, 331 bp, Homo sapiens
cagtctgccctgactcagcctgcctccgtgtctgggtctcctggacagtcgatcaccatctcctgcactggaaccagcagcgacgttggtggttataactatgtctcctggtaccaacaacacccaggcaaagcccccaaactcatgatttatgatgtcactaagcggccctcaggggtttctaatcgcttctctggctccaagtctggcaacacggcctccctgaccatctctgggctccaggctgaggacgaggctgattattactgctgctcatatacaagcagcagcactgtactattcggcggagggaccaagctgaccgtcctag

SEQ ID NO: 835 - DNA, 325 bp, Homo sapiens
gaaattgtgttgacacagtctccagccaccctgtctttgtctccaggggaaagagccaccctctcctgcagggccagtcagagtgttagcagctacttagcctggtaccaacagaaacctggccaggctcccaggctcctcatctatgatgcatccaacagggccactggcatcccagccaggttcagtggcagtgggtctgggacagacttcactctcaccatcagcagcctagagcctgaagattttgcagtttattactgtcagcagcgtagcaactggctttcgatcaccttcggccaagggacacgactggagattaaac

SEQ ID NO: 836 - DNA, 325 bp, Homo sapiens
gaaattgtgttgacgcagtctccaggcaccctgtctttgtctccaggggaaagagccaccctctcctgcagggccagtcagagtgttaccggcaacttcttatcctggtaccagcagaaacctggccaggctcccaggctcctcatctatggtgcctccagcagggccactggcatcccagacaggttcagtggcagtgggtctgggacagacttcactctcaccatcagcagactggagcctgaagattttgcagtgtattactgtcagcattatggtagctcacggaggacgttcggccaagggaccaaggtggaaatcaaac

SEQ ID NO: 837 - DNA, 322 bp, Homo sapiens
gccatccggatgacccagtctccatcctcattctctgcatctacaggagacagagtcaccatcacttgtcgggcgagtcagggtattagcagttatttagcctggtatcagcaaaaaccagggaaagcccctaagctcctgatctatgctgcatccactttgcaaagtggggtcccatcaaggttcagcggcagtggatctgggacagatttcactctcaccatcagctgcctgcagtctgaagattttgcaacttattactgtcaacagtattatagttaccctcggacgttcggccaagggaccaaggtggaaatcaaac

SEQ ID NO: 838 - DNA, 322 bp, Homo sapiens
gacatcccgatgacccagtctccatcctccctgtctgcatctgtaggagacagagtcaccatcacttgccgggcaagtcagaacattatcacctatttaaattggtatcagcagaaaccagggaaagcccctaacctcctgatctatgctgtatccagtctgcaaagtagggtcccatcaaggttcagtggcagtggatctgggacagatttcactctcaccatcagcagtctgcaacctgaagattttgcaacttactactgtcaacagagttacagtacgccgtacaattttggccaggggaccaagctggagatcaaac

SEQ ID NO: 839 - DNA, 322 bp, Homo sapiens
tcctatgagctgacacagccaccctcggtgtcagtgtccccaggacagacggccaggatcacctgctctggagatgcattgccaaagcaatatgcttattggtaccagcagaagccaggccaggcccctgtgctggtgatatataaagacagtgagaggccctcagggatccctgagcgattctctggctccagctcagggacaacagtcacgttgaccatcagtggagtccaggcagaagatgaggctgactattactgtcaatcagcagacagcagtggtacttgggtgttcggcggagggaccaagctgaccgtcctag

SEQ ID NO: 840 - DNA, 322 bp, Homo sapiens
tcctatgagctgacacagccaccctcggtgtcagtgtccccaggacagacggccaggatcacctgctctggagatgcattgccaaagcaatatgcttattggtaccagcagaagccaggccaggcccctgtgctggtgatatataaagacagtgagaggccctcagggatccctgagcgattctctggctccagctcagggacaacagtcacgttgaccatcagtggagtccaggcagaagatgaggctgactattactgtcaatcagcagacagcagtggtacttatgtcttcggaactgggaccaaggtcaccgtcctag

SEQ ID NO: 841 - DNA, 337 bp, Homo sapiens
gatattgtgatgactcagtctccactctccctgcccgtcacccctggagagccggcctccatctcctgcaggtctagtcagagcctcctgcatagtaatggatacaactatttggattggtacctgcagaagccagggcagtctccacagctcctgatctatttgggttctaatcgggcctccggggtccctgacaggttcagtggcagtggatcaggcacagattttacactgaaaatcagcagagtggaggctgaggatgttggggtttattactgcatgcaagctctacaaactcctcacacttttggccaggggaccaagctggagatcaaac

SEQ ID NO: 842 - DNA, 319 bp, Homo sapiens
tcctatgagctgactcagccaccctcagtgtccgtgtccccaggacagacagccagcatcacctgctctggagataaattgggggataaatatgcttgctggtatcagcagaagccaggccagtcccctgtggtggtcatctatcaagatagcaagcggccctcagggatccctgagcgattctctggctccaactctgggaacacagccactctgaccatcagcgggacccaggctatggatgaggctgactattactgtcaggcgtgggacagcagcactgtcatactcggcggagggaccaagctgaccgtcctag

SEQ ID NO: 843 - DNA, 331 bp, Homo sapiens
cagtctgtgctgactcagccaccctcagcgtctgggacccccgggcagagggtcaccatctcttgttctggaagcagctccaacatcggaagtaattatgtatactggtaccagcagctcccaggaacgacccccaaactcctcatctataggaataatcagcggccctcaggggtctctgaccgattctctggctccaagtctggcacctcagcctccctggccatcagtgggctccggtccgaggatgaggctgattattactgtgcagcatgggatgacagcctgagtggtccggtgttcggcggagggaccaagctgaccgtcctag

SEQ ID NO: 844 - DNA, 331 bp, Homo sapiens
cagtctgccctgactcagcctgcctccgtgtctgggtctcctggacagtcgatcaccatctcctgcactggaaccagcagtgacgttggtggttataactatgtctcctggtaccaacagcacccaggcaaagcccccaaactcatgatttatgaggtcagtaatcggccctcaggggtttctaatcgcttctctggctccaagtctggcaacacggcctccctgaccatctctgggctccaggctgaggacgaggctgattattactgcagctcatatacaagcagcatcacgggggtattcggcggagggaccaagttgaccgtcctag

SEQ ID NO: 845 - DNA, 325 bp, Homo sapiens
gaaatagtgatgacgcagtctccagccaccctgtctgtgtctccaggggaaagagccaccctctcctgcagggccagtcagagtgttagcagcaacttagcctggtaccagcagaaacctgggcaggctcccaggctcctcatctatggtgcatccaccagggccactggtatccctgccaggttcagtggcagtgggtctgcgacagagttcactctcaccatcagcagcctgcagtctgaagattttgcagtttattactgtcagcagtataattactggcctccgtggacgttcggccaagggaccaaggtggaaatcaaac

SEQ ID NO: 846 - DNA, 325 bp, Homo sapiens
gaaattgtgttgacgcagtctccaggcaccctgtctttgtctccaggggaaaaagccaccctctcctgcagggccagtcagagtgttagcagcagctatttagcctggtaccagcagaagcctggccaggctcccaggctcctcatctatggtgcatccagcagggccactggcatcccagacaggttcagtggcagtgggtctgggacagacttcactctcaccatcagcagactggagcctgaagattttgcagtgtattactgtcagcagtctggtagctcacctcgaacttttggccaggggaccaagctggagatcaaac

SEQ ID NO: 847 - DNA, 328 bp, Homo sapiens
gacatccagatgacccagtctccatcctccctgtctgcatctgtaggagacagagtcaccatcacttgccgggcaagtcagagcattagcagctatttaaattggtatcagcagaaaccagggaaagcccctaagctcctgatctatgctgcatccagtttgcaaagtggggtcccatcaaggttcagtggcagtggatctgggacagatttcactctcaccatcagcagtctgcaacctgaagattttgcaacttactactgtcaacagagttacagtaccccccccctattcactttcggccctgggaccaaagtggatatcaaac

SEQ ID NO: 848 - DNA, 325 bp, Homo sapiens
gacatccagatgacccagtctccatcctccctgtctgcatctgtaggagacagagtcaccatcacttgccgggcaagtcacagcattagcacctatttaaattggtatcagcagaaaccagggaaagcccctaagctcctgatctatgctgcatccagtttgcaaagtggggtcccatcaaggttcagtggcagtggatctgggacagatttcactctcaccatcagcagtctgcaacctgaagattttgctacttactactgtcaacagagttacagtatgcctccgtacacttttggccaggggaccaagctggagatcaaac

SEQ ID NO: 849 - DNA, 325 bp, Homo sapiens
gacatccagatgacccagtctccatcctccctgtctgcatctgtaggagacagagtcaccatcacttgccgggcaagtcagagcattagcagctatttaaattggtatcagcagaaaccagggaaagcccctaagctcctgatctatgctgcatccagtttgcaaagtggggtcccatcaaggttcagtggcagtggatctgggacagatttcactctcaccatcagcagtctgcaacctgaagattttgcaacttactactgtcaacagagttacagtacccttacgtgggcgttcggccaagggaccaaggtggaaatcaaac

SEQ ID NO: 850 - DNA, 334 bp, Homo sapiens
cagtctgtgctgacgcagccgccctcagtgtctggggccccagggcagagggtcaccatctcctgcactgggagcagctccaacatcggggcaggttattatgtacactggtaccagcaacatccaggaacagcccccaaactcctcatctatggtaacagcaatcggccctcaggggtccctgaccgattctctggttctaagtctggcacctcagcctccctggccatcactgggctccaggctgaggatgaggctgattattactgccagtcctatgacagcagactgagtggttgggtgttcggcggagggaccaagctgaccgtcctag

SEQ ID NO: 851 - DNA, 322 bp, Homo sapiens
gacatccagatgacccagtctccatcctccctgtctgcatctgtaggagacagagtcaccatcacttgccgggcaagtcagagcattagcagctatttaaattggtatcagcagaaaccagggaaagcccctaagctcctgatctatgctgcatccagtttgcaaagtggggtcccatcaaggttcagtggcagtggatctgggacagatttcactctcaccatcagcagtctgcaacctgaagattttgcaacttactactgtcaacagagttacagtaccccgtacacttttggccaggggaccaagctggagatcaaac

SEQ ID NO: 852 - DNA, 325 bp, Homo sapiens
gaaattgtgttgacgcagtctccaggcaccctgtctttgtctccaggggaaagagccaccctctcctgcagggccagtcagagtgttagcagcagcttcttagcctggtaccagcagaaacctggccacgctcccaggctcctcatctatggtgcatccagcagggccactggcatcccagacaggttcagtggcagtgggtctgggacagacttcactctcaccatcagcagactggagcctgaagattttgcagtgtattactgtcagcagtatggtggctcaaccatcaccttcggccaagggacacgactggagattaaac

SEQ ID NO: 853 - DNA, 324 bp, Homo sapiens
gacatccagttgacccagtctccatcctccctgtctgcatctgtaggagacagagtcaccatcacttgccgggtgagtcagggcattagcagttatttaaattggtatcggcagaaaccagggaaagttcctaagctcctgatctatagtgcatccaatttgcaatctggagtcccatctcggttcagtggcagtggatctgggacagatttcactctcactatcagcagcctgcagcctgaagatgttgcaacttattacggtcaacggacttacaatgccctccattcactttcggccctgggaccaaagtggatatcaaac

SEQ ID NO: 854 - DNA, 322 bp, Homo sapiens
gacatccagatgacccagtctccatcctccctgtctgcatctgtaggagacagagtcaccatcacttgccgggcaagtcagagcattaacagctatttaatttggtatcagcagaaaccagggaaagcccctaagctcctgatctatgctgcatccagtttgcaaagtggggtcccatcaaggttcagtggcagtggatctgggacagatttcactctcaccatcagcactctgcaacctgaagattttgcaacttactactgtcaacagagtttcagtacccctcggacgttcggccaagggaccaaggtggaaatcaaac

SEQ ID NO: 855 - DNA, 322 bp, Homo sapiens
gacatccagatgacccagtctccatcctccctgtctgcatctgtaggagacagagtcaccatcacttgccaggcgagtcaggacattagcaactatttaaattggtatcagcagaaaccagggaaagcccctaagctcctgatctacgatgcatccaatttggaaacaggggtcccatcaaggttcagtggaagtggatctgggacagattttactttcaccatcagcagcctgcagcctgaagatattgcaacatattactgtcaacagtatgataatctcccgctcactttcggcggagggaccaaggtggagatcaaac

SEQ ID NO: 856 - DNA, 322 bp, Homo sapiens
gacatccagatgacccagtctccatcctccctgtctgcatctgtaggagacagagtcaccatcacttgccaggcgagtcaggacattagcaactatttaaattggtatcagcagaaaccagggaaagcccctaagctcctgatctacgatgcatccaatttgcaaataggggtcccatcaaggttcagtggaagtggatctgggacagattttactttcaccatcagcagcctgcagcctgaagatattgcaacatattactgtcaacagtatgataatctccctcaaactttcggcggagggaccaaggtggagatcaaac

SEQ ID NO: 857 - DNA, 323 bp, Homo sapiens
gacatccagatgacccagtctccatcctccctgtctgcatctgtaggagacagagtcaccatcacttgccgggcaagtcagagcattagcagctatttaaattggtatcagcagaaaccagggaaagcccctaagctcctgatctatgctgcatccagtttgcaaagtggggtcccatcaaggttcagtggcagtggatctgggacagatttcactctcaccatcagcagtctgcaacctgaagattttgcaacttactactgtcaacagagttacagtacctctgctcactttcggcggagggaccaaggtggagatcaaac

SEQ ID NO: 858 - DNA, 337 bp, Homo sapiens
gatattgtgatgacccagactccactctcctcacctgtcacccttggacagccggcctccatctcctgcaggtctagtcaaagcctcgtacacagtgatggaaacacctacttgagttggcttcagcagaggccaggccagcctccaagactcctaatttataagatttctaaccgattctctggggtcccagacagattcagtggcagtggggcagggacagatttcacactgaaaatcagcagggtggaagctgaggatgtcgggttttattactgcatgcaagctacacaatttcctcacactttcggcggagggaccaaggtggagatcaaac

SEQ ID NO: 859 - DNA, 337 bp, Homo sapiens
gatgttgtgatgactcagtctccactctccctgcccgtcacccttggacagccggcctccatctcctgcaggtctagtcaaagcctcgtatacagtgatggaaacacctacttgaattggtttcagcagaggccaggccaatctccaaggcgcctaatttataaggtttctaaccgggactctggggtcccagacagattcagcggcagtgggtcaggcactgatttcacactgaaaatcagcagggtggaggctgaggatgttggggtttattactgcatgcaaggtacacactggcctcacacttttggccaggggaccaagctggagatcaaac

SEQ ID NO: 860 - DNA, 331 bp, Homo sapiens
cagtctgtgctgactcaaccaccctcagcgtctgggacccccgggcagaaagtcattatctcttgttctggaagcagctccaacatcggaagtaagagtgtaaactggttccagcagctcccaggaacggcccccaaactcctcattaatcctaataatcagcggccctcaggggtccctgaccgattctctggctccaagtctggcacctcagcctccctggccatcagtgggctccagtctgaggatgaggctgattattactgtgcagcatgggatgacagcctgaatggtgtggtattcggcggagggaccaagctgaccgtcctag

SEQ ID NO: 861 - DNA, 348 bp, Homo sapiens
cagcctgtgctgactcagccaccttctgcatcagcctccctgggagcctcggtcacactcacctgcaccctgagcagcggctacagtaattataaagtggactggtaccagcagagaccagggaagggcccccggtttgtgatgcgagtgggcactggtgggattgtgggatccaagggggatggcatccctgatcgcttctcagtcttgggctcaggcctgaatcggtacctgaccatcaagaacatccaggaagaggatgagagtgactaccactgtggggcagaccatggcagtgggagcaacttcgtgtggtattcggcggagggaccaagctgaccgtcctag

SEQ ID NO: 862 - DNA, 322 bp, Homo sapiens
gacatccagatgacccagtctccatcctccctgtctgcatctgtaggagacagagtcaccatcacttgccgggcaagtcagagcattagcagctatttaaattggtatcagcagaaaccagggaaagcccctaagctcctgatctatgctgcatccagtttgcaaagtggggtcccatcaaggttcagtggcagtggatctgggacagatttcactctcaccatcagcagtctgcaacctgaagattttgcaacttactactgtcaacagagttacagtacccctcgaacttttggccaggggaccaagctggagatcaaac

SEQ ID NO: 863 - DNA, 331 bp, Homo sapiens
cagtctgccctgactcagcctgcctccgtgtctgggtctcctggacagtcgatcaccatctcctgcactggaaccagcagtgacgttggtggttataactatgtctcctggtaccaacagcacccaggcaaagcccccaaactcatgatttatgaggtcagtaatcggccctcaggggtttctaatcgcttctctggctccaagtctggcaacacggcctccctgaccatctctgggctccaggctgaggacgaggctgattattactgcagctcatatacaagcatcagcacttgggtgttcggcggagggaccaagctgaccgtcctag

SEQ ID NO: 864 - DNA, 331 bp, Homo sapiens
cagtctgccctgactcagcctgcctccgtgtctgggtctcctggacagtcgatcaccatctcctgcactggaaccaccagtgacgttggtgcttatgactatgtctcctggtaccaacaacacccaggcaaagcccccaaactcatgatttatgatgtcagtaatcggccctcaggggtttctaatcgcttctctggctccaagtctggcaacacggcctccctgaccatctctgggctccaggctgaggacgaggctgattattactgcagctcatatacaaccactagcacggtggtattcggcggagggaccaagctgaccgtcctag

SEQ ID NO: 865 - DNA, 325 bp, Homo sapiens
gacatccagatgacccagtctccatcctccctgtctgcatctgtaggagacagagtcaccatcacttgccaggcgagtcaggacattaccaactatttaaattggtatcagcagaaaccagggaaagcccctaagctcctgatctacgatgcatccaatttggaaacaggggtcccatcaaggttcagtggaagtggatctgggacagattttactttaaccatcagcagcctgcagcctgaagatattgcaacatattactgtcaacagtatgataatctcccctcgtacacttttggccaggggaccaagctggagatcaaac

SEQ ID NO: 866 - DNA, 325 bp, Homo sapiens
gacatccaggtgacccagtctccatcctccctgtctgcatctgtaggagacagagtcagcatcacttgccgggcaagtcagaccattagcaggtacttaaattggtatcagcagaaaccagggaaagcccctaagctcctgatctatgctgcatccagtttgcaaagtggggtcccatcaaggttcagtggcagtggatctgggacagatttcactctcaccatcagcagtctgcaacctgaagattttgcaacttactactgtcaacagagttacagtgcccctccgtacacttttggccaggggaccaagctggagatcaaac

SEQ ID NO: 867 - DNA, 322 bp, Homo sapiens
tcctatgagctgactcagccaccctcagtgtccgtgtctccaggacagacagccagcatcacctgctctggagataaattgggggataaatatgcttgctggtatcagcagaagccaggccagtcccctgtgctggtcatctatcaagatactaagcggccctcagggatccctgagcgattctctggctccaactctgggaacacagccactctgaccatcagcgggacccaggctatggatgaggctgactattactgtcaggcgtgggacagcagcacggattatgtcttcggaactgggaccaaggtcaccgtcctag

SEQ ID NO: 868 - DNA, 331 bp, Homo sapiens
aattttatgctgactcagccgcactctgtgtcggagtctccggggaagacggtaaccatctcctgcacccgcagcagtggcagcattgccagcaactatgtgcagtggtaccagcagcgcccgggcagtgcccccaccactgtgatctatgaggataaccaaagaccctctggggtccctgatcggttctctggctccatcgacagctcctccaactctgcctccctcaccatctctggactgaagactgaggacgaggctgactactactgtcagtcttatgatagcagcaatgtggtattcggcggagggaccaagctgaccgtcctag

SEQ ID NO: 869 - DNA, 331 bp, Homo sapiens
aattttatgctgactcagccccactctgtgtcggagtctccggggaagacggtaaccatctcctgcacccgcagcagtggcagcattgccagcaactatgtgcagtggtaccagcagcgcccgggcagttcccccaccactgtgatctatgaggataaccaaagaccctctggggtccctgatcggttctctggctccatcgacagctcctccaactctgcctccctcaccatctctggactgaagactgaggacgaggctgactactactgtcagtcttatgatagcagcattgtggtattcggcggagggaccaagctgaccgtcctag

SEQ ID NO: 870 - DNA, 325 bp, Homo sapiens
tcctatgagctgactcagccaccctcagtgtccgtgtccccaggacagacagccagcatcccctgctctggatataaattgggggataaatatacttgctggtatcaccagaggccaggccagtcccctgtgctggtcatctatcaagatagcaagcggccctcagggatccctgagcgattctctggctccaactctgggaacacagccactctgaccatcagcgggacccaggctatggatgaggctgactattactgtcaggcgtgggacagcagcactgctcatgtggttttcggcggagggaccaagctgaccgtcctag

SEQ ID NO: 871 - DNA, 322 bp, Homo sapiens
gacatccagatgacccagtctccatcctccctgtctgcatctgtaggagacagagtcaccatcacttgccaggcgagtcaggacattagcaactatttaaattggtatcagcagaaaccagggaaagcccctaagctcctgatctacgatgcatccaatttggaaacaggggtcccatcaaggttcagtggaagtggatctgggacagattttactttcaccatcagcagcctgcagcctgaagatattgcaacatattactgtcaacagtatgataatctcccgtacacttttggccaggggaccaagctggagatcaaac

SEQ ID NO: 872 - DNA, 325 bp, Homo sapiens
gaaatagtgatgacgcagtctccagccaccctgtctgtgtctccaggggaaagagccaccctctcctgcagggccagtcagagtgttagcagcaacttagcctggtaccagcagaaacctggccaggctcccaggctcctcatctatggtgcatccaccagggccactggtatcccagccaggttcagtggcagtgggtctgggacagagttcactctcaccatcagcagcctgcagtctgaagattttgcagtttattactgtcagcagtataataactggcctccgtacacttttggccaggggaccaagctggagatcaaac

SEQ ID NO: 873 - DNA, 319 bp, Homo sapiens
gacatccagctgacccagtctccctcctccctgtctgcttctgtgggagacagagtcaccatcacttgccggacgagtcaggtcatctacaattatttagcctggtatcagcaaaaaacaggcgaagctcctaggctcctggtctatgctgcgtccactttggaatcaggggtcccatctcgcttcagtgccggcggactcgagagacatttcactctcaccatcagcggcctgcagcctgaagatgctgcaacttattactgtcaacgatatgacaatgtcccacggacgttcggccaagggaccacagtggaaatca

SEQ ID NO: 874 - DNA, 331 bp, Homo sapiens
cagtctgtgttgacgcagccgccctcagtgtctgcggccccaggacagaaggtcaccatctcctgctctggaagcagctccaacattgggaataattatgtatcctggtaccagcagctcccaggaacagcccccaaactcctcatttatgacaataataagcgaccctcagggattcctgaccgattctctggctccaagtctggcacgtcagccaccctgggcatcaccggactccagactggggacgaggccgattattactgcggaacatgggatagcagcctgagtgccgtggtattcggcggagggaccaagctgaccgtcctag

SEQ ID NO: 875 - DNA, 325 bp, Homo sapiens
gacatccagatgacccagtctccttccaccctgtctgcatctgtaggagacagagtcaccatcacttgccgggccagtcagagtattagtacctggttggcctggtatcagcagagaccagggaaagcccctaagctcctgatctataaggcgtctactttagaaagtggggtcccatcaaggttcagcggcagtggctctgggacagaattcactctcaccatcagcagcctgcagcctgatgattttgcaacttattactgccaacagtataatagttattctctgtacacttttggccaggggaccaagctggagatcaaac

SEQ ID NO: 876 - DNA, 320 bp, Homo sapiens
gacatccagatgacccagtctccatcctcactgtctgcatctgtaggagacagagtcaccatcacttgtcgggcgagtcagggcattaggaattatttagcctggtttcagcagaaaccagggaaagcccctaagtccctgatctatggtgcatccactttgcaaagtggggtcccgtcaaagttcagcggcagtggatctgggacagatttcactctcaccatcagcagcctgcagcctgaagattttgcaacttattactgccaacagtatattagttacccgctcactttcggcggagggactaaggtggagatcaa

SEQ ID NO: 877 - DNA, 322 bp, Homo sapiens
gacatccagatgacccagtctccttccaccctgtctgcatctgtaggagacagagtcaccatcacttgccgggccagtcagagtattagtagctggttggcctggtatcagcagaaaccagggaaagcccctaagctcctgatctataaggcgtctagtttagaaagtggggtcccatcaaggttcagcggcagtggatctgagacagaattcactctcaccatcagcagcctgcagcctgatgattttgcaacttattactgccaacaatataatagttattcgtggacgttcggccaagggaccaaggtggaaatcaaac

SEQ ID NO: 878 - DNA, 322 bp, Homo sapiens
gccatccggatgacccagtctccatcctcattctctacatctacaggagacagagtcaccatcacttgtcgggcgagtcagggtattagcagttatttagcctggtatcagcaaaaaccagggaaagcccctaaactcctgatctatgctgcatccactttgcaaagtggggtcccatcaaggttcagcggcagtggatctgggacagatttcactctcaccatcagctgcctgcagtctgaagattttgcaacttattactgtcaacagtattataattaccctcggacgttcggccaagggaccaaggtggaaatcaaac

SEQ ID NO: 879 - DNA, 325 bp, Homo sapiens
gaaattgtgttgacgcagtctccaggcaccctgtctttgtctccaggggaaagagccaccctctcctgcagggccagtcagagtgttggcagcggctacttagcctggtaccagcagagacctggccaggctcccaggctcctcatctatggtgcatccagcagggccactggcatcccagacaggttcagtggcagtgggtctgggacagacttcactctcaccatcagcagactggagcctgaagattttgcagtctattactgtcagcagtatgctggctcacctaggaccttcggccaagggacacgactggagattaaac

SEQ ID NO: 880 - DNA, 325 bp, Homo sapiens
gaaattgtgttgacgcagtctccaggcaccctgtctttgtctccaggggaaagagccaccctctcctgcagggccagtcagagtgttcgcggcagctacttagcctggtaccagcagaaacctggccaggctcccaggctcctcatctatggtgcatccaccagggccactggcatcccagacaggttcagtggcagtgggtctgggacagacttcactctcaccatcagcagactggagcctgaagattttgcagtgtattattgtcagcagtatgataggtcacctaggaccttcggccaagggacacgactggagattaaac

SEQ ID NO: 881 - DNA, 331 bp, Homo sapiens
cagtctgtgctgactcagccaccctcagcgtctgggacccccgggcagagggtcaccatctcttgttctggaagcagctccaacatcggaagtaatactgtaaactggtaccagcagctcccaggaacggcccccaaactcctcatctatagtaataatcagcggccctcaggggtccctgaccgattctctggctccaagtctggcacctcagcctccctggccatcagtgggctccagtctgaggatgaggctgattattactgtgcagcatgggatgacagcctgaatggtgtggtattcggcggagggaccaagctgaccgtcctag

SEQ ID NO: 882 - DNA, 325 bp, Homo sapiens
gaaattgtgttgacgcagtctccaggtaccctgtctttgtctccaggggaaagagccaccctctcctgcagggccagtcagagtgttagcagcagctacttagcgtggtaccagcagaaacctggccaggctcccaggctcctcatctatggtgcatccagcagggccactggcatcccagacaggttcagtggcagtgggtctgggacagacttcactctcaccatcgacagactggagcctgaagattttgcagtgtattactgtcagcagtatgctggctcacctcggacgttcggccaagggaccaaggtggaaatcaaac

SEQ ID NO: 883 - DNA, 325 bp, Homo sapiens
gaaattgtgttgacgcagtctccaggcaccctgtctttgtctccaggggaaagagccaccctctcctgcagggccagtcagagtgttagcagcagctacttagcctggtaccagcagaaacctggccaggctcccaggctcctcatctatggtgcatccagcagggccactggcatcccagacaggttcagtggcagtgggtctgggacagacttcactctcaccatcagcagactggagcctgaagattttgcagtgtattactgtcagcagtatggtagctcaccgtggacgttcggccaagggaccaaggtggaaatcaaac

SEQ ID NO: 884 - DNA, 325 bp, Homo sapiens
gagattgtattgacacagtctccagccaccctgtctttgtctccaggggaaagagcctccctctcctgcagggccagtcagagtgttgacaactgcttagcctggtaccaacagaaacctggccaggctcccaggctcctcatctatgaggcatccactagggccactggcatcccagccaggttcagtggcagtgggtctgggacagacttcactctcaccatcagcagcctagagcctgaagattttgcagtttattactgtcagcagcgtggcaactggcctccgatcaccttcggccaagggacacgactggagattaaac

SEQ ID NO: 885 - DNA, 325 bp, Homo sapiens
gacatccagatgacccagtctccatcctccctgtctgcatctgtaggagacagagtcaccatcacttgccgggcaagtcagagcattaccaactatttaaattggtatcagcagaaaccagggaaagcccctaaactcctgatctatgctgcatccactttgcaaagtggggtcccatcaaggttcagtggcagtggatctgggacagatttcactctcaccatcagcagtctgcaacctgaagattttgcaacttactactgtcaacagagttacagtacctcccggatcaccttcggccaagggacacgactggagattaaac

SEQ ID NO: 886 - DNA, 328 bp, Homo sapiens
gaaattgtgttgacacagtctccagccaccctgtctttgtctccaggggaaagagccaccctctcctgcagggccagtcagagtgttagcagctacttagcctggtaccaacagaaacctggccaggctcccaggctcctcatctatgatgcatccaacagggccactggcatcccagccaggttcagtggcagtgggtctgggacagacttcactctcaccatcagcagcctagagcctgaagattttgcagtttattactgtcagcagcgtagcaactggcctccgctactcactttcggcggagggaccaaggtggagatcaaac

SEQ ID NO: 887 - DNA, 322 bp, Homo sapiens
gacatccagatgacccagtctccatcctccctgtctgcatctgtaggagacagagtcaccatcacttgccaggcgagtcaggacattagcaactatttaaattggtatcagcagaaaccagggaaagcccctaagctcctgatctacgatgcatccaatttggaaacaggggtcccatcaaggttcagtggaagtggatctgggacagattttactttcaccatcagcagcctgcagcctgaagatattgcaacatattactgtcaacagtatgataatctcccgagcactttcggccctgggaccaaagtggatatcaaac

SEQ ID NO: 888 - DNA, 325 bp, Homo sapiens
gacatccagatgacccagtctccatcctccctgtctgcatctgtaggagacagagtcaccatcacttgccaggcgagtcaggacattagcaactatttaaattggtatcagcagaaaccagggaaagcccctaagctcctgatctacgatgcatccaatttggaaacaggggtcccatcaaggttcagtggaagtggatctgggacagattttactttcaccatcagcagcctgcagcctgaagatattgcaacatattactgtcaacagtatgataatctccctccgatcaccttcggccaagggacacgactggagattaaac

SEQ ID NO: 889 - DNA, 322 bp, Homo sapiens
gacatccagatgacccagtctccctccaccctgtccgcatctgtaggagacagagtcaccatcacttgccgggccagtcagagtattagtaggtggttggcctggtatcagcagaaaccagggaaagcccctaagttcctgatctatcaggcgtcaactttggaaagtggggtcccatcaaggttcagcggcagtggctctgggacagagttcactctcaccatcagcagcctgcagcctgatgattttgcaacttattactgccagcagtatagtacttattcggggacgttcggcctagggaccaaggtggaaatcaaac

SEQ ID NO: 890 - DNA, 325 bp, Homo sapiens
gaaattgtgttgacgcagtctccaggcaccctgtctttgtctccaggggaaagagccaccctctcctgcagggccagtcagagtgttagcagcagctacttagcctggtaccagcagaaacctggccagtctcccaggctcctcatctatggtgcatccagcagggccactggcatcccagacaggttcagtggcagtgggtctgggacagacttcactctcaccatcagcagactggagcctgaagattttgcagtgtattactgtcagcagtatggtagctcaccctacacttttggccaggggaccaagctggagatcaaac

SEQ ID NO: 891 - DNA, 337 bp, Homo sapiens
gatattgtgatgactcagtctccactctccctgcccgtcacccctggagagccggcctccatctcctgcaggtctagtcagagcctcctgcatagtaatggatacaactatttggattggtacctgcagaagccagggcagtctccacagctcctgatctatttgggttctaatcgggcctccggggtccctgacaggttcagtggcagtggatcaggcacagattttacactgaaaatcagcagagtggaggctgaggatgttggggtttattactgcatgcaagctctacaaaccccgatcaccttcggccaagggacacgactggagattaaac

SEQ ID NO: 892 - DNA, 322 bp, Homo sapiens
gacatccagatgacccagtctccatcttctgtgtctgcatctgtaggagacagagtctccatcacttgtcgggcgagtcagggtattatcagctggttagcctggtatcagcagaaaccagggaaagcccctaagctcctgatctatgctgcatccagtttgcaaagtggggtcccatcaaggttcagcggcagtggatctgggacagatttcaatctcactatcagcagcctgcagcctgaagattttgcaacttactattgtcaacaggctaacagtttcccgctcactttcggcggagggaccaaggtggagatcaaac

SEQ ID NO: 893 - DNA, 325 bp, Homo sapiens
tcctatgagttgacacagccaccctcggtgtcagtgtccccaggacagacggccaggatcacctgctctggagatgcattgccaaaacaatatgcttattggtaccagcagaagccaggccaggcccctgtggtggtgatatataaagacagtgagacgccctcagggatccctgagcgattctctggctccagctcagggacaacagtcacgttgaccatcagtggagtccaggcagaagacgaggctgactattactgtcaatcagcagacagcagtggtagttatgtgctattcggcggagggaccaagctgaccgtcctag

SEQ ID NO: 894 - DNA, 328 bp, Homo sapiens
gaaattgtgttgacgcagtctccaggcaccctgtctttgtctccaggggaaagagccaccctctcctgcagggccagtcagagtgttagcagcagctacttagcctggtaccagcagaaacctggccaggctcccaggctcctcatctatggtgcatccagcagggccactggcatcccagacaggttcagtggcagtgggtctgggacagacttcactctcaccatcagcagactggagcctgaagattttgcagtgtattactgtcagcagtatggtagctcacctccgtacacttttggccaggggaccaagctggagatcaaac

SEQ ID NO: 895 - DNA, 328 bp, Homo sapiens
gaaattgtgttgacgcagtctccaggcaccctgtctttgtctccaggggaaagagccaccctctcctgcagggccagtcagagtgttagcagcagctacttagcctggtaccagcagaaacctggccaggctcccaggctcctcatctatggtgcatccagcagggccactggcatcccagacaggttcagtggcagtgggtctgggacagacttcactctcaccatcagcagactggagcctgaagattttgcagtgtattactgtcagcagtatggtagctcacctccgatcactttcggccctgggaccaaagtggatatcaaac

SEQ ID NO: 896 - DNA, 340 bp, Homo sapiens
gacatcgtgatgacccagtctccagactccctggctgtgtctctgggcgagagggccaccatcaactgcaagtccagccagagtgttttatacagctccatcaataagaactacttagcttggtaccagcagaaaccaggacagcctcctaaggtgctcatttactgggcatctacccgggaatccggggtccctgaccgattcagtggcagcgggtctgggacagatttcactctcaccatcagcagcctgcaggctgaagatgtggcagtttattactgtcagcaatattatagtactcccctgacgttcggccaagggaccaaggtggaaatcaaac

SEQ ID NO: 897 - DNA, 322 bp, Homo sapiens
gacatccagatgacccagtctccatcctccctgtctgcatctgtaggagacagagtcaccatcacttgccgggcaagtcagagcattagcagctatttaaattggtatcagcagaaaccagggaaagcccctaagctcctgatctatgctgcatccagtttgcaaagtggggtcccatcaaggttcagtggcagtggatctgggacagatttcactctcaccatcagcagtctgcaacctgaagattttgcaacttactactgtcaacagagttacagtaccccctggacgttcggccaagggaccaaggtggaaatcaaac

SEQ ID NO: 898 - DNA, 328 bp, Homo sapiens
gaaatagtgatgacgcagtctccagccaccctgtctgtgtctccaggggaaagagccaccctctcctgcagggccagtcagagtgttagcagcaacttagcctggtaccagcagaaacctggccaggctcccaggctcctcatctatggtgcatccaccagggccactggtatcccagccaggttcagtggcagtgggtctgggacagagttcactctcaccatcagcagcctgcagtctgaagattttgcagtttattactgtcagcagtataataactggcctccctcgtacacttttggccaggggaccaagctggagatcaaac

SEQ ID NO: 899 - DNA, 319 bp, Homo sapiens
tcctatgagctgactcagccaccctcagtgtccgtgtccccaggacagacagccagcatcacctgctctggagataaattgggggataaatatgcttgctggtatcagcagaagccaggccagtcccctgtgctggtcatctatcaagatagcaagcggccctcagggatccctgagcgattctctggctccaactctgggaacacagccactctgaccatcagcgggacccaggctatggatgaggctgactattactgtcaggcgtgggacagcagcaccccggtcttcggaactgggaccaaggtcaccgtcctag

SEQ ID NO: 900 - DNA, 328 bp, Homo sapiens; identical to SEQ ID NO: 894

SEQ ID NO: 901 - DNA, 325 bp, Homo sapiens
gacatccagatgacccagtctccatcctccctgtctgcatctgtaggagacagagtcaccatcacttgccgggcaagtcagggcattagaaatgatttaggctggtatcagcagaaaccagggaaagcccctaagcgcctgatctatgctgcatccagtttgcaaagtggggtcccatcaaggttcagcggcagtggatctgggacagaattcactctcacaatcagcagcctgcagcctgaagattttgcaacttattactgtctacagtataatagttacccctttgggacgttcggccaagggaccaaggtggaaatcaaac

SEQ ID NO: 902 - DNA, 331 bp, Homo sapiens
gatattgtgatgacccagactccactctctctgtccgtcacccctggacagccggcctccatctcctgcaagtctagtcagagcctcctgcatagtgatggaaagacctatttgtattggtacctgcagaagccaggccagtctccacagctcctgatctatgaagtttccagccggttctctggagtgccagataggttcagtggcagcgggtcagggacagatttcacactgaaaatcagccgggtggaggctgaggatgttggggtttattactgaatgcaaggtatacacccccgcttcggccaagggacacgactggagattaaac

SEQ ID NO: 903 - DNA, 325 bp, Homo sapiens
gaaattgtgttgacgcagtctccaggcaccctgtctttgtctccaggggaaagagccaccctctcctgcagggccagtcagagtgttagcagcagctacttagcctggtaccagcagaaacctggccaggctcccaggctcctcatctatggtgcatccagcagggccactggcatcccagacaggttcagtggcagtgggtctgggacagacttcactctcaccatcagcagactggagcctgaagattttgcagtgtattactgtcagcagtatggtagctcaccgatcaccttcggccaagggacacgactggagattaaac

SEQ ID NO: 904 - DNA, 325 bp, Homo sapiens
gacatccagttgacccagtctccatccttcctgtctgcatctgtaggagacagagtcaccatcacttgccgggccagtcagggcattagcagttatttagcctggtatcagcaaaaaccagggaaagcccctaagctcctgatctatgctgcatccactttgcaaagtggggtcccatcaaggttcagcggcagtggatctgggacagaattcactctcacaatcagcagcctgcagcctgaagattttgcaacttattactgtcaacagcttaatagttaccccggggtcactttcggccctgggaccaaagtggatatcaaac

SEQ ID NO: 905 - DNA, 340 bp, Homo sapiens
gacatcgtgatgacccagtctccagactccctggctgtgtctctgggcgagagggccaccatcaactgcaagtccagccagagtgttttatacagctccaacaataagaactacttagcttggtaccagcagaaaccaggacagcctcctaagctgctcatttactgggcatctacccgggaatccggggtccctgaccgattcagtggcagcgggtctgggacagatttcactctcaccatcagcagcctgcaggctgaagatgtggcagtttattactgtcagcaatattatagtactccgtacacttttggccaggggaccaagctggagatcaaac

SEQ ID NO: 906 - DNA, 325 bp, Homo sapiens
gacatccagatgacccagtctccatcctccctgtctgcatctgtaggagacagagtcaccatcacttgccaggcgagtcaggacattagcaactatttaaattggtatcagcagaaaccagggaaagcccctaagctcctgatctacgatgcatccaatttggaaacaggggtcccatcaaggttcagtggaagtggatctgggacagattttactttcaccatcagcagcctgcagcctgaagatattgcaacatattactgtcaacagtatgataatctcctttcgatcaccttcggccaagggacacgactggagattaaac

SEQ ID NO: 907 - DNA, 328 bp, Homo sapiens
gaaattgtgttgacgcagtctccaggcaccctgtctttgtctccaggggaaagagccaccctctcctgcagggccagtcagagtattagcagcagctacttagcctggtaccagcagaaacctggccaggctcccaggctcctcatctatggtgcatccaggagggccactggcatcccagacaggttcagtggcagtgggtctgggacagacttcactctcaccatcagcagactggagcctgaagattttgcagtgtattgctgtcagcactatggtagctcacccatgtacacttttggccaggggaccaagctggagatcaaac

SEQ ID NO: 908 - DNA, 328 bp, Homo sapiens
tcctatgagctgacacagccaccctcggtgtcagtgtccccaggacagacggccaggatcacctgttctggagatgcgttgccaaaccaatatgcttattggtaccagcagaagccaggccaggcccctatgggggtggtcatatataaagacactgagaggccctcagggatccctgagcgattctctggctccagctcagggacaacagtcacgttgaccatcagtggagtccaggcagaagatgaggctgactattactgtcaatcagcagacagcagtggtacttactgggtgttcggcggagggaccaagctgaccgtcctag

SEQ ID NO: 909 - DNA, 328 bp, Homo sapiens
gacatccagttgacccagtctccatccttcctgtctgcatctgtaggagacagagtcaccatcacttgccgggccagtcagggcattagcaattatttagcctggtatcagcaaaaaccagggaaagcccctaagctcctgatctatactgcatccactttgcaaagtggggtcccatcaaggttcagcggcagtggatctgggacagaattcactctcacaatcagcagcctgcagcctgaagattttgccacttattactgtcaacagcttaatagttaccctcctcggagcactttcggccctgggaccaaagtggatatcaaac

SEQ ID NO: 910 - DNA, 328 bp, Homo sapiens
gacatccagttgacccagtctccatccttcctgtctgcatctgtaggagacagagtcaccatcacttgccgggccagtcaggggattagcagttatttagcctggtatcagcaaaagccagggaaagcccctaagctcctgatctatgctgcatccactttgcaaagtggggtcccatcaaggttcagcggcagtggatctgggacagaattcactctcacaatcagcagcctgcagcctgaagattttgcaacttattactgtcaacagcttaatagttcccctccgaagctcactttcggcggagggaccaaggtggagatcaaac

SEQ ID NO: 911 - DNA, 331 bp, Homo sapiens
gaaatcgtgttgacgcagtctccaggcaccctgtctctgtctccaggggaaagagcctccctctcatgcagggccagtcagagtgttagcagcaggtatgtagcctggtaccagcaaaaacctggccaggctcccaggctcctcatccagggtgcatccagcagggccactggcatcccagacaggttcaccggcagtgggtctgggacagacttcactctcaccatcagcagactggagcctgaagattttgcagtctattactgtcagcagtatggtagttcacctcccatgtacacttttggccaggggaccaagctggagatcaaac

SEQ ID NO: 912 - DNA, 322 bp, Homo sapiens
tcctatgagctgactcagccaccctcagtgtccgtgtccccaggacagacagccagcatcacctgctctggagataaattggaggataaatatgcttgctggtatcagcagaagccaggccagtcccctgtgctggtcatctatcaagataccaagcggccctcagggatccctgagcgattctctggctccaactctgggaacacagccactctgaccatcagcgggacccaggctatggatgaggctgactattactgtcaggcgtgggacagcagcaccgccgtggtattcggcggagggaccaagctgaccgtcctag

SEQ ID NO: 913 - DNA, 328 bp, Homo sapiens
cagtctgccctgactcagcctgcctccgtgtctgggtctcctggacagtcgatcaccatctcctgcactggatccagcagtgacgttggtgcttttatctatgtctcctggtatcaacaacacccaggcaaagcccccaaactcatgatttatgaggtcagtcatcggccctcaggggtttctaatcgcttctctggctccaagtctggcaacacggcctccctgaccatctctgggctccaggctgaggacgaggctgattattactgcagctcatatacaagcagcagcatcgttttcggcggagggaccaagctgaccgtcctag

SEQ ID NO: 914 - DNA, 316 bp, Homo sapiens
gacatccagatgacccagtctccatcctccctgtctgcatctgtaggagacagagtcaccatcacttgccaggcgagtcaggacattagcaactatttaaattggtatcagcagaaaccagggaaagcccctaagctcctgatctacgatgcatccaatttgaaaacaggggtcccatcaaggttcagtggaagtggatctgggacagattttactttcaccatcagcagcctgcagcctgaagatattgcaacatattactgtcaacagtatgataatcttttcactttcggccctgggaccaaagtggatatca

SEQ ID NO: 915 - DNA, 331 bp, Homo sapiens
cagtctgtgctgactcagccaccctcagcgtctggttcccccgggcagagggtcaccatctcttgttctggaagcagcgccaacatcggaaataattatgtatgctggtaccaacaactccctggaacggcccccaaactcctcatctataggaatattgagcggccctctggggtccctgaccgattctctggctccaattctggcacctcagcctccctggccattcgtgggctccggtccgaggatgaggctgattattactgtacaacatgggatgacagcctgagtggttgggtgttcggcggagggaccaagctgaccgtcctag

SEQ ID NO: 916 - DNA, 324 bp, Homo sapiens
gacatccagttgacccagtctccatcctccctgtctgcatctgcaggagacagagtcaccatcacttgccgggtgagtcagggcattagcagttatttaaagtggtatcggcagaaaccagggaaagttcctaagctcctgatctatagtgcgtccaatttgcaatctggagtcccatctcggttcagtggcagtgaatctgggacagatttcactctcactatcagcagcctgcagcctgaggatgttggaccttatcacggtcaacggacttacaatgcccctcgatcaccttcggccaagggacacgactggagattaaac

SEQ ID NO: 917 - DNA, 325 bp, Homo sapiens
tcctatgagctgacacagccaccctcggtgtcagtgtccccaggacagacggccaggatcacctgctctggagatgcattgccaaagcaatatggttattggtaccagcagaagccaggccaggcccctgtgctggtgatatataatgacattgagaggccctcagggatccctgagcgattctctggctccagctcagggacaacagtcacgttgaccatcagtggagtccaggcagaagacgaggctgactatcactgtcaatcagcagacagcagtggcactcagtgggtgttcggcggagggaccaagctgaccgtcctag

SEQ ID NO: 918 - DNA, 322 bp, Homo sapiens; identical to SEQ ID NO: 837

SEQ ID NO: 919 - DNA, 310 bp, Homo sapiens
gaaattgtgctgactcagtctccagactttcagtctgtgactccaaaggagaaagtcaccatcacctgccgggccagtcagagcattggtagtagcttacactggtaccagcagaaaccagatcagtctccaaagctcctcatcaagtatgcttcccagtccatctcaggggtcccctcgaggttcagtggcagtggatctgggacagatttcaccctcaccatcaatagcctggaagctgaagatgctgcagcgtattactgtcatcagagtagtagtttacctcaggggacacgactggagattaaac

SEQ ID NO: 920 - DNA, 322 bp, Homo sapiens
gacatccagatgacccagtctccatcctccctgtctgcatctgtaggagacagagtcaccatcacttgccaggcgagtcaggacattagcaagtatttaaattggtatcagcagaaaccagggaaagcccctaagctcctgatctacgatgcatccaatttggaaacaggggtcccatcaaggttcagtggaagtggatctgggacagattttactttcaccatcagcagcctgcagcctgaagatattgcaacatattactgtcaacagtatgataatctcccgatcaccttcggccaagggacacgactggagattaaac

SEQ ID NO: 921 - DNA, 331 bp, Homo sapiens
cagtctgtgttgacgcagccgccctcagtgtctgcggccccaggacagaaggtcaccatctcctgctctggaagcagctccaacattgggaataattatgtatcctggtaccagcagctcccaggaacagcccccaaactcctcatttatgacaataataagcgaccctcagggattcctgaccgattctctggctccaagtctggcacgtcagccaccctgggcatcaccggactccagactggggacgaggccgattattactgcggaacatgggatagcagcctgagttctgtggtattcggcggagggaccaagctgaccgtcctag

SEQ ID NO: 922 - DNA, 325 bp, Homo sapiens
gacatccagttgacccagtctccatccttcctgtctgcatctgtaggagacagagtcaccatcacttgccgggccagtcagggcattagcagttatttagcctggtatcagcaaaaaccagggaaagcccctaagctcctgatctatgctgcatccactttgcaaagtggggtcccattaaggttcagcggcagtggatctgggacagaattcactctcacaatcagcagcctgcagcctgaagattttgcaacttattactgtcaacagcttaatagttcccctccgtacacttttggccaggggaccaagctggagatcaaac

SEQ ID NO: 923 - DNA, 322 bp, Homo sapiens
gacatccagatgacccagtctccatcctccctgtctgcatctgtaggagacagagtcaccatcacttgccgggcgagtcagggcattagcaattatttagcctggtatcagcagaaaccagggaaagttcctaacctcctgatctatgctgcatccactttgcaatcaggggtcccatctcggttcagtggcagtggatctgggacagatttcactctcaccatcagcagcctgcagcctgaagatgttgcaacttattactgtcaaaagtataacagtgccccattcactttcggccctgggaccaaagtggatatcaaac

SEQ ID NO: 924 - DNA, 325 bp, Homo sapiens
gaaatagtgatgacgcagtctccagccaccctgtctgtgtctccaggggaaagagccaccctctcctgcagggccagtcagagtgttagcagcaacttagcctggtaccagcagaaacctgggcaggctcccaggctcctcatctatggtgcatccaccagggccactggtatcccagccaggttcagtggcagtgggtctgggacagagttcactctcaccgtcagcagcctgcagtctgaagattttgcagtttattactgtcagcagtataatgactggcctttctacacttttggccaggggaccaagctggagatcaaac

SEQ ID NO: 925 - DNA, 322 bp, Homo sapiens
tcctatgagctgacacagccaccctcggtgtcagtgtccccaggacagacggccaggatcacctgctctggagatgcattgccaaagcaatatgcttattggtaccagcagaagccaggccaggcccctgtgctggtgatatataaagacagtgagaggccctcagggatccctgagcgattctctggctccagctcagggacaacagtcacgttgaccatcagtggagtccaggcagaagacgaggctgactattactgtcaatcagcagacagcagtggtacttgggtgttcggcggagggaccaagctgaccgtcctag

SEQ ID NO: 926 - DNA, 325 bp, Homo sapiens
tcctatgagctgacacagccaccctcggtgtcagtgtccccaggacagacggccaggatcacctgctctggagatgcattgccaaagcaatatgcttcttggtaccagcagaagccaggccaggcccctgtggtggtgatatataaagacactgagaggccctcagggatccctgagcgattctctggctccacctcagggacaacagtcacgttgaccatcagtggagtccaggcagaagacgaggctgactattactgtcaatcagcagacagcagtggtactttcgtggtattcggcggagggaccaagctgaccgtcctag

SEQ ID NO: 927 - DNA, 322 bp, Homo sapiens
gacatccagatgacccagtctccatcctccctgtctgcatctgtaggagacagagtcaccatcacttgccgggcaagtcagagcattagcagctatttaaattggtatcagcagaaaccagggaaagcccctaagctcctgatctatgctgcatccagtttgcaaagtggggtcccatcaaggttcagtggcagtggatctgggacagatttcactctcaccatcagcagtctgcaacctgaagattttgcaacttactactgtcaacagagttacagtaccccgtggacgttcggccaagggaccaaggtggaaatcaaac

SEQ ID NO: 928 - DNA, 322 bp, Homo sapiens
gaaattgtgttgacacagtctccagccaccctgtctttgtctccaggggaaagagccaccctctcctgcagggccagtcagagtgttagcagctacttagcctggtaccaacagaaacctggccaggctcccaggctcctcatctatgatgcatccaacagggccactggcatcccagccaggttcagtggcagtgggtctgggacagacttcactctcaccatcagcagcctagagcctgaagattttgcagtttattactgtcagcagcgtagcaactggcctccccttttcggccctgggaccaaagtggatatcaaac

SEQ ID NO: 929 - DNA, 322 bp, Homo sapiens
gccatccggatgacccagtctccatcctcattctctgcatctacaggagacagagtcaccatcacttgtcgggcgagtcagggtattagcagttatttagcctggtatcagcaaaaaccagggaaagcccctaagctcctgatctatgctgcatccactttgcaaagtggggtcccatcaaggttcagcggcagtggatctgggacagatttcactctcaccatcagctgcctgcagtctgaagattttgcaacttattactgtcaacagtattatagttaccctcgaacttttggccaggggaccaagctggagatcaaac

SEQ ID NO: 930 - DNA, 331 bp, Homo sapiens
gatattgtgatgacccagactccaccctccctgcccgtcaaccctggagagccggcctccatctcttgcaggtctagtcagagcctcctgcatagtaatggatatacctatttgcattggtacctgcagaagccagggcagtctccacagctcctgatttatagggtttccaatcatctttctggggtcccagacaggtttagtggcagtgggtcaggtagtgatttcacactgaaaatcagctgggtggaggctgaggatgttggggtttattactgcatgcaagctacacagtttcctcctggccaggggaccaagctggagatcaaac

SEQ ID NO: 931 - DNA, 328 bp, Homo sapiens
gaaattgtgttgacgcagtctccaggcaccctgtctttgtctccaggggaaagagccaccctctcctgcagggccagtcagagtgttagcagcagctacttagcctggtaccagcagaaacctggccaggctcccaggctcctcatctatggtgcatccagcagggccactggcatcccagacaggttcagtggcagtgggtctgggacagacttcactctcaccatcagcagactggagcctgaagattttgcagtgtattactgtcagcagtatggtagctcacctccgaacacttttggccaggggaccaagctggagatcaaac

SEQ ID NO: 932 - DNA, 322 bp, Homo sapiens
gacatccagatgacccagtctccttccaccctgtctgcatctgtaggagacagagtcaccatcacttgccgggccagtcagagtattagtagctggttggcctggtatcagcagaaaccagggaaagcccctaagctcctgatctataaggcgtctagtttagaaagtggggtcccatcaaggttcagcggcagtggatctgggacagaattcactctcaccatcagcagcctgcagcctgatgattttgcaacttattactgccaacagtataatagttattcggggacgttcggccaagggaccaaggtggaaatcaaac

SEQ ID NO: 933 - DNA, 332 bp, Homo sapiens
cagtctgccctgactcagcctgcctccgtgtctgggtctcctggacagtcgatcaccatctcctgcactggaaccagcagtgacgttggtggttataactatgtctcctggtaccaacaacacccaggcaaagcccccaaactcatgatttatgatgtcagtaatcggccctcaggggtttctaatcgcttctctggctccaagtctggcaacacggcctccctgaccatctctgggctccaggctgaggacgaggctgattattactgcagctcatatacaagcagcagcactttgggtgttcggcggagggaccaagctgaccgtcctag

SEQ ID NO: 934 - DNA, 327 bp, Homo sapiens
tcctatgtgctgactcagccaccctcagtgtcagtggccccaggaaagacggccaggattacctgtggggacaacaacattggaagtaaaaatgtgcactggtaccagcagaagccaggccaggcccctgtgctggtcgtctatgatgatagcgaccggccctcagggatccctgagcgattctctggctccaactctgggaacacggccaccctgaccatcagcagggtcgaagccggagatgaggccgactattactgtcaggtgtgggatggtagtagtgatctcttttatgtcttcggaactgggaccaaggtcaccgtccta

SEQ ID NO: 935 - DNA, 325 bp, Homo sapiens
gacatccagttgacccagtctccatccttcctgtctgcatctgtaggagacagagtcaccatcacttgccgggccagtcagggcattagcagttatttagcctggtatcagcaaaaaccagggaaagcccctaagctcctgatttatgctgcatccactttgcaaagtggggtcccatcaaggttcagcggcagtggatctgggacagaattcactctcacaatcagcagcctgcagcctgaagattttgcaacttattactgtcaacagcttaatagttaccccccattcactttcggccctgggaccaaagtggatatcaaac

SEQ ID NO: 936 - DNA, 325 bp, Homo sapiens; identical to SEQ ID NO: 935

SEQ ID NO: 937 - DNA, 325 bp, Homo sapiens
gacatccagttgacccagtctccatccttcctgtctgcatctgtaggagacagagtcaccatcacttgccgggccagtcagggcattagcagttatttagcctggtatcagcaaaaaccagggaaagcccctaagctcctgatctatgctgcatccactttgcaaagtggggtcccatcaaggttcagcggcagtggatctgggacagaattcactctcacaatcagcagcctgcagcctgaagattttgcaacttattactgtcaacagcttgatacttactccccgctcactttcggcggagggaccaaggtggagatcaaac

SEQ ID NO: 938 - DNA, 328 bp, Homo sapiens
cagtctgtgctgactcagccaccctcagcgtctgggacccccgggcagagggtcaccatctcttgttctggaagcagctccaacatcggaagtaatactgtaaactggtaccagcagctcccaggaacggcccccaaactcctcatctatagtaataatcagcggccctcaggggtccctgaccgattctctggctccaagtctggcacctcagcctccctggccatcagtgggctccagtctgaggatgaggctgattattactgtgcagcatgggatgacagcctgaatggtgtattcggcggagggaccaagctgaccgtcctag

SEQ ID NO: 939 - DNA, 325 bp, Homo sapiens
tcctatgagctgacacagccaccctcggtgtcagtgtccccaggacaaacggccaggatcacctgctctggagatgcattgccaaaaaaatatgcttattggtaccagcagaagtcaggccaggcccctgtgctggtcatctatgaggacagcaaacgaccctccgggatccctgagagattctctggctccagctcagggacaatggccaccttgactatcagtggggcccaggtggaggatgaagctgactactactgttactcaacagacagcagtggtaatcttggggtattcggcggagggaccaagctgaccgtcctag

SEQ ID NO: 940 - DNA, 337 bp, Homo sapiens
cagtctgtgttgacgcagccgccctcagtgtctgcggccccaggacagaaggtcaccatctcctgctctggaagcagctccaacattgggaataattatgtatcctggtaccagcagctcccaggaacagcccccaaactcctcatttatgacaataataagcgaccctcagggattcctgaccgattctctggctccaagtctggcacgtcagccaccctgggcatcaccggactccagactggggacgaggccgattattactgcggaacatgggatagcagcctgagtgctggcccttatgtcttcggaactgggaccaaggtcaccgtcctag

SEQ ID NO: 941 - DNA, 337 bp, Homo sapiens
cagtctgtgctgacgcagccgccctcagtgtctggggccccagggcagagggtcaccatctcctgcactgggagcaggtccaacatcggggcaggttatgatgtacactggtaccagcaacttccaggaacagcccccaaactcctcatctatgctaacagcaatcggccctcaggggtccctgaccgattctctggctccaagtctggcacctcagcctccctggccatcactgggctccaggctgaggatgagggtgattattactgccagtcctatgccagcagcctgagtgttcatgtggtattcggcggagggaccaagctgaccgtcctag

SEQ ID NO: 942 - DNA, 337 bp, Homo sapiens
cagtctgtgctgacgcagccgccctcagtgtctggggccccagggcagagggtcaccatctcctgcactgggagcagctccaacatcggggcaggttatgatgtacactggtaccagcagcttccaggaacagcccccaaactcctcatctatggtaacaataatcgcccctcaggggtccctgaccgattctctggctccaagtctggcacctcagcctccctggccatcactgggctccaggctgaggatgaggctgattattactgccagtcctatgccagtagcctgagtgttcatgtcgtattcggcggagggaccaagctgaccgtcctag

SEQ ID NO: 943 - DNA, 322 bp, Homo sapiens
gaaattgtgttgacacagtctccagccaccctgtctttgtctccaggggaaagagccaccctctcctgcagggccagtcagagtgttagcagctacttagcctggtaccaacagaaacctggccaggctcccaggctcctcatctatgatgcatccaacagggccactggcatcccagccaggttcagtggcagtgggtctgggacagacttcactctcaccatcagcagcctagagcctgaagattttgcagtttattactgtcagcagcgtagcaactggcctcggacgttcggccaagggaccaaggtggaaatcaaac

SEQ ID NO: 944 - DNA, 322 bp, Homo sapiens
gacatccagatgacccagtctccatcctccctgtctgcatctgtaggagacagagtcaccatcacttgccgggcaagtcagagcattagcagctatttaaattggtatcagcagaaaccagggaaagcccctaagctcctgatctatgctgcatccagtttgcaaagtggggtcccatcaaggttcagtggcagtggatctgggacagatttcactctcaccatcagcagtctgcaacctgaagattttgcaacttactactgtcaacagagttacagtaccctcatcaccttcggccaagggacacgactggagattaaac

SEQ ID NO: 945 - DNA, 325 bp, Homo sapiens
gacatccagatgacccagtctccatcttctgtgtctgcatctgtaggagacagagtcaccatcacttgtcgggcgagtcagggtattagcagctggttagcctggtatcagcagaaaccagggaaagcccctaagctcctgatctatgctgcatccagtttgcaaagtggggtcccatcaaggttcagcggcagtggatctgggacagatttcactctcactatcagcagcctgcagcctgaagattttgcaacttactattgtcaacaggctaacagtttccctccgtggacgttcggccaagggaccaaggtggaaatcaaac

SEQ ID NO: 946 - DNA, 337 bp, Homo sapiens
gatattgtgatgacccagactccactctcctcacctgtcacccttggacagccggcctccatctcctgcaggtctagtcaaagcctcgtacacagtgatggaaacacctacttgagttggcttcagcagaggccaggccagcctccaagactcctaatttataagatttctaaccggttctctggggtcccagacagattcagtggcagtggggcagggacagatttcacactgaaaatcagcagggtggaagctgaggatgtcggggtttattactgcatgcaagctacacaatttcccttgacgttcggccaagggaccaaggtggaaatcaaac

SEQ ID NO: 947 - DNA, 328 bp, Homo sapiens
gaaattgtgttgacacagtctccagccaccctgtctttgtctccaggggaaagagccaccctctcctgcagggccagtcagagtcttagcagctacttagcctggtaccaacagaaacctggccaggctcccaggctcctcatctatgatgcatccaacagggccactggcatcccagccaggttcagtggcagtgggtctgggacagacttcactctcaccatcagcagcctagagcctgaagattttgcagtttattactgtcagcagcgtagcaactggcctccttcgatcaccttcggccaagggacacgactggagattaaac

SEQ ID NO: 948 - DNA, 334 bp, Homo sapiens
cagtctgccctgactcagcctgcctccgtgtctgggtctcctggacagtcgatcaccatctcctgcactggaaccagcagtgacgttggtgattataactatgtctcctggtaccaacaacacccaggcaaagcccccaaactcatgatttatgatgtcagtaatcggccctcaggggtttctaatcggttctctggctccaagtctggcaacacggcctccctgaccatctctgggctccaggctgaggacgaggctgattattactgcagctcatatacaagcatcataccttgttgggtgttcggcggagggaccaagctgaccgtcctag

SEQ ID NO: 949 - DNA, 322 bp, Homo sapiens
gacatccagatgacccagtctccttccaccctgtctgcatctgtaggagacagagtcaccatcacttgccgggccagtcagagtattagtagctggttggcctggtatcagcagaaaccagggaaagcccctaagctcctgatctataaggcgtctagtttagaaagtggggtcccatccaggttcagcggcagtggatctgggacagaattcactctcaccatcagcagcctgcagcctgatgattttgcaacttattactgccaacagtataatacttatgcaaggacttttggccaggggaccaagctggagatcaaac

SEQ ID NO: 950 - DNA, 319 bp, Homo sapiens
gaaattgtgttgacacagtctccagccaccctgtctttgtctccaggggaaagagccaccctctcctgcagggccagtcagagtgttagcagctacttggcctggtaccaacagaaacctggccagggtcccagactcctcatctatgatacatcccaccgggccactgacgtcccagacaggttcagtggcagtgggtctgggacagacttcacgctcatcatcagcaggctagagcctgaagacttcgcagtctattactgtcagcagcgtagcaacaggcccactttcggcggagggaccaaggtggagatcaaac

SEQ ID NO: 951 - DNA, 322 bp, Homo sapiens
gacatccagatgacccagtctccatcctcactgtctgcatctgtaggagacagagtcaccatcacttgtcgggcgagtcagggcattagcaattatttagcctggtttcagcagaaaccagggaaagcccctaagtccctgatctatgctgcatccagtttgcaaagtggggtcccatcaaagttcaccggcagtggatctgggacagatttcactctcaccatcagcagcctgcagcctgaagattttgcaacttattactgccaacagtataatagttaccctcccacgttcggccaagggaccaaggtggaaatcaaac

SEQ ID NO: 952 - DNA, 322 bp, Homo sapiens
gacatccagatgacccagtctccatcctccctgtctgcatctgtaggagacagagtcaccatcacttgccaggcgagtcaggacattagcaactatttaaattggtatcagcagaaaccagggaaagcccctaagctcctgatctacgatgcatccaatttggaaacaggggtcccatcaaggttcagtggaagtggatctgggacagattttactttcaccatcagcagcctgcagcctgaagatattgcaacatattactgtcaacagtatgataatctcccgatcaccttcggccaagggacacgactggagattaaac

SEQ ID NO: 953 - DNA, 319 bp, Homo sapiens
tcctatgagctgactcagccaccctcagtgtccgtgtccccaggacagacagccagcatcacctgctctggagataaattgggggataaatatgcttgctggtatcagcagaagccaggccagtcccctgtgctggtcatctttcaagattccaagcggccctcagggatccctgagcgattctctggctccaactctgggaacacagccactctgaccatcagcgggacccaggctatggatgaggctgactattactgtcaggcgtgggacagcagcactgtggtattcggcggagggaccaagttgaccgtcctag

SEQ ID NO: 954 - DNA, 322 bp, Homo sapiens
gacatccagttgacccagtctccatccttcctgtctgcatctgtaggagacagagtcaccatcacttgccgggccagtcagggcattagcagttatttagcctggtatcagcaaaaaccagggaaagcccctaagctcctgatctatgctgcatccactttgcaaagtggggtcccatcaaggttcagcggcagtggatctgggacagaattcactctcacaatcagcagcctgcagcctgaagattttgcaacttattactgtcaacagcttaatagttaccctccggctttcggccctgggaccaaagtggatatcaaac

SEQ ID NO: 955 - DNA, 322 bp, Homo sapiens
gacatccagatgacccagtctccttccaccctgtctgcatctgtaggagacagagtcaccatcacttgccgggccagtcagagtattagtagctggttggcctggtatcagcagaaaccagggaaagcccctaagctcctgatctataaggcgtctagtttagaaagtggggtcccatcaaggttcagcggcagtggatctgggacagaattcactctcaccatcagcagcctgcagcctgatgattttgcaacttattactgccaacagtataatagttatccgtggacgttcggccaagggaccaaggtggaaatcaaac

SEQ ID NO: 956 - DNA, 346 bp, Homo sapiens
cagcctgtgctgactcagccaacttccctctcagcatctcctggagcatcagtcagactcacctgcaccttgcgcagtgacatcaatgttgctacctacaggatattctggtaccagcagaagccagagagccctccccggtttctcctgaactactactcagactcaaataaacatcagggctctggagtccccagccgcttctctggatccaaagatacttcgaccaatgccgggattttagtcatctctgggctccagtctgacgatgaggctgactattactgtatgatttgggacatcagtgtctgggtgttcggcggagggaccaagctgaccgtcctag

SEQ ID NO: 957 - DNA, 205 bp, Homo sapiens
caggccagcctccacagctcctgatctatgaagtttccaaccggttctctggagtgccagataggttcagtggcagcgggtcagggacagatttcacactgaaaatcagccgggtggaggctgaggatgttgggatttattactgcatgcaaactatacagcttcctcgtcactttcggcggagggaccaaggtggagatcaaac

SEQ ID NO: 958 - DNA, 331 bp, Homo sapiens
cagtctgccctgactcagcctgcctccgtgtctgggtctcctggacagtcgatcaccatctcctgcactggaaccagcagtgacgttggtggttataactttgtctcctggtaccaacagcacccaggcaaagcccccaaactcatgatttatgaggtcagtaatcggccctcaggggtttctaatcgcttctctggctccaagtctggcaacacggcctccctgaccatctctgggctccaggctgaggacgaggctgattattactgcagctcatatacaagcagcagcacttatgtcttcggaactgtgaccaaggtcaccgtcctag

SEQ ID NO: 959 - DNA, 331 bp, Homo sapiens
cagtctgtgctgactcagccaccctcagcgtctgggacccccgggcagagggtcaccatctcttgttctggaagcagctccaacatcggaagtaatactgtaaactggtaccagcaactcccaggaacggcccccaaactcctcatctatagtaatgatcagcggccctcaggggtccctgaccgattctctggctccaagtctggcacctcagcctccctggccatcagtgggctccagtctgaggatgaggctgattattactgtgcagcatgggatgacagcctgaatgctgtggtattcggcggagggaccaaactgaccgtcctag

SEQ ID NO: 960 - DNA, 331 bp, Homo sapiens
gaaattgtgttgacgcagtctccaggcaccctgtctttgtctccaggggaaagagccaccctctcctgcagggccagtcagagtgttagcagcagctacttagcctggtaccagcagaaacctggccaggctcccaggctcctcatctatggtgcatccagcagggccactggcatcccagacaggttcagtggcagtgggtctgggacagacttcactctcaccatcagcagactggagcctgaagattttgcagtgtattactgtcagcagtatggtagctcacctagagggaacacttttggccaggggaccaagctggagatcaaac

SEQ ID NO: 961 - DNA, 319 bp, Homo sapiens
gaaatagtgatgacgcagtctccagccaccttgtctgtgtctccaggggagagagccaccctctcctgcagggccagtcagagtgttagcagcaacttagcctggtaccagcagaaacctgggcaggctcccaggctcctcatctatggtgcttccaccagggccactggtatcccagccaggttcagtggcagtgggtctgggacagggttcactctcaccatcagcagcctgcagtctgaagattttgcagtttattactgtcagcagtataatcactggcccactttcggcggagggaccaaggtggagatcaaac

SEQ ID NO: 962 - DNA, 322 bp, Homo sapiens
gacatccagatgacccagtctccatcctccctgtctgcatctgtaggagacagagtcaccatcacttgccgggcaagtcagagcattagcagctatttaaattggtatcagcagaaaccagggaaagcccctaagttcctgatcaatgctgcatccagtttgcaaagtggggtcccatcaaggttcagtggcagtggatctgggacagatttcactctcaccatcagcagtctgcaacctgaagattttgcaacttactactgtcaacagtattacagtaatcctctcactttcggcggagggaccaaggtggagatcaaac

SEQ ID NO: 963 - DNA, 325 bp, Homo sapiens
tcctatgagctgactcagccaccctcagtgtccgtgtccccaggacagacagccagcatcacctgctctggagataaattgggggataaatatgcttgctggtatcagcagaagccaggccagtcccctgtgctggtcatctatcaagatagcaagcggccctcagggatccctgagcgattctctggctccaactctgggaacacagccactctgaccatcagcgggacccaggctatggatgaggctgactattactgtcaggcgtgggacagcagcactgcttatgtggtattcggcggagggaccaagctgaccgtcctag

SEQ ID NO: 964 - DNA, 331 bp, Homo sapiens
caggctgtggtgactcaggagccctcactgactgtgtccccaggagggacagtcactctcacctgtggctccagcactggagctgtcaccagtgatcattatccctactggttccagcagaagcctggccaagcccccaggacactgatttatgatacacacaacaaacactcctggacacctgcccggttctcaggctccctccttgggggcaaagctgccctgaccctttcgggtgcgcagcctgaggatgaggctgactattactgcttgctctcctatagtgctgctcggcgagtcatcggaactgggaccaaggtcaccgtcctag

SEQ ID NO: 965 - DNA, 325 bp, Homo sapiens
gaaattgtgttgacgcagtctccaggcaccctgtctttgtctccaggggaaagagccaccctctcctgcagggccagtcagagtgttagcagcagctacttagcctggtaccagcagaaacctggccaggctcccaggctcctcatctatggtgcatccagcagggccactggcatcccagacaggttcagtggcagtgggtctgggacagacttcactctcaccatcagcagactggagcctgaagattttgcagtgtattactgtcagcagtatggtagctcacctcggacgttcggccaagggaccaaggtggaaatcaaac

SEQ ID NO: 966 - DNA, 322 bp, Homo sapiens
gacatccagatgacccagtctccatcctccctgtctgcatctgtaggagacagagtcaccatcacttgccgggcaagtcagggcattagaaatgatttaggctggtatcagcagaaaccagggaaagcccctaagcgcctgatctatgctgcatccagtttgcaaagtggggtcccatcaaggttcagcggcagtggatctgggacagaattcactctcacaatcagcagtctgcagcctgaagattttgcaacttattactgtctacagcataacagttaccctcggacgttcggccaagggaccaaggtggaaatcaaac

SEQ ID NO: 967 - DNA, 322 bp, Homo sapiens
gacatccagatgacccagtctccatcttctgtgtctgcatctgtaggagacagagtcaccatcacttgtcgggcgagtcagggtattagcagctggttagcctggtatcagcagaaaccagggaaagcccctaagctcctgatctatgctgcatccagtttgcaaagtggggtcccatcaaggttcagcggcagtggatctgggacagatttcactctcactatcagcagcctgcagcctgaagattttgcaacttactattgtcaacaggctaacagtttccctctcactttcggcggagggaccaaggtggagatcaaac

SEQ ID NO: 968 - DNA, 328 bp, Homo sapiens
gaaattgtgttgacgcagtctccaggcaccctgtctttgtctccaggggaaagagccaccctctcctgcagggccagtcagagtgttagcagcagctacttagcctggtaccagcagaaacctggccaggctcccaggctcctcatctatggtacatccagcagggccactggcatcccagacaggttcagtggcagtgggtctgggacagacttcactctcaccatcagcagactggagcctgaagattttgcagtgtattactgtcagcagtatggtggctcacctccgtggacgttcggccaagggaccaaggtggaaatcaaac

SEQ ID NO: 969 - DNA, 340 bp, Homo sapiens; identical to SEQ ID NO: 905

SEQ ID NO: 970 - DNA, 337 bp, Homo sapiens
gatgttgtgatgactcagtctccactctccctgcccgtcacccttggacagccggcctccatctcctgcaggtctagtcaaagcctcgtatacagtgatggaaacacctacttgaattggtttcagcagaggccaggccaatctccaaggcgcctaatttataaggtttctaaccgggactctggggtcccagacagattcagcggcagtgggtcaggcactgatttcacactgaaaatcagcagggtggaggctgaggatgttggggtttattactgcatgcaaggtacacactggcctctcactttcggcggagggaccaaggtggagatcaaac

SEQ ID NO: 971 - DNA, 322 bp, Homo sapiens
gccatccagatgacccagtctccatcctccctgtctgcatctgtaggagacagagtcaccatcacttgccgggcaagtcagggcattagaaatgatttaggctggtatcagcagaaaccagggaaagcccctaagctcctgatctttgctgcatccattttacaaagtggggtcccatccaggttcagcggcagtggatctggcacagatttcactctcaccatcagcagcctgcagcctgaagattttgcaacttattactgtctacaagattacaattccccgctcactttcggcggagggaccaaggtggagatcaaac

SEQ ID NO: 972 - DNA, 337 bp, Homo sapiens
gatattgtgatgacccagactccactctcctcacctgtcacccttggacagccggcctccatctcctgcaggtctagtcaaagcctcgtacacagtgatggaaacacctacttgagttggcttcagcagaggccaggccagcctccaagactcctaatttataagatttctaaccggttctctggggtcccagacagattcagtggcagtggggcagggacagatttcacactgaaaatcagcagggtggaagctgaggatgtcggggtttattactgcatgcaagctacacaatttcctcggacgttcggccaagggaccaaggtggaaatcaaac

SEQ ID NO: 973 - DNA, 328 bp, Homo sapiens
gacatccagatgacccagtctccatcctccctgtctgcatctgtaggagacagagtcaccatcacttgccgggcaagtcagagcattagcagctatttaaattggtatcagcagaaaccagggagagcccctaaggtcctgatctatgctgcatccagtttgcagagtggggtcccatcaaggttcagtggcagtggatctgggacagatttcactctcaccatcagcagtctgcaagctgaagattttgcaacttactactgtcaacagacttacattttccctccggaggacacttttggccaggggaccaagctgcagatcaaac

SEQ ID NO: 974 - DNA, 325 bp, Homo sapiens
gaaatagtgatgacgcagtctccagccaccctgtctgtgtctccaggggaaagagccaccctctcctgcagggccagtcagagtgttagcagcaacttagcctggtaccagcagaaacctggccaggctcccaggctcctcatctatggtgcatccaccagggccactggtatcccagccaggttcagtggcagtgggtctgggacagagttcactctcaccatcagcagcctgcagtctgaagattttgcagtttattactgtcagcagtatgataactggccttcgtacacttttggccaggggaccaagctggagatcaaac

SEQ ID NO: 975 - DNA, 331 bp, Homo sapiens
cagtctgtgttgacgcagccgccctcagtgtctgcggccccaggacagaccgtcaccatctcctgctctggaagcagctccaacattgggaataattatgtatcctggttccagcagctcccaggaacagcccccaaactcctcatttatgaaaataataagcgaccctcagggattcctgaccgattctctggctccaagtctggcacgtcagccaccctgggcatcaccggactccagactggggacgaggccgattattactgcggaacatgggataatagtctgagagctgtggtattcggcggggggaccaagttgaccgtcctag

SEQ ID NO: 976 - DNA, 322 bp, Homo sapiens
tcctatgagctgactcagccaccctcagtgtccgtgtccccaggacagacagccagcatcacctgctctggagataaattgggggataaatatgcttgctggtatcagcagaagccaggccagtcccctgtgctggtcatctatcaagatagcaagcggccctcagggatccctgagcgattctctggctccaactctgggaacacagccactctgaccatcagcgggacccaggctatggatgaggctgactattactgtcaggcgtgggacagcagcactgggggagtcttcggaactgggaccaaggtcaccgtcctag

SEQ ID NO: 977 - DNA, 322 bp, Homo sapiens
gacatccagatgacccagtctccatcctccctgtctgcatctgtaggagacagagtcaccatcacttgccaggcgagtcaggacattagcaactatttaaattggtatcagcacaaaccagggagagccccgaaactcctgatctacgatgcgtccaatttggaaacaggggtcccatcaaggttcagtggaagtggatctgggacagattttactttcaccatcagcagcctgcagcctgaagatattgcaacatatttctgtcaacagtatgataatctccctcaaacgttcggccaagggaccaaggtggaaatcaaac

SEQ ID NO: 978 - DNA, 322 bp, Homo sapiens
gacatccagatgacccagtttccatcctccctgtctgcttctgtaggagacagagtcaccatcacttgccgggcaagtcacagcattagcagtcatttaaattggcatcagcaaaaaccagggaaagcccctaaggtcctgatctatgctgcatccagtttgcaaagtggggtcccatcaaggttcagtggcagtggatctgggacagatttcactctcaccatcagcagtctgcaacctgaagattttgcaacttactactgtcaacagacttacacctccccgtacaactttggccaggggaccaagctggagatcaaac

SEQ ID NO: 979 - DNA, 333 bp, Homo sapiens
cagtctgccctgactcagcctccctccgtgtccgggtctcctggacagtcagtcaccatctcctgcactggagccagcagtgacgttggtagttttaatcgtgtctcctggtaccagcagcccccaggcacagcccccaaagtcatgatttatgaggtcagtaatcggccctcaggggtccctgatcgcttctctgggtccaagtctggcaacacggcctccctgaccatctctgggctccaggctgaggacgaggctgattattactgcagctcatatagaagcagcagcacttttgtggtattcggcggagggaccaagctgaccgtccta

SEQ ID NO: 980 - DNA, 335 bp, Homo sapiens
cagtctgccctgactcagcctcgctcagtgtccgggtctcctggacagtcagtcaccatctcctgcactggaaccagcagtgatgttggtggttataactatgtctcctggtaccaacagcacccaggcaaagcccccaaactcatgatttatgatgtcagtaagcggccctcaggggtccctgatcgcttctctggctccaagtctggcaacacggcctccctgaccatctctgggctccaggctgaggatgaggctgattattactgctgctcatatgcaggcagctacacttccagtggtattcggcggagggaccaagctgaccgtcctag

SEQ ID NO: 981 - DNA, 331 bp, Homo sapiens
cagtctgccctgactcagcctgcctccgtgtctgggtctcctggacagtcgatcaccatctcctgcactggaaccagcagtgacgttggtggttataactatgtctcctggtaccaacaacacccaggcaaagcccccaaactcatgatttatgatgtcagtaatcggccctcaggggtttctaatcgcttctctggctccaagtctggcaacacggcctccctgaccatctctgggctccaggctgaggacgaggctgattattactgcagctcatatacaagcagcagcacaaaggtattcggcggagggaccaagctgaccgtcctag

SEQ ID NO: 982 - DNA, 325 bp, Homo sapiens
gaaattgtgttgacgcagtctccaggcaccctgtctttgtctccaggggaaagagccaccctctcctgcagggccagtcagagtgtcagcagcaactacttagcctggtaccagcagaaacctggccaggctcccaggctcctcatctatggtgcatccagcagggccactggcatcccagacaggttcagtggcagtgggtctgggacagacttcactctcaccatcagcagactggagcctgaagattttgcagtgtattactgtcagcagtatggtagctcacaggtcaccttcggccaagggacacgactggagattaaac

SEQ ID NO: 983 - DNA, 331 bp, Homo sapiens
cagtctgtgctgactcagccaccctcagcgtctgggacccccgggcagagggtcaccatctcttgttctggaagcagctccaacatcggaaggaatactgtgaactggtaccagcagctcccaggaacggcccccaaactcctcatctatagtaataatcagaggccctcagggatccctgaccgattctctgcctccaagtctggcacctcagcctccctggccatcagtgggctccagtctgaggatgaggctgattattactgtgcagcatgggatgacagcctgagtggtgtggtatttggcggagggaccagggtgaccgtcctag

SEQ ID NO: 984 - DNA, 334 bp, Homo sapiens
cagtctgtgctgacgcagccgccctcagtgtctggggccccagggcagagggtcaccatctcctgcactgggagcagctccaacatcggggcaggttatgatgtacactggtaccagcagcttccaggaacagcccccaaactcctcatctatggtaacagcaatcggccctcaggggtccctgaccgattctctggctccaactctggcacctcagcctccctggccatcactgggctccaggctgaggatgaggctgattattactgccagtcctatgacagcagcctgagtggttgggtgttcggcggagggaccaagctgaccgtcctag

SEQ ID NO: 985 - DNA, 340 bp, Homo sapiens
gacatcgtgatgacccagtctccagactccctggctgtgtctctgggcgagacggccaccatcaactgcaagtccagccagagtattttatacagctccaacaataagaactacttagcttggtaccagcagaaaccaggacagcctcctaggctgctcatttactgggcatctacccgggaatccggggtccctgaccgattcagtggcagcgggtctgggacagatttcactctcaccatcagcagcctgcaggctgaagatgtggcagtttattactgtcagcaatattatagtacttctctcactttcggcggagggaccaaggtggagatcaaac

SEQ ID NO: 986 - DNA, 321 bp, Homo sapiens
tcctatgagctgacacagccaccctcggtgtcagtgtccccaggacagacggccaggatcacctgctctggagatgcattgacaaagcaatatgcttattggtaccagcagaagccaggccaggcccctgtgctgctgatatataaagacagtgagaggccctcagggatccctgagcgattctctggctccagctcagggacaacagtcacgttgaccatcagtggagtccaggcagaagatgaggctgactattactgtcaatcagcagacagcagtgttgcttgggtgttcggcggagggaccaagctgaccgtccta

SEQ ID NO: 987 - DNA, 325 bp, Homo sapiens
gacatccagatgacccagtctccatcctccctgtctgcatctgtaggagacagagtcaccatcacttgccgggcaagtcagagcattagcagctatttaaattggtatcagcagaaaccagggaaagcccctaagctcctgatctatgctgcatccagtttgcaaagtggggtcccatcaaggttcagtggcagtggatctgggacagatttcactctcaccatcagcagtctgcaacctgaagattttgcaacttactactgtcaacagagttacagtatctcgggattcactttcggccctgggaccaaagtggatatcaaac

SEQ ID NO: 988 - DNA, 331 bp, Homo sapiens
cagtctgtgctgaatcagccaccctcggtgtctgaagcccccaggcagagggtcaccatctcctgttctggaagcagctccaacatcgaaaataatgctgtaaactggtaccagcagctcccaggaaaggctcccaaactcctcatctattatgatgatctgctgccctcaggggtctctgaccgattctctggctccaagtctggcacctcagcctccctggccatcagtgggctccagtctgaggatgaggctgattattactgtgcatcatgggatgacagcctgaatggtccggtgttcggcggagggaccaagctgaccgtcctag

SEQ ID NO: 989 - DNA, 326 bp, Homo sapiens
gacatccagatgacccagtctccatcctccctgtctgcatctgtaggagacagagtcaccatcacttgccgggcgagtcagggcattaccaattacttagcctggtatcagcggaaaccagggaaagttcctaacctcctgatctatgctgcatccactttgcaatcaggggtcccatctcggttcagtggcagtggatctgggacagacttcactctcaccatcagcagcctgcagcctgaagatgttgcaacttattactgtcaaaagaataacagtgccctcaaagatcaccttcggccaagggacacgactggagattaaac

SEQ ID NO: 990 - DNA, 335 bp, Homo sapiens
gatattgtgatgactcagtctccactctccctgcccgtcacccctggagagccggcctccatctcctgcaggtctagtcagagcctcctgcatactaatggatacaagtatttggattggtacctgcagaagccagggcagtctccacagctcctgatctatttgggttctaatcgggcctccggggtccctgacaggttcagtggcagtggatcaggcacagattttacactgaaaatcagcaaagtggaggctgaggatgttggggtttattactgcatgcaagctctacaaactcctcctcttcggccaagggacacgactggagattaaac

SEQ ID NO: 991 - DNA, 322 bp, Homo sapiens
gaaatagtgatgacgcagtctccagccgccctgtctgtgtctccaggggaaagagccaccctctcctgcagggccagtcagagtgctagcagcaacttagcctggtaccagcagaaacctggccaggctcccaggctcctcatctatggtgcatccaccagggccactggtatcccagccaggttcagtggcagtgggtctgggacagagttcactctcaccatcagcagcctgcagtctgaagattttgcagtttattactgtcagcagtataataactggccgatcaccttcggccaagggacacgactggagattaaac

SEQ ID NO: 992 - DNA, 330 bp, Homo sapiens
tcctatgtgctgactcagccaccctcggtgtcagtggccccaggacagacggccaggattacctgtgggggaaacaacattggaagtaatagtgtgcactggtaccagcagaagcccggccaggcccctgtgctggtcgtctatgatgatagcgaccggccctcagggatccctgagcgattctctggctccaactctgggaacacggccaccctgaccttcagcagggtcgaagccggggatgaggccgactattactgtcaggtgtgggattgtagtagtgatcatccgacgtggtattcggcggagggaccaaactgaccgtcctag

SEQ ID NO: 993 - DNA, 322 bp, Homo sapiens
gacatccagatgacccagtctccatcctcactgtctgcatctgtaggaaacagagtcaccatcacttgtcgggcgagtcagggcattagcaattatttagcctggtttcagcagaaaccagggaaagcccctaagtccctgatctatgatgcatccagtttgcaaagtggggtcccatcaaagttcagcggcaatggatctgggacagatttcactctcaccatcagcagcctgcaggcggaagattctgcaacttattactgccaacagtataagagttaccctctcactttcggcggggggaccaagctggagatcaaac

SEQ ID NO: 994 - DNA, 319 bp, Homo sapiens
tcctatgacctgactcagccaccctcagtgtccgtgtccccaggacagacagccagcatcacctgctctggagataaattggggtatagatatgtttgttggtatcagcagaagccaggccagtcccctgtcctagtcatctatcaagataccaagcggccctcagggatccctgagcgattctctggctccaactctgggaacacagccactctgaccatcagcgggacccaggctatggatgaggctgactattactgtcaggcgtgggacagtgacactgtggtcttcggcggagggaccaaactgaccgtcctag

SEQ ID NO: 995 - DNA, 322 bp, Homo sapiens
gaaactgtgttgacacagtctccagccaccctgtctttgtctccaggggaaagagccaccctctcctgcggggccagtcagagtgttagcaggtacttagcctggtaccaacagagacctggccaggctcccagcctcctcatctatgatgcatccaacagggccactggcatcccagccaggttcagtggcagtgggtctgggacagacttcactctcaccatcagcagcctagagcctgaggattttgcagtttattactgtcagcagcgtagcaactggccgtacacttttggccaggggaccaagctggagatcaaac

SEQ ID NO: 996 - DNA, 340 bp, Homo sapiens
gacatcgtgatgacccagtctccagactccctggctgtgtctctgggcgagagggccaccatcaactgcaagtccagccagagtattttaaacagctccaacaataagaactccttaacttggtaccagcagaaaccaggacagcctcctaagctgctcatttactgggcatctacccgggaatccggggtccctgaccgattcagtggcagcgggtctgggacagatttcactctcaccatcagcagcctgcaggctgaagatgtggcagtttattactgtcagcaatattatagtaatcccctcactttcggccctgggaccaaagtggatatcaaac

SEQ ID NO: 997 - DNA, 326 bp, Homo sapiens
tcctatgtgctgactcagccaccctcggtgtcagtggccccaggacagacggccaggattacctgtgggggaaacaacattggaagtaaaagtgtgcactggtaccagcagaagccaggccaggcccctgtgttggtcgtctatgatgatagcgaccggcccccagggatccctgagcgattctctggctccaactctgggaacacggccaccctgagcatcagcagggtcgaagtcggggatgaggccgactattactgtcagctgtgggatagtagtgctgatcatcagggggtattcggcggagggaccaaactgaccgtcct

SEQ ID NO: 998 - DNA, 322 bp, Homo sapiens
gacatccagatgacccagtctccatcctccctgtctgcatctgtaggagacagagtcaccatcacttgccgggcaagtcagagcatgagcacttatttaaattggtatcagcagaaagcagagaaagcccctaaactcctgatctacgctgcatccagtttgcaaagtggggtcccatcaaggttcagtggcagtggatctgggacagatttcactcttaccatcagcagtctgcaacctgaagattttgcaacttactactgtcaacagagttacagcatgccgtacacttttggccaggggaccaagctggaggtcaaac

SEQ ID NO: 999 - DNA, 325 bp, Homo sapiens
gaaattgtgttgacacagtctccagccaccctgtctttgtctccaggggaaagagccaccctctcctgcagggccagtcagagtgttagcagctacttagcctggtaccaacagaaacctggccaggctcccaggctcctcatctatgatgcatccaacagggccactggcatcccagccaggttcagtggcagtgggtctgggacagacttcactctcaccatcagcagcctagagcctgaagattttgcagtttattactgtcagcagcgtagcaactggcctccgtacacttttggccaggggaccaagctggagatcaaac

SEQ ID NO: 1000 - DNA, 322 bp, Homo sapiens
gacatccagatgacccagtctccatcctccctgtctgcatctgtaggagacagagtcaccatcacttgccaggcgagtcaggacattaacaaatatttaaattggtatcagcagaaaccagggaaagcccctaagctcctgatctacgatgcatccaatttggaaacaggggtcccatcaaggttcagtggaagtggatctgggacagattttactttcaccatcagcagcctgcagcctgaagatattgcaacatattactgtcaacagtatgataatctccccatcaccttcggccaagggacacgactggagattaaac

SEQ ID NO: 1001 - DNA, 319 bp, Homo sapiens
tcctatgagctgactcagccaccctcactgtccgtgtccccaggacagacagccagcatcacctgctctggagataaattgggggataaatatgcttgctggtatcagcagaagccaggccagtcccctgtgctggtcatctatgaagataacaagcggccctcagggatccctgagcggttctctggctccaactctgggaacacagccactctgaccatcagcgggacccagactatggatgaggctgactattactgtcagacgtgggacagcagcagtggggtcttcggaactgggaccaaggtcaccgtcctag

SEQ ID NO: 1002 - DNA, 318 bp, Homo sapiens
tcctatgagctgactcagccaccctcagtgtccgtgtccccaggacagacagccagcatcacctgctctggagataaattggggtatacatatgcttgctggtatcagcagaagccaggccagtcccctgtgctggtcatctatcaagatagcaagcggccctcagggatccctgagcgattctctggctccaactctgggaacacagcctctctgaccatcagcgggacccaggctatggatgaggctgactattactgtcaggcgtgggacagcagcactgtggtgttcggcggagggaccaagctgaccgtccta

SEQ ID NO: 1003 - DNA, 332 bp, Homo sapiens
cagtctgtgctgactcagccaccctcagcgtctgggacccccgggcagagggtcaccatctcttgttctggaagcagctccaacatcggaagtaatactgtaaactggtaccagcagctcccaggaacggcccccaaactcctcatctatagtaataatcagcggccctcaggggtccctgaccgattctctggctccaagtctggcacctcagcctccctggccatcagtgggctccagtctgaggatgaggctgattattactgtgcagcatgggatgacagcctgaatggtcctggtattcggcggagggaccaagctgaccgtcctag

SEQ ID NO: 1004 - DNA, 331 bp, Homo sapiens
cagtctgccctgactcagcctccctccgcgtccgggtctcctggacagtcagtcaccatctcctgcactggaaccagcagtgacgttggtggttataactatgtctcctggtaccaacagcacccaggcaaagcccccaaactcatgatttatgaggtcagtaagcggccctcaggggtccctgatcgcttctctggctccaagtctggcaacacggcctccctgaccgtctctgggctccaggctgaggatgaggctgattattactgcagctcatatgcaggcagcaacagttatgtcttcggaactgggaccaaggtcaccgtcctag

SEQ ID NO: 1005 - DNA, 331 bp, Homo sapiens
cagtctgccctgactcagcctgcctccgtgtctgggtctcctggacagtcgatcaccatctcctgcactggaaccagcagtgacgttggtggttataactatgtctcctggtaccaacagcacccaggcaaagcccccaaactcataatttatgaggtcagtaatcggccctcaggggtttctaatcgcttctctggctccaagtctggcaacacggcctccctgaccatctccgggctccaggctgaggacgaggctgattattactgcagctcatatacaagcagaaacactgtcgtattcggcggagggaccaagctgaccgtcctag

SEQ ID NO: 1006 - DNA, 325 bp, Homo sapiens
gaaatagtgatgacgcagtctccagccaccctgtctgtgtctccaggggaaagagccaccctctcctgcagggccagtcagagtgttagcagcaacttagcctggtaccagcagaaacctgggcaggctcccaggctcctcatctatggtgcatccaccagggccactggtatcccagccaggttcagtggcagtgggtctgggacagagttcactctcaccatcagcagcctgcagtctgaagattttgcagtttattactgtcagcagtataataactggcctccgtacacttttggccaggggaccaagctggagatcaaac

SEQ ID NO: 1007 - DNA, 331 bp, Homo sapiens
cagtctgccctgactcagcctcgctcagtgtccgggtctcctggacagtcagtcaccatctcctgcactggaaccagcagtgatgttggtggttataactatgtctcctggtaccaacagcacccaggcaaagcccccaaactcatgatttatgatgtcagtaagcggccctcaggggtccctgatcgcttctctggctccaagtctggcaacacggcctccctgaccatctctgggctccaggctgaggatgaggctgattattactgctgctcatatgcaggcagaccccctccggtgttcggcggagggaccaagctgaccgtcctag

SEQ ID NO: 1008 - DNA, 322 bp, Homo sapiens; identical to SEQ ID NO: 837

SEQ ID NO: 1009 - DNA, 319 bp, Homo sapiens
gacatccagatgacccagtctccatcctccctgtctgcatctgtaggagatagagtcaccatcacttgccgggcaagtcagagcattagtggctatttaaattggtatcaacataaagcagggaaagcccctaaactcctgatctatgctgcatccagtttgcaaagtggggtcccatcaaggttcagtggcagtggatctgggacagatttcactctcaccatcagcagtctgcaacctgaagattttgcaacttactactgtcaacagagttacagtacccccgtttttggccaggggaccaagctggagatcaaac

SEQ ID NO: 1010 - DNA, 322 bp, Homo sapiens
gacatccagatgacccagtctccatcctccctgtctgcatctgtaggagacagagtcaccatcacttgccgggcaagtcagagcattagcagctttttaaattggtatcagcagaaaccagggaaagcccctaagctcctgatctatgctgcatccaatttgcaaagtggggtcccatcaaggttcggtggcagtggatctgggacagatttcactctcaccatcagcagtctgcaacctgaagactttgcaacttactactgtcaacagagttacagtacccccgcgacgttcggccaagggaccaaggtggaaatcaaac

SEQ ID NO: 1011 - DNA, 340 bp, Homo sapiens
cagtctgccctgactcagcctgcctccgtgtctgggtctcctggacagtcgatcaccatctcctgcactggaaccagcagtgatgttgggagttataaccttgtctcctggtaccaacagcacccaggcaaagcccccaaactcatgatttatgagggcagtaagcggccctcaggggtttctaatcgcttctctggctccaagtctggcaacacggcctccctgacaatctctgggctccaggctgaggacgaggctgattattactgctgctcatatgcaggtagtagcactttctcccatgtggtattcggcggagggaccaagctgaccgtcctag

SEQ ID NO: 1012 - DNA, 340 bp, Homo sapiens
gacatcgtgatgacccagtctccagactccctggctgtgtctctgggcgagagggccaccatcaactgcaagtccagccagactgttttatacagctccaacaataagaactacttaggttggttccagaagaaaccaggacagcctcctaaattgctcatttactgggcatctacccgggaatccggggtccctgaccgattcagtggcagcgggtctgggacagatttcactctcaccatcagcagcctgcaggctgaagatgtggcagtttattactgtcaacaatattatagtcctccttggacgttcggccaagggaccaaggtggaaatcaaac

SEQ ID NO: 1013 - DNA, 322 bp, Homo sapiens
tcctatgagctgactcagccaccctcagtgtccgtgtccccaggacagacagccagcatcacctgctctggagataaattgggggataaatatgcttgctggtatcagcagaagccaggccagtcccctgtgctggtcatctatcaagatagcaagcggccctcagggatccctgagcgattctctggctccaactctgggaacacagccactctgaccatcagcgggacccaggctatggatgaggctgactattactgtcaggcgtgggacagcagcactgccgtggtattcggcggagggaccaagctgaccgtcctag

SEQ ID NO: 1014 - DNA, 325 bp, Homo sapiens
gacatccagatgacccagtctccatcctccctgtctgcatctgtaggagacagagtcaccatcacttgccaggcgagtcaggacattagcaactatttaaattggtatcagcagaaaccagggaaagcccctaagctcctgatctacgatgcatccaatttggaaacaggggtcccatcaaggttcagtggaagtggatctgggacagattttactttcaccatcagcagcctgcagcctgaagatattgcaacatattactgtcaacagtatgataatctcccccgaatcgccttcggccaagggacacgactggagattaaac

SEQ ID NO: 1015 - DNA, 325 bp, Homo sapiens
tcctatgtgctgactcagccaccctcagtgtcagtggccccaggaaagacggccaggattacctgtgggggaaacaacattggaagtaaaagtgtgcactggtaccagcagaagccaggccaggcccctgtgctggtcgtctatgatgatagcgaccggccctcagggatccctgagcgattctctggctccaactctgggaacacggccaccctgaccatcagcagggtcgaagccggggatgaggccgactattactgtcaggtgtgggatagtagtagtgatccttatgtcttcggaactgggaccaaggtcaccgtcctag

SEQ ID NO: 1016 - DNA, 319 bp, Homo sapiens
gtcatctggatgacccagtctccatcctttctctctgcatctacaggagacagagtcaccatcagttgtcggatgagtcagggcattagcagttatttagcctggtatcagcaaaaaccagggaaagcccctgagctcttgatctatgatgcatccactttgcagagtggggtcccatcacggttcagtggcagtggatctgggacagatttcactctcaccatcagttgcctgcagtctgaagattttgcaagttattactgtcaacagtattaaaatttcccccctttcggcggagggaccaaggtggagatcaaac

SEQ ID NO: 1017 - DNA, 331 bp, Homo sapiens
cagtctgccctgactcagcctcgctcagtgtccgggtctcctggacagtcagtcaccatctcctgcactggaaccagcagtgatgttggtggttataactatgtctcctggtaccaacagcacccaggcaaagcccccaaactcatgatttatgatgtcagtaagcggccctcaggggtccctgatcgcttctctggctccaagtctggcaacacggcctccctgaccatctctgggctccaggctgaggatgaggctgattattactgctgctcatatgcaggcagctacactttggtgttcggcggagggaccaagctgaccgtcctag

SEQ ID NO: 1018 - DNA, 337 bp, Homo sapiens
gatattgtgatgactcagtctccactctccctgcccgtcacccctggagagccggcctccatctcctgcaggtctagtcagagcctcctgcatagtaatagatacaactatttggattggtacctgcagaagccagggcagtctccacagctcctgatctatttgggttctaatcgggcctccggggtccctgacaggttcagtggcagtggatcaggcacagattttacactgaaaatcagcagagtggaggctgaggatgttggggtttattactgcatgcaagctctccaaactctgtggacgttcggccaagggaccaaggtggaaatcaaac

SEQ ID NO: 1019 - DNA, 330 bp, Homo sapiens
cagtctgtgctgactcagccaccctcagcgtctgggacccccgggcagagggtcaccatctcttgttctggaagcagctccaacatcggaagtcatactgtaaattggtaccagcaactcccaggaacggcccccaaactcctcatctataataatgatcagcggccctcaggggtccctgaccgattctctggctccaagtctggcacctcagcctccctggccatcagtgggctccagtctgaggatgaggctcattattactgtgcagcatgggatgacagcctgaatggtggggtgttcggcggagggaccaagctgaccgtccta

SEQ ID NO: 1020 - DNA, 330 bp, Homo sapiens
cagtctgtgctgactcagccaccctcagcgtctgggacccccgggcagagggtcaccatctcttgttctggaagcagctccaacatcggaagtattactgtaaactggtaccagcaactcccaggaacggcccccaaactcctcatctataataataatcagcggccctcaggggtccctgaccgattctctggctccaagtctggcacctcagcctccctggccatcagtgggctccagtctgaggatgaggctgattattactgtgcagcatgggatgacagcctgaatggtggggtgttcggcggagggaccaagctgaccgtccta

SEQ ID NO: 1021 - DNA, 331 bp, Homo sapiens
cagtctgtgttgacgcagccgccctcagtgtctgcggccccaggacagaaggtcaccatctcctgctctggaagcagctccaacattgggaataattatgtatcctggtaccagcagctcccaggaacagcccccaaactcctcatttatgacaataataagcgaccctcagggattcctgaccgattctctggctccaagtctggcacgtcagccaccctgggcatcaccggactccagactggggacgaggccgattattactgcggaacatgggatagcagcctgagtgctgtggtattcggcggagggaccaagctgaccgtcctag

SEQ ID NO: 1022 - DNA, 337 bp, Homo sapiens
cagtctgccctgactcagcctcgctcagtgtccgggtctcctggacagtcagtcaccatctcctgcactggcaccagcagtgatgttggtgcttatgaccatgtctcctggtaccaacaacacccaggcaaagcccccaaagtcatgatttatgatgtcagtaagcggccctcaggggtccctgatcgcttctctggctccaagtctggctacacggcctccctgaccatcactgggctccaggctgaggatgaggctgattattactgctgctcatatacaggcagctacgctttcctttatgtcttcggaagtgggaccaaggtcaccgtcctag

SEQ ID NO: 1023 - DNA, 319 bp, Homo sapiens
gacatccagatgacccagtctccttccaccctgtctgcatctgtaggagacagagtcaccatcacttgccgggccagtcagaatattaatagctggttggcctggtatctgcagaaaccagggaaagcccctaagctcctgatctataaggcgtctactttagaaagtggggtcccatcaaggttcagcggcagtggatctgggacagaattcactctcatcatcagcagcctgcagcctgatgattttgctacttattactgccaacagtattatagttggtggacgttcggccaagggaccaaggtggaaatcaaac

SEQ ID NO: 1024 - DNA, 334 bp, Homo sapiens
cagtctgccctgactcagcctgcctccgtgtctgggtctcctggacagtcgatcaccatctcctgcactggaaccagcagtgacgttggtggttataactatgtctcctggtaccaacagcacccaggcaaagcccccaaactcatgatttatgaggtcagtaatcggccctcaggggtttctaatcgcttctctggctccaagtctggcaacacggcctccctgaccatctctgggctccaggctgaggacgaggctgattattactgcagctcatatacaagcagcagcactctcgaagtcttcggaactgggaccaaggtcaccgtcctag

SEQ ID NO: 1025 - DNA, 334 bp, Homo sapiens
caggttgtgctgactcaatcgccctctgcctctgcctccctgggagcctcggtcaagctcacctgcactctgagcagtgggcacagcaactacgccatcgcctggcatcagcaccagccagagacgggccctcgatacttgatgaagcttaacagtgatggcagctatacgaaaggggacggggtccctgagcgcttctcaggctccagctctggggctgagcgcttcctcatcatctccagcctccagtctgaggatgaggctgactattactgtcagacctggggcactgacattcatgtcttcggaactgggaccaaggtcaccgtcctag

SEQ ID NO: 1026 - DNA, 325 bp, Homo sapiens
gacatccagatgacccagtctccatcctccctgtctgcatctgtaggagacagagtcaccatcacttgccgggcaagtcagagcattagtagctatttaaattggtattcgcagaaaccagggaaagcccctaagctcctgatctatgctgcatccagtttgcaaagtggggtcccatcaaggttcagtggcagtggatctgggacagatttcactctcaccatcagcagtctgcaacctgaagattttgcaacttactactgtcaacagagttacaatacccctccctggacgttcggccaagggaccaaggtggaaatcaaac

SEQ ID NO: 1027 - DNA, 334 bp, Homo sapiens
cagtctgccctgactcagcctgcctccgtgtctgggtctcctggacagtcgatcaccatctcctgcactggaaccagcagtgacgttggtggtgataactatgtctcctggtaccaacaacacccaggcaaagcccccaaactcatgatttctgatgtcagtaatcggccctcaggggtttctaatcgcttctctggctccaagtctggcaacacggcctccctgaccatctctgggctccaggctgaggacgaggctgactattactgcagctcatatacaagcagcagcaccccttgggtgttcggcggagggaccaagctgaccgtcctag

SEQ ID NO: 1028 - DNA, 328 bp, Homo sapiens
gaaattgtgttgacgcagtctccaggcaccctgtctttgtctccaggggaaagagccaccctctcctgcagggccagtcagagtgttagcagcagctacttagcctggtaccagcagaaacctggccaggctcccaggctcctcatctatggtgcatccagcagggccactggcatcccagacaggttcagtggcagtgggtctgggacagacttcactctcaccatcagcagactggagcctgaagattttgcagtgtattactgtcagcagtatggtagctcacctatgtacacttttggccaggggaccaagctggagatcaaac

SEQ ID NO: 1029 - DNA, 334 bp, Homo sapiens
cagtctgccctgactcagcctgcctccgtgtctgggtctcctggacagtcgatcaccatctcctgcactggaaccagcagtgacgttggtggttataactatgtctcctggtaccaacaacacccaggcaaagcccccaaactcatgatttatgatgtcagtaatcggccctcaggggtttctaatcgcttctctggctccaagtctggcaacacggcctccctgaccatctctgggctccaggctgaggacgaggctgattattactgcagctcatatacaagcagcagcactctcgtggtattcggcggagggaccaagctgaccgtcctag

SEQ ID NO: 1030 - DNA, 325 bp, Homo sapiens
gacatccagatgacccagtctccatcctccctgtctgcatctgtaggagacagagtcaccatcacttgccgggcaagtcagagcattaggaactatttaaattggtatcagcagaaaccagggaaagcccctaagctcctgatctatgctgcatccagtttgcaaactggggtcccatcaaggtttagtggcagtggatctgggacagatttcactctcaccatcagcagtctgcaacctgaagattttggaaattactactgtcaacagagttacggtacccctccgtggacgttcggccaagggaccaaggtggaaatcaaac

SEQ ID NO: 1031 - DNA, 331 bp, Homo sapiens
cagtctgtgctgactcagccaccctcagcgtctggtacccccgggcagagggtcaccatctcttgttctggaagcagctccaacatcggaagtaattatgtatactggtaccagcagctcccaggaacggcccccaaactcctcatctataggaataatcagcggccctcaggggtccctgaccgattctctggctccaagtctggcacctcagcctccctggccatcagtgggctccggtccgaggatgaggctgattattactgtgcagcatgggatgacagcctgagtggttatgtcttcggaactgggaccaaggtcaccgtcctag

SEQ ID NO: 1032 - DNA, 325 bp, Homo sapiens
gaaatagtgatgacgcagtctccagccaccctgtctgtgtctccaggggaaagagccaccctctcctgcagggccagtcagagtgttaggagcaacttagcctggtaccagcagaaacctgggcaggctcccaggctcctcatctatggtgcatccaccagggccactggtatcccagccaggttcagtggcagtgggtctgggacagagttcactctcaccatcagcagcctgcagtctgaagattttgcagtttattactgtcagcagtataataactggcctccgctcactttcggcggagggaccaaggtggagatcaaac

SEQ ID NO: 1033 - DNA, 331 bp, Homo sapiens
cagtctgccctgactcagcctgcctccgtgtctgggtctcctggacagtcgatcaccatctcctgcactggaaccagcagtgatgttgggagttataacgttgtctcctggtaccaacagcacccaggcaatgcccccaaactcatgatttatgaggtcaataagcggccctcaggggtttcttatcgcttctctggctccaagtctggcaacacggcctccctgacaatctctgggctccaggctgaggacgaggctgattattactgctgctcatatgcaggtagtagcacttatgtcttcggaactgggaccaaggtcaccgtcctag

SEQ ID NO: 1034 - DNA, 322 bp, Homo sapiens
gaaattgtgttgacgcagtctccaggcaccctgtctttgtctccaggggacagagccaccctctcctgcagggccagtcagagtgttagcagcaggtacttagcctggtaccagaagaaacctggccaggctcccaggctcctcatctatggtgcatccagcagggccactggcatcccagacaggttcagtggcagtgggtctgggacagacttcactctcaccatcagcagactggagcctgaagattttgcagtatattactgtcagcagtatggtagctcactcactttcggcggagggaccaaggtggagatcaaac

SEQ ID NO: 1035 - DNA, 316 bp, Homo sapiens
gacatccagatgacccagtctccttccaccctgtctgcatctgtaggagacagagtcaccatcacttgccgggccagtcagagtattagtcgctggttggcctggtatcagcagaaaccagggaaagcccctaagctcctgatctataaggcgtctagtttagaaagtggggtcccatcaaggttcagcggcagtggatctgggacagaattcactctcaccatcagcagcctgcagcctgatgattttgcaacttattactgccaacagtataatagttattcgttcggccaagggaccaaggtggaaatcaaac

SEQ ID NO: 1036 - DNA, 319 bp, Homo sapiens
gacatccagatgacccagtctccttccaccctgtctgcatctgtaggagacagagtcaccatcacttgccgggccagtcagagtattagtacctggttggcctggtatcagcagaaaccagggaaagcccctaagctcctgatctataaggcgtctagtttagaaagtggggtcccatcaaggttcagcggcagtggatctgggacagaattcactctcaccatcagcagcctgcagcctgatgattttgcaacttattactgccaacagtataatagttattggacgttcggccaagggaccaaggtggaaatcaaac

SEQ ID NO: 1037 - DNA, 322 bp, Homo sapiens
gacatccagatgacccagtctccatcctccctgtctgcatctgtaggagacagagtcaccatcacttgccgggcaagtcagagcattagcagctatttaaattggtatcagcagaaaccagggaaagcccctaagctcctgatctatgctgcatccagtttgcaaagtggggtcccatcaaggttcagtggcagtggatctgggacagatttcactctcaccatcagcagtctgcaacctgaagattttgcaacttactactgtcaacagagttacagtacccctaagacgttcggccaagggaccaaggtggaaatcaaac

SEQ ID NO: 1038 - DNA, 323 bp, Homo sapiens
gacatccagatgacccagtctccatcctccctgtctgcatctgtaggggacagagtcaccatcacttgccaggcgagtcaggccattagcaactatttaaattggtatcagcagaaaccagggaaagcccctaagctcctgatctacgatgcatccaatttggaaacaggggtcccatcaaggttcagtggaagtggatctgggacagattttactttcaccatcagcagcctgcagcctgaagatgttgcaacatattactgtcaacagtataataatctcctttcgctcactttcggcggagggaccaaggtggagatcaa

SEQ ID NO: 1039 - DNA, 322 bp, Homo sapiens
tcttctgaactgactcaggacccggctgtgtctgtggccctgggacagacagtcaacatcacatgccaaggggacagactcagaagttattctgcaagttggtatcaaaagaagccaggactggcccctgttcttgtcatctatggcaaaaataatcggccctcagggatctcggcccgattctctggctccagctcaggaaacacagcttccttgattatcacaggggctcaggcggaagatgaggccgactattattgcagttcccgggccactagtggaaacccctcattcggcggcgggaccgtgttgaccgtcctag

SEQ ID NO: 1040 - DNA, 319 bp, Homo sapiens
gacatccagatgacccagtctccttccaccctgtctgcatctgtaggagacagagtcaccatcacttgccgggccagtcagagtattagtaggtggttggcctggtatcagcagaaaccagggaaagcccctaaggtcctgatctataaggcgtctagtttagaaggtggggtcccatcaaggttcagcggcagtggatctgagacagagttcactctcaccatcagcagcctgcagcctgatgattttgcaacttattactgccaacagtatgatagttattggacgttcggccaagggaccaaggtggaaatcaaac

SEQ ID NO: 1041 - DNA, 337 bp, Homo sapiens
gacatcgtgatgacccagtctccagactccctggctgtgtctctgggcgagagggccaccatcaactgcaagtccagccagagtgttttatacagctccaacaataagaactacttagcttggtaccagcagaaaccaggacagcctcctaagctgctcatttactgggcatctacccgggaatccggggtccctgaccgattcagtggcagcgggtctgggacagatttcactctcaccatcagcagcctgcaggctgaagatgtggcagtttattactgtcagcaatattatagtactccgacgttcggccaagggaccaaggtggaaatcaaac

SEQ ID NO: 1042 - DNA, 334 bp, Homo sapiens
cagtctgccctgactcagcctgcctccgtgtctgggtctcctggacagtcgatcaccatctcctgcactggaaccagcagtgatgttgggagttataaccttgtctcctggtaccaacagcacccaggcaaagcccccaaactcatgatttatgagggcagtaagcggccctcaggggtttctaatcgcttctctggctccaagtctggcaacacggcctccctgacaatctctgggctccaggctgaggacgaggctgattattactgctgctcatatgcaggtagtagcatcccctatgtcttcggaactgggaccaaggtcaccgtcctag

SEQ ID NO: 1043 - DNA, 328 bp, Homo sapiens
caggctgaggtgactcaggagccctcactgactgtgtccccaggagggacagtcactctcacctgtggccccagcactggggctgtcaccagtggtcattatccctactggttccagcagaagcctggccaagcccccaggacactgatttatgatataagcaacaaacactcctggacacctgcccggttctcaggctccctccttgggggcaaagctgccctgaccctttcgggtgcgcagcctgaggatgaggctgagtattactgcttgctctcctatagtggtgctcccgtgttcggcggagggaccaagctgaccgtcctag

SEQ ID NO: 1044 - DNA, 322 bp, Homo sapiens; identical to SEQ ID NO: 897

SEQ ID NO: 1045 - DNA, 321 bp, Homo sapiens
gacatccagatgacccagtctccatcctccctgtctgcatctgtaggagacagagtcaccatcacttgccgggcaagtcagagcattagcagctatttaaattggtatcagcagaaaccagggaaagcccctaagctcctgatctatgctgcatccagtttgcaaagtggggtcccatcaaggttcagtggcagtggatctgggacagatttcactctcaccatcagcagtctgcaacctgaagattttgcaacttactactgtcaacagagttacagtacccctccactttcggcggagggaccaaggtggagatcaaac

SEQ ID NO: 1046 - DNA, 322 bp, Homo sapiens
gacatccagatgacccagtctccatcctccctgtctgcatctgtaggagacagagtcaccatcacttgccgggcaagtcagagcattagaagctatttaaattggtatcagcagaaaccagggaaagcccctaaactcctgatctttgctgcatccagtttgctaagtggggtcccatcaaggttcagtggcagtggatctgggacagatttcactctcaccatcagcagtctgcaacctgaagattttgcaacttactactgtcaacagagttacagtacccctcaatcttttggccaggggaccaagctggagatcaaac

SEQ ID NO: 1047 - DNA, 325 bp, Homo sapiens; identical to SEQ ID NO: 903

SEQ ID NO: 1048 - DNA, 325 bp, Homo sapiens
gacatccagatgacccagtctccatcctccctgtctgcatctgtaggagacagagtcaccatcacttgccgggcaagtcagagcattagcagctatttaaattggtatcagcagaaaccagggaaagcccctaaactcctgatctatgctgcatccagtttgcaaagtggggtcccatcaaggttcagtggccgtggatctgggacagatttcactctcaccatcagcagtctgcaacctgaagattttgcaacttacttctgtcaacagagttacactatgcctccgatcaccttcggccaagggacacgactggagattaaac

SEQ ID NO: 1049 - DNA, 322 bp, Homo sapiens
gacatccagatgacccagtctccatcctccctgtctgcatctgtaggagacagagtcaccatcacttgccaggcgagtcaggacattagcaactatttaaattggtatcagcagaaaccagggaaagcccctaagctcctgatctacgatgcatccaatttggaaacaggggtcccatcaaggttcagtggaagtggatctgggacagattttactttcaccatcagcagcctgcagcctgaagatattgcaacatattactgtcaacagtatgataatctccctcccactttcggcggagggaccaaggtggagatcaaac

SEQ ID NO: 1050 - DNA, 340 bp, Homo sapiens
cagtctgtgctgacgcagccgccctcagtgtctggggccccagggcagagggtcaccatctcctgcactgggagcagctccaacatcggggcaggttatgatgtacactggtaccagcagcttccaggaacagcccccaaactcctcatctatggtaacagcaatcggccctcaggggtccctgaccgattctctggctccaagtctggcacctcagcctccctggccatcactgggctccaggctgaggatgaggctgattattactgccagtcctatgacagcagcctgagtggatcctcttatgtcttcggaactgggaccaaggtcaccgtcctag

SEQ ID NO: 1051 - DNA, 322 bp, Homo sapiens
gacatccagatgacccagtctccatcctccctgtctgcatctgtaggagacagagtcaccatcacttgccgggcaagtcagagcattagcatctatttaaattggtatcagcagaaaccagggaaagcccctaagctcctgatctatgctgcatccagtttgcaaagtggggtcccatcaaggttcagtggcagtggatctgagacagaattcactctcaccatcagcagtctgcaacctgaagattgtgcaacttactactgtcaacagagttacagtacctcgtggacgttcggccaagggacccaggtggaaatcaaac

SEQ ID NO: 1052 - DNA, 322 bp, Homo sapiens
gaaattgtgttgacacagtctccagccaccctgtctttgtctccaggggaaagagccaccctctcctgcagggccagtcagagtgttagcagctacttagcctggtaccaacagaaacctggccaggctcccaggctcctcatctatgatgcatccaacagggccactggcatcccagccaggttcagtggcagtgggtctgggacagacttcactctcaccatcagcagcctagagcctgaagattttgcagtttattactgtcagcagcgtagcaactggcccctcactttcggcggagggaccaaggtggagatcaaac

SEQ ID NO: 1053 - DNA, 322 bp, Homo sapiens
gacatccagatgacccagtctccatcctcactgtctgcatctgtaggagacagagtcaccatcacttgtcgggcgagtcagggcattagcaattatttagcctggtttcagcagaaaccagggaaagcccctaagtccctgatctatgctgcatccagtttgcaaagtggggtcccatcaaagttcagcggcagtggatctgggacagatttcactctcaccatcagcagcctgcagcctgaagattttgcaacttattactgccaacagtataatagttacccgtggacgttcggccaagggaccaaggtggaaatcaaac

SEQ ID NO: 1054 - DNA, 322 bp, Homo sapiens
gaaattgtgttgacacagtctccagccaccctgtctttgtctccaggggaaagagccaccctctcctgcagggccagtcagagtgttagcagctacttagcctggtaccaacagaaacctggccaggctcccaggctcctcatctatgatgcatccaacagggccactggcatcccagccaggttcagtggcagtgggtctgggacagacttcactctcaccatcagcagcctagagcctgaagattttgcagtttattactgtcagcagcgtagcaactggcctcccactttcggcggagggaccaaggtggagatcaaac

SEQ ID NO: 1055 - DNA, 325 bp, Homo sapiens
gacatccagatgacccagtctccatcctccctgtctgcatctgtaggagacagagtcaccatcacttgccgggcaagtcagagcattagcagctatttaaattggtatcagcagaaaccagggaaagcccctaagctcctgatctatgctgcatccagtttgcaaagtggggtcccatcaaggttcagtggcagtggatctgggacagatttcactctcaccatcagcagtctgcaacctgaagattttgcaacttactactgtcaacagagttacagtacccccacgtggacgttcggccaagggaccaaggtggaaatcaaac

SEQ ID NO: 1056 - DNA, 331 bp, Homo sapiens
cagtctgccctgactcagcctccctccgcgtccgggtctcctggacagtcagtcaccatctcctgcactggaaccagcagtgacgttggtggttatgcctatgtctcctggtaccaacagcacccaggcaaagcccccaaactcatgatttctgaggtcagtaagcggccctcaggggtccctgatcgcttctctggctccaagtctggcaacacggcctccctgaccgtctctgggctccaggctgaggatgaggctgattattactgcagctcatatgcaggcagcaacaatttggtgttcggcggagggaccaagctgaccgtcctag

SEQ ID NO: 1057 - DNA, 322 bp, Homo sapiens
gacatccagatgacccagtctccatcctccctgtctgcatctgtaggagacagagtcaccatcacttgccaggcgagtcaggacattaacaagtatttaaattggtatcagcagaaaccagggaaagcccctaagctcctgatctacgatgcatccaatttggaaacaggggtcccatcaaggttcagtggaagtggatctgggacagattttactttcaccatcagcagcctgcagcctgaagatattgcaacatattactgtcatcagtatgataatctccctccgcatttcggcggagggaccaaggtggagatcaaac

SEQ ID NO: 1058 - DNA, 322 bp, Homo sapiens
gacatccagatgacccagtctccagcctccctgtctgcatctgtaggagacagagtcaccatcacttgccaggcgagtcaggacattaacaagtatttaaattggtatcagcagaaaccagggaaagcccccaagctcctgatctacgatgcatccaatttggaaacaggggtcccttcaaggttcagtggaagtggatctgggacagattttactttcaccatcagcagcctgcagcctgaagatattgcaacatattactgtcaacagtatgataatctccctcgaactttcggccctgggaccaaagtggatatcaaac

SEQ ID NO: 1059 - DNA, 322 bp, Homo sapiens
gacatccagatgacccagtctccatcctccctgtctgcatctgtaggagacagagtcaccatcacttgccaggcgagtcaggacattagcaactatttaaattggtatcagcagaaaccagggaaagcccctaagctcctgatctacgatgcatccaatttggaaacaggggtcccatcaaggttcagtggaagtggatctgggacagattttactttcaccatcagcagcctgcagcctgaagatattgcaacatattactgtcaacagtatgataatctccctccttcttttggccaggggaccaagctggagatcaaac

SEQ ID NO: 1060 - DNA, 322 bp, Homo sapiens
gacatccagatgacccagtctccatcctccctgtctgcatctgtaggagacagagtcaccatcacttgccaggcgagtcaggacattaataagtatttaaattggtatcagcagaaaccagggaaagcccctaagctcctgatctacgatgcatccaatttggaaacaggggtcccatcaaggttcagtggaagtggatctgggacagattttactttcaccatcagcagcctgcagcctgaagacattgcaacatattactgtcaacagtatgataatctccctccgaccttcggccaagggacacgactggagattaaac

SEQ ID NO: 1061 - DNA, 325 bp, Homo sapiens
gacatccagatgacccagtctccatcctccctgtctgcatctgtaggagacagagtcaccatcacttgccgggcaagtcagagcattagcagctatttaaattggtatcagcagaaaccagggaaagcccctaagctcctgatctatgctgcatccagtttgcaaagtggggtcccatcaaggttcagtggcagtggatctgggacagatttcactctcaccatcagcagtctgcaacctgaagattttgcaacttactactgtcaacagagttacagtacccccttattcactttcggccctgggaccaaagtggatatcaaac

SEQ ID NO: 1062 - DNA, 328 bp, Homo sapiens
gaaattgtgttgacgcagtctccaggcaccctgtctttgtctccaggggaaagagccaccctctcctgcagggccagtcagactgttagcagcagctacttagcctggtaccagcagaaacctggccaggctcccaggctcctcatctatggtgcatccggcagggccactggcatcccagacaggttcagtggcagtgggtctggggcagacttcactctcaccatcagcagactggagcctgaagattttgcagtgtattactgtcagcagtatggtagctcacctccgggcactttcggcggagggaccaaggtggagatcaaac

SEQ ID NO: 1063 - DNA, 376 bp, Homo sapiens
gaggtgcagctgttggagtctgggggaggcttgatacagcctggggggtccctgagactctcctgtgcagcctctggattcaccttcaccacctatgccatgagctgggtccgccaggctccagggaaggggctggagtgggtctcagctattagtggtagtagtactagaatattttacgcagactccgtgaagggccggttcaccatctccagagacaattccaagaacacgctgtatctgctactgaacagcctgagagccgaggacacggccgtatattactgtgcgaaagccgcgcaggtgtatcagtatgatagtagtggtcatcccattgactactggggccagggaacccaggtcaccgtctcctcag

SEQ ID NO: 1064 - DNA, 376 bp, Homo sapiens
gaggtgcagctgttggagtctgggggaggcttgatacagcctggggggtccctgagactctcctgtgcagcctctggattcaccttcagcacctatgccatgagctgggtccgccaggctccagggaaggggctggagtgggtctcagctattagtggtagtagtactagaatattctacgcagactccgtgaagggccggttcaccatctccagagacaattccaagaacacgctatatctgctactgaacagcctgagagccgaggacacggccgtatattactgtgcgaaagccgcgcaggtgtatcagtatgatagtagtggtcatcccattgactactggggccagggaacccaggtcaccgtctcctcag

SEQ ID NO: 1065 - DNA, 376 bp, Homo sapiens
gaggtgcagctgttggagtctgggggaggcttgatacagcctggggggtccctgagactctcctgtgcagcctctggattcaccttcaccacctatgccatgagctgggtccgccaggctccagggaaggggctggagtgggtctcagctattagtggtagtagtactagaatattctacgcagactccgtgaagggccggttcaccatctccagagacaattccaagaacacgctgtatctgctactgaacagcctgagagccgaggacacggccgtatattactgtgcgaaagccgcgcaggtgtatcagtatgatagtagtggtcatcccattgactactggggccagggaacccaggtcaccgtctcctcag

SEQ ID NO: 1066 - DNA, 376 bp, Homo sapiens; identical to SEQ ID NO: 1063

SEQ ID NO: 1067 - DNA, 376 bp, Homo sapiens; identical to SEQ ID NO: 1063

SEQ ID NO: 1068 - DNA, 376 bp, Homo sapiens; identical to SEQ ID NO: 1065

SEQ ID NO: 1069 - DNA, 376 bp, Homo sapiens; identical to SEQ ID NO: 1065

SEQ ID NO: 1070 - DNA, 376 bp, Homo sapiens; identical to SEQ ID NO: 1065

SEQ ID NO: 1071 - DNA, 376 bp, Homo sapiens; identical to SEQ ID NO: 1063

SEQ ID NO: 1072 - DNA, 376 bp, Homo sapiens; identical to SEQ ID NO: 1065

SEQ ID NO: 1073 - DNA, 376 bp, Homo sapiens; identical to SEQ ID NO: 1065

SEQ ID NO: 1074 - DNA, 376 bp, Homo sapiens; identical to SEQ ID NO: 1065

SEQ ID NO: 1075 - DNA, 376 bp, Homo sapiens; identical to SEQ ID NO: 1065

SEQ ID NO: 1076 - DNA, 376 bp, Homo sapiens; identical to SEQ ID NO: 1065

SEQ ID NO: 1077 - DNA, 376 bp, Homo sapiens; identical to SEQ ID NO: 1065

SEQ ID NO: 1078 - DNA, 376 bp, Homo sapiens; identical to SEQ ID NO: 1065

SEQ ID NO: 1079 - DNA, 376 bp, Homo sapiens; identical to SEQ ID NO: 1065

SEQ ID NO: 1080 - DNA, 376 bp, Homo sapiens; identical to SEQ ID NO: 1065

SEQ ID NO: 1081 - DNA, 376 bp, Homo sapiens; identical to SEQ ID NO: 1063

SEQ ID NO: 1082 - DNA, 376 bp, Homo sapiens; identical to SEQ ID NO: 1064

SEQ ID NO: 1083 - DNA, 376 bp, Homo sapiens; identical to SEQ ID NO: 1065

SEQ ID NO: 1084 - DNA, 376 bp, Homo sapiens; identical to SEQ ID NO: 1065

SEQ ID NO: 1085 - DNA, 376 bp, Homo sapiens; identical to SEQ ID NO: 1065

SEQ ID NO: 1086 - DNA, 376 bp, Homo sapiens; identical to SEQ ID NO: 1065

SEQ ID NO: 1087 - DNA, 376 bp, Homo sapiens; identical to SEQ ID NO: 1065

SEQ ID NO: 1088 - DNA, 376 bp, Homo sapiens; identical to SEQ ID NO: 1064

SEQ ID NO: 1089 - DNA, 376 bp, Homo sapiens; identical to SEQ ID NO: 1064

SEQ ID NO: 1090 - DNA, 376 bp, Homo sapiens; identical to SEQ ID NO: 1065

SEQ ID NO: 1091 - DNA, 376 bp, Homo sapiens; identical to SEQ ID NO: 1065

SEQ ID NO: 1092 - DNA, 376 bp, Homo sapiens; identical to SEQ ID NO: 1065

SEQ ID NO: 1093 - DNA, 376 bp, Homo sapiens; identical to SEQ ID NO: 1065

SEQ ID NO: 1094 - DNA, 376 bp, Homo sapiens; identical to SEQ ID NO: 1065

SEQ ID NO: 1095 - DNA, 376 bp, Homo sapiens; identical to SEQ ID NO: 1065

SEQ ID NO: 1096 - DNA, 376 bp, Homo sapiens; identical to SEQ ID NO: 1065

SEQ ID NO: 1097 - DNA, 376 bp, Homo sapiens; identical to SEQ ID NO: 1065

SEQ ID NO: 1098 - DNA, 376 bp, Homo sapiens; identical to SEQ ID NO: 1065

SEQ ID NO: 1099 - DNA, 376 bp, Homo sapiens; identical to SEQ ID NO: 1063

SEQ ID NO: 1100 - DNA, 376 bp, Homo sapiens; identical to SEQ ID NO: 1064

SEQ ID NO: 1101 - DNA, 376 bp, Homo sapiens; identical to SEQ ID NO: 1063

SEQ ID NO: 1102 - DNA, 376 bp, Homo sapiens; identical to SEQ ID NO: 1065

SEQ ID NO: 1103 - DNA, 376 bp, Homo sapiens; identical to SEQ ID NO: 1065

SEQ ID NO: 1104 - DNA, 376 bp, Homo sapiens; identical to SEQ ID NO: 1065

SEQ ID NO: 1105 - DNA, 376 bp, Homo sapiens; identical to SEQ ID NO: 1063

SEQ ID NO: 1106 - DNA, 376 bp, Homo sapiens; identical to SEQ ID NO: 1065

SEQ ID NO: 1107 - DNA, 376 bp, Homo sapiens; identical to SEQ ID NO: 1065

SEQ ID NO: 1108 - DNA, 376 bp, Homo sapiens
gaggtgcagctagtggagtctgggggaggcttggttcagcctggggggtccctgagactctcctgtgcagcctctggattcaccttcagtaactatggcatgaactgggtccgccaggctccagggaaggggctggagtgggtttcatacattagtagtggtagtagtcccatatattacgcagagtctgtgaagggccgatttaccatctccagagacaacgccaagaactcactgtatctgcaaatgaacagcctgagagccgaggacacggctgtgtattactgtgcgagagcggcatattactatgatagtagtaattattaccggccttttgactactggggccagggaaccctggtcaccgtctcctcag

SEQ ID NO: 1109 - DNA, 376 bp, Homo sapiens
gaggtgcagctagtggagtctgggggaggcttggttcaggctggggggtccctgagactctcctgtgcagcctctggattcaccttcaggaactatggcatgaactgggtccgccaggctccagggaaggggctggagtgggtttcatacattagtagtggtagtagtcccatatattacgcagagtctgtgaagggccgatttaccatctccagagacaacgccaagaactcactgtatctgcaaatgaacagcctgagagccgaggacacggctgtgtattactgtgcgagagcggcatattactatgatagtagtaattattaccggccttttgactactggggccagggaaccctggtcaccgtctcctcag

SEQ ID NO: 1110 - DNA, 376 bp, Homo sapiens; identical to SEQ ID NO: 1109

SEQ ID NO: 1111 - DNA, 376 bp, Homo sapiens; identical to SEQ ID NO: 1109

SEQ ID NO: 1112 - DNA, 376 bp, Homo sapiens; identical to SEQ ID NO: 1109

SEQ ID NO: 1113 - DNA, 376 bp, Homo sapiens; identical to SEQ ID NO: 1109

SEQ ID NO: 1114 - DNA, 376 bp, Homo sapiens; identical to SEQ ID NO: 1109

SEQ ID NO: 1115 - DNA, 376 bp, Homo sapiens; identical to SEQ ID NO: 1109

SEQ ID NO: 1116 - DNA, 376 bp, Homo sapiens; identical to SEQ ID NO: 1108

SEQ ID NO: 1117 - DNA, 376 bp, Homo sapiens; identical to SEQ ID NO: 1109

SEQ ID NO: 1118 - DNA, 376 bp, Homo sapiens; identical to SEQ ID NO: 1109

SEQ ID NO: 1119 - DNA, 376 bp, Homo sapiens; identical to SEQ ID NO: 1109

SEQ ID NO: 1120 - DNA, 376 bp, Homo sapiens; identical to SEQ ID NO: 1109

SEQ ID NO: 1121 - DNA, 376 bp, Homo sapiens; identical to SEQ ID NO: 1109

SEQ ID NO: 1122 - DNA, 376 bp, Homo sapiens; identical to SEQ ID NO: 1109

SEQ ID NO: 1123 - DNA, 376 bp, Homo sapiens; identical to SEQ ID NO: 1109

SEQ ID NO: 1124 - DNA, 376 bp, Homo sapiens; identical to SEQ ID NO: 1109

SEQ ID NO: 1125 - DNA, 376 bp, Homo sapiens; identical to SEQ ID NO: 1109

SEQ ID NO: 1126 - DNA, 367 bp, Homo sapiens
gaggtgcagctgttggagtctgggggaggcttggtactgccgggggggtccctgagactctcgtgtgcagcctctggattcacctttagcagctatgccatgagctgggtccgccaggctccagggaaggggctggagtgggtctcagatattagtggtagtggtggtagcacatactacgcagactccgtgaagggccggctcaccatctccagagacaattccaagaacacgctgtatctgcaaatgaacagcctgagagccgaggacacggccctatattactgtgcgaaagccagccggtatagcagcagctgggatgcctttgatatctggggccaagggacaatggtcaccgtctcttcag

SEQ ID NO: 1127 - DNA, 367 bp, Homo sapiens; identical to SEQ ID NO: 1126

SEQ ID NO: 1128 - DNA, 367 bp, Homo sapiens; identical to SEQ ID NO: 1126

SEQ ID NO: 1129 - DNA, 367 bp, Homo sapiens; identical to SEQ ID NO: 1126

SEQ ID NO: 1130 - DNA, 367 bp, Homo sapiens; identical to SEQ ID NO: 1126

SEQ ID NO: 1131 - DNA, 355 bp, Homo sapiens
caggtgcaactggtggagtctgggggaggcgtggtccagcctggggggtccctgagactctcctgtgcagcgtctggattcgccttcagtacctatggcatgcattgggtccgccaggctccaggcaaggggctggagtgggtggcatttatacggtatgatgaaagtcataaatactatgtagactccgtgaaggaccgattcaccatctccagagacaattccaagaacacgctgtctctacaaatgaacagcctgacagctgaggacacggctgtttattactgtgcggctttttggagtggccgtggtcccccctactggggccagggaaccctggtcaccgtctcctcag

SEQ ID NO: 1132 - DNA, 355 bp, Homo sapiens; identical to SEQ ID NO: 1131

SEQ ID NO: 1133 - DNA, 355 bp, Homo sapiens
caggtgcgactggtggagtcggggggaggcgtggtccaccctggggggtccctgagactctcctgtgcagcgtctggattcgccttcagcacctatggcatgcattgggtccgccaggctccaggcaaggggctggagtgggtggcttatatacgctatgatgaaagcattcaattttatgtagactccgtgaagggccgattcaccatctccagagacaattccaagaacacactgtctctgcaaatgaatagcctgactactgaggacacggctgtgtattactgtgcggccttttggagtggccgtggtcccccctactggggccagggaaccctggtcgccgtctcctcag

SEQ ID NO: 1134 - DNA, 355 bp, Homo sapiens
caggtgcaactggtggagtctgggggaggcgtggtccagccgggggggtccctgagactctcctgtgcagcgtatggattcgccttcagtacttatggcatgcattgggtccgccaggctccaggcaaggggctggagtgggtggcttatattcgctatgatgaagcttataaattctatgtggactccgtgaagggccgattcaccatctccagagacaattccaagaacacactgtctctgcgaatgaacagcctgagcactgaggacacgggtgtctattactgtgcggctttttggagtggccgtggtcccccctactggggcctgggaacccgggtcaccgtctcctcag

SEQ ID NO: 1135 - DNA, 355 bp, Homo sapiens; identical to SEQ ID NO: 1131

SEQ ID NO: 1136 - DNA, 370 bp, Homo sapiens
gaggtgcagctggtggagtctgggggagacttggtccagcctggagggtccctgagactctcctgtgcagcctctggattcaccttcagtgaccactacatggactgggtccgccaggctccagggaaggggctggagtgggttggccgtagtagaaataaagctaacagttacaccacagaatacgccgcgtctgtgaaaggcagattcatcctctcaagagatgagtcaaagaactcactgtatctgcaaatgaacagcctgaaaaccgaggacacggccatgtattactgtgctagagtacgcgatatgagtggctggttcccctttgactactggggccagggaaccctggtcaccgtctcctcag

SEQ ID NO: 1137 - DNA, 370 bp, Homo sapiens
gaggtgcagctggtggagtctgggggagacttggtccagcctggagggtccctgagactctcctgtgcagcctctggattcaccttcagtgaccactacatggactgggtccgccaggctccagggaaggggctggagtgggttggccgtagtagaaacaaagctaacagttacaccacagaatacgccgcgtctgtgaaaggcagattcaccctctcaagagatgattcaaagaactcactgtatctgcaaatgaacagcctgaaaaccgaggacacggccatgtattactgtgctagagtacgggatagcagtggctggttcccctttgactactggggccagggaaccctggtcaccgtctcctcag

SEQ ID NO: 1138 - DNA, 370 bp, Homo sapiens
gaggtgcagctggtggagtctgggggagacctggtccagcctggagggtccctgagactctcctgtgcagcctctggattcaccttcagtgaccactacatggactgggtccgccaggctccagggaaggggctggagtgggttggccgtagtagaaataaagctaatagttacaccacagaatacgccacgtctgtgaaaggcagattcatcctctcaagagatgagtcaaagaactcactgtatctgcaaatgaacagcctgaaaaccgaggacacggccatgtattactgtgctagagtacgcgataccagtggctggttcccctttgactactggggccagggaaccctggtcaccgtctcctcag

SEQ ID NO: 1139 - DNA, 370 bp, Homo sapiens; identical to SEQ ID NO: 1136

SEQ ID NO: 1140 - DNA, 363 bp, Homo sapiens
caggtgcagctgcaggagtcgggcccaggactggtgaagccttcggagaccctgtccctcacctgcactgtctctggtggctccatcagtagttactactggagctggatccggcagcccccagggaagggactggagtggattgggtacatctataccagtgggagcaccaactacaacccctccctcaagagtcgagtcaccatatcagtagacacgtccaagaaccagttctccctgaagctgagctctgtgaccgccgcagacacggccgtgtattactgtgcgagacatgcccgctatggttcgtggtactactacatggacgtctggggcaaagggaccacggtcaccgtctcctca

SEQ ID NO: 1141 - DNA, 363 bp, Homo sapiens; identical to SEQ ID NO: 1140

SEQ ID NO: 1142 - DNA, 363 bp, Homo sapiens; identical to SEQ ID NO: 1140

SEQ ID NO: 1143 - DNA, 363 bp, Homo sapiens; identical to SEQ ID NO: 1140

SEQ ID NO: 1144 - DNA, 378 bp, Homo sapiens
cagccgcagctgcaggagtcgggcccaggactggtgaagccttcggagaccctgtccctcacctgcattgtctctggtggctccatcagcagtagtagttactactggggctggatccgccagcccccagggaaggggctggagtggattgggactattcattatagtgggagtacctactacaacccgtccttcaagagtcgagtcaccatgtcagtagacacctccaggaaccagttctccctgaaactgagctctatgaccgcagcggacacggccgtgtattactgtgcgagagataaccggtggatgttaacaaactactactacaatggtatggacgtctggggccaagggaccacggtcaccgtctcctca

SEQ ID NO: 1145 - DNA, 378 bp, Homo sapiens; identical to SEQ ID NO: 1144

SEQ ID NO: 1146 - DNA, 378 bp, Homo sapiens; identical to SEQ ID NO: 1144

SEQ ID NO: 1147 - DNA, 378 bp, Homo sapiens
cagccgcagttgcaggagtcgggcccaggactggtgaagccttcggagaccctgtccctcacctgcattgtctctggtggctccatcagcagtagtaattactactggggctggatccgccagcccccagggaaggggctggagtggattgggactattcattatagtgggagcaccttctacaacccgtccttcaagagtcgagtcaccatgtcagtagacacctccaggaaccagttctccctgaaggtgagctccatgaccgcagcggacacggccgtctattactgtgcgagagataaccggtggatgttaacaaactactactacaatggtatggacgtctggggccaagggaccacggtcaccgtctcctca

SEQ ID NO: 1148 - DNA, 367 bp, Homo sapiens
gaggtgcagctggtggagactggaggaggcttgatccagcctggggggtccctgagactctcctgtgcaggctctggatttaccgtcagtagcaaccacatgagctgggtccgccaggctccagggaaggggctggagtgggtctcagttatttatagcgatggtagcacatactacgcagactccgtgaagggccgattcaccatctccagagacaattccaagaacaccctgtatcttcaaatgaacagcctgagagccgaggacacggccgtatattactgtgcgagcccgattcattatagcagtggctggtcttggtcttttgatatctggggccaagggacaatggtcaccgtctcctcag

SEQ ID NO: 1149 - DNA, 367 bp, Homo sapiens; identical to SEQ ID NO: 1148

SEQ ID NO: 1150 - DNA, 367 bp, Homo sapiens; identical to SEQ ID NO: 1148

SEQ ID NO: 1151 - DNA, 370 bp, Homo sapiens
caggtcaccttgaaggagtctggtcctgtgctggtgaaacccacacagaccctcacactgacctgcaccttctctgggttctcactcagcagtagtggagtatgtgtgagctggatccgtcagcccccagggaaggccctggagtggcttgcacgcattgattgggatgatgataaattctacagcacatctctgaagaccaggctcaccatctccaaggacacctccaaaaaccaggtggtccttacaatgaccaacatggaccctgtggacacagccacgtattactgtgcacggatacagtgtagtgggagctaccaagctcgaggcgtctactggggccagggaaccctggtcaccgtctcctcag

SEQ ID NO: 1152 - DNA, 370 bp, Homo sapiens
caggtcaccttgaaggagtctggtcctgtgctggtgaaacccacacagaccctcacactgacctgcaccttctctgggttctcactcagcactagtggagtatgtgtgagctggatccgtcagcccccagggaaggccctggagtggcttgcacgcattgattgggatgatgataaattctacagcacatctctgaagaccaggctcaccatctccaaggacacctccaaaaaccaggtggtccttacaatgaccaacatggaccctgtggacacagccacgtattactgtgcacggatacagtgtagtgggagctaccaagctcgaggcgtctactggggccagggaaccctggtcaccgtctcctcag

SEQ ID NO: 1153 - DNA, 370 bp, Homo sapiens; identical to SEQ ID NO: 1152

SEQ ID NO: 1154 - DNA, 376 bp, Homo sapiens
gaggtgcagctggtgcagtctggagcagaggtgaaaaagcccggggagtctctgaagatctcctgtaagggttctggatacaggtttaccaactactggatcggctgggtgcgccagaggcccgggaaaggcctggagtggatggggatcatctatcctggtgactctgataccagatacagcccgtccttccaaggccaggtcaccatctcatccgacacgtccatcagcaccgcctacctgcagtggagcagcctgaaggcctcggacaccgccatgtattactgtgcgagacttcgaagtctgaccgggtatagcagtggccaggtctattttgactactggggccagggagccctggtcaccgtctcctcag

SEQ ID NO: 1155 - DNA, 376 bp, Homo sapiens
gaggtgcagctggtgcagtctggagcagaggtgaaaaagcccggggagtctctgaagatctcctgtaagggttctggatacacctttaccaactactggatcggctgggtgcgccagatgtccgggaaaggcctggagtggatggggatcatctatcctggtgactctgataccagatacagcccgtctttccaaggccaggtcaccatctcagccgacaagtccatcagaaccgcctatctgcagtggagcagcctgaaggcctcggacaccgccatgtattattgtgcgagacttcgaagtccgaccgggtatagcagtggccaggtctattttgactactggggccagggaaccctggtcaccgtctcctcag

SEQ ID NO: 1156 - DNA, 376 bp, Homo sapiens
gaggtgcagctggtgcagtctggagcagaggtgaaaaagcccggggagtctctgaagatctcctgtaagggttctggatacacctttaccaactactggatcggctgggtgcgccagatgcccggaaaaggcctcgagtggatggggatcatctatcctggtgactctgataccagatacagcccgtccttgcaaggccaggtcaccatctcagccgacaagtccatcagaaccgcctatctgcagtggagcagcctgaaggcctcggacaccgccatgtattactgtgcgagacttcgaagtccgaccggatatagcagtggccaggtcttttttgactactggggccagggaaccctggtcaccgtctcctcag

SEQ ID NO: 1157 - DNA, 364 bp, Homo sapiens
gaggtgcagttggtggagtctgggggaggcttggtccagcctggagggtccctgagactctcctgtgtagcctctggattcaccttcagtgaccactacatggactgggtccgccaggctccagggaaggggctggagtgggttggccgtactagaaacagagctaacagttacaccacacaatacgccgcgtctgtgacaggcagattcaccatctcaagagatgattcaaagaactcactgtatctgcaaatgaatagcctgaaacccgaggacacggccgtgtattactgtattagatcctttactacgcggtactactttgactactggggccagggaaccctggtcaccgtctcctcag

SEQ ID NO: 1158 - DNA, 364 bp, Homo sapiens
gaggtgcagttggtggagtctgggggaggcttggtccagcctggagggtccctgagactctcctgtgcagcctctggattcaccttcagtgaccactacatggactgggtccgccaggctccagggaaggggctggagtgggttggccgtactagaaacagagctaacagttacaccacacaatacgccgcgtctgtgacaggcagattcaccatctcaagagatgattcaaagaactcagtgtatctgcaaatgaatagcctgaaacccgaggacacggccgtgtattactgtattagatcctttactacgcggtactactttgactactggggccagggaaccctggtcaccgtctcctcag

SEQ ID NO: 1159 - DNA, 364 bp, Homo sapiens; identical to SEQ ID NO: 1157

SEQ ID NO: 1160 - DNA, 373 bp, Homo sapiens
caggtcaccttgaaggagtctggtcctgcgctggtgaaacccacagagaccctcacactgacctgcaccttctctgggttctcactcagcactagtcaaatgcgtgtgagctggatccgtcagcccccagggaaggccctggaatggcttgcacgcattgattgggatgatgataaattctacagcacatctctgaagaccaggctcaccatcgccaaggacacctccaaaaaccaggtggtccttacaatgaccaacatggaccctgtggacacagccacgtattattgtgtacggattagtacatattgtagtactggcaactgctactttgactactggggccagggaatcctggtcaccgtctcctcag

SEQ ID NO: 1161 - DNA, 373 bp, Homo sapiens; identical to SEQ ID NO: 1160

SEQ ID NO: 1162 - DNA, 373 bp, Homo sapiens
caggtcaccttgaaggagtctggtcctgcgctggtgaaacccacagagaccctcacactgacctgcaccttctctgggttctcactcagaactagtcaaatgcgtgtgagctggatccgtcagcccccagggaaggccctggaatggcttgcacgcattgattgggatgatgataaattctacagcacatctctgaagaccaggctcaccatcgccaaggacacctccaaaaaccaggtggtccttacaatgaccaacatggaccctgtggacacagccacgtattattgtgtacggattagtacatattgtagtagtggcaactgctactttgactactggggccagggaatcctggtcaccgtctcctcag

SEQ ID NO: 1163 - DNA, 355 bp, Homo sapiens
gaagtgcagctggtgcagtctggagcagaggtgaaaaagcccggggagtctctgaggatctcctgtaagggttctggatacagctttaccagttactggatcagctgggtgcgccagatgcccgggaaaggcctggagtggatggggaggattgatcctagtgactcttataccaactacggcccgtccttccaaggccacgtcaccatctcagctgacaagtccatcagcactgcctacctgcagtggagcagcctgaaggcctcggacagcgccatgtattactgtgtgaggatcgttcattatagtagccctgactactggggccagggaaccctggtcaccgtctcctcag

SEQ ID NO: 1164 - DNA, 355 bp, Homo sapiens; identical to SEQ ID NO: 1163

SEQ ID NO: 1165 - DNA, 355 bp, Homo sapiens; identical to SEQ ID NO: 1163

SEQ ID NO: 1166 - DNA, 361 bp, Homo sapiens
caggtgcagctacagcagtggggcgcaggactgttgaagccttcggagaccctgtccctcacctgcgctgtctatggtgggtccttcagtggttactactggagctggatccgccagcccccagggaaggggctggagtggattggggaaatcaatcatagtggaagcaccaactacaacccgtccctcaagagtcgagtcaccatatcagtagacacgtccaagaaccagttctccctgaagctgaggtctgtgaccgccgcggacacggctgtgtattactgtgcgagagtgggcagctatggttactttgatgcttttgatatctggggccaagggacaatgttcaccgtctcttcag

SEQ ID NO: 1167 - DNA, 361 bp, Homo sapiens
caggtgcagctacagcagtggggcgcaggactgttgaagccttcggagaccctgtccctcacctgcgctgtctatggtgggtccttcagtggttactactggagctggatccgccagcccccagggaaggggctggagtggattggggaaatcaatcatagtggaagcaccaactacaacccgtccctcaagagtcgagtcaccatatcagtagacacgtccaagaaccagttctccctgaagctgagctctgtgaccgccgcggacacggctgtgtattactgtgcgagagtgggcagctatggttactttgatgcttttgatatctggggccaagggacaatggtcaccgtctcttcag

SEQ ID NO: 1168 - DNA, 361 bp, Homo sapiens
caggtgcagctacagcagtggggcgcaggactgttgaagccttcggagaccctgtccctcacctgcgctgtctatggtgggtccttcagtggttactactggagctggatccgccagcccccagggaaggggctggagtggattggggaaatcaatcatagtggaagcaccaactacaacccgtccctcaagagtcgagtcaccatatcagtagacacgtccaagaaccagttctccctgaagctgaggtctgtgaccgccgcggacacggctgtgtattactgtgcgagagtgggcagctatggttattttgatgcttttgatatctggggccaagggacaatggtcaccgtctcgtcag

SEQ ID NO: 1169 - DNA, 352 bp, Homo sapiens
caggtgcagctggtggagtctgggggaggcgtggtccagcctggggggtccctgagactctcctgtgcagcgtctggattcaacttcaggtctcatggcatgcactgggtccgccaggctccaggcaaggggctgcagtgggtggcacaaattaatcatgatggaacttatatatcctatgtagactccgtgaagggccgattcaccatctccagagacaattccaggaccacagtttatctgcaattgaacagcctgacaattgaggacacggctgtatattactgtgcgagagaccagacctatgcgtgggactggtggggccagggtagcctggtcaccgtcccctcag

SEQ ID NO: 1170 - DNA, 352 bp, Homo sapiens
caggtgcagctggtggagtctgggggaggcgtggtccagcctggggggtccctgagactctcctgtgcagcgtctggattcagcttcagatctcatggcatgcactgggtccgccaggctccaggcaaggggctgcagtgggtggcacaaattaatcatgatggaacttatatatcctatgcagactccgtgaagggccgattcaccatctccagagacaattccaggaccacagtttatctgcaattgaacagcctgacaattgaggacacggctgtatattactgtgcgagagaccagacctatgcgtgggactggtggggccagggtagcctggtcaccgtcccctcag

SEQ ID NO: 1171 - DNA, 373 bp, Homo sapiens
cagctgcagctgcaggagtcgggcccagaactggtgaagccttcggagaccctgtccctcacctgcactgtctctggtggctccatcaccatcagtacatactactggggctggatccgccagcccccagggaaggggctggagtggattgtgagcagctattatagtgggaatacctactccaatccgtccctccagggtcgagtcaccatgtccgcagacgcgtccaagaaccagatatccctgaggctgacctctgtgaccgccgcagacacggctgtctattattgtgcgcgaccaacagactattactatggtttggggggccaatttgagtactggggccagggaatcctcgtcaccgtctcctcag

SEQ ID NO: 1172 - DNA, 373 bp, Homo sapiens
caactgcagctgcaggagtcgggcccagaactggtgaagccttcggagaccctgtccctcacctgcactgtctctggtggctccatcaccatcagtacatactactggggctggatccgccagcccccagggaaggggctggagtggattgtgagcagctattatagtgggaatacctactccaatccgtccctccagggtcgagtcaccatgtccgcagacgcgtccaagaaccagatatccctgaggctgacctctgtgaccgccgcagacacggctgtctattattgtgcgcgaccaacagactattactatggtttggggggccaatttgagtactggggccagggaatcctcgtcaccgtctcctcag

SEQ ID NO: 1173 - DNA, 367 bp, Homo sapiens
gaggtgcaactggtggagtctgggggaggcttggtccagccgggggggtccctgagactctcctgtgcagcctctggattcacctttagtaattattggatgaattgggtccgccaggctccagggaaggggctggagtgggtggccagcattaaacaagatgaaggtgagaaatattttgtggactctgtgaagggccggttcaccatctccagaggcaacgccaagaactcactgtatctgcaaatgaatagtttgagagccgaggacacggctgtgtattactgtgtgaggagtagagaagaagttcgtctttatgaaccttttgactactggggccagggaaccctggtcaccgtctcgtcag

SEQ ID NO: 1174 - DNA, 367 bp, Homo sapiens
gaggtgcaactggtggagtctgggggaggcttggtccagccgggggggtccctgagactctcctgtgcagcctctggattcacctttagtagttattggatgaattgggtccgccaggctccagggaaggggctggagtgggtggccagcattaaacaagatgaaggtgagaaatattttgtggactctgtgaagggccggttcaccatctccagaggcaacgccaagaactcactgtatctgcaaatgaatagtttgagagccgaggacacggctgtttattactgtgtgaggagtagagaagaagttcgtctttatgaaccttttgactactggggccagggaaccctggtcaccgtctcgtcag

SEQ ID NO: 1175 - DNA, 358 bp, Homo sapiens
caggtgcagctggtgcagtctggggctgaggtgaagaagcctggggcctcagtgatactttcctgcaagacatctggacacaccttcaccagctactatcttcactgggtgcgactggcccctggacaagggcttgaatacatgggaataatcaatcctgaaaatggtgccacaacctacgcacagaacttccagggcagactcatcatgaccagggacacgtccacgagcgcaatcttcatggagctgagcagcctcagatctgacgacacggccgtgtattactgtgcgacagaacctcctaaccgctgctactttgacaactggggcccgggaaccctggtcaccgtctcctcag

SEQ ID NO: 1176 - DNA, 358 bp, Homo sapiens
caggtgcagctggtgcagtctggggctgaggtgaagaagcctggggcctcagtgatactttcctgcaagacatctggacacaccttcaccaactactatcttcactgggtgcgactggcccctggacaagggcttgaatacatgggaataatcaatcctgaaaatggtgccacaacctacgcacagaacttccagggcagactcatcatgaccagggacacgtccacgagcgcaatcttcatggagctgagcagcctgagatctgacgacacggccgtatattactgtgcgacagaacctcctaaccgctgctactttgacaactggggcccgggaaccctggtcaccgtctcctcag

SEQ ID NO: 1177 - DNA, 358 bp, Homo sapiens
caggtgcagctggtggagtctgggggaggcgtggtccagcctggggggtccctgagactctcctgtgcagcgtctggattcaccttcaggagctatggcatgcactgggtccgccaggctccaggcaaggggctggagtgggtgacatttatacggtctgatgcaagtaataaatactatgcagactccgtgaagggccgattcaccatctccagagacaattccaagaacacgctgattctgcaaatgaacagcctgagagctgaggacacggctgtgtattactgtgcgaaagatcgagatgactacgccgggcttgactactggggccagggaaccctggtcaccgtctcctcag

SEQ ID NO: 1178 - DNA, 358 bp, Homo sapiens; identical to SEQ ID NO: 1177

SEQ ID NO: 1179 - DNA, 387 bp, Homo sapiens
gaggtgcaactggtggagtctgggggaggcttggtccagcctggggggtccctgagactctcctgttcagcctctggattcaccttcagtagctatgctatgcactgggtccgccaggctccagggaagggactggaatatgtttcaggtattagtagtaatgggggtaacacatactacgcagactcagtgaagggcagattcaccatctccagagacaattccaagaacacgctgtatcttcaaatgagcagtctgagagctgaggacacggctgtgtattactgtgtgaaacactattacgatattttgactggttattaccaagactactactactactacatggacgtctggggcaaagggaccacggtcaccgtctcctca

SEQ ID NO: 1180 - DNA, 387 bp, Homo sapiens
gaggtgcagctggtggagtctgggggaggcttggtccagcctggggggtccctgagactctcctgttcagcctctggattcaccttcagtagctatgctatgcactgggtccggcaggctccagggaagggactggaatatgtttcagctattagtagtaatgggggtagcacatactacgcagactcagtgaagggcagattcaccatctccagagacaattccaagaacacgctgtatcttcaaatgagcagtctgagagctgaggacacggctgtgtattactgtgtgaaacactattacgatattttgactggttattaccaagactactactactactacatggacgtctggggcaaagggaccacggtcaccgtctcctca

SEQ ID NO: 1181 - DNA, 385 bp, Homo sapiens
gaggtgcagctggtggagtctgggggaggcttggtccagcctggggggtccctgagactctcctgtgcagcctctggattcacctttagaagttattggatgacctgggtccgccaggctccagggaagtggctggagtgggtggccaacataaatcaagatggaagtgggaaatattatgtggactctgttaagggccgattcaccatctccagagacaacgccgagaactcactgtctctgcaaatgaacagcctgagagccgaggacacggctgtgtattactgtgcgagagttctgaactactatagttcggggagtaccagggtgcccaactggtacttcgatctctggggccgtggcaccctggtcactgtctcctcag

SEQ ID NO: 1182 - DNA, 385 bp, Homo sapiens; identical to SEQ ID NO: 1181

SEQ ID NO: 1183 - DNA, 385 bp, Homo sapiens
gaggtgcagctggtggagtctgggggaggcctggtcaagcctggggggtccctgagactctcctgtgcagcctctggattcaccttcagtagctatagcatgaactgggtccgccaggctccagggaaggggctggagtgggtctcatccattagtagtagtagtagttacatatactacgcagactcagtgaagggccgattcaccatctccagagacaacgccaagaactcactgtatctgcaaatgaacagcctgagagccgaggacacggctgtgtattactgtgcgagagattggcgatccttcggtatggttcggggagttgcccccaacagcgcctggggcgactggggccagggaaccctggtcaccgtctcctcag

SEQ ID NO: 1184 - DNA, 385 bp, Homo sapiens; identical to SEQ ID NO: 1183

SEQ ID NO: 1185 - DNA, 346 bp, Homo sapiens
gaggtgcagctggtggagtccgggggaggcttagttcagcctggggggtccctgagactctcctgtgcagcctctggattcaccttcagtagctactggatgcactgggtccgccaagatccagggaaggggctggtgtgggtctcacgtattaatagtgatgggagtaccacaagctacgcggactccgtgaagggccgattcaccatctccagagacaacgccaagaacacgttgtatttgcaaatgaacagtctgagagccgaggacacggctgtgtattactgtgcaagaaactggaactgtgactactggggccagggaaccctggtcaccgtctcctcag

SEQ ID NO: 1186 - DNA, 346 bp, Homo sapiens
gaggtgcagctggtggagtccgggggaggcttagttcagcctggggggtccctgagactctcctgtgcagcctctggattcaccttcagtagctactggatgcactgggtccgccaagctccagggaaggggctggtatgggtctcacgtattaatagtgatgggagtagcacaagctacgcggactccgtgaagggccgattcaccatctccagagacaacgccaagaacacgctgtatctgcaaatgaacagtctgagagccgaggacacggctgtgtattactgtgcaagaaactggaactgtgactactggggccagggaaccctggtcaccgtctcctcag

SEQ ID NO: 1187 - DNA, 399 bp, Homo sapiens
gaggtgcagctgttggagtctgggggaggcttggtacagcctggggggtccctgagactctcctgtgcagcctctggattcacctttagcaactatgccatgaactgggtccgccaggctccagggaaggggctggagtgggtctcagttattagtgatagtggtggtcgcacatactacgcagactccgtgaagggccggttcaccatctccagagacaattccaagcacacgctgtatctgcaaatgaacagcctgagagccgaggacacggccgtttattactgtgtgaaagatccccattattattactatgatagtagtggtcacgaggggggaatccgctactactacgggatggacgtctggggccaagggaccacggtcaccgtctcctca

SEQ ID NO: 1188 - DNA, 399 bp, Homo sapiens
gaggtgcagctgttggagtctgggggaggcttggtacagcctggggggtccctgagactctcctgtgtagcctctggattcacctttagtaactatgccatgaactgggtccgccaggctccagggagggggctggagtgggtctcagctattagtggaggtgcacttagcacagattacgcagactccgtgaagggccggttcaccatctccagagacaattccaagaacacgttgtatgtgcaaatgaacagcctgagagccgaggacacggccgtttattactgtgtgaaagatcccgattattattactatgatagtagtggtcacgaggggggaatccactactactacgggatggacgtctggggccaagggaccacggtcaccgtctcctca

SEQ ID NO: 1189 - DNA, 352 bp, Homo sapiens
caggtgcagctggtgcagtctggggctgaggtgaagaagcctggggcctcagtgaaggtttcctgcaaggcatctgaatacacgctgaccggctactatttccactgggtgcgacagacccctagacaagggcttgaatggatgggaatcatcagccctagtggtaattacacaacggacgaacagaagtttaagggcaggctcaccatgaccagggacacgtccacgagcacagtctacatggagctgagtagcctgaaattagaagacacggccctgtattactgtgcaagagctactgaccaggactttgctctgtggggccagggaacccgggtcaccgtctcctcag

SEQ ID NO: 1190 - DNA, 352 bp, Homo sapiens
caggtgcagctggtgcagtctggggctgaggtgaagaaccctggggcctcagtgaaggtttcctgcaaggcgtctggatacacgctcagcgactactatatgcactgggtgcgacagacccctggacaagggcttgagtggatgggaatcatcagccctagtggtaattacacagcggacgaacagaagtttaagggcaggctcaccatgaatagggacacgtccacgagcacagtatatatggagctgcgcagcctgagatcagaagacacgggcgtgtattattgtgcaagagctactgaccaggactttgctctgtggggccagggaacccgggtcaccgtctcctcag

SEQ ID NO: 1191 - DNA, 352 bp, Homo sapiens
gaggtgcaactcttggagtctgggggaggcttggtacagcctggggcgtccctgagactctcctgtgcagcctctggattcaccttcaggagccatgccatggcctgggtccgccagactccagggaggggcctggagtgggtctcaactattgatggagaaggtgttaacacacattacgctgactccgtgaagggccggttcaccatctccagagacgattccaagaacacactgtatcttcaaatgaacagcctgagagccgaggacacggccctttattactgtgtggaagaacaccactacgataatggatactggggccagggaaccctggtcaccgtctcctcag

SEQ ID NO: 1192 - DNA, 352 bp, Homo sapiens
gaggtgcagctattggagtctgggggaggcttggtacagcctggggggtccctgagactctcctgtgcagcctctggattcaccttcaggagccatgccatggcctgggtccgccagactccagggaggggcctggagtgggtctcaactattgatggagaaggtgttaatacacattacgctgactccgtgaagggccggttcaccatctccagagacgattccaagaacacactgtatcttcaaatgaacagcctgagagccgaggacacggccctttattactgtgtggaagaacaccactacgataatggatactggggccagggaaccctggtcaccgtctcctcag

SEQ ID NO: 1193 - DNA, 358 bp, Homo sapiens
gagatgcagctggtggagtctgggggaggcttggttgagccgggggggtccctaagactctcctgtgcagcctctggattcactttcaaaaacgcctggatgagctgggtccgccaggctccagggaaggggctggagtgggttggccgtattagaagcagtgctgatggtgggacaacagacttcgctgctcccctgaaaggcagattcagtatctcaagagatgattcaatagagacgctgtatctgcaaatgaacagcctgaagaccgaggacacagccgtgtacttttgcacagatagtaacgggggtggctttgatatctggggccaagggacaatggtcaccgtctcttcag

SEQ ID NO: 1194 - DNA, 358 bp, Homo sapiens; identical to SEQ ID NO: 1193

SEQ ID NO: 1195 - DNA, 355 bp, Homo sapiens
caggtgcagctggtgcagtctggggctgaggtgaagaagcctgggtcctcggtgaaggtctcctgcaaggcttctggaggcaccttcagcagctatggtatcagctgggtgcgacaggcccctggacaagggcttgagtggatgggagggatcatccctatctttggtacagcaaactacgcacagaagttccagggcagagtcacgattaccgcggacaaatccacgagcacagcctacatggagctgagcagcctgagatctgaggacacggccgtgtattactgtgcgagaagggggaactgggatgcttttgatatctggggccaagggacaatggtcaccgtctcttcag

SEQ ID NO: 1196 - DNA, 355 bp, Homo sapiens
caggtgcagctggtgcagtctggggctgaggtgaagaagcctgggtcctcggtgaaggtctcctgcaaggcttctggaggcaccttcagcagctatgctatcagctgggtgcgacaggcccctggacaagggcttgagtggatgggagggatcatccctatctttggtacagcaaactacgcacagaagttccagggcagagtcacgattaccgcggacaaatccacgagcacagcctacatggagctgagcagcctgagatctgaggacacggccgtgtattactgtgcgagaagggggaactgggatgcttttgatatctggggccaagggacaatggtcaccgtctcttcag

SEQ ID NO: 1197 - DNA, 355 bp, Homo sapiens
gaggtgcagctggtggagtccgggggaggcttagttcagcctggggggtccctgagactctcctgtgcagcctctggattcaccttcagtagttactggatgcactgggtccgccaagctcctgggaaggggctggtgtgggtctcacgtattaatactgatggaagtagtacaacgtacgcggactccgtgaagggccgattcaccatctccagagacaacgccaagaacacgctgtatctgcaaatgaacagtctgagagccgaggatacggctgtctattattgtgcaagagacccaattgatgatgtttttgatatctggggccaagggacaatggtcaccgtctcttcag

SEQ ID NO: 1198 - DNA, 355 bp, Homo sapiens
gaggtgcagctggtggagtccgggggaggcttagttcagcctggggggtccctgagactctcctgtgcagcctctggattcaccttcagtagttactggatgcactgggtccgccaagctcctgggaaggggctggtgtgggtctcacgtattaatagtgatgggagtagtacaacgtacgcggactccgtgaagggccgattcaccatctccagagacaacgccaagaacacgctgtatctgcaaatgaacagtctgagagccgaggacacggctgtctattattgtgcaagagacccaattgatgatgtttttgatatctggggccaagggacaatggtcaccgtctcttcag

SEQ ID NO: 1199 - DNA, 360 bp, Homo sapiens
caggtgcagctgcaggagtcgggcccaggactggtgaagccttcggagaccctgtccctcacctgcactgtctctggtggctccatcagtagttactactggagctggatccggcagcccgccgggaagggactggagtggattgggcgtatctataccagtgggagcaccaactacaacccctccctcaagagtcgagtcaccatgtcagtagacacgtccaagaatcagttctccctgaagctgagctctgtgaccgccgcggacacggccgtgtattactgtgcgagaggaggggtagtaccagctggctacggtatggacgtctggggccaagggaccacggtcaccgtctcctca

SEQ ID NO: 1200 - DNA, 360 bp, Homo sapiens; identical to SEQ ID NO: 1199

SEQ ID NO: 1201 - DNA, 364 bp, Homo sapiens
caggtgcagctggtggagtctgggggaggcgtggtccagcctgggaggtccctgagactctcctgtgcggcctctgggttcaccttcagtagctatgctatgcactgggtccgccaggctccaggcaaggggctggagtgggtggctcttgtatcatatgatggaactaatcaatactacgctgactccgtggagggccgattcaccatctccagagacaattccaagaacacgctgtatctgcaaatgaacagcctgacagctgaggacacggctgtatattactgtgcgagaccgtacagtgggagctaccactcccctcatgactactggggccagggaacccttgtcaccgtctcctcag

SEQ ID NO: 1202 - DNA, 364 bp, Homo sapiens
caggtgcagctggtggagtctgggggaggcgtggtccagcctgggaggtccctgagactctcctgtgcggcctctggattcaccttcagtagctatgctatgcactgggtccgccaggctccaggcgaggggctggagtgggtggcacttatatcttatgatggaactaataaatactacgctgactccgtgaagggccgattcaccatctccagagacaattccgagaacacgctgtatctgcaaatgaacagcctgacagctgaggacacggctgtgtattactgtgcgagaccgtatagtgggagctaccactcccctcatgactactggggccagggaacccttgtcaccgtctcctcag

SEQ ID NO: 1203 - DNA, 364 bp, Homo sapiens
caggtgcagctagtggagtctgggggaggcgtggtccagcctgggaggtccctgagactctcctgtgcagcctctggattcaccttcagtagctatgccatgcactgggtccgccaggctccaggcaaggggctggagtgggtggcagttatgtcatatgatggagataataaatactacgcagactccgtgaagggccgattcaccatctccagagacaattccaagcacacgctgtatgtgcaaatgaacagcctgagagctgaggacacggctgtctattactgtgcgagatcccgttcggggagatatcacgatgcttttgatgtctggggccaagggacaatggtcaccgtctcttcag

SEQ ID NO: 1204 - DNA, 364 bp, Homo sapiens
caggggcacctggtggagtctgggggaggcgtggtccagcctgggcggtccctgagactctcctgttcagcctctggattcaccttcggctcctatgctatgcactgggtccgccaggctccaggcaagggactggagtgggtggtagttatatcatatgatggcgataataaatactacgcagactccgtgaagggccgcttcatcatctccagagacaattccaagaacacactttatctacaaatgaacagcctgagagctgaggacacggctttatatttctgtgcgagatcccgttcggggaggtatcacgatgcttttgatatttggggccaagggacactggtcaccgtctcttcag

SEQ ID NO: 1205 - DNA, 363 bp, Homo sapiens
caggtgcagctggtggagtctgggggaggcgtggtccagcctgggaggtccctgagactctcctgtgcaacctctggattcagcttcagtacctatgctatgcactgggtccgccaggctccaggcaaggggctggagtgggtggcagttatatcatatgatggagataataaatattacgcagactccgtgaagggccgattcaccatctccagagacaattccaagaacacgctgtatctgcaaatgaacagcctgagagctgaggacacggctgtatattactgcgcgagagtaaaccaaggatcatactactacggtatggacgtctggggccaagggaccacggtcaccgtctcctca

SEQ ID NO: 1206 - DNA, 363 bp, Homo sapiens
caggtgcagctggtggagtctgggggaggcgtggtccagcctgggaggtccctgagactctcctgtgcagcctctggattcagcttcagtacctatgccatgcattgggtccgccaggctccaggcaaggggctggagtgggtggcagttatatcatatgatggagataataaatactacgcagactccgtgaagggccgattcaccatctccagagacaattccaaggacacgctgtatctgcaaatgaacagcctgacagctgaggacacggctgtgtattactgtgcgagagtaaaccaaggatcatactactacggtatggacgtctggggccaagggaccacggtcaccgtctcctca

SEQ ID NO: 1207 - DNA, 364 bp, Homo sapiens
gaggtgcagctggtggagtctgggggaggcttggtacagcctggggggtccctgagactctcctgtgcagcctctggattcaccttcagtagctatagcatgaactgggtccgccaggctccagggaaggggctggagtgggtttcatacattagtagtagtagtagtaccatatactacgcagactctgtgaagggccgattcaccatctccagagacaacgccaagaactcactgtatctgcaaatgaacagcctgagagccgaggacacggctgtgtattactgtgcccatcgaggggactggaacctgcatgatgcttttgatatctggggccaagggacaatggtcaccgtctcttcag

SEQ ID NO: 1208 - DNA, 364 bp, Homo sapiens; identical to SEQ ID NO: 1207

SEQ ID NO: 1209 - DNA, 352 bp, Homo sapiens
gaggtgcagttggtggagtctgggggaggcttggtccagcctggggggtccctgagactctcctgtgcaacctccggattcacctttagtagacattggatgagctgggtccgccaggctccagggaaggggctggagtggctggccaacatcgggcaagatggcgttgaccaacactgtgtggactctatgaagggccgactcaccatcttcagggacaacgccaagaattcactatttctgcaagtggacagcctgagagtcgaggacacggctatttattactgtgcgaccaattatgaatacaggtttgactactggggccagggaaccctggtcaccgtctcttcag

SEQ ID NO: 1210 - DNA, 361 bp, Homo sapiens
caggtgcagctacagcagtggggcgcaggactgttgaagccttcggagaccctgtccctcacctgcgctgtctatggtgggtccttcagtggttactactggagctggatccgccagcccccagggaaggggctggagtggattggggaaatcaatcatagtggaagcaccaactacaacccgtccctcaagagtcgagtcaccatatcagtagacacgtccaagaaccagttctccctgaagctgagctctgtgaccgccgcggacacggctgtgtattactgtgcgagaggctatagcagcagctggtaccattggttcgacccctggggccagggaaccctggtcaccgtctcctcag

SEQ ID NO: 1211 - DNA, 370 bp, Homo sapiens
caggtgcagctgcaggagtcgggcccaggactggtgaagccttcggagaccctgtccctcacctgcactgtctctggtggctccatcagtagttactactggagctggatccggcagcccgccgggaagggactggagtggattgggcgtatctataccagtgggagcaccaactacaacccctccctcaagagtcgagtcaccatgtcagtagacacgtccaagaaccagttctccctgaagctgagctctgtgaccgccgcggacacggccgtgtattactgtgcgagagaatcctacgggtatagcagcagctggtacacctactttgactactggggccagggaaccctggtcaccgtctcctcag

SEQ ID NO: 1212 - DNA, 375 bp, Homo sapiens
cagctgcagctgcaggagtcgggcccaggactggtgaagccttcggagaccctgtccctcacctgcactgtctctggtggctccatcagcagtagtagttactactggggctggatccgccagcccccagggaaggggctggagtggattgggagtatctattatagtgggagcacctactacaacccgtccctcaagagtcgagtcaccatatcagtagacacgtccaagaaccagttctccctgaagctgagctctgtgaccgcagcggacacggccgtgtattactgtgcgggggaggcagtggctggtacttactactactactacggtatggacgtctggggccaagggaccacggtcaccgtctcctca

SEQ ID NO: 1213 - DNA, 372 bp, Homo sapiens
gaggtgcagctggtggagtctgggggaggcttggtacagcctggggggtccctgagactctcctgtgcagcctctggattcaccttcagtagctatagcatgaactgggtccgccaggctccagggaaggggctggagtgggtttcatacattagtagtagtagtagtaccatatactacgcagactctgtgaagggccgattcaccatctccagagacaacgccaagaactcactgtatctgcaaatgaacagcctgagagccgaggacacggctgtgtattactgtgcgagagatggggggactacggtggtaccgggttactacggtatggacgtctggggccaagggaccacggtcaccgtctcctca

SEQ ID NO: 1214 - DNA, 372 bp, Homo sapiens
gaggtgcagctggtggagtctgggggaggcttggtccagcctggggggtccctgagactctcctgtgcagcctctggattcacctttagtagctattggatgagctgggtccgccaggctccagggaaagggctggagtgggtggccaacataaagcaagatggaagtgagaaatactatgtggactctgtgaagggccgattcaccatctccagagacaacgccaagaactcactgtttctgcaaatgaacagcctgagagccgaggacacggccgtgtattactgtgcgagagggcgatattttgactgggactactactactacggtatggacgtctggggccaagggaccacggtcaccgtctcctca

SEQ ID NO: 1215 - DNA, 364 bp, Homo sapiens
caggtgcagctggtggagtctgggggaggcgtggtccagcctgggaggtccctgagactctcctgtgcagcctctggattcattttcagtggccatgctatgctctgggtccgccaggctccaggcaaggggctggagtgggtggcagttatatcatatgatggaagtaataagtactacgcagactccgtgaagggccgattcaccatctccagagacaattccaagaacacgctgtatctgcaaatgaacagcctgagagctgaggacacggctgtgtattactgtgcgagagcaggaggtgggaactactatagctggttcgacccctggggccagggaaccctggtcaccgtctcctcag

SEQ ID NO: 1216 - DNA, 364 bp, Homo sapiens
caggtgcagctggtggagtctgggggaggcgtggtccagcctgggaggtccctgagactctcctgtgcagcctctggattcaccttcaggagctatgctatgcactgggtccgccaggctccaggcaagggtctggagtgggtggcagttatatcatatgatggaagtaataaatactacgcagactccgtgaagggccgattcaccatctccagagacaattccaagaacacgctgtatctgcaaatgaacagcctgagagctgaggacacggctgtgtattactgtgcgagagggagtagtgggagctacttcggatggtttgactcctggggccagggaaccctggtcaccgtctcctcag

SEQ ID NO: 1217 - DNA, 364 bp, Homo sapiens
caggtgcaggtggtggagtctgggggaggcgtggtccagcctgggaggtccctgagactctcctgtgcagcctctggattcaccttcagtagctatgctatgcactgggtccgccaggctccaggcaaggggctggagtgggtggcagttatatcatatgatggaaacaataaatactacgcagactccgtgaagggccgattcaccatctccagagacaattccaagaacacgctgtatctgcaaatgaacagcctgagagctgacgacacggctgtgtattcctgtgcgaggtccgatagtgggacctactactcctggttcgacccctggggccagggaaccctggtcaccgtctcctcag

SEQ ID NO: 1218 - DNA, 364 bp, Homo sapiens
caggtgcagctggtggagtctgggggaggcgtggtccagcctgggaggtccctgagactctcctgtgcagcctctggattcatcttcagtagctatgctatgcactgggtccgccaggctccaggcaaggggctggagtgggtggcagttatatcatatgatggaagcaataaatactacgcagactccgtgaagggccgattcaccatctccagagacaattccaaaaccacgctgtatctgcaagtgaacagcctgagagctgaggacacggctgtgtatcactgtgcgagagattctactgggagctattgggggtggttcgacccctggggcccgggaaccctggtcaccgtctcctcag

SEQ ID NO: 1219 - DNA, 370 bp, Homo sapiens
caggtgcagctggtggagtctgggggaggcttggtcaagcctggagggtccctgagactctcctgtgcagcctctggattcaccttcagtgactactacatgagctggatccgccaggctccagggaaggggctggagtgggtttcatacattagtagtagtagtagttacacaaactacgcagactctgtgaagggccgattcaccatctccagagacaacgccaagaactcactgtatctgcaaatgaacagcctgagagccgaggacacggccgtgtattactgtgcgagagggggccgtagtagcgggcgggggtacgatgcttttgatatctggggccaagggacaatggtcaccgtctcttcag

SEQ ID NO: 1220 - DNA, 379 bp, Homo sapiens
gaggtgcaactggtggagtctgggggaggcttggtaaagcctggggggtcccttagactctcctgtacagcctctggattcactttcagtaacgcctggatgagctgggtccgccaggtttcagggaaggggctggagtgggttggccgtattaaaagcaaaactgatggtgggacaacagactacgctgcacccgtgaaaggcagattcgccatctcaagagatgattcaaaagacacgctgtatttgcaaatgaacagcctgaaaatcgaggacacagccgtgtattattgtaccatctcgtacgtttgggggaataatcgttatagcgggacctttgacttctggggccagggaactctggtcaacgtctcctcag

SEQ ID NO: 1221 - DNA, 369 bp, Homo sapiens
caggtgcagctacagcagtggggcgcaggactgttgaagccttcggagaccctgtccctcacctgcggtgtccatggtgggtccttcagtggttactactggatctggatccgccagtccccggggaaggggctggagtggattggggaaatcaatcatagtggaagcaccaattacaaatcgtccctcaagagtcgagtcaccatatcagtagacacgtccaagaaccagttctccctgaagttgaggtctgtgaccgccgcggacacggctgtgtattactgtgcgagaggttatggttcggggagatactaccagtactacggtatagacgtctggggccaagggaccacggtcaccgtctcctca

SEQ ID NO: 1222 - DNA, 375 bp, Homo sapiens
cagttgcagctgcaggagtccggctcaggacaggtgaagccttcacagaccctgtccctcacttgcagtgtttctggtgccgccatgaatagtggtccttattcttggacctggatccggcagccaccagggaagggcctggagtgggtggggtacatctatcatagtggtgccacatatatcaacccgtccctcaacagtcgagtctctttatcagttgacaagtccaagaacgacttctccctgagcctgagctctgtgaccgccgcggacacggccgtgtattattgtgccagaattgtgaccatttttggagtccagtatcactactacatggacgtctggggcaaagggaccacggtcaccgtctcctca

SEQ ID NO: 1223 - DNA, 357 bp, Homo sapiens
gaggtgcaactggtggagactggaggaggcttggtgcagcctggggggtccctgacactctcctgtgaggcgtccgggttcagcgtcagtagcgactatatgagttgggtccgccaggctccagggaaggggctggagtgggtctcagttctctatagcggtggtggcacatactacgcagactccgtgaagggccgattcaccatctccagagacaattccaagaacactctatatcttcaaatgaacagcctgagacccgaggacacggccatatattactgtgtgagagtgtcaaggggactcatctggaacaatgtggaagtattggactcctggggccagggaaccctggtc

SEQ ID NO: 1224 - DNA, 368 bp, Homo sapiens
tgcaactggtggagtctgggggaggcgtggtccagcctggggggtccctgagactctcttgtgtagtctctggattcagcttcagtaactatgctttgcactgggtccgccaggctccaggcaaggggctggagtgggtggcagttatctcatttgatggaaataataaatactacgcagactccgtgaagggccgtttcagcgtctccagagacaattccaagaacacgctgtatctgcaaatgaacagcctgagacctgaagacacggctgtgtattactgtgtgagacccattcgaacaaccatctcctactactattacgctatggacgtctggggccaagggaccacggtcaccgtctcctca

SEQ ID NO: 1225 - DNA, 364 bp, Homo sapiens
gaagtgcagctggtgcagtctggagcagaggtgaaaaagcccggggagtctctgaggatctcctgtaagggttctggacacacctttagcaccaattggatcaactgggtgcgccaggtgcccgggaaaggcctggagtggatggggaggattgatcccagtgactcttatatcaacaacagcccgtccttccaaggccacgtcaccatctcagctgacaagtccatcaacactgcctacctgcagtggagcagcctgaaggcctcggacaccgccatgtattactgtgcgagtcacgactccgggttcaactatggcttgttcgactcttggggccagggaaccctggtcaccgtctcctcag

SEQ ID NO: 1226 - DNA, 376 bp, Homo sapiens
cagatcaccttgaaggagtctggtcctacgctggtgaaacccacacagaccctcacgctgacctgcaccttctctgggttctcactcagcacgaatggagtgggtgtgggctggatccgtcagcccccaggaaaggccctggagtggcttgcactcatttattgggatgatgataagcgctacagcccatctctgaagagcagactcaccatcaccaaggacacctccagaaaccaggtggtccttacaatgaccaacatggaccctgtggacacagccacatatttctgtgcacacacccgacacataagcgaatacagctatggtaaattgtttgactactggggccagggaaccctggtcaccgtctcctcag

SEQ ID NO: 1227 - DNA, 370 bp, Homo sapiens
caggtgcagctacagcagtggggcgcaggactgttgaagccttcggagaccctgtccctcacctgcgctgtctatggtgggtccttcagtggttactactggagctggatccgccagcccccagggaaggggctggagtggattggggaaatcaatcatagtggaagcaccaactacaacccgtccctcaagagtcgagtcaccatatcagtagacacgtccaagaaccagttctccctgaagctgagctctgtgaccgccgcggacacggctgtgtattactgtgcgagaggcaagcagcaccattactatggttcggggagttattatttctactggggccagggaaccctggtcaccgtctcctcag

SEQ ID NO: 1228 - DNA, 373 bp, Homo sapiens
gaggtgcagctggtgcagtctggagcagaggtgaaaaagccgggggagtctctgaagatctcctgtaagggttctggatacagctttaccagctactggatcggctgggtgcgccagatgcccgggaaaggcctggagtggatggggatcatctatcctggtgactctgataccagatacagcccgtccttccaaggccaggtcaccatctcagccgacaagtccatcagcaccgcctacctgcagtggagcagcctgaaggcctcggacaccgccatgtattactgtgcgagatcggtccgggcatgtagtggtggtagctgctactccggggactactggggccagggaaccctggtcaccgtctcctcag

SEQ ID NO: 1229 - DNA, 373 bp, Homo sapiens
caggtgcagttggtggagtctgggggaggcgtggtccagcctgggaggtccctgagactctcctgtgcagcctctggattcaccttcagtagctatgctatgcactgggtccgccaggctccaggcaaggggctggagtgggtggcagttatatcatatgatgcaagtaataaatactacgcagactccgtgaagggccgattcaccatctccagagacaattccaagaacacgctgtatctgcaaatgaacagcctgagagctgaggacatggctgtgtattactgtgcgagaagtcatggccagtggctggtactggtcgactggtacttcgatctctggggccgtggcaccctggtcactgtctcctcag

SEQ ID NO: 1230 - DNA, 373 bp, Homo sapiens
gaggtgcagctggtggagtctgggggaggcttggtccagcctggggggtccctgagactctcctgtgcagcctctggattcacctttagtagctattggatgagctgggtccgccaggctccagggaaggggctggagtgggtggccaacataaagcaagatggaagtgagaaatactatgtggactctgtgaagggccgattcaccatctccagagacaacgccaagaactcactgtatctgcaaatgaacagcctgagagccgaggacacggctgtgtattactgtgcgagatcctcttggggtagtagtggttattacttcgaagcttttgatatctggggccaagggacaatggtcaccgtctcttcag

SEQ ID NO: 1231 - DNA, 373 bp, Homo sapiens
caggtgcagctggtggagtctgggggaggcgtggtccagcctgggaggtccctgagactctcctgtgcagcctctggattcaccttcagtagctatgctatgcactgggtccgccaggctccaggcaaggggctggagtgggtggctgttatatcatatgatggaagcaataaatactacgcagactccgtgaagggccgattcaccatctccagagacaattccaagaacacgctgtatctgcaaatgaacagcctgagagctgaggacacggctgtgtattactgtgcgagaggttttcttgttagcgtattactatggttcggggagttatcctactggggccagggaaccctggtcaccgtctcctcag

SEQ ID NO: 1232 - DNA, 373 bp, Homo sapiens
gaagtgcagctggtgcagtctggagcagaggtgaaaaagcccggggagtctctgaggatctcctgtaagggttctggatacagctttaccagctactggatcagctgggtgcgccagatgcccgggaaaggcctggagtggatggggaggattgatcctagtgactcttataccaactacagcccgtccttccaaggccacgtcaccatctcagctgacaagtccatcagcactgcctacctgcagtggagcagcctgaaggcctcggacaccgccatgtattactgtgcgagaccgctctatgatagtagtggttaccacacatggggctttgactactggggccagggaaccctggtcaccgtctcctcag

SEQ ID NO: 1233 - DNA, 373 bp, Homo sapiens
gaggtgcggctggtggagtctgggggaggcttggtacagcctggggggtccctgagactctcctgtgcagcctctggattcacctttagcagctataccatgggctgggtccgccaggctccagggaaggggctggattgggtctcagctattagtggaagtggtggtggcatatactacgcagactccgtgaagggccggttcaccatctccagagacaattccaagaacacactgtatctgcaaatgaacagcctgagagccgaggacacggccgtatattactgtgcgaaagagagccccatttgtggtggtggctgctatttcctctttgactactggggccagggaaccctggtcaccgtctcctcag

SEQ ID NO: 1234 - DNA, 373 bp, Homo sapiens
gaggtgcagctggtggagtctgggggaggcttggtgcagccgggggggtccctgagagtctcctgtgtagcctctggcttcgcctttaataactatgccatgaactgggtccgccaggctccagggaaggggctgcagtgggtctccgctattagtggtggtggtggtggcacattctacgcagactccgtgaagggccggttcaccatctccagagacaattccaagaacacgctgtatctgcaaatgaacagcctgagagccgaggacacggccgtatattactgtgcgaaggctgacaactacggtggcaactccgtgggggattactttgactactggggccagggaaccctggtcaccgtctcctcag

SEQ ID NO: 1235 - DNA, 367 bp, Homo sapiens
gaagtgcagctggtgcagtctggagcagaggtgaaaaagcccggggagtctctgaggatctcctgtaagggttctggatacagctttaccagctactggatcagctgggtgcgccagatgcccgggaaaggcctggagtggatggggaggattgatcctagtgactcttataccaactacagcccgtccttccaaggccacgtcaccatctcagctgacaagtccatcagcactgcctacctgcagtggagcagcctgaaggcctcggacaccgccatgtattactgtgcgagacatttaagggagaatagtggctacgactcgactgactactggggccagggaaccctggtcaccgtctcctcag

SEQ ID NO: 1236 - DNA, 364 bp, Homo sapiens
caggtgcagctgcaggagtcgggcccaggactggtgaagccttcggagaccctgtccctcacctgcactgtctctggtggctccatcagtagttactactggagctggatccggcagcccccagggaagggactggagtggattggatatatctattacagtgggagcaccaactacaacccctccctcaagagtcgagtcaccatatcagtagacacgtccaagaaccagttctccctgaagctgagctctgtgaccgctgcggacacggccgtgtattactgtgggagaggggggggatactatggttcgggatatgcttttgatatctggggccaagggacaatggtcaccgtctcttcag

SEQ ID NO: 1237 - DNA, 373 bp, Homo sapiens
gaggtgcagctgttggagtctgggggaggcttggtacagcctggggggtccctgagactctcctgtgcagcctctggattcacctttagcagctatgccatgagctgggtccgccaggctccagggaaggggctggagtgggtctcagctattagtggtagtggtggtagcacatactacgcagactccgtgaagggccggttcaccatctccagagacaattccaagaacacgctgtatctgcaaatgaacagcctgagagccgaggacacggccgtatattactgtgcgaaagatggcgatggatacaactatggtcgctactggtacttcgatctctggggccgtggcaccctggtcactgtctcctcag

SEQ ID NO: 1238 - DNA, 373 bp, Homo sapiens
caggtgcagctggtggagtctgggggaggcgtggtccagcctgggaggtccctgagactctcctgtgcagcgtctggattcaccttcagtagctatggcatgcactgggtccgccaggctccaggcaaggggctggagtgggtggcagttatatggtatgatggaagtaataaatactatgcagactccgtgaagggccgattcaccatctccagagacaattccaagaacacgctgtatctgcaaatgaacagcctgagagccgaggacacggctgtgtattactgtgcgaaagatagggtcagatacagctatggccaaaggagtggctttgactactggggccagggaaccctggtcaccgtctcctcag

SEQ ID NO: 1239 - DNA, 370 bp, Homo sapiens
caggtgcagctggtgcagtctggggctgaggtgaagaagcctggggcctcagtgaaggtctcctgcaaggcttctggatacaccttcaccgactactatatgcactgggtgcgacaggcccctggacaagggcttgagtggatgggatggatcaaccctaacagtggtggcacaaactatgcacagaggtttcagggcagggtcaccatgaccagggacacgtccatcagcacagcctacatggaactgaacagcctgagatctgacgacacggccgtgtattactgtgcgagaggtagcagcagctggtatggcgcgcctgatgcttttgatatctggggccaagcgacaatggtcaccgtctcttcag

SEQ ID NO: 1240 - DNA, 364 bp, Homo sapiens
gaggtgcagctggtggagtctggaggaggcttgatccagcctggggggtccctgagactctcctgtgcagcctctgggttcaccgtcagtagcaactacatgagctgggtccgccaggctccagggaaggggctggagtgggtctcagttatttatagcggtggtagcacatactacgcagactccgtgaagggccgattcaccatctccagagacaattccaagaacacgctgtatcttcaaataaacagcctgagagccgaggacacggccgtgtattactgtgcgagacgggacccttactcgaaaacacctaatgcttttgatatctggggccaagggacaatggtcaccgtctcttcag

SEQ ID NO: 1241 - DNA, 370 bp, Homo sapiens
caggtcaccttgaaggagtctggtcctgcgctggtgaaacccacacagaccctcacactgacctgcaccttctctgggttctcactcagcactagtggaatgcgtgtgagctggatccgtcagcccccagggaaggccctggagtggcttgcacgcattgattgggatgatgataaattctacagcacatctctgaagaccaggctcaccatctccaaggacacctccaaaaaccaggtggtccttacaatgaccaacatggaccctgtggacacagccacgtattactgtgcacggatacagtatagcagcagctggtacggtgcttttgatatctggggccaagggacaatggtcaccgtctcttcag

SEQ ID NO: 1242 - DNA, 366 bp, Homo sapiens
gaggtgcagctggtgcagtctggagcagaggtgaaaaagcccggggagtctctgaagatctcctgtaagggttctggatacagttttaccaactactggatcggctgggtgcgccagatgcccgggaaaggcctggagtggatggggatcatctatcctggtgactctgataccagatacagcccgtccttccaaggccaggtcaccatctcagccgacaagtccatcagcaccgcctacctgcagtggagcagcctgaaggcctcggacaccgccatgtattactgtgcgaggaattcaccagaatggggctactactacggtatggacgtctggggccaagggaccacggtcaccgtctcctca

SEQ ID NO: 1243 - DNA, 362 bp, Homo sapiens
gaggtgcaactggtggagtctgggggaggcttggtccagcctggggggtccctgagactgtcctgtgtagcctctggatttatgattagtagtcactggctgacctgggtccgccaggctccaggaaaggggctggagtgggtggccaacataaatcaagatggaagtgccaaagtctatgtggactctttgaaggaccgattcaccatctccagagacaatgtcaagaactcagtgtctctgcaaatgaacagcctgagagtcgacgacacggctgtgtatttctgtgcgagggatccctatgataacggtggttatggggcttttgatatctggggccaagggacaacggtcaccgtctc

SEQ ID NO: 1244 - DNA, 370 bp, Homo sapiens
cagctgcagctgcaggagtccggctcaggactggtgaaaccttcggacaccctggccctcacctgcactgtctctggtggctccatcagcagtggtggttactcctggagctggatccggcagccaccagggaagggcctggagtggattgggtacatctatcatagtgggaccacctactacaacccgtccctcaagagtcgagtcaccatgtcagtagacaggtccaagaatcagttctccctgaagctgaactctgtgaccgccgcggacacggccgtgtattactgtgccggagatctgggaaggtggctctttcatgatgcttttgatatctggggccaagggacaatggtcaccatctcttcag

SEQ ID NO: 1245 - DNA, 367 bp, Homo sapiens
caggtgcagctggtggagtctgggggaggcgtggtccagcctgggaggtccctgcgactctcctgtgcagcgtctggattcaccttcagtacctatggcatgcactgggtccgccaggctccaggcaaggggctggagtgggtggcagttatatggtatgatggaagtaataaatattatgcagactccgtgaagggccgattcaccatctccagagacaattccaagaacacgctgtatctgcaaatgaacagcctgagagccgaggacacggctgtgtattactgtgcgaaggacggtccggacctcgatctaggagcagatcttgactcctggggccagggaaccctggtcaccgtctcctcag

SEQ ID NO: 1246 - DNA, 364 bp, Homo sapiens
caggtgcagctgcaggagtcgggcccaggactggtgaagccttcggagaccctgtccctcacctgcactgtctctggtgactccatcagtagttactcctggagctggatccggcagcccgccgggaagggactggagtggattgggcatatctataccagtgggagcaccaactacaacccctccctcaagagtcgagtcaccatgtcagtagacacgtccaagaaccagttctccctgaagctgagctctgtgaccgccgcggacacggccgtgtattactgtgcgagagaactcctcaggtatagcagcagctggtacccctccgactggggccagggaaccctggtcaccgtctcctcag

SEQ ID NO: 1247 - DNA, 363 bp, Homo sapiens
caggtgcagctgcaggagtcgggcccaggactggtgaagccttcggagaccctgtccctcacctgcactgtctctggtggctccatcagaagtcactactggagctggatccggcagcccccagggaagggactggagtggattggatatatctattacactgggagcaccaactacaacccctccctcaagagtcaattcaccatgtcagtggacatgtccaagaaccagttctccctgaagctgagctctgtgaccgctgcggacacggccgtatattactgtgcgagaactatatacatgttcccgccaaactaccacatggacgtctggggcaaagggatcacggtcaccgtctcctca

SEQ ID NO: 1248 - DNA, 366 bp, Homo sapiens
gaggtgcagctggtggagtccgggggaggcttagttcagcctggggggtccctgagactctcctgtgcagcctctggattcaccttcagtagctactggatgcactgggtccgccaagctccagggaaggggctggtgtgggtctcacgtattaatagtgatgggagtagcacaagctacgcggactccgtgaagggccgattcaccatctccagagacaacgccaagaacacgctgtatctgcaaatgaacagtctgagagccgaggacacggctgtgtattactgtgcaaggtgctggtggggtgactgctcccgggggggtatggacgtctggggccaagggaccacggtcaccgtctcctca

SEQ ID NO: 1249 - DNA, 376 bp, Homo sapiens
gaggtgcagctggtggagtctgggggaggcttggtaaagcctggggggtcccttagactctcctgtgcagcctctggattcactttcagtcacgcctggatgagctgggtccgccaggctccagggaaggggctggagtgggttggccatattaaaagcaaaactgatggtgggacaggagactacgctgcacccgtcaaaggcagattcaccatctcaagagatgattcaaaaaacacgctgtatctgcaaatgaacagcctgaaaaccgaggacacagccgtgtattactgtagtacagcggggtatttctatgatagtagtgcttattactacgcctactggggccacggaaacctggtcaccgtctcctcag

SEQ ID NO: 1250 - DNA, 370 bp, Homo sapiens
cagatcaccttgaaggagtctggtcctacgctggtgaaacccacacagaccctcacgctgacctgcaccttctctgggttctcactcagcactagtggagtgggtgtgggctggatccgtcagcccccaggaaaggccctggagtggcttgcactcatttattggaatgatgataagcgctacagcccatctctgaagagcaggctcaccatcaccaaggacacctccaaaaaccaggtggtccttacaatgaccaacatggaccctgtggacacagccacatattactgtgcacacaggatcagtgggagctacttttctggtgcttttgatatctggggccaagggacaatggtcaccgtctcttcag

SEQ ID NO: 1251 - DNA, 367 bp, Homo sapiens
caggtgcagctggtggaatctgggggaggcgtggtccagcctgggaggtccctgagactctcctgtgcagcctctggattcaccttcagtagctatgctatgcactgggtccgccaggctccaggcaaggggctggagtgggtggcagttatatcatatgatggaagcaataaatactacgcagactccgtgaagggccgattcaccatctccagagacaattccaagaacacgctgtatctgcaaatgaacagcctgagacctgaggacacggctgtttattactgtgggaggctgactagtagtggttattactacgccggttttgactactggggccagggaaccctggtcaccgtctcctcag

SEQ ID NO: 1252 - DNA, 367 bp, Homo sapiens
caggtgcagctggtggagtctgggggaggcgtggtccagcctgggaggtccctgagactctcctgtgcagcctctggattcaccttcagtagctatgctatgcactgggtccgccaggctccaggcaaggggctggagtgggtggcagttatatcatatgatggaagtaataaatactacgcagactccgtgaagggccgattcaccatctccagagacaattccaagaacacgctgtatctgcaaatgaacagcctgagagctgaggacacggctgtgtattactgtgcgagagatggttcggggagttattataacgggggttttgactactggggccagggaaccctggtcaccgtctcctcag

SEQ ID NO: 1253 - DNA, 367 bp, Homo sapiens
caggtgcagctggtggagtctgggggaggcgtggtccagcctgggaggtccctgagactctcctgtgcagcctctggattcaccttcagtagctatgctatgcactgggtccgccaggctccaggcaaggggctggagtgggtggcagttatatcatatgatggaagtaataaatactacgcagactccgtgaagggccgattcaccatctccagagacaattccaagaacacgctgtatctgcaaatgaacagcctgagagctgaggacacggctgtgtattactgtgcgagagatcatcagcgggtaggatggttcggggagttatcacattggggccagggaaccctggtcaccgtctcctcag

SEQ ID NO: 1254 - DNA, 367 bp, Homo sapiens
gaggtgcagctggtggagtctgggggaggcctggtcaagcctggggggtccctgagactctcctgtgcagcctctggattcaccttcagtagctatagcatgaactgggtccgccaggctccagggaaggggctggagtgggtctcatccattagtagtagtagtagttacatatactacgcagactcagtgaagggccgattcaccatctccagagacaacgccaagaactcactgtatctgcaaatgaacagcctgagagccgaggacacggctgtgtattactgttatacgctagcatattgtggtggtgactgctatcgagatgactactggggccagggaaccctggtcaccgtctcctcag

SEQ ID NO: 1255 - DNA, 367 bp, Homo sapiens
gaggtgcagctggtggagtctgggggaggcctggtcaagcctggggggtccctgagactctcctgtgcagcctctggattcaccttcagtagctatagcatgaactgggtccgccaggctccagggaaggggctggagtgggtctcatccattagtagtagtagtagttacatatactacgcagactcagtgaagggccgattcaccatctccagagacaacgccaagaactcactgtatctgcaaatgaacagcctgagagccgaggacacggctgtgtattactgtgcgagagattggtatagtgggagctactacgaagtgtttgactactggggccagggaaccctggtcaccgtctcctcag

SEQ ID NO: 1256 - DNA, 364 bp, Homo sapiens
caggtgcagctacagcagtggggcgcaggactgttgaagccttcggagaccctgtccctcacctgcgctgtctatggtgggtccttcagtggttactactggagctggatccgccagcccccagggaaggggctggagtggattggggaaatcaatcatagtggaagcaccaactacaacccgtccctcaagagtcgagtcaccatatcagtagacacgtccaagaaccagttctccctgaagctgagctctgtgaccgccgcggacacggctgtgtattactgtgcgagagaggtggtggtgactgctagtcggcggtggttcgacccctggggccagggaaccctggtcaccgtctcctcag

SEQ ID NO: 1257 - DNA, 364 bp, Homo sapiens
caggtgcagctacaacagtggggcgcaggactgttgaagccttcggagaccctgtccctcacctgcgctatgtatggtgggtccctcactgcttactactggagttggatccgccagcccccagggaaggggctggagtggattggggaaatcactcatagtggaagcaccaactacaatccgtccctcaagagtcgactcaccatatcaatagacacgtccaagagacacctctccctgaagctgagctctgtgaccgccgcggacacggctgtatatttctgtgcgagggtggattacagtaactggttcgttcggcactttgactcctggggccagggaaccctggtcatcgtctcctcag

SEQ ID NO: 1258 - DNA, 364 bp, Homo sapiens
caggtgcagctacaacaatggggcgcaggactgttgaagccttcggagaccctgtccctcacctgcgctgtctatggtgggtccctcactgcttactactggagttggatccgccagcccccagggaaggggctggagtggattggggaaatcactcatagtggaagcaccaactacaacccgtccctcaagagtcgactcaccatatcaatagacacgtccaagagacacctctccctgaagctgagctctgtgaccgccgcggacacggctgtatattactgtgcgagggtggattacagcaactggtacgttcggcagtttgactcctggggcgagggaaccctggtcatggtctcgtcag

SEQ ID NO: 1259 - DNA, 367 bp, Homo sapiens
gaggtgcagctggtgcagtctggagcagaggtgaaaaagccgggggagtctctgaagatctcctgtcaggtttctggatacagatttaccacttactggatcggctgggtgcgccagatgcccgggaaaggcctggagtggatggggatcatctatcctgctgactctgataccagatacagcccgtccttcgaaggccaggtcaccatgtcagccgacaagtccatcagcaccgcctacctgcagtggaacagcctgaaggcctcggacaccgccatgtattactgtgcgagacatgagggcccctactccacaacctcaccctttgactactggggccagggaaccctggtcaccgtctcctcag

SEQ ID NO: 1260 - DNA, 367 bp, Homo sapiens
gaggtgcagctgttggagtctgggggaaacttggtacagcctggggggtccctgagactctcctgtgcagcctctggattcagctttagaagctatgccatgagctgggtccgccaggctccagggaaggggctggagtgggtctcagatattagtggtagtggtggtagcacatactacgcagactccgtgaagggccggttcaccatctccagagacaattccaagaacacgctgtatctgcaaatgaacagcctgagagtcgaggacacggccgtatattactgtgcgaaagatccggggctgtatagcagcacctggtacgctgactactggggccagggaaccctggtcaccgtctcctcag

SEQ ID NO: 1261 - DNA, 367 bp, Homo sapiens
gaggtgcagctgttggagtctgggggaggcttggtacagcctggggggtccctgagactctcctgtgcagcctctggattcacctttagcagctatgccatgagctgggtccgccaggctccagggaaggggctggagtgggtctcagctattagtggtagtggtggtagcacatactacgcagactccgtgaagggccggttcaccatctccagagacaattccaagaacacgctgtatctgcaaatgaacagcctgagagccgaggacacggccgtatattactgtgcgaaagaatcgagcagtggctggtaccttggctactttgactactggggccagggaaccctggtcaccgtctcctcag

SEQ ID NO: 1262 - DNA, 367 bp, Homo sapiens
gaggtgcagctgttggagtctgggggagactttatacagcctggggggtccctgagactctcttgtgtagcctctcgattcacctttagcagctatgccatgaactgggtccgccaggctccagggaaggcgctggagtgggtctccgctattagtactagtggtggtactacatactacgcagactccgtgaagggccggttcaccatctccagagacaattccaagaacacgttgtatctccaaatgaacagcctgagagccgaggacacggccatatactactgtgcgaaagagttacatccagctgctatcacgtcgggctttgactactggggccagggaaccctggtcaccgtctcctcag

SEQ ID NO: 1263 - DNA, 367 bp, Homo sapiens
caggtgcagctggtgcagtctggggctgaggtgaagaagcctgggtcctcggtgaaggtctcctgcaaggcttctggaggcaccttcagcagctatgctatcagctgggtgcgacaggcccctggacaagggcttgagtggatgggagggatcatccctatctttggtacagcaaactacgcacagaagttccagggcagagtcacgattaccgcggacgaatccacgagcacagcctacatggagctgagcagcctgagatctgaggacacggccgtgtattactgtgcgagagggggagctacagtgggagctactaagtactttgactactggggccagggaaccctggtcaccgtctcctcag

SEQ ID NO: 1264 - DNA, 367 bp, Homo sapiens
caggtccagctggtgcagtctggggctgaggtgaagaagcctgggtcctcggtgaaggtctcctgcaaggcttctggaggcaccttcagcagctatgctatcagctgggtgcgacaggcccctggacaagggcttgagtggatgggagggatcatccctatctttggtacagcaaactacgcacagaagttccagggcagagtcacgattaccacggacgaatccacgagcacagcctacatggagctgagcagcctgagatctgaggacacggccgtgtattactgtgcgaggctctctggtattacgatttttggagtggcctttgactactggggccagggaaccctggtcaccgtctcctcag

SEQ ID NO: 1265 - DNA, 367 bp, Homo sapiens
caggtgcagctggtgcagtctggggctgaggtgaagaagcctggggcctcagtgaaggtctcctgcaaggcttctggatacaccttcaccggctactatatgcactgggtgcgacaggcccctggacaagggcttgagtggatgggatggatcaaccctaacagtggtggcacaaactatgcacagaagtttcagggcagggtcaccatgaccagggacacgtccatcagcacagcctacatggagctgagcaggctgagatctgacgacacggccgtgtattactgtgcgagagagtatagcagcagcctgtacgctgaatacttccagcactggggccagggcaccctggtcaccgtctcctcag

SEQ ID NO: 1266 - DNA, 352 bp, Homo sapiens
gaggtgcagctggtggagtctgggggaggcttggtaaagcctggggggtcccttatagtctcctgtgcagcctctggattcagtttcagtgacgccgggatgagctgggtccgccaggctccagggaaggggctggagtgggttggccgtattcacagaaaaactgatggtgggacaacagtctacgctgcacccgtgaaaggcagattcagcatctcaagagatgattcaaagaacacggtctatctgcaaatgaacagcctgataaccgaggacacaggcgtatattattgtaccatagatcaagattatgataggatatggggccaagggacaacggtcaccgtctctt

SEQ ID NO: 1267 - DNA, 367 bp, Homo sapiens
caggtgcagctggtgcagtctggggctgaggtgaagaagcctggggcctcagtgaaggtctcctgcaaggcttctggatacaccttcaccggctactatatgcactgggtgcgacaggcccctggacaagggcttgagtggatgggatggatcaaccctaacagtggtggcacaaactatgcacagaagtttcagggcagggtcaccatgaccagggacacgtccatcagcacagcctacatggagctgagcaggctgacatctgacgacacggccgtgtattattgtgcgagagggtcttcatataactggaactacagttggttcgacccctggggccagggaaccctggtcaccgtctcctcag

SEQ ID NO: 1268 - DNA, 378 bp, Homo sapiens
gaggtgcaactggtggagtctgggggaggcttggtcaggcctggggggtaccttagactctcctgtgcagcctccagactcaccttcttcagtaatacctggatgagttgggtccgccaggctccggggaaggggctggagtgggttggccgtattaaaagcaaaactgatggtgggacaacagactacgctgcacccgtgaaaggcagattcaccatctcaagagatgattcaaaaaacacgctgtatctgcaaatggaaagcctgaaaaccgaggacacagccgtgtatcactgtaccacagagagtacgatttttggagaatactactacttcatggacgtctggggcatagggaccacggtcaccgtctcctca

SEQ ID NO: 1269 - DNA, 364 bp, Homo sapiens
caggtgcagctgcaggagtcgggcccaggactggtgaagccttcggagaccctgtccctcacctgcactgtctctggtggctccatcagtagtcactactggagctggatccggcagcccccagggaagggactggagtggattgggtatatctattacagtgggagcaccaactacaacccctccctcaagagtcgagtcaccatatcagtagacacgtccaagaaccagttctccctgaagctgagctctgtgaccgctgcggacacggccgtgtattactgtgcgagagagtacgtagagatggctacatcgaccgcctttgactactggggccagggaaccctggtcaccgtctcctcag

SEQ ID NO: 1270 - DNA, 346 bp, Homo sapiens
caggtgcagctacagcagtggggcgcaggactgttgaagccttcggagaccctgtccctcacctgcgctgtctatggtgggtccttcagtggttactactggagctggatccgccagcccccagggaaggggctggagtggattggggaaatcaatcatagtggaagcaccaactacaacccgtccctcaagagtcgagtcaccatatcagtagacacgtccaagaaccagttctccctgaagctgagctctgtgaccgccgcggacacggctgtgtattactgtgcgagaggcctcaactggttattacgctggggccagggaaccctggtcaccgtctcctcag

SEQ ID NO: 1271 - DNA, 346 bp, Homo sapiens
gaggtgcagctggtggagactggaggaggtttgatccagcctggggggtccctgagactctcctgtgcagcctctgggttcaccgtcagtagcaactacatgagctgggtccgccaggctccagggaaggggctggagtgggtctcaattctttatagcggtggtagcacatactacgcagactccgtgaagggccgattcaccatctccagagacaattccaagaacacgctgtatcttcaaatgaacagcctgagagccggggacacggccgtgtattactgtgtagctggtactggtgactcacttacttggggccagggaaccctggtcaccgtctcctcag

SEQ ID NO: 1272 - DNA, 376 bp, Homo sapiens
gaggtgcagttggtggagtctgggggaggcctggtcaagcctggggggtccctgagactctcctgtgcagcctctggattcaccttcagtacctatagcatgaactggctccgccaggctccagggaaggggctggagtgggtctcatccattagtagtagtagtacttacatagactacgcagactcagtgaagggccgcttcaccatctccagagacaacgccaagaactcactgtatctgcaaatgaacagcctgagagccgaggacacggctgtgtattactgtgcgaggagggacgaatatagtgggagccctcccggccagtactactttaactactggggccagggaaccctggtcaccgtctcctcag

SEQ ID NO: 1273 - DNA, 349 bp, Homo sapiens
gaggtgcagctggtggagtctgggggaggcctggtcaagcctggggggtccctgagactctcctgtgcagcctctggattcaccttcagtagctatagcatgaactgggtccgccaggctccagggaaggggctggagtgggtctcatccattagtagtagtagtagttacatatactacgcagactcagtgaagggccgattcaccatctccagagacaacgccaagaactcactgtatctgcaaatgaacagcctgagagccgaggacacggctgtgtattactgtgcgagcagcagctggttttttgactactggggccagggaaccctggtcaccgtctcctcag

SEQ ID NO: 1274 - DNA, 373 bp, Homo sapiens
caggtgcatctgcaggagtcgggcccaggactggtgaagccttcggagaccctgtccctcacttgcactgtctctggtggctccatcagtagttactactggagctggatccggcagcccccagggaagggactggagtggattgggtatatgtattacagtgggagcaccaactacaacccctccctcaagagtcgagtcagcatgtcattagacacgtccaagaaccacttctccctgaggctgagctctgtgaccgctgcggacacggccgtgtattactgtgcgagagggacgggttactatgtttcggggaattatgtccccctgttgaactactggggccagggaaccctggtcaccgtctcctcag

SEQ ID NO: 1275 - DNA, 352 bp, Homo sapiens
gaggtgcagctggtggagtccgggggaggcttagttcagcctggggggtccctgagactctcctgtggagcctctggattcaccctcagtagttactggatgcactgggtccgccaagctccaggcaaggggctggagtgggtctcacgtattaataatgatgggagtagcaccacattctacgcggactccgtgaagggccgattcaccatctccagagacaacgccaagaacacgctgtatctgcaaatgaacagtctgagagtcgaggacacggctgtgtattactgtgtaagagatgataaggctatggctaactggggccagggaaccctggtcaccgtctcctcag

SEQ ID NO: 1276 - DNA, 349 bp, Homo sapiens
caagttcagctggtgcagtctggagctgaggtgaagaagcctggggcctcagtgaacgtctcctgcaagacttctggttacacctttaccacttatggtatcagctgggtgcgacaggcccctggacaagggcttgagtggatgggatggatcagcacttacaatggtaatacaaactttgcacagaagttccagggcagagtcaccttgaccacagacacatccacgagcacaacctacatggaactgaggagcctgagatctgacgacacggccgtctattactgtgcgagaggtgggagcgcgtcggactactggggccagggaaccctggtcaccgtctcctcag

SEQ ID NO: 1277 - DNA, 376 bp, Homo sapiens
gaggtgcagctggtggagtctgggggaggcttggtccagcctggggagtccctgagactctcctgttcagtctctggagtcatcttcagttactatgctatgtactgggtccgccaggctccagggaagggactggaatatgtttcaactattagtagtactggggatagcacatactacgcagactcagtgaagggcagattcagcatctccagagacaattccaagagcaccctgtatcttcaaatgagaagtctgagaactgaggacacggctgtgtatttctgtgtcaaagggtcggctagaaattgtattagtaccagctgctatgactctgactactggggccagggaaccctggtcaccgtctcctcag

SEQ ID NO: 1278 - DNA, 376 bp, Homo sapiens
gaggtgcagctggtggagtctgggggaggcttggtccagcctggggggtccctgagactctcctgttcagcctctggattcaccttcagtagctatgctatgcactgggtccgccaggctccagggaagggactggaatatgtttcagctattagtagtaatgggggtagcacatactacgcagactcagtgaagggcagattcaccatctccagagacaattccaagaacacgctgtatcttcaaatgagcagtctgagagctgaggacacggctgtgtattactgtgtgaaaggtcgaaatcgagggtggggcagcagctggtacgaagcccctgactactggggccagggaaccctggtcaccgtctcctcag

SEQ ID NO: 1279 - DNA, 372 bp, Homo sapiens
cagctgcagctgcaggagtccggctcaggactggtgaagccttcacagaccctgtccctcacctgcactgtctctggtggctccatcagcagtggtggttactcctggagctggatccggcagccaccagggaagggcctggagtggattgggtacatctatcatagtgggagcacctactacaacccgtccctcaagagtcgagtcaccatatcagtagacaggtccaagaaccagttctccctgaagctgagctctgtgaccgccgcggacacggccgtgtattactgtgccagagcacgccaggctcataactactactactactacatggacgtctggggcaaagggaccacggtcaccgtctcctca

SEQ ID NO: 1280 - DNA, 376 bp, Homo sapiens
gaggtccagctggtacagtccggggctgaggtgaagaagcctggggccaccgttaaaatctcctgcaaggcttttggatacaccttcacccactactacatgcactggctacagcaggcccccggaaaaggatttgagtggatgggacgtgttgatcctgacgatggtgaaagacgatatgcagagaagttccaacatagaatcacaataaccgcagacgcgtctacagatacttcgtacatggaagtcaccagcctgacatctgaggacacggccgtctatttctgtgtaacagcttggatcgggtattgtggtcagagtgtctgtccctcttatcattactggggccagggaaccctggtcaccgtctcctcag

SEQ ID NO: 1281 - DNA, 382 bp, Homo sapiens
gaggtgcagctggtggagtctgggggaggcttggtacagccagggcggtccctaagactctcctgttcagcttctggattcatttttagtgattatcctatgacctggttccgccaggctccggggaaggggctggagtggctaggcttcattagaagcaaaacttatggtgagacaacagaatacgccgcgtctgtgaaagggagattcaccatctcaagagatgattccaaaaacatcgcctatctacaaatgaacagcctgaaaaccgaggacacagccgtgtatttttgtactaggaggctcgtgacggtgccagcttcattaagtttttattactttgactactggggccagggaaccctggtcaccgtctcctcag

SEQ ID NO: 1282 - DNA, 349 bp, Homo sapiens
caggtgcagctggtgcagtctggggctgaggtgaagaagcctggggcctcagtgaaagtttcctgcaaggcatctggatacaccttcaccagctactatatgcactgggtgcgacaggcccctggacaagggcttgagtggatgggaataatcaaccctagtggtgatagcacaggctacgcacagaagttccagggcagagtcaccatgaccagggacacgtccacgagcacagtctacatggagctgagcagcctgagatctgaggacacggccgtgtattactgtgcgagaacgggaggggcttttgatatctggggccaagggacaatggtcaccgtctcttcag

SEQ ID NO: 1283 - DNA, 379 bp, Homo sapiens
cagctgcagctgcaggagtcgggcccaggactggtgaagccttcggagaccctgtccctcacctgcactgtctctggtggctccatcagcagtagtagttactactggggctggatccgccagcccccagggaaggggctggagtggattgggagtatctattatagtgggagcacctactacaacccgtccctcaagagtcgagtcaccatatcagtagacacgtccaagaaccagttctccctgaagctgagctctgtgaccgcagcggacacggccgtgtattactgtgcgagagggacgcgatggttcggggagttattagtttcgtactactttgactactggggccagggaaccctggtcaccgtctcctcag

SEQ ID NO: 1284 - DNA, 376 bp, Homo sapiens
gaggtgcagctggtggagtccgggggaggcttagttcagcctggggggtccctgagactctcctgtgcagcctctggattcaccttcagtagctactggatgcactgggtccgccaagctccagggaaggggctggtgtgggtctcacgtattaatagtgatgggagtagcacaagctacgcggactccgtgaagggccgattcaccatctccagagacaacgccaagaacacgctgtatctgcaaatgaacagtctgagagccgaggacacggctgtgtattactgtgcaagggctgaacttggatacagctatggttacgggggttcttactttgactactggggccagggaaccctggtcaccgtctcctcag

SEQ ID NO: 1285 - DNA, 375 bp, Homo sapiens
gaggtgcagctggtggagtctgggggaggcttggtacagcctggggggtccctgagactctcctgtgcagcctctggattcaccttcattacctatagcatgaattgggtccgccaggctccagggaaggggctggagtgggtttcatacattagtagtagtagtagtaccatatactacgcagactctgtgaagggccgattcaccatctccagagacaacgccaagaactcactgtatctgcaaatgaacagcctgagagccgaggacacggctgtgtattactgtgcgagactccttagagcagcagctggtagggacaagtactacggtatggacgtctggggccaagggaccacggtcaccgtctcctca

SEQ ID NO: 1286 - DNA, 375 bp, Homo sapiens
caggtccagctggtgcagtctggggctgaggtgaagaagcctgggtcctcggtgaaggtctcctgcaaggcttctggaggcaccttcagcagctatgctatcagctgggtgcgacaggcccctggacaagggcttgagtggatgggagggatcatccctatctttggtacagcaaactacgcacagaagttccagggcagagtcacgattaccacggacgaatccacgagcacagcctacatggagctgagcagcctgagatctgaggacacggccgtgtattactgtgcgagagataggagtggctacgtgggggactactactactactacatggacgtctggggcaaagggaccacggtcaccgtctcctca

SEQ ID NO: 1287 - DNA, 375 bp, Homo sapiens
caggagcagctggtggagtctgggggaggcttggtcaagcctggagggtccctgagactctcctgtgcagcctctggattcaccttcagtgactactacatgagctggatccgccaggctccagggaaggggctggaatgggtttcatacattagtggtagtagtcgttacacaaactacgcagactctgtgacgggccgattcaccatctccagagacaacgccaagaactcactatatctgcaaatgaacggcctgagagccgaggacacggccatatattactgtgcgagagcagaggatagtggctacgaatcgccctacttctacggtatggacgtctggggccaagggaccacggtcaccgtctcctca

SEQ ID NO: 1288 - DNA, 369 bp, Homo sapiens
caggtgcagctggtggagtctgggggaggcttggtcaagcctggagggtccctgagactctcctgtgcagcctctggattcaccttcagtgactactacatgagctggatccgccaggctccagggaaggggctggagtgggtttcatacattagtagtagtagtagttacacaaactacgcagactctgtgaagggccgattcaccatctccagagacaacgccaagaactcactgtatctgcaaatgaacagcctgagagccgaggacacggccgtgtattactgtgcgagatgtatagcagaccgttactactactactactacatggacgtctggggcaaagggaccacggtcaccgtctcctca

SEQ ID NO: 1289 - DNA, 375 bp, Homo sapiens
caggtgcagctggtggagtctgggggaggcttggtcaagcctggagggtccctgagactctcctgtgcagcctctggattcaccttcagtgactactacatgagctggatccgccaggctccagggaaggggctggagtgggtttcatacattagtagtagtagtagttacacaaactacgcagactctgtgaagggccgattcaccatctccagagacaacgccaagaactcactgtatctgcaaatgaacagcctgagagccgaggacacggccgtgtattactgtgcgaggccgaaatacagtaagtcccattactactactactactacatggacgtctggggcaaagggaccacggtcaccgtctcctca

SEQ ID NO: 1290 - DNA, 376 bp, Homo sapiens
caggtgcagctggtggagtctgggggaggcgtggtccagcctgggaggtccctgagactctcctgtgcagcctctggattcagcttcagtagctatgctatgcactgggtccgccaggctccaggcaaggggctggagtgggtggcagttatatcatatgatggaagtaaaaaattctacgcagactccgtgaagggccgattcaccatctccagagacaattccaagaacacgctgtatgtgcaaatgaacagcctgagagctgaggacacggctgtttattactgtgcgacagatgggggcattgtaggagtaccagctgttcacaactggttcgacccctggggccagggaaccctggtcaccgtctcctcag

SEQ ID NO: 1291 - DNA, 376 bp, Homo sapiens
gaggtgcagttggtggagtctgggggaggcttggtccagactggggggtccctgagactctcctgtgcagcctctggattcaccttgagtaggtattggatgacctgggtccgccaggctccagggaaggggctggagtgggtggccaacatacaacaagatggaggtgagaaaaattatgtggactctgtgaagggccgattcaccatctccagagacaacgccaagaactcactgtatctgcaaatgagcagcctgagagccgaggacacggctgtttactattgtgcgagagaaacctatcgtattggggattacgggagtgttgatgctcttgatatctggggccaagggacaatgctcaccgtctctgcag

SEQ ID NO: 1292 - DNA, 376 bp, Homo sapiens
caggttcagctggtgcagtctggagctgaggtgaagaagcctggggcctcagtgaaggtctcctgcaaggcttctggttacacctttaccagctatggcatcacctgggtgcgacaggcccctggacaagggcttgagtggatgggatggatcagcacttacaatgataacacaaactatgcacagaagttccagggcagagtcaccatgaccacagacacatccacgagcacagcctacatggagctggggagcctgagatctgacgacacggccgtgttttactgtgcgagagttgttattctgggagctactgaggggattagttggtacttcgatctctggggccgtggcaccctggtcactgtctcctcag

SEQ ID NO: 1293 - DNA, 379 bp, Homo sapiens
cagatcaccctgaaggagtctggtcccacgctggtgaaacccgcagagaccctcacgctgacctgcaccttctctgacttctcactcagcactagtggcgtgggtgtgggctggatccgtcagcccccaggagaggccctggagtggcttgcactcatttattgggatgatgataggcgctacagcccatctctgcagagcagactcaccatcagcaaggacacctccagaaagcaggtgattcttacaatgacgtacatggaccctgcggacacaggcacatattactgtgctcaccacgggggccccaactgtcaatatagtagtggttgctactttgactactggggccagggagccctggtcaccgtctcctcag

SEQ ID NO: 1294 - DNA, 379 bp, Homo sapiens
cagatcaccttgaaggaatctggtcctacgctggtgaaacccacacagaccatcacgctgacctgcaccttctctgggttctcactcaccaccagtggagtgggtgtgggctggatccgtcagcccccaggaaaggccctggagtggcttgcactcatttactgggatgatgataggcgctacagcccatctctgcggagcaggctcaccatcactaaggacacttcgaagaaccaggtggtcctaacaatgaccaacatggaccctgtggacacagccacatattattgtgcataccacgggggaccctcctgccaatatagcactggttgctattttgaccagtggggccagggaaccctggtcaccgtctcctcag

SEQ ID NO: 1295 - DNA, 361 bp, Homo sapiens
gaggtgcagctggtggagtctgggggaggcttggaacagcctggggggtccctgagactctcctgtgcagcctctggattcacctttagcaactatgccatgaactgggtccgccaggctccagggaaggggctggagtgggtctcagctattagtggtagtggtagtaccacatactacgcagactccgtgaagggccggttcaccatctccagagacaattccaagaacacgctgtatctgcaaatgaacagcctgagagtcgaggacacggccgtatattactgtgcgaaagacgatccagactacggtgacttccctgactactggggccagggaaccctggtcaccgtctcctcag

SEQ ID NO: 1296 - DNA, 356 bp, Homo sapiens
caggtgcagctgcaggagtcgggcccaggactggtgaagccttcggagaccctgtccctcacctgcactgtctctggtggctccatcagtaattactacttgagctggatccggcagcccccagggaagggactgcagtggattgggtacgtctataccagtgggaccaccaactacaacccctccctcaagagtcgagtcaccttgtctgtagacacgtccaagaacctgttctccctgaggctgacctctgtgaccgccgcagacacggccgtgtattattgtgcgaaacatcgtctaggaagtggtccattctttgactactggggccagggaaccctggtcaccgtctcctc

SEQ ID NO: 1297 - DNA, 367 bp, Homo sapiens
caggtgcagctgcaggagtcgggcccaggactggtgaagccttcggagaccctgtccctcacctgcactgtctctggtggctccatcagtagttactactggagctggatccggcagtccccagggaagggactggaatggattgggtatatctattacactgggagcaccaactacaacccctccctcaagagtcgagtcaccatgtcagtagacacgtccaagaaccagttctccctgaatctgagctctgtgaccgctgcggacacggccgtgtattactgtgcgagaattgggaccctctatagcagtacctggtactggttcgacccctggggccagggaaccctggtcaccgtctcctcag

SEQ ID NO: 1298 - DNA, 361 bp, Homo sapiens
gaggtgcagctggtgcagtctggagcagaggtgaaaaagccgggggagtctctgaagatctcctgtaagggttctggatacagctttaccagctactggatcggctgggtgcgccagatgcccgggaaaggcctggagtggatggggatcatctatcctggtgactctgataccagatacagcccgtccttccaaggccaggtcaccatctcagccgacaagtccatcagcaccgcctacctgcagtggagcagcctgaaggcctcggacaccgccatgtattactgtgcgagacggagcagctatgcctatgggcctcttgactactggggccagggaaccctggtcaccgtctcctcag

SEQ ID NO: 1299 - DNA, 361 bp, Homo sapiens
caggtgcaactggtggagtctgggggaggcctggtcaagcctggagggtccctgagactctcctgtgcagccgctggattcaccttcagtgactactacatgagctggatccgccaggctccagggaaggggccggagtgggtttcatacattagtactaggagtggttacacaaactacgtagactctgtgaagggccgattcaccatctccagagacaacgccaagaactcactgtatctgcaaatgaacagcctgagagccgaggacacggccgtgtattactgtgcgagagatctgacggcagtggctggtcctgctgactactggggccagggaaccctggtcaccgtctcctcag

SEQ ID NO: 1300 - DNA, 356 bp, Homo sapiens
caggtgcagctgcaggagtcgggcccaggactggtgaagccttcggagaccctgtccctcacctgcactgtctctggtggctccatcagtaattactacttgagctggctccggcagcccccagggaagggactgcagtggattgggtacgtctataccagtgggaccaccaactacaacccctccctcaagagtcgagtcaccttgtcagtagacacgtccaagaacctgttctccctgaggctgacctctgtgaccgccgcagacacggccgtgtattattgtgcgaaacatagtctaggaagtggtccactctttgactactggggccagggaaccctggtcaccgtctcctc

SEQ ID NO: 1301 - DNA, 361 bp, Homo sapiens
caggtgcagctggtggagtctgggggaggcgtggtccagcctgggaggtccctgagactctcctgtgcagcctctggattcaccttcagtaactatgctatgcactgggtccgccaggctccaggcaaggggctggagtgggtggcagttatatcatatgatggaagcaataaatactacgcagactccgtgaagggccgattcaccatctccagagacaattccaagaacacgctgtatctgcaaatgaacagcctgagagttgaggacacggctgtgtattactgtgcgagaccccgggggggtggctacgcagaatttgactactggggccagggaaccctggtcaccgtctcctcag

SEQ ID NO: 1302 - DNA, 361 bp, Homo sapiens
caggtgcagctggtggagtctgggggaggcgtggtccagcctgggaggtccctgagactctcctgtgcagcctctggattcaccttcagtagctatgctatgcactgggtccgccaggctccaggcaaggggctggagtgggtggcagttatatcatatgatggaagcaataaatactacgcagactccgtgaagggccgattcaccatctccagagacaattccaagaacacgctgtatctgcaaatgaacagcctgagagctgaggacacggctgtgtattactgtgcgagatcgaagggtggctacgtatccccctttgactactggggccagggaaccctggtcaccgtctcctcag

SEQ ID NO: 1303 - DNA, 361 bp, Homo sapiens
caggtgcagctggtggagtctgggggaggcgtggtccagcctgggaggtccctgagactctcctgtgcagcctctggattcaccttcagtagctttgctatgcactgggtccgccagagtccaggcaagggactggagtgggtggcagttatatcatatgatggaaacaataagtactacacagactccgtgaagggccgattcgccatctccagagacaattccaagaacacggtgtatctggaaatgaacagcctgcgagctgaggacacgtctgtatattactgtgcgagagacagaagtggctacagctatgtgtttgactactggggtcagggaaccctggtcaccgtctcctcag

SEQ ID NO: 1304 - DNA, 361 bp, Homo sapiens
gaggtgcagctggtggagtctgggggaggcttggtccagcctggggggtccctgagactctcctgttcagcctctggactcaccttcagtagccacactatacactgggtccgccaggctccagggaagggactggaatatgtttcagctattagtcctaatgggggaagcacatactacgcagactcagtgaagggcagattcaccatctccagagacaattccaagaacacgttgtatcttcaaatgagcagtctgagaactgaagacacggctgtgtattactgtgtgagagggaagggtggctacgcctactactttgactcctggggccagggaaccctggtcgccgtctcctcag

SEQ ID NO: 1305 - DNA, 358 bp, Homo sapiens
caggtgcagctgcaggagtcgggcccaggactggtgaagccttcggagaccctgtccctcacctgcactgtctctggtgcctccatcagtaattactactggagctggatccggcagcccccagggaagggactggagtggattgggtatgtctattacagtgggagcaccaactacaacccctccctcaagagtcgagtcaccatgtcagtagacacgtccaagagccagttctccctgaagctgagttctgtgaccgctgcggacacggccgtgtattactgtgcgggaggactgggagctacgtacaactggttcgacccctggggccagggaaccctggtcaccgtctcctcag

SEQ ID NO: 1306 - DNA, 364 bp, Homo sapiens
caggtgcagctgcaggagtcgggcccaggactggtgaagccttcacagaccctgtccctcacctgcactgtctctggtggctccatcagcagtggtgattactactggagctggatccgccagcccccagggaagggcctggagtggattgggtacatctattacagtgggagcacctactacaacccgtccctcaagagtcgagttaccatatcagtagacacgtccaagaaccagttctccctgaagctgagctctgtgactgccgcagacacggccgtgtattactgtgccagagatgggagctcaaggtacaactggttcgacccctggggccagggaaccctggtcaccgtctcctcag

SEQ ID NO: 1307 - DNA, 367 bp, Homo sapiens
gaggtacagttggtggagtctgggggaggcttggtccagcctggagggtccctgaggctctcctgtgcagcctctggattcaccctcagtgaccactacatggactgggtccgccaggctccagggaaggggctggagtgggttggccgtagtagaaacaaagctaacagttacaccacagaatacgccgcgtctgtgaaaggcagattcaccatctcaagagatgattcagagaattcactgtatcttcaaatgggcagcctgaaaaccgaggacacggccgtgtattactgtgctagagtggtggttagtagtggttattactcctgggactggggccagggaaccctggtcaccgtctcctcag

SEQ ID NO: 1308 - DNA, 355 bp, Homo sapiens
cagctgcagctgcaggagtccggctcaggactggtgaagccttcacagaccctgtccctcacctgcactgtctctggtggctccatcagcagtggtggttactcctggagctggatccggcagccaccagggaagggcctggagtggattgggtacatctatcatagtgggagcacctactacaacccgtccctcaagagtcgagtcaccatatcagtagacaggtccaagaaccagttctccctgaagctgagctctgtgaccgccgcggacacggccgtgtattactgtgccagagttgtcacgtactactttgactactggggccagggaaccctggtcaccgtctcctcag

SEQ ID NO: 1309 - DNA, 369 bp, Homo sapiens
caggtgcagctggtggagtctgggggaggcgtggtccagcctgggaggtccctgagactctcctgtgcagcgtctggattcaccttcagtagctatggcatgcactgggtccgccaggctccaggcaaggggctggagtgggtggcagttatatggtatgatggaagtaataaatactatgcagactccgtgaagggccgattcaccatctccagagacaattccaagaacacggtgtatctgcaaatgaacagcctgagagccgaggacacggctgtgtattactgtgcgaaagatttttggagggggagttactactactactacatggacgtctggggcaaagggaccacggtcaccgtctcctca

SEQ ID NO: 1310 - DNA, 382 bp, Homo sapiens
gaggtgcagctggtggagtctgggggaggcttggtaaagcctggggggtcccttagactctcctgtgcagcctctggattcactttcagtaacgcctggatgagctgggtccgccaggctccagggaaggggctggagtgggttggccgtattaaaagcaaaactgatggtgggacaacagactacgctgcacccgtgaaaggcagattcaccatctcaagagatgattcaaaaaacacgctgtatctgcagatgaacagcctgaaaaccgaggacacagccgtgtattactgtaccacaacaatgatagtagtggttacacattatctcgatgatgcttttgatatctggggccaagggacaatggtcaccgtctcttcag

SEQ ID NO: 1311 - DNA, 357 bp, Homo sapiens
gaggtgcagctggtggagtctgggggaggcttggtacagcctggggggtccctgagactctcctgtgcagcctctggattcaccttcagtttgtacgacatgcactgggtccgccaagctacaggaaaaggtctggaatgggtctcagttattggcactgctggtgacacatactactcaggctccgtgaagggccgattcaccatctccagagaaaatgccaagaactccttgtatcttcaaatgaacagcctgagagccggggacacggctgtgtattactgtgcgagatcggttttgactggttattacggtatggacgtctggggccaagggaccacggtcaccgtctcctca

SEQ ID NO: 1312 - DNA, 378 bp, Homo sapiens
caggtgcagctggtgcagtctggggctgaggtgaagaagcctgggtcctcggtgaaggtctcctgcaaggcttctggaggcaccttcagcagctatgctatcagctgggtgcgacaggcccctggacaagggcttgagtggatgggagggatcatccctatctttggtatagcaaactacgcacagaagttccagggcagagtcacgattaccgcggacgaatccacgagcacagcctacatggagctgagcagcctgagatctgaggacacggccgtatattactgtgcgagagtttcggggttcggggagttactgccatactactactacggtatggacgtctggggccaagggaccacggtcaccgtctcctca

SEQ ID NO: 1313 - DNA, 384 bp, Homo sapiens
gaggtgcagctggtggagtctgggggaggcttggtaaagcctggggggtcccttagactctcctgtgcagcctctggattcactttcagtaacgcctggatgagctgggtccgccaggctccagggaaggggctggagtgggttggccgtattaaaagcaaaactgatggtgggacaacagactacgctgcacccgtgaaaggcagattcaccatctcaagagatgattcaaaaaacacgctgtatctgcaaatgaacagcctgaaaaccgaggacacagccgtgtattactgtaccacagatcttagcagctcgcccggggattactactactactactacatggacgtctggggcaaagggaccacggtcaccgtctcctca

SEQ ID NO: 1314 - DNA, 378 bp, Homo sapiens
caggttcagctggtgcagtctggagctgaggtgaagaagcctggggcctcagtgatggtctcctgcaaggcttctggttacacctttaccgactatggtatcagttgggtgcgacaggcccctggacaagggcttgagtggatgggatggatcagcgcttacaatggtaacacaaagtatgcacagaaactccagggcagagtcaccatgaccacagacacatccacgagcacagcctacatggagctgaggagcctgagctctgacgacacggccatgtattactgtgcgagagaatgttcggtgactccacgccgatactactactactactacatggacgtctggggcaaagggaccacggtcaccgtctcgtca

SEQ ID NO: 1315 - DNA, 364 bp, Homo sapiens
cagatcaccttgaaggagtctggtcctacgctggtgaaacccacacagaccctcacgctgacctgcaccttctctgggttctcactcagcactagtggagtgggtgtgggctggatccgtcagcccccaggaaaggccctggagtggcttgcactcatttattgggatgatgataagcgctacagcccatctctgaagagcaggctcaccatcaccaaggacacctccaaaaaccaggtggtccttacaatgaccaacatggaccctgtggacacagccacatattactgtgcacacaggggctatgtccagcccaatgcttttgatatctggggccaagggacaatggtcaccgtctcttcag

SEQ ID NO: 1316 - DNA, 382 bp, Homo sapiens
cagctgcagctgcaggagtccggctcaggactggtgaagccttcacagaccctgtccctcacctgcactctctctggtggctccatcagcagtggtggttcctcctggagctggatccggcagccaccagggaagggcctggagtggattgggtacatctatcatggtgggagcacctactacaacccgtccctcaagagtcgagtcaccatatcagtagacaggtccaagaaccagttctccctgaagctgagctctgtgaccgccgcggacacggccgtgtattactgtgccagaacgtattactatgatagtagtggttattactaccagtactactttgactactggggccagggaaccctggtcaccgtctcctcag

SEQ ID NO: 1317 - DNA, 376 bp, Homo sapiens
gaggtgcagctggtggagactggaggaggcttgatccagcctggggggtccctgagactctcctgtgcagcctctgggttcaccgtcagtaccaactacatgacctgggtccgccaggctccagggaaggggctggagtgggtctcagttctttatagcgatggtagcacatactacgcagactccccgaagggccgattcaccatctccagagacaattccaagaacacgctgtatcttcaaatgaacagcctgagagccgaggacacggccgtgtattactgtgcgagaggcgcggtggctcggcgtgtggttggtactaacccgtactactttgactactggggccagggaaccctggtcaccgtctcctcag

SEQ ID NO: 1318 - DNA, 379 bp, Homo sapiens
gaggtacaattgttggagtctgggggaggcttggtacagcctggggggtccctgagactctcctgtgcagcctctggattcacctttagcaactttgccatgaactggctccgccaggctccagggaaggggctggagtgggtctcagctattagtggtagtagtggtagcatatactatgcagacttcgtgaagggccggttcaccgtctccagagacaattccaagaacacgctgtatttgcaaatgagcagcctgagagccgaggacacggccgtatattactgtgcaaaagtcacatccccgtcgttcggctactatgatagtagtggttttcccgactactggggccagggaaccctggtcaccgtctcctcag

SEQ ID NO: 1319 - DNA, 382 bp, Homo sapiens
cagatcaccttgaaggagtctggtcctacgctggtgaaacccacacagaccctaacgctgacctgcacgttctctggattctcactcagcactagtggagtgggtgtgggctggatccgtcagcccccaggaaaggccctggagtggcttgcactcatttattgggatgatgataagcgcttcagcccatctctgaggggcaggctcaccatcaccaaggacacctccaaaaaccaggtggtccttacaatgaccaacctggaccctgtggacacagccacatattactgtgcacacactttaaggagcacggggcaggtttttttggagtggcccaactttgagtactggggccagggagccctggtcaccgtctcctcag

SEQ ID NO: 1320 - DNA, 381 bp, Homo sapiens
caggtgcagctggtgcagtctggggctgaggtgaagaagcctgggtcctcggtgaaggtctcctgcaaggcttctggaggcaccttcagcagctatgctatcagctgggtgcgacaggcccctggacaagggcttgagtggatgggagcgatcatccctatctttggtacaccaaactacgcacagaagttccagggcagagtcacgattaccgcggacaaatccacgaacacagcctacatggagctgagcagcctgagatctgaggacacggccgtgtattactgtgcgagagtaggtggttcggggagtccagaccaaccgtactactactacggtatggacgtctggggccaagggaccacggtcaccgtctcctca

SEQ ID NO: 1321 - DNA, 385 bp, Homo sapiens
gaggtgcagctggtggagtctgggggaggcttggtccagcctggagggtccctgagactctcctgtgcagcctctggattcaccttcagtgaccactacatggactgggtccgccaggctccagggaaggggctggagtgggttggccgtactagaaacaaagctaacagttacaccacagaatacgccgcgtctgtgaaaggcagattcaccatctcaagagatgattcaaagaactcactgtatctgcaaatgaacagcctgaaaaccgaggacacggccgtgtattactgtgctagagttactctctactatgatagtagtggttattacaatgatgcttttgatatctggggccaagggacaatggtcaccgtctcttcag

SEQ ID NO: 1322 - DNA, 379 bp, Homo sapiens
gaggtgcagctggtgcagtctggagcagaggtgaaaaagcccggagagtctctgaagatctcctgtaagggttctggatacagctttaccaactactggatcggctgggtgcgccagatgcccgggaaaggcctggagtggatggggatcatctatcctggtgactcttataccagatacagcccgtccttccaaggccaggtcaccatctcagccgacaagtccatcagcaccgcctacctgcagtggagcagcctgaaggcctcggacaccgccatttattactgtgcgaggcctacatattactatgtttcggggagttattatagcgggggttttgactactggggccagggaaccctggtcaccgtctcctcag

SEQ ID NO: 1323 - DNA, 361 bp, Homo sapiens
gaagtgcagctggtggagtctgggggagtcgtggtacagcctggggggtccctgagactctcctgtgcagcctctggattcacctttgatgattataccatgcactgggtccgtcaagctccggggaagggtctggagtgggtctctcttcttagttgggatggtggtagcacatactatgcagactctgtgaagggccgattcaccatctccagagacaacagcaaaaactccctgtatctgcaaatgaacagtctgagaactgaggacaccgccttgtattactgtgcccgaggagtggctggcttaggttggtacttcgatctctggggccgtggcaccctggtcactgtctcctcag

SEQ ID NO: 1324 - DNA, 379 bp, Homo sapiens
caggtgcagctggtggagtctgggggaggcgtggtccagcctgggaggtccctgagactctcctgtgcagcctctggattcaccttcagtagctatgctatgcactgggtccgccaggctccaggcaaggggctggagtgggtggcagttatatcatatgatggaagtaataaatactacgcagactccgtgaagggccgattcaccatctccagagacaattccaagaacacgctgtatctgcaaatgaacagcctgagagctgaggacacggctgtgtattactgtgcgagaggtcctagggggtattactatgatagtagtggttattacatctttgactactggggccagggaaccctggtcaccgtctcctcag

SEQ ID NO: 1325 - DNA, 379 bp, Homo sapiens
caggtccagctggtacagtctggggctgaggtgaagaagcctggggcctcagtgaaggtctcctgcaaggtttccggatacaccctcactgaattatccatgcactgggtgcgacaggctcctggaaaagggcttgagtggatgggaggttttcatcctgaagatggtgaaacaatctacgcacagaagttccagggcagagtcaccatgaccgaggacacatctatagacacagcctacatggagctgagcagcctgagatctgaggacacggccgtgtattactgtgcaacagtgcccctcaggagacgatttttggagtgggtcgaacttaggttcgacccctggggccagggaaccctggtcaccgtcccctcag

SEQ ID NO: 1326 - DNA, 376 bp, Homo sapiens
caggtgcagctgcaggagtcgggcccaggactggtgaagccttcggagaccctgtccctcacctgcactgtctctggtggctccatcagtagttactactggacctggatccggcagcccccagggaagggactggagtggattgggtatatttattacagtgggagcaccaactacaacccctccctcaagagtcgagtcaccacatcagtagacacgtccaagaaccagttctccctgaagctgagctctgtgaccgctgcggacgcggccgtgtattactgtgcgagggtcctaggatattgtagtggtggtacctgctactcggggaggttcgacccctggggccagggaaccctggtcaccgtctcctcag

SEQ ID NO: 1327 - DNA, 358 bp, Homo sapiens
gaggtgcagctggtggagtctgggggaggcttggtacagcctggggggtccctgagactctcctgtgcagcctctggattcacctttagcagctatgccatgagctgggtccgccaggctccagggaaggggctggagtgggtctcaactgttagtggtagtggtggtagcacatactacgcagactccgtgaagggccggttcaccctctccagagacaattccaagaacacgctgtatctgcaaatgaacagcctgagagccgaggacacggccatttattactgtgcgaaggtctggcagtggccttctccttttgactactggggccagggaaccctggtcaccgtctcctcag

SEQ ID NO: 1328 - DNA, 379 bp, Homo sapiens
gaagtgcagctggtgcagtctggagcagaggtgaaaaagcccggggagtctctgaggatctcctgtaagggttctggatacagctttaccagctactggatcagctgggtgcgccagatgcccgggaaaggcctggagtggatggggaggattgatcctagtgactcttataccaactacagcccgtccttccaaggccacgtcaccatctcagctgacaagtccatcagcactgcctacctgcagtggagcagcctgaaggcctcggacaccgccatgtattactgtgcgagacagaccgtggatacagctatggttacggcgggggagagctggttcgacccctggggccagggaaccctggtcaccgtctcctcag

SEQ ID NO: 1329 - DNA, 379 bp, Homo sapiens
gaggtgcagctggtgcagtctggagcagaggtgaaaaagcccggggagtctctgaggatctcctgtaagggttctggatacggctttaccagctactggatcagctgggtgcgccagatgcccgggaaaggcctggagtggatggggaggattgatcctagtgactcttataccaactacagcccgtccttccaaggccacgtcaccatctcagctgacaagtccatcagcactgcctacctgcagtggagcagcctgaaggcctcggacaccgccatgtattactgtgcgagacatggttactatgatattagtgcttattactacccagactggttcgacccctggggccagggaaccctggtcaccgtctcctcag

SEQ ID NO: 1330 - DNA, 358 bp, Homo sapiens
caggtgcagctggtgcagtctggggctgaggtgaaggagcctggggcctcagtgaaggtctcctgcaaggcttctggatacaccttcaccggctactatatgaactgggtgcgacaggcccctggacaagggcttgagtggatgggatggatcaaccctaacagtggtggcacaaactatgcacagaagtttcagggcagggtcaccatgaccagggacacgtccatcagcacagcctacatggagctgagcagtctgagatctgacgacacggccatatatttctgtgcgagagctgggggccaagtgactacgttggactactggggccagggaaccctggtcaccgtctcctcag

SEQ ID NO: 1331 - DNA, 370 bp, Homo sapiens
cagatgcagctggtccagtctggggctgaggtgaagaagcctgggtcctcggtgaacgtctcctgcgagtctgcaggaggcacgttcggcagctttgctatcagttggctgcgacaggcccctggacaagggcttgagtggatgggagggatcacccctctctttggtacaccaaactacgcacagagtttccagggcagactcacgatttccgcggacaaatttacgggcacagccttcatggagctgcgcagcctgaggacagaggacactgccatttattactgtgcgagagtccactatgatagtggtggttttgccactggcttcgacccctggggcccgggaaccctggtcaccgtctcctcag

SEQ ID NO: 1332 - DNA, 355 bp, Homo sapiens
gaagtactactgctggagtctgggggagccttggtacagcctggggggtccctgagactctcctgtgcagcctctggattcaccttcagtagtttcgacatgcactgggtccgccaggctacaggaagaggtctggagtgggtctcaactattactgttgctggtgatacatattattcagggtccgtgaagggccgattcaccatctccagagaaaatgccaagaattcgttgtatcttcaaatggagagcctgagagccggggacacggctgtgtattactgtgcaagacggggggggcaacttaatccctttgactactggggtcagggaaccctggtcaccgtctcctcag

SEQ ID NO: 1333 - DNA, 358 bp, Homo sapiens
caggtgcagctggtggagtctgggggaggcgtggtccagcctgggaggtccctgagactctcctgtgcagcctctggattcaccttcagtagctatgctatgcactgggtccgccaggctccaggcaaggggctggagtgggtggcagttatatcatatgatggaagcaataaatattatggagactccgtgaagggccgattcaccatctccagagacagttccaaaaacacgctgtatctgcaaatgaacagcctgagagctgaggacacggctgtgtattactgtgcgaggactgcaattgtactacattactttgactactggggccagggaaccctggtcaccgtctcctcag

SEQ ID NO: 1334 - DNA, 361 bp, Homo sapiens
cagatcaccttgaaggagtctggtcctacgctggtgaaacccacacagaccctcacgctgacctgcaccttctctgggttctcactcagcactagtggagtgggtgtgggctggatccgtcagcccccaggaaaggccctggagtggcttgcactcatttattgggatgatgataagcgctacagcccatctctgaagagcaggctcaccatcaccaaggacacctccaaaaaccaggtggtccttacaatgaccaacatggaccctgtggacacagccacatattactgtgcacacagaagaagtggctggggatactttgactactggggccagggaaccctggtcaccgtctcctcag

SEQ ID NO: 1335 - DNA, 361 bp, Homo sapiens
cagatcaccttgaaggagtctggtcctacgctggtgaaacccacacagaccctcacgctgacctgcaccttctctgggttctcactcagcactagtggagtgggtgtgggctggatccgtcagcccccaggaaaggccctggagtggcttgcactcatttattgggatgatgataagcgctacagcccatctctgaagagcaggctcaccatcaccaaggacacctccaaaaaccaggtggtccttacaatgaccaacatggaccctgtggacacagccacatattactgtgcacacgtacagctatggccaatcacccttgactactggggccagggaaccctggtcaccgtctcctcag

SEQ ID NO: 1336 - DNA, 382 bp, Homo sapiens
cagttgcagctgcaggagtcgggcccaggactggtgaagccttcggagaccctgtccctcacctgcactgtctctggtggctccatcagtagtagtagttactactggggctggatccgccagcccccagggaaggggctggagtggattgggaatatctattatagtgggagcacctactacaacccgtccctcaagagtcgagtcaccatatcagtagacacgtcccagaaccagttctccctgaagctgagctctgtgacctcagcggacacggccgtgtattactgtgcgacccgactcctacgtggttacgatattttgactgggtatgatgcttttgatatctggggccaagggacaatggtcaccgtctcttcag

SEQ ID NO: 1337 - DNA, 350 bp, Homo sapiens
caggtgcagctgcaggagtcgggcccaggactggtgaaaccttcggagaccctgtccctcacctgcactgtctctggtgtctccatgagtagttactactggagttggatccggcagcgcccagggaggggactggagtggattggatttatctatttcagtgggagtaccacctacaacccctccctcgagagtcgagtcaccatatcaatagtcacgtccaagaagcagttctccctgaagctcacttctgtgaccgctacggacacggccgtgtattactgcgcgtcgactacggtgaccggggggcttattggctactggggccagggaaccccagtcatcgtctc

SEQ ID NO: 1338 - DNA, 355 bp, Homo sapiens
caggtgcagttgcaggagtcgggcccaggactggtgaagcctgcggggaccctgtccctcacctgcactgtctctagtggctccatcactacttactactggaactggattcggcagcccccagggaagggactggagtggattgggtatatccattacagtgggaccaacggttataacccctccctcaagagtcgagtcactctgtcagtagacacgtccaacaaccagttctccttgaggctgaactctgtgaccgctgcggacacggccgtttattactgtgcgagatgggatgatagtggtaaatactttggcgactggggccagggaaccctggtcaccgtctcctcag

SEQ ID NO: 1339 - DNA, 361 bp, Homo sapiens
cagctgcacctgcaggagtcgggcccaggactggtgaggccttcagagaccctgtccctcacctgcactgtctctggtgactccgacagcagtagtgtttactactggggctggatccgccagcccccagggaaggggctggagtggattggtagtatttataaaagtgggagtacctactacactccgtccctcaggagtcgagtcatcatatccttagacgcgtccatgaaccagttctccctgaagctgaactctgtgaccgccgcagacacggctgtttattactgcgcgcgacggaaggagcagcacctgatacttgactactggggccagggaatcctggtcaccgtctcctcag

SEQ ID NO: 1340 - DNA, 361 bp, Homo sapiens
caactgcagctgcaggagtcgggcccgggactggtgaagccttcggagaccctgtccctcacctgcactgtctctggtggctccatcagtagtagttattactactgggtctggatccgccagcccccagggaaggggctggagtggattgggaatttttattatagtggcagcagctattacaacccgtccctcaagagtcgagtcaccatatccgcagacacggccaagaaccagttctccctgaggctgagctctgtgaccgccgcagacacggctatgtattactgtgcgagacgccgtggtggtagctcagaaattgactcctggggccagggaactctggtcaccgtctcctcag

SEQ ID NO: 1341 - DNA, 384 bp, Homo sapiens
cagctgcagctgcaggagtcgggcccaggactagtgaagccttcggagaccctgtccctcacctgcactgtctctggtggctccatcagcagtagtagttactactggggctggatccgccagcccccagggaaggggctggagtggattgggagtatctattatactgggagcacctactacaacccgtccctcaagagtcgagtctccatatcagtagacacgtccaagaaccagttctccctgaagctgagctctgtgaccgcagcggacacggccgtgtattactgtgcgagaattgtagtggtggtagctgctacatattactactactactacggtatggacgtctggggccaagggaccacggtcaccgtctcctca

SEQ ID NO: 1342 - DNA, 358 bp, Homo sapiens
caggtgcagctggtggagtctgggggaggcttggtcaagcctggagggtccctgagactctcctgtgcagcctctggattcaccttcagtgactactacatgagctggatccgccaggctccagggaaggggctggagtgggtttcatacattagtagtagtagtagttacacaaactacgcagactctgtgaagggccgattcaccatctccagagacaacgccaagaactcactgtatctgcaaatgaacagcctgagagccgaggacacggccgtgtattactgtgcgagagatcgaggggttaccccgaggtttgactactggggccagggaaccctggtcaccgtctcctcag

SEQ ID NO: 1343 - DNA, 358 bp, Homo sapiens
gaggtgcagctggtggagtctgggggaggcttggtccagcctggggggtccctgagactctcctgtgcagcctctggattcacctttagtagttattggatgagctgggtccgccaggctccagggaaggggctggagtgggtggccaacataaagcaagatggaagtgagaaatactatgtggactctgtgaagggccgattcaccatctccagagacaacgccaagaactcactgtatctgcaaatgaacagcctgagagccgaggacacggctgtgtattactgtgcgagagatgaaagcagtggctggttcggagactactggggccagggaaccctggtcaccgtctcctcag

SEQ ID NO: 1344 - DNA, 358 bp, Homo sapiens
gaggtacaactggtggagtctgggggaggcttggtccagcctggggggtccctgagactctcctgtgcagcctctggattcccctttagtacctattggatgacctggatccgccaggctccggggaaagggctggagtgggtgggcagcataaaccaagatgcaagtgacaaatactatctggactctgtgaggggccgattcaccctctccagagacaacggcaagaactcactgtttctggaaatgaacagcctgagagccgaggacacggccctctattattgtgtgagagatcgccggagcgagcgcctttttgactactggggcctggggaccctggtcaccgtctcctcag

SEQ ID NO: 1345 - DNA, 358 bp, Homo sapiens
caggtgcagctggtggagtctgggggaggcgtggtccagcctgggaggtccctgagactctcctgtgcagcctctggattcaccttcagtagctatgctatgcactgggtccgccaggctccaggcaaggggctggagtgggtggcagttatatcatatgatggaagcaataaatactacgcagactccgtgaagggccgattcaccatctccagagacaattccaagaacacgctgtatctgcaaatgaacagcctgagagctgaggacacggctgtgtattactgtgcgagcggggcgggtttcctttttgggttcgacccctggggccagggaaccctggtcaccgtctcctcag

SEQ ID NO: 1346 - DNA, 355 bp, Homo sapiens
caggtgcagctgcaggagtcgggcccaggactggtgaagccttcggagaccctgtccctcacctgcactgtctctggtggctccatcagtagtcactactggagctggatccggcagcccccagggaagggactggagtggattgggtatatctattacagtgggagcaccaactacaacccctccctcaagagtcgagtcaccatatcagtagacacgtccaagaaccagttctccctgaagctgagctctgtgaccgctgcggacacggccgtgtattactgtgcgagagatacgtattataaaagttggttcgacccctggggccagggaaccctggtcaccgtctcctcag

SEQ ID NO: 1347 - DNA, 361 bp, Homo sapiens
cagatcaccttgaaggagtctggtcctacgctggtgaaacccacacagaccctcacgctgacctgcaccttctctgggttctcactcagcactagtggagtgggtgtgggctggatccgtcagcccccaggaaaggccctggagtggcttgcactcatttattgggatgatgataagcgctacagcccatctctgaagagcaggctcaccatcaccaaggacacctccaaaaaccaggtggtccttacaatgaccaacatggaccctgtggacacagccacatattactgtgcacacagacatccgcagcctgatgcttttgatatctggggccaagggacaatggtcaccgtctcttcag

SEQ ID NO: 1348 - DNA, 361 bp, Homo sapiens
cagctgcagctgcaggagtcgggcccaggactggtgaagccttcggagaccctgtccctcacctgcactgtctctggtggctccatcagcagtagtgattactactggggctggatccgccagcccccagggaaggggctggagtggattgggagtatctattatagtgggagcacctactacaacccgtccctcaggggtcgagtcaccatatccgtagacacgtccaagaaccagttctccctgaagctgagctctgtgaccgccgcagacacggctgtgtattactgtgcgagacagctcattgtaccttcggtcttccagcactggggccagggcaccctggtcaccgtctcctcag

SEQ ID NO: 1349 - DNA, 357 bp, Homo sapiens
gaggtgcagttggtggagtccgggggaggcttagttcagccggggggtccctgagactctcctgtgcagcctctggattcacagtcagtacttattggatgcactgggtccgccaagctccagggcgggggccggtgtgggtctcacgtatcaatggtgatagcactagcacaaactacgcggactccgtgaggggccgcttcaccatctccagagacaacgccaagaacacgttgtatctgcaaatgaacagtctgagaggcgacgattcggctgtttattactgtgcaagaaggtctgaggcggggggcttctttgacttctggggccggggaaccctggtcaccgtctcctcag

SEQ ID NO: 1350 - DNA, 355 bp, Homo sapiens
gaggtgcagctggtggagtctgggggaggcttggtacagcctggggggtccctaagactctcctgtgcagcctctggattcaccttcagtagccaaaacatgaactgggtccgccaggctccagggaagggcctggagtggctttcatatattagtcctgatggtcgtggcacacactacgcagactccgtgaagggccgattcaccacctccagagacaatgccaagaactcactgtttctgcaaatgaccagcctgagagccgaggacacggctgtgtattactgtgcgagaggagatggcagcagctggttctctcactggggccagggaaccctggtcaccgtctcctcag

SEQ ID NO: 1351 - DNA, 336 bp, Homo sapiens
caggtgcagctgcaggagtcgggcccaggactggtgaagccttcggagaccctgtccctcacctgcactgtctctggtggctccatcagtagttactactggagttggatccggcagcccgccgggaagggactggagtggattgggcgtatccataccagtgggagcaccaactacaacccctccctcaagagtcgagtcaccatgtcagtagacacgtccaagaaccagttctccctgaagatgagctctgtgactgccgcggacacggccgtgtattattgtgcgagagacctggacgtctggggccaagggaccacggtcaccgtctcctca

SEQ ID NO: 1352 - DNA, 340 bp, Homo sapiens
gaggtgcagctggtggagtctgggggaggcttggtccagcctggggggtccctgagactctcctgtgcagcctctggattcactttcagtacttattggatgaactgggtccgccaggctccagggaaggggccggagtgggtggccaacataaagcgagatggaagtgagaaaaactatatagactctgtgaagggccgattcaccatctccagagacaacgccaagaactcattgtatctgcagatgagtagcctgagagccgaggacacggctatatattactgtacgagagggtttgactcctggggccagggaactttgatcaccgtctcctcag

SEQ ID NO: 1353 - DNA, 357 bp, Homo sapiens
caggtggagctggtggagtctgggggaggcgtggtccagcctgggaggtccctgagactctcctgtgcagcctctggattcaccttcagtagttatgctatgcactgggtccgccaggctccaggcaaggggctggagtgggtggtagttatatcatatgatggaagcaataaatactacgcagactccgtgaagggccgattcaccatctccagagacaattccaagaacacgttgtatctgcaaatgaacagcctaagaactgaagacacggctgtatattactgtgcgagagggatcggccactactactacatggacgtctggggcaaagggaccacggtcaccgtctcctca

SEQ ID NO: 1354 - DNA, 357 bp, Homo sapiens
caggtgcagctggtggagtctgggggaggcgtggtccagcctgggaggtccctgagactctcctgtgcagcctctggattcaccttcagtagctttggtatgcactgggttcgccaggctccaggcaaggggctggagtggatggcagttatatcatatgatggaagtaataaatactacgcagactccgtgaagggccgattcaccatctccagagacaattccaagaacacgctgtatctgcaaatgaacagcctgagagctgaggacacggctgtgtattactgtgcgagatcggtgggggggtattacggtatggacgtctggggccaagggaccacggtcaccgtctcctca

SEQ ID NO: 1355 - DNA, 387 bp, Homo sapiens
gaggtgcagctggtgcagtctggagcagaggtgaaaaagcccggggagtctctgaagatctcctgtaagggttctggatacagctttaccagctactggatcggttgggtgcgccagatgcccgggaaaggcctggagtggatggggatcatctatcctggtgactctgataccagatacagcccgtccttccaaggccaggtcaccatctcagccgacaagtccatcaacaccgcctacctgcagtggagcagcctgaaggcctcggacaccggcatgtattactgtgcgagacataagggtttatgggactttggttcggggaggtttttcgcctacgccggtttggacgtctggggccaagggaccacggtcaccgtctcctca

SEQ ID NO: 1356 - DNA, 387 bp, Homo sapiens
gaggtgcagctggtggagtctgggggaggcttggtccagcctggggggtccctgagactctcctgtgcagcctctggattcacctttagtaactattggatgaactgggtccgccaggctccagggaaggggctggagtgggtggccaacataaagcaagatgaaagtgagaaatactatgtggactctgtgaagggccgattcaccatctccagagacaacgccaagaactcactgtatctgcaaatgaacagcctgagagccgaggacacggctgtgtattactgtgcgagatcctctcacagcgcggagtatagcagtggctggtactattactactactacatggacgtctggggcaaagggaccacggtcaccgtctcctca

SEQ ID NO: 1357 - DNA, 390 bp, Homo sapiens
cagctgcagctgcaggagtccggctcaggactggtgaagccttcacagaccctgtccctcacctgcactgtctctggtggctccatcagcagtggtggttactcctggagctggatccggcagccaccagggaagggcctggagtggattgggtacatctatcatagtgggagcacctactacaacccgtccctcaagagtcgagtcaccatatcagtagacaggtccaagaaccagttctccctgaagctgagctctgtgaccgccgcggacacggccgtgtattactgtgccagagacaggcctgtagtagtaccagctgccccatcttactactactactactacatggacgtctggggcaaagggaccacggtcaccgtctcctca

SEQ ID NO: 1358 - DNA, 388 bp, Homo sapiens
gaggtgcagctggtggagtctgggggaggcttggtacagcctggggggtccctgagactctcctgtgcagcctctggattcaccttcagtagctatagcatgaactgggtccgccaggctccagggaaggggctggagtgggtttcatacattagtagtagtagtagtagcatatactacgcagactctgtgaagggccgattcaccatctccagagacaacgccaagaactcactgtatctggaaatgaacagcctgagagccgaggacacggctgtgtattcctgtgcgagagtgtcagtcggcggtactatggttcggggagttattaccccttactggtactttgatctctggggccgtggcaccctggtcactgtctcctcag

SEQ ID NO: 1359 - DNA, 388 bp, Homo sapiens
gaggtgcagctgttggagtctgggggaggcttggtacagcctggggggtccctgagactctcctgtgcagcctctggattcacctttagcagctatgccatgagctgggtccgccaggctccagggaaggggctggagtgggtctcagctattagtggtagtggtggtagcacatactacgcagactccgtgaagggccggttcaccatctccagagacaattccaagaacacgctgtatctgcaaatgaacagcctgagagccgaggacacggccgtatattactgtgcgaaagataggtccccatggtatagcagtggctggatagagagtgcatcggttctttttgactactggggccagggaaccctggtcaccgtctcctcag

SEQ ID NO: 1360 - DNA, 384 bp, Homo sapiens
caggtgcagctgcaggagtcgggcccaggactggtgaagccttcacagaccctgtccctcacctgcactgtctctggtggctccatcagcagtggtgattactactggagctggatccgccagcccccagggaagggcctggagtggattgggtacatctattacagtgggagcacctactacaacccgtccctcaagagtcgagttaccatatcagtagacacgtccaagaaccagttctccctgaagctgagctctgtgactgccgcagacacggccgtgtattactgtgccagagcaaccagctgctatgcgggggctggctgctactactactactacatggacgtctggggcaaagggaccacggtcaccgtctcctca

SEQ ID NO: 1361 - DNA, 381 bp, Homo sapiens
caggtgcagctgcaggagtcgggcccaggactggtgaagccttcggagaccctgtccctcacctgcactgtctctggtggctccatcaatagttactactggagctggatccggcagcccccagggaagggactggagtggattgggtatatctattacagtgggagcaccaattacaacccctccctcaagagtcgagtcaccatatcagtagacacgtccaagaaccagttctccctgaagctgagctctgtgaccgctgcggacacggccgtgtattattgtgcgagagataacgggtatttctctgcttattcggggagttataatagtcacggtatggacgtctggggccaagggaccacggtcaccgtctcctca

SEQ ID NO: 1362 - DNA, 381 bp, Homo sapiens
caggtgcagctgcaggagtcgggcccaggactggtgaagccttcggagaccctgtccctcacctgcactgtctctggtggctccatcagtagttactactggagctggatccggcagcccccagggaagggactggagtggattggctacatctataccagtgggagcaccaactacagcccctccctcaagagtcgagtcaccatatcagtagacacgtccaagaaccagttctccctgaagctgagctctgtgaccgccgcagacacggccgtgtattactgtgcgagacttcccggcagcaggtatagcagtggctggtactactacgactactacatggacgtctggggcaaagggaccacggtcaccgtctcctca

SEQ ID NO: 1363 - DNA, 387 bp, Homo sapiens
gaggtgcagctggtggagtctgggggaggcttggtacagcctggggggtccctgagactctcctgtgcagcctctggattcacctttagcagctatgccatgagctgggtccgccaggctccagggaaggggctggagtgggtctcagctattagtggtagtggtggtagcacatactacgcagactccgtgaagggccggttcaccatctccagagacaattccaagaacacgctgtatctgcaaatgaacagcctgagagccgaggacacggccgtatattactgtgcgaaagaaggggtccatgtagtggtggtagctggggattactactactactactacatggacgtctggggcaaagggaccacggtcaccgtctcctca

SEQ ID NO: 1364 - DNA, 385 bp, Homo sapiens
caggtgcagctggtggagtctgggggaggcgtggtccagcctgggaggtccctgagactctcctgtgcagcgtctggattcaccttcagtaactatggcatgcactgggtccgccaggctccaggcaaggggctggagtgggtggcagttatatggtatgatggaagcaataaatattatgcagactccgtgaagggccgattcaccatctccagagacaattccaagaacacgctgtatctgcaaatgaacagcctgagagccgaggacacggctgtgtattactgtgtgaaagatatgccctggggaggaagagatggttccaattcggagagtgatgcttttgatatatggggccaagggacaatggtcaccgtctcttcag

SEQ ID NO: 1365 - DNA, 385 bp, Homo sapiens
caggttcacctggtgcagtctggagctgaggtgaagaagcctggggcctcagtgaaggtctcctgcaaggcttctggttacacctttatgagttatgctgtcagctgggtgcgacaggcccctggacaagggcttgagtggatgggatggatcagcccttacaatggtaacacaaattatgcacagaatttccagggcagagtcaccatgaccacagacacatccacgagcacagtgtacatggacctgaggagcctgagatctgacgacacggccatgtattactgtgcgagagcccagcaaattgggttttggagtgcttattataccggtattggctggttcgacccctggggccagggaaccctggtcaccgtctcctcag

SEQ ID NO: 1366 - DNA, 385 bp, Homo sapiens
caggttcagctggtgcagtctggagctgaggtgaagaagcctggggcctcagtgaaggtctcctgcaaggcttctggttacacctttaccagctatggtatcagctgggtgcgacaggcccctggacaagggcttgagtggatgggatggatcagcgcttacaatggtaacacaaactatgcacagaagctccagggcagagtcaccatgaccacagacacatccacgagcacagcctacatggagctgaggagcctgagatctgacgacacggccgtgtattactgtgcgagatgccgcggtgtagtggtggtagctgctactcgtcgggcccccaactggttcgacccctggggccagggaaccctggtcaccgtctcctcag

SEQ ID NO: 1367 - DNA, 385 bp, Homo sapiens
gaggtgcagctggtggagtctgggggaggcttggtccagcctggggggtccctgagactctcctgttcagcctctggattcaccttcagtagctatgttatgcactgggtccgccaggctccagggacgggactggaatatgtttcaactattaatagtgatgggggtaccacatactacgcagactcagtgacgggcagattcgccatctccagagacaattccaagaacacgctgtatcttcaaatgagcagtctgagagctgaggacacggctgtgtattactgtgtgaaagactcaaactatcgaaagtattactatgatagtagtggcccatccccgggggactactggggccagggaaccctggtcaccgtctcctcag

SEQ ID NO: 1368 - DNA, 355 bp, Homo sapiens
gaagtgcagttgttggagtctgggggagacttggtgcaacctggggggtccctgagactctcctgtgtagcctctggattcaccttcagtaactttggcatgagctgggtccgccaggctccagggaaggggctggagtgggtctcaactatcaatgagaattctgctaacacacactacgcagagtccgtaaagggccggttcaccatctccagagacaattccatgagcactctgtttctgcagatgaacagcctgggcgtcgacgacacggccatatattactgtgcgaaagatggccaatatgatagttgtgattttgagggccagggaaccctggtcaccgtctcctcag

SEQ ID NO: 1369 - DNA, 380 bp, Homo sapiens
caggtgcagctggtgcagtctggggctgaggtgaagaagcctgggtcctcggtgaaggtctcctgcaaggcttctggaggcaccttcagcagctatgctatcacctgggtgcgacaggcccctggacaagggcttgagtggatgggaataatcatccctatctttggtacagcaaactacgcacagaaattacagggcagagtcacgattaccgcggacgaatccacgaacacagcctacatggagctgagacgcctgagatctgaagacacggccgtgtattactgtgcgagagcctacccttgtagtagtaccagctgcccatattcgcccgatgcttttgatgtctggggccaagggacaatggtcaccgtctcttc

SEQ ID NO: 1370 - DNA, 343 bp, Homo sapiens
gaggtgcagctggtggagtccgggggaggcttagttcagcctggggggtccctgagactctcctgtgcagcctctggattcaccttcagtagctactggatgcactgggtccgccaagctccagggaaggggctggtgtgggtctcacgtattaatactgatgggagtagcacaagctacgcggactccgtgaagggccgattcaccatctccagagacaacgccaagaacacgctgtatctgcaaatgaacagtctgagagccgaggacacggctgtgtattactgtcttactaccggatttgactactggggccagggaaccctggtcaccgtctcctcag

SEQ ID NO: 1371 - DNA, 393 bp, Homo sapiens
gaggtgcagctggtggagtctgggggaggcttggtccagcctggggggtccctgagactctcctgtgcagcctctgggttcacctttaatagctattggatgagctgggtccgccaggctccagggaaggggctggagtgggtggccaacataaagcacgatggaagtgagaaatactatgtggactctctgaagggccgattcaccatctccagagacaacgccaagagctcactgtatctgcaaatgaacagcctgagagccgaggacacggctgtgtattactgtgcgagagatcgagtaataccagctactattcccgggattgctggctgggtctactactactacatggacgtctggggcaaagggaccacggtcaccgtctcctca

SEQ ID NO: 1372 - DNA, 346 bp, Homo sapiens
caggttcagctggtgcagtctggagctgagctgaagaagcctggggcctcagtgaaggtctcctgcaaggcttctggttacacctttagcagctatagtttcacctgggtgcgacaggcccctggacaagggcttgagtggatggggtggatcagcacttacaatggtaacacaaactatgcacagaaggtccagggcagagtcaccttgaccacagacacatccacgaacacagcctacatggaactgaggagcctcagatctgacgacacggccgtgtattactgtgcgagaaatcgtccaagtgactactggggccagggaaccctggtcaccgtctcctcag

SEQ ID NO: 1373 - DNA, 391 bp, Homo sapiens
caggtgcagctggtgcagtctggacctgaggtgaagaagcctgggtcctcggtgaaggtctcctgcaaggcttctggaggcagcttcgacagctatcctgtcagctgggtgcgacaggcccctggagaaggacttgagtggatgggagggatcatccctctgtttggttcaccaaactacgcacagaagttccagggcagagtcacgataagcgcggacagatatacgagcacagtctacatggagttgaccagcctgagattcgaggacacggccctctattactgtgcgagaccttcatctccgtattactatgatattaatggttctcgacggtgggggcctgctcctgactattggggccagggaaccctggtcaccgtctcctcag

SEQ ID NO: 1374 - DNA, 391 bp, Homo sapiens
gaggtgcagctggtggagtctgggggaggcttggtaaagcctggggggtcccttagactctcctgtgcagcctctggattcactttcagtaacgcctggatgagctgggtccgccaggctccagggaaggggctggagtgggttggccgtattaaaagcaaaactgatggtgggacaacagactacgctgcacccgtgaaaggcagattcaccatctcaagagatgattcaaaaaacacgctgtatctgcaaatgaacagcctgaaaaccgaggacacagccgtgtattactgtaccacagatccatcaggtagcagcagctggcgccggggggggatatacaactggttcgacccctggggccagggaaccctggtcaccgtctcctcag

SEQ ID NO: 1375 - DNA, 390 bp, Homo sapiens
gaggtgcagctggtggagtctgggggaggcttggtacagcctggggggtccctgagactctcctgtgcagcctctggattcaccttcagtagctatagcatgaattgggtccgccaggctccagggaaggggctggagtgggtttcatacattagtactagtagtagtaccatatactacgcagactctgtgaagggccgattcaccatctccagagacaacgccaagaactcactgtatctgcaaatgaacagcctgagagccgaggacacggctgtgtattactgtgcgagagacccgtattattatgatagtagtgtttattacccccacccttattactacggtatggacgtctggggccaagggaccacggtcaccgtctcctca

SEQ ID NO: 1376 - DNA, 415 bp, Homo sapiens
caggtgcagctggtgcagtctggggctgaggtgaagaagcctgggtcctcggtgaaggtctcctgcaaggcttctggaggcaccttcagcagctatgctatcagctgggtgcgacaggcccctggacaagggcttgagtggatgggagggatcatccctatctttggtacagcaaactacgcacagaagttccagggcagagtcacgattaccgcggacgaatccacgagcacagcctacatggagctgagcagcctgagatctgaggacacggccgtgtattactgtgcgagagagccctctggtagtggctacgatccccaggttcctgtagtggtggtagctgctactcctgtactactactactacggtatggacgtctggggccaagggaccacggtcaccgtctcctca

SEQ ID NO: 1377 - DNA, 381 bp, Homo sapiens
gaggtgcagctggtggagtctgggggaggcttggtacagcctggggggtccctgagactctcctgtgcagcctctggattcacctttagcagctatgccatgagctgggtccgccaggctccagggaaggggctggagtgggtctcagctattagtggtagtcgtggtagcacagactacgcagactccgtgaagggccggttcaccatctccagagacaattccaagaacacgctgtatctgcaaatgaacagcctgagagccgcggacacggccgtatattactgtgcgaaagatccccgcggggtggtgactgctatccgctactactattactacatggacgtctggggcaaagggaccacggtcaccgtctcctca

SEQ ID NO: 1378 - DNA, 352 bp, Homo sapiens
caggtgcagctacagcagtggggcgcaggactgttgaagccttcggagaccctgtccctcacctgcgctgtctatggtgggtccttcagtggttactactggagctggatccgccagcccccagggaaggggctggagtggattggggaaatcaatcatagtggaagcaccaactacaacccgtccctcaagagtcgagtcaccatatcagtagacacgtccaagaaccagttctccctgaagctgagctctgtgaccgccgcggacacggctgtgtattactgtgcgagagagaggagtgggagctactacccctactggggccagggaaccctggtcaccgtctcctcag

SEQ ID NO: 1379 - DNA, 352 bp, Homo sapiens
gaggtgcagctgttggagtctgggggaggcttggtacagcctggggggtccctgagactctcctgtgcagcctctggattcacctttagcagctatgccatgagctgggtccgccaggctccagggaaggggctggagtgggtctcagctattagtggtagtggtggtagcacatactacgcagactccgtgaagggccggttcaccatctccagagacaattccaagaacacgctgtatctgcaaatgaacagcctgagagccgaggacacggccgtatattactgtgcgaaaaaggagtggctagactttgactactggggccagggaaccctggtcaccgtctcctcag

SEQ ID NO: 1380 - DNA, 382 bp, Homo sapiens
caggtgcagctggtgcagtctggggctgaggtgaagaagcctgggtcctcggtgaaggtctcctgcaaggcttctggaggcaccttcaacagttatattttcagctgggtgcgacaggcccctggacaagggcttgagtggatgggggggatcatccctatctttgatacaacaaactacgcacagaaattccagggcagagtcacgattaccgcggacgaatccacgagcacagtctacatggagctgagcagcctgagatctgaggacacggccgtgtattactgtgcgagaagaggagaactgggagactatgatagtaatggttattacttggcctttgacttttggggccagggaaccctggtcaccgtctcctcag

SEQ ID NO: 1381 - DNA, 352 bp, Homo sapiens
caggtgcagctgcaggagtcgggcccaggactggtgaagccttcggagaccctgtccctcacctgcactgtctctggtggctccatcagtagttactactggagctggatccggcagcccccagggaagggactggagtggattgggtacatctataccagtgggagcaccaactacaacccctccctcaagagtcgagtcaccatatcagtagacacgtccaagaaccagttctccctgaagctgagctctgtgaccgccgcagacacggccgtgtattactgtgcgagaggggactggaaagggggcctggactactggggccagggaaccctggtcaccgtctcctcag

SEQ ID NO: 1382 - DNA, 370 bp, Homo sapiens
caggtgcagctggtggagtctgggggaggcgtggtccagcctgggaggtccctgagactcgcctgtgcagcctctggattcaccttcagtagctatgatatgaactgggtccggcaggctccaggcaaggggctggagtgggtggcagttatatcatatgatggaagtaataaatactacgcagactccgtgaagggccgattcaccatctccagagacaattccaagaacacgctgtatctgcaaatgaacagcctgagagctgaggacacggctgtgtattactgtgcgagagattcactttttagaggctggtacgtcgatgcttttgatatctggggccaagggacaatggtcaccgtctcttcag

SEQ ID NO: 1383 - DNA, 370 bp, Homo sapiens
caggtgcagctggtggagtctgggggaggcgtggtccagcctgggaggtccctgagactctcctgtgcagcctctggactcaccttcactacctatgctatgcactgggtccgccaggctccaggcaaggggctggagtgggtggcagttatagcatatgacggaagcaataaatactacgcagactccgtgaagggccgattcaccatctccagagacaattccaagaacacgctgtatctgcaaatgaacagcctgagacctgaggacacggctgtttattactgtgcgagagaaaaaagttaccatttttggacagcagatgcttttgatatctggggccaagggacaatggtcaccgtctcttcag

SEQ ID NO: 1384 - DNA, 381 bp, Homo sapiens
caggtgcagctggtggagtctgggggaggcgtggtccagcctgggaggtccctgagactctcctgtgcagcgtctggattcagcttcaataactatggcatgcactgggtccgccaggctccaggcaaggggctggagtgggtggcagttatatggtatgatggaagtaataaatactatgcagactccgtgaagggccgattcaccatctccagagacaattccaagaacacgctgtatctgcaaatgaacagcctgagagccgaggacacggctgtgtattactgtgcgaaggatctaagggatagcggcagtggctggtactcctactactactacatggacgtctggggcaacgggaccacggtctccgtctcctca

SEQ ID NO: 1385 - DNA, 381 bp, Homo sapiens
caggtgcagctggtggagtctgggggaggcgtggtccagcctgggaggtccctgagactctcctgtgcagcgtctggattcatcttcagtagctatgccatgcactgggtccgccaggctccaggcaaggggctggagtgggtgtcacttatatggtatgatggaagtaataaatactatgtagactccgtgaagggccgattcaccatctccagagacaattccaggaacacattgtatctgcaaatgaacagcctgagagtcgacgacacggctgtatattattgtgtgaaagcaccgagtcgattttgtactactaccagctgctatccctactacatggacgtctggggcaaagggaccacggtcaccgtctcctca

SEQ ID NO: 1386 - DNA, 370 bp, Homo sapiens
gaggtgcagctgttggagtctgggggaggcttggtacagcctggggggtccctgagactctcctgtgcagcctctggattcacctttaatgtctatgccatgacctgggtccgccaggctccagggatggggctggagtgggtctcagctattagtggtggtggtggtagcacatactacgcagactccgtgaagggccggttcaccatctccagagacaattccaagaacaccctgtatctgcaaatgaacagcctgagagtcgaggacacggccgtatattactgtgcgaagggttactatgataatagtggttattactcagggggtgactactggggccagggaaccctggtcaccgtctcctcag

SEQ ID NO: 1387 - DNA, 370 bp, Homo sapiens
gaggtgcagctgttggagtctgggggaggcttggtacagcctggggggtccctgagactctcctgtgcagcctctggattcacctttagcagctatgccatgagctgggtccgccaggctccagggaaggggctggagtgggtctcagctattagtggtagtggtggtagcacatactacgcagactccgtgaagggccggttcaccatctccagagacaattccaagaacacgctgtatctgcaaatgaacagcctgagagccgaggacacggccgtatattactgtgcggtccattactatgatagtagtggttattaccccctatttgactactggggccagggaaccctggtcaccgtctcctcag

SEQ ID NO: 1388 - DNA, 370 bp, Homo sapiens
gaggtgcagctggtggagtctgggggaggcttgctacagcctggggggtccctgagactctcctgtgcagcctctggattcacctttagcagctatgccatgagctgggtccgccaggctccagggaaggggctggagtgggtctcagctataagtggtagtggtggtggctcatactacgcagactccgtgaagggccggttcaccatctccagagacaattccaagaacacgctgtacctgcaaatgaacagcctgagagccgaggacacggccgtgtattactgtgcgcgagttacgatttttggagtggttatctcttctcactttgactactggggccagggaaccctggtcaccgtctcctcag

SEQ ID NO: 1389 - DNA, 368 bp, Homo sapiens
ggtgcagctggtggagtctgggggaggcttggtgcagcctggggggtccctgagactctcctgtgcagcctctggattctcctttcccaactatgccatgacctggatccgccaggccccagggaaggggctggagtgggtctcaactattactgccggtggtgagacgacatactacgcagactccgtgaagggccggttcaccatctccagagacaattccaggaacacactgtatctcgaaatgaacagcctgagagccgaggacacggccgtgtattactgtgcgaatagggccggtaactacgataacccttgggtctgctttgacttctggggcctgggagccctggtcaccgtctcctcag

SEQ ID NO: 1390 - DNA, 358 bp, Homo sapiens
cagctgcagctgcaggagtcgggcccaggactggtgaagccttcggagaccctgtccctcacctgcactgtctctggtggctccatcagaagtactactgactactggggctggatccgccagcccccagggaaggggctggagtggattgggagtatctactatagtgggagcacctactacaagccgtccctcaagagtcgagtcaccatatccgtagacacgtccaagaaccagttctccctgaagttgagctctgtgaccgccgcagacacggctgtgtattactgtgcgagacattggtggagtgggtcatttgactactggggccagggaaccctggtcaccgtctcctcag

SEQ ID NO: 1391 - DNA, 358 bp, Homo sapiens
cagatccccttgaaggagtctggtcctacgctggtgaaacccacagagaccctcacgctgacctgcaccttctctgggttctcactcagcactactggaatgggtgtgggctggatccgtcagcccccaggaaaggccctggagtggcttgcactcatttattggaatgatgataagcgctacagcccatctctgaagagcaggctcaccatcaccaaggacacctccaaaaaccaggtggtccttacaatgaccaacatggaccctgtggacacagccacatattactgtgcacacaggggctatagcagcagctgggactactggggccagggaaccctggtcaccgtctcctcag

SEQ ID NO: 1392 - DNA, 358 bp, Homo sapiens
cagatcaccttgaaggagtctggtcctacgctggtgaaacccacacagaccctcacgctgacctgcaccttctctgggttctcactcagcactagtggaatgggtgtgggctggatccgtcagcccccaggaaaggccctggagtggcttgctctcatttattgggatgatgataagcgctacagcccatctctgaagagcaggctcaccatcaccaaggacacctccaaaaaccaggtggtccttacaatgaccaacatggaccctgtggacacagccacatattactgtgcacacagagattgggtggatacctttgactactggggccagggaaccctggtcaccgtctcctcag

SEQ ID NO: 1393 - DNA, 355 bp, Homo sapiens
gaggtgcagctgttggagtctgggggaggcttggtacagcctggggggtccctgagactctcctgtgcagcctctggattcacctttagcagctatgccatgagctgggtccgccaggctccagggaaggggctggagtgggtctcagctattagtggtagtggtggtagcacatactacgcagactccgtgaagggccggttcaccatctccagagacaattccaagaacacgctgtatctgcaaatgaacagcctgagagccgaggacacggccgtatattactgtgcctttatggggggatacagctatgattactactggggccagggaaccctggtcaccgtctcctcag

SEQ ID NO: 1394 - DNA, 355 bp, Homo sapiens
gaggtgcagctggtggagtctgggggaggcttggtacagcctggggggtccctgagactctcctgtgcagcctctggattcacctttagcagctatgccatgaactgggtccgccaggctccagggaaggggctggagtgggtctcaggcattacttttagtggtactgacacgttctacgcagactccgtgaagggccggttcaccatctccagagataattccaggaataccttctatgtgcaaatgaacaacctgagaggcgaggacacggccgtatatttctgtgcgaaaggttggggatccgggtactttgacaactggggccagggaaccctggtcaccgtctcctcag

SEQ ID NO: 1395 - DNA, 355 bp, Homo sapiens
gaggtgcagctgttggagtctgggggaggcttggtacagcctggggggtccctgagactctcctgtgcagcctctgggttcgcctttaacagctatgacatgaactgggtccgccaggctccagggaaggggctggagtgggtctcagctattagtggtagtggtgataacacatactacgcagactccgtgaagggccggttcaccatctccagagacaattccaagaacacgctgtatctgcaaatgaacagcctgagagccgaggacacggccgtatattactgtgcgaaatgtacctggttcggggaacttgactactggggccagggaaccctggtcaccgtctcctcag

SEQ ID NO: 1396 - DNA, 355 bp, Homo sapiens
gaggtgcagctggtgcagtctggagcagaggtgacaaagccgggggagtctctggagatctcctgtaaagcttctggatacacctttagcacctacgggatcggctgggcgcgccagatgcccgggaaaggcctggagtggatggggctcatctatcctggtgaccctaatataagatacagcccgtccttccaaggccaggtcaccatttcagccgacaagtccaccagcaccgcctacctgcagtggagcagcgtgaaggcctcggacaccgccatgtattactgtgtgagacataaggggggtgcggggcctgactactggggccagggaaccctggtcaccgtctcctcag

SEQ ID NO: 1397 - DNA, 352 bp, Homo sapiens
gaggtgcagctgttggagtctgggggaggcttggtacagcctggggggtccctgagactctcctgtgcagcctctggattcacctttagtagctatgccatgagctgggtccgccaggctccagggaaggggctggagtgggtctcaggtattagtggtagtggtggtagcacatactacgcagactccgtgaagggccggttcaccatctccagagacaattccaagaacacgctgtatctgcaaatgaacagcctgagagccgaggacacggccgtatattactgtgcgaagggtgactacgttgcttttgatatctggggccaagggacaatggtcaccgtctcttcag

SEQ ID NO: 1398 - DNA, 355 bp, Homo sapiens
caggtgcagctggtggagtctgggggaggcgtggtccagcctgggaggtccctgagactctcctgtgcggcctctggattcaccttcagtagttatgctatgccctgggtccgccaggctccaggcaaggggctggagtgggtggcagttatatcatatgatggaagtaataaatactatgcagactccgtgaagggccgattcaccatctccagagacaattccaagaacacgttgtatctgcaaatgaacagcctgagagttgaggacacggctgtgtattactgtgcgagaggggagggatacagctatggggacaactggggccagggaaccctggtcaccgtctcctcag

SEQ ID NO: 1399 - DNA, 355 bp, Homo sapiens
gaggtgcagctggtggagtccgggggaggcttagttcagcctggggggtccctgagactctcctgtgcagcctctggattcaccttcaggaactactggatgcactgggtccgccaagctccagggaaggggctggtgtgggtctcacgtattaatagtgatgggagtagcacaacctacgcggactccgtgaagggccgattcaccatctccagagacaacgccaagaacacgctgtatctgcaaatgaacagtctgagagccgaggacacggctgtgtattactgtgcaagaggaagagatgcctacaaccctgactactggggccagggaaccctggtcaccgtctcctcag

SEQ ID NO: 1400 - DNA, 354 bp, Homo sapiens
caggtgctgctggtggagtctgggggaggcgtggtccagcctgggaggtccctgagactctcctgtgcagcctctggattcaccttcagtacctatgctatgcactgggtccgccaggctccaggcacggggctggagtgggtggcagttatctcatatgatggaagcaataaatactacgcagactccgtgaagggccgattcaccatctccagagacaattccaagaacacgctgtatctgcaaatgaacagcctgagagctgaggacacggctgtgtattactgtgcgaggggacccaactactactacatggacgtctggggcaaagggaccacggtcaccgtctcctca

SEQ ID NO: 1401 - DNA, 355 bp, Homo sapiens
caggtgcagctggtgcagtctggggctgaggtgaagaagcctggggcctcagtgaaggtctcctgcaaggcttctggatacaccttcaccggctactatatgcactgggtgcgacaggcccctggacaagggcttgagtggatgggatggatcaaccctaacagtggtggcacaaactatgcacagaagtttcagggcagggtcaccatgaccagggacacgtccatcagcacagcctacatggagctgagcaggctgagatctgacgacacggccgtgtattactgtgcgagagtggggatctgggattactttgactactggggccagggaaccctggtcaccgtctcctcag

SEQ ID NO: 1402 - DNA, 353 bp, Homo sapiens
gaggtccagctggtacagtccggggctgaggtgaggaagcctggggccaccgtgaaaatctcctgcaaggcttctggatacaccttcaccggctactacatgcactgggtgcaacaggcccctggaaaagggcttgagtggatgggacgtgttgatcctgaatatggtgaaacaacatatgcagagaagttccagggcagagtcaccgtaaacgcagacacgtctacagacacagcctacatggagttgagcagcctgagatctgaggacacggccgtctattactgtgcaacaggcattatgcaagctgcccttgactactggggccagggaaccctagtcaccgtctcctc

SEQ ID NO: 1403 - DNA, 354 bp, Homo sapiens
caggtgcagctggtggagtctgggggaggcttggtcaagcctggagggtccctgagactctcctgtgcagcctctggattcaccttcagtgactactacatgagctggatccgccaggctccagggaaggggctggagtgggtttcatacattagtagtagtagtagtttcacaatctacgcagactctgtgaaaggccgattcaccatctccagagacaacgccaagaactcactgtatctgcaaatgaacagcctgagtgccgaagacacggccgtgtattactgtgcgagactaggaacaggttacggtatggacgtctggggccaagggaccacggtcaccgtctcctca

SEQ ID NO: 1404 - DNA, 352 bp, Homo sapiens
caggtgcagctgcaggagtcgggcccaggactggtgaagccttcggagaccctgtccctcacctgcactgtctctggtggctccatcagtagttactactggagctggatccggcagcccgccgggaagggactggagtggattgggcgtctttataacactgggaacaccgactacaacccctccctcaagactcgagtcaccatgtcagtagacacgtccaagaacgagttctccctgaagttgagctctgtgaccgccgcggacacggccgtgtattattgtgcactaaccactttaaactggtacttcgatctctggggccgtggcaccctggtcactgtctcctcag

SEQ ID NO: 1405 - DNA, 355 bp, Homo sapiens
caggtgcagctggtggagtctgggggaggcgtggtccagcctgggaggtccctgagactctcctgtgcagcgtctggattcaccttcagcaactatggcatgcactgggtccgccaggctccaggcaaggggctggagtgggtggcacttatatggtatgatggaagtaataaatattatgcagactccgtgaagggccgatccaccatctccagagacaattccaagaacacgctgtatctgcaaatgaacaacctgagagccgaggacacggctgtgtattactgtgcgacagatcacccttttggggggcatggctattggggccagggaaccctggtcaccgtctcctcag

SEQ ID NO: 1406 - DNA, 370 bp, Homo sapiens
caggtgcagctggtggagtctgggggaggcgtggtccagcctgggaggtccctgagactctcctgtgcagcctctggattcaccttcagtagctatgctatgcactgggtccgccaggctccaggcaaggggctggagtgggtggcagttatatcatatgatggaagcaataaatactacgcagactccgtgaagggccgattcaccatctccagagacaattccaagaacacgctgtatctgcaaatgaacagcctgagagctgaggacacggctgtgtattactgtgcgagagttcatagtgggagctacttacggttcaactactttgactactggggccagggaaccctggtcaccgtctcctcag

SEQ ID NO: 1407 - DNA, 355 bp, Homo sapiens
gaggagcagctggtggagtccgggggaggcttagttcagcctggggggtccctgagactctcctgtgcagcctctggattcaccttcaggagctactggatacattgggtccgccaagctccagggaaggggctgatgtgggtctcacgtattgataatgatgggaggagcacaatctacgcggattccgtgaagggccggttcaccatctccagagacaacgtcaagaacacactgtatttacaaatgaacagtctgagagccgacgacacggctgtctattattgtgcaagagggggcttcgatcatgcttttgatatgtggggccaagggacaatggtcaccgtctcttcag

SEQ ID NO: 1408 - DNA, 364 bp, Homo sapiens
caggtgcagctggtgcagtctggggctgaggtgaagaagcctggggcctcagtgaagatttcctgtaaggcatctggatacatgttcactagtcagtttttgcactgggtgcgacaggcccctggacaagggcttgagtggatggggatgatcagccctagtggtggaagcacaagctacgcacagaggttccagggcagagtcaccatgaccagagacacgtccacgaccacagtctacatggaagtgaccagcctgacttctgaagacacggccgtgtattactgtgcgagagaggggaggactacaatgacccaatcctttgaccactggggccagggaaccctggtcaccgtctcctcag

SEQ ID NO: 1409 - DNA, 364 bp, Homo sapiens
caggtgcagctggtgcagtctggggctgaggtgaagaagcctggggcctcagtgaaggtttcctgcaggacatctggatacaccttcaccagctactatatgcactgggtacgacaggcccctggacaagggcttgagtggatgggcataattaaccctagtggtggtggcacttcctatgcacagaagttccaaggcagagtcagaatgaccagggacacgtccacgaacacagtctacatggagttgagcagcctgagatctgaggacacggccgtgtattactgtgcgagagatgattactatgatcgtagtggttattttgccttctggggccagggaacgctggtcaccgtctcctcag

SEQ ID NO: 1410 - DNA, 364 bp, Homo sapiens
gaggtgcagctggtggagtctgggggaggcttggtacagcctggggggtccctgagactctcctgtgcagcctctggattcaccttcagtagttatagcatgaactgggtccgccaggctccagggaaggggctggagtgggtttcatacattagtagtagtagtagtaccatatactacgcagactctgtgaagggccgattcaccatctccagagacaacgccaagaactcactgtatctgcaaatgaacagcctgagagtcgaggacacggctgtgtattactgtgcgagagattactatgatagtagtgggccccgtcttgactactggggccagggaaccctggtcaccgtctcctcag

SEQ ID NO: 1411 - DNA, 367 bp, Homo sapiens
caggtcaccttgagggagtctggtcctgcgctggtgaaacccacacagaccctcacactgacctgcaccttctctgggttctcactcagcactagtggaatgtgtgtgagctggatccgtcagcccccagggaaggccctggagtggcttgcacgcattgattgggatgatgataaatactacagcacatctctgaagaccaggctcaccatctccaaggacacctccaaaaaccaggtggtccttacaatgaccaacatggaccctgtggacacagccacgtattactgtgcacggatgaggtgtgggagctaccacatttattttgactactggggccagggaaccctggtcaccgtctcctcag

SEQ ID NO: 1412 - DNA, 364 bp, Homo sapiens
gaagtgcagctggtgcagtctggagcagaggtgaaaaagcccggggagtctctgaggatctcctgtaagggttctggatacagctttaccagctactggatcagctgggtgcgccagatgcccgggaaaggcctggagtggatggggaggattgatcctagtgactcttataccaactacagcccgtccttccaaggccacgtcaccatctcagctgacaagtccatcagcactgcctacctgcagtggagcagcctgaaggcctcggacaccgccatgtattactgtgcgagacattcgcgttactatgatagtagtggctctgactactggggccagggaaccctggtcaccgtctcctcag

SEQ ID NO: 1413 - DNA, 364 bp, Homo sapiens
gaggtgcagctggtggagactggaggaggcttgatccagcctggggggtccctgagactctcctgtgcagcctctgggttcaccgtcagtagcaactacatgagctgggtccgccaggctccagggaaggggctggtgtgggtctcacgtattaatggtgatgggagtagtacaacctacgcggactccgtgaggggccgattcaccatctccagagacaattccaagaacacgctgtatcttcaaatgaacagcctgagagccgaggacacggccgtgtattattgtgcgagagatcgacgtagcagtgcctggtacggaactgactactggggccagggaaccctggtcaccgtctcctcag

SEQ ID NO: 1414 - DNA, 364 bp, Homo sapiens
gaggtgcagctgttggagtctgggggaggcttggtacagcctggggggtccctgagactctcctgtgcagcctctggattcacctttagcagctatgccatgagctgggtccgccaggctccagggaaggggctggagtgggtctcagctattagtggtagtggtggtagcacatactacgcagactccgtgaagggccggttcaccatctccagagacaattccaagaacacgctgtatctgcaaatgaacagcctgagagccgaggacacggccgtatattactgtgcgaaagatcctaagttgatctacggtgactacgtcgactactggggccagggaaccctggtcaccgtctcctcag

SEQ ID NO: 1415 - DNA, 364 bp, Homo sapiens
gaggtgcagctggtggagtctgggggaggcctggtcaagcctggggggtccctgagactctcctgtgcagcctctggattcaccttcagtagctatagcatgaactgggtccgccaggctccagggaaggggctggagtgggtctcatccattagtagtagtagtagttacatatactacgcagactcagtgaagggccgattcaccatctccagagacaacgccaagaactcactgtatctgcaaatgaacagcctgagagccgaggacacggctgtgtattactgtgcgagagtaatgggtacggtgacctcggggggatttgactactggggccagggaaccctggtcaccgtctcctcag

SEQ ID NO: 1416 - DNA, 370 bp, Homo sapiens
caggtgcagctggtggagtctgggggaggcgtggtccagcctgggaggtccctgagactctcctgtgcagcgtctggattcatcttcagtagctatggcatgcactgggtccgccaggctccaggcaaggggctggagtgggtggcagttatatggtatgatggaagtaataaatactatgcagactccgtgaagggccgattcaccatctccagagacaattccaagaacacgctgtatctgcaaatgaacagcctgagagacgaggacacggctgtgtattactgtgcgaaagattcggccgggggtttcgggaaaaaatattattttgactattggggccagggaaccctggtcaccgtctcctcag

SEQ ID NO: 1417 - DNA, 364 bp, Homo sapiens
gaggtccagctggtggagtctgggggaggcctggtcaagcctggggggtccctgagactctcctgtgcagcctctggattcaccttcagtgactatagcatgaactgggtccgccaggctccagggaaggggctggagtgggtctcatccattactaatactggtgatttcgtatactactcagactcattgaagggccgattcaccatctccagagacaacgccaaaaactctctgtatctgcaaatgagcagcctgagagtcgaggacacggctgtctattactgtgcgagagggtggtggggttcggggacttattacatgggctactggggccagggaatcttggtcaccgtctcctcag

SEQ ID NO: 1418 - DNA, 364 bp, Homo sapiens
gaggtgcagctggtggagtctgggggaggcctggtcaagcctggggggtccctgagactctcctgtgcagcctctggattcaccttcagtagctatagcatgaactgggtccgccaggctccagggaaggggctggagtgggtctcatccattagtagtagtagtagttacatatactacgcagactcagtgaagggccgattcaccatctccagagacaacgccaagaactcactgtatctgcaaatgaacagcctgagagccgaggacacggctgtgtattactgtgcgagagcccttcattactatggttcggggagttatgactactggggccagggaaccctggtcaccgtctcctcag

SEQ ID NO: 1419 - DNA, 366 bp, Homo sapiens
caggtgcagctgcaggagtcgggcccaggactggtgaagccttcacagaccctgtccctcacctgcactgtctctggtggctccatcagcagtggtgattactactggagctggatccgccagcccccagggaagggcctggagtggattgggtacatctattacagtgggagcacctactacaacccgtccctcaagagtcgagttaccatatcagtagacacgtccaagaaccagttctccctgaagctgagctctgtgactgccgcagacacggccgtgtattactgtgccagaggtctagtggctacgtactactactacatggacgtctggggcaaagggaccacggtcaccgtctcctca

SEQ ID NO: 1420 - DNA, 363 bp, Homo sapiens
gaagtgcagctggtgcagtctggagcagaggtgaaaaagcccggggagtctctgaggatctcctgtaagggttctggatacagctttaccagctactggatcagctgggtgcgccagatgcccgggaaaggcctggagtggatggggaggattgatcctagtgactcttataccaactacagcccgtccttccaaggccacgtcaccatctcagctgacaagtccatcagcactgcctacctgcagtggagcagcctgaaggcctcggacaccgccatgtattactgtgcgtgtatagcgagccagtactactactacggtatggacgtctggggccaagggaccacggtcaccgtctcctca

SEQ ID NO: 1421 - DNA, 357 bp, Homo sapiens
cagatcaccttgaaggagtctggtcctacgctggtgaaacccacacagaccctcacgctgacctgcaccttctctgggttctcactcagcactagtggagtgggtgtgggctggatccgtcagcccccaggaaaggccctggagtggcttgcactcatttattgggatgatgataagcgctacagcccatctctgaagagcaggctcaccatcaccaaggacacctccaaaaaccaggtggtccttacaatgaccaacatggaccctgtggacacagccacatattactgtgcacactgggcttcgggcattcccatggacgtctggggcaaagggaccacggtcaccgtctcctca

SEQ ID NO: 1422 - DNA, 364 bp, Homo sapiens
caggtgcagctggtggagtctgggggaggcgtggtccagcctgggaggtccctgagactctcctgtgcagcctctggattcaccttcagtagctatgctatgcactgggtccgccaggctccaggcaaggggctggagtgggtggcagttatatcatatgatggaagcaataaatactacgcagactccgtgaagggccgattcaccatctccagagacaattccaagaacacgctgtatctgcaaatgaacagcctgagacctgaggacacggctgtatattactgtgcgagaagttctagtagtggttattcgggctcatttgactactggggccagggaaccctggtcaccgtctcctcag

SEQ ID NO: 1423 - DNA, 364 bp, Homo sapiens
caggtgcagctggtggagtctgggggaggcgtggtccagcctgggaggtccctgagactctcctgtgcagcctctggattcaccttcagtagctatgctatgcactgggtccgccaggctccaggcaaggggctggagtgggtggcagttatatcatatgatggaagcaataaatactacgcagactccgtgaagggccgattcaccatctccagagacaattccaagaacacgctgtatctgcaaatgaacagcctgagagctgaggacacggctgtgtattactgtgcgagaggtctaagtgggagctactatacgtgctttgactactggggccagggaaccctggtcaccgtctcctcag

SEQ ID NO: 1424 - DNA, 364 bp, Homo sapiens
caggtgcaactggtggagtctgggggaggcgcggtccagcctgggaggtccctgagactctcctgtgtagcctctggattcaccttcagtacacatactctgcactgggtccgccaggctccaggcaaggggctggagtgggtggcagttatttttgatgatgcaaccactccatattatgcagactccgtgacgggccggttcaccatctccagagacaattccaggaacacactgtatctccaaatgaacagcctgagacctgacgacacggctgtttactattgtgcgagtccgaagagtgcgagcttcacctccactctggactactggggccggggaaccctggtcaccgtctcttcag

SEQ ID NO: 1425 - DNA, 364 bp, Homo sapiens
caggtgcagctggtggagtctgggggaggcgtggtccagcctgggaggtccctgagactctcctgtgcagcctctggattcaccttcagtagctatgctatgcactgggtccgccaggctccaggcaaggggctggagtgggtggcagttatatcatatgatggaagcaataaatactacgcagactccgtgaagggccgattcaccatctccagagacaattccaagaacacgctgtatctgcaaatgaacagcctgagagctgaggacacggctgtgtattactgtgcgagagcaccaatttatgggaggtcagggtactttgactactggggccagggaaccctggtcaccgtctcctcag

SEQ ID NO: 1426 - DNA, 368 bp, Homo sapiens
caggtgcagctggtggagtctgggggaggcttggtcaagcctggagggtccctgagactctcctgtgcagtctctggattcaccttcagtgactactacatgagttggatccgccaggctccagggaaggggctggagtgggtttcatacattagtggtagtactacttacacaaactacgcagactctgtgaagggccgattcaccatctccagagacaacgccaagaactcactgtatctgcaaatgaacagcctgagagccgaggacacggccgtgtattattgtgcgagaggactcccttatagtgggagctactcggatactttcgactactggggccagggaacgctggtcaccgtctcctc

SEQ ID NO: 1427 - DNA, 364 bp, Homo sapiens
caggtgcagctggtggagtctgggggaggcgtggtccagcctgggaggtccctgagactctcctgtgcagcctctggattcaccttcaggagctatgctatgcagtgggtccgccaggctccaggcaaggggctggagtgggtggcagttatatcatatgatggaagcaataaatactccgcagactccgtgaagggccgattcaccatctccagagacaattccaagaacacgctgtatctgcaaatgaacagcctgagacctgaggacacggctgtgtattactgtgcgagagccggttcggggagttattattccgcctttgactactggggccagggaaccctggtcaccgtctcctcag

SEQ ID NO: 1428 - DNA, 364 bp, Homo sapiens
caggtgcaggtggtggagtctgggggaggcgtggtccagcctgggaggtccctgagactctcctgtgcagcctctggattcaccttcagcatctatgctatgcactgggtccgccaggctccaggcaaggggctggagtgggtggcagttatatcatatgatggatacaataaatactacgcagacaccgtgaagggccgattcaccatctccagagacaattccaagaacacgctgtatctgcaaatgaacagcctgagagctgaggacacggctgtgtattactgtgcgagagccgaaagtgggagctactacagttcttttgactattggggccagggaaccctggtcaccgtctcctcag

SEQ ID NO: 1429 - DNA, 364 bp, Homo sapiens
gaggtgcagctggtggagtctgggggaggcttggtacagcctggggggtccctgagactctcctgtgcagcctctggattcacctttagcagctatgccatgagctgggtccgccaggctccagggaaggggctggagtgggtctcagctattagtggtagtggtggtagcacatactacgcagactccgtgaagggccggttcaccatctccagagacaattccaagaacactctgtatctgcaaatgaacagcctgagagccgaggacacggccgtatattactgtgcgaaatattctctccagctgctatgggatgcttttgatatctggggccaagggacaatggtcaccgtctcttcag

SEQ ID NO: 1430 - DNA, 366 bp, Homo sapiens
cagctgcagctgcaggagtcgggcccaggactggtgaagccctcggagaccctgtccctcacctgcactgtctctggtggctccatcagcagtagtacttattactggggctggatccgccagcccccagggaaggggctggagtggattgggagtatctattatagtgggagtacctactacaacccgtccctcaagagtcgagtcatcatatcagtagacacgtccaagaaccagttctccctgaagctgagctctgtgaccgcagcggacacggccgtgtattactgtgcgaggtaccacagaggtaatcccggccacggtatggacgtctggggccgagggaccacggtcaccgtctcctca

SEQ ID NO: 1431 - DNA, 363 bp, Homo sapiens
cagctgcagctgcaggagtcgggcccaggactggtgaagccttcggagaccctgtccctcacctgcactgtctctggtggctccatcaccacaagtaactactggggctggatccgccagcccccagggaaggggctggagtggattgggagtatccattatagtggaaccaccttctacaacccgtccctcaagagtcgagtcaccatatctgtagacacgtccaagaaccagttctccctgaagctgacctctgtgaccgccgcagacacggctgtgtattactgtgcgagaatcgctgagaaatactaccactactacatggacgtctggggcaaagggaccacggtcaccgtctcctca

SEQ ID NO: 1432 - DNA, 364 bp, Homo sapiens
caggtgcagctggtggagtctgggggaggcgtggtccagcctgggaagtccctgagactctcctgtggagcctctggattcaccttcaggagctatgctattcactgggtccgccaggctccaggcaaggggctggagtgggtggcagttatatcatatgatggaattaataaatacttcgcaggctccgtgaagggccgattcaccatctccagagacaattccaagaacacgctgtttctgcaaatgaacagcctgagacctgaggacacggctgtgtattactgtgcgaggacctcgagtgggagctactctgatgcttttgatatctggggccaagggacaatggtcaccgtctcttcag

SEQ ID NO: 1433 - DNA, 364 bp, Homo sapiens
caggtgcagctggtggagtctgggggaggcgtggtccagcctgggaggtccctgagactctcctgtgcagcctctggattcaccttcagtagctatgctatgcactgggtccgccaggctccaggcaaggggctggagtgggtggcagttatatcatatgatggaagcaataaatactacgcagactccgtgaagggccgattcaccatctccagagacaattccaagaacacgctgtatctgcaaatgaacagcctgagagctgaggacacggctgtgtattactgtgcgagggcgtatagtgggagctacttgggtgcttttgatatctggggccaagggacaatggtcaccgtctcttcag

SEQ ID NO: 1434 - DNA, 370 bp, Homo sapiens
gaggtgcagctggtggagtctgggggagacttggtaaaccctggggggtccctgagactctcctgtgcagcctctgggttcactttcagcagtgcctggatgagttgggtccgccaggctcccgggaaggggctggagtgggttgcccgtgttaaaagtaaaactgatggtgggacaacagactatgccgcatccgtgaaaggcagattcatcatttcaagagatgattcagaaaaaacactgttcctgcaaatgaccagtctgaaaagtgaggacacagccgtctattattgtaccacagatcggagagccgggtataacagtcaatttgactactggggccagggaaccctggtcaccgtctcctcag

SEQ ID NO: 1435 - DNA, 367 bp, Homo sapiens
caggtgcagctgcaggagtcggacccaggactggtaaagccttcggagaccctgtccctcacctgcactgtctctgatggctccatcagtagtcactactggagctggatccggcagcccccagggaagggactggagtggattgggtatatctatgacagtgggaccaccaactacaacccgtccctcaagagtcgagtcaccatatcagtaggcccgtccaagaagcagttctccctgaagttgacctctgtgaccgctgcggacacggccgtgtattattgtgcgagaggctaccgagatggctacgggctcattgatgcttttgatatctgggcccaagggacaatggtcaccgtctcttcag

SEQ ID NO: 1436 - DNA, 370 bp, Homo sapiens
gaggtgcaactggtggagtctgggggaggcttggtaaagcctggggagtcccttagactctcttgtacagcctctggattcactttcagtaacgcctggatgagctgggtccgccaggctccaggaaaggggctggagtgggttggccgtatcagaagcagacctgaaggtgggacaacagactacgctgcacccgtgaaaggcagattcaccatctcaagagatgattcaaaaaacacactgtatctgcaaatgaacagcctgaaaaccgaggacacagccgtgtattactgtaccacagatcggcgcgggattacggtgaacgtttttgactactggggccagggaaccctggtcaccgtctcctcag

SEQ ID NO: 1437 - DNA, 363 bp, Homo sapiens
caggtgcagctggtggagtctgggggaggcgtggtccagcctgggaggtccctgagactctcctgtgcagcctctggattcaccttcagtacctatgctatgcactgggtccgccaggctccaggcgaggggctggagtgggtggcagttatttcatatgatggaagtaataaatactacgcagactccgtgaagggccgattcaccatctccagagacaattccaagaacacgatgtatctgcaaatgagcagcctgagaactgaggacacggctttgtattactgtgcgagagccacgtttgggggctactacttcggtatggacgtctggggccaagggaccacggtcaccgtctcctca

SEQ ID NO: 1438 - DNA, 363 bp, Homo sapiens
caggtgcagctggtggagtctgggggaggcgtggtccagcctgggaggtccctgagactctcctgtgcagcctctggattcaccttcaatagctatgctatgcactgggtccgccaggctccaggcaaggggctggagtgggtggcagttatatcatatgatggaagtaataaatactacgcagactccgtgaagggccgattcaccatctccagagacaattccaagaacacgctgtatctgcaaatgagcagcctgagaactgaggacacggctgtttattactgtgcgagaagtagcaggggaagttactactacggtatggacgtctggggccgagggaccacggtcaccgtctcctca

SEQ ID NO: 1439 - DNA, 363 bp, Homo sapiens
caggtgcagctggtggagtctgggggaggcgtggtccagcctgggaggtccctgagactctcctgtgcagcctctggaatcaccttcagtacctatgctatgcactgggtccgccaggctccaggcaaggggctggagtgggtggcaattatatcatatgatggaagtaataaatactacgcagactccgtgaagggccgattcaccatctccagagacaattccaagaacacactgtatctgcaaatgaatagcctgacagctgaggacacggctgtctattactgtgtgagggccacaggaggatcctactactacggtatggacgtctggggccaagggaccacggtcaccgtctcctca

SEQ ID NO: 1440 - DNA, 362 bp, Homo sapiens
caggtgcagctggtggagtctgggggaggcgtggtccagcctgggaggtccctgagactctcctgtgcagcctctggattcaccttcaatagctatgctatgcactgggtccgccaggctccaggcaaggggctggagtgggtggcagttgtatcatatgatggaattaataaatactacgcagactccgtgaagggccgattcaccatctccagagacaattccaagaacacgctgtatctgcaaatgaacagcctgagagctgaggacacggctgtgtattactgtgcgagaggttttggtgggaactactactacggtatggacgtctggggccaagggaccacggtcaccgtctcctc

SEQ ID NO: 1441 - DNA, 364 bp, Homo sapiens
caggttcagctggtgcagtctggagctgaggtgaagaagcctggggcctcagtgaagatctcctgcaaggcttctggttacatttttaccgtctatggtatcagctgggtgcgacaggcccctggacaagggcttgagtggatgggatggatcaccacttacaatggtgacacaaactatgcacagaagctccagggcagagtcaccatgaccacagacacatccacgagcacagcctatatggagctgaggagcctgagatctgacgacacggccgtgtattactgtgcgagaggggcggaattcggggactggtcccccctccagcactggggccagggcaccctggtcaccgtctcctcag

SEQ ID NO: 1442 - DNA, 364 bp, Homo sapiens
caggtgcagctggtggagtctgggggaggagtcgtccagcctgggaggtccctgagactctcctgtgcagcctctggattcaccttcagtagttatgttatgtactgggtccgccaggctccaggcaaggggctggagtgggtggcagttatatcatatgatggaagtaataaatactacgcagactccgtgaagggccgattcaccatctccagagacaattccaagaacacgctgtatctgcaaatgaacagcctgagagttgacgacacggctgtgtattactgtgcgagaggggacagcagctggtacgtcgggtacttccagcactggggccagggcaccctggtcaccgtctcctcag

SEQ ID NO: 1443 - DNA, 330 bp, Homo sapiens
caggctgtggtgactcaggagccctcactgactgtgtccccaggagggacagtcactctcacctgtggctccagcactggagctgtcaccagtggtcattttccctactggttccagcagaagcctggccaagcccccaggacactgatttatgatacagacaagaaacactcctggacacctgcccggttctcaggctccctccttgggggcatagctgccctgaccctttcgggtgcgcagcctgaggatgaggctgagtattactgcttgctctcctatagtggtgctcggccaggggttttcggcggagggaccaagctgaccgtc

SEQ ID NO: 1444 - DNA, 330 bp, Homo sapiens; identical to SEQ ID NO: 1443

SEQ ID NO: 1445 - DNA, 330 bp, Homo sapiens; identical to SEQ ID NO: 1443

SEQ ID NO: 1446 - DNA, 330 bp, Homo sapiens; identical to SEQ ID NO: 1443

SEQ ID NO: 1447 - DNA, 330 bp, Homo sapiens; identical to SEQ ID NO: 1443

SEQ ID NO: 1448 - DNA, 330 bp, Homo sapiens; identical to SEQ ID NO: 1443

SEQ ID NO: 1449 - DNA, 330 bp, Homo sapiens; identical to SEQ ID NO: 1443

SEQ ID NO: 1450 - DNA, 330 bp, Homo sapiens; identical to SEQ ID NO: 1443

SEQ ID NO: 1451 - DNA, 330 bp, Homo sapiens; identical to SEQ ID NO: 1443

SEQ ID NO: 1452 - DNA, 330 bp, Homo sapiens; identical to SEQ ID NO: 1443

SEQ ID NO: 1453 - DNA, 330 bp, Homo sapiens; identical to SEQ ID NO: 1443

SEQ ID NO: 1454 - DNA, 330 bp, Homo sapiens; identical to SEQ ID NO: 1443

SEQ ID NO: 1455 - DNA, 330 bp, Homo sapiens; identical to SEQ ID NO: 1443

SEQ ID NO: 1456 - DNA, 330 bp, Homo sapiens; identical to SEQ ID NO: 1443

SEQ ID NO: 1457 - DNA, 330 bp, Homo sapiens; identical to SEQ ID NO: 1443

SEQ ID NO: 1458 - DNA, 330 bp, Homo sapiens; identical to SEQ ID NO: 1443

SEQ ID NO: 1459 - DNA, 330 bp, Homo sapiens; identical to SEQ ID NO: 1443

SEQ ID NO: 1460 - DNA, 330 bp, Homo sapiens; identical to SEQ ID NO: 1443

SEQ ID NO: 1461 - DNA, 330 bp, Homo sapiens; identical to SEQ ID NO: 1443

SEQ ID NO: 1462 - DNA, 322 bp, Homo sapiens
gacatccagatgacccagtctccttccaccctgtctgcatctgtgggagacagagtcaccatcacttgccgggccagtcagagtattagtagctggttggcctggtatcagcagaagccagggaaagcccctaacctcctgatttataaggcgtctaatttacaaagtggggtcccatcaaggttcagcggcagtggatctgggacagaattcactctcaccatcagcagcctgcagcctgatgattttgcaacttattactgccaacagtataatactaacccggtcactttcggcggagggaccaaggtggagatcaaac

SEQ ID NO: 1463 - DNA, 330 bp, Homo sapiens
caggctgtggtgactcaggagccctcactgactgtgtccccaggagggacagtcactctcacctgtggctccagcactggagctgtcaccagtggtcattttccctactggttccagcagaagcctggccaagcccccaggacactgatttatgatacagacaagaaacactcctggacacctgcccggttctcaggctccctccttgggggcatagctgccctgaccctttcgggtgcgcagtctgaggatgaggctgagtattactgcttgctctcctatagtggtgctcggccaggggttttcggcggagggaccaagctgaccgtc

SEQ ID NO: 1464 - DNA, 330 bp, Homo sapiens; identical to SEQ ID NO: 1443

SEQ ID NO: 1465 - DNA, 330 bp, Homo sapiens; identical to SEQ ID NO: 1443

SEQ ID NO: 1466 - DNA, 330 bp, Homo sapiens; identical to SEQ ID NO: 1443

SEQ ID NO: 1467 - DNA, 330 bp, Homo sapiens; identical to SEQ ID NO: 1443

SEQ ID NO: 1468 - DNA, 330 bp, Homo sapiens; identical to SEQ ID NO: 1443

SEQ ID NO: 1469 - DNA, 330 bp, Homo sapiens; identical to SEQ ID NO: 1443

SEQ ID NO: 1470 - DNA, 330 bp, Homo sapiens; identical to SEQ ID NO: 1443

SEQ ID NO: 1471 - DNA, 330 bp, Homo sapiens; identical to SEQ ID NO: 1443

SEQ ID NO: 1472 - DNA, 330 bp, Homo sapiens; identical to SEQ ID NO: 1443

SEQ ID NO: 1473 - DNA, 330 bp, Homo sapiens; identical to SEQ ID NO: 1443

SEQ ID NO: 1474 - DNA, 330 bp, Homo sapiens; identical to SEQ ID NO: 1443

SEQ ID NO: 1475 - DNA, 330 bp, Homo sapiens; identical to SEQ ID NO: 1443

SEQ ID NO: 1476 - DNA, 330 bp, Homo sapiens; identical to SEQ ID NO: 1443

SEQ ID NO: 1477 - DNA, 330 bp, Homo sapiens; identical to SEQ ID NO: 1443

SEQ ID NO: 1478 - DNA, 330 bp, Homo sapiens; identical to SEQ ID NO: 1443

SEQ ID NO: 1479 - DNA, 334 bp, Homo sapiens
caggctgtggtgactcaggagccctcactgactgtgtccccaggagggacagtcactctcacctgtggctccagcactggagctgtcaccagtggtcattttccctactggttccagcagaagcctggccaagcccccaggacactgatttatgatacagacaagaaacactcctggacacctgcccggttctcaggctccctccttgggggcatagctgccctgaccctttcgggtgcgcagcctgaggatgaggctgagtattactgcttgctctcctatagtggtgctcggccaggggttttcggcggagggaccaagctgaccgtcctag

SEQ ID NO: 1480 - DNA, 330 bp, Homo sapiens; identical to SEQ ID NO: 1443

SEQ ID NO: 1481 - DNA, 330 bp, Homo sapiens; identical to SEQ ID NO: 1443

SEQ ID NO: 1482 - DNA, 330 bp, Homo sapiens; identical to SEQ ID NO: 1443

SEQ ID NO: 1483 - DNA, 330 bp, Homo sapiens; identical to SEQ ID NO: 1443

SEQ ID NO: 1484 - DNA, 330 bp, Homo sapiens; identical to SEQ ID NO: 1443

SEQ ID NO: 1485 - DNA, 330 bp, Homo sapiens; identical to SEQ ID NO: 1443

SEQ ID NO: 1486 - DNA, 330 bp, Homo sapiens; identical to SEQ ID NO: 1443

SEQ ID NO: 1487 - DNA, 330 bp, Homo sapiens; identical to SEQ ID NO: 1443

SEQ ID NO: 1488 - DNA, 343 bp, Homo sapiens
gacatcgtgatgacccagtctccagactccctggctgtgtctctgggcgagagggccaccatcaactgcaagtccagccagagtgttttatacagctccaacaataagaactccttagcttggtaccagcagaaaccaggacagcctcctaagctgctcatttactgggcatctacccgggaatccggggtccctgaccgattcagtggcagcgggtctgggacagatttcactctcaccatcagcagcctgcaggctgaagatgtggcagtttattactgtcagcaatattatagtagtcctccgaacacttttggccaggggaccaagctggagatcaaac

SEQ ID NO: 1489 - DNA, 343 bp, Homo sapiens; identical to SEQ ID NO: 1488

SEQ ID NO: 1490 - DNA, 343 bp, Homo sapiens; identical to SEQ ID NO: 1488

SEQ ID NO: 1491 - DNA, 343 bp, Homo sapiens; identical to SEQ ID NO: 1488

SEQ ID NO: 1492 - DNA, 343 bp, Homo sapiens; identical to SEQ ID NO: 1488

SEQ ID NO: 1493 - DNA, 343 bp, Homo sapiens; identical to SEQ ID NO: 1488

SEQ ID NO: 1494 - DNA, 343 bp, Homo sapiens; identical to SEQ ID NO: 1488

SEQ ID NO: 1495 - DNA, 343 bp, Homo sapiens; identical to SEQ ID NO: 1488

SEQ ID NO: 1496 - DNA, 343 bp, Homo sapiens; identical to SEQ ID NO: 1488

SEQ ID NO: 1497 - DNA, 343 bp, Homo sapiens; identical to SEQ ID NO: 1488

SEQ ID NO: 1498 - DNA, 343 bp, Homo sapiens; identical to SEQ ID NO: 1488

SEQ ID NO: 1499 - DNA, 343 bp, Homo sapiens; identical to SEQ ID NO: 1488

SEQ ID NO: 1500 - DNA, 343 bp, Homo sapiens; identical to SEQ ID NO: 1488

SEQ ID NO: 1501 - DNA, 343 bp, Homo sapiens; identical to SEQ ID NO: 1488

SEQ ID NO: 1502 - DNA, 343 bp, Homo sapiens; identical to SEQ ID NO: 1488

SEQ ID NO: 1503 - DNA, 343 bp, Homo sapiens; identical to SEQ ID NO: 1488

SEQ ID NO: 1504 - DNA, 343 bp, Homo sapiens; identical to SEQ ID NO: 1488

SEQ ID NO: 1505 - DNA, 343 bp, Homo sapiens; identical to SEQ ID NO: 1488

SEQ ID NO: 1506 - DNA, 319 bp, Homo sapiens
gaaattgtgttgacacagtctccagccaccctgtctttctctccaggggaaagagccaccctctcctgcagggccagtcagagtgttagcagctacttagcctggtaccaacagaaacctggccaggctcccaggctcctcatctatgatgcatccaacagggccactggcatcccagccaggttcagtggcagtgggtctgggacagacttcactctcaccatcagcagcctagagcctgaagattttgcagtttattactgtcagcagcgtagcgactggccgacgttcggccaagggaccaaggtggaaatcaaac

SEQ ID NO: 1507 - DNA, 319 bp, Homo sapiens; identical to SEQ ID NO: 1506

SEQ ID NO: 1508 - DNA, 319 bp, Homo sapiens; identical to SEQ ID NO: 1506

SEQ ID NO: 1509 - DNA, 319 bp, Homo sapiens; identical to SEQ ID NO: 1506

SEQ ID NO: 1510 - DNA, 319 bp, Homo sapiens; identical to SEQ ID NO: 1506

SEQ ID NO: 1511 - DNA, 327 bp, Homo sapiens
aaatagtgatgacgcagtctccagccaccctgtctgtgtctccaggggaaagcgccaccctctcctgcagggccagtcagagtgttagcagcaacttagcctggtaccagcagaaacctggccaggctcccagggtcctcatctatggtgcatccaccagggcctctggttccccggccaggttcagtggcagtgggtctgggacagagttcactctcaccatcagcagcctgcagtctgaagattctgcagtttattactgtcagcagtataatagctggcctccgatgttcacttttggccaggggaccaaactggagatcaaac

SEQ ID NO: 1512 - DNA, 327 bp, Homo sapiens; identical to SEQ ID NO: 1511

SEQ ID NO: 1513 - DNA, 327 bp, Homo sapiens
aaataatgatgacgcagtctccagcctccctgtctgtgtctccaggggaaagcgccatcctctcctgtagggccagtgagagtgttaccaacaacttagcctggtaccagcaaaaacctggccaggctcccaggctcctcatctatggtgcatccaccagggccgctggttccccggccaggttcagtggcagtgggtctgggacagagttcactctcaccatcagcagcgtgcagtctgcagatttcggagtttattactgtcaacagtatgatagctggcctccgaggttcacctttggccaggggaccaaactggagatcaaac

SEQ ID NO: 1514 - DNA, 327 bp, Homo sapiens
aaatagtgatgacgcagtctccagccaccctgtctctgtctccaggggaaagcgccaccctctcctgcagggccagtcagagtgttaccagcaatttagcctggtaccagcagaaacttggccaggctcccaggctcctcatctatggtgcatccaccagggccactggttccccggccaggttcagtggcagtgggtctgggacagagttcactctcaccatcagcagcctgcagtctgaagattctgcagtttattactgtcaacactatgatggctggcctccgatgttcacttttggccaggggaccaagctggagatcaaac

SEQ ID NO: 1515 - DNA, 327 bp, Homo sapiens; identical to SEQ ID NO: 1511

SEQ ID NO: 1516 - DNA, 322 bp, Homo sapiens
gacatccagatgacccagtctccttccaccctgtctgcatctgtaggagacggagtcaccatcacttgccgggccagtcagagtgtttacacctggttggcctggtatcagcagaaaccagggaaagcccctaagctcctgatctataaggcgtctagtttagaaagtggggtcccatcaaggttcagcggcagtggatctggggcagaattcactctcaccatcagcagcctgcagcctgatgattctgcaacttattactgccaacagtataatagttattctctcacttttggccaggggaccaagctggagatcaaac

SEQ ID NO: 1517 - DNA, 322 bp, Homo sapiens
gacatccagatgacccagtctccttccaccctgtctgcatctgtaggagacggagtcaccatcacttgccgggccagtcagagtatttacacctggttggcctggtatcagcagaaaccagggaaagcccctaagctcctgatctataaggcgtctagtttagaaagtggggtcccatcaaggttcagcggcagtggatctggaacacaattcactctcaccatcagcagcctgcagcctgatgattttgcaacttattactgccaacagtataacagttattctctcacttttggccaggggaccaagctggagatcaaac

SEQ ID NO: 1518 - DNA, 322 bp, Homo sapiens
gacatccagatgacccagtctccttccaccctgtctgcatctgtaggagacggagtcaccatcacttgccgggccagtcagagtgtttacacctggttggcctggtatcagcagaaaccagggaaagcccctaagctcctgatctataaggcgtctactttagaaagtggggtcccatcaaggttcagcggcagtggatctggggcagaattcactctcaccatcagcagcctgcagcctgatgattctgcaacttattactgccaacagtataatagttattctctcacttttggccaggggaccaagctggagatcaaac

SEQ ID NO: 1519 - DNA, 322 bp, Homo sapiens; identical to SEQ ID NO: 1516

SEQ ID NO: 1520 - DNA, 322 bp, Homo sapiens
gccatccggatgacccagtctccatcctcattctctgcatctacaggagacagagtcaccatcacttgtcgggcgagtcagggtattagcagttatttagcctggtatcagcaaaaaccagggaaagcccctaagctcctgatctatgctgcatccactttgcaaagtggggtcccatcaaggttcagcggcagtggatctgggacagatttcactctcaccatcagctgcctgcagtctgaagattttgcaacttattactgtcaacagtattatagttacccgtacacttttggccaggggaccaagctggagatcaaac

SEQ ID NO: 1521 - DNA, 322 bp, Homo sapiens; identical to SEQ ID NO: 1520

SEQ ID NO: 1522 - DNA, 322 bp, Homo sapiens; identical to SEQ ID NO: 1520

SEQ ID NO: 1523 - DNA, 322 bp, Homo sapiens; identical to SEQ ID NO: 1520

SEQ ID NO: 1524 - DNA, 330 bp, Homo sapiens
cagtctgccctgactcagcctgcctccgtgtctgggtctcctggacagtcgatcaccatctcctgcactggaaccagcgatgacgttggtggttatcactatgtctcctggtaccaacagcacccaggcaaagcccccaaactcatgatttttgatgtcaataagcggccctcaggggtttctgatcggttctctggctccaagtctggcaacacggcctccctgaccatctctgggctccaggctgaggacgaggctgattatttctgcagctcatatacaagcagcaacacttgggtgttcggcggagggaccaagctgaccgtccta

SEQ ID NO: 1525 - DNA, 330 bp, Homo sapiens
cagtctgccctgactcagcctgcctccgtgtctgggtctcctggacagtcgatcaccatctcctgcactggaaccagcaatgacgttggtggttatcactatgtctcctggtaccaacagcacccaggcaaagcccccaaactcatgatttttgatgtcaataagcggccctcaggggtttctgatcggttctctggctccaagtctggcaacacggcctccctgaccatctctgggctccaggctgaggacgaggctgattatttctgcagctcatatacaagcagcaacacttgggtgttcggcggagggaccaagctgaccgtccta

SEQ ID NO: 1526 - DNA, 330 bp, Homo sapiens; identical to SEQ ID NO: 1525

SEQ ID NO: 1527 - DNA, 330 bp, Homo sapiens
cagtctgccctgactcagcctgcctccgtgtctgggtctcctggacagtcgatcaccatctcctgcactggaaccagcgatgacgttggtggttatcactatgtctcctggtaccaacaacacccaggcaaagcccccaaactcatgatttttgatgtcaataagcggccctcagggatttctgatcggttctctggctccaagtctggcaacacggcctccctgaccatctctgggctccaggctgaggacgaggctgattatttctgcagctcatatacaagcagcaacacttgggtgttcggcggagggaccaagctgaccgtccta

SEQ ID NO: 1528 - DNA, 337 bp, Homo sapiens
gatattgtgatgacccagactccactctcctcacctgtcacccttggacagccggcctccatctcctgcaggtctagtcaaagcctcgtatataatgatggaaacacctacttgagttggcttcaccagaggccaggccagcctccaagactcctaatttataagatttctaaccggttctctggggtcccagacagattcagtggcagtggggcagggacagatttcacactgaaaatcagcagggtggaagctgaggatgtcggggtttattactgcatgcaagctacacaatttccattcactttcggccctgggaccaaagtggatatcaaac

SEQ ID NO: 1529 - DNA, 337 bp, Homo sapiens; identical to SEQ ID NO: 1528

SEQ ID NO: 1530 - DNA, 337 bp, Homo sapiens; identical to SEQ ID NO: 1528

SEQ ID NO: 1531 - DNA, 325 bp, Homo sapiens
gaaattgtgttgacgcagtctccaggcaccctgtctttgtctccaggggaaagagccaccctctcctgcagggccagtcagagtgttagcagcagctacttagcctggtaccagcagaaacctggccaggctcccaggctcctcatctatggtgcatccagcagggccactggcatcccagacaggttcagtggcagtgggtctgggacagacttcactctcaccatcagcagactggagcctgaagattttgcagtgtattactgtcagcagtatggtagttctccgtacacttttggccaggggaccaagctggagatcaaac

SEQ ID NO: 1532 - DNA, 325 bp, Homo sapiens
gaaattgtgttgacgcagtctccaggcaccctgtctttgtctccaggggaaagagccaccctctcctgcagggccagtcagagtgttagcagcagctacttagcctggtaccagcagaaacctggccaggctcccaggctcctcatctatggtgcatccagcagggccactggcatcccagacaggttcagtggcagtgggtctgggacagacttcactctcaccatcagcagactggagcctgaagattttgcagtgtattactgtcagcagtatggtacctctccgtacacttttggccaggggaccaagctggagatcaaac

SEQ ID NO: 1533 - DNA, 325 bp, Homo sapiens
gaaattgtgttgacgcagtctccaggcaccctgtctttgtctccaggggaaagagccaccctctcctgcagggccagtcagagtgttagcagcagctacttagcctggtaccagcagaaacctggccaggctcccaggctcctcatctatggtgcatccagcagggccactggcatcccagacaggttcagtggcagtgggtctgggacagacttcactctcaccatcagcagactggagcctgaagattttgcagtgtattactgtcagcagtatggtagctctccgtacacttttggccaggggaccaagctggagatcaaac

SEQ ID NO: 1534 - DNA, 337 bp, Homo sapiens
cagtctgtgctgacgcagccgccctcagtgtctggggccccagggcagagggtcaccatctcctgtactgggagcagctccaacatcggggcaggttatgatgtacactggtaccagcagcttccaggaacagcccccaaactcctcatctatggtaacaccaatcggccctcaggggtccctgaccgattttctggctccaagtctggcacctcagcctccctggccatcactgggctccaggctgaggatgaggctgattattactgccagtcctatgacagcagcctgagtggttctgtggtattcggcggagggaccaagctgaccgtcctag

SEQ ID NO: 1535 - DNA, 336 bp, Homo sapiens
cagtctgtgctgacgcagccgccctcagtgtctggggccccagggcagggggtcaccatctcctgcactgggagcagctccaacatcggggcaggttatgatgtacactggtaccagcagcttccaggaacagcccccaaactcctcatctatgataacaccaatcggccctcaggggtccctgaccgattctctggctccaagtctggcacctcagcctccctggccatcactgggctccaggctgaggatgaggctgattattactgccagtcctgtgacatcagcctgagtagttctgtggtgttcggcggagggaccaagctgaccgtccta

SEQ ID NO: 1536 - DNA, 337 bp, Homo sapiens
cagtctgtgctgacgcagccgccctcagtgtctggggccccagggcagagggtcaccatctcctgcactgggagcagctccaacatcggggcaggttatgatgtacactggtaccagcagcttccaggaacagcccccaaagtcctcatctatgctaacattaatcggccctcaggggtccctgaccgattctctggctccaagtctggcacctcagcctccctggccatcactgggctccaggctgaggatgaggctgattattactgccagtcctatgacagcagcctgagtggttctgttgtcttcggcggagggaccaagctgaccgtcctag

SEQ ID NO: 1537 - DNA, 322 bp, Homo sapiens
gacatccagttgacccagtctccatccttcctgtctgcatctgtaggagacagagtcagcatcgcctgccgggccagtcagggcattagcaattatttagcctggtatcagcaaaaaccagggaaagcccctaagctcctgatctatgatgcatccaccttgcaaagtggggtcccatcaaggttcagcggcagtggatctgggacagaattcactctcacaatcaccagcctgcagcctgaagattttgcaacttactactgtcaacaggttaatacttaccccctgactttcggcggagggaccaaggtggagatcaaac

SEQ ID NO: 1538 - DNA, 322 bp, Homo sapiens; identical to SEQ ID NO: 1537

SEQ ID NO: 1539 - DNA, 322 bp, Homo sapiens; identical to SEQ ID NO: 1537

SEQ ID NO: 1540 - DNA, 323 bp, Homo sapiens
gaaattgtgttgacgcagtctccaggcaccctctctttatctccaggggaaagagccaccctctcctgcagggccagtcagagtgttgggaccagctacttagcctggtaccagcagaaacttggccaggctcccaggctcctcatctatggtgcatccggcagggcctctggcatcccagacaggttcagtggcagtgggtctgggacagacttcactctcaccatcagcagactggagcctgaagattttgcagtgtattactgtcagcattatggtagctcacttttcactttcggccctgggaccaaggtggatatcaa

SEQ ID NO: 1541 - DNA, 323 bp, Homo sapiens; identical to SEQ ID NO: 1540

SEQ ID NO: 1542 - DNA, 323 bp, Homo sapiens
gaaattgtgttgacgcagtctccaggcaccctctctttatctccaggggaaagagccaccctctcctgcagggccagtcagagtgttgggaccagctacttagcctggtaccagcagaaacttggccaggctcccaggctcgtcatctatggtgcatccggcagggcctctggcatcccagacaggttcagtggcagtgggtctgggacagacttcactctcaccatcagcagactggagcctgaagattttgcagtgtattactgtcagcattatggtagctcacttttcactttcggccctgggaccaaggtggatatcaa

SEQ ID NO: 1543 - DNA, 322 bp, Homo sapiens
gacatccagatgacccagtctccatcctccctgtctgcatctgtaggagacagagtcaccatcacttgccgggcaagtcagggcattagaaatgatttaggctggtatcagcagaaaccagggaaagcccctaagcgcctgatctatgctgcatccagtttgcaaagtggggtcccatcaaggttcagcggcagtggatctgggacagaattcactctcacaatcagcagcctgcagcctgaagattttgcaacttattactgtctacagcataatagttaccctctcactttcggcggagggaccaaggtggagatcaaac

SEQ ID NO: 1544 - DNA, 322 bp, Homo sapiens; identical to SEQ ID NO: 1543

SEQ ID NO: 1545 - DNA, 322 bp, Homo sapiens; identical to SEQ ID NO: 1543

SEQ ID NO: 1546 - DNA, 325 bp, Homo sapiens
gaaattgtgttgacgcagtctccaggcaccctgtccatgtctccaggggaaagagccaccctctcctgcagggccagtcagagtgttagcagcagctacttagcctggtaccagcagaaacctggccaggctcccaggctcctcatctatggtgcatccagcagggccactggcatcccagacaggttcagtggcagtgggtctgggacagacttcactctcaccatcagcagactggagcctgaagattttgcagtgtattactgtcagcagtatggtagctcacctcgaacgttcggccaagggaccaaggtggaaatcaaac

SEQ ID NO: 1547 - DNA, 325 bp, Homo sapiens
gaaattgtgttgacgcagtctccaggcaccctgtctttgtctccaggggaaagagtcaccctctcctgcagggccagtcagagtgttagcagcagttacttagcctggtaccagcagaaacctggccaggctcccaggctcctcatctatggtgcatccagcagggccactggcatcccagacaggttcagtggcagtgggtctgggacagacttcactctcaccatcagcagactggagcctgaagattttgcagtgtattactgtcagcagtatggtaactcacctcgaacgttcggccaagggaccaaggtggaaatcaaac

SEQ ID NO: 1548 - DNA, 325 bp, Homo sapiens
gaaattgtgttgacgcagtctccaggcaccctgtctttgtctccaggggaaagagccaccctctcctgcagggccagtcagagtgttagcagcagctacttagcctggtaccagcagaaacctggccaggctcccaggctcctcatctatggtgcatccagcagggccactggcatcccagacaggttcagtggcagtgggtctgggacagacttcactctcaccatcagcagactggagcctgaagattttgcagtgtattactgtcagcagtatggtagctcacctcgaacgttcggccaagggaccaaggtggaaatcaaac

SEQ ID NO: 1549 - DNA, 331 bp, Homo sapiens
cagactgtggtgacccaggagccatcgttctcagtgtcccctggagggacagtcacactcacttgtggcttgacctctggctcagtctctactgattcctaccccagctggtaccagcagaccccaggccagcctccacgcaccctcatctacaatacaaacattcgctcttctggggtccctgatcgcttctctggctccatccttgggaacaaagctgccctcaccatcgcgggggcccaggcagatgatgaatctcattattattgtgtagtgtttatgggtagtggctcttgggtgttcggcggagggaccaagctgaccgtcctag

SEQ ID NO: 1550 - DNA, 329 bp, Homo sapiens
cagactgtggtgacccaggagccatcgttctcagtgtcccctggagggacagtcacactcacttgtggcttgacctctggctcagtctctactggttcctaccccagctggtaccagcagaccccaggccagcctccacgcacgctcatctacaatacagacattcgctcttctggggtccctaatcgcttctctggctccatccttgggaacaaagctgccctcaccatcacgggggcccaggcagatgatgaatctcattattattgtgtcgtctttatgggtagtggctcttgggtgttcggcggagggaccaagctgaccgtcct

SEQ ID NO: 1551 - DNA, 331 bp, Homo sapiens
cagtctgccctgactcagcctgcctccgtgtctgggtctcctggacagtcgatcaccatctcctgcactggaaccagcaatgacattggtcgttataattatgtctcctggtaccaacaacacccaggcaaagcccccaaactcttgatttatgatgtcactaagcggcccacgggggtttctaatcgcttctctggctccaagtctggcaacacggcctccctgaccatctctggactccaggctgacgacgaggctgattactactgcgcctcatatacaagtactagtcctgtactcttcggcggagggaccaagctgaccgtcctag

SEQ ID NO: 1552 - DNA, 330 bp, Homo sapiens
cagtctgccctgactcagcctgcctccgtgtctgggtctcctggacagtcgatcaccatctcctgcactggaaccagcaatgacattggtcgttataattatgtctcctggtaccaacaacacccaggcaaagcccccaaactcttgatttatgatgtcactaagcggcccacgggggtttctaatcgcttctctggctccaagtctgtcaacacggcctccctgaccatctctggactccaggctgacgacgaggctgattactactgcgcctcatatacaagtactagtcctgtactcttcggcggagggaccaagctgaccgtccta

SEQ ID NO: 1553 - DNA, 340 bp, Homo sapiens
gacatcgtgatgacccagtctccagactccctggctgtgtctctgggcgagagggccaccatcaactgcaagtccagccagagtattttatacagctccaacaataagaaatctttagtttggtatcagcagaaaccaggacagcctcctaagctgctcacttactgggcatctacccgggaatccggggtccctgaccgactcagtggcagcgaatctgggacagatttcactctcaccatcagcagcctgcaggctgaagatgtggcaatttattactgtcagcaatattatagtactcctccgccgttcggccaagggaccaaggtggaaatcaaac

SEQ ID NO: 1554 - DNA, 340 bp, Homo sapiens
gacatcgtgatgacccagtctccagactccctggctgtgtctctgggtgagagggccgccatcaactgcaagtccagtcagactgttttatacagctccaacaagaagaactacttagcttggtaccagcagaaaccaggacagcctcccaagctgctcatttactcggcatctacccgggaatccggggtccctgagcgattcagtggcagcgggtctgggacagatttcactctcaccatcagcagcctgcaggctgaagatgtggcagtttatttctgtcaacaatattatagtactccgtacacttttggccaggggaccaagctggagatcaaac

SEQ ID NO: 1555 - DNA, 331 bp, Homo sapiens
cagtctgccctgactcagcctccctccgtgtccgggtctcctggacagtcagtcatcatctcctgcactggaaccagcagtgacgttggtggttatgaccgtgtctcctggtaccaacagcccccaggcacagcccccaaactcataatttatgaggtcaataatcggccctcaggggtccctgatcgcttctctgggtccaagtctggcaacacggcctccctgaccatctctcggctccaggctgaggacgaggctgattattactgcagctcacatacaagcagcagcacttatgtcttcggaactgggaccaaggtcaccgtcctag

SEQ ID NO: 1556 - DNA, 331 bp, Homo sapiens
cagtctgccctgactcagcctccctccgtgtccgggtctcctggacagtcagtcatcatctcctgcactggaaccagcagtgacgttggtggttatgaccgtgtctcctggtaccagcagccccccggcacagcccccaaactcataatttatgaggtcaataatcggccctcaggggtccctgatcgcttctctgggtccaagtctggcaacacggcctccctgaccatctctcggctccaggctgaggacgaggctgattattactgcagctcacatacaagcagcagcacttatgtcttcggaactgggaccaaggtcaccgtcctag

SEQ ID NO: 1557 - DNA, 319 bp, Homo sapiens
gaaattgtgttgacacagtctccagccaccctgtctttgtctccaggggaaagagccaccctctcctgcagggccagtcagagtgttagcaggtacttagcctggtaccaacagaaacctggccaggctcccaggctcctcatctatgatgcatccaacagggccactggcatcccagccaggttcagtggcagtgggtctgggacagacttcactctcaccatcagcagcctagagcctgaagattttgcagtttattactgtcagcagcgtagcaactggccttgggcttttggccaggggaccaagctggagatca

SEQ ID NO: 1558 - DNA, 319 bp, Homo sapiens; identical to SEQ ID NO: 1557

SEQ ID NO: 1559 - DNA, 322 bp, Homo sapiens
gacatccagatgacccagtctccatcctccctgtctgcatctgtaggagacagagtcaccatcacttgccgggcaagtcagggcattagaaatgatttaggctggtatcagcagaaaccagggaaagcccctaagcgcctgatctatgctgcatccagtttgcaaagtggggtcccatcaaggttcagcggcagtggatctgggacagaattcactctcacaatcagcagcctgcagcctgaagattttgcaacttattactgtctacagcataatagttaccctccgacgttcggccaagggaccaaggtggaaatcaaac

SEQ ID NO: 1560 - DNA, 322 bp, Homo sapiens; identical to SEQ ID NO: 1559

SEQ ID NO: 1561 - DNA, 270 bp, Homo sapiens
gcactggaaccagcagtgacgttggtggttataactatgtctcctggtaccaacaacacccaggcaaagcccccaaactcatgatttatgatgtcagtaatcggccctcaggggtttctaatcgcttctctggctccaagtctggcacctcagcctccctggccatcactgggctccaggctgaggatgaggctgattattactgccagtcctatgacagcctgagtggttggggggtattcggcggagggaccaagctgaccgtcctag

SEQ ID NO: 1562 - DNA, 337 bp, Homo sapiens
cagtctgtgctgacgcagccgccctcagtgtctggggccccagggcagagggtcaccatctcctgcacggggagcagctccaacatcggggcaggttctgatgtacactggtaccagcagcttccaggaacagcccccaaactcctcatctatgctaacagcaatcggccctcaggggtccctgaccgattctctggctcccagtctggcacctcagcctccctggccatcactgggctccaggctgaggatgaggctgattattactgccagtcctatgacagcagcctgagtggttctgtggtattcggcggagggaccaagctgaccgtcctag

SEQ ID NO: 1563 - DNA, 331 bp, Homo sapiens; identical to SEQ ID NO: 1021

SEQ ID NO: 1564 - DNA, 331 bp, Homo sapiens; identical to SEQ ID NO: 1021

SEQ ID NO: 1565 - DNA, 334 bp, Homo sapiens
cagtctgccctgactcagcctgcctccgtgtctgggtctcctggacagtcgatcaccatctcctgcactggaaccagcagtgacgttggtggttataactatgtctcctggtaccaacagcacccaggcaaagcccccaaactcatgatttatgatgtcagtaagcggccctcaggggtttctaatcgcttctctggctccaagtctggcaacacggcctccctgaccatctctgggctccaggctgaggacgaggctgattattactgcagctcatatacaagcagcagcactctttatgtcttcggaactgggaccaaggtcaccgtcctag

SEQ ID NO: 1566 - DNA, 334 bp, Homo sapiens
cagtctgccctgactcagcctgcctccgtgtctgggtctcctggacagtcgatcaccatctcctgcactggaaccagcagtgacgttggtggttataactatgtctcctggtaccaacagcacccaggcaaagcccccaaactcatgatttatgatgtcagtaagcggccctcaggggtttcttatcgcttctctggctccaagtctggcaacacggcctccctgaccatctctgggctccaggctgaggacgaggctgattattactgcagctcatatacaagcagcagcactctttatgtcttcggaactgggaccaaggtcaccgtcctag

SEQ ID NO: 1567 - DNA, 325 bp, Homo sapiens
gaaattgtgttgacgcagtctccaggcaccctgtctttgtctccaggggaaagagtcaccctctcctgcagggccagtcagagtattagcagcagctacttagcctggtaccagcagaaacctggccaggctcccaggctcctcatctatgctgcatccagcagggccactggcatcccagacaggttcactggcagtgggtctgggacagacttcactctcaccatcaccagactggagtctgaagattttgcagtgtattactgtcagcagtatggtagcctcacacggactttcggcggagggaccaaggtggagatcaaac

SEQ ID NO: 1568 - DNA, 325 bp, Homo sapiens
gaaattgtgttgacgcagtctccaggcaccctgtctttgtctccaggggaaagagtcaccctctcctgcagggccagtcagagtattagcagcagctacttagcctggtaccagcagaaacctggccaggctcccaggctcctcatctatgctgcatccagcagggccactggcatcccagacaggttcactggcagtgggtctgggacagacttcactctcaccatcaccagactggagcctgaagattttgcagtgtattactgtcagcagtatgatagcctcacacggactttcggcggagggaccaaggtggagatcaaac

SEQ ID NO: 1569 - DNA, 337 bp, Homo sapiens
gatattgtgatgacccagactccactctcctcacctgtcacccttggacagccggcctccatctcctgcaggtctagtcaaagcctcgtacacaggaatggaaacacctacttgagttggcttcagcagaggccaggccagcctccaagactcctaatttataaaatttctaaccggttctctggagtcccagacagattcagtggcagtggggcagggacagatttcacactgaagatcagcagggtggaagctgaggatgtcggggtttattactgcatgcaagctacagaatttcctcggacgttcggccaagggaccaaagtggaaatcaaac

SEQ ID NO: 1570 - DNA, 337 bp, Homo sapiens
gatattgtgatgacccagactccactctcctcacctgtcacccttggacagccggcctccatctcctgcaggtctagtcaaagcctcgtacacagaaatggaaacacctacttgagttggcttcagcagaggccaggccagcctccaagactcctaatttataaaatttctaaccggttctctggggtcccagacagattcagtggcagtggggcagggacagatttcacactgaggatcagcagggtggaagctgaggatgtcggggtttattactgcatgcaagctacagaatttcctcggacgttcggccaagggaccaaagtggaaatcaaac

SEQ ID NO: 1571 - DNA, 337 bp, Homo sapiens
gatattgtgatgacccagacaccactctcctcacctgtcacccttggacagccggcctccatctcctgcaggtctagtgaaagcctcgcccacagtaatggtaacacctacttgagttggcttcagcagaggccaggccagcctccaagagtcctaatctctaagatttctaaccgcttgtctggcgtcccagacagattcactggcggtggggcagggtcagatttcacactgacaatcagtagggtggaggctgaggatgtcggggtttattactgcatgcaagctacaggctttcctcgaacttttgcccaggggacgaagctggagatcaaac

SEQ ID NO: 1572 - DNA, 337 bp, Homo sapiens
gatattgtgatgacccagacaccactctcctcacctgtcacccttggacagccggcctccatctcctgcaggtctagtgaaagcctcgcccacagtaatggtaacacctacttgagttggcttcagcagaggccaggccagcctccaagagtcctaatctctaagatttctaaccgcttgtctggcgtcccagacagattcactggcggtggggcagggtcagatttcacactgaaaatcagcagggtggaggctgaggatgtcggggtttattactgcatgcaagctacaggctttcctcgaacttttggccaggggaccaagctggagatcaaac

SEQ ID NO: 1573 - DNA, 325 bp, Homo sapiens
cagtctgtgctgactcagccaccctcagcgtctgggacccccgggcagagggtcaccatctcttgttctggaagcagctccaacatcggaagtagtactgttgactggtaccaacaactcccaggatcggcccccaaactcctcatctatagggataatcagcggccctcaggggtccctgaccgattctctggctccaagtctggcacttcagcctccctggccatcagtgggctgcagtctgaggatgaggctgactattactgtgcagtatgggatgacagcctgagggtgttcggcggagggaccaaactgaccgtcctag

SEQ ID NO: 1574 - DNA, 325 bp, Homo sapiens; identical to SEQ ID NO: 1573

SEQ ID NO: 1575 - DNA, 322 bp, Homo sapiens
gacatccagatgacccagtctccttccaccctgtctgcatctgtaggagacagagtcaccatcacttgccgggccagtcagagtattagtagctggttggcctggtatcagcagaaaccagggaaagcccctaagctcctgatctataaggcgtctagtttagaaagtggggtcccatcaaggttcagcggcagtggatctgggacagaattcactctcaccatcagcagcctgcagcctgatgattttgcaacttattactgccaacagtataatagttattctttctcgttcggccaagggaccaaggtggaaatcaaac

SEQ ID NO: 1576 - DNA, 322 bp, Homo sapiens
gacatccagatgacccagtctccttccaccctgtctgcatctgtaggagacagagtcaccatcacttgccgggccagtcagagtattagtagctggttggcctggtatcagcagaaaccagggaaagcccctaagctcctgatctataaggcgtctagtttagaaagtggggtcccatcaaggttcagcggcagtggatctgggacagaattcactctcaccatcagcagcctgcagcctgatgattttgcaacttattactgccaacagtataaaagttattctttttcgttcggccaagggaccaaggtggaaatcaaac

SEQ ID NO: 1577 - DNA, 325 bp, Homo sapiens
tcttctgagctgactcaggaccctgctgtgtctgtggccttgggacagacagtcaggatcacatgccaaggagaaagtctcagaagtcattctgcaagctggtatcaacagaagccaggacaggcccctgtagttgtcatctatggtaaaaacaaccggccctcagggatcccagaccgattctctggctccagctcaggaaacacagcttccttgaccatcactggggctcaggcggaagatgaggctgacttttactgtagctcccgggacagcaatggttaccatgtggtattcggcggagggaccaagctgaccgtcctag

SEQ ID NO: 1578 - DNA, 325 bp, Homo sapiens
tcttctgagctgactcaggaccctgctgtgtctgtggccttgggacagacagtcaggatcacatgccaaggagacagtctcagaagtcattctgcaagctggtaccaacagaagccaggacaggcccctgtagttgtcatctatggtaaaaacaaccggccctcagggatcccagaccgattctctggctccagctcaggaaacacagcttccttgaccatcactggggctcaggcggaagatgaggctgacttttactgtagctcccgggacaggagtggttaccatgtggtattcggcggagggaccaagctgaccgtcctag

SEQ ID NO: 1579 - DNA, 322 bp, Homo sapiens
gacatccagatgacccagtctccatcctccctgtctgcatctgtaggagacagagtcaccatcacttgccggacaagtcagagcattagcaactatttaaattggtttcaacaaaaaccagggaaagcccctaagctcctgatctatgctgcatccagtttgcaaagtgaggtcccatcaaggttcagtggcagtggatctgggacagatttcactctcaccatcagcagtctacaacctgaagattttgcaacttactactgtcaacagagttacagtacccccctcactttcggcggagggaccaaggtggagatcaaac

SEQ ID NO: 1580 - DNA, 322 bp, Homo sapiens
gacatccagatgacccagtctccatcctccctgtctgcatctgtaggagacagagtcaccatcacttgccggacaagtcagagcattagcaactatttaaattggtttcaacaaaaaccagggaaagcccctaagctcctgatctatgctgcatccagtttgcaaagtgaggtcccatcaaggttcagtggcagtggatctgggacagatttcactctcaccatcagcagtctgcaacctgaagattttgcaacttactactgtcaacagagttacagtacccccctcactttcggcggagggaccaaggtggagatcaaac

SEQ ID NO: 1581 - DNA, 325 bp, Homo sapiens
gaaatagtgatgacgcagtctccagccaccctgtctgtgtctccaggggaaagagccaccctctcctgcagggccagtcagagtgttagcagcaacttagcctggtaccagcagaaacctggtcagggtcccaggctcctcatctatggtgcatccaccagggccactggtatcccagccaggttcagtggcagtgggtctgggacagagttcactctcaccatcagcagcctgcagtctgaagattttgcagtttattactgtcagcagtatcataactggcctccgtacacttttggccaggggaccaagctggagagcaaac

SEQ ID NO: 1582 - DNA, 319 bp, Homo sapiens
gaaatagtgatgacgcagtctccagccaccctgtctgtgtctccaggggaaagagccaccctctcctgcagggccagtcagagtgttagcagcaacttagcctggtaccagcagaaacctggccaggctcccaggctcctcatctatggtgcatccaccagggccactggtatcccagccaggttcagtggcagtgggtctgggacagagttcactctcaccatcagcagcctgcagtctgaagattttgcagtttattactgtcagcagtatcataactggcctccgtacacttttggccaggggaccaagctggaga

SEQ ID NO: 1583 - DNA, 316 bp, Homo sapiens
gacatccagttgacccagtctccatccttcctgtctgcatctgtgggagacagagtcaccatcacttgccgggccagtcagggcattagcagttatttagcctggtatcagcaaaaaccagggaaagcccctaagctcctgatctatggtgcatccactttgcaaagtggggtcccatcaaggttcagcggcagtggatctgggacagaattcactctcacaatcagcagcctgcagcctgaagattttgcaacttattactgtcaacagcttaatagttaccctttcggccctgggaccaaagtggatatcaaac

SEQ ID NO: 1584 - DNA, 316 bp, Homo sapiens
gacatccagttgacccagtctccatccttcctgtctgcatctgtaggagacagagtcaccatcacttgccgggccagtcagggcattagcaattttttagcctggtatcagcaaaaaccagggaatgcccctaggctcctgatctatggtgcatccactttgcaaactggggtcccatcaaggttcagcggcagtggatctgggacacaattcactctcacaatcagcagcctgcagcctgaagattttgcaacttattactgtcaacaacttaatagttaccctttcggccctgggaccaaagtggatatcaaac

SEQ ID NO: 1585 - DNA, 322 bp, Homo sapiens
gacatccagatgacccagtctccttccaccctgtctgcatctgtaggagacagagtcaccatcacttgccgggccagtcagagtattagtagctggttggcctggtatcagcagagaccagggaaagcccctaagctcctgatctataaggcgtctagtttagaaagtggggtcccatcaaggttcagcggcagtggatctggaacagaattcactctcaccatcagcagcctgcagcctgatgattttgcaacttattactgccaacaatataatagttattcgtggactttcggccaagggaccaaggtggaaatcaaac

SEQ ID NO: 1586 - DNA, 322 bp, Homo sapiens
gacatccagatgacccagtctccttccaccctgtctgcatctgtaggagacagagtcaccatcacttgccgggccagtcagagtattagtagctggttggcctggtatcagcagaaaccagggaaagcccctaagttcctgatctataaggcgtctagtttagaaagtggggtcccatcaaggttcagcggcagtggatctgggacagaattcactctcaccatcagcagcctgcagcctgatgattttgcaacttattactgtcaacagtataatagttattcgtggactttcggccaagggaccaaggtggaaatcaaac

SEQ ID NO: 1587 - DNA, 325 bp, Homo sapiens
gaaatagtgatgacgcagtctccagccaccctgtctgtgtctccaggggaaagagccaccctctcctgcagggccagtcagagtgttagcagcaacttagcctggtaccagcagaaacctggccaggctcccaggctcctcatctatggtgcatccaccagggccactggtatcccagccaggttcagtggcagtgggtctgggacagagttcactctcaccatcagcagcctgcagtctgaagattttgcagtttattactgtcagcagtataataactggccttcgggaacttttggccaggggaccaagctggagatcaaac

SEQ ID NO: 1588 - DNA, 325 bp, Homo sapiens; identical to SEQ ID NO: 1587

SEQ ID NO: 1589 - DNA, 331 bp, Homo sapiens
cagtctgccctggctcagcctgcctccgtgtctgggtctcctggacagtcgatcaccatctcctgcactggaaccagcagtgacattggtcgttataactatgtctcctggtacgaacagcgcccagccaaagcccccaaactcttaatttacgatgtcactaagcggccctcaggggtttctaatcgcttctctggctccaagtctggcaacacggcctccctgaccatctctgggctccaggttgcggacgaggctgattattactgcacctcatatacacgcaccagcacttgggtgttcggcggagggaccaaactgaccgtcctag

SEQ ID NO: 1590 - DNA, 340 bp, Homo sapiens
gacatcgtgatgacccagtctccagactccctggctgtgtctctgggcgagagggccaccatcaactgcaagtccagccagagtgttttatacagctccaacaataagaactacttagcttggtaccagcagaaaccaggacagcctcctaagctgctcatttactgggcatctacccgggaatccggggtccctgaccgattcagtggcagcgggtctgggacagatttcactctcaccatcagcagcctgcaggctgaagatgtggcagtttattactgtcagcaatattatagtactcctctcactttcggcggagggaccaaggtggagatcaaac

SEQ ID NO: 1591 - DNA, 322 bp, Homo sapiens
gccatccggatgacccagtctccatcctcattctctgcatctacaggagacagagtcaccatcacttgtcgggcgagtcagggtattagcagttatttagcctggtatcagcgaaaaccagggaaagcccctaagctcctgatctatgctgcatccactttgcaaagtggggtcccatcaaggttcagcggcagtggatctgggacagatttcactctcaccatcagctgcctgcagtctgaagattttgcaacttattactgtcaacagtattatagttatccccggacgttcggccaagggaccaaggtggaaatcaaac

SEQ ID NO: 1592 - DNA, 331 bp, Homo sapiens
cagtctgccctgactcagcctgcctccgtgtctgggtctcctggacagtcgatcaccatctcctgcactggaaccagcagtgacgttggtggttataactatgtctcctggtaccaacagcacccaggcaaagcccccaaactcatgatttatgatgtcagtaagcggccctcaggggtttctaatcgcttctctggctccaagtctggcaacacggcctccctgaccatctctgggctccaggctgaggacgaggctgattattactgcagctcatatacaagcagcagcacttttgtcttcggaactgggaccaaggtcaccgtcctag

SEQ ID NO: 1593 - DNA, 325 bp, Homo sapiens
gaaatagtgatgacgcagtctccagccaccctgtctgtgtctccaggggaaagagccaccctctcctgcagggccagtcagagtgttagcagcaacttagcctggtaccagcagaaacctggccaggctcccaggctcctcatctatggtgcatccaccagggccactggtatcccagccaggttcagtggcagtgggtctgggacagagttcactctcaccatcagcagcctgcagtctgaagattttgcagtttattactgtcagcagtataataactggcctccctggacgttcggccaagggaccaaggtggaaatcaaac

SEQ ID NO: 1594 - DNA, 325 bp, Homo sapiens
gacatccagatgacccagtctccatcctccctgtctgcatctgtaggagacagagtcaccatcacttgccaggcgagtcaggacattaggaaatatttaaattggtatcagcagaaaccagggaaagcccctaagctcctgatctacgatgcatccaatttggaaacaggggtcccatcaaggttcagtggaagtggatctgggacagattttactttcaccatcagcagcctgcagcctgaagatattgcaacatattactgtcaacagtatgataatctccctccgtacacttttggccaggggaccaagctggagatcaaac

SEQ ID NO: 1595 - DNA, 322 bp, Homo sapiens
gaaatagtgatgacgcagtctccagccaccctgtctgtgtctccaggggaaagagccaccctctcctgcagggccagtcagagtgttagcagcaacttagcctggtaccagcagaaacctggccaggctcccaggctcctcatctatggtgcatccaccagggccactggtatcccagccaggttcagtggcagtgggtctgggacagagttcactctcaccatcagcagcctgcagtctgaagactttgcagtttattactgtcagcagtataaaaactggcctccgtacacttttggccaggggaccaagctggagatca

SEQ ID NO: 1596 - DNA, 322 bp, Homo sapiens
gaaatagtgatgacgcagtctccagccaccctgtctgtgtctccaggggaaagagccaccctctcctgcagggccagtcagagtgttagcagcaacttagcctggtaccagcagaaacctggccaggctcccaggctcctcatctatggtgcatccaccagggccactggtatcccagccaggttcagtggcagtgggtctgggacagagttcactctcaccatcagcagcctgcagtctgaagattttgcagtttattactgtcagcagtatgataactggcctctcactttcggcggagggaccaaggtggagatcaaac

SEQ ID NO: 1597 - DNA, 325 bp, Homo sapiens
gaaatagtgatgacgcagtctccagccaccctgtctgtgtctccaggggaaagagccaccctctcctgcagggccagtcagagtgttagcagcaacttagcctggtaccagcagaaacctggccaggctcccaggctcctcatctatggtgcatccaccagggccactggtatcccagccaggttcagtggcagtgggtctgggacagagttcactctcaccatcagcagcctgcagtctgaagattttgcaatttattactgtcagcagtataataactggcctccgtacacttttggccaggggaccaagctggagatcaaac

SEQ ID NO: 1598 - DNA, 322 bp, Homo sapiens
gaaatagtgatgacgcagtctccagccaccctgtctgtgtctccaggggaaagagccaccctctcctgcagggccagtcagagtgttagcagcaagttagcctggtaccagcagaaacctggccaggctcccaggctcctcatctatggtgcatccaccagggccactggtatcccagccaggttcagtggcagtgggtctgggacagagttcactctcaccatcagcagcctgcagtctgaagattttgcagtttattactgtcagcagtataataactggcctcaaacgttcggccaagggaccaaggtggaaatcaaac

SEQ ID NO: 1599 - DNA, 322 bp, Homo sapiens
gccatccggatgacccagtctccatcctcattctctgcatctacaggagacagagtcaccatcacttgtcgggcgagtcagggtattagcagttatttagcctggtatcagcaaaaaccagggaaagcccctaagctcctgatctatgctgcatccactttgcaaagtggggtcccatcaaggttcagcggcagtggatctgggacagatttcactctcaccatcagctgcctgcagtctgaagattttgcaacttattactgtcaacagtattatagttaccctcggactttcggccctgggaccaaagtggatatcaaac

SEQ ID NO: 1600 - DNA, 325 bp, Homo sapiens
gacatccagatgacccagtctccatcctccctgtctgcatctgcaggagacagagtcaccatcacttgccgggcaagtcagagcattatcaagtatttaaattggtataagcagaaaccagggaaagcccctaaactcctgatctatactgcatcctttttgcaaagtggggtcccatcaaggttcagtggcagtggatctgggacagaattcactctcaccatcagcagtctgcaacctgaagattttgcaacttactactgtcaacaacattatagtagccccccgtggacgttcggccaagggaccaaggtggaaatcaaac

SEQ ID NO: 1601 - DNA, 322 bp, Homo sapiens
gacatccagatgacccagtctccttccaccctgtctgcatctgtaggagacagagtcaccatcacttgccgggccagtcagagcattagtagctggttggcctggtatcagcagaaaccagggaaagcccctaacctcctgatctataaggcgtctagtttacatagtggggttccatcacggttcagcggcagtggatctgggacagaattcactctcaccatcagcagcctgcagcctgatgattttgcaacttattactgccaacagtgtaataattacccgtggacgttcggccaagggaccaaggtggaaatcaaac

SEQ ID NO: 1602 - DNA, 328 bp, Homo sapiens
gaaattgtgttgacgcagtctccaggcaccctgtctttgtctcccggggaaggagccaccctctcctgtagggccagtcaggatctgaggaataactacttggcctggtatcagcagaaaggtggccaggctcccaggctcctcgtttatggtgcatccagcagggccactggcatcccagacaggttcagtggcagtgggtctgggacagacttcactctcaccatcagcagactggagcctgaagattttgcaatatattattgtcagtactatgatttctcatcttcgatgtacacttttggccaggggaccaagctggagatca

SEQ ID NO: 1603 - DNA, 320 bp, Homo sapiens
gacatccagatgacccagtctccatcctccctgtctgcatctgtaggagacagagtcaccatcacttgccgggcaagtcagagcattagcacctatttaaattggtatcagcaaaaaccagggaaagcccctaagctcctgatctatgctgcatccagtttgcaaagtggggtcccatcaaggttcagtggcagtggatctgggacagatttcactctcagcatcaccaatctgcagcctgaagattttgcaacttactactgtcaacagagtatcagtatactcgtcactttcggcggagggaccaaggtggagatcaa

SEQ ID NO: 1604 - DNA, 331 bp, Homo sapiens
caggctgtggtgactcaggagccctcactgactgtgtccccaggagggacagtcactctcacctgtggctccagcactggaactgtcaccagtggtcattatccctactggttccagcagaagcctggccaagcccccaggacactgatttatgatactaacaacaaacactcctggacacctgcccggttctcaggctccctccttgggggcaaagctgccctgaccctttcgggtgcgcagcctgaggatgaggctgactattactgcttactctcctatagtggtgctcggagggcattcggcggagggaccaagctgaccgtcctag

SEQ ID NO: 1605 - DNA, 325 bp, Homo sapiens
gaaattgtgttgacgcagtctccaggcaccctgtctttgtctccaggggaaagagccaccctctcctgcagggccagtgagaatacttacagcacgtacctagcctggtaccagcagaaacctggccaggctcccaggctcctcatctatggtgcatccaacagggccactggcatcccagacagattcagtggcagtgggtctgggacagacttcactctcaccatcagcagactgaagcctgaagattctgcagtatattactgtcagctttatggttactcaccggagaccttcggcggagggacgaaggtggagatcaaac

SEQ ID NO: 1606 - DNA, 324 bp, Homo sapiens
gacatccagatgacccagtctccatcctccctgtctgcatctgtaggagacagagtcaccatcacttgccgggcaagtcagagcattagcaactatttaaattggtatcagcagaaaccagggaaagcccctaagctcctgatctatgctgcatccaatttgcaaagtggggtcccatcaaggttcagtggcagtggatctgggacagatttcactctcaccatcagcagtctgcaacctgaagattttgcaacttactactgtcaacagagttacattaccctctattcgactttcggccctgggaccacagtggatatcaaa

SEQ ID NO: 1607 - DNA, 322 bp, Homo sapiens
gacatccagatgacccagtctccatcctccctgtctgcatctgtaggagacagagtcaccatcacttgccgggcaagtcagagcattagcagctatttaaattggtatcagcagaaaccagggaaagcccctaagctcctgatctatgctgcatccagtttgcaaagtggggtcccatcaaggttcagtggcagtggatctgggacagatttcactctcaccatcagcagtctgcaacctgaagattttgcaacttactactgtcaacagagttacagtacccccttaacttttggccaggggaccaagctggagatcaaac

SEQ ID NO: 1608 - DNA, 322 bp, Homo sapiens
gacatccagatgacccagtctccatcctccctgtctgcatctgtaggagacagagtcaccatcacttgccgggcaagtcagggcattagaaatgatttaggctggtatcagcagaaaccagggaaagcccctaagcgcctgatctatgctgcatccagtttgcaaagtggggtcccatcaaggttcagcggcagtggatctgggacagaattcactctcacaatcagcagcctgcagcctgaagattttgcaacttattactgtctacagcataatagttacccgctcactttcggcggagggaccaaggtggagatcaaac

SEQ ID NO: 1609 - DNA, 325 bp, Homo sapiens
gaaatagtgatgacgcagtctccagtcatcctgtctgtgtctccaggggaaagagccaccctctcctgcagggccagtcagagtgttagcatcaacttagcctggtaccagcagaaacctggccaggctcccaggctcctcatctatggtgcatccaccagggccactggtatcccagccaggttcagtggcagtgggtctgggacagagttcactctcaccatcagcagcctgcagtctgaagattttgcagtttattactgtcagcactataataactggcctccgctcactttcggcggagggaccaaggtggagatcaaac

SEQ ID NO: 1610 - DNA, 322 bp, Homo sapiens
gacatccagatgacccagtctccatcctcactgtctgcatctgtaggagacagagtcaccatcacttgtcgggcgagtcagggtattagcagctggttagcctggtatcagcagaaaccagagaaagcccctaagtccctgatctatgctgcatccagtttgcaaagtggggtcccatcaaggttcagcggcagtggatctgggacagatttcactctcaccatcagcagcctgcagcctgaagattttgcaacttattactgccaacagtataatagttaccctctcactttcggcggagggaccaaggtggagatcaaac

SEQ ID NO: 1611 - DNA, 334 bp, Homo sapiens
cagtctgtgctgacgcagccgccctcagtgtctggggccccagggcagagggtcaccatctcctgcactgggagcagctccaacatcggggcaacttatgatgtacactggtatcagcagcttccaagaacagcccccaaactcctcatctctggtaacagcaatcggccctcaggggtccctgaccgattctctgggtccaagtctggcacctcagcctccctggccatcactgggctccaggctgaggatgaggctgattattactgccagtcgtttgacagcagcctgagtggcgtggtattcggcggagggaccaagctgaccgtcctag

SEQ ID NO: 1612 - DNA, 324 bp, Homo sapiens
cagtctgtgttgacgcagccgccctcagtgtctgcggccccaggacagaaggtcaccatctcctgctctggaagcagctccaacattgggaataattatgtatcctggtaccagcagctcccaggaacagcccccaaactcctcatttatgacaataataagcgaccctcagggattcctgaccgattctctggctccaagtctggcacgtcagccaccctgggcatcaccggactccagactggggacgaggccgattattactgcggaacatgggatagcagcctgagtgctgtggtattcggcggagggaccaagctgacc

SEQ ID NO: 1613 - DNA, 325 bp, Homo sapiens
gaaattgtgttgacgcagtctccaggcaccctgtctttgtctccaggggaaagagccaccctctcctgcagggccagtcagagtgttagcagcagctacttagcctggtaccagcagaaacgtggccaggctcccaggctcctcatctatggtgcatccagcagggccactggcatcccagacaggttcagtggcagtgggtctgggacagacttcactctcaccatcagcagactggagcctgaagattttgcagtgtattactgtcagcagtatggtagcccccggtggacgttcggccaagggaccaaggtggaaatcaaac

SEQ ID NO: 1614 - DNA, 322 bp, Homo sapiens
gacatccagatgacccagtctccatcctccctgtctgtatctgtaggagacagagtcaccatcacttgccgggcaagtcagaccattagcagttatttaaattggtatcagcagaaaccagggaaagcccctaacctcctgatctatgctgcatccagtttgcaaagtggggtcccatcaaggttcagtggcagtggatctgggacagatttcactctcaccatcagcagtctgcaacctgaagattttgcaacttactactgtcaacagagttacagtaccccgtggacgttcggccaagggaccaaggtggaaatcaaac

SEQ ID NO: 1615 - DNA, 318 bp, Homo sapiens
gccatccggatgacccagtctccattctccctgtctgcatctgtaggagacagagtcaccatcacttgctgggccagtcagggcattagcagttatttagcctggtatcagcaaaaaccagcaaaagcccctaagctcttcatctattatgcatccagtttgcaaagtggggtcccatcaaggttcagcggcagtggatctgggacggattacactctcaccatcagcagcctgcagcctgaagattttgcaacttattactgtcaacagtattatagtacccctccgggggccaggggaccaagctggagatcaaac

SEQ ID NO: 1616 - DNA, 329 bp, Homo sapiens
cagtctgccctgactcagcctccctccgcgtccgggtctcctggacagtcagtcaccatctcctgcactggaaccagcagtgacgttggtggttataactttgtctcctggtaccaacagcacccaggcaaagcccccaaactcatgatttatgaggtcagtaagcggccctcaggggtccctgatcgcttctctggctccaagtctggcaacacggcctccctgaccgtctctgggctccaggctgaggatgaggctgattattactgcagctcatatgcaggcagcaacaatttggtattcggcggagggaccaaactgaccgtcct

SEQ ID NO: 1617 - DNA, 322 bp, Homo sapiens
gaaattgtgttgacacagtctccagccaccttgtctttgtctccaggggaaagagccaccctctcctgcagggccagtcagagtgttagcagctacttagcctggtaccaacagaaacctggccaggctcccaggctcctcatctatgatgcatccaacagggccactggcatcccagccaggttcagtggcagtgggtctgggacagacttcactctcaccatcagcagcctagagcctgaagattttgcagtttattactgtcagcagcgtagcaactggcctccgactttcggcggagggaccaaggtggagatcaaac

SEQ ID NO: 1618 - DNA, 337 bp, Homo sapiens
gatattgtgatgactcagtctccactctccctgcccgtcacccctggagagccggcctccatctcctgcaggtctagtcagagcctcctgcatagtaatggatacaactatttggattggtacctgcagaagccagggcagtctccacagctcctgatctatttgggttctaatcgggcctccggggtccctgacaggttcagtggcagtggatcaggcacagattttacactgaaaatcagcagagtggaggctgaggatgttggggtttattactgcatgcaagctctacaaactcctcagacgttcggccaagggaccaaggtggaaatcaaac

SEQ ID NO: 1619 - DNA, 334 bp, Homo sapiens
cagtctgccctgactcagcctcgctcagtgtccgggtctcctggacagtcagtcaccatctcctgcactggaaccagcagtgatgttggtggttataactatgtctcctggtaccaacagcacccaggcaaagcccccaaactcatgatttatgatgtcagtaagcggccctcaggggtccctgatcgcttctctggctccaagtctggcaacacggcctccctgaccatctctgggctccaggctgaggatgaggctgattattactgctgctcatatgcaggcagctacaccctttatgtcttcggaactgggaccaaggtcaccgtcctag

SEQ ID NO: 1620 - DNA, 328 bp, Homo sapiens
gacatccagttgacccagtctccatccttcctgtctgcatctgtaggagacagagtcaccatcacttgccgggccagtcagggcattagcagttatttagcctggtatcagcaaaaaccagggaaagcccctaagctcctgatctatgctgcatccactttgcaaagtggggtcccatcaaggttcagcggcagtggatctgggacagaattcactctcacaatcagcagcctgcagcctgaagattttgcaacttattactgtcaacagcttaatagttaccctccgataatctttttcggcggagggaccaaggtggagatcaaac

SEQ ID NO: 1621 - DNA, 334 bp, Homo sapiens
cagtctgtgctgacgcagccgccctcagtgtctggggccccagggcagagggtcaccatctcctgcactgggagcagctccaacatcggggcaggttatgatgtacactggtaccagcagcttccaggaacagcccccaaactcctcatctatggtaacagcaatcggccctcaggggtccctgaccgattctctggctccaagtctggcacctcagcctccctggccatcactgggctccaggctgaggatgaggctgattattactgccagtcctatgacagcagcctgagtggttatgtcttcggaactgggaccaaggtcaccgtcctag

SEQ ID NO: 1622 - DNA, 325 bp, Homo sapiens
gaaattgtgttgacgcagtctccaggcaccctgtctttgtctccaggggaaagagccaccctctcctgcagggccagtcagagtgttagcagcaactacttagcctggtaccagcagaaacctggccaggctcccaggctcctcatctatggtgcatccagcagggccactggcatcccagacaggttcagtggcagtgggtctgggacagacttcactctcaccatcagcagactggagcctgaagattttgcagtgtattactgtcagcagtatggtagctcaccgttcacttttggccaggggaccaacctggagatcaaac

SEQ ID NO: 1623 - DNA, 337 bp, Homo sapiens
gatgttgtaatgactcagtctccactctccctgcccgtcacccttggacagccggcctccatctcctgcaggtctagtcaaagcctcgtatacaatgatgaaaacacctacttgaattggtttcagcagaggccaggccaatctccaaggcgcctaatttataaggtttctaaccgggactctggggtcccagacagattcagcggcagtgggtcaggcactgatttcacactgaaaatcagcagggtggaggctgaggatgttgggatttattactgcatgcaaggtacacagtggccgtacacttttggccaggggaccaagctggagatcaaac

SEQ ID NO: 1624 - DNA, 334 bp, Homo sapiens
cagtctgccctgactcagcctgcctccgtgtctgggtctcctggacagccgatcaccatctcctgcgctggaaccagcagtgacgttggcggttataattatgtctcctggtaccaacagcacccagacaaagcccccaaactcatgatttatgatgtcagtaagcggccctcgggggtttctaatcgcttctctggctccaagtctgccaacacggccttcctgaccatctctggcctccaggctgaggacgaggctaattattactgcagctcatattccagcagcagtacttcgaaggtgttcggcggagggaccaagctgaccgtcctag

SEQ ID NO: 1625 - DNA, 319 bp, Homo sapiens
tcctatgagctgacacagccatcctcagtgtcagtgtctccgggacagacagccaggatcacctgctcaggagatgtactggcaaaaaaatatgctcggtggttccagcagaagccaggccaggcccctgtgctggtgatttataaagacactgagcggccctcagggatccctgagcgattctccggctccagctcagggaccacagtcaccttgaccatcagcggggcccaggttgaggatgaggctgactattactgttactctgcggctgacaacaatcgggtattcggcggagggaccaagctgaccgtcctag

SEQ ID NO: 1626 - DNA, 334 bp, Homo sapiens
cagtctgtgctgacgcagccgccctcagtgtctggggccccagggcagagggtcaccatctcctgcactgggagcagctccaacatcggggcaggttatgatgtacactggtaccagcagtttccaggaacagcccccaaactcctcatctatggtaacagcaatcggccctcaggggtccctgaccgattctctggctccaagtctggcacctcagcctccctggccatcactgggctccaggctgaggatgaggctgattattactgccagtcctatgacagcagcctgagtggttcggtgttcggcggagggaccaagctgaccgtcctag

SEQ ID NO: 1627 - DNA, 322 bp, Homo sapiens
gaaattgtgttgacgcagtctccaggcaccctgtctttgtctccaggggaaagagccaccctctcctgcagggccagtcagagtgttactaccaattatttagcctggtaccaacagattcctggccaggctcccaggctcctcatctatggtgcatccagcaggcccactggcatcccagacaggttcaggggcagtgggtctgggacagacttcactctcaccatcagcagactggagcctgaagattttgcagtgtattactgtcagcagtatactaactcggtcactttcggcggagggaccaaggtggagatcaaac

SEQ ID NO: 1628 - DNA, 331 bp, Homo sapiens; identical to SEQ ID NO: 1592

SEQ ID NO: 1629 - DNA, 328 bp, Homo sapiens
cagactgtggtgactcaggagccctcactgactgtgtccccaggagggacagtcactctcacctgtgcttccagcactggagcagtcaccagtggttactatccaaactggttccagcagaaacctggacaagcacccagggcactgatttatcgtacaagcaacaaacactcctggacccctgcccggttctcaggctccctccttgggggcaaagctgccctgacactgtcaggtgtgcagcctgaggacgaggctgagtattactgcctgctctactatggtggtgcttatgtcttcggaactgggaccaaggtcaccgtcctag

SEQ ID NO: 1630 - DNA, 331 bp, Homo sapiens
cagtctgccctgactcagcctgcctccgtgtctgggtctcctggacagtcgatcaccatctcctgcactggaaccagcagtgacgttggtggttataactatgtctcctggtaccaacagcacccaggcaaagcccccaaactcatgatttatgatgtcagtaagcggccctcaggggtttctaatcgcttctctggctccaagtctggcaacacggcctccctgaccatctctgggctccaggctgaggacgaggctgattattactgcagctcatatacaagcagcagcacttgggtgttcggcggagggaccaagctgaccgtcctag

SEQ ID NO: 1631 - DNA, 337 bp, Homo sapiens
gatattgtgatgacccagactccactctctctgtccgtcacccctggacagccggcctccatctcctgcaagtctagtcagagcctcctgcatagtgatggaaagacctatttgtattggtacctgcagaagccaggccaccctccacagctcctgatctatgaagtttccaaccggttctctggagtgccagataggttcagtggcagcgggtcagggacagatttcacactgaaaatcagccgggtggaggctgaggatgttggggtttattactgcatgcaaagtaaacagcttccgctcactttcggcggagggaccaaggtggagatcaaac

SEQ ID NO: 1632 - DNA, 334 bp, Homo sapiens
cagtctgtgctgactcagccaccctcagcgtctgggacccccgggcagagggtcaccatctcttgttctggaagcagctccaacatcggaagtaattatgtatactggtaccagcagctcccaggaacggcccccaaactcctcatctataggaataatcagcggccctcaggggtccctgaccgattctctggctccaagtctggcacctcagcctccctggccatcagtgggctccggtccgaggatgaggctgattattactgtgcagcatgggatgacagcctgagtggccatgtggtattcggcggagggaccaagctgaccgtcctag

SEQ ID NO: 1633 - DNA, 325 bp, Homo sapiens
gaaattgtgttgacgcagtctccaggcaccctgtctttgtctccaggggaaagagccaccctctcctgcagggccagtcagagtgttagcagcagctacttagcctggtaccagcagaaacctggccaggctcccaggctcctcatctatggtgcatccagcagggccactggcatcccagacaggttcagtggcagtgggtctgggacagacttcactctcaccatcagcagactggagcctgaagattttgcagtgtattactgtcagcagtatggtagctcaccggggacgttcggccaagggaccaaggtggaaatcaaac

SEQ ID NO: 1634 - DNA, 323 bp, Homo sapiens
gtcatctggatgacccagtctccatccttactctctgcatctacaggagacagagtcaccatcagttgtcggatgagtcagggcattagcagttatttagcctggtatcagcaaaaaccagggaaagcccctgagctcctgatctatgctgcatccactttgcaaagtggggtcccatcaaggttcagtggcagtggatctgggacagatttcactctcaccatcagttgcctgcagtctgaagattttgcaacttattactgtcaacagtattatagtttccctccggacgttcggccaagggaccaaggtggaaatcaaac

SEQ ID NO: 1635 - DNA, 325 bp, Homo sapiens
gaaattgtgttgacacagtctccagccaccctgtctttgtctccaggggaaagagccaccctctcctgcagggccagtcagagtgttagcagctacttagcctggtaccaacagaaacctggccaggctcccaggctcctcatctatgatgcatccaacagggccactggcatcccagccaggttcagtggcagtgggtctgggacagacttcactctcaccatcagcagcctagagcctgaagattttgcagtttattactgtcagcagcgtagcaactggcctcagctcactttcggcggagggaccaaggtggagatcaaac

SEQ ID NO: 1636 - DNA, 322 bp, Homo sapiens; identical to SEQ ID NO: 837

SEQ ID NO: 1637 - DNA, 337 bp, Homo sapiens
cagtctgccctgactcaacctgcctccgtgtctgggtctcctggacagtcgatcaccatctcctgcactggaaccggcagtgaccttagtgattataattatatctatgtctcctggtaccaacagcacccaggcaaagcccccaaactcatgatttatgatgtcactaagcggccctcaggggtttctaatcgcttctctggctccaagtctgccaacacggcctccctgaccatctctgggctccaggctgaggacgaggctgattattactgcagttcatttacaaggagcagtacttatgtcttcggaactgggaccaaggtcaccgtcctag

SEQ ID NO: 1638 - DNA, 337 bp, Homo sapiens
cagtctgccctgactcaacctgcctccgtgtctgggtctcctggacagtcgatcaccatctcctgcactggaaccggcagtgaccttagtgattataattatatctatgtctcctggtaccaacagcacccaggcaaagcccccaaactcatgatttatgatgtcactaagcggccctcaggggtttctaatcgcttctctggctccaagtctgccaacacggcctccctgaccatctctgggctccaggctgaggacgaggctgattattactgcagttcatttacaagcagcagtacttatgtcttcggaactgggaccaaggtcaccgtcctag

SEQ ID NO: 1639 - DNA, 322 bp, Homo sapiens
gaaattgtgttgacgcagtctccaggcaccctgtctttgtctccaggggaaagagccaccctctcctgcagggccagtcagagtgttcgcagcaggtacttagcctggtaccagcagagacctggccaggctcccaggctcctcatctatggtgcatccagcagggccactggcatcccagacaggttcagtggcagtgggtctgggacagacttcactctcaccatcagcagactggagcctgaagattgtgcactgtattactgtcagcagtatggtagctcaccgtggacgttcggccaagggaccaaggtggaaatca

SEQ ID NO: 1640 - DNA, 322 bp, Homo sapiens
gacatccagatgacccagtctccatcctccctgtctgcatctgtaggagacagagtcaccatcacttgccgggcaagtcagagcattagcacctatttacattggtatcagcagaaaccagggaaagcccctaggctcctgatctatgctgcatccagtttgcaaagtggggtcccatcaaggttcagtggcagtggatctgggacagatttcactctcaccatcagcagtctgcaacctgaagattttgcaacttactactgtcaacagagttacagtacccctcccaccttcggccaagggacacgactggagattaaac

SEQ ID NO: 1641 - DNA, 322 bp, Homo sapiens
gacatccagatgacccagtctccttccaccctgtctgcatctgtaggagacagagtcaccatcacttgccgggccagtcagagtattagtagctggttggcctggtatcagcagaaaccagggaaagcccctaagctcctgatctataaggcgtctagtttagaaagtggggtcccatcaaggttcagcggcagtggatctgggacagaattcactctcaccatcagcagcctgcagcctgatgattttgcaacttattactgccaacagtataatagttattcgtacacttttggccaggggaccaagctggagatcaaac

SEQ ID NO: 1642 - DNA, 331 bp, Homo sapiens
cagtctgtgctgactcagccaccctcagtttctgggacccccgggcagacggtttccatctcttgttctggaagccgttccaacatcggaagtaataatgtatactggtatcagaacctcccaggaacggcccccaaagtcgtcatcaataggaataatgaatggtcctcaggggtccctgaccgattctcaggctccaagtctggcacctcagccgccctggccatcagtgggctccggtccgaggatgaggctgattattactgtgcagcatgggatgacagcctgactggttatgtcttcggaactgggaccaaggtcaccgtcctag

SEQ ID NO: 1643 - DNA, 319 bp, Homo sapiens
gaaatagtgatgacgcagtctccagccaccctgtctgtgtctccaggggaaagagccaccctctcctgcagggccagtcagagtgttagcagcaacttagcctggtaccagcagaaacctggccaggctcccaggctcctcatctatggtgcatccaccagggccactggtatcccagccaggttcagtggcagtgggtctgggacagagttcactctcaccatcagcagcctgcagtctgaagattttgcagtttattactgtcagcagtataataactggcccaccttcggccaagggacacgactggagattaaac

SEQ ID NO: 1644 - DNA, 325 bp, Homo sapiens
tcttctgagctgactcaggaccctgctgtgtctgtggccttgggacagacagtcaggatcacatgccaaggagacagcctcagaagctattatgcaagctggtaccagcagaagccaggacaggcccctgtacttgtcatctatggtaaaaacaaccggccctcagggatcccagaccgattctctggctccagctcaggaaacacagcttccttgaccatcactggggctcaggcggaagatgaggctgactattactgtaactcccgggacagcagtggtaacctcgtggtattcggcggagggaccaagctgaccgtcctag

SEQ ID NO: 1645 - DNA, 322 bp, Homo sapiens
gaaattgtgttgacgcagtctccaggcaccctgtctttgtctccaggggaaagagccaccctctcctgcagggccagtcagagtgttagcagcagctacttagcctggtaccagcagaaacctggccaggctcccaggctcctcatctatggtgcatccagcagggccactggcatcccagacaggttcagtggcagtgggtctgggacagacttcactctcaccatcagcagactggagcctgaagattttgcagtgtattactgtcagcagtatggtagctcaccgacgttcggccaagggaccaaggtggaaatcaaac

SEQ ID NO: 1646 - DNA, 328 bp, Homo sapiens
cagggtgtggtgactcaggagccctcactgactgtgtccccaaaagggacagtcattctcacctgtggctccagcactggagctgtcaccagtggtcattttccctactggttccagcagaagcctggcctagcccccacgacactgatttatgatacaaccaacaaacactcctggacacctgcccggttctcaggctccctccttgggggcaaagctgccctgaccctttcgggtgcgcaggctgaggatgaggctgagtattactgcttgctcacctataatagtcttcgggtgttcggcggagggaccaagctgaccgtcctag

SEQ ID NO: 1647 - DNA, 331 bp, Homo sapiens; identical to SEQ ID NO: 834

SEQ ID NO: 1648 - DNA, 322 bp, Homo sapiens
gacatccagatgacccagtctccatcctccctgtctacatatgtaggagacagagtcaccatcacttgccgggcaagtcagagcattagtaggtttttaaattggtatcagcagaaaccagggaaagcccctaaactcctgatctatggtgcatccactttgcaaagtggggtcccttcaaggttcagtggcagtggatctgggacagatttcactctcaccatcagcagtctgcaacctgaagattttgcaacttactactgtcaacagagttacgatatcccgctaactttcggcggagggaccaaggtggagatcaaac

SEQ ID NO: 1649 - DNA, 328 bp, Homo sapiens
tcctatgagctgacacagccaccctcggtgtcagtgtccccaggacagacggccaggatcacctgctctgcagatgcattgccaaagcaatatgcttattggtaccagcagaagccaggccaggcccctgtgctggtgatatataaagacagtgagaggccctcagggatccctgagcgattctctggctccagctcagggacaacagtcacgttgaccatcagtggagtccaggcagaagacgaggctgactattactgtcaatcagcagacagcagtggtacttatctcgtggtattcggcggagggaccaagctgaccgtcctag

SEQ ID NO: 1650 - DNA, 310 bp, Homo sapiens
gaaattgtgttgacacagtctccagccaccctgtctttgtctccaggggaaagagccaccctctcctgcagggccagtcagagtgttagcagctacttagcctggtaccaacagaaacctggccaggctcccaggctcctcatctatgatgcatccaacagggccactggcatcccagccaggttcagtggcagtgggtctgggacagacttcactctcaccatcagcagcctagagcctgaagattttgcagtttattactgtcagcagcgtaggactttcggccctgggaccaaagtggatatcaaac

SEQ ID NO: 1651 - DNA, 322 bp, Homo sapiens
gacatccagatgacccagtctccttccaccctgtctgcatctgtaggagccagagtcaccatcacttgccgggccagtcagagtattagtagctggttggcctggtatcagcagaaaccagggaaagcccctaagctcctgatctataaggcgtctagtttagaaagtggggtcccatcaaggttcagcggcagtggatctgggacagagttcactctcaccatcagcagcctgcagcctgatgattttgcaacttattactgccaacagtataatatttatgcgtggacgttcggccaagggaccaaggtggaaatcaaac

SEQ ID NO: 1652 - DNA, 322 bp, Homo sapiens
gacatccagatgacccagtctccatcctccctgtctgcatctgtaagagacagagtcaccatcacttgccgggcaagtcagagcattagcacgtatttaaattggtatcagcagaaaccagggaaagcccctaaggtcctgatctatgctgcatccagtttccaaagtggggtcccatcaaggttcagtggcagtggatctgggacagatttcactctcaccatcagcagtctgcaacctgaagattttgcaacttattactgtcaacagagttacagtacgccgtacacttttggccaggggaccaaggtggagatcaaac

SEQ ID NO: 1653 - DNA, 322 bp, Homo sapiens; identical to SEQ ID NO: 808

SEQ ID NO: 1654 - DNA, 325 bp, Homo sapiens
gaaattgtgttgacgcagtctccaggcaccctgtctttgtctccaggggaaagagccaccctctcctgcagggccagtcagagtgttagcagcagttacttagcctggtaccagcagaaacctggccaggctcccaggctcctcatctatggtgcatccagcagggccactggcatccccgacaggttcagtggcagtgggtctgggacagacttcactctcaccatcagcagactggagcctgaagatttcgcagtgtatttctgtcagcagtatggtagctcaccgctcactttcggcggagggaccgaggtggagatcaaac

SEQ ID NO: 1655 - DNA, 340 bp, Homo sapiens
gacatcgtgatgacccagtctccagactccctggctgtgtctctgggcgagagggccaccatcaactgcaggtccagccagagtattttatacagctccaacaataagaactacttagcttggtaccagcagaaaccaggacagcctcctaagatgctcatttactgggcatctacccgggaatccggggtccctgaccgattcagtggcagcgggtctgggacagatttcactctcagcatcagcagcctgcaggctgaagatgtggcagtttattactgtcagcaatattatgatattcccctcactttcggcggagggaccaaggtggagatcaaac

SEQ ID NO: 1656 - DNA, 319 bp, Homo sapiens
gacatccagatgacccagtccccatcctccctgtctgcatctgtaggggacagagtcaccatcacttgccaggcgagtcaggacattggcaactatttaaattggtatcagcagaaaccagggaaagcccctaaactcgtgatctacgatgcatccaatttgaaaacaggggtcccatcaaggttcagtggaagaggatctgggacagattttactttcaccatcagcagcctgcagcctgaagatgttgcaacatattactgtcaacagtatcataatctgctcagtttcgccggagggaccaaggtggagatcaaac

SEQ ID NO: 1657 - DNA, 331 bp, Homo sapiens
cagtctgccctgactcagcctgcctccgtgtctgggtctcctggacagtcgatcaccatctcctgcactggaaccagcagtgacgttggtggttataactatgtctcctggtaccaacaacacccaggcaaagcccccaaactcatgatttatgatgtcactaagcggccctcaggggtttctaatcgcttctctgcctccaagtctggcaacacggcctccctgaccatctctgggctccaggctgaggacgaggctgattattactgcagctcatatacaaccagtagcactttggtattcggcggagggaccaagctgaccgtcctag

SEQ ID NO: 1658 - DNA, 319 bp, Homo sapiens
gacatccagatgacccagtctccttccaccctgtctgcatctgtaggagacagagtcaccatcacttgccgggccagtcagagtattagtagctggttggcctggtatcagcagaaaccagggaaagcccctaagctcctgatctataaggcgtctagtttagaaagtggggtcccatcaaggttcagcggcagtggatctgggacagaattcactctcaccatcagcagcctgcagcctgatgattttgcaacttattactgccaacagtataatagttattggacgttcggccaagggaccaaggtggaaatcaaac

SEQ ID NO: 1659 - DNA, 322 bp, Homo sapiens; identical to SEQ ID NO: 927

SEQ ID NO: 1660 - DNA, 318 bp, Homo sapiens
aaatagtgatgacgcagtctccagacaccctgtctgtgtctccaggggaaagagccaccctctcctgcagggccagtcagagtgttcgcgtctacttagcctggtatcaccataaacctggccagcctcccaggctcctcatccatggtgcgtccaccagggccgctggtgtcccagccaggttcagtggcagtgggtctgggacagacttcactctcaccatcagcagcctgcagtctgaagattttggagtttattactgtcatcagtataatcgcgggcccagtttcggcggagggaccaacgtggagatcaaac

SEQ ID NO: 1661 - DNA, 322 bp, Homo sapiens
gacatccagttgacccagtctccatccttcctgtctgcatctttaggagacagagtcaccatcacttgccgggccagtcaggacattagcagttatttagcctggtatcagcaaacaccagggaaagcccctaaactcctgatctatgctgcctccactttgcaaagtggggtcccgtcaaggttcagcggcagtagatctgggacagaattcactctcacaatcagcagcctgcagcctgaagattttacaacttattactgtcaacagcttaatacttaccctctcaattttagccaggggaccaagctggagatcaaac

SEQ ID NO: 1662 - DNA, 325 bp, Homo sapiens
gaaattgtgttgacgcagtctccaggcaccctgtctttgtctccaggggaaagagccaccctctcctgcagggccagtcagagtgttagcagcagctacttagcctggtaccagcagaaacctggccaggctcccaggctcctcatctatggtgcatccagcagggccactggcatcccagacaggttcagtggcagtgggtctgggacagacttcactctcaccatcagcagactggagcctgaagattttgcagtgtattactgtcagcagtatggtagctcaccgctcactttcggcggagggaccaaggtggagatcaaac

SEQ ID NO: 1663 - DNA, 334 bp, Homo sapiens
cagtctgtgctgactcagccaccctcagcgtctgggacccccgggcagagggtcaccatctcttgttctggaagcagctccaacatcggaagtaattatgtatactggtaccagcagctcccaggaacggcccccaaactcctcatctataggaataatcagcggccctcaggggtccctgaccgattctctggctccaagtctggcacctcagcctccctggccatcagtgggctccggtccgaggatgaggctgattattactgtgcagcatgggatgacagcctgagtggcctttatgtcttcggaactgggaccaaggtcaccgtcctag

SEQ ID NO: 1664 - DNA, 328 bp, Homo sapiens
gaaatagtgatgacgcagtctccagccaccctgtctgtgtctccaggggaaagagccaccctctcctgcagggccagtcagagtgttagcagcaacttagcctggtaccagcagaaacctggccaggctcccaggctcctcatctatggtgcatccaccagggccactggtatcccagccaggttcagtggcagtgggtctgggacagagttcactctcaccatcagcagcctgcagtctgaagattttgcagtttattactgtcagcagtataataactggcctcggggttacacttttggccaggggaccaagctggagatcaaac

SEQ ID NO: 1665 - DNA, 331 bp, Homo sapiens; identical to SEQ ID NO: 881

SEQ ID NO: 1666 - DNA, 328 bp, Homo sapiens
gaaattgtgttgacacagtctccagccaccctgtctttgtctccaggggaaagagccaccctctcctgcagggccagtcagagtgttagcagctacttagcctggtaccaacagaaacctggccaggctcccaggctcctcatctatgatgcatccaacagggccactggcatcccagccaggttcagtggcagtgggtctgggacagacttcactctcaccatcagcagcctagagcctgaagattttgcagtttattactgtcagcagcgtagcaactggcctccgaagctcactttcggcggagggaccaaggtggagatcaaac

SEQ ID NO: 1667 - DNA, 320 bp, Homo sapiens
cagtctgtgctgactcagccaccctcagcgtctgggacccccgggcagagggtcaccatctcttgttctggaagcagctccaacatcggaactaatactgtaaactggtaccagcagctcccaggaacggcccccaaactcctcatttataggaacaatcagcggccctcaggggtccctgaccgattctctggctccaagtctggcacctcagcctccctggccatcagtgggctccagtctgcggatgaggctgattattactgtgcaacatgggatgacagcctggtattcggcggagggaccaagctgaccgtcct

SEQ ID NO: 1668 - DNA, 322 bp, Homo sapiens
gccatccggatgacccagtctccatcctcattctctgcatctacaggagacagagtcaccatcacttgtcgggcgagtcagggtattagcagttatttagcctggtatcagcaaaaaccagggaaagcccctaagctcctgatctatgctgcatccactttgcaaagtggggtcccatcaaggttcagcggcagtggatctgggacagatttcactctcaccatcagctgcctgcagtctgaagattttgcaacttattactgtcaacagtattatagttacccgctcactttcggcggagggaccaaggtggagatcaaac

SEQ ID NO: 1669 - DNA, 348 bp, Homo sapiens
caggctgtgctgactcagccggcttccctctctgcatctcctggagcatcagccagtctcacctgcaccttgcgcagtggcatcaatgttggtacctacaggatatactggtaccagcagaagccagggagtcctccccagtatctcctgaggtacaaatcagactcagataagcagcagggctctggagtccccagccgcttctctggatccaaagatgcttcggccaatgcagggattttactcatctctgggctccagtctgaggatgaggctgactattactgtatgatttggcacagcagcgcttctgtgtgttcggcggagggaccaagctgaccgtcctag

SEQ ID NO: 1670 - DNA, 334 bp, Homo sapiens
cagtctgtgctgacgcagccgccctcagtgtctggggccccagggcagagggtcaccatctcctgcactgggagcagctccaacatcggggcaggttatgatgtacactggtaccagcagcttccaggaacagcccccaaactcctcatctatggtaacagcaatcggccctcaggggtccctgaccgattctctggctccaagtctggcacctcagcctccctggccatcactgggctccaggctgaggatgaggctgattattactgccagtcctatgacagcagcctgagtggttcggtattcggcggagggaccaagctgaccgtcctag

SEQ ID NO: 1671 - DNA, 322 bp, Homo sapiens
gacatccagatgacccagtctccatcctccctgtctgcatctgtaggagacagagtcaccatcacttgccgggcaagtcagagcgttaacacctatttaaattggtattatcagaaaccagggaaagcccctaagttcctgatctatgctgcatccagtttgcaaagtggggtcccatcaaggttcagtggcagtggatctgggacacatttcactctcaccatcaacagtctgcaacctgaagattttgcaacttactactgtcaacagagtttcactacccctttcactttcggccctgggaccacagtggatatcaaac

SEQ ID NO: 1672 - DNA, 331 bp, Homo sapiens
cagtctgtgctgactcagccaccctcagcgtctgggacccccgggcagagggtcaccatctcttgttctggaagcagctccaacatcggaagtaatactgtaaactggtaccagcagctcccaggaacggcccccaaactcctcatctataataataatcagcggccctcaggggtccctgaccgattctctggctccaagtctggcacctcagcctccctggccatcagtgggctccagtctgaggatgaggctgattattactgtgcagcatgggatgacagcctgaatgggccggtattcggcggagggaccaagctgaccgtcctag

SEQ ID NO: 1673 - DNA, 322 bp, Homo sapiens
gaaattgtgttgacacagtctcccgccaccctgtctttgtctccaggggaaagagccaccctctcctgcagggccagtcagagtgttagtagcgtcttagcctggtaccaacaaaaacctggccaggctcccaggctcctcatctctgatgcatccaccagggccactggcatcccagccaggttcagtggcagtgggtctgggacagacttcactctcaccatcagctatatagagcctgaagattctgcagtttactactgtcagcagcgtaccagctggctggtcactttcggcggagggaccaaggtggagatcaaac

SEQ ID NO: 1674 - DNA, 322 bp, Homo sapiens
gaagttgtgttgacacagtctcccgccaccctgtctttgtctccaggagaaagagccaccctcgcctgcagggccagtgagagtgttggcagcttcttagcctggtaccaacagaaacctggccaggctcccaggatcctcatgtttgatgcatccaacagggccactggcatcccagccaggttcagtggcagtgggtctgggacagacttcactctcaccatcagcagcctagagcctgaagattttgcagtttattactgtcagcagcgtagcagctggctggtcagtttcggcggagggaccaaggtggagctcgaac

SEQ ID NO: 1675 - DNA, 340 bp, Homo sapiens
cagcttgtgctgactcaatcgccctctgcctctgcctccctgggagcctcggtcaagctcacctgcactctgagcagtgggcacagcagctacgccatcgcatggcatcagcagcagccagagatgggccctcggtacttgatgaaggttaacagtgatggcagccacagcaagggggacgggatccctgatcgcttctcaggctccagctctggggctgagcgctacctcaccatctccagcctccagtctgaggatgaggctgactattactgtcagacctggggcactggcatccccaattgggtgttcggcggagggaccaagctgaccgtcctag

SEQ ID NO: 1676 - DNA, 340 bp, Homo sapiens
gacatcgtgatgacccagtctccagactccctggctgtgtctctgggcgagagggccaccatcaactgcaagtccagccagagtgttttatacagctccaacaataagaactacttcgcttggtaccagcagaaaccaggacagcctcctaagctgctcatttactgggcgtctacccgggaatccggggtccctgaccgattcagtggcagcgggtctgggacagatttcactctcaccatcagcagcctgcaggctgaagatgtggctgtttattactgtcaacaatattataatactccttcgacgttcggccaagggaccaaggtggaagtcaaac

SEQ ID NO: 1677 - DNA, 322 bp, Homo sapiens
gaaactgtgttgacgcagtctccaggcaccctgtctttgtctccaggggaaagagccaccctctcctgcagggccagtcagagtgttagcagcagctacttagcctggtaccagcagagacctggccaggctcccaggctcctcatttatgatgcatccaccagggccactggcatcccagacaggttcggtggccgtgggtctgggacagacttcactctcaccatcagtagactggagcctgaagattttgcagtgtattactgtcagcagtatggtaactcacctctcactttcggcggagggaccaaggtggagatca

SEQ ID NO: 1678 - DNA, 319 bp, Homo sapiens
tcctatgagctgactcagccaccctcagtgtccgtgtccccaggacagacagccagcatcacctgctctggagataaattgggggataaatatgcttgctggtatcagcagaagccaggccagtcccctgtgctggtcatctatcaagatagcaagcggccctcagggatccctgagcgattctctggctccaactctgggaacacagccactctgaccatcagcgggacccaggctatggatgaggctgactattactgtcaggcgtgggacagcagcactgcggtattcggcggagggaccaagctgaccgtcctag

SEQ ID NO: 1679 - DNA, 319 bp, Homo sapiens
gacatccagatgacccagtctccttccaccctgtctgcatctgtaggagacagagtcaccatcacttgccgggccagtcagagtattagtagctggttggcctggtatcagcagaaaccagggaaagcccctaagctcctgatctataaggcgtctagtttagaaagtggggtcccatcaaggttcagcggcagtggatctgggacagaattcactctcaccatcagcagcctgcagcctgatgattttgcaacttattactgccaacagtataatagttatcggacgttcggccaagggaccaaggtggaaatcaaac

SEQ ID NO: 1680 - DNA, 340 bp, Homo sapiens
gacatcgtgatgacccagtctccagactccctggctgtgtctctgggcgagagggccaccatcaactgcaagtccagccagagtgttttatacagctccaacaataagaactacttcgcttggtaccagcagaaaccaggacagcctcctaagctgctcatttactgggcgtctacccgggaatccggggtccctgaccgattcagtggcagcggatctgggacagatttcactctcaccatcagtagcctgcaggctgaagatgtgggtgtttattactgtcaacaattttataatactccttcgacgttcggccaagggaccaaggtggaggtcaaac

SEQ ID NO: 1681 - DNA, 334 bp, Homo sapiens
gatattgtgatgacccagactccactctctctgtccgtcacccctggacagccggcctccatctcctgcaagtctagtcagagcctcctgcatagtgatggaaagacctatttgtattggtacctgcagaagccaggccagcctccacagctcctgatctatgaagtttccaaccggttctctggagtgccagataggttcagtggcagcgggtcagggacagatttcacactgaaaatcagccgggtggaggctgaggatgttggggtttattactgcatgcaaagtatacagctttggacgttcggccaagggaccaaggtggaaatcaaac

SEQ ID NO: 1682 - DNA, 325 bp, Homo sapiens
gaaattgtgttgacgcagtctccaggcaccctgtctttgtctccaggggaaagagccaccctctcctgcagggccagtcagagtgttagcagcagctacttagcctggtaccagcagaaacctggccaggctcccaggctcctcatctatggtgcatccagcagggccactggcatcccagacaggttcagtggcagtgggtctgggacagacttcactctcaccatcagcagactggagcctgaagattttgcagtgtattactgtcagcagtatggtagctcatcgtacacttttggccaggggaccaagctggagatcaaac

SEQ ID NO: 1683 - DNA, 319 bp, Homo sapiens
gacatccagatgacccagtctccatcctccctgtctgcatctgtaggagacagagtcaccatcacttgccgggcaagtcagagcattagcagctatttaaattggtatcaccagaaaccagggaaagcccctaagctcctgatctatgctgcttccacttcacaaagtggggtcccatcaagggtcagtggcagtggatctgggacagatttcactctcaccatcagcgatctgcaacctgaagattctggaacttactactgtcaacagacttacagtacccctcgtattttcggccctgggaccaaagtggatatca

SEQ ID NO: 1684 - DNA, 325 bp, Homo sapiens
gacatccagatgacccagtctccttccaccctgtctgcatctgtaggagacagagtcaccatcacttgccgggccagtcagagtattagtagctggttggcctggtatcagcagaaaccagggaaagcccctaagctcctgatctataaggcgtctagtttagaaagtggggtcccatcaaggttcagcggcagtggatctgggacagaattcactctcaccatcagcagcctgcagcctgatgatcttgcaacttaccactgccaacagtataatagttattcccctatcactttcggccctgggaccaaagtggatatcaaac

SEQ ID NO: 1685 - DNA, 334 bp, Homo sapiens
cagtctgtgctgacgcagccgccctcagtgtctggggccccagggcagagggtcaccatctcctgcactgggagcagctccaacatcggggcaggttatgatgtacactggtaccagcagcttccaggaacagcccccaaactcctcatctatggtaacagcaatcggccctcaggggtccctgaccgattctctggctccaagtctggcacctcagcctccctggccatcactgggctccaggctgaggatgaggctcattattactgccattcctatgacagcagcctgagtggtttggtattcggcggagggaccaagctgaccgtcctag

SEQ ID NO: 1686 - DNA, 325 bp, Homo sapiens
gaaatagtgatgacgcagtctccagccaccctgtctgtgtctccaggggaaagagccaccctctcctgcagggccagtcagagtgttagcagcaacttagcctggtaccagcagaaacctggccaggctcccaggctcctcatctatggtgcatccaccagggccactggtatcccagccaggttcagtggcagtgggtctgggacagagttcactctcaccatcagcagcctgcagtctgaagattttgcagtttattactgtcagcagtataataactggcctccgtggacgttcggccaagggaccaaggtggaaatcaaac

SEQ ID NO: 1687 - DNA, 322 bp, Homo sapiens
gacatccagttgacccagtctccatccttcctgtctgcatctgtaggagacagagtcaccatcacttgccgggccagtcagggcattagcagttatttagcctggtatcagcaaaagccagggaaagcccctaagctcctgatctatgctgcatccactttgcaaaatggggtcccatcaaggttcagcggcagtggatctgggacagaattcactctcacaatcagcagcctgcagcctgaagattttgcaacttattactgtcaacatcttaatagttacccgctcactttcggcggagggactaaggtggagatcaaac

SEQ ID NO: 1688 - DNA, 319 bp, Homo sapiens
tcctatgagctgactcagccaccctcagtgtccgtgtccccaggacagacagccagcatcacctgctctggagataaattgggggataaatatgcttgctggtatcagcagaagccaggccagtcccctgtgctggtcatctatcaagatagcaagcggccctcagggatccctgagcgattctctggctccaactctgggaacacagccactctgaccatcagcgggacccaggctatggatgaggctgactattactgtcaggcgtgggacagcagcactgtggtattcggcggagggaccaagctgaccgtcctag

SEQ ID NO: 1689 - DNA, 331 bp, Homo sapiens
aattttatgctgactcagccccactctgtgtcggagtctccggggaagacggtaaccatctcctgcacccgcagcagtggcagcattgccagcaactatgtgcagtggtaccagcagcgcccgggcagttcccccaccactgtgatctatgaggataaccaaagaccctctggggtccctgatcggttctctggctccatcgacagctcctccaactctgcctccctcaccatctctggactgaagactgaggacgagactgactactactgtcagtcttatgatagcagcaatgtggtattcggcggagggaccaagctgaccgtcctag

SEQ ID NO: 1690 - DNA, 325 bp, Homo sapiens
tcttctgagctgactcaggaccctgctgtgtctgtggccttgggacagacagtcaggatcacatgccaaggagacagcctcagaagctattatgcaagctggtaccagcagaagccaggacaggcccctgtagttgtcatctatggtaaaaacaaccggccctcagggatcccagaccgattctctggctccaactcaggaaacacagcttccttgaccatcgctgggcctcaggcggaagatgaggctgactattactgtaactcccgggacagcagtggtaaccatctggtattcggcggagggaccaagctgaccgtcctag

SEQ ID NO: 1691 - DNA, 325 bp, Homo sapiens
gacatccagttgacccagtctccatccttcctgtctgcatctgtaggagacagagtcaccatcacttgccgggccagtcagggcattagcagttatttagcctggtatcagcaaaaaccagggaaagcccctaagctcctgatctatgctgaatccactttgcaaagtggggtcccatcaaggttcagcggcagtggatctgggacagaattcactctcacaatcagcagcctgcagcctgaagattttgcaacttattactgtcaacagcttaatagttaccctccgctcactttcggcggagggaccaaggtggagatcaaac

SEQ ID NO: 1692 - DNA, 334 bp, Homo sapiens
cagtctgccctgactcagcctccctccgcgtccgggtctcctggacagtcagtcaccatctcctgcactggaaccagcagtgacgttggtggttataactatgtctcctggtaccaacagcacccaggcaaagcccccaaactcatgatttatgaggtcagtaagcggccctcaggggtccctgatcgcttctctggctccaagtctggcaacacggcctccctgaccgtctctgggctccaggctgaggatgaggctgattattactgcagctcatatgcaggcagcaacaatttcgtggtattcggcggagggaccaagctgaccgtcctag

SEQ ID NO: 1693 - DNA, 325 bp, Homo sapiens
gaaattgtgttgacgcagtctccaggcaccctgtctttgtctccaggggaaagagccaccctctcctgcagggccagtcagagtgttagcagcagctacttagcctggtaccagcagaaacctggccaggctcccaggctcctcatctatggtgcatccagcagggccactggcatcccagacaggttcagtggcagtgggtctgggacagacttcactctcaccatcagcagactggagcctgaagattttgcagtgtattactgtcagcagtatggtagctcaccgttcactttcggccctgggaccaaagtggatatcaaac

SEQ ID NO: 1694 - DNA, 325 bp, Homo sapiens
gaaattgtgttgacgcagtctccagtcaccctgtctttgtctccaggggaaagagccaccctctcctgcagggccagtgagagtcttagcagcagctacttagcctggtaccagcagaaacctggccaggctcccaggctcctcatctatggtgcatccagcagggccactggcatcccagacaggttcagtggcagtgggtctgggacagacttcactctcaccatcagcagactggagcctgaagattttgcagtgtattactgtcaggagtctggtggctcacagttcactttcggccctgggaccaaagtggatatcaaac

SEQ ID NO: 1695 - DNA, 322 bp, Homo sapiens
tcctatgagctgactcagccaccctcagtgtccgtgtccccaggacagacagccagcatcacctgctctggagataaattgggggataaatatgcttgctggtatcagcagaagccaggccagtcccctgtgctggtcatctatcaagatagcaagcggccctcagggatccctgagcgattctctggctccaactctgggaacacagccactctgaccatcagcgggacccaggctatggatgaggctgactattactgtcaggcgtgggacagcagcactcatgtggtattcggcggagggaccaagctgaccgtcctag

SEQ ID NO: 1696 - DNA, 322 bp, Homo sapiens
gaaattgtgttgacgcagtctccaggcaccctgtctttgtctccaggggaaagagccaccctctcctgcagggccagtcagagtgttagcagcagctacttagcctggtaccagcagaaacctggccaggctcccaggctcctcatctatggtgcatccagcagggccactggcatcccagacaggttcagtggcagtgggtctgggacagacttcactctcaccatcagcagactggagcctgaagattttgcagtgtattactgtcagcagtatggtagctcaccgactttcggccctgggaccaaagtggatatcaaac

SEQ ID NO: 1697 - DNA, 332 bp, Homo sapiens
cagtctgccctgactcagcctgcctccgtctctgggtctcctggacagtcgatcaccatctcctgcactggaaccagcagtgacgttggtgcttataactatgtctcctggtaccaacaacacccaggcaaagcccccaaactcatattttatgatgtcactaagcggccctcagggatttctaatcgcttctctggctccaagtctggcaacacggcctccctgaccatctctgggctccaggctgaggacgaggctgattattactgctgctcatatacaagcaccagcaccttttatgtcttcggaactgggaccaaggtcaccgtcct

SEQ ID NO: 1698 - DNA, 310 bp, Homo sapiens
gaaatcgttttgacgcagtctccaggcaccctgtctttgtctccaggggaaagagccactctctcctgcagggccagtcagagtgtagcctggtaccagcacaaacctggccaggctcccaggctcctcatctatggtgcatccagcagggccactggcatcccagacaggttcagtggcagtgtgtctgagacggacgtcactctcaccatcagcagactggagcctgaagattttgcagtgtattactgtcaggactatggaacttcacctcgggcgttcggccaagggaccaaggtggaaattaaac

SEQ ID NO: 1699 - DNA, 325 bp, Homo sapiens
gaagtcctgatgacgcagtctccagccaccctgtctgtgtctccaggggaaagagccaccctctcctgcagggccagtcagagtgttggcagcaacttagcctggtaccaacaaaaacctggccaggctcccaggctcctcatcaatggtgcatccaccagggccactggtgtcccagccaggttcagtggcagtgggtctgggacagagttcactctcaccatcagcagcctgcagtctgaagattttgcagtttattactgtcagcagtataatacctggcctccgctcactttcggcggagggaccaaggtggagatcaaac

SEQ ID NO: 1700 - DNA, 313 bp, Homo sapiens
gaaattgtgttgacgcagtctccaggcaccctgtctttgtctccaggggaaagagccaccctctcctgcagggccagtcagagtgttagcagcagctacgtagcctggtaccagcagaaacctggccagcctcccaggctcctcatctatggtgcatccagcagggccactggcatcccagacaggttcagtggcagtgggtctgggacagacttcactctcaccatcagcagactggagcctgaagattttgcagtgtattactgtcagcagtcactcactttcggcggagggaccaaggtggagatcaaac

SEQ ID NO: 1701 - DNA, 322 bp, Homo sapiens
gccatccagatgacccagtctccatcctccctgtctgcatctgtaggagacagagtcaccatcacttgccgggcaagtcagggcattagaaatgatttaggctggtatcagcagaaaccagggaaagcccctaagctcctgatctatgctgcatccagtttacaaagtggggtcccatcaaggttcagcggcagtggatctggcacagatttcactctcaccatcagcagcctgcagcctgaagattttgcaacttattactgtctacaagattacaattaccctcggacgttcggccaagggaccaaggtggaaatcaaac

SEQ ID NO: 1702 - DNA, 322 bp, Homo sapiens
gacatccagatgacccagtctccatcctccctgtctgcatctgtaggagacagagtcaccatcacttgccgggcaagtcagggcattagaagtgatttaggctggtatcagcagaaaccagggaaagcccctaagcgcctgatctatgctgcatccagtttgcaaagtggggtcccatcaaggttcagcggcagtggatctgggacagagttcactctcacaatcagcagcctgcagcctgaagattttgcaacgtattactgtctagagcataatagttacccgtggacgttcggccaagggaccaaggtggaaatcaaac

SEQ ID NO: 1703 - DNA, 325 bp, Homo sapiens
gacatccagatgacccagtctccttccaccctgtctgcatctgtaggagacagagtcaccatcacttgccgggccagtcagagtattagtagctggttggcctggtatcagcagaaaccagggaaagcccctaaactcctaatctatgaggcgtctagtttagaaagtggggtcccatcaaggttcagcggcagtggatctgggacagaattcactctcaccatcagcagcctgcagcctgatgattttacaacttattactgccaacagtataatagttattcttccctcactttcggcggagggaccaaggtggagatcaaac

SEQ ID NO: 1704 - DNA, 322 bp, Homo sapiens
gacatccagatgacccagtctccatcctccctgtctgcatctgtaggagacagagtcaccatcacttgccgggcaagtcagagcattagcagctatttaaattggtatcagcagaaaccagggaaagcccctaagctcctgatctatgctgcatccagtttgcaaagtggggtcccatcaaggttcagtggcagtggatctgggacagatttcactctcaccatcagcagtctgcaacctgaagattttgcaacttactactgtcaacagagttacagtacctctatcaccttcggccaagggacacgactggagattaaac

SEQ ID NO: 1705 - DNA, 337 bp, Homo sapiens
gatattgtgatgactcagtctccactctccctgcccgtcacccctggagagccggcctccatctcctgcaggtctagtcagagcctcctgcatagtaatggatacaactatttggattggtacctgcagaagccagggcagtctccacagctcctgatctatttgggttctaatcgggcctccggggtccctgacaggttcagtggcagtggatcaggcacagattttacactgaaaatcagcagagtggaggctgaggatgttggggtttattactgcatgcaagctctacaaactcctatcaccttcggccaagggacacgactggagattaaac

SEQ ID NO: 1706 - DNA, 334 bp, Homo sapiens
cagtctgtgctgacgcagccgccctcagtgtctggggccccagggcagagggtcaccatctcctgcactgggagcagctccaacatcgggggaggttatgatgcacactggtaccagcgccttccaggaacagcccccaaactcctcatctatggtaagaacaatcggccctcaggggtccctgaccgattctctggctccaagtctggcacctcagcctccctggccatcactgggctccaggctgaggatgaggctgattattactgccagtcctatgacagcagcctgagtggttcggtattcggcggagggaccaagctgaccgtcctag

SEQ ID NO: 1707 - DNA, 325 bp, Homo sapiens
gaaattgtgttgacgcagtctccaggcaccctgtctttgtctccaggggaaagagccaccctctcctgcagggccagtcagagtgttagcagcagctacttagtctggtaccagcagaaacctggccaggctcccaggctcctcatctatggtgcatccagcagggccactggcatcccagacaggttcagtggcagtgggtctgggacagacttcactctcaccatcagcagactggagcctgaagattttgcagtgtattactgtcagcagtatggtagctcacggtggacgttcggccaagggaccaaggtggaaatcaaac

SEQ ID NO: 1708 - DNA, 340 bp, Homo sapiens
gacatcgtgatgacccagtctccagactccctggctgtgtctctgggcgagagggccaccatcaactgcaagtccagccagagtgttttagacagctccaacaataaaaactacttaacttggttccagcagaaaccaggacagcctcctaacctgctcatttactgggcatctacccgggactccggggtccctgaccgattcagtggcagcgggtctgggacagatttcactctcaccatcagcagcctgcaggctgaagatgtggcagtttattactgtcagcaatattatagtactccgtacacttttggccaggggaccaagctggagatcaaac

SEQ ID NO: 1709 - DNA, 328 bp, Homo sapiens
gaaattgtgttgacgcagtctccaggcaccctgtctttgtctccaggggaaagagccaccctctcctgcagggccagtcagactgttagcagcagctacttagcctggtaccagcagagacctggccaggctcccaggctcctcatctatggtgcatccagcagggccactggcatcccagacaggttcagtggcagtgggtctgggacagacttcactctcaccatcagcagactggagcctgaagattttgcagtttattactgtcagcagtatggtacctatccgacgtggacgttcggccaagggaccaaggtggaaatcaaac

SEQ ID NO: 1710 - DNA, 319 bp, Homo sapiens
tcctatgagctgactcagccaccctcagtgtccgtgtccccaggacagacagccagcatcacctgctctggagataaattgggggataaatatgcttgctggtatcagcagaagccaggccagtcccctgtgctggtcatctatcaagatgacaagcggccctcagggatccctgagcgattctctggctccaactctgggaacacagccactctgaccatcagcgggacccaggctatggatgaggctgactattactgtcaggcgtgggacagcagcactgtggtattcggcggagggaccaagctgaccgtcctag

SEQ ID NO: 1711 - DNA, 340 bp, Homo sapiens
gacatcctgatgacccagtctccagactccctggctgtgtctctgggcgcgagggccaccctcaactgcaagtccagccagagtgttttacacagctccaacaagaacttcttagcttggtaccagcaaaaaccaggacagcctcctaagctgctcatttactgggcatctacccggcaatacggggtccctgaccgattcaatggcagcgggtctgggacagatttcactctcaccatcagcagcctgcaggttgaagatgtggcagtttattactgtcagcaatattatactagtccttcgtacacttttggccaggggaccaagctggagatcaaac

SEQ ID NO: 1712 - DNA, 319 bp, Homo sapiens
tcctatgagctgactcagccaccctcagtgtccgtgtccccaggacagacagccagcatcacctgctctggagataaattgggggataaatatgcttgctggtatcagcagaagccaggccagtcccctgtgatggtcatctatcaagataccaagcggccctcagggatccctgagcgattctctggctccaactctgggaacacagccactctgaccatcagcgggacccaggctatggatgaggctgactattactgtcaggcgtgggacagcaacacttgggtgttcggcggagggaccaagctgaccgtcctag

SEQ ID NO: 1713 - DNA, 322 bp, Homo sapiens
gacatccagatgacccagtctccttccaccctgtctgcatctgtacgagacagagtcaccatcacttgccgggccagtcagagtattagtagctggttggcctggtatcagcagaaaccagggaaagcccctaagctcctgatctataaggcgtctagtttagaaagtggggtcccatcaaggttcagcggcagtggatctgggacagaattcactctcaccatcagcagcctgcagcctgatgattttgctacttattactgccaacagtataatacttacccgtggacgttcggccaagggaccaaggtggaaatcaaac

SEQ ID NO: 1714 - DNA, 322 bp, Homo sapiens
tcctatgagctgacacagccaccctcggtgtcagtgtccccaggacagacggccaggatcacctgctctgcagatgcattgccaaagcaatatgctcattggtaccagcagaagccaggccaggcccctgtggtggtgatatataaagacagtgagaggccctcagggatccctgagcgattctctggctccagctcagggacaacagtcacgttgaccatcagtggagtccaggcagaagacgaggctgactattactgtcaatcagcagacagcagtggtactgtggtattcggcggagggaccaagctgaccgtcctag

SEQ ID NO: 1715 - DNA, 322 bp, Homo sapiens
gaaattgtgttgacacagtctccagccaccctgtctttgtctccaggggaaagagccaccctctcctgcagggccagtcagagtgttagcagctacttagcctggtaccaacagaaacctggccaggctcccaggctcctcatctatgatgcatccaacagggccactggcatcccagccaggttcagtggcagtgggtctgggacagacttcactctcaccatcagcagcctagagcctgaagattttgcagtttattactgtcagcagcgtagcaactggcctcagactttcggccctgggaccaaagtggatatcaaac

SEQ ID NO: 1716 - DNA, 331 bp, Homo sapiens
cagtctgccctgactcagcctgcctccgtgtctgggtctcctggacagtcgatcaccatctcctgcactggaaccagcagtgacgttggtggttataactctgtctcctggtaccaacgacacccaggcaaagccccccaactcatcatttatgatgtcactgagcggccctcaggggtctctagtcgcttctctggctccaagtctggcaacacggcctccctgaccatctctgggctccaggctgaggacgaggctgatttttactgcagctcatatacaagtatcagcacggtggtattcggcggagggaccaaggtgaccgtcctag

SEQ ID NO: 1717 - DNA, 322 bp, Homo sapiens
gacatccagatgacccagtctccatcctccctgtctgcatttgtaggagacagagtcaccatcacttgccgggcgagtcagggcattagcaattctttagcctggtatcaacagaaaccagggaaagcccctaagctcctgctctatgctgcatccagattggaaagtggggtcccatccaggttcagtggcagtggatctgggacggattacactctcaccatcagcagcctgcagcctggagattttgcaacttattactgtcaacagtattatagttccactctcactttcggcggagggaccaaggtggagaccaaac

SEQ ID NO: 1718 - DNA, 325 bp, Homo sapiens
gacactgtgttgacgcagtctccaggcaccctgtctttgtctccaggggaaagggccaccctctcctgcagggccagtcagagtgttagcagcaactacttagcctggtaccaacagaaacctggccaggctcccaggcccctcatctatgctacatccagcagggccactggcatcccagacaggttcagtggcagtgggtctgggacagacttcactctcaccatcagcagactggagcctgaagattttgcagtgtattactgtcagcagtatgataattcagtccttacttttggccaggggaccaagctggagatcaaac

SEQ ID NO: 1719 - DNA, 331 bp, Homo sapiens
cagtctgccctgactcagcctccctccgcgtccgggtctcctggacagtcagtcaccatctcctgcactggaaccagcagtgacgttggtggttataagtatgtctcctggtaccaacaatacccaggcaaagtccccaaactcatgatttatgaggtcaataagcggccctcaggggtccctgatcgcttctctggctccaagtctggcaacacggcctccctgaccgtctctgggctccagcctgaggatgaggctgattattactgctcctcatatgcaggcagcaacaatctggtgttcggcggagggaccaagctgactgtcctag

SEQ ID NO: 1720 - DNA, 331 bp, Homo sapiens
cagtctgccctgactcagcctgcctccgtgtctgggtctcctggacagtcgatcaccatctcctgcactggaaccagcagtgacgttggtggttataactatgtctcctggtaccaacagcacccaggcaaagcccccaaactcatgatttatgatgtcacttaccggccctccggggtttctactcgcttctctggctccaagtctggcaacacggcctccctgaccatctctgggctccaggctgaggacgaggctgattattactgcagctcatacacaagcattttcacttgggtgttcggcggagggaccaagctgaccgtcctag

SEQ ID NO: 1721 - DNA, 322 bp, Homo sapiens
gacatccagatgacccagtctccatcttccgtgtctgcatctgtaggagacagagtcaccatcacttgtcgggcgagtcagggtattagcagctggttagcctggtatcagcagataccagggaaagcccctaagctcctgatctatgctgcatccagtttgcaaagtggggtcccatcaaggttcagcggcagtggatctgggacagatttcactctcaccatcagcagcctgcagcctgaagattttgcaacttactattgtcaacagactgacagtttcccattcactttcggccctgggaccaaagtggatatcaaac

SEQ ID NO: 1722 - DNA, 322 bp, Homo sapiens; identical to SEQ ID NO: 855

SEQ ID NO: 1723 - DNA, 337 bp, Homo sapiens
cagcttgtgctgactcaatcgccccctgcctctgcctctctgggagcctcggtcaagctcacctgcactctgagcagtgggcacagcggctacgccatcgcatggcatcagcagcagccagagaagggccctcgctacttgatgaaggttaacagtgatggcagccacagcaagggggacggcatccctgatcgcttctcaggctccagctccggggctgagcgctacctcagcatctccagcctccagtctgaggatgaggctgactattactgtcagacctggggcactgacacttatgtggtattcggcggagggaccaagttgaccgtcctag

SEQ ID NO: 1724 - DNA, 334 bp, Homo sapiens
gatattgtgatgacccagactccactctctctgtccgtcacccctggacagccggcctccatctcctgcaagtctagtcagagcctcctgcatagtgatggacagacctatttgtattggtacttgcagaaggcaggccagcctccacagctcctgatctatgaggtttccaaccgtttctctggagtgccagataggttcagtggcagcgggtcagggacagatttcacactgaaaatcagccgggtggaggctgaggatgttggggtttattactgcatgcacagtatacagtttcctcgaacgttcggccaagggaccaaggtggaaatca

SEQ ID NO: 1725 - DNA, 325 bp, Homo sapiens; identical to SEQ ID NO: 883

SEQ ID NO: 1726 - DNA, 334 bp, Homo sapiens
cagtctgtgctgacgcagccgccctcagtgtctggggccccagggcagagggtcaccatctcctgcactgggagcagctccaacatcggggcatattatgatgtacactggtaccaccagcttccaggaacagcccccaaactcctcatctatggtaacagcaatcggccctcaggggtccctgaccgattctctggctccaagtctggcacctcagcctccctggccatcactgggctccaggctgaggatgaggctgattattactgccagtcctatgacagcagcctgagtggtagggtgttcggcggagggaccaagctgaccgtcctag

SEQ ID NO: 1727 - DNA, 319 bp, Homo sapiens; identical to SEQ ID NO: 1688

SEQ ID NO: 1728 - DNA, 325 bp, Homo sapiens
gaaattgtgttgacgcagtctccaggcaccctgtctttgtctccaggggaaagagccaccctctcctgcagggccagtcagagtgttagcagcagctacttagcctggtaccagcagaagcctggccaggttcccaggctcctcatctatggtgcatccagcagggccactggcatcccagacaggttcagtggcagtgggtctgggacagacttcactctcaccatcagcagactggagcctgaagattttgcagtgtattactgtcagcaatatggtagctcactgtggacgttcggccaagggaccaaggtggaaatcaaac

SEQ ID NO: 1729 - DNA, 322 bp, Homo sapiens
gaaattgtgttgacgcagtctccaggcaccctgtctttgtttccaggggaaagagccaccctctcctgcaggaccagtcagagttttagccgcaacactttagcctggtaccagcagaaacctggccaagctcccactctcctcatctatgatgcattaaccagggccactggcatcccagacaggttcagtggcagtgggtctgggacagacttcactctcactatcagcagactggagcctgaagattttgcagtctattactgtcagcactattatgactcacagtggacgttcggccaagggaccaaggtggaagtca

SEQ ID NO: 1730 - DNA, 331 bp, Homo sapiens
caggctgtggtgactcaggagccctcactgactgtgtccccaggagggacagtcactctcacctgtggctccagcactggagctgtcaccagtggtcattatccctactggttgcagcagaagcctggccaagcccccaggacactgatttatgatacaagcaacaaacactcctggacacctgcccggttctcaggctccctccttgggggcaaagctgccctgaccctttcgggtgcgcagcctgaggatgaggctgactattactgtttcctctcctataatggtgctcggtttctcttcggaactgggaccagggtcaccgtcctag

SEQ ID NO: 1731 - DNA, 325 bp, Homo sapiens
gaaattgtgttgacgcagtctccaggcaccctgtctttgtctccaggggaaagagccaccctctcctgcagggccagtcagagtgttagcagcagctacttagcctggtaccagcagaaacctggccaggctcccaggctcctcatctatggtgcatccagcagggccattggcatcccagacaggttcagtggcagtgggtctgggacagacttcagtcttaccatcagcagactggagcctgaagattttgcagtgtattactgtcagcagtttggtagctcaccgtggacgttcggccaagggaccaaggtggaaatcaaac

SEQ ID NO: 1732 - DNA, 328 bp, Homo sapiens
cagactgtggtgactcaggagccctcactgactgtgtccccaggagggacagtcactctcacctgtgcttccagcactggagcagtcaccagtgcttcctctccacactggttccagcagaaacctggacaagcacccagggcattgatttatagtacaaacaacaaacactcctggacccctgcccggttctcaggctccctccttgggggcaaagctgtcctgaccctgtcaggtgtgcagactgaggacgaggctgactattactgcctgctcctctataatggtccctggtttttcggcggagggaccaagctgaccgtcctag

SEQ ID NO: 1733 - DNA, 334 bp, Homo sapiens
cagtctgccctgactcagcctgcctccgtgtctgggtctcctggacagtcgatcaccatctcctgcactggaaccagcagtgacgttggtggttataactatgtctcctggtaccaacaacacccaggcaaagcccccaaactcatgatttatgatgtcagtaagcggccctcaggggtttctaatcgcttctctggctccaagtctggcaacacggcctccctgaccatctctgggctccaggctgaggacgaggctgattattactgcagctcatatacaagcagcagcactttcgtggtattcggcggagggaccaagctgaccgtcctag

SEQ ID NO: 1734 - DNA, 334 bp, Homo sapiens
cagtctgccctgactcagcctgcctccgtgtctgggtctcctggacagtcgatcaccatctcctgcactggaaccagcagtgacgttggtggttataactatgtctcctggtaccaacaacacccaggcaaagcccccaaactcatgatttatgatgtcactaagcggccctcaggggtttctaatcgcttctctggctccaagtctggcaacacggcctccctgaccatctctgggctccaggctgaggacgaggctgattattactgcacctcatatacaaccagcaccactttagtggtattcggcggagggaccaagctgaccgtcctag

SEQ ID NO: 1735 - DNA, 337 bp, Homo sapiens
gatattgtgatgactcagtctccactctccctgcccgtcacccctggagagccggcctccatctcctgcaggtctagtcagagcctcctgcatagtaatggatacaactatttggattggtacctgcagaagccagggcagtctccacagctcctgatctatttgggttctaatcgggcctccggggtccctgacaggttcagtggcagtggatcaggcacagattttacactgaaaatcagcagagtggaggctgaggatgttggggtttattactgcatgcaagctctacaaactccgttgacgttcggccaagggaccaaggtggaaatcaaac

SEQ ID NO: 1736 - DNA, 322 bp, Homo sapiens
gaaattgtgctgactcagtctccagactttcagtctgtgactccaaaggagaaagtcaccatcacctgccgggccagtcagagcattggtagtaggttacactggtaccagcaaaaaccagatcagtctccaaagctcctcatcaagtatgcttcccagtccttgtcaggggtcccctcgaggttcagtggcagtggatctgggacagatttcaccctcaccatcaatagcctggaagctgaagatgctgcaacgtattactgtcatcagagtagtagttttccgtacacttttggccaggggaccaagctggagatcaaac

SEQ ID NO: 1737 - DNA, 322 bp, Homo sapiens
gacatccagatgacccagtctccatcctccctgtctgcatctgtaggagacagagtcaccatcacttgccgggcaagtcagagcattagcagctatttaaattggtatcagcagaaaccagggaaagcccctaagctcctgatctatgctgcatccagtttgcaaagtggggtcccatcaaggttcagtggcagtggatctgggacagatttcactctcaccatcagcagtctgcaacctgaagattttgcaacttactactgtcaacagagttacagtacccctcgaacgttcggccaagggaccaaggtggaaatcaaac

SEQ ID NO: 1738 - DNA, 325 bp, Homo sapiens
gacatccagatgacccagtctccatcctccctgtctgcatctgtaggagacagagtcaccatcacttgccgggcaagtcagagcattagcagctatttaaattggtatcagcagaaaccagggaaagcccctaaggtcctgatctatgctgcatccagtttgcaaagtggggtcccatcaaggttcagtggcggtggatctgggacagatttcactctcaccatcagcagtctgcaacctgaagattttgcaacttactactgtcaacagagttacagtaccccggcgctcactttcggcggagggaccaaggtggagatcaaac

SEQ ID NO: 1739 - DNA, 328 bp, Homo sapiens
gaaattgtgttgacgcagtctccaggcaccctgtctttgtctccaggggaaagagccaccctctcctgcagggccagtcagagtgttagcagcagctacttagcctggtaccagcagaaacctggccaggctcccaggctcctcatctatggtgcatccagcagggccactggcatcccagacaggttcagtggcagtgggtctgggacagacttcactctcaccatcagcagactggagcctgaagattttgcagtgtattactgtcagcagtatggtagctcacctccgggcacttttggccaggggaccaagctggagatcaaac

SEQ ID NO: 1740 - DNA, 322 bp, Homo sapiens; identical to SEQ ID NO: 929

SEQ ID NO: 1741 - DNA, 322 bp, Homo sapiens
gaaactgtgttgacgcagtctccaggcaccctgtctttgtctccaggggagagagccaccctctcctgcagggccagccagagtgttagcggcagctacttagcctggtaccagcagaaacctggccaggctcccaggctcctcctctatggtgcatccagcagggccactggcatcccagacaggttcagtggcagtgggtctgggacagacttcactctcaccatcagcagactggagcctgaagattttgcagtgtattactgtcagcagtatggtagctcacggacgttcggccaagggaccaaggtggaaatcaaac

SEQ ID NO: 1742 - DNA, 334 bp, Homo sapiens
gaaatagtgatgacgcagtctccagccaccctgtctgtgtctccaggggaaagagccaccctctcctgcagggccagtcagagtgttagcagcaacttagcctggtaccagcagaaacctggccaggctcccaggctcctcatctatggtgcatccaccagggccactggtatcccagccaggttcagtggcagtgggtctgggacagagttcactctcaccatcagcagcctgcagtctgaagattttgcagtttattactgtcagcagtataataactggcccccaggggccctcctcactttcggcggagggaccaaggtggagatcaaac

SEQ ID NO: 1743 - DNA, 337 bp, Homo sapiens; identical to SEQ ID NO: 1618

SEQ ID NO: 1744 - DNA, 325 bp, Homo sapiens
tcctatgagctgacacagccaccctcggtgtcagtgtccccaggacaaacggccaggatcacctgctctggagatgcattgccaaaaaaatatgcttattggtaccagcagaagtcaggccaggcccctgtgctggtcatctatgaggacagcaaacgaccctccgggatccctgagagattctctggctccagctcagggacaatggccaccttgactatcagtggggcccaggtggaggatgaagctgactactactgttactcaagagacagcagtggtaatcattatgtcttcggaactgggaccaaggtcaccgtcctag

SEQ ID NO: 1745 - DNA, 325 bp, Homo sapiens
gaaattgtgttgacacagtctccaggcaccctgtctttgtctccaggggaaagagccaccctctcctgcagggccagtcagagtgttaccagcagctccttagcctggtaccagcagaaacctggccaggctcccaggctcctcatctatggtgcatccagcagggccactggcatcacagacaggttcagtggcagtgggtctgggacagacttcactctcaccatcagcagactggagcctgaagattttgcagtgtattactgtcagcagtatggtagctctacctacacttttggccaggggaccaagctggagatcaaac

SEQ ID NO: 1746 - DNA, 334 bp, Homo sapiens
cagtctgccctgactcagcctgcctccgtgtctgggtctcctggacagtcgatcaccatctcctgcactggaaccagcagtgacgttggtggttataactatgtctcctggtaccaacagcacccaggcaaagcccccaaactcatgatttatgatgtcagtaagcggccctcaggggtttctaatcgcttctctggctccaagtctggcaacacggcctccctgaccatctctgggctccaggctgaggacgaggctgattattactgcagctcatatacaagcagcagcactttctatgtcttcggaactgggaccaaggtcaccgtcctag

SEQ ID NO: 1747 - DNA, 319 bp, Homo sapiens
gacatccagatgacccagtctccttccaccctgtctgcctctgtaggagacagagtcaccatcacttgccgggccagtcagagtattcatagctggttggcctggtatcagcagaaaccagggaaagcccctaagttcctgatctataaggcgtctagtttacaaagtggggtcccatcaaggttcagcggcagtggatctgggacagaattcactctcaccatcagcagcctgcagcctgatgattttgcaacttattactgccaacaatataatagttatccgacgttcggccaagggaccaaggtggaaatcaaac

SEQ ID NO: 1748 - DNA, 337 bp, Homo sapiens
gatattgtgatgacccagactccactctcctcacctgtcacccttggacagccggcctccatctcctgcaggtctagtcaaaccctcctacacagtaatggaaaaacctacttgaattggcttcaccagaggccaggccagcctccaagactcctcatttataagatttctaatcgagtctccggggtcccagacagattcagtggcagtggggcagggacagatttcacactgaagatcagcagggtggaggctgaggatgtcggggtttattactgcatgcaagctacagactttcctcggacgttcggccaggggaccaaggtggaaatcaaac

SEQ ID NO: 1749 - DNA, 334 bp, Homo sapiens
cagtctgccctgactcagcctcgctcagtgtccgggtctcctggacagtcagtcaccatctcctgcactggaaccagcagtgatgttggtacttataactatgtctcctggtaccaacagcacccaggcaaagcccccaaactcatgatttatgatgtcagtaagcggccctcaggggtccctgatcgcttctctggctccaagtctggcaacacggcctccctgaccatctctgggctccaggctgaggatgaggctgattattactgctgctcatatgcaggcagctacacttctgtggtattcggcggagggaccaagctgaccgtcctag

SEQ ID NO: 1750 - DNA, 340 bp, Homo sapiens; identical to SEQ ID NO: 905

SEQ ID NO: 1751 - DNA, 331 bp, Homo sapiens
gaaattgtgttgacgcagtctccaggcgccctgtctttgtctccaggggaaagagccaccctctcctgcagggcccgtcagagtgttagcagcagctacttagcctggtaccagcagaaacctggccaggctcccaggctcctcatctatggtgcatccagcagggccgctggcatcccagacaggttcagtggcagtgggtctgggacagacttcactctcaccatcagcagactggagcctgaagattttgcagtgtattactgtcagcagtttggtacctcacctcctgcgtggacgttcggccaagggaccaaggtggaaatcaaac

SEQ ID NO: 1752 - DNA, 337 bp, Homo sapiens
gatattgtgatgacccagactccactctcctcacctgtcacccttggacagccggcctccatctcctgcaggtctagtcaaagcctcttaaacagtgatggaaatacctacttgagttggcttcagcagaggccaggccagcctccaagactcctaatttataagatttctaaccggttctctggggtcccagacagattcagtggcagtggggcagggacagaattcacactgaaaatcagcagggtggaagctgaggatgtcggggtttattactgcatgcaagctacacaatttcctcagacgttcggccaagggaccaaggtggaaatcaaac

SEQ ID NO: 1753 - DNA, 331 bp, Homo sapiens
cagtctgccctgactcagcctgcctccgtgtctgggtctcctggacagtcgatcaccgtctcctgcactgcaaccagcagtgactttgctgattataaatatgtctcctggtaccagcaactcccaggcaatgcccccaaactcctgatttatgatgtcagtgagcggccctcagggatttctgatcacttctctggctccaagtctggcaacacggcctccctgaccatctctgggctccaggctgaggacgaggctgattattactgcgcctcatatacaacgagaaatattttcgtcttcggaactgggaccaaggtcaccgtcctag

SEQ ID NO: 1754 - DNA, 331 bp, Homo sapiens
cagtctgtgctgactcagccaccctcagcgtctgggacccccgggcagagggtcaccatctcttgttctggaagcagctccaacatcggaagtaattatgtatactggtaccagcagctcccaggaacggcccccaaactcctcatctataggaataatcagcggccctcaggggtccctgaccgattctctggctccaagtctggcacctcagcctccctggccatcagtgggctccggtccgaggatgaggctgattattactgtgcagcatgggatgacagcctgagtggttatgtcttcggaactgggaccaaggtcaccgtcctag

SEQ ID NO: 1755 - DNA, 322 bp, Homo sapiens
gacatccagatgacccagtctccttccaccctgtctgcatctgtaggagacagagtcaccatcacttgccgggccagtcagagtattagtagctggttggcctggtatcagcagaaaccagggaaagcccctaagctcctgatctataaggcgtctagtttagaaagtggggtcccatcaaggttcagcggcagtggatctgggacagaattcactctcaccatcagcagcctgcagcctgatgattttgcaacttattactgccaacagtataatagttatttgtacacttttggccaggggaccaagctggagatcaaac

SEQ ID NO: 1756 - DNA, 322 bp, Homo sapiens; identical to SEQ ID NO: 851

SEQ ID NO: 1757 - DNA, 331 bp, Homo sapiens
cagtctgccctgactcagcctgcctccgtgtctgggtctcctggacagtcgatcaccatctcctgcactggaaccaacagtgacgttggtggttataactatgtctcctggtaccaacagcacccaggcaaagcccccaaactcgtgatttatgatgtcagtaagcgaccctcaggggtttctaatcgcttctctggctccaagtctggcaacacggcctccctgaccatctctgggctccaggctgaggacgaggctgattattactgcagctcatatacaagcagcagtgctagggtcttcggaactgggaccaaggtcaccgtcctag

SEQ ID NO: 1758 - DNA, 340 bp, Homo sapiens; identical to SEQ ID NO: 905

SEQ ID NO: 1759 - DNA, 325 bp, Homo sapiens
gaaattgtgttgacgcagtctccaggcaccctgtctttgtctccaggggaaagagccaccctctcctgcagggccagtcagagtgttagcagcagctacttagcctggtaccagcagaaacctggccaggctcccaggctcctcatctatggtgcatccagcagggccactggcatcccagacaggttcagtggcagtgggtctgggacagacttcactctcaccatcagcagactggagcctgaagattttgcagtgtattactgtcagcagtatggtagctcaaggtggacgttcggccaagggaccaaggtggaaatcaaac

SEQ ID NO: 1760 - DNA, 331 bp, Homo sapiens
caggctgtggtgactcaggagccctcactgactgtgtccccaggagggacagtcactctcacctgtggctccagcactggagctgtcacctttactcattatccctactggttccagcagaagcctggccaagcccccaggacactgatttttgatacaagcaacaaacactcctggacccctgcccggttctcaggctccctccttgggggcaaagctgccctgaccctttcgggtgcgcagcctgacgatgaggctgactattactgcttcctctactatagtggtgctcgggtggtattcggcggagggaccaagctgaccgtcctag

SEQ ID NO: 1761 - DNA, 322 bp, Homo sapiens; identical to SEQ ID NO: 1668

SEQ ID NO: 1762 - DNA, 322 bp, Homo sapiens; identical to SEQ ID NO: 1608

SEQ ID NO: 1763 - DNA, 325 bp, Homo sapiens
gaaattgtgttgacgcagtctccaggcaccctgtctttgtctccaggggaaagagccaccctctcctgcagggccagtcagagtgttagcagcagctacttagcctggtaccagcagaaacctggccaggctcccaggctcctcatctatggtgcatccagcagggccactgacatcccagacaggttcagtggcagtgggtctgggacagacttcactctcaccatcagcagactggagcctgaagattttgcagtgtattactgtcagcagtatgatagctcacctcggacttttggccaggggaccaagctggagatcaaac

SEQ ID NO: 1764 - DNA, 331 bp, Homo sapiens
cagtctgtgttgacgcagccgccctcagtgtctgcggccccaggacagaaggtcaccatctcctgctctggaagcagctccaacattgggaataattatgtatcctggtaccagcagctcccaggaacagcccccaaactcctcatctatgaaaataataagcgaccctcagggattcctgaccgattctctggctccaagtctggcacgtcagccaccctgggcatcaccggactccagactggggacgaggccgattattactgcggaacatgggatagcagcctgagtgctgtggtattcggcggagggaccaagctgaccgtcctag

SEQ ID NO: 1765 - DNA, 332 bp, Homo sapiens; identical to SEQ ID NO: 1697

SEQ ID NO: 1766 - DNA, 331 bp, Homo sapiens
cagtctgccctgactcagcctgcctccgtgtctgggtctcctggacagtcgatcaccatctcctgcactggaaccagcagtgacgttggtggttataactatgtctcctggtaccaacagcacccaggcaaagcccccaaactcatgatttttgatgtcagtaagcggccctcaggggtttctaatcgcttctctggttccaagtctggcaacacggcctccctgaccatctctgggctccaggctgaggacgaggctgattattactgcagctcatatacaagcagggccactgtggtattcggcggagggaccaagctgaccgtcctag

SEQ ID NO: 1767 - DNA, 328 bp, Homo sapiens
gaaattgtgttgacgcagtctccaggcaccctgtctttgtctccaggggaaagagccaccctctcctgcagggccagtcagagtgttagcagcagctacttagcctggtaccagcagaaacctggccaggctcccaggctcctcatctatggtgcatccagcagggccactggcatcccagacaggttcagtggcagtgggtctgggacagacttcactctcaccatcagcagactggagcctgaagattttgcagtgtattactgtcagcagtatggtagctcacctccgtggacgttcggccaagggaccaaggtggaaatcaaac

SEQ ID NO: 1768 - DNA, 322 bp, Homo sapiens
gaaattgtgttgacgcagtctccaggcaccctgtctttgtctccaggggaaagagccaccctctcctgcagggccagtcagagtgttagcagcagctacttagcctggtaccagcagaaacctggccaggctcccaggctcctcatctatgctgcatccagcagggccacaggcatcccagacaggttcagtggcagtgggtctgggacagacttcactctcaccatcagcagactggagcctgaagattttgcagtgtattactgtcagcagtatggtagcttaccgacgttcggccaagggaccaaggtggaaatcaaac

SEQ ID NO: 1769 - DNA, 330 bp, Homo sapiens
cagtctgccctgactcagcctgcctccgtgtctgggtctcctggacagtcgatcaccatctcctgcactggagccgccagtgacgtcggtaattctcactatgtctcctggtaccaacagctcccaggcatggcccccaaactcttgatttatgatgtcagtaatcggccctcaggggtttctcatcgcttctctggctccaagtctggcaacacggcctccctgaccatctctgggctccaggctgaggacgaggctgattattactgcagctcatatacaagcagcgacactttggtgttcggcggagggaccaaggtgaccgtccta

SEQ ID NO: 1770 - DNA, 331 bp, Homo sapiens
cagtctgtgctgactcagccaccctcagcgtctgggacccccgggcagagggtcaccatctcttgttctggaagcggctccaacatcggaagtaatactgtgaactggtaccagcagctcccaggaacggcccccaaactcctcatctatagtaataatcagcggccctcaggggtccctgaccgattctctggctccaagtctggcacctcagcctccctggccatcagtgggctccagtctgaggatgaggctgattattactgtgcagcttgggatgacagcctgaatggttatgtcttcggaactgggaccaaggtcaccgtcctag

SEQ ID NO: 1771 - DNA, 337 bp, Homo sapiens
gatattgtgatgactcagtctccactctccctgcccgtcacccctggagagccggcctccatctcctgcaggtctagtcagagcctcctgcatagtaatggatacaactatttggattggtacctgcagaagccagggcagtctccacagctcctgatctatttgggttctaatcgggcctccggggtccctgacaggttcagtggcagtggatcaggcacagattttacactgaaaatcagcagagtggaggctgaggatgttggggtttattactgcatgcaagctctacaaactccctacacttttggccaggggaccaagctggagatcaaac

SEQ ID NO: 1772 - DNA, 322 bp, Homo sapiens
gacatccagatgacccagtctccatcctccctgtctgcatctgtaggagacagagtcaccatcacttgccgggcaagtcagagcattaccagctatttacattggtatcagcagaaaccagggaaagcccctaagctcctgatctatgctgcatccagtttgcaaagtggggtcccatcaaggttcagtggcagtggatctgggacagatttcactctcaccatcagcagtctgcaacctgaagattttgcaacttactactgtcaacagagttacagtaccccgtacacttttggccaggggaccaagctggagatcaaac

SEQ ID NO: 1773 - DNA, 322 bp, Homo sapiens
gaaattgtgctgactcagtctccagactttcagtctgtgactccaaaggagaaagtcaccatcacctgccgggccagtcagagcattggtagtagcttacactggtaccagcagaaaccagatcagtctccaaagctcctcatcaagtatgcttcccagtccatctcaggggtcccctcgaggttcagtggcagtggatctgggacagatttcaccctcaccatcaatagcctggaagctgaagatgctgcagcgtattactgtcatcagagtagtagtttaacgtggacgttcggccaagggaccaaggtggaaatcaaac

SEQ ID NO: 1774 - DNA, 322 bp, Homo sapiens
gacatccagttgacccagtctccatccttcctgtctgcatctgtaggagacagagtcaccatcacttgccgggccagtcaggacatttccagttatttagcctggtatcagcaaaaaccggggaaagcccctaagctcctgatctatgctgcatccagtttgcaaactggggtcccatcaaggttcagcggcagtgaatctgggacagaattcactctcacaatcagcagcctgcagcctgaagattttgcaacttattactgtcaacacattagtcgttacccgtacacttttggccaggggaccaagctggagatcaaac

SEQ ID NO: 1775 - DNA, 322 bp, Homo sapiens
gacatccagatgacccagtctccttccaccctgtctgcatctgtaggagacagagtcaccatcacttgccgggccagtcagagtattagtagctggttggcctggtatcagcagaaaccagggaaagcccctaagctcctgatctataaggcgtctagtttagaaagtggggtcccatcaaggttcagcggcagtggatctgggacagaattcactctcaccatcagcagcctgcagcctgatgattttgcaacttattactgccaacagtataatacttacccgtggacgttcggccaagggaccaaggtggaaatcaaac

SEQ ID NO: 1776 - DNA, 328 bp, Homo sapiens
cagactgtggtgactcaggagccctcactgactgtgtccccaggagggacagtcactctcacctgtacttccagcactggagcagtcaccagtaattactatccaaactggttccagcagaaacctggacaagcacccagggcactgatttatagtacaagcaacaaacactcctggacccctgcccggttctcaggctccctccttggggacaaagctgccctgacactgtcaggtgtgcagcctgaggacgaggctgactattactgcctgctctactatggtgtttcctgggtgttcggcggagggaccaagctgaccgtcctag

SEQ ID NO: 1777 - DNA, 328 bp, Homo sapiens
cagtctgtgctgactcagccaccctcagcgtctgggacccccgggcagagggtcaccatctcttgttctggaagcagctccaacatcggaagtaattatgtatactggtaccagcagctcccaggaacggcccccaaactcctcatctataggaataatcagcggccctcaggggtccctgaccgattctctggctccaagtctggcacctcagcctccctggccatcagtgggctccggtccgaggatgaggctgattattactgtgcagcatgggatgacagcctgagtggtctgttcggcggagggaccaagctgaccgtcctag

SEQ ID NO: 1778 - DNA, 322 bp, Homo sapiens
gacatccagatgacccagtctccttccaccctgtctgcatctgtaggagacagagtcaccatcacttgccgggccagtcagagtattagtagctggttggcctggtatcagcagaaaccagggaaagcccctaagctcctgatctataaggcgtctagtttagaaagtggggtcccatcaaggttcagcggcagtggatctgggacagaattcactctcaccatcagcagcctgcagcctgatgattttgcaacttattactgccaacagtataatagttattcgtggacgttcggccaagggaccaaggtggaaatcaaac

SEQ ID NO: 1779 - DNA, 322 bp, Homo sapiens
gacatccagatgacccagtctccatcctccctgtctgcatctgtaggagacagagtcaccatcacttgccgggcaagtcagagcattagcagctatttaaattggtatcagcagaaaccagggaaagcccctaagctcctgatctatgctgcatccagtttgcaaagtggggtcccatcaaggttcagtggcagtggatctgggacagatttcactctcaccatcagcagtctgcaacctgaagattttgcaacttactactgtcaacagagttacagtaccccgctcactttcggcggagggaccaaggtggagatcaaac

SEQ ID NO: 1780 - DNA, 322 bp, Homo sapiens
gaaattgtgttgacgcagtctccaggcaccctgtctttgtctccaggggaaagagccaccctctcctgcagggccagtcagagtgttagcagcacctacttagcctggtaccagcagaaacctggccaggctcccaggctcctcatctatggtgcatccaggagggccactggcatcccagacaggttcagtggcagtgggtctgggacagacttcactctcaccatcagcagactggagcctgaagattttgcagtgtattactgtcagcagtatggtagctcactcactttcggcggagggaccaaggtggagatcaaac

SEQ ID NO: 1781 - DNA, 322 bp, Homo sapiens; identical to SEQ ID NO: 927

SEQ ID NO: 1782 - DNA, 325 bp, Homo sapiens
gaaattgtgttgacgcagtctccaggcaccctgtctttgtctccaggggaaagagccaccctctcctgccgggccagtcagagtgttgccagcagttacttaggctggtatcagcagaaacctggccaggctcccaggctcctcatctatgctgcatccagcagggccaccggcatcccagacaggttcagtggcagtgtgtctgggacagacttcactctcaccatcagcagactggagcctgaagattttgcagtgtattactgtcaccagcatggtagctcacccttgacgttcggccaagggaccaaggtggaaatcaaac

SEQ ID NO: 1783 - DNA, 331 bp, Homo sapiens
cagtctgccctgactcagcctgcctccgtgtctgggtctcctggacagtcgatcaccatctcctgcactggaaccagcagtgacgttggtggttataactatgtctcctggtaccaacagcacccaggcaaagcccccaaactcatgatctatgatgtcagtaagcggccctcaggggtttctaatcgcttctctggctccaagtctggcaacacggcctccctgaccatctctgggctccaggctgaggacgaggctgattattactgcagctcatatacaagcagcagcactgtggtattcggcggagggaccaagctgaccgtcctag

SEQ ID NO: 1784 - DNA, 340 bp, Homo sapiens
gacatcgtgatgacccagtctccagactccctggctgtgtctctgggcgagagggccaccatcaactgcaagtccagccagaatgttttatacagctccaacaataagaactacttagcttggtaccagcaaaaaccaggacagcctcctaagctgctcatttactgggcatctacccgggaatccggggtccctgaccgattcagtggcagcgggtctgggacagatttcactctcaccatcagcagcctgcaggctgaagatgtggcagtttattactgtcagcaatattatagtattcccctgacgttcggccaagggaccaaggtggaaatcaaac

SEQ ID NO: 1785 - DNA, 325 bp, Homo sapiens
tcctatgagctgacacagccaccctcggtgtcagtgtccccaggacaaatggccaggatcacctgctctggagatgcattgccaaaaaaatatgtttattggtaccagcagaagtcaggccaggcccctgtactggtcatctatgaggacagcaaacgaccctccgggatccctgagagattctctggctccagctcagggacaatggccaccttgactatcagtggggcccaggtggaagatgaagctgactactactgttactcagcagacagcagtggtaatcattgggttttcggcggagggaccaagctgaccgtcctag

SEQ ID NO: 1786 - DNA, 331 bp, Homo sapiens
cagtctgccctgactcagcctccctccgcgtccgggtctcctggacagtcagtcaccatctcctgcactggaaccagcagtgacgttggtggttataactatgtctcctggtaccaacagcacccaggcaaagcccccaaactcatgatttatgaggtcagtaagcggccctcaggggtccctgatcgcttctctggctccaagtctggcaacacggcctccctgaccgtctctgggctccaggctgaggatgaggctgattattactgcagctcatatgcaggcagcatccctgtggtattcggcggagggaccaagctgaccgtcctag

SEQ ID NO: 1787 - DNA, 325 bp, Homo sapiens
gaaattgtgttggcgcagtctccaggcaccctgtccttgtctccaggggaaagagccaccctctcctgcagggccagtcagagtgttagcagcatctacttagcctggtaccagcagaaacctggccaggctcccaggctcctcatctatggtgcatacaacagggccactggcatcccagacaggttcagtggcagtgggtctgggacagacttcactctcaccatcagcagactggagcctgaagattttgcggtgtattactgtcagcagtatggtgactcactgtggacgttcggccaagggaccaaggtagaaatcaaac

SEQ ID NO: 1788 - DNA, 320 bp, Homo sapiens
gacatccagatgacccagtctccatcttctgtgtctgcatctgtaggagacagagtcaccatcagttgtcgggcgagtcagggtatcagtaactggttaacctggtatcagcagaaaccagggaaagcccctaaactcctgatttatgctgcgtccagtttgcagagtggggtcccatcgaggttcagcggcagtggatctgggacagaattcagtctcactatcagcagcctgcagcctgaagattcagcaacttactactgtcaagaggcaactactttcccgctcactttcggcggagggaccaaggtggagatcaa

SEQ ID NO: 1789 - DNA, 331 bp, Homo sapiens
gaaattgtgttgacgcagtctccaggcactctgtctttgtctccaggggaaagagccaccctctcctgcagggccagtcagagtgtaagcagtaaccacttagcctggtaccagcagaaacctggtcaggctcccagcgtcctcatctatggcgcatccaggagggccactggcatcccagacaggttcagtggcagtgggtctgggacagacttcactctcaccatcagcagactggagcctgaagattttgcagtgtattactgtcagcagtatactagctcacctccgaaggtcactttcggcggagggaccaaggtggagatcaaac

SEQ ID NO: 1790 - DNA, 322 bp, Homo sapiens
gacatccagatgacccagtctccatcctccctgtctgcatctgtaggagacagagtcaccatcacttgccgggcaagtcagagcattagcagctatttaaattggtatcagcagaaaccagggaaagcccctaagctcctgatctatgctgcatccagtttgcaaagtggggtcccatcaagtttcagtggcagtggatctgggacagatttcactctcaccatcagcagtctgcaacctgaagattttgcaacttactactgtcaacagagtgacactaccccttacacttttggccaggggaccaagctgcagatcaaac

SEQ ID NO: 1791 - DNA, 319 bp, Homo sapiens; identical to SEQ ID NO: 1678

SEQ ID NO: 1792 - DNA, 331 bp, Homo sapiens; identical to SEQ ID NO: 1630

SEQ ID NO: 1793 - DNA, 331 bp, Homo sapiens
cagtctgtgctgactcagtcaccctcagcgtctgggacccccgggcagagggtcaccatctcttgttctggaagcagctccaacatcggaagccattctgtaaactggtaccagcacctcccaggaacggcccccaaactcctcatctgtaggaatgatcagcggccctcaggggtccctgaccgattgtctggctccaggtctggcacctcagcctccctggccatcagtgggctccagcctgaggatgaggctgattattattgtgctacatgggatgacagcctgaatggttatgtcttcggaactgggaccaaggtcatcgtcctag

SEQ ID NO: 1794 - DNA, 328 bp, Homo sapiens
gaaattgtgttgacacagtctccagccaccctgtctttgtctccaggggaaagagccaccctctcctgcagggccagtcagagtgttagcagctacttagcctggtaccaacagaaacctggccaggctcccaggctcctcatctatgatgcatccaacagggccactggcatcccagccaggttcagtggcagtgggtctgggacagacttcactctcaccatcagcagcctagagcctgaagattttgcagtttattactgtcagcagcgtagcaactggcctttttcgatcaccttcggccaagggacacgactggagattaaac

SEQ ID NO: 1795 - DNA, 334 bp, Homo sapiens
cagtctgtgctgactcagccaccctcagcgtctgggacccccgggcagagggtcaccatctcttgttctggaagcagctccaacatcggaagtaatactgtaaactggtaccagcagctcccaggaacggcccccaaactcctcatctataggaataatcagcggccctcaggggtccctgaccgattctctggctccaagtctggcacctcagcctccctggccatcagtgggctccagtctgaggatgaggctgattattactgtgcagcatgggatgacagcctgaatggccattatgtcttcggaactgggaccaaggtcaccgtcctag

SEQ ID NO: 1796 - DNA, 325 bp, Homo sapiens
tcctatgtgctgactcagccaccctcagtgtcagtggccccaggaaagacggccaggattacctgtgggggaaacaacattggaagtaaaagtgtgtactggtaccagcggaggccaggccaggcccctgtgctggtcgtctattatgatagcgaccggccctcatggatccctgagcgattctctggctccaactctgagaacacggccaccctgaccatcagcagggtcgaagccggggatgaggccgactattactgtcaggtgtgggatagtactactgatcatgtggtattcggcggagggaccaagctgaccgtcctag

SEQ ID NO: 1797 - DNA, 322 bp, Homo sapiens
gacatccagatgacccagtctccatcctcactgtctgcttctgtaggagacagagtcaccatcacttgtcgggcgagtcaggccattagcaattatttagcctggtttcagcagaaaccagggaaagcccctaagtccctgatctatgctgcatccagtttgcaaagtggggtcccatcaaaattcagcggcagtggatctgggacagatttcactctcaccatcagcaacctgcagcctgaagattttgcaacttattactgccaacagtataatacttacccgtacacttttggccaggggaccaagctggagatcaaac

SEQ ID NO: 1798 - DNA, 322 bp, Homo sapiens
gacatccagatgacccagtctccatcctccctgtctgcatctgtaggagacagagtcaccatcacttgccgggcaagtcagagcattagcagctatttaaattggtatcagcagaaaccagggaaagcccctaagctcctgatctatgctgcatccagtttgcaaagtggggtcccatcaaggttcagtggcagtggatctgggacagatttcactctcaccatcagcagtctgcaacctgaagattttgcaacttactactgtcaacagagttacagtacccctcggacgttcggccaagggaccaaggtggaaatcaaac

SEQ ID NO: 1799 - DNA, 319 bp, Homo sapiens
gacatccagatgacccagtctccatcctccctgtctgcatctgtaggagacagagtcaccatcacttgccgggcaagtcagagcgttagcagctatttaaattggtatcagcagaaaccagggaaagcccctaagctcctgatctatgctgcatccagtttgcaaagtggggtcccatcaaggttcagtggcagtggatctgggacagatttcactctcaccatcagcagtctgcaacctgaagattttgcaacttactactgtcaagtgagttacagtaccctcactttcggccctgggaccaaagtggatatcaaac

SEQ ID NO: 1800 - DNA, 322 bp, Homo sapiens; identical to SEQ ID NO: 808

SEQ ID NO: 1801 - DNA, 332 bp, Homo sapiens
aattttatgctgactcagccccactctgtgtcggagtctccggggaagacggtaaccatctcctgcacccgcagcagtggcagcattgccagcaactatgtgcagtggtaccagcagcgcccgggcagtgcccccaccactgtgatctatgaggataaccaaagaccctctggggtccctgatcggttctctggctccatcgacagctcctccaactctgcctccctcaccatctctggactgaagactgaggacgaggctgactactactgtcagtcttatgatagcagcatcgagggtgttcggcggagggaccaagctgaccgtcctag

SEQ ID NO: 1802 - DNA, 319 bp, Homo sapiens
gacatccagatgacccagtctccttccaccctgtctgcatctgtaggagacagagtcaccatcacttgccgggccagtcagagtattagtagctggttggcctggtatcagcagaaaccagggaaagcccctaagctcctgatctatcaggcgtctactttagaaggtggggtcccatcaaggttcagcggcagtggatctgggacagaattcactctcaccatcagcagcctgcagcctgatgattttgcaacttattactgccaacagtataatagttattacacttttggccaggggaccaagctggagatcaaac

SEQ ID NO: 1803 - DNA, 322 bp, Homo sapiens
gaaattgtgctgactcagtctccagactttcagtctgtgactccaaaggagaaagtcaccatcacctgccgggccagtcagagcattggtagtagcttacactggtaccagcagaaaccagatcagtctccaaagctcctcatcaagtatgcttcccagtccatctcaggggtcccctcgaggttcagtggcagtggatctgggacagatttcaccctcaccatcaatagcctggaagctgaagatgctgcagcgtattactgtcatcagagtagtagtttaccgctcactttcggcggagggaccaaggtggagatcaaac

SEQ ID NO: 1804 - DNA, 319 bp, Homo sapiens
gagattgtgttgacacagtctccagccaccctgtctttgtctccaggggatacagccaccctctcctgcagggccagtcagagtattagccagtacttagcctggtaccaacacaaacctggccaggctccccggctcctcctctatgatgcttcccgcagggccactggcatcccagcccggttcagtggcagttggtctgggacagaccacactctcaccatcagcagcctagagactgaagattttgcagtttattactgtcagcatcgtagcaactggcctctcaccttcggccaggggacacgactggacatta

SEQ ID NO: 1805 - DNA, 325 bp, Homo sapiens
gaaattgtgttgacgcagtctccaggcaccctgtctttgtctccaggggaaagagccaccctctcctgcagggccagtcagagtgttagcagcagctacttagcctggtaccagcagaaacctggccaggctcccaggctcctcatctatggtgcatccagcagggccactggcatcccagacaggttcagtggcagtgggtctgggacagacttcactctcaccatcagcagactggagcctgaagattttgcagtgtattactgtcagcagtatggtagctcacctaacacttttggccaggggaccaagctggagatcaaac

SEQ ID NO: 1806 - DNA, 322 bp, Homo sapiens
gacatccagatgacccagtctccatcctccctgtctgcatctgtaggagacagagtcaccatcacttgccgggcaagtcagagcattagcagctatttaaattggtatctccagaaaccagggaaagcccctaaactcctggtctatgctacatccagtttgcaaagtggggtcccgtcaaggttcagtggcagtggatctgggacagatttcactctcaccatcagcagtctgcaacctgaagattttgcaacttactattgtcaacagagttacactcccccgtacatctttggccaggggaccaagctggagatcaaac

SEQ ID NO: 1807 - DNA, 322 bp, Homo sapiens
gaaattgtgctgactcagtctccagactttcagtctgtgactccaaaggagaaagtcaccatcacctgccgggccagtcagagcattggtagtagcttacactggtaccagcagaaaccagatcagtctccaaagctcctcatcaagtatgcttcccagtccttctcaggggtcccctcgaggttcagtggcagtggatctgggacagatttcaccctcaccatcaatagcctggaagctgaagatgctgcaacgtattactgtcatcagagtagtagtctaccgtacacttttggccaggggaccaagctggagatcaaac

SEQ ID NO: 1808 - DNA, 328 bp, Homo sapiens
gaaattgtgttgacgcagtctccaggcaccctgtctttatctccaggggaaagagccaccctctcctgcagggccagtcagagtgttagcaacagctacttagcctggtaccagcagaaacctggccaggctcccaggctcctcatctatggtgcatccagcagggccactggcatcccagacaggttcagtggcagtgggtctgggacagacttcactctcaccatcagcagactggagcctgaagattttgcagtgtattactgtcagcagtatggtagctcacctctgtggacttttggccaggggaccaagctggagatcaaac

SEQ ID NO: 1809 - DNA, 325 bp, Homo sapiens
gaaattgtgttgacgcagtctccaggcaccctgtctttgtctccaggggaaagagccaccctctcctgcagggccagtcagagtgttagcagcagctacttagcctggtaccagcagaaacctggccaggctcccaggctcctcatctatggtgcatccagcagggccactggcatcccagacaggttcagtggcagtgggtctgggacagacttcactctcaccatcagcagactggagcctgaagattttgcagtgtattactgtcagcagtatggtagctcaccattcactttcggccctgggaccaaagtggatatcaaac

SEQ ID NO: 1810 - DNA, 322 bp, Homo sapiens
gaaatagcgatgacgcagtctccagccaccctgtctgtgtctccaggggaaagagtcaccctctcctgcagggccagtcagagtgtgagcagcaacttagcctggtaccagaaggaacctggccaggctcccaggctcctcatctatggtgcatccaccagggccactggtatcccagccaggttcagtggcagtgggtctgggacagagttcactctcaccatcagcagcctgcagtctgaagattttgcagtttattactgtcagcagtataatatctggcctcctacgttcggccaagggacacgactggagattaaac

SEQ ID NO: 1811 - DNA, 337 bp, Homo sapiens
gacatcgtgatgacccagtctccagactccctggctgtgtctctgggcgagagggccaccatcaactgcaagtccagccagagtgttttatccacctccaataataagaactacttagtttggtaccagcagaaaccaggacagcctcctaatctgctcatttactgggcatctacccgggaatccggggtccctgaccgattcagtggcagtgggtctgggacagatttcactctcaccatcagcagcctgcaggctgaagatgtggcagtttattactgtcagcaatattatggtagtccgacgttcggccaagggaccaaggtggaaatcaaac

SEQ ID NO: 1812 - DNA, 319 bp, Homo sapiens
gaaatagtgatgacgcagtctccagccaccctgtctgtgtctccaggggaaagagtcaccctctcctgcagggccagtcagagtgttagcagcaacttagcctggtaccagcagaaacctggccaggctcccaggctcctcatctatggtgcatccaccagggccactggtatcccagccaggttccgtggcagtgggtctgggacagacttcactctcaccatcagcagcctgcagtctgaagattttgcagtttattactgtcagcaatataataacgcgtacacttttggccaggggaccaagctggagatcaaac

SEQ ID NO: 1813 - DNA, 334 bp, Homo sapiens
gatattgtgatgactcagtctccactctccctgcccgtcacccctggagagccggcctccatctcctgcaggtctagtcagagcctcctgcatagtaatggatacaactatttggattggtacctgcagaagccagggcagtctccacagctcctgatctatttgggttctaatcgggcctccggggtccctgacaggttcagtggcagtggatcaggcacagattttacactgaaaatcagcagagtggaggctgaggatgttggggtttattactgcatgcaagctctacaaacgtggacgttcggccaagggaccaaggtggaaatcaaac

SEQ ID NO: 1814 - DNA, 340 bp, Homo sapiens
gacatcgtgatgacccagtctccagactccctggctgtgtctctgggcgagagggccaccatcaactgcaagtccagccagagtctttttatgagccacaccaatcagaactacttagcttggtaccagcagaaaccgcgacagcctcctaagctgctcatttactgggcatctatccgggaatccggggtccctgaccgattcagtggcagcgggtcggggacagacttcactctcaccatcagcagcctgcaggctgaagatgtggcactttattactgtctgcattattataatgttcctcggacgttcggccaagggaccaaggtggaaatcaaac

SEQ ID NO: 1815 - DNA, 325 bp, Homo sapiens
gacatccagatgacccagtctccttccaccctgtctgcatctgtaggggacagagtcaccatcacttgccgggccagtcagagtattagtagctggttggcctggtatcagcagaaaccagggaaagcccctaagctcctcatctataaggcgtctagtttagaaagtggggtcccatcaaggttcagcggcagtggatctgggacagaattcactctcaccatcagcagcctgcagcctgatgattttgcaacttattactgccaacagtataatagttattcttcgatcaccttcggccaagggacacgactggagattaaac

SEQ ID NO: 1816 - DNA, 331 bp, Homo sapiens
gagattgtgttgacgcagtctccaggcaccctgtctttgtctccaggggaaagagccaccctctcctgcagggccagtcagagtgttttcagcagttacttagcctggtaccagcagaaacctggccaggctcccaggctcctcatctatggtgcattcaacagggccactggcatcccagacaggttcagtggcagtgggtctgggacagacttcactctcaccatcagcagactggagcctgaagattttgcagtatattactgtcagtactatgatagctcacaattccaattcactttcggccctgggaccaaagtggatatcaaac

SEQ ID NO: 1817 - DNA, 316 bp, Homo sapiens
cagtctgccctgactcagcctgcctccgtgtctgggtctcctggacagtcgatcaccatctcctgcactggaaccagcagtgacgttggtggttataactatgtctcctggtaccaacaacacccaggcaaagcccccaaactcatgatttatgatgtcagtaagcggccctcaggggtttctaatcgcttctctggctccaagtctggcaacacggcctccctgaccatctctgggctccaggctgaggacgaggctgattattactgcagcagtacttgggtgttcggcggagggaccaagctgaccgtcctag

SEQ ID NO: 1818 - DNA, 319 bp, Homo sapiens
gacatccagatgacccagtctccatcctccctgtctgcgtctgtgggagacagagtcaccgtcacttgccgggcaagtcagagcattagcacctatttaaattggtatcagcagaaaccagggaaagcccccaaactcctgatctatgctgcatccagtttgcagagtggggtcccatcaaggttcagtggcagtggatctgggacagatttcactctcaccatcggcagtctgcaacctgaagattttgcaacttactactgtcaacagagttacacaacccacacttttggccaggggaccaagctggagatcaaac

SEQ ID NO: 1819 - DNA, 322 bp, Homo sapiens
gacatccagttgacccagtctccatccttcctgtctgcatctgtaggagacagagtcaccatcacttgccgggccagtcagggcattagcagttatttagcctggtatcagcaaaaaccagggaaagcccctaagctcctgatctatgctgcatccactttgcaaagtggggtcccatcaaggttcagcggcagtggatctgggacagaattcactctcacaatcagcagcctgcagcctgaagattttgcaacttattactgtcaacagcttaatagttacccgtggacgttcggccaagggaccaaggtggaaatcaaac

SEQ ID NO: 1820 - DNA, 334 bp, Homo sapiens
cagtctgtgctgactcagccaccctcagcgtctgggacccccgggcagagggtcaccatctcttgttctggaagcagctccaacatcggaagtaattatgtatactggtaccagcagctcccaggaacggcccccaaactcctcatctataggaataatcagcggccctcaggggtccctgaccgattctctggctccaagtctggcacctcagcctccctggccatcagtgggctccggtccgaggatgaggctgattattactgtgcagcatgggatgacagcctgagtgcctcttatgtcttcggaactgggaccaaggtcaccgtcctag

SEQ ID NO: 1821 - DNA, 319 bp, Homo sapiens; identical to SEQ ID NO: 1036

SEQ ID NO: 1822 - DNA, 322 bp, Homo sapiens
gaaattgtgttgacgcagtctccaggcaccctgtctttgtctccaggggaaagagccaccctctcctgcagggccagtcagagtgttagcagcagctacttagcctggtaccagcagaaacctggccaggctcccaggctcctcatctatggtgcatccagcagggccactggcatcccagacaggttcagtggcagtgggtctgggacagacttcactctcaccatcagcagactggagcctgaagattttgcagtgtattactgtcagcagtatggtagctcactcactttcggcggagggaccaaggtggagatcaaac

SEQ ID NO: 1823 - DNA, 364 bp, Homo sapiens
caggtgcggctggtggagtctgggggaggcgtggtccagcctgggaggtccctgagactctcctgtgcagtctctggatttaccttcagtagctatgctatgaactgggtccgccaggctccaggcaaggggctggagtgggtgacagttatatcatatgatggaagcaataaatactacgcagactccgtgaagggccgattcaccatctccagagacaattccaagaacacgctgtatctgcaaatgaacagcctgagacctgacgacacggctgtatattactgtgcgagagcgcgtagtgggagctactactccgctattgactactggggccagggaaccctggtcaccgtctcctcag

SEQ ID NO: 1824 - DNA, 364 bp, Homo sapiens; identical to SEQ ID NO: 1823

SEQ ID NO: 1825 - DNA, 364 bp, Homo sapiens; identical to SEQ ID NO: 1823

SEQ ID NO: 1826 - DNA, 364 bp, Homo sapiens
caggtgcagctggtggagtctgggggaggcgtggtccagcctgggaggtccctgagactctcctgtgcagtctctggatttaccttcagtagctatgctatgaactgggtccgccaggctccaggcaaggggctggagtgggtggcagttatatcatatgatggaagcaataaatactacgcagactccgtgaagggccgattcaccatctccagagacaattccaagaacacgctgtatctgcaaatgaacagcctgagacctgaggacacggctgtatattactgtgcgagagcgcgtagtgggagctactactccgctattgactactggggccagggaaccctggtcaccgtctcctcag

SEQ ID NO: 1827 - DNA, 364 bp, Homo sapiens; identical to SEQ ID NO: 1826

SEQ ID NO: 1828 - DNA, 364 bp, Homo sapiens
caggtgcagctggtggagtctgggggaggcgtggtccagcctgggaggtccctgagactctcctgtgcagtctctggatttaccttcagtagctatgctatgaactgggtccgccaggctccaggcaaggggctggagtgggtggcagttatatcatatgatggaagcaataaatactacgcagactccgtgaagggccgattcaccatctccagagacaattccaagaacacgctgtatctgcaagtgaacagcctgagacctgaggacacggctatatattactgtgcgagagcgcgtagtgggagctactactccgctattgactactggggccagggaaccctggtcaccgtctcctcag

SEQ ID NO: 1829 - DNA, 364 bp, Homo sapiens; identical to SEQ ID NO: 1823

SEQ ID NO: 1830 - DNA, 364 bp, Homo sapiens; identical to SEQ ID NO: 1826

SEQ ID NO: 1831 - DNA, 364 bp, Homo sapiens; identical to SEQ ID NO: 1826

SEQ ID NO: 1832 - DNA, 364 bp, Homo sapiens; identical to SEQ ID NO: 1826

SEQ ID NO: 1833 - DNA, 364 bp, Homo sapiens; identical to SEQ ID NO: 1826

SEQ ID NO: 1834 - DNA, 370 bp, Homo sapiens
gaggtgcagctgttggagtctgggggaagcttggtacagcctggggggtccctgagactctcctgtgcagcctctggattcacctttagcagctatgccatgagctgggtccgccaggctccagggaaggggctggagtgggtctcagctattagtggtagtggtggtagcacgtactacgcagactccgtgaagggccggttcaccatctccagagacaattccaagaacacgctgtatctgcaaatgaacagcctgagagccgaggacacggccgtatattactgtgcgaaagaggcttattttacggcttggctacatttcccgttcgacccctggggccagggaaccctggtcaccgtctcctcag

SEQ ID NO: 1835 - DNA, 370 bp, Homo sapiens; identical to SEQ ID NO: 1834

SEQ ID NO: 1836 - DNA, 370 bp, Homo sapiens; identical to SEQ ID NO: 1834

SEQ ID NO: 1837 - DNA, 370 bp, Homo sapiens; identical to SEQ ID NO: 1834

SEQ ID NO: 1838 - DNA, 384 bp, Homo sapiens
cacgtgcagttggtggagtctgggggaggcgtggtccagcctgggaggtccctgagaatctcctgtgcagcctctggattcaccttcagtagctatactatgcactgggtccgccaggctccaggcaaggggctggagtgggtggcagttatatcaaaagaggcagatatttcatatgatggaaataacaaatactacgcagactccgtgaagggccggttcaccatctccagagacaattccaagaacacgctgtatctgcaattgaacagcctgagaactgaggacacggctgtgtactattgtgcgagagatagggatgactacggtgacccatacggtatggacgtctggggccaagggaccacggtcaccgtctcctca

SEQ ID NO: 1839 - DNA, 382 bp, Homo sapiens
ggttcagttggtggagtctgggggaggcgtggtccagcctgggaggtccctgagactctcctgtgcagcctctggattcacctttagtagttatagtatgcactgggtccgccaggctccaggcaaggggctggagtgggtggcagttatatcaaaagaggctgttattgcatatgatggaagtaataaatactacgcagactccgtgaagggacggttcaccatctccagagacaattccaagagcacactgtatttgcaattgaacagtctgagaactgaggacacggctgtgtattactgtgcgagagatagggatgactacagtgacccatacggtatggacgtctggggccaagggaccacggtcaccgtctcctca

SEQ ID NO: 1840 - DNA, 384 bp, Homo sapiens
cacgtgcagttggtggagtctgggggaggcgtggtccagcctgggaggtccctgagactctcctgtgcagcctctggattcaccttcagtagttatactatgcactgggtccgccaggctccaggcaaggggctggagtgggtggcagttatatcatatgaggcagatatttcatatgatggaaataacaaatactacgcagactccgtgaagggccggttcaccatctccagagacaattccaagaagacgttgtatctgcaattgaacagcctgagaactgaagacacggctgtctattactgtgcgagagatagggatgactacggtgacccatacggtatggacgtctggggccaagggaccacggtcaccgtctcctca

SEQ ID NO: 1841 - DNA, 364 bp, Homo sapiens
gaggtgcagctggtggagtctgggggaggcttggtaaagcctggggggtcccttagactctcctgtgcagcctctgaattcactttcagtaacgtctggatgagctgggtccgccaggctccagggaaggggctggagtgggttggccgtattaaaagcaaaactgatggtgggacaacagactacgctgcacccgtgaaaggcagattcaccatctcaagagatgattcaaaaaacacgttgtatctgcaaatgaacagcctgaaaaccgaggacacaggcgtgtattactgtaccacagggcctacggttcggggagttagtgtctactggggccagggaaccctggtcaccgtctcctcag

SEQ ID NO: 1842 - DNA, 364 bp, Homo sapiens; identical to SEQ ID NO: 1841

SEQ ID NO: 1843 - DNA, 364 bp, Homo sapiens; identical to SEQ ID NO: 1841

SEQ ID NO: 1844 - DNA, 355 bp, Homo sapiens
caggtgcagctgatgcagtctggggctgaggtgaagaagcctggggcctcagtgaaggtctcctgcaaggcttctggagactccttcaccgactactatgttcactgggtgcgacaggcccctggacaagggcttgagtggatgggatggatcagcccttacagtggtggcacaaactatgcaccgaagtttcggggcagggtcaccatgaccagggacacgtccatcaccacagcccacatggagctgggcaggctgagatctgacgacacggccgtgtatttctgtgcgaggtccgtagggtatgatgcttttgatgtctggggcccagggacaatggtcaccgtctcttcag

SEQ ID NO: 1845 - DNA, 355 bp, Homo sapiens; identical to SEQ ID NO: 1844

SEQ ID NO: 1846 - DNA, 355 bp, Homo sapiens; identical to SEQ ID NO: 1844

SEQ ID NO: 1847 - DNA, 376 bp, Homo sapiens
gaggtgcagttggtggagtctgggggaggcctggtcaagcctggggggtccctgagactctcctgtgcagcctctggattcaccttcagtagctatactatgaactgggtccgccaggctccagggaaggggctggagtgggtctcatccattagtggcgctcctaattacatatactacgcagactcagtgaagggccgattcaccatctccagagacaacgccaagaactcactgtctctgcaaatgaacagcctgagagccgaggacacggctgtctattactgtgcgagagatcttatggattacgatattttgactggttattatccggcggggtactggggccagggaaccctggtcaccgtctcctcag

SEQ ID NO: 1848 - DNA, 376 bp, Homo sapiens; identical to SEQ ID NO: 1847

SEQ ID NO: 1849 - DNA, 376 bp, Homo sapiens; identical to SEQ ID NO: 1847

SEQ ID NO: 1850 - DNA, 415 bp, Homo sapiens
ctgcaaccggtgtacattcccaggtgcagctggtgcagtctggggctgaggtgaagaagcctggggcctcagtgaaggtctcctgcaaggcttctggatacaccttcaccggctactatatgcactgggtgcgacaggcccctggacaagggcttgagtggatgggatggatcaacctaaacagcggtggcacaaattatgcacagaagtttcagggcagggtcaccatgaccagggacacgtccatcagcacagcctacatggagctcagcaggctgagatctgacgacacggccgtctattactgtgcgagaggacccccccccccggctattactatgatagtagtgactacggtatggacgtcatggggccaagggaccacggtcaccgtctcctcagcgtcgacttcgca

SEQ ID NO: 1851 - DNA, 380 bp, Homo sapiens
caggtgcagctggtgcagtctggggctgaggtgaagaagcctggggcctcagtgaaggtctcctgcaaggcttctggatacaccttcaccggctactatatgcactgggtgcgacaggcccctggacaagggcttgagtggatgggatggatcaacctaaacagcggtggcacaaattatgcacagaagtttcagggcagggtcaccatgaccagggacacgtccatcagcacagcctacatggagctcagcaggctgagatctgacgacacggccgtctattactgtgcgagaggacccccccccccggctattactatgatagtagtgactacggtatggacgtctggggccaagggaccacggtcaccgtctcctca

SEQ ID NO: 1852 - DNA, 380 bp, Homo sapiens; identical to SEQ ID NO: 1851

SEQ ID NO: 1853 - DNA, 364 bp, Homo sapiens
gaagtgcagctggtgcagtccggagcagaggtgaaaaagcccggggagtctctgaggatctcctgtaagggttctggatacagctttaccagctactggatcagctgggtgcgccagatgcccgggaaaggcctggagtggatggggaggattgatcctagtgactcttataccaactacagcccgtccttccaaggccacgtcaccatctcagctgacaagtccatcagcactgcctacctgcagtggagcagcctgaaggcctcggacaccgccatgtattactgtgcgagactagaaactacggtgactactgactggttcgacccctggggccagggaaccctggtcaccgtctcctcag

SEQ ID NO: 1854 - DNA, 364 bp, Homo sapiens; identical to SEQ ID NO: 1853

SEQ ID NO: 1855 - DNA, 364 bp, Homo sapiens; identical to SEQ ID NO: 1853

SEQ ID NO: 1856 - DNA, 374 bp, Homo sapiens
ggtgcagctggttgagtctgggggaggcttggcacagccgggccggtccctgagactctcctgtagatgttctggattcaggtttggagattatgccgtaaactgggttcgccagttcccagggaaggggccggaatggataggattcattagaaccaagacttttggtgcggcaacacaatacgccgcgtctgtgaaaggcagatttaccatctcaagggatgactcgcaaagtgtcgcctatctgcaaatgaaccgcctgatcaccgacgacacagccgtctattactgtactataggtaattggcatggttcgggaaataacattatgcacgactattggggccagggaaccctggtcagcgtctcctcag

SEQ ID NO: 1857 - DNA, 374 bp, Homo sapiens
ggtgcagctggttgagtctgggggaggcttggcacagccgggccggtccctgagactctcctgcagatgttctggattcaggtttggagattatgccgtaaactgggttcgccaggtcccagggaaggggccggaatggatagggtttatcagaacgaagacttttggtgcggcaacacaatacgccgcgtctgtggaaggcagatttaccatctcaagggatgactcgcaaagtgtcgcctatctgcaaatgaaccgcctgatcaccgacgacacagccgtctattactgtactataggtaattggcatggttcgggaaataacattatgcacgactattggggccagggaaccctggtcagcgtctcctcag

SEQ ID NO: 1858 - DNA, 367 bp, Homo sapiens
caggtgcaactggtgcagtctggggctgaggtgaagaaacctggggcctcagtgaaggtctcctgcaaggcttctggatacaccttcaccggcttctatatacactgggtgcgacaggcccctggacaagggcttgagtggatgggatggatcaatcctattagtggtggcacaaactatgcacagaagtttcagggcagggtcaccgtgacgagcgacacgtccatcaccacagcctacatggaactgagcaggctgagatctgacgacacggccgtgttttactgtgcgagagacagatggttcgggaagttggagggcagttttgacatctggggccaagggacaatggtcaccgtctcttcag

SEQ ID NO: 1859 - DNA, 367 bp, Homo sapiens
caggtgcagctggtgcagtctggggctgaggtgaagaagcctggggcctcagtgaaggtgtcctgcaaggcttctggatacatcttcaccggctactatatacactgggtgcgacaggcccctggacaagggcttgagtggatgggatggatcaatcctattagtggtggcacaaattatgcacagaagtttcagggcagggtcaccgcgaccagggacacgtccatcaccacagcctacatggaactgaccagtctgacatctgacgacacggccgtgttttactgtgcgagagacagatggttcgggaagttggagggcagttttgatgtctggggccaagggacaatggtcaccgtctcttcag

SEQ ID NO: 1860 - DNA, 364 bp, Homo sapiens
caggtgcagctacagcagtggggcgcaggactgttgaagccttcggagaccctgtccctcacctgcgctgtctatgatgagtccttcagtgattactactggacctggatccgccagcccccagggaaggggctggagtggattggggaaatcaatcatagtggaagcaccaactacaacccgtccctcaagagtcgagtcaccatatcagtagacacgtccaagaaccagttctccctgaggctgagttctgtgaccgccgcggacacggctgtatattactgtgcgagagatactgtggtggtggtaggtgctcatgcttttgatatctggggccaagggacaatggtcaccgtctcttcag

SEQ ID NO: 1861 - DNA, 364 bp, Homo sapiens; identical to SEQ ID NO: 1860

SEQ ID NO: 1862 - DNA, 385 bp, Homo sapiens
cagctgcagctgcaggagtcgggcccaggactggtgaagccttcggagaccctgtccctcacctgcattgtctctggtggttccatcagcagtagtagttactactggggctggatccgccagcccccagggaaggggctggagtggattgggactatctataatagtgggagcacccactacaacccgtccctcaggagtcgggtcaccatatccgtagacacgtccaagagccacttctccctgaagctgagctctgtgaccgccgcagacacggctgtatattactgtgcgaggccccaggtcttgtattactatggttcggggagttatagtcactggttcgacccctggggccagggaaccctggtcaccgtctcctcag

SEQ ID NO: 1863 - DNA, 385 bp, Homo sapiens
cagctgcagctgcaggagtcgggcccaggactggtgaagccttcggagaccctgtccctcacctgctctgtctctggtggctccatcagcagtagtagttactactggggctggatccgccagcccccagggagggggctggagtggattgggactttctattttaatgggagcacctactacaacccgtccctcaagagtcgagtcaccatatccgtagacacgtccaagaaccagttctccctgaagctgagctctgtgaccgccgcagacacggctgtgtattactgtgcgaggccccaggtcttgtattactatggttcggggagttatagtcactggttcgacccctggggccagggaaccctggtcaccgtctcctcag

SEQ ID NO: 1864 - DNA, 358 bp, Homo sapiens
gaggtgcagctggtggagtctgggggaggcttggtacagcctggagggtccctgagactctcctgtgcagcctctggattcaccttcagtagttatgaaatgaactgggtccgccaggctccagggaaggggctggagtgggtttcatacattagtagtagtggtagtaccatatactacgcagactctgtgaagggccgattcaccatctccagagacaacgccaagaactcactgtatctgcaagtgaacagcttgagagccgaggacacggctgtttattactgtgcgagggggagtggctggtatgtcggttttgactactggggccagggaaccctggtcaccgtctcctcag

SEQ ID NO: 1865 - DNA, 358 bp, Homo sapiens; identical to SEQ ID NO: 1864

SEQ ID NO: 1866 - DNA, 387 bp, Homo sapiens
caggtgcagctggtgcagtctggggctgaggtgaagaagcctggggcctcagtgaaggtctcctgcaaggcttctggatacaccttcaccggctactatatacactgggtgcgacaggcccctggacaagggcttgagtggatgggatggatcaaccctaacagtggtggcacaaactatgcacagaagtttcagggcagggtcaccatgaccagggacacgtccatcagcacagcctacatggaactaagcaggctgagatctgacgacacggccgtgtatttctgtgcgagagtaacaaccataccccaatatgactacggtgactactactactactacggtatggacgtctggggccaggggaccacggtcaccgtctcctca

SEQ ID NO: 1867 - DNA, 387 bp, Homo sapiens
caggtgcagctggtgcagtctggggctgaggtgaagaagcctggggcctcagtgaaggtctcctgcaaggcttctggatacaccttcaccggctactttatgcactgggtgcgacaggcccctgggcaagggcttgagtggatgggatggatcaaccctaacagtggtggcacaaactatgcacagaactttcagggcagggtcaccatgaccagggacacgtccatcagcacagcctacatggagctgagcaggctgagatctgacgacacggccgtgtattattgtgcgagagtaacaaccataccccaatacgactacggtgactactactactactacggtatggacgtctggggccaagggaccacggtcaccgtctcctca

SEQ ID NO: 1868 - DNA, 340 bp, Homo sapiens
caggtgcagctgcaggagtcgggcccaggactggtgaagccttcggagaccctgtccctcacctgcactgtctctggtggctccatcagtagttactactggagctggatccggcagcccccagggaagggactggactggattgggtatatctattacagtgggagcaccaactacaacccctccctcaagagtcgagtcaccatatcagtagacacgtccaagaaccagttctccctgaagctgagctctgtgaccgctgcggacacggccgtgtattactgtgcgagagacttaggacaggactggggccagggaaccctggtcaccgtctcctcag

SEQ ID NO: 1869 - DNA, 340 bp, Homo sapiens
caggtgcagctgcaggagtcgggcccaggactggtgaagccttcggagaccctgtccctcacctgcaaagtctctggtggctccatcagtagttactactggagctggatccggcagcccccagggaagggactggagtggattgggtatatctattacagtgggagcaccaactacaacccctccctcaagagtcgagtcaccatatcagtagacacgtccaagaaccagttctccctgaagctgagctctgtgaccgctgcggacacggccgtgtattactgtgcgagagatctaggtcaagactggggccagggaaccctggtcaccgtctcctcag

SEQ ID NO: 1870 - DNA, 379 bp, Homo sapiens
caggtgcagctgcaggagtcgggcccaggactggtgaagccttcacagaccctgtccctcacctgcactgtctctggtggctccatcagcagtggtagttcctactggagctggatccggcagcccgccgggaagggactggagtggattgggcgtatctataccagtgggagcaccaactacaacccctccctcaagagtcgagtcaccatatcagtagacacgtccaagaaccagttctccctgaagctgagctctgtgaccgccgcagacacggccgtgtattactgtgcgagagatatattcggttcggggagcccaccttctggggtcgcctttgactactggggccagggaaccctggtcaccgtctcctcag

SEQ ID NO: 1871 - DNA, 379 bp, Homo sapiens
caggtgcagctgcaggagtcgggcccagggctggtgaagccttcacagaccctgtccctcacctgcactgtctctggtggctccatcagcagtcgtagttactactggagctggatccggcagcccgccgggaagggactggagtggattgggcgtatctataccagtgggggcaccaactacaacccctccctcaaaagtcgagtcacgatatcgatagacacgtcgaagaaccagttctccctgacgctgagctctgtgaccgccgcagacacggccgtgtattactgtgcgagagatatattcggttcggggagcccaccttctggggtcgcctttgactactggggccagggaatcctggtcaccgtctcctcag

SEQ ID NO: 1872 - DNA, 345 bp, Homo sapiens
gaggtgcagctggtggagtctggaggaggcttgatccagcctggggggttcctgagactctcctgtgcagcctctgggctcaccgtcagtagcaactacatgaactgggtccgccaggctccagggaaggggctggagtgggtctcagttatttatagcggtgggagcacatactacgcggactccgtgaagggccgcttcaccatctccagagacaattccaagaacacgctgtatcttcaaatgaacagtctgagagccgaggacacggccgtgtattactgtgcgagagagtcctacggtatggacgtctggggccaagggaccacggtcaccgtctcctca

SEQ ID NO: 1873 - DNA, 345 bp, Homo sapiens
gaggtgcagctggtggagtctggaggaggcttggcccagccgggggggtccctgagactctcctgtgcagcctctggggtcaccgtcagtagcaactacatgaactgggtccgccaggctccagggaaggggctggagtgggtctcagttatttatagcggtggcagtacatactacgcagagtccgtgaagggccgattcaccatctccagacacaattcgaagaacacgctgtatcttcaaatgagcagcctgagagctgaggacacggccgtgtattactgtgcgagagaaggttacggtatggacgtctggggccaagggaccacggtcaccgtctcctca

SEQ ID NO: 1874 - DNA, 391 bp, Homo sapiens
caggtgcagctggtgcagtctggggctgaggtgaagaagcctgggtcctcggtgaaggtctcctgcaaggcttctggaggcaccttcagcaactatgctgtcagctgggtgcgacaggcccctggacaagggcttgagtggatgggagggatcatctctatctttgctacagcaaactacgcacagaagttccagggcagagtcacgattaccgcggacgaatccacgagcacagcctacatggagctgagcagcctgagatctgaggacacggccgtgtattactgtgctagagtcaaggagtgggggtcttattactctgattcggggagccacggcaaaaactactttgactactggggccagggaaccctggtcaccgtctcctcag

SEQ ID NO: 1875 - DNA, 391 bp, Homo sapiens
caggtccagctggtgcaatctggggctgaggtgaagaagcctgggtcctcggtgaaggtctcctgcaaggcttctggaggcaccttcagcaactatactatcagctgggtgcgacaggcccctggacaagggcttgggtggatgggaaggatcatccctatcgttggtatcacaaactacgcacagaagttccagggcagagtcacgtttaccgcggacgaatccacgagcacagcctacatggagctgagcagcctgagatctgaggacacggccgtgtattactgtgcgagagtcaaggagtgggggtcttattactatgattcggggagccacggcaaaaactattttgactactggggccagggaaccctggtcaccgtctcctcag

SEQ ID NO: 1876 - DNA, 384 bp, Homo sapiens
caggtgcagctggtgcagtctggggctgaggtgaagaagcctggggcctcagtgaaggtctcctgcaaggcttctggatacaccttcaccggctactctatgcactgggtgcgacaggcccctggacaagggcttgagtggatgggatggatcaaccctaacagtggtggcacaaactatgcacagaagtttcagggcagggtcaccatgaccagggacacgtccatcagcacaacctacatggagctgagcaggctgagatctgacgacacggccgtgtattactgtgcgagagacggctatagtagcagctttatcccgggaccaagaaactactacggtatggacgtctggggccaagggaccacggtcaccgtctcctca

SEQ ID NO: 1877 - DNA, 384 bp, Homo sapiens
caggtgcagctggtgcagtctggggctgaagtgaagaagcctggggcctcagtgaaggtctcctgcaaggcttctggatacaccttcaccggctactctatgcactgggtgcgacaggcccctggacaagggcttgagtggatgggatggatcaaccctaacagtggtggcacaaactatgcacagaagtttcagggcagggtcaccatgaccagggacacgtccatcaccacaacctacatggagctgagcaggctgagatctgacgacacggccgtatattactgtgcgagagacggctatagcagcagctttatcccgggaccaagaaactactacggtatggacgtctggggccaagggaccacggtcaccgtctcctca

SEQ ID NO: 1878 - DNA, 399 bp, Homo sapiens
caggttcagctggtgcagtctggagctgaggtgaagaagcctggggcctcagtgaaggtctcctgcaaggcttctggttacacctttaccagctacggtatcagctgggtgcgacaggcccctggacaagggcttgagtggatgggatggatcagcgcttacaatggtaacacaaactatgcacagaagctccagggcagagtcaccatgaccacagacacttccacgagcacagcctacatggagctgaggagcctgagatctgacgacacggccgtgtattactgtgcgagaccccgcgggcgtttgattacgtttgggggagttatcgttaccacccttgactactactacggtatggacgtctggggccaagggaccacggtcaccgtctcctca

SEQ ID NO: 1879 - DNA, 399 bp, Homo sapiens
caggttcacctggtgcagtctggagctgaggtgaagaagcctggggcctcagtgaaggtctcctgcaaggcttctggttacacctttaccagctacggtatcaactgggtacgacaggcccctggacaagggcttgagtggatgggatggatcagcgcttacaatggtaacacaaactatgcacagaagctccagggcagagtcaccatgaccacagacacttccacgagcacagcctacatggaactgaggagcctgagatctgacgacacggccgtgtattactgtgcgagaccccgcgggcgtttgattacgtttgggggacttatcgttaccaccctggactattactacggtatgggcgtctggggccaagggaccacggtcaccgtctcctca

SEQ ID NO: 1880 - DNA, 359 bp, Homo sapiens
caggtgcaactggtgcagtctgggcctgaggtgaagaagcctggggcctcagtgagggtctcctgcaagacttctggacacaccttcaccgactactggatacagtgggtgcgacaggcccctggacaagggctcgagtggatgggctggatcgaacttagtactggtggcacaaactatgccccgaagtttcagggcagggtcgccatgtccagcgacacgtccatcagaacagcctacatggacctatggagcctgacatctgacgacacggccctctattactgtgcgacagacaaggccgacaccagctggtgggagttcgacccctggggccagggaaccctggtcaccgtctc

SEQ ID NO: 1881 - DNA, 359 bp, Homo sapiens; identical to SEQ ID NO: 1880

SEQ ID NO: 1882 - DNA, 385 bp, Homo sapiens
gaggtgcagctggtgcagtctggagcagaggtgaaaaagccgggggagtctctgaagatctcctgtaagggttctggatacagtgttaccgactactggatcggctgggtgcgccagaagcccgggaaaggcctggagtggatgggaatcatctatcctggtgactctggtaccagatacagcccgtccttccaaggccaggtcaccttctcagccgacaagtccatcagcaccgcctacctgcagtggagtcgcctgaaggcctcggacaccgccatgtattactgtgcgagacgcggaagcgttccttatagtggtggttattacctcccggaccactactttgactactggggccagggaaccctggtcaccgtctcctcag

SEQ ID NO: 1883 - DNA, 357 bp, Homo sapiens
caggtgcagctggtggagtctgggggaggcgtggtccagcctgggaggtccctgagactctcctgtgcagcgtctggattcaccttcagtagctatggcatgcactgggtccgccaggctccaggcaaggggctggagtgggtggcagttatatggtatgatggaagtaataaatactatgcagactccgtgaagggccgattcaccatctccagagacaattccaagaacacgctgtatctgcaaatgaacagcctgagagccgaggacacggctgtgtattactgtgcgagagagttccaaatatactacggtatggacgtctggggccaagggaccacggtcaccgtctcctca

SEQ ID NO: 1884 - DNA, 367 bp, Homo sapiens
caggtgcagctgcaggagtcgggcccaggactggtgaagccttcggagaccctgtccctcacctgcactgtctctggtggctccatcagtagttactactggagctggatccggcagcccccagggaagggactggagtggattgggtatatctattacagtgggagtatcaactacaacccctcccttaagagtcgagtcaccatatcagtcgacacgtccaagaaccagttctccctgaagctgagctctgtgaccgctgcggacacggccgtgtattactgtgcgagagatgccggcgacagctatggttataggtggtactttgactactggggccagggaaccctggtcaccgtctcctcag

SEQ ID NO: 1885 - DNA, 373 bp, Homo sapiens
cagatcaccttgaaggagtctggtcctacgctggtgaaacccacacagaccctcacgctgacctgcaccttctctgggttctcactcagcactagtggagtgggtgtgggctggatccgtcagcccccaggaaaggccctggagtggcttgcactcatttattgggatgatgataagcgctacagcccatctctgaagagcaggctcaccatcaccaaggacacctccaaaaaccaggtggtccttacaatgaccaacatggaccctgtggacacagccacatattactgtgcacacctctccgggacagcagctggtactttcctcacctttgactactggggccagggaaccctggtcaccgtctcctcag

SEQ ID NO: 1886 - DNA, 376 bp, Homo sapiens
gaggtgcagttggtggagtctgggggaggcttggtacagccagggcggtccctgagactctcctgtacagcttctggattcacctttggtgactttgctatgagctgggtccgccaggctcccgggaaggggctggagtgggtaggtttcattagaagcaaagcttatggtggggcaacagaatacgccgcgtctgtgaaaggcagattcaccatctcaagagatgattccaaaaccatcgcctatctgcaaatgaacagcctgaaaaccgaggacacagccgtgtattactgtactagagacagcgaattgatggctacgattgatcctagctttgactactggggccagggaaccctggtcaccgtctcctcag

SEQ ID NO: 1887 - DNA, 367 bp, Homo sapiens
caggtgcagctacagcagtggggcgcaggactgttgaagccttcggagaccctgtccctcacctgcgctgtctatggtgggtccttcagtggttactactggagctggatccgccagcccccagggaaggggctggagtggattggggaaatcaatcatagtggaagcaccaactacaacccgtccctcaagagtcgagtcaccatatcagtagacacgtccaagaaccagttctccctgaagctgagctctgtgaccgccgcggacacggctgtgtattactgtgcgagagaagcggttccccgggagtatagcagcagctggtacgcctactggggccagggaaccctggtcaccgtctcctcag

SEQ ID NO: 1888 - DNA, 370 bp, Homo sapiens
gaggtgcagctggtggagtctgggggaggtgtggtacggcctggggggtccctgagactctcctgtgcagcctctggattcacctttgatgattatggcatgagctgggtccgccaagctccagggaaggggctggagtgggtctctggtattaattggaatggtggtagcacaggttatgcagactctgtgaagggccgattcaccatctccagagacaacgccaagaactccctgtatctgcaaatgaacagtctgagagccgaggacacggccttgtatcactgtgctcgcggcgggttactatggttcggggaagggtcctggttcgacccctggggccagggaaccctggtcaccgtctcctcag

SEQ ID NO: 1889 - DNA, 373 bp, Homo sapiens
cagctgcagctgcaggagtcgggcccaggactggtgaagccttcggagaccctgtccctcacctgcactgtctctggtggctccatcagcagtagtagttactactggggctggatccgccagcccccagggaaggggctggagtggattgggagtatctattatagtgggagcacctactacaacccgtccctcaagagtcgagtcaccatatccgtagacacgtccaagaaccagttctccctgaagctgagctctgtgaccgccgcagacacggctgtgtattactgtgcgagactccccccgggtatagcagtggctggctactactttgactactggggccagggaaccctggtcaccgtctcctcag

SEQ ID NO: 1890 - DNA, 369 bp, Homo sapiens
caaatgcagctggtgcagtctgggcctgaggtgaagaagcctgggacctcagtgaaggtctcctgcaaggcttctggattcacctttactagctctgctgtgcagtgggtgcgacaggctcgtggacaacgccttgagtggataggatggatcgtcgttggcagtggtaacacaaactacgcacagaagttccaggaaagagtcaccattaccagggacatgtccacaagcacagcctacatggagctgagcagcctgagatccgaggacacggccgtgtattactgtgcgggactatggttcgggggaaatgggggctcggggggtatggacgtctggggccaagggaccacggtcaccgtctcctca

SEQ ID NO: 1891 - DNA, 373 bp, Homo sapiens
caggtgcagctgcaggagtcgggcccaggactggtgaagccttcacagaccctgtccctcacctgcactgtctctggtggctccatcagcagtggtggttactactggagctggatccgccagcacccagggaagggcctggagtggattgggtacatctattacagtgggagcacctactacaacccgtccctcaagagtcgagttaccatatcagtagacacgtctaagaaccagttctccctgaagctgagctctgtgactgccgcggacacggccgtgtattactgtgcgagagctccccctgattactatgatagtagtggttatttggactactggggccagggaaccctggtcaccgtctcctcag

SEQ ID NO: 1892 - DNA, 367 bp, Homo sapiens
gaggtgcagctggtggagtctggaggaggcttgatccagcctggggggtccctgagactctcgtgtgcagcctctgggttcaccgtcagtagcaactacatgagctgggtccgccaggctccagggaaggggctggagtgggtctcagttatttatagcggtggtagcacatactacgcagactccgtgaagggccgattcaccatctccagagacaattccaagaacacgctgtatcttcaaatgaacagcctgagagccgaggacacggccgtgtattactgtgcgagacaggtccctatggttcggggagttataagtgggtttgactactggggccagggaaccctggtcaccgtctcctcag

SEQ ID NO: 1893 - DNA, 357 bp, Homo sapiens
caggtgcagctggtggagtctgggggaggcgtggtccagcctgggaggtccctgagactctcctgtgcagcctctggattcaccttcagtagctatgctatgcactgggtccgccaggctccaggcaaggggctggagtgggtggcagttatatcatatgatggaagcaataaatactacgcagactccgtgaagggccgattcaccatctccagagacaattccaagaacacgctgtatctgcaaatgaacagcctgagagctgaggacacggctgtgtattactgtgttatgggtagtggttattgggacggtatggacgtctggggccaagggaccacggtcaccgtctcctca

SEQ ID NO: 1894 - DNA, 367 bp, Homo sapiens
caggtgcagctacagcagtggggcgcaggactgttgaagccttcggagaccctgtccctcacctgcgctgtctatggtgggtccttcagtggttactactggagctggatccgccagcccccagggaaggggctggagtggattggggaaatcaatcatagtggaagcaccaactacaacccgtccctcaagagtcgagtcaccatatcagtagacacgtccaagaaccagttctccctgaagctgagctctgtgaccgccgcggacacggctgtgtattactgtgcgagaggccaatctgactacggtgggtccaggagcgcttttgatatctggggccaagggacaatggtcaccgtctcttcag

SEQ ID NO: 1895 - DNA, 369 bp, Homo sapiens
gaagtgcagctggtggagtctgggggaggcttggtacagcctggcaggtccctgagactctcctgtgcagcctctggattcacctttgatgattatgccatgcactgggtccggcaagctccagggaagggcctggagtgggtctcaggtattagttggaatagtggtagcataggctatgcggactctgtgaagggccgattcaccatctccagagacaacgccaagaactccctgtatctgcaaatgaacagtctgagagctgaggacacggccttgtattactgtgcaaaagactccggggcgacttactactactactacggtatggacgtctggggccaagggaccacggtcaccgtctcctca

SEQ ID NO: 1896 - DNA, 367 bp, Homo sapiens
caggtgcagctacagcagtggggcgcaggactgttgaagccttcggagaccctgtccctcacctgcgctgtctatggtgggtccttcagtggttactactggagctggatccgccagcccccagggaaggggctggagtggattggggaaatcaatcatagtggaagcaccaactacaacccgtccctcaagagtcgagtcaccatatcagtagacacgtccaagaaccagttctccctgaagctgagctctgtgaccgccgcggacacggctgtgtattactgtgcgagagtatcgtatagcagcagctggatctactggtacttcgatctctggggccgtggcaccctggtcactgtctcctcag

SEQ ID NO: 1897 - DNA, 367 bp, Homo sapiens
gaagtgcagctggtggagtctgggggaggcttggtacagcctggcaggtccctgagactctcctgtgcagcctctggattcacctttgatgattatgccatgcactgggtccggcaagctccagggaagggcctggagtgggtctcaggtattagttggaatagtggtagcataggctatgcggactctgtgaagggccgattcaccatctccagagacaacgccaagaactccctgtatctgcaaatgaacagtctgagagctgaggacacggccttgtattactgtgcaaaagataggttcggggaaatatccgtgggctggttcgacccctggggccagggaaccctggtcaccgtctcctcag

SEQ ID NO: 1898 - DNA, 369 bp, Homo sapiens
caggtgcagctggtggagtctgggggaggcgtggtccagcctgggaggtccctgagactctcctgtgcagcctctggattcaccttcagtagctatgctatgcactgggtccgccaggctccaggcaaggggctggagtgggtggcagttatatcatatgatggaagtaataaatactacgcagactccgtgaagggccgattcaccatctccagagacaattccaagaacacgctgtatctgcaaatgaacagcctgagagctgaggacacggctgtgtattactgtgcgagaaattactatggttcggggagttattatagcactatggacgtctggggccaagggaccacggtcaccgtctcctca

SEQ ID NO: 1899 - DNA, 369 bp, Homo sapiens
caggtgcagctggtggagtctgggggaggcgtggtccagcctgggaggtccctgagactctcctgtgcagcctctggattcaccttcagtagctatgctatgcactgggtccgccaggctccaggcaaggggctggagtgggtggcagttatatcatatgatggaagtaataaatactacgcagactccgtgaagggccgattcaccatctccagagacaattccaagaacacgctgtatctgcaaatgaacagcctgagagctgaggacacggctgtgtattactgtgcgagagactcgttatcctatagcagcagctcgagaggtatggacgtctggggccaagggaccacggtcaccgtctcctca

SEQ ID NO: 1900 - DNA, 367 bp, Homo sapiens
gaggtgcaggtgttggagtctgggggaggcttggtacagcctggggggtccctgagactctcctgtgcagcctctggattcacctttagcagctatgccatgaactgggtccgccaggctccagggaaggggctggagtgggtctcaggtattagtggtagtggtggtagcacagactacgcagactccgtgaagggccggttcaccatctccagagacaactccaagaacacgctgaatctgcaaatgaacagcctgagagccgaggacacggccatatattactgtgcgaaagaatgggcaagtcgatacagcaacagcaatgtcgactactggggccagggaaccctggtcaccgtctcctcag

SEQ ID NO: 1901 - DNA, 367 bp, Homo sapiens
gaagtgcagctggtgcagtccggagcagaggtgaaaaagcccggggagtctctgaggatctcctgtaagggttctggatacagttttaccagctactggatcagctgggtgcgccagatgcccgggaaaggcctggagtggatggggacgattgatcctagtgactcttataccaactacagcccgtccttccaaggccacgtcaccatctcagctgacaagtccatcagcactgcctacctgcagtggagcagcctgaaggcctcggacaccgccatgtattactgtgcgaggcaatttaagagcagtaacttgctaaactggttcgacccctggggccagggaaccctggtcaccgtctcctcag

SEQ ID NO: 1902 - DNA, 370 bp, Homo sapiens
caggtgcagctggtgcagtctggggctgaggtgaagaagcctggggcctcagtgaaggtctcctgcaaggcttctggatacaccttcaccggctactttatgcactgggtgcgacaggcccctggacacgggcttgagtggatgggatggatcaaccctaacagtggtggcacaaaatatgcacagaagtttcagggcagggtcaccatgaccacagacacgtccatcaccacagcctacgtggagctgagcaggctgagatctgacgacacggccgtgtattactgtgcgagagacccgcctctatggttcggggagttattcggccttgactactggggccagggaaccctggtcaccgtctcctcag

SEQ ID NO: 1903 - DNA, 370 bp, Homo sapiens
caggtgcagctggtgcagtctggggctgaggtgaagaagcctggggcctcagtgaaggtctcctgcaaggcttctggatacaccttcaccggctactatttgcactgggtgcgacaggcccctggacaagggcttgagtggatgggatggatcaaccctaacagtggtggcacaaactatgcacagaagtttcagggcagggtcaccatgaccagggacacgtccatcagcacagcctacatggagctgagcaggctgagatctgacgacacggccgtgtattactgtgcgaggggtagatattactatgatagtagtggttcccaccttgactactggggccagggaaccctggtcaccgtctcctcag

SEQ ID NO: 1904 - DNA, 357 bp, Homo sapiens
gaagtgcagctggtggagtctgggggaggcttggtacagcctggcaggtccctgagactctcctgtgcagcctctggattcacctttgatgattatgccatgcactgggtccggcaagctccagggaagggcctggagtgggtctcaggtattagttggaatagtggtagcataggctatgcggactctgtgaagggccgattcaccatctccagagacaacgccaagaactccctgtatctgcaaatgaacagtctgagagctgaggacacggccttgtattactgtgcaaaaggggggcggttcgagtacggtatggacgtctggggccaagggaccacggtcaccgtctcctca

SEQ ID NO: 1905 - DNA, 369 bp, Homo sapiens
caggtgcagctggtggagtctgggggaggcgtggtccagcctgggaggtccctgagactctcctgtgcagcgtctggattcaccttcagtagctatggcatgcactgggtccgccaggctccaggcaaggggctggagtgggtggcagttatatggtatgatggaagtaataaatactatgcagactccgtgaagggccgattcaccatctccagagacaattccaagaacacgctgtatctgcaaatgaacagcctgagagccgaggacacggctgtgtattactgtgcgagatcgggaggttcgggggggatctactactacggtatggacgtctggggccaagggaccacggtcaccgtctcctca

SEQ ID NO: 1906 - DNA, 367 bp, Homo sapiens
gaagtgcagctggtggagtctgggggaggcgtggtacagcctggggggtccctgagactctcctgtgcagcctctggattcacctttgatgattatgccatgcactgggtccgtcaagctccagggaagggtctggagtgggtctctcttattagtggggatggtggtagcacatactatgcagactctgtgaagggccgattcaccatctccagagacaacagcaaaaactccctgtatctgcaaatgaacagtctgagaactgaggacaccgccttgtattactgtgcaaaaggcccccactacggtgacttacacaccacagctgactactggggccagggaaccctggtcaccgtctcctcag

SEQ ID NO: 1907 - DNA, 376 bp, Homo sapiens
caggtacagctgcagcagtcaggtccaggactggtgaagccctcgcagaccctctcactcacctgtgccatctccggggacagtgtctctagcaacagtgctgcttggaactggatcaggcagtccccatcgagaggccttgagtggctgggaaggacatactacaggtccaagtggtataatgattatgcagtatctgtgaaaagtcgaataaccatcaacccagacacatccaagaaccagttctccctgcagctgaactctgtgactcccgaggacacggctgtgtattactgtgcaaggggaatccatatagcagcagctggagcaccgtatgactactggggccagggaaccctggtcaccgtctcctcag

SEQ ID NO: 1908 - DNA, 369 bp, Homo sapiens
gaggtgcagctggtggagtctgggggaggcttggtacagcctggagggtccctgagactctcctgtgcagcctctggattcaccttcagtagttatgaaatgaactgggtccgccaggctccagggaaggggctggagtgggtttcatacattagtagtagtggtagtaccatatactacgcagactctgtgaagggccgattcaccatctccagagacaacgccaagaactcactgtatctgcaaatgaacagcctgagagccgaggacacggctgtttattactgtgcgagagtcaacggtaggagctcctactactactacggtatggacgtctggggccaagggaccacggtcaccgtctcctca

SEQ ID NO: 1909 - DNA, 367 bp, Homo sapiens
caggtgcagctggtggagtctgggggaggcgtggtccagcctgggaggtccctgagactctcctgtgcagcctctggattcaccttcagtagctatgccatgcactgggtccgccaggctccaggcaaggggctggagtgggtggcacttatatcatatgatggaagtaataaatactatgcagactccgtgaagggccgattcaccatctccagagacaattccaagaacacgctgtatctgcaaatgaacagcctgagagctgaggacacggctgtgtattactgtgcgaaagattcaagtttttggggttcggggagttactttgactactggggccagggaaccctggtcaccgtctcctcag

SEQ ID NO: 1910 - DNA, 367 bp, Homo sapiens
caggtgcagctggtggagtctgggggaggcgtggtccagcctgggaggtccctgagactctcctgtgcagcctctggattcaccttcagtagctatgacatgcactgggtccgccaggcttcaggcaaggggctggagtgggtggcagttatatcatttgatggaagtaataaatactatgcagactccgtgaagggccgattcaccatctccagagacaattccaagaacacgctgtatctgcaaatgaacagcctgagagctgaggacacggctgtgtattactgtgcgaaaaatggatacagctatgcatataattcctactttgactactggggccagggaaccctggtcaccgtctcctcag

SEQ ID NO: 1911 - DNA, 367 bp, Homo sapiens
gaggtgcagctggtggagtctgggggaggcttggtacagcctggagggtccctgagactctcctgtgcagcctctggattcaccttcagtagttatgaaatgaactgggtccgccaggctccagggaaggggctggagtgggtttcatacattagtagtagtggtagtaccatatactacgcagactctgtgaagggccgattcaccatctccagagacaacgccaagaactcactgtatctgcaaatgaacagcctgagagccgaggacacggctgtttattactgtgcgagagagtacccccggtgggagctatccccgggacttgcggactggggccagggaaccctggtcaccgtctcctcag

SEQ ID NO: 1912 - DNA, 367 bp, Homo sapiens
caggtgcagctggtgcagtctggggctgaggtgaagcagcctgggtcttcggtgaaggtctcctgcaaggcttctggaggcaccttcagcacctatgctatcagctgggtgcgacaggcccctggacaagggcttgagtggatgggagggatcatccctatgtttggtacaggaaattacgcacagaagttccagggcagagtcacgattaccgcggacgaatccacgaacacagcctacatggagctgagcagcctgagatctgaggacacggccgtgtattactgtgcgagacgtggatatagtggctacgatggggggccaggggactactggggccagggaaccctggtcaccgtctcctcag

SEQ ID NO: 1913 - DNA, 366 bp, Homo sapiens
gaggtgcagctgttggagtctgggggaggcttggtacagcctggggggtccctgagactctcctgtgcagcctctggattcacccttaggagctatgccatgagctgggtccggcaggctccagggaaggggctggagtgggtctcagctattagtggtggtggtggtagcacatactacgcaggctccgtgaagggccggttcaccatttccagagacaattccaagaaaacgatctatctacaaatgaacagcctgagagccgaggacacggccgtatattactgtgcgaaagggaggtcgggagagtacgatatctcttgtatggacgtctggggccaagggaccacggtcaccgtctcctca

SEQ ID NO: 1914 - DNA, 366 bp, Homo sapiens
gaggtgcagctggtggagtctgggggaggcctggtcaagcctggggggtccctgagactctcctgtgcagcctctggattcaccttcagtagctatagcatgaactgggtccgccaggctccagggaaggggctggagtgggtctcatccattagtagtagtagtagttacatatactacgcagactcagtgaagggccgattcaccatctccagagacaacgccaagaactcactgtatctgcaaatgaacagcctgagagccgaggacacggctgtgtattactgtgcgagagtttgtagtgcctttcctgactactacggtatggacgtctggggccaagggaccacggtcaccgtctcctca

SEQ ID NO: 1915 - DNA, 361 bp, Homo sapiens
caactgcagctgcaggagtcgggcccaggactggtgaagccttcggagaccctgtccctcacctgcagtgtctctggtggctccatcagcagtagtagttacttctggggctggatccgccagcccccagggaaggggctggagtggattgggaatatctattatagtgggagcacctactacaacccgtccctcaagagtcgagtcaccatatccgtagacacgtccaagaaccagttctccctgaagctgagctctgtgaccgccgcagagacggctgtgtatttctgtgcgagacaaatgtggctacgaggctggttcgacccctggggccagggaaccctggtcaccgtctcctcag

SEQ ID NO: 1916 - DNA, 367 bp, Homo sapiens
caggtccagctggtgcaatctggggctgaggtgaagaagcctgggtcctcggtgaaggtctcctgcaaggcttctggaggcaccttcagcagctatactatcagctgggtgcgacaggcccctggacaagggcttgaatggatgggaaggaccatccctatccttggtttatcaaactacgcacagaagttccagggcagagtcacgattagcgcggacaaatttaagagcacagcctacatggagctgagcagcctgagatctgaggacacggccgtgtattactgtgcgagagattctcactattgtactagtaccaggtgcgctgacccctggggccagggaaccctggtcaccgtctcctcag

SEQ ID NO: 1917 - DNA, 366 bp, Homo sapiens
caggtgcagctggtgcagtctggggctgaggtgaagaagcctggggcctcagtgaaggtctcctgcaaggcttctggatacaccttcaccggctactatatgcactgggtgcgacaggcccctggacaagggcttgagtggatgggatggatcaaccctaacagtggtggcacaaactatgcacagaagtttcagggcagggtcaccatgaccagggacacgtccatcagcacagcctacatggagctgagcaggctgagatctgacgacacggccgtgtattactgtgcgagagatcaacagctgtggaccggcacgtacggtatggacgtctggggccaagggaccacggtcaccgtctcctca

SEQ ID NO: 1918 - DNA, 370 bp, Homo sapiens
caggtgcagctgcaggagtcgggcccaggactggtgaagccttcacagaccctgtccctcacctgcactgtctctggtggctccatcagcagtggtggttactactggagctggatccgccagcacccagggaagggcctggagtggattgggtacatctattacagtgggagcacctactacaacccgtccctcaagagtcgagttaccatatcagtagacacgtctaagaaccagttctccctgaagctgagctctgtgactgccgcggacacggccgtgtattactgtgcgagagatggggccatgggttcggggagtatgggctttgactactggggccagggaaccctggtcaccgtctcctcag

SEQ ID NO: 1919 - DNA, 369 bp, Homo sapiens
cagctgcagctgcaggagtcgggcccaggactggtgaagccttcggagaccctgtccctcacctgcatagtctctggtggctccatcagcagtagtagttactactggggctggatccgccagcccccagggaaggggctggagtggattgggagtatctattatagtgggagcacctactacaacccgtccctcaagagtcgagtcaccatatccgtagacacgtccaagaaccggttctccctgaagttgagctctgtgaccgccgcagacacggctgtgtattactgtgcgagtatgtatagtagcagggtgccgaaatacggtatggacgtctggggccaagggaccacggtcaccgtctcctca

SEQ ID NO: 1920 - DNA, 367 bp, Homo sapiens
caggtgcagctggtgcagtctggggctgaggtgaagaagcctggggcctcagtgaaggtctcctgcaaggcttctggatacatcttcaccggctactatatgcactgggtgcgacaggcccctggacaagggcttgagtggatggggtggatcaaccctaacagtggtgccacaaactatgcacagaagtttcagggcagggtcaccatgaccagggacacgtccatcagcacagtctacatggagctgagcaggctgagatctgacgacacggccctgtattactgtgcgagagattataagttctcggtactagggacatactttgactactggggccagggaaccctggtcaccgtctcctcag

SEQ ID NO: 1921 - DNA, 367 bp, Homo sapiens
caggtgcagctggtgcagtctggggctgaggtgaagaagcctggggcctcagtgaaggtctcctgcaaggcttctggatacaccttcaccggctactatatgcactgggtgcgacaggcccctggacaagggcttgagtggatgggatggatcaaccctaacagtggtggcacaaactatgcacagaagtttcagggcagggtcaccatgaccagggacacgtccatcagcacagcctacatggagctgagcaggctgagatctgacgacacggccgtgtattactgtgcgagagcccccagggccccagcagctggttactactttgactactggggccagggaaccctggtcaccgtctcctcag

SEQ ID NO: 1922 - DNA, 367 bp, Homo sapiens
caggtgcagctggtgcagtctggggctgaggtgaagaagcctggggcctcagtgaaggtctcctgcaaggcttctggatacaccttcaccgactactatatgcactgggtgcgacaggcccctggacaagggcttgagtggatgggatggatcaaccctaacagtggtggcacaaactatgcacagaagtttcagggcagggtcaccatgaccagggacacgtccatcagcacagcctacatggagctgagcaggctgagatctgacgacacggccgtgtattactgtgcgagaggacaaaggtataactggaacgaccccactctggactactggggccagggaaccctggtcaccgtctcctcag

SEQ ID NO: 1923 - DNA, 367 bp, Homo sapiens
caggtgcagctggtggagtctgggggaggcgtggtccagcctgggaggtccctgagactctcctgtgtagcgtctggattcaccttcagtagctatggcatgcactgggtccgccaggctccaggcaaggggctggagtgggtggcagttatatggtatgatggaagtaataaatactatggagactccgtgaagggccgattcaccatctccagagacaattccaagaacacactgtatctgcaaatgaacagcctgagagtcgaggacacggctgtgtattattgtgcgagagagggaatgtacggtgactacggaggtgcttttgatatctggggccaagggacaatggtcaccgtctcttcag

SEQ ID NO: 1924 - DNA, 366 bp, Homo sapiens
caaatgcagctggtgcagtctgggcctgaggtgaagaagcctgggacctcagtgaaggtctcctgcaaggcttctggattcacctttactagctctgctgtgcagtgggtgcgacaggctcgtggacaacgccttgagtggataggatggatcgtcgttggcagtggtaacacaaactacgcacagaagttccaggaaagagtcaccattaccagggacatgtccacaagcacagcctacatggagctgagcagcctgagatccgaggacacggccgtgtattactgtgcggcagatcccttccagtgggcctactactacggtatggacgtctggggccaagggaccacggtcaccgtctcctca

SEQ ID NO: 1925 - DNA, 358 bp, Homo sapiens
caggtgcagctggtgcagtctggggctgaggtgaagaagcctggggcctcagtgaaggtctcctgcaaggcttctggatacaccttcaccgactactatatgcactgggtgcgacaggcccctggacgagggcttgagtggatgggatggatcaaccctaacagtggtggcacaaactatgcacagaagtttcagggcagggtcaccatgaccagggacacgtccatcagcacagcctacatggagctgagcaggctgagatctgacgacacggccgtgtattactgtgcgaaaggggactggaaggtgggctggttcgacccctggggccagggaaccctggtcaccgtctcctcag

SEQ ID NO: 1926 - DNA, 367 bp, Homo sapiens
caggtgcagctggtggagtctgggggaggcgtggtccagcctgggaggtccctgagactctcctgtgcagcctctggattcaccttcagtagctatgctatgcactgggtccgccaggctccaggcaaggggctggagtgggtggcagttatatcatatgatggaagtaataaatactacgcagactccgtgaagggccgattcaccatctccagagacaattccaagaacacgctgtatctgcaaatgaacagcctgagagctgaggacacggctgtgtattactgtgcgagatctaagtcggggagttattattttgatgcttttgatatctggggccaagggacaatggtcaccgtctcttcag

SEQ ID NO: 1927 - DNA, 366 bp, Homo sapiens
gaggtgcagctggtgcagtctggagcagaggtgaaaaagccgggggagtctctgaagatctcctgtaagggttctggatacagctttaacagttactggatcggctgggtgcgccagatgcccgggaaaggcctggagtggatggggatcatctatcctggtgactctgataccagatacagcccgtccttccaaggccaggtcaccatctcagccgacaagtccatcagaaccgcctacctgcagtggagcagcctgaaggcctcggacaccgccatgtattactgtgcgagacatatggatatcggcgccgggcactacggtatggacgtctggggccaagggaccacggtcaccgtctcctca

SEQ ID NO: 1928 - DNA, 367 bp, Homo sapiens
caggtgcaactggtgcagtctggggctgaggtgaagcagcctgggtcctcggtgaaggtctcctgcaaggcttctggaggcaccttcagcaactatgctatcacctgggtgcgacaggcccctggacaagggcttgagtggatgggagggatcatccctatctttggtacacgaaactacgcacagaagttccaggacagagtcaccataaccgcggacgaatccacgagcacagcctacatggagctgagcagcctgagatctgaggacacggccgtctattactgtgcgagagggggtggctacgaccacgactactggtacttcgatctctggggccgtggcaccctggtcactgtctcctcag

SEQ ID NO: 1929 - DNA, 364 bp, Homo sapiens
gaggtgcagctggtggagtctgggggaggcttggtccagcctggggggtccctgagactctcctgtgaagcctctggattcaccgtcactagcaactacatgagctgggtccgccaggctccagggaaggggctgcagtgggtctcagttatttacagcggtggtagcacatactacgcagactccgtgaagggccgattcaccatctccagagacatttccaagaacacgctgtatcttcaaatgaacagcctgagagttgaggacacggctgtgtattattgtgcgagagaaaggggaaaactggggaacgtcggtgcttttgatatctggggccaagggacaatggtcaccgtctcttcag

SEQ ID NO: 1930 - DNA, 378 bp, Homo sapiens
gaagtgcagctggtggagtctgggggaggcttggtacagcctggcaggtccctgagactctcctgtgcagcctctggattcacctttgatgattatgccatgcactgggtccggcaagctccagggaagggcctggagtgggtctcaggtattagttggaatagtggtaacataggctatgcggactctgtgaagggccgattcaccatctccagagacaacgccaagaactccctatatctgcaaatgaacagtctgagagctgaggacacggccttgtattactgtgcaaaagagcaatatggttcggggagcaattactactacttcttcggtatggacgtctggggccaagggaccacggtcaccgtctcctca

SEQ ID NO: 1931 - DNA, 387 bp, Homo sapiens
caggtacagctacagcagtcaggtccaggactggtgaagccctcgcagaccctctcactcacctgtgccatctccggggacagtgtctctaggaacagtgctgcttggaactggatcaggcagtccccatcgagaggccttgagtggctgggaaggacatactacaggtccaagtggtataatgattatgcagtatctgtgaaaagtcgaataaccatcaagccagacacaaccaagaaccagttctccctgcagctgaactctgtgactcccgaggacacggctgtgtattactgtgcaagagaccgggaggtattggttattagagaccacttctactacggtatggacgtctggggccaagggaccacggtcaccgtctcctca

SEQ ID NO: 1932 - DNA, 378 bp, Homo sapiens
gaggtgcagctggtgcagtctggagcagaggtgaaaaagccgggggagtctctgaagatttcctgtaagggttctggatacagctttaccagctactggatcggctgggtgtgccagatgcccgggaaaggcctggagtggatggggatcatctatcctgatgactctgataccagatacagcccgtccttccaaggcctggtcaccatctcagccgacaagtccatcagcactgcctacctgcagtggagcagcctgaaggcctcggacaccgccatgtatttctgtgcgagattgacgtttgggggagttatcggaagatactactacaacggtatggacgtctggggccaagggacctcggtcaccgtctcctca

SEQ ID NO: 1933 - DNA, 370 bp, Homo sapiens
caggtcaccttgaaggagtctggtcctgtgctggtgaaacccacagagaccctcacgctgacctgcaccgtctctgggttctcactcatcaatgctagaatgggtgtgagctggatccgtcagcccccagggaaggccctggagtggcttgcacacattttttcggctgacgaaaaatcctacagcgcatctctgaagaacaggctcaccatctccaaggatacctccaaaagccaggtggtccttatcatgaccaacatggaccctgtggacacagccacatattactgtgcacggatacggtggttcggggaattattgtatgcttttgatttctggggccaagggacaatggtcaccgtctcttcag

SEQ ID NO: 1934 - DNA, 356 bp, Homo sapiens
ggtgcagctggtgcagtctggagcagaggtgaaaaagccgggagagtctctgaagatctcctgtaagggttctggatacagctttaccagctggtggatcggctgggtgcgccagatgcccgggaaaggcctagagtggatgggaatcatctatcctactaactctgataccaaatacagcccgtccttccaaggccaggtcaccatctcagccgacaagtccaccaacaccgcctacttgcagtggaacagcctgaaggcctcggacaccgccatatattactgtgcgaggtcatttgactggctatattggttcgacccgtggggccagggaaccctggtcaccgtctcctcag

SEQ ID NO: 1935 - DNA, 375 bp, Homo sapiens
caggtgcagctgcaggagtcgggcccaggactggtgaagccttcggagaccctgtccctcacctgcactgtctctggtggctccatcagtagttactactggagctggatccggcagcccccagggaagggactggagtggattgggtatatctattacagtgggagcaccaactacaacccctccctcaagagtcgagtcaccatatcagtagacacgtccaagaaccagttctccctgaagctgagctctgtgaccgctgcggacacggccgtgtattactgtgcgagagccagtggctgggaccgaaccttgaactactactactacggtatggacgtctggggccaagggaccacggtcaccgtctcctca

SEQ ID NO: 1936 - DNA, 381 bp, Homo sapiens
caggtgcagctgcaggagtcgggcccaggactggtgaagccttcacagaccctgtccctcacctgcactgtctctggtggctccatcagcagtggtagttactactggagctggatccggcagcccgccgggaagggactggagtggattgggcgtatctataccagtgggagcaccaactacaacccctccctcaagagtcgagtcaccatatcagtagacacgtccaagaaccagttctccctgaagctgagctctgtgaccgccgcagacacggccgtgtattactgtgcgagagaacatagtggcacgaaacctcattactactactactacggtatggacgtctggggccaagggaccacggtcaccgtctcctca

SEQ ID NO: 1937 - DNA, 378 bp, Homo sapiens
gaggtgcagctgttggagtctgggggaggcttggtacagcctggggggtccctgagactctcctgtgcagcctctggattcacctttagcagctatgccatgagctgggtccgccaggctccagggaaggggctggagtgggtctcagctattagtggtagtggtggtagcacatactacgcagactccgtgaagggccggttcaccatctccagagacaattccaagaacacgctgtatctgcaaatgaacagcctgagagccgaggacacggccgtatattactgtgcgaaagacttattacgatattttgactggttattagcagggtacggtatggacgtctggggccaagggaccacggtcaccgtctcctca

SEQ ID NO: 1938 - DNA, 378 bp, Homo sapiens
gaggtgcagctgttggagtctgggggaggcttggtacagcctggggggtccctgagactctcctgtgcagcctctggattcacctttagcagctatgccatgagctgggtccgccaggctccagggaaggggctggagtgggtctcagctattagtggtagtggtggtagcacatactacgcagactccgtgaagggccggttcaccatctccagagacaattccaagaacacgctgtatctgcaaatgaacagcctgagagccgaggacacggccgtatattactgtgcgaaagatccctatagtggctacgacccactatactactactacggtatggacgtctggggccaagggaccacggtcaccgtctcctca

SEQ ID NO: 1939 - DNA, 378 bp, Homo sapiens
caggtgcagctggtggagtctgggggaggcgtggtccagcctgggaggtccctgagactctcctgtgcagcctctggattcaccttcagtagctatgctatgcactgggtccgccaggctccaggcaaggggctggagtgggtggcagttatatcatatgatggaagcaataaatactacgcagactccgtgaagggccgattcaccatctccagagacaattccaagaacacgctgtatctgcaaatgaacagcctgagagctgaggacacggctgtgtattactgtgcgagagatgacccccataatcccaaggagtactactactactacggtatggacgtctggggccaagggaccacggtcaccgtctcctca

SEQ ID NO: 1940 - DNA, 379 bp, Homo sapiens
gaagtgcagctggtggagtctgggggaggcttggtacagcctggcaggtccctgagactctcctgtgcagcctctggattcacctttgatgattatgccatgcactgggtccggcaagctccagggaagggcctggagtgggtctcaggtattagttggaatagtggtaccataggctatgcggactctgtgaagggccgattcaccatctccagagacaacgccaagaactccctgtatctgcaaatgaacagtctgagagctgaggacacggccttgtattactgtgcaaaagatcctcatcctccgtcggaaggctacgaatacacctactactttgactactggggccagggaaccctggtcaccgtctcctcag

SEQ ID NO: 1941 - DNA, 378 bp, Homo sapiens
caggtccagctggtacagtctggggctgaggtgaagaagcctggggcctcagtgaaggtctcctgcaaggtttccggatacaccctccctgaattatccatgcactgggtgcgacaggctcctggaaaaggccttgagtggatgggaggttttgatcctgaagatgctgaaacaatctacgcacagaagttccagggcagagtcaccatcaccgaggacacatctacagacacagcctacatggagctgagcagcctgagatctgaagacacggccgtgtattactgtgcaacagaatttgcatattgtggtggtgactgctattctcgtcgcggtatggacgtctggggccaagggaccacggtcaccgtctcctca

SEQ ID NO: 1942 - DNA, 379 bp, Homo sapiens
gaggtgcagctggtggagtctgggggaggcttggtacagcctggagggtccctgagactctcctgtgcagcctctggattctccttcagtagttatgaaatgaactgggtccgccaggctccagggaaggggctggagtgggtttcatacattagtagtagtggtagtaccatatactacgcagactctgtgaagggccgattcaccatctccagagacaacgccaagaactcactgtatctgcaaatgaacagcctgagagccgaggacacggctgtttattactgtgcgagagatccgggcgattacgtttgggggagttatcgttaccggtactttgactactggggccagggaaccctggtcaccgtctcctcag

SEQ ID NO: 1943 - DNA, 384 bp, Homo sapiens
gaggtgcagctggtggagtctgggggagacttggtaaagcctggggggtcccttagactctcttgtgcagcctccggattcactttaagttacgcctggatgagctgggtccgccaggctccagggaagggcctggagtgggttggccgtattaaaagcaaaagtgaaggtgggacaacagactacggtgcacccgtgaaaggcagtttcaccatttcaagagatgattcaaaaaacaggctgtatctggaaatgaacagcctgaaaatcgaggacacagccgtgtattattgtaccacagttgggcggttctacggttcgggacgaagtgaccactacggtatggacgtctggggccaagggaccacggtcatcgtctcctca

SEQ ID NO: 1944 - DNA, 379 bp, Homo sapiens
caggtgcagctggtggagtctgggggaggcgtggtccagcctgggaggtccctgagactctcctgtgcagcgtctggattcaccttcagtagctatggcatgcactgggtccgccaggctccaggcaaggggctggagtgggtggcagttatatggtatgatggaagtaataaatactatgcagactccgtgaagggccgattcaccatctccagagacaattccaagaacacgctgtatctgcaaatgaacagcctgagagccgaggacacggctgtgtattactgtgcgagagatcgttcactctatagcagcagctggtacgtttcctcccacccaatatactggggccagggaaccctggtcaccgtctcctcag

SEQ ID NO: 1945 - DNA, 358 bp, Homo sapiens
caggtccagctggtgcaatctggggctgaggtgaagaagcctgggtcctcggtgaaggtctcctgcaaggcttctggaggcaccttcagcagctatactatcagctgggtgcgacaggcccctggacaagggcttgagtggatgggaaggatcatccctatccttggtatagcaaactacgcacagaagttccagggcagagtcacgattaccgcggacaaatccacgagcacagcctacatggagctgagcagcctgagatctgaggacacggccgtgtattactgtgcgagagagcgtttattacgagatgcttttgatatctggggccaagggacaatggtcaccgtctcttcag

SEQ ID NO: 1946 - DNA, 379 bp, Homo sapiens
gaggtgcagctggtggagtctgggggaggtgtggtacggcctggggggtccctgagactctcctgtgcagcctctggattcacctttgatgattatggcatgagctgggtccgccaagctccagggaaggggctggagtgggtctctggtattaattggaatggtggtagcacaggttatgcagactctgtgaagggccgattcaccatctccagagacaacgccaagaactccctgtatctgcaaatgaacagtctgagagccgaggacacggccttgtatcactgtgcgagaggggacggagtttactatggttcggggagttattataccccctctgggtactggggccagggaaccctggtcaccgtctcctcag

SEQ ID NO: 1947 - DNA, 376 bp, Homo sapiens
caggtgcagctacagcagtggggcgcaggactgttgaagccttcggagaccctgtccctcacctgcgctgtctatggtgggtccttcagtggttactactggagctggatccgccagcccccagggaaggggctggagtggattggggaaatcaatcatagtggaagcaccaactacaacccgtccctcaagagtcgagtcaccatatcagtagacacgtccaagaaccagttctccctgaagctgagctctgtgaccgccgcggacacggctgtgtattactgtgcgagggttcttccaacgtattactatgatagtagtggttatacggggtttgactactggggccagggaaccctggtcaccgtctcctcag

SEQ ID NO: 1948 - DNA, 378 bp, Homo sapiens
gacgtgcagctggtggagtctgggggaggcctggtcaagcctggggggtccctgagactctcctgtgcagcctctggattcaccttcagtagctacagcatgaactgggtccgccaggctccagggaaggggctggaatgggtctcatccattagtagtggtagtagttacatatactacgcagactcagtgaagggccgattcaccatctccagagacaacgccaataactcactgtatctgcaaatgaacagcctgagagccgaggacacggctgtgtattactgtgcgagagcggattgtgctggtgactgcccaggctggtactactacggtatggacgtctggggccaagggaccacggtcaccgtctcctca

SEQ ID NO: 1949 - DNA, 378 bp, Homo sapiens
gaggtgcagctggtggagtctgggggaggcctggtcaagcctggggggtccctgagactctcctgtgcagcctctggattcaccttcagtagctatagcatgaactgggtccgccaggctccagggaaggggctggagtgggtctcatccattagtagtagtagtagttacatatactacgcagactcagtgaagggccgattcaccatctccagagacaacgccaagaactcactgtatctgcaaatgaacagcctgagagccgaggacacggctgtgtattactgtgcgagaacaaactctgggggaagctacggtgactactactactacggtatggacgtctggggccaagggaccacggtcaccgtctcctca

SEQ ID NO: 1950 - DNA, 382 bp, Homo sapiens
caggtcaccttgaaggagtctggtcctgtgctggtgaaacccacagagaccctcacgctgacctgcaccgtctctggctttttactcagcaatcctagaatgggtgtgagctggatccgtcagcccccagggaaggccctggagtggcttgcacacattttttcgaatgacgaagaatcctacagcacatctctgaagaacaggctcaccatctccaaggacacctccaaaagccaggtggtccttaccatgaccaacatggaccctgtggacacagccacatattactgtgcacgggcggaattgggggagcagctggcctactgggacccaatttactttgactactggggccagggaaccctggtcaccgtctcttcag

SEQ ID NO: 1951 - DNA, 376 bp, Homo sapiens
caggtgcagctacagcagtggggcgcaggactgttgaagccttcggagaccctgtccctcacctgcgctgtctatggtgggtccttcagtggttactactggagctggatccgccagcccccagggaaggggctggagtggattggggaaatcaatcatagtggaagcaccaactacaacccgtccctcaagagtcgagtcaccatatcagtagacacgtccaagaaccagttctccctgaagctgagctctgtgaccgccgcggacacggctgtgtattactgtgcgagaggcgtgtttggatacagctatggtttggggtcaatcggctggttcgacccctggggccagggaaccctggtcaccgtctcctcag

SEQ ID NO: 1952 - DNA, 379 bp, Homo sapiens
caggtgcagctggtgcagtctggggctgaggtgaagaagcctgggtcctcggtgaaggtctcctgcaaggcttctggaggcaccttcagcagctatgctatcagctgggtgcgacaggcccctggacaagggcttgagtggatgggagggatcatccctatctttggtacagcaaactacgcacagaagttccagggcagagtcacgattaccgcggacgaatccacgagcacagcctacatggagctgagcagcctgagatctgaggacacggccgtgtattactgtgcgccttattactatggttcggggagttattataacgccgggaactggttcgacccctggggccagggaaccctggtcaccgtctcctcag

SEQ ID NO: 1953 - DNA, 379 bp, Homo sapiens
caggtccagctggtgcaatctggaactgaggtgaggaagcctgggtcctcggtgaaggtctcctgcagggcttctgggggcaccttcagcaactattctatcagctgggtgcgacaggcccctggacacgggcttgagtggatgggaaggatcatccctatccttcctatagcaatctactcagagaagttccagggcagagtcacgattaccgcggacaaatcctcgaacacagcctacatggagctgagcagcctgagatctgaggacacggccgtgtatttctgtgcgagaggggtggacacgtttggatacagtggcccgggacccagctggttcgacccctggggccagggaaccctggtcaccgtctcctcag

SEQ ID NO: 1954 - DNA, 382 bp, Homo sapiens
cagctgcagctgcaggagtcgggcccaggactggtgaagccttcggagaccctgtccctcacctgcactgtctctggtggctccatcagcagtagtagttactactggggctggatccgccagcccccagggaaggggctggagtggattgggagtatctattatagtgggagcacctactacaacccgtccctcaagagtcgagtcaccatatcagtagacacgtccaagaaccagttctccctgaagctgagctctgtgaccgctgcggacacggccgtgtattactgtgcgagtactctagagtattacgatattttgactggttaccctagtacctttgactactggggccagggaaccctggtcaccgtctcctcag

SEQ ID NO: 1955 - DNA, 358 bp, Homo sapiens
gaggtgcagctggtggagtctggaggaggcttggtccagcctggggcgtccctgagactctcctgtgcagcctctgggttcaccgtcagtaacaactacatgagctgggtccgccaggctccagggaaggggctggagtgggtctcagttatttatagcggtggtagtacatactacgcagactccgtgaagggccgattcaccatctccagacacaattccgagaacacgctgtatcttcaaatgaacagcctgagagctgaggacacggccgtgtattactgtgcgagattttcaaaattgtaccaatggtcttttgatatctggggccaagggacaatggtcaccgtctcttcag

SEQ ID NO: 1956 - DNA, 358 bp, Homo sapiens
caggtgcagctggtgcagtctggggctgaggtgaagaagcctggggcctcagtgaaggtctcctgcaaggcttctggatacaccttcaccggctactatatgcactgggtgcgacaggcccctggacaagggcttgagtggatgggatggatcaaccctaacagtggtggcacaaactatgcacagaagtttcagggcagggtcaccatgaccagggacacgtccatcagcacagcctacatggagctgagcaggctgagatctgacgacacggccgtgtattactgtgcgagagaattgatagtggctacgattcttgactactggggccagggaaccctggtcaccgtctcctcag

SEQ ID NO: 1957 - DNA, 365 bp, Homo sapiens
ggtgcagctggtggagtccgggggaggcttagtccagccgggggggtccctgaaactctcctgtgcagcctctgggttcaccttcagtggctctgctttgcactgggtccgccaggcctccgggaaggggctggagtggattggccgtattaaaacaaaagctgaaaattacgggacagaatatgctgcgtcgctgaaaggcaggttcaccatctccagagatgattcaaagaacacggcggatctgcgaatgaacagcctgaacaccgacgacacggccgtgtattattgtgctagactggcagtggctgaaattgatgcttatgacatctggggccaagggacaatggtcatcgtcacttcag

SEQ ID NO: 1958 - DNA, 379 bp, Homo sapiens
gaggtgcagctgttggagtctgggggaggcttggtacagcctggggggtccctgagactctcctgtgcagcctctggattcacctttagcagctatgccatgagctgggtccgccaggctccagggaaggggctggagtgggtctcagctattagtggtagtggtggtagcacatactacgcagactccgtgaagggccggttcaccatctccagagacaattccaagaacacgctgtatctgcaaatgaacagcctgagagccgaggacacggccgtatattactgtgcgaaagacgccggtcgtagtggttattacctacctccgggtgaatacttccagcactggggccagggcaccctggtcaccgtctcctcag

SEQ ID NO: 1959 - DNA, 361 bp, Homo sapiens
caggtgcagctggtgcagtctggggctgaggtgaagaagcctgggtcctcggtgaaggtctcctgcaaggcttctggaggcaccttcagcagctatgctatcagctgggtgcgacaggcccctggacaagggcttgagtggatgggagggatcatccctatctttggtacgacaaactacgcacagaagttccagggcagagtcacgattaccgcggacgattccacgagcacagcctacatggagctgagcagcctaagatctgaggacacggccgtgtattactgtgcgagaggggccagtgggagctaccaagactttgactactggggccagggaaccctggtcaccgtctcctcag

SEQ ID NO: 1960 - DNA, 361 bp, Homo sapiens
caggttcagctggtgcagtctggagctgaggtgaagaagcctggggcctcagtgaaggtctcctgcaaggcttctggttacacctttaccacctacggtatcagctgggtgcgacaggcccctggacaagggcttgagtggatgggatggatcagcgcttacaacggtaacacaaactatgcacagaagctccagggcagagtcaccatgaccacagacacatccacgagcacagcctacatggaactgaggaacctgagatctgacgacacggccgtgtactactgtgcgaggctttccgagggttcggggagaccccttggctactggggccagggaaccctggtcaccgtctcctcag

SEQ ID NO: 1961 - DNA, 358 bp, Homo sapiens
caggtgcagctgcaggagtcgggcccaggactggtgaagccttcggagaccctgtccctcacctgcactgtctctggtggctccatcagtagttactactggagctggatccggcagcccgccgggaagggactggagtggattgggcgtatctataccagtgggagcaccaactacaacccctccctcaagagtcgagtcaccatgtcagtagacacgtccaagaaccagttctccctgaagctgagctctgtgaccgccgcggacacggccgtatattactgtgcgagagattacgatattttgactgcaggctttgactactggggccagggaaccctggtcaccgtctcctcag

SEQ ID NO: 1962 - DNA, 361 bp, Homo sapiens
gaggtgcagctggtggagtctgggggaggcctggtcaagcctggggggtccctgagactctcctgtgcagcctctggattcaccttcagtagctatagcatgaactgggtccgccaggctccagggaaggggctggagtgggtctcatccattagtagtagtagtagttacatatactacgcagactcagtgaagggccgattcaccatctccagagacaacgccaagaactcactgtatctgcaaatgaacagcctgagagccgaggacacggctgtgtattactgtgcgagagtgtggtgtggtggtgactgcccgacgggctactggggccagggaaccctggtcaccgtctcctcag

SEQ ID NO: 1963 - DNA, 364 bp, Homo sapiens
cagctgcagctgcaggagtccggctcaggactggtgaagccttcacagaccctgtccctcacctgcgctgtctctggtggctccatcagcagtggtgcttactcctgtagctggatccggcagccaccagggaagggcctggagtggattgggtacgtctttcatagtgcgaacacctactacaacccgtccctcaagagtcgagtcaccatatcagtagacaggtccaagaaccagttctccctgaagctgacctctgtgaccgccgcggacacggccgtgtattactgtgccagagcccccctttgggctggtggggcttttgatatctggggccaagggacaatggtcaccgtctcttcag

SEQ ID NO: 1964 - DNA, 364 bp, Homo sapiens
caggtcaccttgagggagtctggtcctgcgctggtgaaacccacacagaccctcacactgacctgcaccttctctgggttctcactcagcactagtggaatgtgtgtgagctggatccgtcagcccccagggaaggccctggagtggcttgcactcattgattgggatgatgataaatactacagcacatctctgaagaccaggctcaccatctccaaggacacctccaaaaaccaggtggtccttacaatgaccaacatggaccctgtggacacagccacgtactactgtgcacggatatggggcagcagctggccaaactttgactactggggccagggaaccctggtcaccgtctcctcag

SEQ ID NO: 1965 - DNA, 364 bp, Homo sapiens
cagctgcagctgcaggagtcgggcccaggactggtgaagccttcggagaccctgtccctcacctgcactgtctctggtggctccatcagcagtagtagttactactggggctggatccgccagcccccagggaaggggctggagtggattgggagtatctattatagtgggagcacctactacaacccgtccctcaagagtcgagtcaccatatccgtagacacgtccaagaaccagttctccctgaagctgagctctgtgaccgccgcagacacggctgtgtattactgtgcgagacagggttcggggagttattataccgttgactactggggccagggaaccctggtcaccgtctcctcag

SEQ ID NO: 1966 - DNA, 361 bp, Homo sapiens
gaggtgcagctggtggagtctgggggaggcttggtacagcctggagggtccctgagactctcctgtgcagcctctggattcaccttcagtagttatgaaatgaactgggtccgccaggctccagggaaggggctggagtgggtttcatacattagtagtagtggtagtaccatatactacgcagactctgtgaagggccgattcaccatctccagagacaacgccaagaactcactgtatctgcaaatgaacagcctgagagccgaggacacggctgtttattactgtgcgacccagctgtatagcagtggctggtgggggccgtactggggccagggaaccctggtcaccgtctcctcag

SEQ ID NO: 1967 - DNA, 355 bp, Homo sapiens
gaggtgcagctggtggagtctgggggaggcttggtccagcctggggggtccctgagactctcctgtgcagcctctggattcaccgtcagtagcaactacatgacctgggtccgccaggctccagggaaggggctggagtgggtctcacttatttatagcggtgctagcacatactacgcagactccgtgaagggccgattcaccatctccagagacacttccaagaacacgctgtatcttcaaatgaacagcctgagagctgaggacacggctgtctattactgtgcgacctcttatgcctggtactcctggttcgacccctggggccagggaaccctggtcaccgtctcctcag

SEQ ID NO: 1968 - DNA, 361 bp, Homo sapiens
gaggtgcagctggtggagtctgggggaggcttggtacagcctggagggtccctgagactctcctgtgcagcctctggattcaccttcagtagttatgaaatgaactgggtccgccaggctccagggaaggggctggagtgggtttcatacattagtagtagtggtagtaccaaatactacgcagactctgtgaagggccgattcaccatctccagagacaacgccaagaactcactgtatctgcaaatgaacagcctgagagccgaggacacggctgtttattactgtgcgagagatggccttacggtgacccactactttgactactggggccagggaaccctggtcaccgtctcctcag

SEQ ID NO: 1969 - DNA, 361 bp, Homo sapiens
gaggtgcagctggtgcagtctggagcagaggtgaaaaagccgggggagtctctgaagatctcctgtaagggttctggatacagctttaccagctactggatcggctgggtgcgccagatgcccgggaaaggcctggagtggatggggatcatctatcctggtgactctgataccagatacagcccgtccttccaaggccaggtcaccatctcagccgacaagtccatcagcaccgcctacctgcagtggaacagcctgaaggcctcggacaccgccatgtattactgtgcgaggaccctgggaggtttggtgggctggttcgacccctggggccagggaaccctggtcaccgtctcctcag

SEQ ID NO: 1970 - DNA, 361 bp, Homo sapiens
caggtgcagctggtggagtctgggggaggcgtggtccagcctgggaggtcccagagactctcatgtgcagcgtctggattcaccttcagtagttatggcatgcactgggtccgccaggctccaggcaaggggctggagtgggtggcagttatatggtttgatggaagtaaaacatactatgcagactccgtgaagggccgattcaccatctccagagacaattccaagaacacgctgtatctgcaaatgaacagcctgagagccgaggacacggctgtgtattactgtgcgagagaggggacgtacgggactgggggccttgactactggggccagggaaccctggtcgccgtctcctcag

SEQ ID NO: 1971 - DNA, 361 bp, Homo sapiens
caggtgaagctggtggagtctgggggaggcgtggtccagcctgggaggtccctgagactctcctgtgtagcgtctggattcacattcagtagctatggcatgcactgggtccgccaggctccaggcaaggggctggagtgggtggcagttatatggtttgatggaagtaatcaatactatgcagactccgtgaagggccgattcaccatctccagagacaattccaagaacacgctgtatctgcaaatgaacagcctgagagccgaagacaccgctgtgtattattgtgcgacagatcacaggttcggggaaaatgaagttgactactggggccagggaaccctggtcaccgtctcctcag

SEQ ID NO: 1972 - DNA, 361 bp, Homo sapiens
caggtgcagctggtggagtctgggggaggcgtggtccagcctgggaggtccctcagactctcctgtgcagcgtctggattcaccttcagtagttatggcatgcactgggtccgccaggctccaggcaaggggctggagtgggtggcagttatatactatgatggaagtaataaatactatgcagattccgtgaagggccgattcaccatctccagagacaattccaagaacacgctgtatctgcaaatgaacagcctgagagccgaggacacggctgtgtattattgtacgacagatcacaggttcggggaacaagaagttgactactggggccagggaaccctggtcaccgtctcctcag

SEQ ID NO: 1973 - DNA, 361 bp, Homo sapiens
caggtgcagctggtggagtctgggggaggcgtggtccagcctgggaggtccctgagactctcctgtgcaacatctggattcaccttcagtaactatggcatgcactgggtccgccaggctccaggcaaggggctggagtgggtggcagttatatggtatgatggaagtaagaaatattatgcagactccgtgaagggccgattcaccatctccagagacaattccaagaacacgctgtatctgcaaatgaacagcctgagagccgaggacacggctgtgtattactgtgcgagagatcacatgttcggggaacaagaagttgaccactggggccagggaaccctggtcaccgtctcctcag

SEQ ID NO: 1974 - DNA, 361 bp, Homo sapiens
caggtgcagctggtgcagtctggggctgaggtgaagaagcctgggtcctcggtgaaggtctcctgcaaggcttctggaggcaccttcaccagttatgctatcagctgggtgcgacaggcccctggacaagggcttgagtggatgggagggatcatccctatctttggtacatcaaactacgcacagaggttccagggcagagtcacgattaccgcggacgaatccacgagcacagcctccatggagttgagcagcctgagatctgaggacacggccgtgtattactgtgctaccgcaagtgggggctactacacctggttcgacccctggggccagggaaccctggtcaccgtctcctcag

SEQ ID NO: 1975 - DNA, 359 bp, Homo sapiens
ggtgcagctggtgcagtctggggctgaggttaagaagcctgggtcctcggtgagggtctcctgcaaggcttctggagacaccttcaccaactatgctttcagctgggtgcgacaggcccctggacaagggcttgagtggatgggagggatcatccctgtctttggtagagcaaactacgcacagaagtttcagggcagagtcaagattaccgcggacgaatccacgagcacagcctacatggaactgagcagcctgagatctgaggacacggccgtgtattactgtgcgagtggctacgatgcaggatacaactggctcgacccctggggccagggaaccctggtcaccgtctcctcag

SEQ ID NO: 1976 - DNA, 361 bp, Homo sapiens
caggtgcagctggtgcagtctggggcagaggtgaagaagcctgggtcctcggtgaaggtctcctgcaaggcttctggaggcattttcggcagctatggtatcacctgggtgcgacaggcccctggacaggggcttgagtggatgggagggatcatccctatctttggtacagcaaactacgcacagaagttccagggcagagtcacgattaccgcggacgaatccacgagcacagcctacatggagctgagtagcctgagatctgaggacacggccgtgtattattgtgcgagagatgtagtggctggtcttagctggttcgacccctggggccagggaaccctggtcaccgtctcctcag

SEQ ID NO: 1977 - DNA, 364 bp, Homo sapiens
cagatcaccttgaaggagtctggtcctacgctggtgaaacccacacagaccctcacgctgacctgcaccttctctgggttctcactcaccactagtggagtggctgtgggctggatccgtcagcccccaggaaaggccctggagtggcttgcactcatttattgggatgatgataagcgctacagcccatctctgaagagcaggctcaccatcaccaaggacacctccaaaaaccaggtggtccttacaatgaccaacatggaccctgtggacacagccacatattactgtgcacacagaggcatagcagcaactggtgaatttgactactggggccagggaaccctggtcaccgtctcctcag

SEQ ID NO: 1978 - DNA, 358 bp, Homo sapiens
caggtgcagctggtgcagtctggggctgaggtgaagaagcctgggtcctcggtgaaggtctcctgcaaggcttctggaggcaccttcagcacctatgctatcagctgggtgcgacaggcccctggacaagggcttgagtggatgggagggatcatccctatcgttggtacagtaaactacgcacagaacttccagggcagagtcacgattaccgcggacgaatccacgagctcagcctacatggaggtgagcagcctgagatctgaggacacggccgtgtattactgtgcgagagatcgggatggtggctacttgttcgacccctggggccagggaaccctggtcaccgtctcctcag

SEQ ID NO: 1979 - DNA, 361 bp, Homo sapiens
gaggtgcaactggtggagtctgggggaggcctggtcaagcctggggggtccctgagactctactgtgcagcctctggattcaccttcagtagttatagcatgaactgggtccgccaggctccagggaaggggctggagtgggtctcatccattagtagtagtcgtggttacatatactacgcagactcagtgaagggccgattcaccatctccagagacaacgccaagaactcactgtatctgcaaatgaacagcctgagagccgaggacacggctgtgtattactgtgcggggatctatggtggccctggaggctggttcgacccctggggccagggaaccctggtcaccgtctcctcag

SEQ ID NO: 1980 - DNA, 358 bp, Homo sapiens
gaggtgcagctggtggagtctggaggaggcttggtccagcctggggggtccctgagactctcctgtgcagcctctgggttcaccgtcagtagcaactacatgagctgggtccgccaggctccagggaaggggctggagtgggtctcagttatttatagcggtggtagcacatactacgcagactccgtgaagggccgattcaccatctccagacacaattccaagaacacgctgtatcttcaaatgaacagcctgagagctgaggacacggccgtgtattactgtgcgagagggacgcactatggttcggggagttattaccactggggccagggaaccctggtcaccgtctcctcag

SEQ ID NO: 1981 - DNA, 358 bp, Homo sapiens
gaggtgcagctggtggagtctgggggaggcttggtacagcctggggggtccctgagactctcctgtgcagcctctggattcaccttcagtagttacgacatgcactgggtccgccaagttacaggaaaaggtctggagtgggtctcagttattggaactgctggtgacacatactatccaggctccgtgaagggccgattcaccatctccagagataatgccaagacctccttgtatcttcaaatgaatagcctgagagccggggacacggctgtgtatttctgtgcaagaggcggttcggggagggtctggtacttcgatctctggggccgtggcaccctggtcactgtctcctcag

SEQ ID NO: 1982 - DNA, 360 bp, Homo sapiens
caggtgcagctggtggagtctgggggaggcgtggtccagcctgggaggtccctgagactctcctgtgcagcctctggattcaccttcagtagctatgctatgcactgggtccgccaggctccaggcaaggggctggagtgggtggcagttatatcatatgatggaagtaataaatactacgcagactccgtgaagggccgattcaccatctccagagacaattccaagaacacgctgtatctgcaaatgaacagcctgagagctgaggacacggctgtgtattactgtgcgagcctgattactatggttcggggagttatggacgtctggggccaagggaccacggtcaccgtctcctca

SEQ ID NO: 1983 - DNA, 361 bp, Homo sapiens
caggtgcagctggtgcaatctgggtctgagttgaagaagcctggggcctcagtgagggtttcctgcaaggcttctggatacaccttcactagctttgctattaattgggtgcgacaggcccctggacaagggcttgagtggatgggatggatcaacaccaacactgagaacccaacgtctgcccagggcttcacaggacggtttgtcttctccttggacacctctgtcaacatggcatatctgcagatcaacaacctaaaggctgaggacactgccgtgtatttctgtgcgagagcagacccttgggacggtgactactttgactactggggccagggatccctggtcaccgtctcctcag

SEQ ID NO: 1984 - DNA, 360 bp, Homo sapiens
caggtgcagctggtgcagtctggggctgaggtgaagaagcctggggcctcagtgaaggtctcctgcaaggcttctggatacaccttcaccggctactatatccactgggtgcgacaggcccctggacaagggcttgagtggatggggtggatcaaccctaacagtggtggcacaaactatgcacagaagtttcagggcagggtcaccatgaccggggacacgtccatcaccacagcctacatggagctgagcaggctgagatctgacgacacggccatgtattactgtgcgagagaagattactatgaggtgaacggtatggacgtctggggccaagggaccacggtcaccgtctcctca

SEQ ID NO: 1985 - DNA, 361 bp, Homo sapiens
caggtgcagctggtgcagtctggggctgaggtgaagaagcctggggcctcagtgaaggtctcctgcaaggcttctggatacaccgtcaccggctactatatgcactgggtgcgacaggcccctggacaagggcttgagtggatgggatggatcaaccctaacagtggtggcacaaactatgcacagaagtttcagggcagggtcaccatgaccagggacacgtccatcagcacagcctacatggagctgagcaggctgagatctgacgacacggccttgtattactgtgcgagttccgttagtagtggttacaactggttcgacccctggggccagggaaccctggtcaccgtctcctcag

SEQ ID NO: 1986 - DNA, 364 bp, Homo sapiens
caggtgcagctgcaggagtcgggcccaggactggtgaagccttcacagaccctgtccctcacctgcactgtctctggtggctccatcagcagtggtagttactactggagctggatccggcagcccgccgggaagggactggagtggattgggcgtatctataccagtgggagcaccaactacaacccctccctcaggagtcgactcagcatatcagtagacacgtccaagaaccagttctccctgaagctgagctctgtgaccgccgcagacacggccgtgtattactgtgcgagagatcctgggatggatagtgggagttttgactactggggccagggaaccctggtcaccgtctcctcag

SEQ ID NO: 1987 - DNA, 364 bp, Homo sapiens
caggtgcagctgcaggagtcgggcccaggactggtgaagccttcacagaccctgtccctcacctgcactgtctctggtggctccatcagcagtggtggttactactggagctggatccgccagcacccagggaagggcctggagtggattgggtacatctattacagtgggagcacctactacaacccgtccctcaagagtcgagttaccatatcagtagacacgtctaagaaccagttctccctgaagctgagctctgtgactgccgcggacacggccgtgtattactgtgcgagagaaagcagcagcagctggtactactttgactactggggccagggaaccctggtcaccgtctcctcag

SEQ ID NO: 1988 - DNA, 361 bp, Homo sapiens
gaggtgcagctggtggagtctgggggaggcttggtccagcctggggggtccctgagactctcctgtgcagcctctggattcacctttagtagctattggatgagctgggtccgccaggctccagggaaggggctggagtgggtggccaacataaagcaagatggaagtgagaaatactatgtggactctgtgaagggccgattcaccatctccagagacaacgccaagaactcactgtatctgcaaatgaacagcctgagagccgaggacacggctgtgtattactgtgcactcccctccggacgtggtggtacgggaggggactactggggccagggaaccctggtcaccgtctcctcag

SEQ ID NO: 1989 - DNA, 385 bp, Homo sapiens
caggtgcagctggtggagtctgggggaggcgtggtccagcctgggaggtccctgagactctcctgtgcagcctctggattcaccttcagtagctatgctatgcactgggtccgccaggctccaggcaaggggctggagtgggtggcagttatatcatatgatggaagcaataaatactacgcagactccgtgaagggccgattcaccatctccagagacaattccaagaacacgctgtatctgcaaatgaacagcctgagagctgaggacacggctgtgtattactgtgcgagagccgatgtattacgatattttgactggctatggtgggaggggaactactttgactactggggccagggaaccctggtcaccgtctcctcag

SEQ ID NO: 1990 - DNA, 358 bp, Homo sapiens
gaggtgcagctggtggagtctgggggaggcttggtccagcctggggggtccctgagactctcctgtgcagcctctggattcacctttagtacctattggatgagctgggtccgccaggctccagggaaggggctggagtgggtggccaacataaagcaagatggaagtgagaaattctatgtggactctgtgaagggccgattcaccatctccagagacaacgccaagaactcactgtatctgcaaatgaacagcctgagagccgaggacacggccgtgtattactgtgcgagactaagtggcagcagctggaactttgactactggggccagggaaccctggtcaccgtctcctcag

SEQ ID NO: 1991 - DNA, 378 bp, Homo sapiens
caggtgcagctacagcagtggggcgcaggactgttgaagccttcggagaccctgtccctcacctgcgctgtctatggtgggtccttcagtggttactactggagctggatccgccagcccccagggaaggggctggagtggattggggaaatcaatcatagtggaagcaccaactacaacccgtccctcaagagtcgagtcaccatatcagtagacacgtccaagaaccagttctccctgaagctgagctctgtgaccgccgcggacacggctgtgtattactgtgcgagagagaggaggtatagtgggagctacaacgcccgatactactacggtatggacgtctggggccaagggaccacggtcaccgtctcctca

SEQ ID NO: 1992 - DNA, 382 bp, Homo sapiens
gaagtgcagctggtgcagtccggagcagaggtgaaaaagcccggggagtctctgaggatctcctgtaagggttctggatacagctttaccagctattggatcacctgggtgcgccagatgcccgggaaaggcctggagtggatggggaggattgatcctagtgactcctataccaactacagcccgtccttccaaggccacgtcaccatctcagctgacaagtccatcagcactgcctacctgcagtggagcagcctgaaggcctcggacaccgccatgtattactgtgcgagacatcccggtccctccatgatagtagtggttagagggtctgatgcttttgatatctggggccaagggacaatggtcaccgtctcttcag

SEQ ID NO: 1993 - DNA, 382 bp, Homo sapiens
gaggtgcagctggtggagtctgggggaggcctggtcaagcctggggggtccctgagactctcctgtgcagcctctggattcaccttcagtaactattgcatgaactgggtccgccaggctccagggaaggggctggtgtgggtctcatccattagtagtagtagtagtcacatatactacgcagactcagtgaagggccgattcaccatctccagagacagcgccaagaactcactgtatctgcaaatgaacagcctgagagccgaggacacggctgtgtattactgtgcgagagatcgcaaaccgtattacgatattttgactggttattccgatgcttttgatatctggggccaagggacaatggtcaccgtctcttcag

SEQ ID NO: 1994 - DNA, 381 bp, Homo sapiens
caggtccagctggtacagtctggggctgaggtgaagaagcctggggcctcagtgaaggtctcctgcaaggtttccggatacaccctcactgaattatccatgcactgggtgcgacaggctcctggaaaagggcttgagtggatgggaggttttgatcctgaagatggtgaaacaatctacgcacagaagttccagggcagagtcaccatgaccgaggacacatctacagacacagcctacatggagctgagcagcctgagatctgaggacacggccgtgtattactgtgcaacggcgagcagtggctggtacggggattattactactactactacggtatggacgtctggggccaagggaccacggtcaccgtctcctca

SEQ ID NO: 1995 - DNA, 381 bp, Homo sapiens
gaggtgcagctggtgcagtctggagcagaggtgaaaaagcccggggagtctctgaagatctcctgtaagggttctggatacacctttacccgctactggatcggctgggtgcgccagatgcccgggaaaggcctggagtggatggggatcatctatcctggtgactctgataccagatacagcccgtccttccaaggccaggtcaccatctcagccgacaagtccatcagcaccgccttcctgcagtggagcagcctgaaggcctcggacaccgccatatattactgtgcgagacacctaggggcttacctagagatgcttacaatcgcctgggacggtatggacgtctggggcctagggaccacggtcaccgtctcctca

SEQ ID NO: 1996 - DNA, 361 bp, Homo sapiens
gaggtgcagctgttggagtctgggggaggcttggtacagcctggggggtccctgagactctcctgtgcagcctctggattcacctttagcagctatgccatgagctgggtccgccaggctccagggaaggggctggagtgggtcacagctatgagtggtagtggtggcagcacatactacgcagactccgtgaagggccggttcaccatctccagagacaattccaggaacacgctgtatctgcaaatgaacagcctgagagccgaggacacggccgtatattactgtgcgaaagatgtcgcacaatctaactactactttgactactggggccagggaaccctggtcaccgtctcctcag

SEQ ID NO: 1997 - DNA, 385 bp, Homo sapiens
cagctgcagctgcaggagtcgggcccaggactggtgaagccttcggagaccctgtccctcacctgcactgtctctggtggctccatcagcagtagtagttactactggggctggatccgccagcccccagggaaggggctggagtggattgggagtatcttttatagtgggagcacctactacaacccgtccctcaagagtcgagtcaccatatccgtagacacgtcgaagaaccagttctccctgaagctgagctctgtgaccgccgcagacacggctgtgtattactgtgcggggtatcttgttgatattgtagtagttccagctgccccgtttggagcttttgatatctggggccaagggacaatggtcaccgtctcttcag

SEQ ID NO: 1998 - DNA, 381 bp, Homo sapiens
caggtgcagctggtggagtctgggggaggcgtggtccagcctgggaggtccctgagactctcctgtgcagcctctggattcaccttcagtagctatgctatgcactgggtccgccaggctccaggcaaggggctggagtgggtggcagttatatcatatgatggaagcaataaatactacgcagactccgtgaagggccgattcaccatctccagagacaattccaagaacacgctgtatctgcaaatgaacagcctgagagctgaggacacggctgtgtattactgtgcgagaggtcggtactatggttcggggtccgggtcctactactactacggtatggacgtctggggccaagggaccacggtcaccgtctcctca

SEQ ID NO: 1999 - DNA, 381 bp, Homo sapiens
caggtgcagctggtggagtctgggggaggcatggtccagcctgggaggtccctgagactctcctgtgcagcctctggattcaccttcagtttctatactatgcactgggtccgccaggctccaggcaaggggctggagtgggtggcagttatatcatttgatggaattaataaatactacgcagactccgtgaagggccgattcaccatctccagagacaattccaagaacacgctgtatgtgcaaatgaacagtttgagacctgaggacacggctgtgttttactgtgcgagagatccagacggatactgtacttataccagctgctatttgcgcggtatggacgtctggggccaagggaccacggtcaccgtctcctca

SEQ ID NO: 2000 - DNA, 385 bp, Homo sapiens
caactgcagctgcaggagtcgggcccaggactggtgaagccttcggagaccctgtccctcacctgcactgtctctggtggctccatcagcagtagtaattactactggggctggatccgccagcccccagggaaggggctggagtggattgggactatctattatagtgggagcacctactacaacccgtccctcaagagtcgagtcaccatatccgtagacacgtccaagaaccggtactccctgaagctgacctctgtgaccgccgcagacacggctgtgtattactgtgcgagacacacccttcgggtcggggggttcggggagtttttaccggactactttgactactggggccagggaaccctggtcaccgtctcctcag

SEQ ID NO: 2001 - DNA, 385 bp, Homo sapiens
caggtgcagctgcaggagtcgggcccaggactggtgaagccttcacagaccctgtccctcacctgcactgtctctggtggctccatcagcagtggtggttactactggagctggatccgccagcacccagggaagggcctggagtggattgggtacatctattacagtgggagcacctactacaacccgtccctcaagagtcgagttaccatatcagtagacacgtctaagaaccagttctccctgaagctgagctctgtgactgccgcggacacggccgtgtattactgtgcgagagacgcttcgggtctcggcgggaaaggtggatacagctatggttactttgactactggggccagggaaccctggtcaccgtctcctcag

SEQ ID NO: 2002 - DNA, 381 bp, Homo sapiens
gaagtgcagctggtggagtctgggggaggcttggtacagcctggcaggtccctgagactctcctgtgcagcctctggattcacctttgatgattatgccatgcactgggtccggcaagctccagggaagggcctggaatgggtctcaggtagtacttggaatagtggtaccatagggtatgcggactctgtgaagggccgattcaccatctccagagacaacgccaagaactccctgtatctgcaaatgaacagtctgagagctgaggacacggccttgtattactgtgcaaaagattactatggttcggggagccctagccgtgactactactacggtatggacgtctggggccaagggaccacggtcaccgtctcctca

SEQ ID NO: 2003 - DNA, 381 bp, Homo sapiens
gaagtgcagctggtggagtctgggggaggcttggtacagcctggcaggtccctgagactctcctgtgcagcctctggattcacctttgatgattatgccatgcactgggtccggcaagctccagggaagggcctggagtgggtctcaggtattagttggaatagtggtagcataggctatgcggactctgtgaagggccgattcaccatctccagagacaacgccaagaactccctgtatctgcaaatgaacagtctgagagctgaggacacggccttgtattactgtgcaaaagatacccttatactatggttcggggagttatcgatccgggggggtatggacgtctggggccaagggaccacggtcaccgtctcctca

SEQ ID NO: 2004 - DNA, 361 bp, Homo sapiens
caggtgcagctggtggagtctgggggaggcgtggtccagcctgggaggtccctgagactctcctgtgcagcctctggattcaccttcagtaactatgctatacactgggtccgccaggctccaggcaaggggctggagtgggtggcagttatatcatatgatggaagtaataaacactacgcagactccgtgaagggccgattcaccatctccagagacaattccaagaacacgctgtatctgcaaatgaacagcctgagagctgaggacacggctgtgtattactgtgcgagctgggttactatggttcgggcagttcctgatagctggggccagggaaccctggtcaccgtctcctcag

SEQ ID NO: 2005 - DNA, 361 bp, Homo sapiens
caggtgcatctggtggagtctgggggaggcgtggtccagcctgggaggtccctgagactctcctgtgcagcctctggattcaccttcagtacctatgctatgcactgggtccgccaggctccaggcaaggggctggaatgggtggcagttatatcatatgatggaagtaataaatactacgcagactccgtgaagggccgattcaccatctccagagacaattccaagaacacgctgtatgtgcaaatgaacagcctgagacctgaggacacggctgtgtattactgtgcgagatctaaagggggtgcctacggaccatttgactactggggccagggaaccctggtcaccgtctcctcag

SEQ ID NO: 2006 - DNA, 361 bp, Homo sapiens
caggtggagctggtggagtctgggggaggcgtggtccagcctgggaggtccctgagactctcctgtgcagcctctggattcaccttcagtacctatgatatgcactgggtccgccaggctccaggcaaggggctggagtgggtggcagttatatcatatgatggaagtaataaattctacgcagactccgtgaagggccgattcaccatctccagagacaattccaagaacacggtgtatctgcaaatgaacagcctgagagctgaggacacggctgtctattactgtgcgagagatggtggtggctgggtgtactactttgaccactggggccagggaaccctggtcaccgtctcctcag

SEQ ID NO: 2007 - DNA, 361 bp, Homo sapiens
caggtgcagctggtggagtctgggggaggcgtggtccagcctgggaggtccctgagactctcctgtgcagcctctggattcaccttcagtagctatgctatgcactgggtccgccaggctccaggcaaggggctggagtgggtggcagttatatcatatgatggaagcaataaatactacgcagactccgtgaagggccgattcaccatctccagagacaattccaagaacacgctgtatctgcaaatgaacagcctgagagctgaggacacggctgtgtattactgtgcgaccggttcggggagttattataaccaacttgactactggggccagggaaccctggtcaccgtctcctcag

SEQ ID NO: 2008 - DNA, 361 bp, Homo sapiens
caggtgcagctggtggagtctgggggaggcgtggtccagcctgggaggtccctgagactctcctgtgcggcctctggattcaccttcagcagctttgctatgcactgggtccgccaggctccaggcaaggggctggagtgggtggcagttatatcatatgatggaagtcatagatcctacgcagactccgtgaagggccgattcaccatctccagagacagttccaggaactcgctgtatctgcaaatgaacagcctgagaagtgacgacacggctctctactactgtgcgagagggggtgggagctcgtcggtcgcatttgactcctggggccagggaaccctggtcaccgtctcctcag

SEQ ID NO: 2009 - DNA, 361 bp, Homo sapiens
caggtgcagctggtggagtctgggggaggcgtggtccagcctgggaggtccctgagactctcctgtgcagcctctggattcaccttcagtagctatgctatgcactgggtccgccaggctccaggcaaggggctggagtgggtggcagttatatcatatgatggaagcaataaatactacgcagactccgtgaagggccgattcaccatctccagagacaattccaagaacacgctgtatctgcaaatgaacagcctgagagctgaggacacggctgtgtattactgtgcgaggacccatgatggctacaaatcctactttgactactggggccagggaaccctggtcaccgtctcctcag

SEQ ID NO: 2010 - DNA, 361 bp, Homo sapiens
caggtgcagctggtggagtctgggggaggcgtggtccagcctgggaggtccctgagactctcctgtgcagcctctggattcaccttcagtaggtatgctatgcactgggtccgccaggctccaggcaaggggctggagtgggtggcagttatatcacatgatggaagcaataaatactacgcagactccgtgaagggccgattcaccatctccagagacaattccaagaacacgctgtatctgcagatgaacagcctgagagctggggacacggctgtctattactgtgcgagagctgagagtcctcatttccggcctttcgaatactggggccagggaaccctggtcaccgtctcctcag

SEQ ID NO: 2011 - DNA, 367 bp, Homo sapiens
cagatcaccttgaaggagtctggtcctacgctggtgaaacccacacagaccctcacgctgacctgcaccttctctgggttctcactcagcactagtggagtgggtgtgggctggatccgtcagcccccaggaaaggccctggagtggcttgcactcatttattgggatgatgataagcgctacagcccatctctgaagagcaggctcaccatcaccaaggacacctccaaaaaccaggtggtccttacaatgaccaacatggaccctgtggacacagccacatattactgtgcacacagagggctatggttcggggagttcaatcttgactactggggccagggaaccctggtcaccgtctcctcag

SEQ ID NO: 2012 - DNA, 361 bp, Homo sapiens
caggtgcagctggtggagtctgggggaggcgtggtccagcctgggaggtccctgagactctcctgtgcagcctctggattcaccttcaaaggctatgctatgcactgggtccgccaggctccaggcaaggggctggagtgggtggcagttatctcatatgatggaaacaataaatactacgcagactccgtgaagggccgattcaccatctccagagacaattccaagaatacgctgtttctgcaaatgaacagcctgagagctgaggacacggctctttattactgtgcgagcggaagtgggagctacttcagctggttcgacccctggggccagggaaccctggtcaccgtctcctcag

SEQ ID NO: 2013 - DNA, 382 bp, Homo sapiens
gaggtgcacctggtggagtctgggggagccttggtacagcctggagggtccctgagactctcctgtgcagcctctggattcaccttcagtagttatgaaatgaactgggtccgccaggctccagggaaggggctggagtgggtttcatacattagcagtagtggtagtaccatatactacgcagactctgtgaagggccgattcaccatctccagagacaacgccaggaactcactgtatctgcaaatgaacagcctgacagccgaggacacggctgtttattactgtgcgagagtccacatcgacggtccctttgaatggttgagagttggctgcttctttgactactggggccagggaaccctggtcaccgtctcctcag

SEQ ID NO: 2014 - DNA, 379 bp, Homo sapiens
gaggtgcagctggtggagtctgggggaaacttggtccagcctggggggtccctgagactctcctgtgcagcctctggattcgccgtcagtagcaactacatgagctgggtccgccaggctccagggaaggggctggagtgggtctcaattatttatagcggtgatagcacatactacgcggactccgtgcggggccgattcaccatctccagagacaattccaagaacaccctgtatcttcaaatgaacagcctgagaactgaggacacggctgtgtatttctgtgcgcgagtagcctcctataccagcacctcgtttatgtcggaaggggggtggttcgacccctggggccagggaaccctggtcaccgtctcctcag

SEQ ID NO: 2015 - DNA, 388 bp, Homo sapiens
gaggtgcagctggtggagtctgggggaggcttggtaaagcctggggggtcccttagactctcctgtgcagcctctggattcactttcagtaacgcctggatgagctgggtccgccaggctccagggaaggggctggagtgggttggccgtattaaaagcaaaactgatggtgggacaacagactacgctgcacccgtgaaaggcagattcaccatctcaagagatgattcaaaaaacacgctgtatctgcaaatgaacagcctgaaaaccgaggacacagccgtgtattactgtaccacagatccgtattgtggtggtgactgctacctattccacgcttccttatttgactactggggccagggaaccctggtcaccgtctcctcag

SEQ ID NO: 2016 - DNA, 388 bp, Homo sapiens
gaggtgcagctggtggagtctgggggaggcttggtaaagcctggggggtcccttagactctcctgtgcagcctctggattcactttcagtaacgcctggatgagctgggtccgccaggctccagggaagggactggagtgggttggccgtattaaaagcagaactgatggtgagacaacagactacgctgcacccgtgaaaggcagattcaccatctcaagagatgattcaaaaaacacgctgtctctgcaaatgaacagcctgaaaaccgaggacacagccgtgtattactgtaccacagatctaattatagtggctacgctaagttgggactccgtgcgtccttttgactactggggccagggaaccctggtcaccgtctcctcag

SEQ ID NO: 2017 - DNA, 381 bp, Homo sapiens
gaggtgcaattggtggagtctgggggaggcttggtccagcctggggggtccctgagactctcctgtgcagcctctggattcacctttagtagcttttgcatgagctgggtccgccaggctccagggaaggggctggagtgggtggccaacataaaacaagatggaagtgagaaatactatgtggactctgtgaagggccgattcaccatctccagagacaacgccaagaactcactgtatctgcaaatgaacagcctgagagccgaggacacggccgtgtattactgtgcgagagatagattcggttactatgattcgggaacccaccccgcctacggtatggacgtctggggccaagggaccacggtcaccgtctcctca

SEQ ID NO: 2018 - DNA, 382 bp, Homo sapiens
caggtgcagctggtgcagtctggggctgaggtgaagaagcctggggcctcagtgaaggtctcctgcaaggcttctggatacaccttcaccggctactatatgcactgggtgcgacaggcccctggacaagggcttgagtggatgggatggatcaaccctaacagtggtggcacaaactatgcacagaagtttcagggcagggtcaccatgaccagggacacgtccatcagcacagcctacatggagctgagcaggctgagatctgacgacacggccgtgtattactgtgcgagagattcggcgtattactatgatagtagtggttattacccgaactggttcgacccctggggccagggaaccctggtcaccgtctcctcag

SEQ ID NO: 2019 - DNA, 382 bp, Homo sapiens
gaggtgcagttggtgcagtctggagcagaggtgaaaaagcccgggcagtctctgaagatctcctgtaagagttctggttacagctttaccagctactggatcggctgggtgcgccagatgcccgggaaaggcctggagtggatgggaatcatctatcctggtgactctaagaccagatacagtccgtccttccaaggccaggtcaccatctcagtcgagaagtcaatcagcaccgcctacctgcagtggagcagcctgaaggcctcggacaccgccatgtattactgtgcgagacaactaggatattgtagtgacaccaactgttttggagggtgggaatttgactactggggccagggaagcctggtctccgtctcctcag

SEQ ID NO: 2020 - DNA, 382 bp, Homo sapiens
gaggtgcagctggtgcagtctggagcagaggtgaaaaagcccggggagtctctgaagatctcctgtaagggttctggatacagctttaccagctactggatcggctgggtgcgccagatgcccgggaaaggcctggagtggatggggatcatctatcctggtgactctgataccagatacagcccgtccttccaaggccaggtcaccatctcagccgacaagtccatcagcaccgcctacctgcagtggagcagcctgaaggcctcggacaccgccatgtattactgtgcgagacttaagccggggtttaattactatgatagtagtggttattactacattgactactggggccagggaaccctggtcaccgtctcctcag

SEQ ID NO: 2021 - DNA, 367 bp, Homo sapiens
cagatcaccttgaaggagtctggtcctacgctggtgaaatccacacagaccctcacgctgacctgcaccttctctgggttctcactcagcactagtggagtgggtgtgggctggatccgtcagcccccaggaaaggccctggagtggcttgcactcatttattgggatgatgataagcgctacagcccatctctgaagagcaggctcaccatcaccaaggacacctccaaaaaccaggtagtccttacaatgaccaacatggaccctgtggacacagccacatatttctgtgcacacaggggagtagtaccagctcccaacacttttgatatctggggccaagggacaatggtcaccgtctcttcag

SEQ ID NO: 2022 - DNA, 382 bp, Homo sapiens
gaggtgcagctggtgcagtctggagcagaggtgaaaaagcccggggagtctctgaagatctcctgtaagggttctggatacagctttaccagctactggatcggctgggtgcgccagatgcccgggaaaggcctggagtggatggggatcatctatcctggtgactctgataccagatacagcccgtccttccaaggccaggtcaccatctcagccgacaagtccatcagcaccgcctacctgcagtggagcagcctgaaggcctcggacaccgccatgtattactgtgcgagacccaaccacgagaattgtagtggtggtagctgcttccccgcccatttggattactggggccagggaaccctggtcaccgtctcctcag

SEQ ID NO: 2023 - DNA, 340 bp, Homo sapiens
caggtgcagctggtggagtctgggggaggcgtggtccagcctgggaggtccctgagactctcctgtgcagcctctggattcaccttcagtagctatggcatgcactgggtccgccaggctccaggcaaggggctggagtgggtggcaattatatcatatgatggaagtaataaatactatgcagactccgtgaagggccgattcaccatctccagagacaattccaagaacacgctgtatctgcaaatgagcagcctgagagctgaggacacggctgtgtattactgtgcgaaagacctcgacccctggggccagggaaccctggtcaccgtctcctcag

SEQ ID NO: 2024 - DNA, 337 bp, Homo sapiens
caggtgcacctgcaggagtcgggcccaggactggtgaagccttcggagaccctgtccctcacctgcactgtctctggtggctccatcagtagttactactggagctggatccggcagcccccagggaagggactggagtggattgggtatatctattacagtgggagcaccaactacaacccctccctcaagagtcgagtcaccatatcagtagacacgtccaagaaccagttctccctgaagctgagctctgtgaccgctgcggacacggccgtgtattactgtgcgaggggtttcgacccctggggccagggaaccctggtcaccgtctcgtcag

SEQ ID NO: 2025 - DNA, 355 bp, Homo sapiens
caggtgcagctggtggagtctgggggaggcttggtcaagcctggagggtccctgagactctcctgtgcagcctctggattcaccttcagtgactactacatgaactggatccgccaggctccagggaaggggctggagtgggtttcatatattagtagtagtggtagtagcatacactacgcagactctgtgaagggccgattcaccatctccagggacaacgccaagaactcagtgtatctgcagatgaacagcctgagagacgaggacacggccgtgtattactgtgcgagcagctggtaccccggatggttcgacccctggggccagggaatcctggtcacagtctcctcag

SEQ ID NO: 2026 - DNA, 340 bp, Homo sapiens
gaagtgcagctggtggagtctgggggaggcttcgtacagcctggcaggtccctgagactctcctgtgcagcctctggattcacctttgatgattatgccatgcactgggtccggcaagctccagggaagggcctggagtgggtctcaggtattagttggaatagtcgtaacataggctatgcggactctgtgaagggccgattcaccatctccagagacaacgccaagaactccctgtatctgcaaatgaacagtctgagagctgaggacacggccttgtattactgtgcaaaagatagtatcgactggggccagggaaccctggtcaccgtctcctcag

SEQ ID NO: 2027 - DNA, 355 bp, Homo sapiens
caggtgcagctggtggagtctgggggaggcgtggtccagcctgggaggtccctgagactctcctgtgcagcctctggattcaccttcagtagctatgctatgcactgggtccgccaggctccaggcaaggggctggagtgggtggcagttatatcatatgatggaagtaataaatattacgcagactccgtgaagggccgattcaccatctccagagacaattccaagaacacgctgtatctgcaaatgaacagcctgagagctgaggacacggctgtgtattactgtgcgaggtccgagggctacaagtactttgactactggggccagggaaccctggtcaccgtctcctcag

SEQ ID NO: 2028 - DNA, 355 bp, Homo sapiens
caggtgcagctggtggagtctgggggaggcgtggtccagcctgggaggtccctgagactctcctgtgcagcctctggattcaccttcagtagctatgctatgcactgggtccgccaggctccaggcaaggggctggagtgggtggcagttatatcatatgatggaagtaataaatactacgcagactccgtgaagggccgattcaccatctccagagacaattccaagaacacgctgtatctgcaaatgaacagcctgagagctgaggacacggctgtgtattactgtgcgagaggggatggctaccaggtctttgactactggggccagggaaccctggtcaccgtctcctcag

SEQ ID NO: 2029 - DNA, 361 bp, Homo sapiens
gaggtgcagctggtggagtctgggggagacttggtccagcctggagggtccctgagactctcctgtgcagcctctggattcaccttcagtaattactacatggactgggtccgccaggctccagggaaggggctggagtgggttggccgaattagaaacaaagctaatggttacaccactgaatacgccgcgtctgtgaaaggcagattcaccatctcaagagatgattcaaagaactcactgtctctgcaaatgaacagcctgaaaaccgaggacacggccgtgtattattgttctagagggtataccagtggctttattgactactggggccagggaaccctggtcaccgtctcctcag

SEQ ID NO: 2030 - DNA, 358 bp, Homo sapiens
cagatcaccttgaaggagtctggtcctacgctggtgaaacccacacagaccctcacgctgacctgcaccttctctgggttctcactcagcactagtggagtgggtgtgggctggatccgtcagcccccagggaaggccctggagtggcttgcactcatttattgggatgatgataagcgctacagcccatctctgaacagcagactcaccatcaccaaggacacctccaaagaccaggtggtccttacagtgaccagcatgggccctgtggacacagccacatattactgtgcgcgataccaccccctggctggttttgactactggggccagggaaccctggtcaccgtctcctcag

SEQ ID NO: 2031 - DNA, 356 bp, Homo sapiens
cagatcaccttgaaggagtctggtcctacgctggtgaaacccacacagaccctcacggtgacctgcaccttctctgggttctcactcagcactagtggagtgggtgtgggctggatccgtcagcccccaggaaaggccctggagtggcttgcactcatttattgggatgatgataagcgctacagcccatctctgaagagcagactcaccatcaccaaggacacctccaaaaaccgggtggtccttacaatgaccaacatggaccctgtggacacagccacatattactgtgcacacacctcccctcgggaacctcttgactactggggccagggaaccctggtcaccgtctcctc

SEQ ID NO: 2032 - DNA, 355 bp, Homo sapiens
caggtgcagctggtgcaatctgggtctgagttgaagaagcctggggcctcagtgaaggtttcctgcaaggcttctggatacaccttcactagctatgctatgaattgggtgcgacaggcccctggacaagggcttgagtggatgggatggatcaacaccaacactgggaacccaacgtatgcccagggcttcacaggacggtttgtcttctccttggacacctctgtcagcacggcatatctgcagatcagcagcctaaaggctgaggacactgccgtgtattactgtgcgatcagcagctggtccttcatctttgactactggggccagggaaccctggtcaccgtctcctcag

SEQ ID NO: 2033 - DNA, 382 bp, Homo sapiens
caggtgcagctggtgcagtctggggctgaggtgaagaagcctgggtcctcggtgaaggtctcctgcaaggcttctggaggcagtttcagcatctatgctatcagctgggtgcgacaggcccctggacaaggccttgagtggatgggagagatcatccctatctctggtacaccaaactacgcacagaagttccagggcagagtcacgattaccgcgggcgaatccacgaccacagcctacatggagctgagcagcctgagatctgaggacacggccgtgtattactgtgcgagagtcggtcggacctattatgatgatagtagtggttattggaattggttcgacccctggggccagggaaccctggtcaccgtctcctcag

SEQ ID NO: 2034 - DNA, 352 bp, Homo sapiens
gaggtgcagttggtggagtctgggggaggcttggtccagccgggggggtccctgagactctcctgtgcaggctctggaatcatcgtcagtagcaactacatgagctgggtccgccaggctccagggaaggggctggagtgggtctcacttatttatagcggtggcagcacatactacgcagactccgtgaagggccgattcaccatctccagagacaattccaagaacacgctgtatcttcaaatgaatagcctgagagctgaggacacggctgtgtattactgtgcgagagatcgcggccccggggtacatgactactggggccagggaaccctggtcaccgtctcctcag

SEQ ID NO: 2035 - DNA, 352 bp, Homo sapiens
gaggtgcaactggtggagtctgggggaggcttggtccagcctggggggtccctgagactctcctgtgcagcctctggagtcaccgtcagtagcaactacatgagctgggtccgccaggctccagggaaggggctggagtgggtctcagtgatttatagcggtggtagcacattctacacagactccgtgaagggccgattcaccatctccagagacaattccaagaacactctgtttcttcagatgaacaacctgagacttgaggacacggctgtatattactgtgcgaggaactggggtaatgatgcttttgatatctggggccaagggacaatggtcaccgtctcttcag

SEQ ID NO: 2036 - DNA, 355 bp, Homo sapiens
caggtgcagctggtgcagtctggggctgaggtgaagaagcctggggcctcagtgaaggtctcctgcaaggcttctggatacaccttcaccggctactatatgcactgggtgcgacaggcccctggacaagggcttgagtggatgggatggatcaaccctaacagtggtggcacaaactatgcacagaagtttcagggcagggtcaccatgaccagggacacgtccatcagcacagcctacatggagctgagcaggctgagatctgacgacacggccgtgtattactgtgcgagagacgatattttgactggcaccaactactggggccagggaaccctggtcaccgtctcctcag

SEQ ID NO: 2037 - DNA, 355 bp, Homo sapiens
caggtgcagctggtgcagtctggggttgaggtgaagaagcctggggcctcagtgaaggtctcctgcaaggcttctggatacaccttctccgtctactatatgcactgggtgcgacaggcccctggacaagggcttgagtggatgggatggatcaaccctaacagtggtggcacatactatgcacagaagtttcagggcagggtcaccatgaccagggacacgtccatcagcacagcctacatggagctgagcaggctgagatctgacgacacggccgtgtattactgtgcgagtgggtgggagttcgtcggttttgactactggggccagggaaccctggtcaccgtctcctcag

SEQ ID NO: 2038 - DNA, 355 bp, Homo sapiens
gaggtgcagctggtgcagtctggagcagaggtgaaaaagccgggggagtctctgaagatctcctgtaagggttctggatacagctttaccagctactggatcggctgggtgcgccagatgcccgggaaaggcctggagtggatggggatcatctatcctggtgactctgataccagatacagcccgtccttccaaggccaggtcaccatctcagccgacaagtccatcagcaccgcctacctgcagtggagcagcctgaaggcctcggacaccgccatgtattactgtgcgagacatatctcccggaccggttttgatatctggggccaagggacaatggtcaccgtctcttcag

SEQ ID NO: 2039 - DNA, 351 bp, Homo sapiens
gaggtgcagctggtggaatctggaggaggcttgatccagcctggggggtccctgagactctcctgtgcagcctctgggttaaccgtcagtagcaattacatgaactgggtccgccaggctccagggaaggggctggagtgggtctcagttatttatagcggtggtagtacattctacgcagactccgtgaagggccgattcaccatctccagagacaattccaagaacacgctgtttcttcaaatgaacagcctgagagccgaggacacggccgtgtattactgtgtgagagatctggactactacggtatggacgtctggggccaagggaccacggtcaccgtctcctca

SEQ ID NO: 2040 - DNA, 354 bp, Homo sapiens
caggtgcagctggtgcagtctggggctgaggtgaagaagcctggggcctcagtgaaggtctcctgcaaggcttctggatacaccttcatcggccactttatgcactgggtgcgacaggcccctggacaagggcttgagtggatgggatgggtcaaccctaacagtggaggcacaaactatgcacagaagtttcagggcagggtcaccgtgaccagggacacgtccatcagcacagcctacatggaggtgagcaggctgagatctgacgacacggccgtgtattactgtgcgagaggacccgggtataccactttggacgtctggggccaagggaccacggtcaccgtctcctca

SEQ ID NO: 2041 - DNA, 354 bp, Homo sapiens
gaggtgcagctggtggagtctggaggaggcttggtccagcctggggggtccctgagactctcctgtgcagcctctggggtcaccgtcagtagcaactacatgagctgggtccgccaggctccagggaaggggctggagtgggtctcagttatttatagcggtggtagtacatactacgcagactccgtgaagggccgattcaccatctccagacacaattccaagaacacgctgtatcttcaaatgaacagcctgagagctgaggacacggccgtatattactgtgcgagagatctacaagagggtggtggtctggacgtctggggccaagggaccacggtcaccgtctcctca

SEQ ID NO: 2042 - DNA, 354 bp, Homo sapiens
gaggtgcagctggtgcagtctggagcagaggtgaaaaagcccggggagtctctgaagatctcctgtaagggttctggatacagctttaccagctactggatcggctgggtgcgccagatgcccgggaaaggcctggagtggatggggatcatctatcctggtgactctgataccagatacagcccgtccttccaaggccaggtcaccatctcagccgacaagtccatcagcaccgcctacctgcagtggagcagcctgaaggcctcggacaccgccatgtattactgtgcgagatcgacgatatgggacggtatggacgtctggggccaagggaccacggtcaccgtctcctca

SEQ ID NO: 2043 - DNA, 384 bp, Homo sapiens
caggtgcagctgcaggagtcgggcccaggactggtgaagccttcggagaccctgtccctcacctgcactgtctctggtggctccatcagtagttactactggagctggatccggcagcccgccgggaagggactggagtggattgggcgtatctataccagtgggagcaccaactacaacccctccctcaagagtcgagtcaccatgtcagtagacacgtccaagaaccagttctccctgaagctgagctctgtgaccgccgcggacacggccgtgtattactgtgcgagagaggggtattactatgatagtagtggttatcatacctactactactacggtatggacgtctggggccaagggaccacggtcaccgtctcctca

SEQ ID NO: 2044 - DNA, 384 bp, Homo sapiens
caggtgcagctacagcagtggggcgcaggactgttgaagccttcggagaccctgtccctcacctgcgctgtctatggtgggtccttcagtggttactactggagctggatccgccagcccccagggaaggggctggagtggattggggaaatcaatcatagtggaagcaccaactacaacccgtccctcaagagtcgagtcaccatatcagtagacacgtccaagaaccagttctccctgaagctgagctctgtgaccgccgcggacacggctgtgtattactgtgcgagagggatctcaattcgggggttcggggagctcctaaggggttactactacggtatggacgtctggggccaagggaccacggtcaccgtctcctca

SEQ ID NO: 2045 - DNA, 393 bp, Homo sapiens
gaggtgcagctggtggagtctgggggaggcttggtaaagcctggggggtcccttagactctcctgtgcagcctctggattcactttcattaacgcctggatgagctgggtccgccaggctccagggaaggggctggagtgggttggccgtgttaaaagtaaaactgatggtgggacaacagactacgctgcacccgtgaaaggcagattcaccatctcaagagatgatgcagagaacacactgtatctgcaaatgaacagcctgaaaaccgaggacacagccgtgtattactgtaccacagattcccgagccctgtcctccggtgaaattattaactactactactatggtatggacgtctggggccaagggaccacggtcaccgtctcctca

SEQ ID NO: 2046 - DNA, 393 bp, Homo sapiens
gaggtgcagctggtggagtctgggggaggcttggtaaagcctggggggtcccttagactctcctgtgcagcctctggattcactttcagtaacgcctggatgagctgggtccgccaggctccagggaaggggctggagtgggttggccgtattaaaaacaaaactgatggtgggacaacagactacgctacacccgtgaaaggcagattcaccatctcaagagatgattcaaaaaacacgctgtatctgcaaatgaacagcctgaaaaccgaggacacagccgtgtattactgtaccacagggtccgatagtagtggttatcacgacctttgggcctactactactacggtatggacgtctggggccaagggaccacggtcaccgtctcctca

SEQ ID NO: 2047 - DNA, 352 bp, Homo sapiens
caggtgcagctgcaggagtcgggcccaggactggtgaagccttcggagaccctgtccctcacctgcagtgtctctggtggctccatcagaagttccttctggagctggatccggcagcccccagggaagggactggagtggattggatatatctattaccgtgggagcaccaactacaacccctccctcaagagtcgagtcaccatttcagtagacacgtccaagacccagttctccatgaacctgaggtctgtgaccgctgcggacacggccgtgtattattgtgcgagatcgggtggttcggggagttacatcgactggggccagggaaccctggtcaccgtctcctcag

SEQ ID NO: 2048 - DNA, 387 bp, Homo sapiens
gaggtgcagctggtggagtctgggggaggcctggtcaagcctggggggtccctgagactctcctgtgcagcctctggattcaccttcagtagctatagcatgaactgggtccgccaggctccagggaaggggctggagtgggtctcatccattagtagtagtagtagttacatatactacgcagactcagtgaagggccgattcaccatctccagagacaacgccaagaactcactgtatctgcaaatgaacagcctgagagccgaggacacggctgtgtattactgtgcgagagatctcgatattttgactggttattattccttggagatccactactacggtatggacgtctggggccaagggaccacggtcaccgtctcctca

SEQ ID NO: 2049 - DNA, 385 bp, Homo sapiens
caggtgcagctgcaggagtcgggcccaggactggtgaagccttcggagaccctgtccctcacctgcactgtctctggtggctccatcagtagttactactggagctggatccggcagcccccagggaagggactggagtggattgggtatatctattacagtgggagcaccaactacaacccctccctcaagagtcgagtcaccatatcagtagacacgtccaagaaccagttctccctgaagctgagctctgtgaccgctgcggacacggccgtgtattactgtgcgagaggccaaaattactatggttcggggagttattatagccttaattacaactggttcgacccctggggccagggaaccctggtcaccgtctcctcag

SEQ ID NO: 2050 - DNA, 387 bp, Homo sapiens
caggtgcagctggtgcagtctggggctgaggtgaagaagcctggggcctcagtgaaggtctcctgcaaggcttctggatacatcttcaccggctattttatgcactgggtgcgacaggcccctggacaagggcttgagtggatgggatggatcaaccctaacagtggtggcacaaactatgcacagatgtttcagggcagggtcaccatgaccagggacacgtccatcagcacagcctacatggagctgagcaggctgagatctgacgacacggccgtgtatttctgtgcgagagtaacaaccataccccaggacgactacagtgactattattactactacggattggacgtctggggccaagggaccacggtcaccgtcacctca

SEQ ID NO: 2051 - DNA, 354 bp, Homo sapiens
gaggtgcagctggtggagtctggaggaggcttgatccagcctggggggtccctgagactctcctgtgcagcctctgggatcaccgtcgttaggaactacatgacttgggtccgccaggctccagggaaggggcttgagtgggtctcagtaatttatagcggtggtaccacatactacgcagactccgtgaagggccgattcaccatctccagagacaactccaagaacacgatgtatcttcaaatgaacagcctgagagccgaggacacggccatttattactgtgcgagagatcttgaagtagtgggtgctatggacgtctggggccaagggaccacggtcaccgtctcctca

SEQ ID NO: 2052 - DNA, 388 bp, Homo sapiens
gaggtgcagctggtgcagtctggagcagaggtgaaaaagccgggggagtctctgaagatctcctgtaagggttctggatacagctttaccagctactggatcggctgggtgcgccagatgcccgggaaaggcctggagtggatggggatcatctatcctggtgactctgataccagatacagcccgtccttccaaggccaggtcaccatctcagccgacaagtccatcagcaccgcctacctgcagtggagcagcctgaaggcctcggacaccgccatgtattactgtgcgagacattccccattccgcatgccttgtagtagtaccagctgctatgctagctggttcgacccctggggccagggaaccctggtcaccgtctcctcag

SEQ ID NO: 2053 - DNA, 385 bp, Homo sapiens
gaggtgcagctggtggagtctggaggaggcttgatccagcctggggggtccctgagactctcctgtgcagcctctgggttcaccgtcagtagcaactacatgagctgggtccgccaggctccagggaaggggctggagtgggtctcagttatttatagcggtggtagcacatactacgcagactccgtgaagggccgattcaccatctccagagacaattccaagaacacgctgtatcttcaaatgaacagcctgagagccgaggacacggccgtgtattactgtgcgagagttttgtattatgattacgtttgggggagttatcgttataccccgggctggttcgacccctggggccagggaaccctggtcaccgtctcctcag

SEQ ID NO: 2054 - DNA, 388 bp, Homo sapiens
gaggtgcagctggtggagtctgggggaggcttggtccagcctggggggtccctgagactctcctgttcagcctctggattcaccttcagtagctatgctatgcactgggtccgccaggctccagggaagggactggaatatgtttcagctattagtagtaatgggggtagcacatactacgcagactccgtgaagggcagattcaccatctccagagacaattccaagaacacgctgtatcttcaaatgagcagtctgagagctgaggacacggctgtgtattactgtgtgaaagatctctttgattacgtttgggggagttatcgttatactgattccctttcctttgactactggggccagggaaccctggtcaccgtctcctcag

SEQ ID NO: 2055 - DNA, 388 bp, Homo sapiens
caggtgcagctggtggagtctgggggaggcgtggtccagcctgggaggtccctgagactctcctgtgcagtctctggatttaccttcagtagctatgctatgaactgggtccgccaggctccaggcaaggggctggagtgggtggcagttatatcatatgatggaagcaataaatactacgcagactccgtgaagggccgattcaccatctccagagacaattccaagaacacgctgtatctgcaaatgaacagtctgagagctgaggacacggccttgtattactgtgcaaaagatcgggttcgatctttctacgttttactatgatagtagtgattattaagagcggactactggggccagggaaccctggtcaccgtctcctcag

SEQ ID NO: 2056 - DNA, 388 bp, Homo sapiens
caggtccagctggtgcaatctggggctgaggtgaagaagcctgggtcctcggtgaaggtctcctgcaaggcttctggaggcaccttcaacaactatactatcagctgggtgcgacaggcccctggacaagggcttgagtggatgggaaggatcatccctatccttgatataacaaactacgcacagatgctccagggcagagtcacgattaccgcggacaaatccacgagcacagtctatatggagctgagcagcctgagatctgaggacacggccgtgtattactgtgcgagagtccccaaccctgattactatgatagtagtggttaccattaccgctggtacttcgatctctggggccgtggcaccctggtcactgtctcctcag

SEQ ID NO: 2057 - DNA, 391 bp, Homo sapiens
caggtgcagctgcaggagtcgggcccaggactggtgaagccttcggagaccctgtccctcacctgcactgtctctggtggctccgtcagcagtggtagttactactggagctggatccggcagcccccagggaagggactggagtggattgggtatatctattacagtgggagcaccaagtacaacccctccctcaagagtcgagtcaccatatcagtggacacgtccaagaaccagttttccctgaagctgaggtctgtgaccgctgcggacacggccgtctattactgtgcgagaggagcaacatcaaaataccatgatagtcgaggtttcacggaatactggtacttcgatctctggggccgtggcaccctggtcactgtctcctcag

SEQ ID NO: 2058 - DNA, 388 bp, Homo sapiens
gaggtgcagctggtggagtctgggggaggcctggtcaagcctggggggtccctgagactctcctgtgcagcctctggattcaccttcagtagctatagcatgaactgggtccgccaggctccagggaaggggctggagtgggtctcatccattggtcctactagtagttccctatactacgcagactcagtgaagggccgattcaccatctccagagacaacgccaagaactcactgtatctgcaaatgaacagcctgagagccgaggacacggctgtgtattactgtgcgagaaaggggatagcgtcttactatgatagtagtggttattacagggatgatgcttttgatatctggggccaagggacaatggtcaccgtctcttcag

SEQ ID NO: 2059 - DNA, 346 bp, Homo sapiens
gaggtgcagctggtggagtctggaggaggcttgatccagcctggggggtccctgagactctcctgtgcagcctctgggttcaccgtcagtagcaactacatgagctgggtccgccaggctccagggaaggggctggactgggtctcgattatttatagcggtggtagcacatactacgcagactccgtgaagggccgattcaccatctccagagacaattccaagaacacgctgtatcttcaaatgaacagcctgagagccgaggactcggccgtgtattactgtgtgacaggtcgtgggtcttcattggggatgggccagggaaccctggtcaccgtctcctcag

SEQ ID NO: 2060 - DNA, 388 bp, Homo sapiens
caggtccagctggtgcaatctggggctgaggtgaagaagcctgggtcctcggtgaaggtctcctgcaaggcctctggaggcaccttcagcaattatagtatcagctgggtgcgacaggcccctggacaagggcttgagtggatgggaaggatcatccctatctttgatataacaaactacgcacagaagttccagggcagagtcacgattaccgcggacaaatccacgagcacagcctacatggagctgagcagcctgagatctgaggacacggccgtatattactgtgcgcgagtccaatctagtgggagctactccggggcggtgcaccaggccctcaactggttcgacccctggggccagggaaccctggtcaccgtctcatcag

SEQ ID NO: 2061 - DNA, 386 bp, Homo sapiens
caggttcagctggtgcagtctggagctgaggtgaagaagcctggggcctcagtgaaggtctcctgcaaggcttctggttacacctttaccaggtatggtatcagctgggtgcgacaggcccctggacaagggcttgagtggatgggatggatcagcgcttacaatggtaacacaaactatgaacagaagttccagggcagagtcaccatgaccacagacacatccacgagcacagcctacatggagctgaggagcctgagatctgacgacacggccgtgtattactgtgcgagagagaggggatattgtagtggtggtaggtgttccccacccctcgctacggtatggacgtctggggccaagggaccacggtcaccgtctcctca

SEQ ID NO: 2062 - DNA, 384 bp, Homo sapiens
caggtccagctggtacagtctggggctgaggtgaagaagcctggggcctcagtgaaggtctcctgcaaggtttccggatacaccctcactgaattatccatgcactgggtgcgacaggctcctggaaaagggcttgagtggatgggaggttttgatcctgaagatggtgaaacaatctacgcacagaagttccagggcagagtcaccatgaccgaggacacatctacagacacagcctacatggagctgagcagcctgagatctgaggacacggccgtgtattactgtgcaacaggattcgcagtggctggtacacctcagtattactactactactacggtatggacgtctggggccaagggaccacggtcaccgtctcctca

SEQ ID NO: 2063 - DNA, 372 bp, Homo sapiens
gaggtacagctgttggagtctggtggaggcttggtacagcctggggggtccctgagactctcctgtgcagcctctggattcacctttagcagctatgccatgagctgggtccgccaggctccagggaaggggctggagtgggtctcagctattagtggtagcggtggtagcacatactacgcagactccgtgaagggccggttcaccatctccagagacaattccaagaacacgctgtatgtgcaaatgaacagcctgagagccgaggacacggccgtatattactgtgcgaaggcgagtggctacgattggggggactactactacggtatggacgtctggggccaagggaccacggtcaccgtctcctca

SEQ ID NO: 2064 - DNA, 387 bp, Homo sapiens
gaagtgcagctggtgcagtccggagcagaggtgaaaaagcccggggagtctctaagaatctcctgtaagggttctggatacagctttaccagctactggatcacctgggtgcgccagatgcccgggaaaggcctggagtggatggggatgattgatcctagtgactcttatttcaactacagcccgtccttccaaggccacgtcaccatctcagctgacaagtccatcagcactgcctgcctgcagtggagcagcctgaaggcctcggacaccgccatgtattgctgtgcgagactggatttagtagtaccagctgctatttttctgtccgggcaaccgaattctttgactactggggccagggaaccctggtcaccgtctcctcag

SEQ ID NO: 2065 - DNA, 372 bp, Homo sapiens
gaggtgcagctggtggagtctgggggaggcttggtacagcctggagggtccctgagactctcctgtgcagcctctggattcaccttcagtagttatgaaatgaactgggtccgccaggctccagggaaggggctggagtgggtttcatacattagtagtagtggtagtaccatatactacgcagactctgtgaagggccgattcaccatctccagagacaacgccaagaactcactgtatctgcaaatgaacagcctgagagccgaggacacggctgtttattactgtgcgagagggggtatagcaacctattactactactactacggtatggacgtctggggccaagggaccacggtcaccgtctcctca

SEQ ID NO: 2066 - DNA, 375 bp, Homo sapiens
caggtgcagctgcaggagtcgggcccaggactgatgaagccttcacagaccctgtccctcacctgcactgtctctggtggctccatcaacaatggtggcaactactggagctggatccgccagcacccagagaagggcctggagtggattgggtacatctattacagtgggagcacctactacaacccgtccctcaagagtcgcgttaccatatcagtagacacctctaagaaccagttctccctgaagctgagctctgtgactgccgcggacacggccgtgtattactgtgcgagggaacatggatacagctatggcagagactactacggtatggacgtctggggccaagggaccacggtcaccgtctcctca

SEQ ID NO: 2067 - DNA, 375 bp, Homo sapiens
cagctgcagctgcaggagtcgggcccaggactggagaagccttcggagaccctgtccctcacctgcactgtctctggtggctccatcagcagtagaagttactactggggctggatccgccagcccccagggaaggggctggagtggattgggaatatctatcacagtgggagcacctactacaacccgtccctcaagagtcgagtcaccatatccgtagaagtgtccaacaaccagttgtccctgaggctgagctctgtgaccgccgcagacacggctgtgtattactgtgcggcagaggctattactatggttcggggagttagctacggtatggacgtctggggccaagggaccacggtcagcgtctcctca

SEQ ID NO: 2068 - DNA, 369 bp, Homo sapiens
caggtgcagctgcaggagtcgggcccaggactggtgaagccttcggagaccctgtccctcacctgcactgtctctggtggctccatcagtagttactactggagctggatccggcagcccgccgggaagggactggagtggattgggcgtatctataccagtgggagcaccaactacaacccctccctcaagagtcgagtcaccatgtcagtagacacgtccaagaaccagttctccctgaagctgagctctgtgaccgccgcggacacggccgtgtattactgtgcgagagattggtggtactatggttcgggtggtcccggcggtatggacgtctggggccaagggaccacggtcaccgtctcctca

SEQ ID NO: 2069 - DNA, 369 bp, Homo sapiens
caggtgcagctgcaggagtcgggcccaggactggtgaagccttcggagaccctgtccctcacctgcactgtctctggtggctccatcagtagttactactggagctggatccggcagcccccagggaagggactggagtggattgggtatatctattacagtgggagcaccaactacaacccctccctcaagagtcgagtcaccatatcagtagacacgtccaagaaccagttctccctgaagctgagctctgtgaccgctgcggacacggccgtgtattactgtgcgagatcccgttcggggagttattccgactactactacggtatggacgtctggggccaagggaccacggtcaccgtctcctca

SEQ ID NO: 2070 - DNA, 372 bp, Homo sapiens
caggtgcagctggtgcagtctggggctgaggtgaagaagcctgggtcctcggtgaaggtctcctgcaaggcttctggaggcaccttcagcagttatgctctcagctgggtgcgacagccccctggacaagggcttgagtggatgggagggatcatccctttctttagtacaacaaactacgcacagaagttccagggcagagtcacgatcaccgcggacgaatccacgagtacagcctacatggagctgagcagcctgagatcagacgacacggccgtttattactgtgcgatcagtggctgggaaccaaattactactactactacggaatggacgtctggggccaagggaccacggtcaccgtctcctca

SEQ ID NO: 2071 - DNA, 372 bp, Homo sapiens
gaggtgcagctggtggagtccgggggaggcttagttcagcctggggggtccctgagactctcctgtgcagcctctggattcaccttcagtagctactggatgcactgggtccgccaagctccagggaaggggctggtgtgggtctcacgtattaatagtgatgggagtagcacaagctacgcggactccgtgaagggccgattcaccatctccagagacaacgccaagaacacgctgtatctgcaaatgaacagtctgagagccgaggacacggctgtgtattactgtgcaagagggacagtgggagctactggatactactactacggtatggacgtctggggccaagggaccacggtcaccgtctcctca

SEQ ID NO: 2072 - DNA, 372 bp, Homo sapiens
gaagtgcagctggtggagtctgggggaggcttggtacagcctggcaggtccctgagactctcctgtgcagcctctggattcacctttgatgattatgccatgcactgggtccggcaagctccagggaagggcctggagtgggtatcaggtattagttgggatagtggtagcataggctatggggactctgtgaagggccgattcaccatctccagagacaacgccaagaactccctgtatctgcaaatgaacagtctgagagctgaggacacggccttgtattactgtgcaaaaagcgcgacgggatggttcggggagttaccgagaggtatggacgtctggggccaaggggccacggtcaccgtctcctca

SEQ ID NO: 2073 - DNA, 384 bp, Homo sapiens
caggtccagctggtacagtctggggctgaggtgaagaagcctggggcctcagtgaaggtctcctgcaaggtttccggatacaccctcactgaattatccatgcactgggtgcgacaggctcctggaaaagggcttgagtggatgggaggttttgatcctgaagatggtgaaacaatctacgcacagaagttccagggcagagtcaccatgaccgaggacacatctacagacacagcctacatggagctgagcagcctgagatctgaggacacggccgtgtattactgtgcaacaggagtggtggttcggggatcaagggaatattactactactactacggtatggacgtctggggccaagggaccacggtcaccgtctcctca

SEQ ID NO: 2074 - DNA, 372 bp, Homo sapiens
gaagtgcagctggtggagtctgggggaggcttggtacagcctggcaggtccctgagactctcctgtgcagcctctggattcacctttgatgattatgccatgcactgggtccggcaagctccagggaagggcctggagtgggtctcaggtattagttggaatagtggtagcaaaggctatgcggactctgtgaagggccgagtcaccatctccagagacaacgccaagaactccctgtatctgcaaatgaacagtctgagagctgacgactcggccttgtattactgtgcaaaatccgttcacagtttcggggaattttttctaagcagtatggacgtctggggccaagggaccacggtcaccgtctcctca

SEQ ID NO: 2075 - DNA, 373 bp, Homo sapiens
caggtgcagctggtgcagtctggggctgaggtgaagaagcctggggcctcagtgaaggtttcctgcaagacatctggatacaccttcaccaggtactatatgcactgggtgcgacaggcccctggacaagggcttcagtggatgggaataatcaaccctagtggtggtagcacatcctacgcacagaagttccggggcagagtcaccatgaccagcgacacgtccacgagcacagtctacatggagctgagcagcctgagatctgatgacacggccgtgtattactgtgcgagcggtagtgatagtagtggttatcatcctgcggggtactttgactactggggccagggaaccctggtcaccgtctcctcag

SEQ ID NO: 2076 - DNA, 373 bp, Homo sapiens
caggtgcagctggtgcaatctggggctgagttgaagaagcctggggcctcagtgaaggtctcctgcaaggcttctggatacaccttcaccggctactatatgcactgggtgcgacaggcccctggacaaggacttgagtggatgggatggatcaaccctaccagtggtggcacaaactatgcacagaagtttcagggcagggtcaccatgaccagggacacgtccatcagcacagtctacatggagctgaacaggctgagatctgacgacacggccatttattactgtgcgaaactagcgtattactatgatagtagtggacaaacagcatttgactactggggccagggaaccctggtcaccgtctcctcag

SEQ ID NO: 2077 - DNA, 373 bp, Homo sapiens
caggtgcagctggtgcagtctggggctgaggtgaagaagcctggggcctcagtgaaggtctcctgcaaggcttctggatacaccttcaccggctactatatgcactgggtgcgacaggcccctggacaagggcttgagtggatgggatggatcaaccctaacagtggtggcacaaactatgcacagaagtttcagggcagggtcaccatgaccagggacacgtccatcagcacagcctacatggagctgagcaggctgagatctgacgacacggccgtgtattactgtgcgagagacgacggaaacgctatagcagcagctggtacaggagttgactactggggccagggaaccctggtcaccgtctcctcag

SEQ ID NO: 2078 - DNA, 373 bp, Homo sapiens
caggttcagctggtgcagtctggagctgaggtgaagaagcctggggcctcagtgaaggtctcctgcaaggcttctggttacacctttaccagctacggtatcagctgggtgcgacaggcccctggacaagggcttgagtggatggggtggatcagcgcttacaatggtaacacaaactatgcacagaagctccagggcagagtcaccatgaccacagacacatccacgagcacagcctacatggagctgaggagcctgagatttgacgacacggccgtgtattactgtgcgagagtcgggacgtattactatgatagtagtgcttattactttgacttctggggccagggaaccctggtcaccgtctcctcag

SEQ ID NO: 2079 - DNA, 373 bp, Homo sapiens
caggtgcagctggtggagtctgggggaggcgtggtccagcctgggaggtccctgagactctcctgtgcagcctctggattcaccttcagtagctatggcatgcactgggtccgccaggctccaggcaaggggctggagtgggtggcagttatatcatatgatggaagtaataaatactatgcagactccgtgaagggccgattcaccatctccagagacaattccaagaacacgctgtatctgcaaatgaacagcctgagagctgaggacacggctgtgtattactgtgcgaaagagggttactatgatagtagtggttattacgtttctgggtactactggggccagggaaccctggtcaccgtctcctcag

SEQ ID NO: 2080 - DNA, 373 bp, Homo sapiens
caggtgcagctggtggagtctgggggaggcgcggtccagcctgggaggtccctgagactctcctgtgcagcctctggattcatcttcattagctatggcatgcactgggtccgccaggctccaggcaaggggctggagtgggtggcagtcatatcatatgatggaagtaacaaatactatgcagactccgtgaagggccgattcaccatctccagagacaattccaagaacacgctatatctacaaatgaacagcctgagagctgaggacacggctgtgtattactgtgcgaaacccccccgacggagtagcagcagctggtactccccctttgactactggggccagggaaccctggtcaccgtctcctcag

SEQ ID NO: 2081 - DNA, 373 bp, Homo sapiens
caggtgcagctggtgcagtctggggctgaggtgaagaagcctggggcctcagtgaaggtctcctgcaaggcttctggatacaccttcaccggctactatatgcactgggtgcgacaggcccctggacaagggcttgagtggatgggatggatcaaccctaacagtggtggcacaaactatgcacagaagtttcagggcagggtcaccatgaccagggacacgtccatcagcacagcctacatggagctgagcaggctgagatctgacgacacggccgtgtattactgtgcgagagccccgcgtatagcagcagctggttcgcagtggtacttcgatctctggggccgtggcaccctggtcactgtctcctcag

SEQ ID NO: 2082 - DNA, 373 bp, Homo sapiens
gaagtgcagctggtggagtctgggggaggcttggtacagcctggcaggtccctgagactctcctgtgcagcctctggattcacctttgatgattatgccatgcactgggtccggcaagctccagggaagggcctggagtgggtctcaggtattagttggaatagtggtagcataggctatgcggactctgtgaagggccgattcaccatctccagagacaacgccaagaactccctgtatctgcaaatgaacagtctgagagctgaggacacggccttgtattactgttcccgctcacccatatattgtagtagtaccagctgccgttacttcgatctctggggccgtggcaccctggtcactgtctcctcag

SEQ ID NO: 2083 - DNA, 358 bp, Homo sapiens
caggtccagttggtacagtctggggctgaggtgaagaagcctggggcctcagtgaaggtctcctgcaagctttccggatccaccctcactgaattctccattcactgggtgcgacaggctcctggaaaagggcttgagtggatgggacgttttgatcttgaagatggtgaaacactctacgcacagaaggtgcagggcagagtcatcatgaccggggacacatctacagacacagcctacatggagatgagcagcctgagatctgaggacacggccgtatattactgtgcaacatctcaggacctcccggatggtgttgatatctggggccgagggacaatggtcaccgtctcttcag

SEQ ID NO: 2084 - DNA, 370 bp, Homo sapiens
caggtgcagctgcaggagtcgggcccaggactggtgaagccttcggagaccctgtccctcacctgcactgtctctggtggctccatcagtagttactactggagctggatccggcagcccgccgggaagggactggagtggattgggcatatctatagcggtgggagcaccaactacaacccctccctcaagagtcgagtcaccatgtcagtagacacgtccaagaaccagttctccctgaagctgagctctgtgaccgccgcggacacggccgtgtattactgtgcgagagatggaactcatggttcggggagttggaactggtacttcgatctctggggccgtggcaccctggtcactgtgtcctcag

SEQ ID NO: 2085 - DNA, 373 bp, Homo sapiens
gaggtgcacttggaggagtctgggggaggcctggtcaagcctggggggtccctgagactctcctgtgcagcctctggattcagtttcagtacttataccatgaactgggtccgccaggctccagggaaggggctggagtgggtcgcatccattaccagcactagtcgttacatcttctacgcagactcagtgaagggccgcttcaccatctccagagacaacgccaagagctcactgtatctgcaaatgaacagcctgagagccgaggacacgggtgttttttactgtgcgcgagatccgttcttggcgcagactaccggcgatggcttctttgactcctggggccagggaaccctggtcaccgtctcctcag

SEQ ID NO: 2086 - DNA, 373 bp, Homo sapiens
gaggtgcagctggtggagtctgggggaggcctggtcaagcctggggggtccctgagactctcctgtgcagcctctggattcaccttcagtagctatagcatgaactgggtccgccaggctccagggaaggggctggagtgggtctcatccattagtagtagtagtagttacatatactacgcagactcagtgaagggccgattcaccatctccagagacaacgccaagaactcactgtatctgcaaatgaacagcctgagagccgaggacacggctgtgtattactgtgcgagagatcgttatgattacgtttgggggagtttggactactttgactactggggccagggaaccctggtcaccgtctcctcag

SEQ ID NO: 2087 - DNA, 373 bp, Homo sapiens
gaggtgcagctggtggagtctgggggaggcctggtcaagcctggggggtccctgagactctcctgtgcagcctctggattcaccttcagtagctatagcatgaactgggtccgccaggctccagggaaggggctggagtgggtctcatccattagtagtagtagtagttacatatactacgcagactcagtgaagggccgattcaccatctccagagacaacgccaagaactcactgtatctgcaaatgaacagcctgagagccgaggacacggctgtgtattactgtgcgagagacgggtatcggtattactatgatagtagtggttacttcgactactggggccagggaaccctggtcaccgtctcctcag

SEQ ID NO: 2088 - DNA, 376 bp, Homo sapiens
cagctgcagctgcaggagtcgggcccaggactggtgaagccttcggagaccctgtccctcacctgcactgtctctggtggctccatcagcagtagtagttactactggggctggatccgccagcccccagggaaggggctggagtggattgggagtatctattatagtgggagcacctactacaacccgtccctcaagagtcgagtcaccatatccgtagacacgtccaagaaccagttctccctgaagctgagctctgtgaccgccgcagacacggctgtgtattactgtgcgagacatgggggtattgtagtggtggtagctgctacctggttcgacccctggggccagggaaccctggtcaccgtctcctcag

SEQ ID NO: 2089 - DNA, 373 bp, Homo sapiens
caggtccagctggtgcaatctggggctgaggtgaagaagcctgggtcctcggtgaaggtctcctgcaaggcttctggaggcaccttcagcagctatactatcagctgggtgcgacaggcccctggacaagggcttgagtggatgggaaggatcatccctatccttaatatagcaaactacgcacagaagttccagggcagagtcacgattaccgcggacaaatccacgagcacagcctacatggagctaagcagcctgagatctgaggacacggccgtgtattactgtgcgagactggactacggtggtaactcctcccccggaagctggttcgacccctggggccagggaaccctggtcaccgtctcctcag

SEQ ID NO: 2090 - DNA, 373 bp, Homo sapiens
caggtccagctggtgcaatctggggctgaggtgaagaagcctgggtcctcggtgaaggtctcctgcagggcttctggaggcaccttcagcaactatactatcagctgggtgcgacaggcccctggacaagggcttgagcggatgggaaggatcatccctatccttgatatagtaaactacgcacagaagttccagggcagagtcacgattaccgcggacaaatccacgagcacagcctacatggagctgagcagcctgagatctgaggacacggccgtgtattactgtgcgagaactttagggtgggggggtagtggttctgacaactggttcgacccctggggccagggaaccctggtcaccgtctcctcag

SEQ ID NO: 2091 - DNA, 373 bp, Homo sapiens
gaggtgcagctggtggagtctgggggaggcttggtccagcctggggggtccctgagactctcctgtgcagcctctggattcacctttagtaattattggatgagctgggtccgccaggctccagggaaggggctggagtgggtggccaacataaagcaagatggaagtgagaaagactatgtggactctgtgaagggccgattcaccatctccagagacaacgccaagaactcactgtatctgcaaatgaacagcctgagagccgaggacacggctgtgtataactgtgcgagacaccctgtcatgactacggtgttaactccggaatacttccagcactggggccagggcaccctggtcaccgtctcctcag

SEQ ID NO: 2092 - DNA, 376 bp, Homo sapiens
caggtcaccttgaaggagtctggtcctgtgctggtgaaacccacagagaccctcacgctgacctgcaccgtctctgggttctcactcagcaatactagaatgggtgtgagctgggtccgtcagcccccagggaaggccctggagtggcttgcacacattttttcgaatgacgaaaaatcctacagtacatctctgaagagcaggctcaccatctccaaggacacctccaaaagccaggtggtccttaccatgaccaacatggaccctgtggacacagccacatattactgtgcacggataggtggtttctatgaaactagtggttattacgattttgactactggggccagggaaccctggtcaccgtctcctcag

SEQ ID NO: 2093 - DNA, 370 bp, Homo sapiens
caggtgcagctgcaggagtcgggcccaggactggtgaagccttcggagaccctgtccctcacctgcactgtctctggtggctccatcagtagttactactggagctggatccggcagcccgccgggaagggactggagtggattgggcgtatctataccagtgggagcaccaactacaacccctccctcaagagtcgagtcaccatgtcagtagacacgtccaagaaccagttctccctgaagctgagctctgtgaccgccgcggacacggccgtgtattactgtgcgagagatgggatgagaatagcagcagctgattggtactggttcgacccctggggccagggaaccctggtcaccgtctcctcag

SEQ ID NO: 2094 - DNA, 384 bp, Homo sapiens
gaggtgcagctggtgcagtctggagcagaggtgaaaaagcccggggagtctctgaagatctcctgtaagggttctggatacagctttaccaactactggatcggctgggtgcgccagatgcccgggaaaggcctggagtggatggggatcatctatcctggtgactctgataccagatacagcccgtccttccaaggccaggtcaccatctcagccgacaagtccatcagcaccgcctacctgcagtggagcagcctgaaggcctcggacaccgccatgtattactgtgcgagacggggaggcgggtatagccgtggctggggtacttactactactccgctatggacgtctggggccaagggaccacggtcaccgtctcctca

SEQ ID NO: 2095 - DNA, 381 bp, Homo sapiens
caggtgcagctacagcagtggggcgcaggactgttgaagccttcggagaccctgtccctcacctgcgctgtctatggtgggtccttcagtggttactactggagctggatccgccagcccccagggaaggggctggagtggattggggaaatcaatcatagtggaagcaccaactacaacccgtccctcaagagtcgagtcaccatatcagtagacacgtccaagaaccagttctccctgaagctgagctctgtgaccgccgcggacacggctgtgtattactgtgcgagagccccttattacagtggatacagctatggttacccttactactacggtatggacgtctggggccaagggaccacggtcaccgtctcctca

SEQ ID NO: 2096 - DNA, 191 bp, Homo sapiens; identical to SEQ ID NO: 681

SEQ ID NO: 2097 - DNA, 376 bp, Homo sapiens
caggtgcagctggtgcagtccggggctgaggtgaagaagcctggggcctcagtgaaggtttcctgcaaggcatctggagacaccttcaccaactcccatatgcactgggtgcgacaggccccagcacaagggcttgagtgggtgggaatgatcacccctagtgatgtttacacagcctacgcacagaagttccagggcagagtcaccgtgaccagggacacgtccacgagcacagtctacatggacctgagcagcctgagatctgaggacacggccgtgtattactgtgcgaggtctcctatggggttcggggagtccatcccgatcgatgcttttgatttctggggccaagggacaatggtcaccgtctcttcag

SEQ ID NO: 2098 - DNA, 373 bp, Homo sapiens
gaggtgcagctggtggagtctggaggaggcttgatccagcctggggggtccctgagactctcctgtgcagcctctgggttcaccgtcagtagcaactacatgagctgggtccgccaggctccagggaaggggctggagtgggtctcagttatttatagcggtggtagcacatactacgcagactccgtgaagggccgattcaccatctccagagacaattccaagaacacgctgtatcttcaaatgaacagcctgagagccgaggacacggccgtgtattactgtgcgagaagcggattactatggttcggggagttccaaaaaggtgcttttgatatctggggccaagggacaatggtcaccgtctcttcag

SEQ ID NO: 2099 - DNA, 379 bp, Homo sapiens
cagatcaccttgaaggagtctggtcctacgctggtcatacccacacagaccctcacgctgacctgcaccttctctgggttctcactcaccagaggaacagtgggtgtgggctggatccgtcagcccccaggagaggccctggagtggcttggaatcatttattgggataatactaaatactacagtacatctctaataagcaggctcaccgtcaccaaggccacctccgacaaccaggtggtccttacaatgaccaacatggaccctgtggacacagccacatattactgtgcacacattatgattacgtatgggggagttgtcgccgatgatgcttttgatacctggggccaagggacaatggtcaccgtctcttcag

SEQ ID NO: 2100 - DNA, 376 bp, Homo sapiens
gaggtgcagctggtggagtctgggggaggcctggtcaagccgggggggtccctaagactctcctgtgaagcctctggattcatcttcagtagttatagcatgagctgggtccgccaggctccagggaaggggctggagtgggtctcatccattactagtagtagtagttacatatactacgcagactctatgcagggccgattcaccatctccagagacaacgccaagaactcactgtatctgcaaatgaacagcctgagagtcgaggacacggctgtgtattactgtgcgagagagagggtatattacgatattttgactggttatgatgcttttgatatctggggcccagggacaatggtcaccgtctcttcag

SEQ ID NO: 2101 - DNA, 375 bp, Homo sapiens
gaggtgcagctggtggagtctgggggaggcctggtcaagcctggggggtccctgagactctcctgtgcagcctctggattcaccttcagtagctatagcatgaactgggtccgccaggctccagggaaggggctggagtgggtctcatccattagtagtagtagtagttacatatactacgcagactcagtgaagggccgattcaccatctccagagacaacgccaagaactcactgtatctgcaaatgaacagcctgagagccgaggacacggctgtgtattactgtgcgagagatgaaacggatacagctatggtttactactactacggtatggacgtctggggccaagggaccacggtcaccgtctcctca

SEQ ID NO: 2102 - DNA, 375 bp, Homo sapiens
caggtgcagctggtgcagtctggggctgaggtgaagaagcctggggcctcagtgaaggtctcctgcaaggcttctggatacaccttcaccggctactatatgcactgggtgcgacaggcccctggacaagggcttgagtggatgggatggatcaaccctaacagtggtggcacaaactatgcacagaagtttcagggcagggtcaccatgaccagggacacgtccatcagcacagcctacatggagctgagcaggctgagatctgacgacacggccgtgtattactgtgcgagggggtatctttggcagcagcaatcaatgggggtctacggtatggacgtctggggccaagggaccacggtcaccgtctcctca

SEQ ID NO: 2103 - DNA, 375 bp, Homo sapiens
caggtgcagctggtggagtctgggggaggcgtggtccagcctgggaggtccctgagactctcctgtgcgccctctggtttcaccttcactaactatgctatacactgggtccgccaggctccaggcaaggggctggagtgggtggcagttatatcatatgatggaagtaataaatactacgcagactccgtgaagggccgattcaccatctccagagacaaatccaagaacacgctgtatctgcaaatgaacagtatgagaggtgaggacacggctgtgtattactgtgcgagagtcccctcggggagtcctccttactggtactactacggcatggacgtctggggccaagggaccacggtcaccgtctcctca

SEQ ID NO: 2104 - DNA, 375 bp, Homo sapiens
caggtgcagctggtggagtctgggggaggcgtggtccagcctgggaggtccctgagactctcctgtgcagcctctggattcaccttcagtagctatgctatgcactgggtccgccaggctccaggcaaggggctggagtgggtggcagttatatcatatgatggaagtaataaatactacgcagactccgtgaagggccgattcaccatctccagagacaattccaagaacacgctgtatctgcaaatgaacagcctgagagctgaggacacggctgtgtattactgtgcgagaggacctgtctattacgatattttgactgggggcgggggtatggacgtctggggccaagggaccacggtcaccgtctcctca

SEQ ID NO: 2105 - DNA, 379 bp, Homo sapiens
cagatcaccttgaaggagtctggtcctacgctggtgaaacccacacagaccctcacgctgacctgcaccttctctgggttctcactcagcactagtggagtggctgtgggctggatccgtcagcccccaggaaaggccctggagtggcttggactcatttattgggatgatgataagcgctacagtccatctctgaagagcaggctcaccatcaccaaggacacctccaaaaaccaggtggtccttacaatgaccaacatggaccctgtagacacagccacatatttctgtgcacgcagagatgcgcggtatagcagcagctggtactcatactggttcgacccctggggccagggaaccctggtcaccgtctcctcag

SEQ ID NO: 2106 - DNA, 381 bp, Homo sapiens
caggtgcagctacagcagtggggcgcaggactgttgaagccttcggagaccctgtccctcacctgcgctgtctatggtgggtccttcagtggttactactggagctggatccgccagcccccagggaaggggctggagtggattggggaaatcaatcatagtggaagcaccaactacaacccgtccctcaagagtcgagtcaccatatcagtagacacgtccaagaaccagttctccctgaagctgagctctgtgaccgccgcggacacggctgtgtattactgtgcgagactgacggcagcagctggttcccactcttattactactactactacggtatggacgtctggggccaagggaccacggtcaccgtctcctca

SEQ ID NO: 2107 - DNA, 378 bp, Homo sapiens
caggtgcagctgcaggagtcgggcccaggactggtgaagccttcacagaccctgtccctcacctgcactgtctctggtggctccatcagcagtggtagttactactggagctggatccggcagcccgccgggaagggactggagtggattgggcgtatctataccagtgggagcaccaactacaacccctccctcaagagtcgagtcaccatatcagtagacacgtccaagaaccagttctccctgaagctgagctctgtgaccgccgcagacacggccgtgtattactgtgcgagagtaccggatagcagcagctggtactactactactacggtatggacgtctggggccaagggaccacggtcaccgtctcctca

SEQ ID NO: 2108 - DNA, 378 bp, Homo sapiens
caggtgcagctgcaggagtcgggcccaggactggtgaagccttcacagaccctgtccctcacctgcactgtctctggtggctccatcagcagtggtacttactactggaactggatccggcagcccgccgggaagggactggaatggattgggcgtatctatatcagtgggagcaccagctacaacccctccctcaagagtcgagtcaccatatcaatagacacgtccaagaaccagttctccctgagcctgcgctctgtgaccgccgcagacacggccgtatattactgtgcgagagggcttatcgtactagtaccaactgctatgccggacggtatggacgtctggggccaagggaccacggtcaccgtctcctca

SEQ ID NO: 2109 - DNA, 370 bp, Homo sapiens
caggtgcagctgcaggagtcgggcccaggactggtgaagccttcacagaccctgtccctcacctgcactgtctctggtggctccatcagcagtggtggttactactggagctggatccgccagcacccagggaagggcctggagtggattgggtacatctattacagtgggagcacctactacaacccgtccctcaagagtcgagttaccatatcagtagacacgtctaagaaccagttctccctgaagctgagctctgtgactgccgcggacacggccgtgtattactgtgcgagacaagggtattgtagtggtggtagctgcttacccacaggtatcggccagggaaccctggtcaccgtctcctcag

SEQ ID NO: 2110 - DNA, 375 bp, Homo sapiens
gaagtgcagctggtggagtctgggggaggcttggtacagcctggcaggtccctgagactctcctgtgcagcctctggattcacctttgatgattatgccatgcactgggtccggcaagctccagggaagggcctggagtgggtctcaggtattagttggaatagtggtagcataggctatgcggactctgtgaagggccgattcaccatctccagagacaacgccaagaactccctgtatctgcaaatgaacagtctgagagctgaggacacggccttgtattactgtgcaaaagagagctcatcgttatggttcggggatccgagggggattatggacgtctggggccaagggaccacggtcaccgtctcctca

SEQ ID NO: 2111 - DNA, 379 bp, Homo sapiens
cagctgcagctgcaggagtcgggcccaggactggtgaagccttcggagaccctgtccctcacctgcactgtctctggtggctccatcagcagtagtagttactactggggctggatccgccagcccccagggaaggggctggagtggattgggagtatctattatagtgggagcacctactacaacccgtccctcaagagtcgagtcaccatatccgtagacacgtccaagaaccagttctccctgaagctgagctctgtgaccgccgcagacacggctgtgtattactgtgcgagacggggcggggcgtattactatgatagtagtggttaccggttcgacccctggggccagggaaccctggtcaccgtctcctcag

SEQ ID NO: 2112 - DNA, 376 bp, Homo sapiens
caggtccagctggtgcaatctggggctgaggtgaagaagcctgggtcctcggtgaaggtctcctgcaagacttctggagacaccttcagcagttatgctatcagctgggtgcgacaggcccctggacaagggcttgagtggatgggaaggatcatccctatccttggtatagcaaactacgcacagaggttccagggcagagtcacatttaccgcggacaaatccacgagcacagcctacatggagctgagcagcctgagatctgaggacacggccgtgtattactgtgcgagagatctattctctccctatggttcggggaatacaaactggttcgacccctggggccagggaaccctggtcaccgtctcctcag

SEQ ID NO: 2113 - DNA, 373 bp, Homo sapiens
caggtgcagctacagcagtggggcgcaggactgttgaagccttcggagaccctgtccctcacctgcgctgtctatggtgggtccttcagtggttactactggagctggatccgccagcccccagggaaggggctggagtggattggggaaatcaatcatagtggaagcaccaactacaacccgtccctcaagagtcgagtcaccatatcagtagacacgtccaagaaccagttctccctgaagctgagctctgtgaccgccgcggacacggctgtgtattactgtgcgagaggccttcttctctcgcggtattactatggttcgcggtggttcgacccctggggccagggaaccctggtcaccgtctcctcag

SEQ ID NO: 2114 - DNA, 376 bp, Homo sapiens
caggtgcagctggtgcagtctggggctgaggtgaagaagcctggggcctcagtgaaggtctcctgcaaggcttctggatacaccttcaccggctactatatgcactgggtgcgacaggcccctggacaagggcttgagtggatgggatggatcaaccctaacagtggtggcacaaactatgcacagaagtttcagggcagggtcaccatgaccagggacacgtccatcagcacagcctacatggagctgagcaggctgagatctgacgacacggccgtgtattactgtgcgagagaaggttcggcgcatcagtatgactggtcccaatggggggttgactactggggccagggaaccctggtcaccgtctcctcag

SEQ ID NO: 2115 - DNA, 384 bp, Homo sapiens
caggtgcagctggtggagtctgggggaggcgtggtccagcctgggaggtccctgagactctcctgtgcagcctctggattcaccttcagtagctatgctatgcactgggtccgccaggctccaggcaaggggctggagtgggtggcagttatatcatatgatggaagtaataaatactacgcagactccgtgaagggccgattcaccatctccagagacaattccaagaacacgctgtatctgcaaatgaacagcctgagagctgaggacacggctgtgtattactgtgcgagagttttgagctatagcagcagctggacgactaactactactactacggtatggacgtctggggccaagggaccacggtcaccgtctcctca

SEQ ID NO: 2116 - DNA, 376 bp, Homo sapiens
caggtgcagctggtgcagtctggggctgaggtgaagaagcctggggcctcagtgaaggtctcctgcaagccttctggatacagattcaccagtttctatatacattggctgcgacaggcccctggacaagggcttgagtggatgggttggattaacccttataatggtgccactctttatgcacagaggtttcagggcagggtcaccttcaccagtgacacgtccgtcggcatcggctacatggagatgcacaggctgacatctgacgacacgtccatatatttctgtgcgagagacctccttccttatgggtcggggacccccagggggtattttgactattggggccagggaaccctggtcaccatctcctcag

SEQ ID NO: 2117 - DNA, 376 bp, Homo sapiens
caggtgcagctggtgcagtctggggctgaggtgaagaagcctggggcctcagtgaaggtctcctgcaaggcttctggatacaccttcaccggctactatatgcactgggtgcgacaggcccctggacaagggcttgagtggatgggatggatcaaccctaacagtggtggcacaaactatgcacagaagtttcagggcagggtcaccatgaccagggacacgtccatcagcacagcctacatggagctgagcaggctgagatctgacgacacggccgtgtattactgtgcgagattggccccagggtaccagctggtccctatctactggtacttcgatctctggggccgtggcaccctggtcactgtctcctcag

SEQ ID NO: 2118 - DNA, 349 bp, Homo sapiens
gaggtgcagctggtggagtctgggggaggcttggtccagcctggggggtccctgagactctcctgtgcagcctctggattcacctttaatatctattggatgacttgggttcgccaggctccagggaaggggctggagtgggtggccaacataaagcaagatggaagtgagaaatactatgtggactctgtgagggaccgattcaccatctccagagacaacgccaagaactcactgtatctgcaaatgaacagcctgagagtcgaggacacggctgtgtattactgtgtgagaggggctgactacaatcgttgctggggccagggaaccctggtcaccgtctcctcag

SEQ ID NO: 2119 - DNA, 345 bp, Homo sapiens
gaggtgcacctggtggagtctgggggaggcttggtccagcctggggggtccctgagactctcctgtgcagcctctgaaattaccgtcagtagcaactacatgaactgggtccgccaggctccagggaagggactggagtgggtctcacttatttacgccggtggtagcacattctacgcagactccgtgaagggccgattcaccatctccagagacaattccaagaacacgctgcatcttcaaatgaacagcctgagacctgaggacactgctgtgtattactgtgcgagagagggctacggtatggacgtctggggccaagggaccacggtcaccgtctcctca

SEQ ID NO: 2120 - DNA, 345 bp, Homo sapiens
gaggtgcagctggtggagtctgggggaggcttggtccagcctggggggtccctgagactctcctgtgcagcctctggattcaccgtcagtagcaactacatgagctgggtccgccaggctccagggaaggggctggagtgggtctcagttatttatagcggtggtagcacatactacgcagactccgtgaagggccgattcaccatctccagagacaattccaagaacacgctgtatcttcaaatgaacagcctgagagctgaggacacggctgtgtattactgtgcgagagatacaggcggtatggacgtctggggccaagggaccacggtcaccgtctcctca

SEQ ID NO: 2121 - DNA, 373 bp, Homo sapiens
caggtgcagctgcaggagtcggccccaggactggtgaagccttcggagaccctgtccctcacctgcactgtctctggtggctccatcagtagttactactggagctggatccggcagcccgccgggaagggactggagtggattgggcatatctataccagtgggagcaccaactacaacccctccctcaagagtcgagtcaccatgtcagtagacacgtccaagaaccagttctccctgaagctgagttctgtgaccgccgcggacacggccgtgtattactgtgcgagagatgtttaccattactatggttcggggagctataactggttcgacccctggggccagggaaccctggtcaccgtctcctcag

SEQ ID NO: 2122 - DNA, 346 bp, Homo sapiens
gaggtgcaactggtggagtctgggggagacttggcccagcctggggggtccctgagactctcctgtgcagcctctgaaatcaccgtcagtaggaactacatgatctgggtccgccagactccagggaaggggctggagtgggtttcaattatttatcccggtggtagcacattctacgcagattccgtgaagggccgtttcaccatctccagagacacttccaagaacaccctgtatcttcaaatgaacagcctgagaggtgatgacacggctgtttattactgtgcgagaggggcctactactttgactactggggccagggaaccctggtcaccgtctcctcag

SEQ ID NO: 2123 - DNA, 346 bp, Homo sapiens
gaggtgcagctggtggagtctgggggaggcttggtccagcctggggggtccctgagactctcctgtgcagcctctggattcaccgtcagtagcaactacatgagctgggtccgccaggctccagggaaggggctggagtgggtctcaattatttatagcggtggtagcacatattacgcagactccgtgaagggccgattcaccatctccagagacaattccaagaacacgctgtatcttcaaatgaacagcctgagagctgaggacacggctgtctattactgtgcgagtggcgactatgatagtttactgtggggccagggaaccctggtcaccgtctcctcag

SEQ ID NO: 2124 - DNA, 345 bp, Homo sapiens
gaggtgcagttggtggagtctggaggaggcttgatccagccgggggggtccctgagactctcctgtgcagcctctgggttcagcgtcagtagcaactacatgacctgggtccgccaggctccggggaaggggctggagtgggtctcaattatctatagcggtggtagtacatactacgcagactccgtgaagggccgattcaccatctccagagacaattccaagaacacgctgtatcttcacttgaacagcctgagagccgaggacacggccgtgtattactgtgcgagcggttactatgatggtcttgtctggggccaagggaccacggtcaccgtctcctca

SEQ ID NO: 2125 - DNA, 384 bp, Homo sapiens
caggtgcagctggtggagtctgggggaggcgtggtccagcctgggaggtccctgagactctcctgtgcagcctctggattcaccttcagtagctatgctatgcactgggtccgccaggctccaggcaaggggctggagtgggtggcagttatatcatatgatggaagtaataaatactacgcagactccgtgaagggccgattcaccatctccagagacaattccaagaacacgctgtatctgcaaatgaacagcctgagagctgaggacacggctgtgtattactgtgcgcactcattcggatattgtagtggtggtagctgctactactactactacggtatggacgtctggggccaagggaccacggtcaccgtctcctca

SEQ ID NO: 2126 - DNA, 355 bp, Homo sapiens
cagctgcagctgcaggagtcgggcccaggactggtgaagccttcggagaccctgtccctcacctgcactgtctctggtggctccatcagcagtagtagttactactggggctggatccgccagcccccagggaaggggctggagtggattgggagtatctattatagtgggagcacctactacaacccgtccctcaagagtcgagtcaccatatccgtagacacgtccaagaaccagttctccctgaagctgagctctgtgaccgccgcagacacggctgtgtattactgtgcgagcacgagaatacggaagtttgactactggggccagggaaccctggtcaccgtctcctcag

SEQ ID NO: 2127 - DNA, 352 bp, Homo sapiens
gaggtgcagctggtggagtctgggggaggcttggtacagcctggagggtccctgagactctcctgtgcagcctctggattcgccttcagtcgttatgaaatgaactgggtccgccgggctccagggaaggggctggagtggctttcatacattactagtagtggtactaccatatactacgcagactctgtgaagggccgattcaccatctccagagacaacgccaagaactcactgtatctgcaaatgaacagcctgagagccgaggacacggctgtttattactgtgcgagagacggaagcagcagccttgactactggggccagggaaccctggtcaccgtctcctcag

SEQ ID NO: 2128 - DNA, 348 bp, Homo sapiens
gaggtgcagctggtggagtctggaggaggcttgatccagcctggggggtccctgagactctcctgtgcagcctctggggtcatcgtcagtagcaactacatgagctgggtccgccaggctccagggaaggggctggagtgggtctcagttatatatagcggtggtagcacatactacgcagactccgtgaagggccgattcaccatctccagagacaaatccaagaacacgctgtatcttcaaatgaacagcctgagagccgaggacacggccgtgtattactgtgcgagagaggggccccacggtatggacgtctggggccaagggaccacggtcaccgtctcctca

SEQ ID NO: 2129 - DNA, 390 bp, Homo sapiens
gaggtgcagctggtggagtctgggggaggcttggtacagcctggagggtccctgagactctcctgtgcagcctctggattcaccttcagtagttatgaaatgaactgggtccgccaggctccagggaaggggctggagtgggtttcatacattagtagtagtggtagtaccatatactacgcagactctgtgaagggccgattcaccatctccagagacaacgccaagaactcactgtatctgcaaatgaacagcctgagagccgaggacacggctgtttattactgtgcgagagatacccagggatattgtagtagtaccagctgctatggatactactactacggtatggacgtctggggccaagggaccacggtcaccgtctcctca

SEQ ID NO: 2130 - DNA, 390 bp, Homo sapiens
gaggtgcagctggtggagtctgggggaggcttggtccagcctggggggtccctgagactctcctgtgcagcctctggattcacctttagtagctattggatgagctgggtccgccaggctccagggaaggggctggagtgggtggccaacataaaacaagatggaagtgagaaatactatgtggactctgtgaagggccgattcaccatctccagagacaacgccaagaactcactgtatctgcaaatgaacagcctgagagccgaggacacggctgtgtattactgtgcgagagtgacagtatggtattactatggttcggggagtggctgggactactactacggtatggacgtctggggccaagggaccacggtcaccgtctcctca

SEQ ID NO: 2131 - DNA, 393 bp, Homo sapiens
caggtgcagctgcaggagtcgggcccaggactggtgaagccttcacagaccctgtccctcacctgcactgtctctggcggctccatcagcagcggtggttactactggagctggatccgccagcacccagggaagggcctggagtggattgggtacatttattacagtgggagcacctactacaacccgtccctcaagagtcgagttaccatatcaatagacacgtctaagaaccagttctccctgaagctgagctctgtgactgccgcggacacggccgtgtattactgtgcgggagaatcagtccactatgatagtagtggttatttggagtatggccactactacggtatggacgtctggggccaagggaccacggtcaccgtctcctca

SEQ ID NO: 2132 - DNA, 390 bp, Homo sapiens
gaggtgcagctggtgcagtctggagcagaggtgaaaaagcccggggagtctctgaagatctcctgtaagggttctggatacagctttaccagctactggatcggctgggtgcgccagatgcccgggaaaggcctggagtggatggggatcatctatcctgatgactctgataccagatacagcccgtccttccaaggccaggtcaccatctcagccgacaagtccatcagcaccgcctacctgcagtggagcagcctgaaggcctcggacagcgccatgtattactgtgcgagacggcggactgtgggttactatggttcggggagttatcataatcgctactacggtatggacgtctggggccaagggaccacggtcaccgtctcctca

SEQ ID NO: 2133 - DNA, 390 bp, Homo sapiens
caggtgcagctggtgcagtctggggctgaggtgaagaagcctggggcctcagtgaaggtctcctgcaaggcttctggatacaccttcaccggctactatatgcactgggtgcgacaggcccctggacaagggcttgagtggatgggatggatcaaccctaacagtggtggcacaaactatgcacagaagtttcagggcagggtcaccatgaccagggacacgtccatcagcacagcctacatggagctgagcaggctgagatctgacgacacggccgtgtattactgtgcgagagatatagtggctacgattaccttccttggtgcccattactactactactacggtatggacgtctggggccaagggaccacggtcaccgtctcctca

SEQ ID NO: 2134 - DNA, 390 bp, Homo sapiens
caggtgcagctggtgcagtctggggctgaggtgaagaaacctggggcctcaatgaaggtctcctgcaaggcttctggatacagtttcaccgactactatatgcactgggtgcgacaggcccctggacaagggcttgagtggatgggatggatcaaccctaatagtggtggcacaaactatgcacagaagtttcagggcagggtcaccatgaccagagacacgtccgtcagcacagcctacatggaactgagcaggctgacatctgacgacacggccttatattactgtgcgagagtacgttacacagaaaacctccaggttccccgtatagtgggagcccggggcggtatggacgtctggggccaagggaccacggtcaccgtctcctca

SEQ ID NO: 2135 - DNA, 391 bp, Homo sapiens
caggtccagctggtgcaatctggggctgaggtgaagaagcctgggtcctcggtgaaggtctcctgcaaggcttctggaggctccttcagcagctatactatcagctgggtgcgacaggcccctggacaagggcttgagtggatgggaaggatcatccctttccttggtatagcaaactacgcacagaagttccagggcagagtcacgattaccgcggacaaatccacgagcacagcctacatggagctgagcagcctgagatctgaggacacggccgtgtattactgtgcgagtggggggcctggaggttcggggagttattcgccaactacaagcccccacaactggttcgacccctggggccagggaaccctggtcaccgtctcctcag

SEQ ID NO: 2136 - DNA, 355 bp, Homo sapiens
gaggtgcagctggtggagtctgggggaggcttggtccagcctggggggtcccggagactctcctgtgcagcctctggattcaccgtcagtagctactacatgagctgggtccgccaggctccagggaaggggctggagtgggtctcagttatttatagcggtggtagcacatactacgcagactccgtgaagggccgattcaccatctccagagacaattccaagaacacgctgtatcttgaaatgaacagcctgagagctgaggacacggctgtgtattactgtgcgagagatgggggtagtaaccgtgcttttgatatctggggccaagggacaatggtcaccgtttcttcag

SEQ ID NO: 2137 - DNA, 391 bp, Homo sapiens
caggtccagctggtgcaatctggggctgaggtgaagaagcctgggtcctcggtgaaggtctcctgcacggcttctggaggctccttcagcagttatactatcagctgggtgcgacaggcccctggacaagggcttgagtggataggaaggatcatccctatccttcctatggctaactacgcacagaagttccagggcagagtcacgattaccgcggacgaatccacaaacacagtctacatggagctgagcagcctgagatctgaggacacggccgtctattactgttctagaggcggggggctaggaggtggttcggggaattattatccaaaaggacgcaactggttcgacccctggggccagggaaccctggtcaccgtctcctcag

SEQ ID NO: 2138 - DNA, 351 bp, Homo sapiens
caggtattgctggtgcagtctggggctgaggtgaagaagtctggggcgtcagtgaaggtttcctgcaaggcatctggacacagcttcaccgattactatataaactgggtgcgacaggcccctggacaaggccttgagtggatgggaataatcaaccccagtgacggtagcacaacttacgcacagaagtttcagggcagactcaccatgaccagggacacgtccacgagcacagtgtacatggacttgacgagcctgagatctgacgacacggccctgtattactgttcggccggcggttacagccctggacacttctggggccagggaaccctggtcaccgtctcctca

SEQ ID NO: 2139 - DNA, 387 bp, Homo sapiens
gaggtgcagctggtggagtctggaggaggcttgatccagcctggggggtccctgagactctcctgtgcagcctctgggttcaccgtcagtagcaactacatgagctgggtccgccaggctccagggaaggggctggagtgggtctcagttatttatagcggtggtagcacatactacgcagactccgtgaagggccgattcaccatctccagagacaattccaagaacacgctgtatcttcaaatgaacagcctgagagccgaggacacggccgtgtattactgtgcgagccctcctccgtattacgatattttgactggttattataatgactactactacggtatggacgtctggggccaagggaccacggtcaccgtctcctca

SEQ ID NO: 2140 - DNA, 394 bp, Homo sapiens
cagatcaccttgaaggagtctggtcctacgctggtgaaacccacacagaccctcactctgacctgcaccttctctgggttctcactcatcactagtggagtgggtgtgggctggatccgtcagcccccaggaaaggccctggagtggcttgcactcatttattgggatgatgataagcgctacaggccatctctgaagagcaggctcaccatcaccaaggacacctccaaaaaccaggtggtccttacaatgaccaacatggaccctgtggacacagccacatattactgtgcacacactaatatccgcggcgttaggttcggggagttattatcgtatttatcaagtgcttttgatatctggggccaagggacaatggtcaccgtctcttcag

SEQ ID NO: 2141 - DNA, 394 bp, Homo sapiens
gaagtgcagctggtgcagtccggagcagaggtgaaaaagcccggggagtctctgaggatctcctgtaagggttctggatacagctttaccagctactggatcacttgggtgcgccagatgcccgggaaaggcctggagtggatggggaggattgatcctagtgactcttataccaactacagcccgtccttccaaggccacgtcaccatctcagctgacaagtccatcagcactgcctacctgcagtggagcagtctgaaggcctcggacaccgccatgtattactgtgcgagatcgggtatagcagcagctggtactttgggtggcttatacccaaccatcatgagggggttcgacccctggggccagggaaccctggtcaccgtctcctcag

SEQ ID NO: 2142 - DNA, 393 bp, Homo sapiens
caggtgcagctggtggagtctgggggaggcgtggtccagcctgggaggtccctgagactctcctgtgcagcctctggattcaccttcagtagctatggcatgaactgggtccgccaggctccaggcaaggggctggagtgggtggcagttatatcatatgatggaagtaatgaatactatgcagactccgtgaagggccgattcaccatctccagagacaattccaagaacacgttgtatctgcaaatgaacagcctgagagatgaggacacggctgtgtatttctgtgcgaaagatctttatagtagggtgactgtggttcggggagttattccctactactactacggtttggacgtctggggccaagggaccacggtcaccgtctcctca

SEQ ID NO: 2143 - DNA, 393 bp, Homo sapiens
gaggtgcagctggtggagtctgggggaggcttggtccagcctggggggtccctgagactctcctgttcagcctctggattcaccttcagtagctatgctatgcactgggtccgccaggctccagggaagggactggaatatgtttcagctattagtagtaatgggggtagcacatactacgcagactccgtgaagggcagattcaccatctccagagacaattccaagaacacgctgtatcttcaaatgagcagtctgagagctgaggacacggctgtgtattactgtgtgaaccccaagctaggtgggagtagcagcagctggtatagttctctggggggtgtaggctggtgggacgtctggggccaagggaccacggtcaccgtctcctca

SEQ ID NO: 2144 - DNA, 393 bp, Homo sapiens
caggttcagctggtgcagtctggagctgaggtgaagaagcctggggcctcagtgaaggtctcctgcaaggcttctggttacacctttaccagctatggtatcagctgggtgcgacaggcccctggacaagggcttgagtggatgggatggatcagcgcttacaatggtaacacaaactatgcacagaagctccagggcagagtcaccatgaccacagacacatccacgagcacagcctacatggagctgaggagcctgagatctgacgacacggccgtgtattactgtgcgagagacctgggggtattcgcaggggtgttgtattactatgatagtagtgggtccccgggtatggacgtctggggccaagggaccacggtcaccgtctcctca

SEQ ID NO: 2145 - DNA, 337 bp, Homo sapiens
caggtccagctggtacagtctggggctgaggtgaagaagcctggggcctcagtgaaggtctcctgcaaggtttccggatacaccctcactgaattatccatgcactgggtgcgacaggctcctggaaaagggcttgagtggatgggaggttttgatcctgaagatggtgaaacaacctacgcacagaagttccagggcagagtcaccttgaccgaggacacatctacagacacagcctacatggagctgagcagcctgagatctgaggacacggccgtgtattactgtgcaacagacgggatctggggccaagggacaatggtcaccgtctcttcag

SEQ ID NO: 2146 - DNA, 337 bp, Homo sapiens
gaagtgcagctggtggagtctgggggaggcttggtacagcctggcaggtccctgagactctcctgtgcagcctctggattcacctttgatgattatgccatgcactgggtccggcaagctccagggaagggcctggagtgggtctcaggtattagttggaatagtggtagcataggctatgcggactctgtgaagggccgattcaccatctccagagacaacgccaagaactccctgtatctgcaaatgaacagtctgagagctgaggacacggccttgtattactgtgcaaaagattactcctggggccagggaaccctggtcaccgtctcctcag

SEQ ID NO: 2147 - DNA, 399 bp, Homo sapiens
gaagtgcagctggtggagtctgggggaggcgtggtacagccgggggggtccctgagactctcctgtgtagcctctggattcacctttgatgattatgccatgcactgggtccgtcaagctccagggaagggtctggagtgggtctctcttatcagtggggatggtggtaacacatactatgcagactctgtgaagggccgattcaccatctccagagacaacagcaaaaactccctgtatctgcaaatgaacagtctgagaactgaggacaccgccttgtattactgtgcaaaagatatggggtcggggtctattaatatggttcggggaatactcgtcctctattactacgacggtatggacgtctggggccaagggaccacggtcaccgtctcctca

SEQ ID NO: 2148 - DNA, 391 bp, Homo sapiens
caggttcagctggtgcagtctggagctgaggtgaagaagcctggggcctcagtgaaggtctcctgcaaggcttctggttactcctttaccaccttcggtatcagctgggtgcgacaggcccctggacaagggcttgagtggatgggatggatcagtggatacaatggtaaaacaaactatgcacagaagttccagggcagagtcaccatgaccacagacacatccacgagcacagcctacatggagctgaggagcctgagatctgacgacacggccatttattactgtgcgagaagacccccgtatttttatgatagaagtggttattaccgggagagtgatgactggttcgacgcctggggccagggaaccctggtcaccgtctcctcag

SEQ ID NO: 2149 - DNA, 402 bp, Homo sapiens
caggtgcagctggtgcagtctggggctgaggtgaagaagcctggggcctcagtgaaggtctcctgcaaggcttctggatacaccttcaccgactactatatgcactgggtgcgacaggcccctggacaagggcttgagtggatgggatggatcaaccctaacagtggtggcacaaactatgcacagaagtttcagggcagggtcaccatgaccagggacacgtccatcagcacagcctacatggagctgagcaggctgagatctgacgacacggccgtgtattactgtgcgagagatccccccctgtattactatggttcggggagttattataaaactttttctggattcgtctacggtatggacgtctggggccaagggaccacggtcaccgtctcctca

SEQ ID NO: 2150 - DNA, 392 bp, Homo sapiens
ggggcagtctggagctgagttgaagaagcctggggcctcagtgaaggtctcctgcaaggcttctacttacacctttaccaactatgatatcaggtgggtgcgacaggcccctggacaagggcttgagtggatgggatgcatcatcgcttacaatggttacacaagctatgcacagaggttccagggcagagtcaccatgaccacagacacatccacgagcacagcctacatggagctgaggagcctgagatctgacgacacggccgtatattactgtgcgagagattagcttcaaaactcatgaaagtgcctggaacggctatgatagtagtggttatctattggggaccttggctactggggccaggaaaccctggtcaccgtctcctcag

SEQ ID NO: 2151 - DNA, 363 bp, Homo sapiens
caggtgcagctggtggagtctgggggaggcgtggtccagcctgggaggtccctgagactctcctgtgcagcctctggattcaccttcagtagctgtgccatgcactgggtccgccaggctccaggcaaggggctggagtgggtggcagttatatggtatgatggaagtaattaataatttccggactccgtgaagggccgattcaccatctccagagacaaatcgaagaacacgctgtatctgcaaatgaaccgcctgagagccgaggccacggttgtgtagtagtgtgccagagatagtgaggggaagtagcacctgctcctgactcctggggccagggaaccctggtcaccgtctcctcag

SEQ ID NO: 2152 - DNA, 389 bp, Homo sapiens
caggtgcagctggtggagtctgggggaggcgtggtccagcctgggaggtccctgagactctcctgtgcagcctctggattcaccttcagtaactatggcatgcactgggtccgccaggctccaggcaaggggctggagtgggtggcagttatatcatctgatggaagtaataaatactatgcagactccgtgaagggccgattcaccatctccagagacaattccaagaacacgctgtatctgcaaatgaacagcctgagagctgaggacacggctgtgtaatactgtgcgaaagatgacccccggtattgcagtggctggtagtggctgtcgggtgttcaactggttcgacccctggggccagggaaccctggtcaccgtctcctcag

SEQ ID NO: 2153 - DNA, 389 bp, Homo sapiens
gaggtgcagctggtgcagtctggagcagaggtgaaaaagccgggggagtctctgaagatctcctataagggttctggatacagctttactacctactaaatcggctgggtgcgccagatgcccgggaaaggcctggggtggatggggatcatctatcctggcgactctgatgccagatacagcccgtccgtccaaggccaggtcaccatctcagccgacaagtccatcagcaccgcctgcctgcagtggagcagcctgaaaccctcggacaccgccatatattactgtgcgagcccccctctcgggggtatcagctgttattttcccacctagggggtgtgtctggttcgacccctggggccagggaaccctggtcacagtctcctcag

SEQ ID NO: 2154 - DNA, 390 bp, Homo sapiens
caggtgcagctgcaggggtcgggcccaggactggtgaggccttcggaaatcctgtctctcacctgcgctgtctctggtgactccctccatagtggcgactgcaggtgactccggcagcccgccggtaaaagttggagtaaattgggcctttccatagcagtgggcgcaccaagtattacatctccctcaggagtcgagtcaccatgtctgaagacacgtccaagaaccagttctccctgaaactgaggtctgtgaggaagtagacgtctgttatcgccgcggacacggccctctttcgtgtacgacagatctcctttataacagtgactctcattatacatctctgatttggacgtctggggccaacggaccacggtcaccgtctcctca

SEQ ID NO: 2155 - DNA, 384 bp, Homo sapiens
caggtgcagctggtgcagtctggggctgaagtgaagaagcctggggcctcagtgaaggtctcctgcaaggcttctggatacaccttcaccgactactatatgcactgggtgcgacaggcccctggacaagggcttgagtggatgggatggatcaatcttaatagtggtggcacatactatgcacagaagtttcagggcagggtcaccatgaccagggacacgtccatcagcacagcctacatggagctgagcagactgagatctgacgacacggccgtgtattactgtgcgagagaggcgctatggagtggctacgatttagggacttactactattacggtatggacgtctggggccaagggaccacggtcaccgtctcctca

SEQ ID NO: 2156 - DNA, 393 bp, Homo sapiens
gaggtgcagctggtggagtctgggggaggcttggtccagcctggggggtccctgagactctcctgtgcagcctctggattcacctttagtagttattggatgacctgggtccgccaggctccagggaaggggctggagtgggtggccaacataaaggaagatggaagtgagaaatactatgtggactctgtgaagggccgattcaccatctccagagacaacgccaagaactcactgtatctgcaaatgaacaccctgagagccgaggacacggccgtgtattactgtgcgagagattctgttttttattactatgatagtagtggctatagagggtactactactactacgttatggacgtctggggccaagggaccacggtcaccgtctcc

SEQ ID NO: 2157 - DNA, 396 bp, Homo sapiens
caggtgcagctggtggagtctgggggaggcgtggtccagcctgggaggtccctgagactctcctgtgcagcctctggattcaccttcagtagctatgctatgcactgggtccgccaggctccaggcaaggggctggagtgggtggcagttatatcatatgatggaagtaataaatactacgcagactccgtgaagggccgattcaccatctccagagacaattccaagaacacgctgtatctgcaaatgaacagcctgagagctgaggacacggctgtgtattactgtgcgagagatcaggaagttctttacgatattttgactggttattatggggcgccttatgcctccggtatggacgtctggggccaagggaccacggtcaccgtctcctca

SEQ ID NO: 2158 - DNA, 396 bp, Homo sapiens
caggtgcagctggtggagtctgggggaggcgtggtccagcctgggaggtccctgagactctcctgtgcagcgtctggattcaccttcagtagctatggcatgcactgggtccgccaggctccaggcaaggggctggagtgggtggcagttatatggtatgatggaagtaataaatactatgcagactccgtgaagggccgattcaccatctccagagacaattccaagaacacgctgtatctgcaaatgaacagcctgagagccgaggacacggctgtgtattactgtgcgagactacaaccctccaattacgatattttgactggtgacccaccttactactactactacggtatggacgtctggggccaagggaccacggtcaccgtctcctca

SEQ ID NO: 2159 - DNA, 403 bp, Homo sapiens
gaggtgcagctgttggagtctgggggaggcttggtacagcctggggggtccctgagactctcctgtgcagcctctggattcacctttagcagctatgccatgagctgggtccgccaggctccagggaaggggctggagtgggtctcagctattagtggtagtggtggtagcacatactacgcagactccgtgaagggccggttcaccatctccagagacaattccaagaacacgctgtatctgcaaatgaacagcctgagagccgaggacacggccgtatattactgtgcgagcgccctaggatattgtagtagtaccagctgctatgggtatggtcgcagtggctggcaaattaactggttcgacccctggggccagggaaccctggtcaccgtctcctcag

SEQ ID NO: 2160 - DNA, 396 bp, Homo sapiens
caggtgcagctggtgcagtctggggctgaggtgaagaagcctggggcctcagtgaaggtctcctgcagggcttctggatacatcttcaccggctactatattcactgggtgcgacaggcccctggacaagggcttgagtggatgggatggatcaaccctatcagtgctggcacgaactatgcacagaagtttcagggcagggtcaccatgaccagagacacgtccatcatcacagcctacatggagctgagcaggctgacatctgacgacacggccgtatattactgtgcgagagtgtatccatatgatggggcggtggaatattgtactggtgatagctgctaccattacggtctggacgtctggggccaagggaccacggtcaccgtctcgtca

SEQ ID NO: 2161 - DNA, 396 bp, Homo sapiens
caggtgcagctggtgcagtctggggctgaggtgaagaagcctggggcctcagtgaaggtctcctgcaaggcttctggatacaccttcaccgactactatatgcactgggtgcgacaggcccctggacaagggcttgagtggataggatggatcaaccctaacagtggtggcacaaactatgcacagaagtttcagggcagggtcaccatgaccagggacacgtccatcatcatagtctacatggagttgagcaggctgagatctgacgacacggccatatattactgtgcgagagtctggcagctgcctccctcgttgtatttgggtaactccggagactactattattacggtatggacgtctggggccaagggaccacggtcaccgtctcctca

SEQ ID NO: 2162 - DNA, 405 bp, Homo sapiens
gaggtgcagctggtggagtccgggggaggcttagttcagcctggggggtccctgagactctcctgtgcagcctctggattcaccttcagtagctactggatgcactgggtccgccaagctccagggaaggggctggtgtgggtctcacgtattaatagtgatgggagtagcacaagctacgcggactccgtgaagggccgattcaccatctccagagacaacgccaagaacacgctgtatctgcaaatgaacagtctgagagccgaggacacggctgtgtattactgtgcaagagatcatgggggtaggggtcgagcgtacgatattttgactggttattacgaatactactactactacggtatggacgtctggggccaagggaccacggtcaccgtctcctca

SEQ ID NO: 2163 - DNA, 397 bp, Homo sapiens
gaggtgcagctgttggagtctgggggaggcttggtacagcctggggggtccctgagactctcctgtgcagcctctggattcacctttagcatctatgccatgagctgggtccgccaggctccagggaaggggctggagtgggtctcatttattagtggtagtggtggtaccacatactacgccgactccgtgaagggccggttcaccatctccagagacaattccaagaacacgctgtatctgctgatgaacagcctgagagccgaggacacggccgtatattactgtgcgaaagttcggaccgtaacatattgtggtggtgactgctatccccccggggggggttgggatgcttttgatatctggggccaagggacaatggtcaccgtctcttcag

SEQ ID NO: 2164 - DNA, 163 bp, Homo sapiens
agactccgtgaagggccgaatcaccatctccagagacaattccaagaacacggtatatctgcaaatgaacagcctgagagccggggacacggctgtctattactgtgcgagagatcgaactcagtgggacccggccagggaaccctggtcaccgtctcctcag

SEQ ID NO: 2165 - DNA, 358 bp, Homo sapiens
caggttcagctggtgcagtctggaactgaggtgaagaagcctggggcctcagtgaaggtctcctgcaaggcttctggttacacctttaccagctacggtatcagttgggtgcgacaggcccctggacaagggcttgagtgggtgggatggatcagcgcttacaatggtaacacaaagtatgcacagaagctccagggcagagtcaccatgaccacagacacatccacgagcacagcctacatggagctgaggagcctgagatctgacgacacggccgtgtattactgtgcgagagcccaatctctatattttgactacttttactggggccagggaaccctggtcaccgtctcctcag

SEQ ID NO: 2166 - DNA, 342 bp, Homo sapiens
gaggtgcagctggtggagtctgggggaggcttggtccagcctggggggtccctgagactctcctgtgcagcctctggactcaccgtcagtagcaactacatgagctgggtccgccaggctccagggaaggggctggagtgggtctcacttatttatagcggtggtagcacattctacgcagacttcgtgaagggccgattcaccatctccagagacaattccaagaacacgctgtatcttcaaatgaacagcctgagagttgaggacacggctgtgtattactgtgcgagagcgacaccatgggacgtctggggccaagggaccacggtcaccgtctcctca

SEQ ID NO: 2167 - DNA, 399 bp, Homo sapiens
gaggtgcagctggtggagtctgggggaggcttggtacagcctggggggtccctgagactctcatgtgcagcctctggattcaccctcagtagctacggcatgcactgggtccgccaagctacaggaaaaggtctggagtgggtctcagttagtggaactgctggtgacccatattatccaggctccgtgaagggccgattcaccatctccagagaaaatgccaagaactccttgtatcttcaaatgaacagcctgagagccggggacacggctgtgtattactgtgcaagaaatcgcggaattagtatggttcggggagctattataacgatggggaattacgacttggggtctactttgactactggggccagggaaccctggtcaccgtctccacag

SEQ ID NO: 2168 - DNA, 358 bp, Homo sapiens
caggttcagctggtgcagtctggagctgagctgaagaagcctggggcctcagtgaaggtctcctgcaaggcttctggttacacctttaccagctacggtatcagctgggtgcgacaggcccctggacaagggcttgagtggatgggatggatcagctcttacaatggcaacacaaagtatgcacagaagctccagggcagagtcaccatgaccacagacacatccacgagcacagcctacatggaactgaggagcctgagatctgacgacgcggccgtgtattactgtgcgagatctctggggatatggttcggggttgactactggggccagggaaccctggtcaccgtctcctcag

SEQ ID NO: 2169 - DNA, 361 bp, Homo sapiens
cagatcaccttgaaggagtctggtcctacgctggtgaaacccacacagaccctcacgctgacctgcaccttctctgggttctcactcagcactagtggagtgggtgtgggctggatccgtcagcccccaggaaaggccctggagtggcttgcactcatttattgggatgatgataagcgctacagcccatctctgaagagcaggctcaccatcaccaaggacacctccaaaaaccaggtggtccttacaatgaccaacatggaccctgtggacacagccacatattactgtgcacactatgatagtagtgtcctaaactttgactactggggccagggaaccctggtcaccgtctcctcag

SEQ ID NO: 2170 - DNA, 357 bp, Homo sapiens
caggtgcagctggtgcagtctggggctgaggtgaagaagcctggggcctcagtgaaagtctcctgtaaggcttctggatacaccttcaccggcttcgatatacactgggtgcgacaggcccctggacaaggacttgagtggatggggtggatcaaccctaacagtggtgacacaaactattcacagaactttcagggcagggtcaccatgaccagggacacgtccattagcacagcctacatggagctgagcaggctgaactctgacgacacggccgtatattactgtgcgagaggcccgtcgatcttctacggtttggacgtctggggccaagggaccacggtcaccgtctcctca

SEQ ID NO: 2171 - DNA, 361 bp, Homo sapiens
cagatcaccttgaaggagtctggtcctacgctggtgaaacccacacagaccctcacgctgacctgcaccttctctgggttctcactcagcactagtggagtgggtgtgggctggatccgtcagcccccaggaaaggccctggagtggcttgcactcatttattgggatgatgataagcgctacagcccatctctgaagagcaggctcaccatcaccaaggacacctccaaaaaccaggtggtccttacaatgaccaacatggaccctgtggacacagccacatattactgtgcacaccgaggggtgtcgagtaattactttgactactggggccagggaaccctggtcaccgtctcctcag

SEQ ID NO: 2172 - DNA, 361 bp, Homo sapiens
cagatcaccttgaaggagtctggtcctacgctggtgaaacccacacagaccctcacgctgacctgcaccttctctgggttctcactcagcactagtggagtgggtgtgggctggatccgtcagcccccaggaaaggccctggagtggcttgcactcatttattgggatgatgataagcgctacagcccatctctgaagagcaggctcaccatcaccaaggacacctccaaaaaccaggtggtccttacaatgaccaacatggaccctgtggacacagccacatattactgtgcacacagcaaggatacagctacgatctttgactactggggccagggaaccctggtcaccgtctcctcag

SEQ ID NO: 2173 - DNA, 361 bp, Homo sapiens
cagatcaccttgaaggagtctggtcctacgctggtgagacccacacagaccctcacgctgacctgcaccttctctgggttctcactcagcactagtggagtgggtgtgggctggatccgtcagcccccaggaaaggccctggagtggcttgcactcatttattgggatgatgatgagcgctacagcccatctctgaagagcaggctcaccatcaccaaggacacctccaaaaaccaggttgtccttacagtgaccaacatggaccctgtggacacagccacatattactgtgcacacggttctacggtgacccccccctttgactactggggccagggaaccctggtcaccgtctcctcag

SEQ ID NO: 2174 - DNA, 361 bp, Homo sapiens
gaggtgcagctggtggagtctgggggaggcttgggacagcctggggggtccctgagactctcctgtgcagcctctggattcaccttcagtagctacgacatgcactgggtccgccaagctacaggaaaaggtctggagtgggtctcagctactggtacttctggtgacacatattatggagactccgtgaagggccgattcaccatctccagagaagatgccaagaactccttgtatcttcaaatgcacagcctgagagccggggacacggctgtgtattattgtgtaagaggtcatagcagtggctggctatactactttgactactggggccagggaaccctggtcaccgtctcctcag

SEQ ID NO: 2175 - DNA, 364 bp, Homo sapiens
gaggtgcagctggtggagtctgggggaggcttggtacagccagggcggtccctgagactctcctgtacagcttctggattcacctttggtgattatgctatgagctgggtccgccaggctccagggaaggggctggagtgggtaggtttcattagaagcaaagcttatggtgggacaacagaatacgccgcgtctgtgaaaggcagattcaccatctcaagagatgattccaaaagcatcgcctatctgcaaatgaacagcctgaaaaccgaggacacagccgtgtattactgtactagagattgggcctcctatatcccgggagactactggggccagggaaccctggtcaccgtctcctcag

SEQ ID NO: 2176 - DNA, 360 bp, Homo sapiens
caggtgcagctgcaggagtcgggcccaggactggtgaagccttcggagaccctgtccctcacctgcactgtctctggtggctccatcagtagtttctactggaactggatccggcagcccccagggaagggactggagtggattgggtatatccattacagtgggagcaccaactacaacccctccctcaagagtcgagtcaccatatcagtagacacgtccaagaaccagttctccctgaagctgagctctgtgaccgctgcggacacggccgtgtattactgtgcgagagggggcaacagttggtaccccctcggtatggacgtctggggccaggggaccacggtcaccgtctcctca

SEQ ID NO: 2177 - DNA, 364 bp, Homo sapiens
caggtgcagctggtggagtctgggggaggcgtggtccagcctgggaggtccctgagactctcctgtgcagcctctggattcaccttcagtagctatgctatgcactgggtccgccaggctccaggcaaggggctggagtgggtggcagttatatcatatgatggaagtaataaatactacgcagactccgtgaagggccgattcaccatctccagagacaattccaagaacacgctgtatctgcaaatgaacagcctgagagctgaggacacggctgtgtattactgtgcgagagaaaccagtggctggtacgggggtgcttttgatatctggggccaagggacaatggtcaccgtctcttcag

SEQ ID NO: 2178 - DNA, 364 bp, Homo sapiens
caggtgcagctggtggagtctgggggaggcgtggtccagcctgggaggtccctgagactctcctgtgcagcctctggattcaccttcagtagctatgctatgcactgggtccgccaggctccaggcaaggggctggagtgggtggcagttatatcatatgatggaagcaataaatactacgcagactccgtgaagggccgattcaccatctccagagacaattccaagaacacgctgtatctgcaaatgaacagcctgagagctgaggacacggctgtgtattactgtgcgagagatcggtctgggagctacttaggtgcttttgatatctggggccaagggacaatggtcaccgtctcttcag

SEQ ID NO: 2179 - DNA, 364 bp, Homo sapiens
caggtgcagctggtggagtctgggggaggcgtggtccagcctgggaggtccctgagactctcctgtgcagcctctggattcaccttcagtagctatgctatgcattgggtccgccaggctccaggcaaggggctggagtgggtggcagttatatcaaaagatggaaggaataaatactacgcagactccgtgaagggccgattcaccatctccagagacaattccaagaacacgctgtatctgcaaatgaacagcctgagagctgaggacacggctgtgtattactgtgcgagagaagatatagcagcagctggtagagcttttgatatctggggccaagggacaatggtcaccgtctcttcag

SEQ ID NO: 2180 - DNA, 363 bp, Homo sapiens
gaggtgcagctgttggagtctgggggaggcttggtacagcctggggggtccctgagactctcctgtgcagcctctggattcacctttagcagctatgccatgagctgggtccgccaggctccagggaaggggctggagtgggtctcagctattagtggtagtggtggtagcacatactacgcagactccgtgaagggccggttcaccatctccagagacaattccaagaacacgctgtatctgcaaatgaacagcctgagagccgaggacacggccgtatattactgtgcgaaagatgggagggttttatgggcctggggtatggacgtctggggccaagggaccacggtcaccgtctcctca

SEQ ID NO: 2181 - DNA, 357 bp, Homo sapiens
caggtgcagctggtggagtctgggggaggcttggtcaagcctggagggtccctgagactctcctgtgcagcctctggattcaccttcagtgactactacatgagctggatccgccaggctccagggaaggggctggagtgggtttcatacattagtagtagtagtagttacacaaactacgcagactctgtgaagggccgattcaccatctccagagacaacgccaagaactcactgtatctgcaaatgaacagcctgagagccgaggacacggctgtgtattactgtgcgagagacggccatggtgctacgatggttgacgtctggggccaagggaccacggtcaccgtctcctca

SEQ ID NO: 2182 - DNA, 363 bp, Homo sapiens
caggtgcagctggtgcagtctggggctgaggtgaagaagcctggggcctcagtgaaggtctcctgcaaggcttctggatacaccttcaccggctactatatgcactgggtgcgacaggcccctggacaagggcttgagtggatgggatggatcaaccctaacagtggtggcacaaactatgcacagaagtttcagggcagggtcaccatgaccagggacacgtccatcagcacagcctacatggagctgagcaggctgagatctgacgacacggccgtgtattactgtgcgagagttcccctccgtatagcctggagtggtatggacgtctggggccaagggaccacggtcaccgtctcctca

SEQ ID NO: 2183 - DNA, 364 bp, Homo sapiens
cagctgcagctggtgcagtctggggctgaggtgaagaagcctggggcctcagtgaaggtttcctgcaaggcatctggatacaccttcaccagctactatatacactgggtgcgacaggcccctggacaagggcttgagtggatgggaataatcaaccctagtggtggtagcacaaggtacgcacagaggttccagggcagagtcaccatgaccagcgacacgtccacgagcacagtctacatggaactgaggagcctgagatctgaggacacggccgtcttttactgtgcgagatctgtgatagtagtgcgtactgatgctcttgatttctggggccgagggacaatggtcaccgtctcttcag

SEQ ID NO: 2184 - DNA, 363 bp, Homo sapiens
gaggtgcagctggtggagtctgggggaggcttggtacagcctggagggtccctgagactctcctgtgcagcctctggattcaccttcagtagttatgaaatgaactgggtccgccaggctccagggaaggggctggagtgggtttcatacattagtagtagtggtagtaccatatactacgcagactctgtgaagggccgattcaccatctccagagacaacgccaagaactcactgtatctgcaaatgaacagcctgagagccgaggacacggctgtttattactgtgcgagatatagcagcagctggtactcctacggtatggacgtctggggccaagggaccacggtcaccgtctcctca

SEQ ID NO: 2185 - DNA, 364 bp, Homo sapiens
caggttcagctggtgcagtctggagctgaggtgaagaagcctggggcctcagtgaaggtctcctgcaaggcttctggttacagctttaccagctacggtatcagctgggtgcgacaggcccctggacaagggcttgagtggatgggatcgatcagcacttacaatggtaagagagactatgcacagaagttccagggcagagtcaccatgaccacagacacatccacgagcacagcctacatggagctgaggagcctgagatctgacgacacggccgtgtattactgtgcgagagatttccaatacagctatggatctgcccccttttcgtggggccagggaaccctggtcaccgtctcctcag

SEQ ID NO: 2186 - DNA, 364 bp, Homo sapiens
caggttcagctggtgcagtctggagctgaggtgaagaagcctggggcctcagtgaaggtctcctgcaaggcttctggttacacctttaccagttacggtatcagctgggtgcgacaggcccctggacaagggcttgagtggatgggatggatcagcggttacaatggtaacacacaccatgcacagaagctccagggcagagtcaccatgaccacagacacatccacgagcacagcctacatggagctgaggagcctgagatctgacgacacggccgtgtattactgtgcgagaaacggggaggggtttttgactggtcaaattgactactggggccagggaaccctggtcaccgtctcgtcag

SEQ ID NO: 2187 - DNA, 363 bp, Homo sapiens
caggtgcagctggtggagtctgggggaggcgtggtccagcctgggaggtccctgagactctcctgtgcagcctctggattcaccttcagtagctatgctatgcactgggtccgccaggctccaggcaaggggctggagtgggtggcagttatatcatatgatggaagcaataaatactacgcagactccgtgaagggccgattcaccatctccagagacaattccaagaacacgctgtatctgcaaatgaacagcctgagagctgaggacacggctgtgtattactgtgcgagagagaggactaactactactactacggtatggacgtctggggccaagggaccacggtcaccgtctcctca

SEQ ID NO: 2188 - DNA, 363 bp, Homo sapiens
caggtgcagctggtggagtctgggggaggcgtggtccagcctgggaggtccctgagactctcctgtgcagcctctggattcaccttcagtagccatgctatgcactgggtccgccaggctccaggcaaggggctggagtgggtggcagttatatcatatgatggaagcaacaaatactacgcagactccgtgaagggccgattcaccatctccagagacaattccaagaacacactgtatctgcaaatgaacagcctgagaactgaggacacggctgtctgttactgtgcgagggctacacgaggctcctattattacggtatggacgtctggggccaagggaccacggtcaccgtctcctca

SEQ ID NO: 2189 - DNA, 363 bp, Homo sapiens
caggtgcagctggtggagtctgggggaggcgtggtccagcctgggaggtccctgagactctcctgtgcagcctctggattcaccttcagtagctatgctatgcactgggtccgccaggctccaggcaaggggctggagtgggtggcagttatatcatatgatggaagtaataaatactacgcagactccgtgaagggccgattcaccatctccagagacaattccaagaacacgctgtatctgcaaatgaacagcctgagagctgaggacacggctgtgtattactgtgcggtggctactctgatctactactactacggtatggacgtctggggccaagggaccacggtcaccgtctcctca

SEQ ID NO: 2190 - DNA, 363 bp, Homo sapiens
caggtgcagctggtggagtctgggggaggcgtggtccagcctgggaggtccctgagactctcctgtgcagcctctggattcaccttcagtagctatgctatgcactgggtccgccaggctccaggcaaggggctggagtgggtggcagttatatcatatgatggaagtaataaatactacgcagactccgtgaagggccgattcaccatctccagagacaattccaagaacacgctgtatctgcaaatgaacagcctgagagctgaggacacggctgtgtattactgtgcgagagatcgagatgggtcgatctactacggtatggacgtctggggccaagggaccacggtcaccgtctcctca

SEQ ID NO: 2191 - DNA, 363 bp, Homo sapiens
caggtgcagctggtggagtctgggggaggcgtggtccagcctgggaggtccctgagactctcctgtgcagcctctggattcaccttcagtacctatgctatgcactgggtccgccaggctccaggcaaggggctggagtgggtggcagttatatcatatgatggaagcaataaatactacgcagactccgtgaagggccgattcaccatctccagagacaattccaagaacacgctgtatctgcaaatgaacagcctgagagctgaggacacggctgtgtattactgtgcgagagccgtgactgggggctactactacggtatggacgtctggggccaagggaccacggtcaccgtctcctca

SEQ ID NO: 2192 - DNA, 381 bp, Homo sapiens
caggtgcagctgcaggagtcgggcccaggactggtgaagccttcggagaccctgtccctcacctgcactgtctctggtggctccatcagtagttactactggagctggatccggcagcccgccgggaagggactggagtggattgggcgtatctataccagtgggagcaccaactacaacccctccctcaagagtcgagtcaccatgtcagtagacacgtccaagaaccagttctccctgaagctgagctctgtgaccgccgcggacacggccgtgtattactgtgcgagtctccaagggtcttcctacgattgggatttggggtactactactacggtatggacgtctggggccaagggaccacggtcaccgtctcctca

SEQ ID NO: 2193 - DNA, 363 bp, Homo sapiens
caggtgcagctggtggagtctgggggaggcgtggtccagcctgggaggtccctgagactctcctgtgcagcctctggattcaccttcagtagctatgctatgcactgggtccgccaggctccaggcaaggggctggagtgggtggcagttatatcatatgatggaagtaataaatactacgcagactccgtgaagggccgattcaccatctccagagacaattccaagaacacgctgtatctgcaaatgaacagcctgagagctgaggacacggctgtgtattactgtgcgagaggttttgctgctaactactactacggtatggacgtctggggccaagggaccacggtcaccgtctcctca

SEQ ID NO: 2194 - DNA, 363 bp, Homo sapiens
caggtgcagctggtggagtctgggggaggcgtggtccagcctgggaggtccctgagactctcctgtgcagcctctggattcaccttcagtagctatgctatgcactgggtccgccaggctccaggcaaggggctggattgggtggcacttatttcatatgatggattcaataaatactacgcagactccgtgaagggccgattcaccatctccagagacaattccaagaacacgctgtatctgcaaatgaacagcctgagagctgaggacacggctgtatattactgtgcgagatcctccaggggaggttactactacggtgtggacgtctggggccaagggaccacggtcaccgtctcctca

SEQ ID NO: 2195 - DNA, 364 bp, Homo sapiens
gaggtgcagctggtggagtctgggggaggcttggtacagcctggagggtccctgagactctcctgtgcagcctctggattcaccttcagtagttatgaaatgcactgggtccgccaggctccagggaaggggctggagtgggtttcatacattagtaggagcggcactaccatatacttcgcagactctgtgaagggccgattcaccatctccagagacaacgccaagaactcactgtatctgcaaatgaacagcctgagagccgaggacacggctgtttattactgtgcgagagagggggtgactgctatttctcgatactttgactattggggccagggaaccctggtcaccgtctcctcag

SEQ ID NO: 2196 - DNA, 363 bp, Homo sapiens
caggtgcagctggtggagtctgggggaggcgtggtccagcctgggaggtccctgagactctcctgtgcagcgtctggattcaccttcagtagctatggcatgcactgggtccgccaggctccaggcaaggggctggagtgggtggcagttatatggtatgatggaagtaataaatactatgcagactccgtgaagggccgattcaccatctccagagacaattccaagaacacgctgtatctgcaaatgaacagcctgagagccgaggacacggctgtgtattactgtgcgagagaccccctatggttcgacgctgctcgtatggacgtctggggccaagggaccacggtcaccgtctcctca

SEQ ID NO: 2197 - DNA, 364 bp, Homo sapiens
gaggtgcagctggtgcagtctggagcagaggtgaaaaagcccggggagtctctgaagatctcctgtaagggttctggatacagctttaccagctactggatcggctgggtgcgccagatgcccgggaaaggcctggagtggatggggatcatctatcctggtgactctgataccagatacagcccgtccttccaaggccaggtcaccatctcagccgacaagtccatcagcaccgcctacctgcagtggagcagcctgaaggcctcggacaccgccatgtattactgtgcgagactgaagtattactatgacctccctgcttttgatatctggggccaagggacaatggtcaccgtctcttcag

SEQ ID NO: 2198 - DNA, 364 bp, Homo sapiens
gaggtgcagctggtgcagtctggagcagaggtgaaaaagccgggggagtctctgaagatctcctgtaagggttctggatacagctttaccagctactggatcggctgggtgcgccagatgcccgggaaaggcctggagtggatggggatcatctatcctggtgactctgataccagatacagcccgtccttccaaggccaggtcaccatctcagccgacaagtccatcagcaccgcctacctgcagtggagcagcctgaaggcctcggacaccgccatgtattactgtgcgagccctacagtaactaccttagggggtgcttttgatatctggggccaagggacaatggtcaccgtctcttcag

SEQ ID NO: 2199 - DNA, 364 bp, Homo sapiens
gaggtgcagctggtgcagtctggagcagaggtgaaaaagccgggggagtctctgaagatctcctgtaagggttctggatacagctttaccagctactggatcggctgggtgcgccagatgcccgggaaaggcctggagtggatggggatcatctatcctggtgactctgataccagatacagcccgtccttccaaggccaggtcaccatctcagccgacaagtccatcagcaccgcctacctgcagtggagcagcctgaaggcctcggacaccgccatgtattactgtgcgaggccaataagcccataccagcttaatgcttttgatatctggggccaagggacaatggtcaccgtctcttcag

SEQ ID NO: 2200 - DNA, 364 bp, Homo sapiens
caggtgcagctggtggagtctgggggaggcgtggtccagcctgggaggtccctgagactctcctgtgcagcgtctggattcaccttcagtagctatggcatgcactgggtccgccaggctccaggcaaggggctggaatgggtggcagttatatggtatgatggaagtaatagatattatgcagactccgtgaagggacgattcaccatctccagagacaattccaagaacacgctgtatctgcaaatgaacagcctgagagccgaggacacggctgtgtattactgtgcgagagattttcggttcggtgactacgaaaacaaagactactggggccagggaaccctggtcatcgtctcctcag

SEQ ID NO: 2201 - DNA, 364 bp, Homo sapiens
caggtgcagctggtgcagtctggggctgaggtgaagaagcctggggcctcagtgaaggtctcctgcaaggcttctggatacaccttcaccagttatgatatcaactgggtgcgacaggccactggacaagggcttgagtggatgggatggatgaaccctaacagtggtaacacaggctatgcacagaagttccagggcagagtcaccatgaccaggaacacctccataagcacagcctacatggagctgagcagcctgagatctgaggacacggccgtgtattactgtgcgagagccgccatatggttcggggagttattatcagacccctggggccagggaaccctggtcaccgtctcctcag

SEQ ID NO: 2202 - DNA, 364 bp, Homo sapiens
caggtccagctggtacagtctggggctgaggtgaagaagcctggggcctcagtgaaggtctcctgcaaggtttccggatacaccctcactgaattatccatgcactgggtgcgacaggctcctggaaaagggcttgagtggatgggaggttttgatcctgaagatggtgaaacaatctacgcacagaagttccagggcagagtcaccatgaccgaggacacatctacagacacagcctacatggagctgagcagcctgagatctgaggacacggccgtgtattactgtgcaacagagtttgccttcataactggaggcttatttgactactggggccagggaaccctggtcaccgtctcctcag

SEQ ID NO: 2203 - DNA, 384 bp, Homo sapiens
gaggtgcagctggtggagtctgggggaggcctggtcaagcctggggggtccctgagactctcctgtgcagcctctggattcaccttcagtagctatagcatgaactgggtccgccaggctccagggaaggggctggagtgggtctcatccattagtagtagtagtagttacatatactacgcagactcagtgaagggccgattcaccatctccagagacaacgccaagaactcactgtatctgcaaatgaacagcctgagagccgaggacacggctgtgtattactgtgcgagagatctgtcttttttctatagcagcagctggccatactactactacggtatggacgtctggggccaagggaccacggtcaccgtctcctca

SEQ ID NO: 2204 - DNA, 361 bp, Homo sapiens
gaggtgcagctggtggagtctggaggaggcttgatccagcctggggggtccctgagactctcctgtgcagcctctgggttcaccgtcagtaggaactacatgagttgggtccgccaggctccagggaaggggctggagtgggtctcagttatttatggtggtggtagcacatattacgcagactccgtgaagggccgattcaccatctccagagacaattccaagaacacgctgtatcttcaaatgaacagcctgagagtcgaggacacggccgtgtattactgtgcgagagggccttattactatgatagaagtggttttgactactggggccagggaaccctggtcaccgtctcctcag

SEQ ID NO: 2205 - DNA, 361 bp, Homo sapiens
gaggtgcagctggtggagtctggaggaggcttggtccagcctggggggtccctgagactctcctgtgcagcctctgggttcaccatccttagcaactacatgagctgggtccgccaggctccagggaaggggctggagtgggtctcagttatttatagcggtggtagcacatactacgcagactccgtgaagggccgattcaccatctccagacacaattccaagaacacgctgtttcttcaaatgaacagcctgagagttgaggacacggccgtgtattactgtgcgagagggcccgttcggggagttattacccactttgactactggggccagggaaccctggtcaccgtctcctcag

SEQ ID NO: 2206 - DNA, 373 bp, Homo sapiens
caggtcaccttgaaggagtctggtcctgtgctggtgaaacccacagagaccctcacgctgacctgcaccgtctctgggttctcactcagccatcctagaatgggtgtgagctggatccgtcagcccccagggaaggccctggagtggcttgcacacattttttcgaatgacgaaaaatcctacagcacatctctgaagagcaggctcaccatctccaagggcacctccaaaagccaggtggtccttaccatgaccaacatggacccggtggacacagccgcatattactgtgcacggattttctacggtggttatgcaggggcttggtggttcgacccctggggccagggaaccctggtcagcgtctcctcag

SEQ ID NO: 2207 - DNA, 370 bp, Homo sapiens
caggtgcagctggtgcaatctgggtctgagttgaagaagcctggggcctcagtgaaggtttcctgcaaggcttctggatacaccttcactagctatgctatgaattgggtgcgacaggcccctggacaagggcttgagtggatgggatggatcaacaccaacactgggaacccaacgtatgcccagggcttcacaggacggtttgtcttctccttggacacctctgtcagcacggcatttctgcagatcaccagcctaaaggctgaggacactgccgtgtattactgtgcgagagtggatgtagcagcagctggaccgtacaactggttcgacccctggggccagggaaccctggtcaccgtctcctcag

SEQ ID NO: 2208 - DNA, 364 bp, Homo sapiens
caggtgcagctggtgcagtctggggctgaggtgaagaagcctgggtcctcggtgaaggtctcctgcaaggcttctggaggcaccttcagcagctatgctatcagctgggtgcgacaggcccctggacaagggcttgagtggatgggagggatcatccctatctttggtacagcaaactacgcacagaagttccagggcagagtcacgattaccgcggacgaatccacgagcacagcctacatggagctgagcagcctgagatctgaggacacggccgtgtattactgtgcgagaggacagcagtggctggttaggtcctggttcgacccctggggccagggaaccctggtcaccgtctcctcag

SEQ ID NO: 2209 - DNA, 364 bp, Homo sapiens
caggtgcagctggtgcagtctggggctgaggtgaagaagcctgggtcctcggtgaaggtctcctgcaaggcttctggaggcaccttcagcagttatcctatcagctgggtgcgacaggcccctggacaagggcttgagtggatgggagggatcatccctaggtttgggacagcaaactacgcacagaacttccagggcagagtcacgattaccgcggacgaatccacgagcacagcctacatggagctgagcagcctgagatctgaggacacggccgtatattactgtgcgagagattcttcagactacgtgctttcctggttcgacccctggggccagggaaccctggtcaccgtctcctcag

SEQ ID NO: 2210 - DNA, 364 bp, Homo sapiens
caggtccagctggtgcaatctggggctgaggtgaagaagcctgggtcctcggtgaaggtctcctgcaaggcttctggaggcaccttcagcagctatactctcacctgggtgcgacaggcccctggacaagggcttgagtggatgggaaggatcgtccctatcgttggtttagcaaactacgcacagaagttccagggcagagtcacgattaccgcggacaaatccacgagcacagcctacatggagctgagcagcctgagatctgaggacacggccgtgtattactgtgcgagagacccagggggaggactggactcggggtttgactactggggccagggaaccctggtcaccgtcccctcag

SEQ ID NO: 2211 - DNA, 364 bp, Homo sapiens
caggtgcagctggtgcagtctggggctgaggtgaagaagcctgggtcctcggtgaaggtctcctgcaaggcttctggaggcaccttcagcagctatgctatcagctgggtgcgacaggcccctggacaagggcttgagtggatgggagggatcatccctatctttggtacaacaaactacgcacagaagttgcagggcagagtcacgattaccgcggacgaatctacgagcacagcctacatggagctgagcagcctgagatctgaggacacggccgtgtattactgtgcgagaggcctaagtggctggtacgcgagttggttcgacccctggggccagggaaccctggtcaccgtctcctcag

SEQ ID NO: 2212 - DNA, 364 bp, Homo sapiens
caggtgcagctggtgcagtctggggctgaggtgaagaagcctgggtcctcggtgagggtctcctgcaaggcttctggaggcaccttcagcagctatgctatcggctgggtgcggcaggcccctggacaaggacttgagtggatgggagggatcatccctatctttcgtacagcaaactacgcacagaaatttcagggcagagtcacgattaccgcggatgaatccacgagcacagcctacatggacctgagcagcctgagatctgaggacacggccgtgtattactgtgcgagcctcctcgatggctacgggtacaactggttcgacccctggggccagggaaccctggtcaccgtctcctcag

SEQ ID NO: 2213 - DNA, 387 bp, Homo sapiens
cagctgcagctgcaggagtccggctcaggactggtgaagccttcacagaccctgtccctcacctgcgctgtctctggtggctccatcagcagtggtggttactcctggagctggatccggcagccaccagggaagggcctggagtggattgggtacatctatcatagtgggagcacctactacaacccgtccctcaagagtcgagtcaccatatcagtagacaggtccaagaaccagttctccctgaagctgagctctgtgaccgccgcggacacggccgtgtattactgtgccagaggatatggttcggggagttattccatgccttactactactactacggtatggacgtctggggccaagggaccacggtcaccgtctcctca

SEQ ID NO: 2214 - DNA, 370 bp, Homo sapiens
caggtgcagctggtggagtctgggggaggcgtggtccagcctgggaggtccctgagactctcctgtgcagcctctggattcaccttcaatagctatgctatgcactgggtccgccaggctccaggcaaggggctggagtgggtggcacttatatcatatgatggaagtaataaatacaacgcagactccgtgaagggccgattcaccatctccagagacaattccaagaacacgctgtatctgcaaatgaacagcctgagagctgaagacacggctgtgtattactgtgcgagagccaaaatatttcggggccttaaatacaactggttggactcctggggccagggaaccctggtcaccgtctcctcag

SEQ ID NO: 2215 - DNA, 370 bp, Homo sapiens
caggttcagctggtgcagtctggagctgaggtgaagaagcctggggcctcagtgaaaatctcctgcaaggcttctggttacaccattaccagctacggtatcaactgggtgcgacaggcccctggacaagggcttgagtggatgggatggatcagcgcttacaatggtaacacaaactatgcacagaagctccagggcagagtcaccatgaccacagacacatccacgagcacagcctacatggagctgcggagcctgagatctgacgacacggccgtgtattactgtgcgagctccctacaatattgtagtagtaacagctgttcctatcgaacctggggccagggaaccctggtcaccgtctcctcag

SEQ ID NO: 2216 - DNA, 364 bp, Homo sapiens
gaggtgcagctagtggagtccgggggaggcttagttcaccctggggggtccctgagactctcctgtgcagcctctggattcaccttcagtagctactggatgcactgggtccgccaagctccagggaaggggctggtgtgggtctcacgtattaatagtgatgggagtagtacaacctacgcggactccgtgaagggccgattcaccatctccagagacaacgccaagaacacgctgtatctgcaaatgaacagtctgagagccgaggacacggctgtgtattactgtgcaagggatcacctatggttcggggaggcaacctttgactactggggccagggaaccctggtcaccgtctcctcag

SEQ ID NO: 2217 - DNA, 364 bp, Homo sapiens
gaggtgcagctggtggagtccgggggaggcttagttcagcctggggggtccctgagactctcctgtgcagcctctggattcaccttcagtagctactggatgcactgggtccgccaagctccagggaaggggctggtgtgggtctcacgtattaatggtgatgggagtagcacaacctacgcggactccgtgaagggccgattcaccatctccagagacaacgccaagaacacgctgtctctgcaaatgaacagtctgagagccgaggacacggctgtatattactgtgcaagagaaagtatagcagcagctgggatcaactttgactactggggccagggaaccctggtcaccgtctcctcag

SEQ ID NO: 2218 - DNA, 364 bp, Homo sapiens
gaggtgcagctggtggagtctgggggaggcctggtcaagcctggggggtccctgagactctcctgtgcagcctctggattcaccttcagtagctatagcatgaactgggtccgccaggctccagggaaggggctggagtgggtctcatccattagtagtagtagtaattacatatactacgcagactcagtgaagggccgattcaccatctccagagacaacgccaagaactcactgtatctgcaaatgaacagcctgagagccgaggacacggctgtgtattactgtgcgagagtgcgcgcagaattgtggggtaactggttcgacccctggggccagggaaccctggtcaccgtctcctcag

SEQ ID NO: 2219 - DNA, 370 bp, Homo sapiens
caggtccagctggtgcaatctggggctgaggtgaagaagcctgggtcctcggtgaaggtctcctgcaaggcttctggaggcaccttcagcagctatactatcagctgggtgcgacaggcccctggacaagggcttgagtggatgggaaggatcatccctatccttggtatagcaaactacgcacagaagttccagggcagagtcacgattaccgcggacaaatccacgagcacagcctacatggagctgagcagcctgagatctgaggacacggccgtgtattactgtgcgagaatgggtccgggtatagaacaagtaacacactggttcgacccctggggccagggaaccctggtcaccgtctcctcag

SEQ ID NO: 2220 - DNA, 370 bp, Homo sapiens
caggtccagctggtgcaatctggggctgaggtgaagaagcctgggtcctcggtgaaggtctcctgtaaggcttctggaggcaccttcagcagctatagtatcagctgggtgcgtcaggcccctggacaagggcttgagtggatgggaaggatcatccctatctttcctataacaaactacgcacagaagttccagggcagagtcacgattaccgcggacaaatccacgagcacagcctacatggaactgagcagcctgagatctgaggacacggccgtgtattactgtgcgagagattccaattctggtttagtggctgggggctggttcgacccctggggccagggaatcctggtcaccgtctcctcag

SEQ ID NO: 2221 - DNA, 370 bp, Homo sapiens
gaggtgcagctggtgcagtctggagcagaggtgaaaaagccgggggagtctctgaagatctcctgtaagggttctggatacagctttaccagctactggatcggctgggtgcgccagatgcccgggaaaggcctggagtggatggggatcatgtatcctggtgactctgataccagatacagcccgtccttccaaggccaggtcaccatctcagccgacaagtccatcagcaccgcctacctgcagtggagcagcctgaaggcctcggacaccgccatgtattactgtgtgagaacttattactatggttcggggagttataactggttcgacccctggggccagggaaccctggtcaccgtctcctcag

SEQ ID NO: 2222 - DNA, 373 bp, Homo sapiens
cagctgcagctgcaggagtcgggcccaggactggtgaagccttcggagaccctgtccctcacctgcactgtctctggtggctccatcagcagtagtagttactactggggctggatccgccagcccccagggaaggggctggagtggattgggagtatctattatagtgggagcacctactacaacccgtccctcaagagtcgagtcaccatatccgtagacacgtccaagaaccagttctccctgaagctgagctctgtgaccgccgcagacacggctgtgtattactgtgcgagacatgcggttattactatggttgctggaggctggttcgacccctggggccagggaaccctggtcaccgtctcctcag

SEQ ID NO: 2223 - DNA, 384 bp, Homo sapiens
gaggtgcagctgttggagtctgggggaggcttggtacagcctggggggtccctgagactctcctgtgcagcctctggattcacctttagcagctatgccatgagctgggtccgccaggctccagggaaggggctggagtgggtctcagctattagtggtagtggtggtagcacatactacgcagactccgtgaagggccggttcaccatctccagagacaattccaagaacacgctgtatctgcaaatgaacagcctgagagccgaggacacggccgtatattactgtgcgaaagatgcggctgatagtagtggttattactacgactactactactacggtatggacgtctggggccaagggaccacggtcaccgtctcctca

SEQ ID NO: 2224 - DNA, 364 bp, Homo sapiens
caggtgcagctggtggagtctgggggaggcgtggtccagcctgggaggtccctgagactctcctgtgcagcctctggattcaccttcagtagctatggcatgcactgggtccgccaggctccaggcaaggggctggagtgggtggcagttatatcatatgatggaagtaataaatactatgcagactccgtgaagggccgattcaccatctccagagacaattccaagaacacgctgtatctgcaaatgaacagcctgagagctgaggacacgtctgtgtattactgtgcgagagagggggcagtgggagctaccaccggcattgactactggggccagggaaccctggtcaccgtctcctcag

SEQ ID NO: 2225 - DNA, 364 bp, Homo sapiens
caggtgcagctggtggagtctgggggaggcgtggtccagcctgggaggtccctgagactctcctgtgcagcctctggattcaccttcagtagccatgctatgcactgggtccgccaggctccaggcaaggggctggagtgggtggcagttatatcatatgatggaagtaataaataccatgcagactccgtgaagggccgattcaccatctccagagacaattccaagaacacgctgtatctgcaaatgagcagcctgagagctgaggacacggctgtgtattactgtgcgacagaagattactatgatagtagtggttcctttgactactggggccagggaaccctggtcaccgtctcctcag

SEQ ID NO: 2226 - DNA, 364 bp, Homo sapiens
caggtgcagctggtggagtctgggggaggcgtggtccagcctgggaggtccctgagactctcctgtgcagcctctggattcaccttcaatagctatggtatgcactgggtccgccaggctccaggcaagggactggagtgggtggcagttatatcatatgatggaagcaataaatactacgcagactccgtgaagggccgattcaccatctccagagacaattccaagaacacgctgtatctgcaaatgaacagcctgagagctgaggacacggctgtgtattactgtgcgaggcctcttagtgggagctacctatccgggattgactactggggccagggaaccctggtcaccgtctcctcag

SEQ ID NO: 2227 - DNA, 364 bp, Homo sapiens
caggtgcagctggtgcagtctggggctgaggtgaagaagcctggggcctcagtgaaggtctcctgcaaggcttctggatacaccttcaccggctactatatgcactgggtgcgacaggcccctggacaagggcttgagtggatgggatggatcaaccctaacagtggtggcacaaactatgcacagaagtttcagggcagggtcaccatgaccagggacacgtccatcagcacagcctacatggagctgagcaggctgagatctgacgacacggccgtgtattactgtgcgagagagggtcgtggatacagctatggttatggtgactactggggccagggaaccctggtcaccgtctcctcag

SEQ ID NO: 2228 - DNA, 364 bp, Homo sapiens
caggtgcagctggtgcagtctggggctgaggtgaagaagcctggggcctcagtgaaggtctcctgcaaggcttctggatacaccttcaccggctactatatgcactgggtgcgacaggcccctggacaagggcttgagtggatgggatggatcaaccctaacagtggtggcacaaactatgcacagaagtttcagggcagggtcaccatgaccagggacacgtccatcagcacagcctacatggagctgagcaggctgagatctgacgacacggccgtgtattactgtgcgagagattattactatgatagtagtgctgcccctgactactggggccagggaaccctggtcaccgtctcctcag

SEQ ID NO: 2229 - DNA, 364 bp, Homo sapiens
caggtgcaactggtgcagtctggggctgaggtgaagaagcctggggcctcagtgaaggtctcctgcaaggcttctggatacatcttcaccggctactatatgcactgggtgcgacaggcccctggacaagggcttgagtggatgggatggatcaaccctaacagtggtgccacaaattctgtacagaagtttcagggcagggtcaccatgaccagggacacgtccatcagcacagcctacatggagctgagcaggctaagatctgacgacacggccgtgtatttctgtgcgagagggtcaagcagcagctggtctgggtggttcgacccctggggccagggaaccctggtcaccgtctcctcag

SEQ ID NO: 2230 - DNA, 364 bp, Homo sapiens
caggtgcagctggtgcagtctggggctgaggtgaagaagcctggggcctcagtgaaggtctcctgcaaggcttctggatacaccttcaccggctactatatgcactgggtgcgacaggcccctggacaagggcttgagtggatgggatggatcaaccctaacagtggtggcacaaactatgcacagaagtttcagggcagggtcaccatgaccagggacacgtccatcagcacagcctacatggagctgagcaggctgagatctgacgacacggccgtgtattactgtgcgagagaagtagcagtggctggtctcaactggttcgacccctggggccagggaaccctggtcaccgtctcctcag

SEQ ID NO: 2231 - DNA, 188 bp, Homo sapiens
agactccgtgaagggccgattcaccatctccagagacaattccaagaacacgctgtatctgcaaatgaacagcctgagagccgaggacacggctgtgtattactgtgcgagagattttttacgcggggcagcagttggttcgtactttgactactggggccagggaaccctggtcaccgtctcctcag

SEQ ID NO: 2232 - DNA, 322 bp, Homo sapiens
gacatccagatgacccagtctccatcctccctgtctgcatctgtaggagacagagtcaccatcacttgccaggcgagtcaggacattagcaactatttaaattggtatcagcagaaaccagggaaagcccctaagctcctgatctacgatgcatccaacttggaaacaggggtcccatcaagattcagtggaagtggatctgggacagattttactttcaccatcagcagcctgcagcctgaagatattgcaacatattactgtcaacagtatgattatctcccgctcactttcggcggagggaccaaggtggagatcaaac

SEQ ID NO: 2233 - DNA, 322 bp, Homo sapiens; identical to SEQ ID NO: 2232

SEQ ID NO: 2234 - DNA, 322 bp, Homo sapiens; identical to SEQ ID NO: 2232

SEQ ID NO: 2235 - DNA, 322 bp, Homo sapiens
gacatccagatgacccagtctccatcctccctgtctgcatctgtaggagacagagtcaccatcacttgccaggcgagtcaggacattagcaactatttaaattggtatcagcagaaaccagggaaagcccctaagctcctgatctacgatgcatccaatttggaaacaggggtcccatcaaggttcagtggaagtggatctgggacagattttactttcaccatcagcagcctgcagcctgaagatattgcaacatattactgtcaacagtatgattatctcccgctcactttcggcggagggaccaaggtggagatcaaac

SEQ ID NO: 2236 - DNA, 322 bp, Homo sapiens; identical to SEQ ID NO: 2235

SEQ ID NO: 2237 - DNA, 322 bp, Homo sapiens; identical to SEQ ID NO: 2235

SEQ ID NO: 2238 - DNA, 322 bp, Homo sapiens; identical to SEQ ID NO: 2232

SEQ ID NO: 2239 - DNA, 322 bp, Homo sapiens; identical to SEQ ID NO: 2235

SEQ ID NO: 2240 - DNA, 322 bp, Homo sapiens; identical to SEQ ID NO: 2235

SEQ ID NO: 2241 - DNA, 322 bp, Homo sapiens; identical to SEQ ID NO: 2235

SEQ ID NO: 2242 - DNA, 322 bp, Homo sapiens; identical to SEQ ID NO: 2235

SEQ ID NO: 2243 - DNA, 322 bp, Homo sapiens
gaaattgtgttgacgcagtctccaggcaccctgtctttgtctccaggggaaagagccaccctctcctgcagggccagtcagagtgttagcagcagctactttgcctggtaccagcagagacctggccaggctcccaggctcctcatctatggtgcatccagcagggccactggcatcccagacaggttcagtggcagtgggtctgggacagacttcactctcaccatcagcagactggagcctgaagattttgcagtgtattactgtcagcagtatggcagctcactcactttcggcggagggaccaaggtggagatcaaac

SEQ ID NO: 2244 - DNA, 322 bp, Homo sapiens; identical to SEQ ID NO: 2243

SEQ ID NO: 2245 - DNA, 322 bp, Homo sapiens; identical to SEQ ID NO: 2243

SEQ ID NO: 2246 - DNA, 322 bp, Homo sapiens; identical to SEQ ID NO: 2243

SEQ ID NO: 2247 - DNA, 319 bp, Homo sapiens
tcctttgagctgacacagccatcctcagtgtcagtgtctccgggacagacagtcacgattacctgctcaggagatgttctggaaaaaaaatatgttcggtggttccagcagaggccaggccaggcccctatcttggtgatttataaagacactgagcggccctcaagaatccctgagcgattctccggctccagctctgggaccacagtctccttgatcatcaccggggcccaggtggaggatgaggctgactattactgttactctgtggctgacaatatgggggtgttcggcggagggaccaagttgaccgtcctag

SEQ ID NO: 2248 - DNA, 319 bp, Homo sapiens
tcctatgaactgacacagccatcctcagtgtcagtgtctccgggacagacagccaggatcatctgctcaggagaggtactgacaaaaaaatatgttcggtggtttcagcagaagccaggccaggcccctatgttggtgatttataaagacaccgagcggccctcagggattcctgagcgattctccggctccagctcagggaccacagtcaccttgaccatcagcggggcccaggttgaggatgaggctgactattactgttactctgcggctgacaatatgggggtattcggcggagggaccaagttgaccgtcctag

SEQ ID NO: 2249 - DNA, 319 bp, Homo sapiens
tcctttgagctgacacagccatcctcagtgtcagtgtctccgggacagacagccatgatcacctgctcaggagatgttctggaaaaaaaatatgttcggtggttccagcagaggccaggccaggcccctgtgatagtgatttataaagacactgagcggccctcagggatccctgagcgattctccggctccagctcagggaccacagtctccttgaccatcagcggggcccaggttgacgatgaggctgactattactgttactctgcggctgacaatatgggggtgttcggcggagggaccaagttgaccgtcctag

SEQ ID NO: 2250 - DNA, 328 bp, Homo sapiens
caggctgtggtgactcaggagccctcactgactgtgtccccaggagggacagtcactctcacctgtggctccaccactggagctgtcaccagtggtcattatccctactggttccagcagaagcctggccaagcccccaggacactgatttatgatacaaacaacaaacactcctggacacctgcccggttctcaggctccctccttgggggcaaagctgccctgaccctttcgggtgcgcagcctgaggatgaggctgagtattactgcttgctctcctatagtggtgcttgggtgttcggcggagggaccaagctgaccgtcctag

SEQ ID NO: 2251 - DNA, 328 bp, Homo sapiens; identical to SEQ ID NO: 2250

SEQ ID NO: 2252 - DNA, 328 bp, Homo sapiens; identical to SEQ ID NO: 2250

SEQ ID NO: 2253 - DNA, 328 bp, Homo sapiens
cagtctgtgctgactcagccaccctcagcgtctgggacccccgggcagagggtcaccgtctcttgttctggaagcagctccaacattctaaataattatgtatactggtaccaacaactcccaggaacggcccccaaactcctcatctataggaataatcagcggccctcaggggtccctgaccgattctctggctccaagtctggcacctcagcctccctggccatcagtggactccggtccgaggatgaggctgattattactgtgcagcatgggatgacagcctttttgtggtattcggcggagggaccaagctgaccgtcctag

SEQ ID NO: 2254 - DNA, 328 bp, Homo sapiens; identical to SEQ ID NO: 2253

SEQ ID NO: 2255 - DNA, 350 bp, Homo sapiens
cagcctgtgctgactcagccaccttctgcatcagcctccctgggagcctcggtcacactcacctgcaccctgagcagcggctacactaattataaagtggactgatagcggcagagaccagggaagggcccccgctttgtgctgcgagtgggcactggtgggattgtgggatccaaggggggtggcatccctgaccgcttctcagtcctgggctcaggcctcaaccgctacctgaccatcaagaacatccaggaagacgatgagagtgactaccactgtggggcagaccatggcagtgggggcaggttcgtctagggtgttcggcggagggaccaacctgaccgtcctag

SEQ ID NO: 2256 - DNA, 343 bp, Homo sapiens
gacatcgtgatgacccagtctccagactccctggctgtgtctctgggcgagagggccaccatcaactgcaagtccagccagagtgttttatacagctccaacaataagaactacttagcttggtaccagcagaagccaggacagcctcctaaactgctcatttactgggcttctacccgggaatccggggtccctgaccgattcagtggcagcgggtctgggacagatttcactctcaccatcagccgcctgcaggctgaagatgtggcagtttattactgtcagcaatattttagtactcctccgagcactttcggcggagggaccaaggtggagatcaaac

SEQ ID NO: 2257 - DNA, 343 bp, Homo sapiens; identical to SEQ ID NO: 2256

SEQ ID NO: 2258 - DNA, 343 bp, Homo sapiens; identical to SEQ ID NO: 2256

SEQ ID NO: 2259 - DNA, 337 bp, Homo sapiens
gatattgtgatgactcagtctccactctccctgcccgtcacccctggagagccggcctccatctcctgcaggtctagtcagagcctcctgcatagtaatggatataactatttggattggtacctgcagaagccagggcagtctccacagctcctgatctatttgggttctaatcgggcctccggggtccctgacaggttcagtggcagtggatcaggcacagattttacactgaaaatcagcagagtggaggctgaggatgttggggtttattactgcatgcaagctctacaaactccctacacttttggccaggggaccaagctggagatcaaac

SEQ ID NO: 2260 - DNA, 337 bp, Homo sapiens; identical to SEQ ID NO: 2259

SEQ ID NO: 2261 - DNA, 337 bp, Homo sapiens; identical to SEQ ID NO: 2259

SEQ ID NO: 2262 - DNA, 328 bp, Homo sapiens
cagtctgccctgactcagcctgcctccgtgtctgggtctcctggacagtcgatcaccatctcctgcactggaaccagcagtgacgttggtggttataactatgtctcctggtaccaacaacacccaggcaaagcccccaaactcatgatttatgatgtcagtaatcggccctcaggggtttctaatcgcttctctggctccaagtctggcaacacggcctccctgaccatctctgggctccaggctgaggacgaggctgattattactgcagctcatatacaagaggcaattatgtcttcggaactgggaccaaggtcaccgtcctag

SEQ ID NO: 2263 - DNA, 328 bp, Homo sapiens; identical to SEQ ID NO: 2262

SEQ ID NO: 2264 - DNA, 328 bp, Homo sapiens; identical to SEQ ID NO: 2262

SEQ ID NO: 2265 - DNA, 340 bp, Homo sapiens
gacatcgttttgacccagtctccagactccctgggtgtgtcgctgggcgagagggccaccatcaactgcagggccacagagactgttttatacagtccccacaataggaactacttggcgtggtatcaacagaaagcaggacagccccctaagttgctcttttattgggcgaccacccgggaaaatggggtccctgaccggttcagtgccaccgggtctgcgacagacttcactctcaccgtcaacagcctgcaggctgaagatgtggcggtttattactgtcaccaatactaccttgtcccgttcactttcggccctgggactagagtcgatatcaaac

SEQ ID NO: 2266 - DNA, 340 bp, Homo sapiens
gacatcgttttgacccagtctccagactccctgggtgtgtcgctgggcgagacggccaccatcaagtgcagggccacagagactgttttatacagtccccacaataggaactacttggcgtggtatcaacaaaaagcaggacagccccctaagttgctcttttattgggcgaccacccgggaaaatggggtccctgaccggttcagtgcctccgggtctgcgacagacttcactctcaccgtcagcagcctgcaggctgaagatgtggcggtttattactgtcaccaacactaccttgtcccgttcactttcggccctgggactagagtcgatatcaaac

SEQ ID NO: 2267 - DNA, 279 bp, Homo sapiens
gacatccagatgacccagtctccttccaccctgtctgcatctgtaggagccagagtcaccatcacttgccgggccactcagagtattaataactggttggcctggaatcagcagaaaccagggaaagcccctaacttcctgatctataagacatctagtttggaaagtggagtcccatcaaggttcagcggcagtggatctggggcagcgttcactctcaccttctgcagcctgcagcctgatgattttccaacttctgacagccgacggagatcaaac

SEQ ID NO: 2268 - DNA, 331 bp, Homo sapiens
cagtctgccctgactcagcctgcctccgtgtctgggtctcctggacagtcgatcaccatctcctgcactggaaccagcgatgatgttgggggttataaccttgtctcctggtaccaacagcacccaagcaaggcccccaaactcatgatttatgcggccaataagcggccctcaggagtttctaatcgcttctctggctccaagtctggcaacacggcctccctgacgatctctgggctccaggctgaggacgaggctcattattactgctgctcctatgcaactggtagttctgtggtgttcggcggagggaccaagctgaccgtcctag

SEQ ID NO: 2269 - DNA, 340 bp, Homo sapiens
gacatcgtgatgacccagtctccagactccctggctgtgtctctgggcgagagggccaccatcaactgcaagtccagccagagtgttttatacagctccaacaataagaactacttaggttggtaccagcagaaaccaggacagcctcctaaactgctcatttactgggcatctacccgggaatccggggtccctgaccgattcagtggcagcgggtctgggacagatttcactctcaccatcagcagcctgcaggctgaagatgtggcagtttattactgtcagcaatattatactactccgctcactttcggcggagggaccaaggtggagatcaaac

SEQ ID NO: 2270 - DNA, 340 bp, Homo sapiens; identical to SEQ ID NO: 2269

SEQ ID NO: 2271 - DNA, 336 bp, Homo sapiens
cagtctgtgctgacgcagccgccctcagtgtctggggccccagggcagaggatcaccatctcctgcactgggagcacctccaatatcggggcaggttatgatgtacactggtaccagcagcttccaggaacagcccccaaactcctcatctatgctaacagcaatcggccctcaggggtccctgaccgattctctggctccaagtctggcacctcagcctccctggccatcactgggctccaggctgaggatgaggctgattattactgccagtcctatgacagcagcctgagtgccgtttgggtcttcggaactgggaccaaggtcaccgtccta

SEQ ID NO: 2272 - DNA, 337 bp, Homo sapiens
cagtctgtgctgacgcagccgccctcagtgtctggggccccagggcagagggtcaccatctcctgcactgggagcagctccaacatcggggcaggttatgatgtacactggtaccagcagcttccaggaacagcccccaaactcctcatctatggtaacaccaatcggccctcaggggtccctgaccgattctctggctccaagtctggcacctcagcctccctggccatcactgggctccaggctgaggatgaggctgattattactgccagtcctatgacagcagcctgagtgccgtttgggtcttcggaactgggaccaaggtcaccgtcctag

SEQ ID NO: 2273 - DNA, 331 bp, Homo sapiens
cagtctgtgctgactcagccaccctcagcgtctgggacccccgggcagagggtcaccatctcttgttctggaagcaactccaacatcggaagtaattatgtatattggtaccagcagctcccaggaacggcccccaaactcctcatctataggaataatcagcggccctcaggggtccctgaccgattctctggctccaagtctggcacctcagcctccctggccatcagtgggctccggtccgaggatgaggctgattattactgtgcagcatgggatgacagcctgagtgccttggtattcggcggagggaccaagctgaccgtcctag

SEQ ID NO: 2274 - DNA, 331 bp, Homo sapiens; identical to SEQ ID NO: 2273

SEQ ID NO: 2275 - DNA, 331 bp, Homo sapiens
cagtctgccctgactcagcctgcctccgtgtctgggtctcctggacagtcgatcaccatctcctgcactggaaccagcagtgatgttgggagttataaccttgtctcctggtaccaacaccacccaggcaaagcccccaaactcatgatttatgaggtcagtaagcggccctcaggggtttctaatcgcttctctggctccaagtctggcaacacggcctccctgacaatctctgggctccaggctgaggacgagactgattattactgctgctcatatgcaggtagtagcactttagtattcggcggagggaccaagctgaccgtcctag

SEQ ID NO: 2276 - DNA, 331 bp, Homo sapiens
cagtctgccctgactcagcctgcctccgtgtctgggtctcctggacagtcgatcaccatctcctgcactggaaccagcagtgatgttgggagttataaccttgtctcctggtaccaacagcacccaggcaaagcccccaaactcatgatttatgaggtcagtaagcggccctcaggggtttctaatcgcttctctggctccaagtctggcaacacggcctccctgacaatctctgggctccaggctgaggacgaggctgattattactgctgctcatatgcaggtagtaggactttagtattcggcggagggaccaagctgaccgtcctag

SEQ ID NO: 2277 - DNA, 325 bp, Homo sapiens
gaaattgtgttgacgcagtctccaggcaccctgtctttgtctccaggggaaagagccaccctctcctgcagggccagtcagagtgttagcaccatctacttagcctggtaccagcagaaacctggccaggctcccaggctcctcatctatgctgcatccagcagggccactggcatcccagacaggttcagtggcagtgggtctgggacagacttcactctcaccatcagcagactggagcctgaagattttgcagtgtattactgtcagcagtatggtagctctccgtggacgttcggccaagggaccaaggtggaaatcaaac

SEQ ID NO: 2278 - DNA, 328 bp, Homo sapiens
gaaattgtgttgacgcagtctccaggcaccctgtctttgtctccaggggaaagagccaccctctcctgcagggccagtcagagtgttagcagcatctacttagcctggtaccagcagaagcctggccaggctcccaggctcctcatctatggtgcatccagcagggccactggcatcccagacaggttcagtggcagtgggtctgggacagacttcactctcaccatcagcagactggagcctgaagattttgcagtgtattactgtcagcagtatggtagctcacttacgtggacgttcggccaagggaccaaggtggaaatcaaac

SEQ ID NO: 2279 - DNA, 337 bp, Homo sapiens
cagtctgccctgactcagcctgcctccgtgtctgggtctcctggacagtcgatcaccatctcctgcactggaaccagcagtgacgttggtggttataactatgtctcctggtaccaacaacacccaggcaaagcccccaaaatcatgatttatgatgtcagtaatcggccctcaggggtttctaatcgcttctctggctccaagtctggcaacacggcctccctgaccatctctgggctccaggctgaggacgaggctgattattactgcagctcacatacaagcagcagctccccccatgtggtattcggcggagggaccaagctgaccgtcctag

SEQ ID NO: 2280 - DNA, 337 bp, Homo sapiens
cagtctgccctgactcagcctgcctccgtgtctgggtctcctggacagtcgatcaccatctcctgcactggaaccagcagtgacgttggtggttataactatgtctcctggtaccaacaacacccaggcaaagcccccaaaatcatgatttatgatgtcagtaatcggccctcaggggtttctaatcgcttctctggctccaagtccgccaacacggcctccctgaccatctctgggctccaggctgaggacgaggctgattattactgcagctcacatacaagcaacatctccccccatgtgctattcggcggagggaccaagctgaccgtcctag

SEQ ID NO: 2281 - DNA, 325 bp, Homo sapiens
gaaattgtgttgacgcagtctccaggcaccctgtctttgtctccaggggaaagagccaccctctcctgcagggccagtcagagtattagcagcacctacttagcctggtaccagcagaaacttggccaggctcccaggctcctcatgtatggtgcatccagcagggccactggcatcccagacaggttcagtggcagtgggtctgggtcagacttcactctcaccatcagcagactggagcctgaagactttgcagtgtatttctgtcagcagtatggtagctctcccggcacttttggccaggggaccaagctggagatcaaac

SEQ ID NO: 2282 - DNA, 328 bp, Homo sapiens
gaaattgtgttgacgcagtctccaggcaccctgtctttgtctccaggggaaagagccaccctctcctgcagggccagtcagagtgttagcagcagctacttagcctggtaccagcataaacctggccaggctcccaggctcctcatctatggtgcatccagcagggccactggcatcccagacaggttcagtggcagtgggtctgggacagacttcactctcaccatcagcagactggagcctgaagattttgcagtgtattactgtcagcactatggtacctcaccgccttacacttttggccaggggaccaagctggagatcaaac

SEQ ID NO: 2283 - DNA, 331 bp, Homo sapiens
cagtctgccctgactcagcctcgctcagtgtccgggtctcctggacagtcagtcaccatctcctgcactggaaccagcagtgatgttggtggttataactatgtctcctggtaccaacagcacccaggcaaagcccccaaactcatgatttatgatgtcagtcagcggccctcaggggtccctgatcgcttctctggctccaagtctggcaacacggcctccctgaccatctctgggctccaggctgaggatgaggctgattattactgctgctcatatgcaggcacctacactgtgatattcggcggagggaccaagctgaccgtcctag

SEQ ID NO: 2284 - DNA, 331 bp, Homo sapiens
cagtctgccctgactcagcctcgctcagtgtccgggtctcctggacagtcagtcaccatctcctgcactggaaccagcagtgatgttggtggttataactatgtctcctggtaccaacagcacccaggcaaagcccccaaagtcatgatttatgatgtcagtaagcggccctcaggggtccctgatcgcttctctggctccaagtctggcaacacggcctccctgaccatctctgggctccaaactgaggatgaggctgattattactgctgctcatatgcaggcaggtactctgtaatattcggcggagggaccaagctgaccgtcctag

SEQ ID NO: 2285 - DNA, 325 bp, Homo sapiens
gagatagtgatgacgcagtctccagccgccctgtctgtgtctccaggggaaagagccaccctctcctgcagggccagtcagagtgttaccagcaacttagcctggtaccagcagaaacctggccaggctcccaggctcctcatctatggtgcatccaccagggccactggtatcccagccaggttcagtggcagtgggtctgggacagagttcactctcaccatcagcagcctgcagtctgaagattttgcagtttattactgtcagcagtttaataactggcctcgagggacgttcggccaagggaccaaggtggaagtcaaac

SEQ ID NO: 2286 - DNA, 325 bp, Homo sapiens
gaaatagtgatgacgcagtctccagccaccctgtctgtgtctccaggggaaagagccaccctctcctgcagggccagtcagagtgttagcagcaacttagcctggtaccagcagaaacctggccaggctcccaggctcctcatctatggtgcatccaccagggccactggtatcccagccaggttcagtggcagtgggtctgggacagagttcactctcaccatcagcagcctgcagtctgaagattttgcagtttattactgtcagcagtttaataactggcctcgagggacgttcggccaagggaccaaggtggaagtcaaac

SEQ ID NO: 2287 - DNA, 337 bp, Homo sapiens
gatattgtgatgactcagtctccactctccctgcccgtcacccctggagagccggcctccatctcctgcaggtctagtcagagcctcctccatagtaatggatacaactatttggattggtacctgcagaagccagggcagtctccacagctcctgatctatttgggttctgatcgggcctccggggtccctgacaggttcagtggcagtggatcaggcacagattttacactgaaaatcagcagagtggaggctgaggatgttgggatttattactgcatgcaagctctacaaactccggtcactttcggcggagggaccaaggtggagatcaaac

SEQ ID NO: 2288 - DNA, 337 bp, Homo sapiens
gatatagtgatgactcagtctccactctccctgcccgtcacccctggagagccggcctccatctcctgcaggtccagtcagagcctcctccatagtaatggatacaactatttggattggtacctgcagaagccagggcagtctccacagctcctgatctatttgggttctgatcgggccttcggggtccctgacaggttcagtggcagtggatcaggcacagattttacactgaaaatcagcagagtggaggctgaggatgttggggtttattactgcatgcaagctctacaaactccggtcactttcggcggagggaccaaggtggagatcaaac

SEQ ID NO: 2289 - DNA, 328 bp, Homo sapiens
caggctgtggtgactcaggagccctcactgactgtgtcccctggagggacagtcactctcacctgtggctccagcactgggactgtcaccagttatcattatgcctactggttccagcagaagcctggccaagtccccagggtattgatttatgatacaagcgacaaaccctcctggacacctgcccgattttcaggcttcctccttggggacaaagctgccctgaccctttcgggtgcgcagcctgaggatgaggctgactattactgcttgctctcctatagtggtgttgtggtgttcggcggagggaccaagttgaccgtcctag

SEQ ID NO: 2290 - DNA, 328 bp, Homo sapiens; identical to SEQ ID NO: 2289

SEQ ID NO: 2291 - DNA, 331 bp, Homo sapiens
cagtctgtgttgacgcagccgccctcagtgtctgcggccccaggacagaaggtcaccatctcctgctctggaagcagctccaacattgggaataattatgtatcctggtaccagcagctcccaggaacagcccccaaactcctcatttatgacaataataagcgaccctcagggattcctgaccgattctctggctccaagtctggcacgtcagccaccctgggcatcaccggactccagactggggacgaggccgattattactgcggaacttgggatagcagcctgactgctgtggtgttcggcggaggggccaagctgaccgtcctag

SEQ ID NO: 2292 - DNA, 331 bp, Homo sapiens
cagtctgccctgactcagcctgcctccgtgtctgggtctcctggacagtcgatcaccatctcctgcactggaaccagcagtgacgttggtggttataactatgtctcctggtaccaacaacacccaggcaaagcccccaaactcatgatttatgatgtcagtaatcggccctcaggggtttctaatcgcttctctggctccaagtctggcaacacggcctccctgaccatctctgggctccaggctgaggacgaggctgattattactgcagctcatatacaagcagcagcactcgggtcttcggaactgggaccaaggtcaccgtcctag

SEQ ID NO: 2293 - DNA, 322 bp, Homo sapiens
gaaatagtgatgacgcagtctccagccaccctgtctgtgtctccaggggaaagagccaccctctcctgcagggccagtcagagtgttagaagcaacttagcctggtaccagcagaaacctggccaggctcccaggctcctcatctatggtgcatccaccagggccactggtatcccagccaggttcagtggcagtgggtctgggacagagttcactctcaccatcagcagcctgcagtctgaagattttgcagtttattactgtcagcagtataataactggcctcggacgttcggccaagggaccaaggtggaaatcaaac

SEQ ID NO: 2294 - DNA, 319 bp, Homo sapiens
gacatccagatgacccagtctccttccaccctgtctgcatctgtaggagacagagtcaccatcacttgccgggccagtcagagtattagtagctggttggcctggtatcagcagaaaccagggaaagcccctaagctcctgatctataaggcatctagtttagaaagtggagtcccatcaaggttcagcggcagtggatctgggacagaattcactctcaccatcagcagcctgcagcctgatgattttgcaacttattactgccaacagtataatagttattcgacgttcggccaagggaccaaggtggaaatcaaac

SEQ ID NO: 2295 - DNA, 322 bp, Homo sapiens; identical to SEQ ID NO: 851

SEQ ID NO: 2296 - DNA, 322 bp, Homo sapiens
gccatccggataacccagtctccatcctcactctctgcatctacaggagacagagtcaccatcacttgtcgggcgagtcagggtattagcagttatttagcctggtatcagcaaaaaccagggaaagcccctaagctcctgatctatgctgcatccactttgcaaagtggggtcccatcaaggttcagcggcagtggatctgggacagatttcactctcaccatcagctgcctgcagtctgaagattttgcaacttattactgtcaacagtattatagttaccctcggacgttcggccaagggaccaaggtggaaatcaaac

SEQ ID NO: 2297 - DNA, 325 bp, Homo sapiens
gaaattgtgttgacgcagtctccaggcaccctgtctttgtctccaggggaaagagccaccctctcctgcagggccagtcagagtgttagcagcagctacttagcctggtaccagcagaaacctggccaggctcccaggctcctcatctatggtgcatccagcagggccactggcatcccagacaggttcagtggcagtgggtctgggacagacttcactctcaccatcagcagactggagcctgaagattttgcagtgtattactgtcagcagtatggtagctcaccgtacacttttggccaggggaccaagctggagatcaaac

SEQ ID NO: 2298 - DNA, 322 bp, Homo sapiens
gccatccggatgacccagtctccatcctcattctctgcatctacaggagacagagtcaccatcacttgtcgggcgagtcagggtattagcagttatttagcctggtatcagcaaaaaccagggaaagcccctaagctcctgatctatgctgcatccactttgcaaagtggggtcccatcaaggttcagcggcagtggatctgggacagatttcactctcaccatcagctgcctgcagtctgaagattttgcaacttattactgtcaacagtattatagttaccctctgacgttcggccaagggaccaaggtggaaatcaaac

SEQ ID NO: 2299 - DNA, 322 bp, Homo sapiens
tcctatgagctgacacagccaccctcggtgtcagtgtccccaggacagacggccaggatcacctgctctggagatgcattgccaaagcaatatgcttattggtaccagcagaagccaggccaggcccctgtgctggtgatatataaagacagtgagaggccctcagggatccctgagcgattctctggctccagctcagggacaacagtcacgttgaccatcagtggagtccaggcagaagacgaggctgactattactgtcaatcagcagacagcagtggtactgtggtattcggcggagggaccaagctgaccgtcctag

SEQ ID NO: 2300 - DNA, 322 bp, Homo sapiens
gccatccggataacccagtctccatcctcactctctgcatctacaggagacagagtcaccatcacttgtcgggcgagtcagggtattagcagttatttagcctggtatcagcaaaaaccagggaaagcccctaagctcctgatctatgctgcatccactttgcaaagtggggtcccatcaaggttcagcggcagtggatctgggacagatttcactctcaccatcagctgcctgcagtctgaagattttgcaacttattactgtcaacagtattatagttaccctcgaacgttcggccaagggaccaaggtggaaatcaaac

SEQ ID NO: 2301 - DNA, 331 bp, Homo sapiens
cagtctgccctgactcagcctgcctccgtgtctgggtctcctggacagtcgatcaccatctcctgcactggaaccagcagtgacgttggtggttataactatgtctcctggtaccaacaacacccaggcaaagcccccaaactcatgatttatgatgtcagtaatcggccctcaggggtttctaatcgcttctctggctccaagtctggcaacacggcctccctgaccatctctgggctccaggctggggacgaggctgattattactgcagctcatatacaagcagcacctccctggtgttcggcggagggaccaagctgaccgtcctag

SEQ ID NO: 2302 - DNA, 337 bp, Homo sapiens
gatgttgtgatgactcagtctccactctccctgcccgtcacccttggacagccggcctccatctcctgcaggtctagtcaaagcctcgtatacagtgatggaaacacctacttgaattggtttcagcagaggccaggccaatctccaaggcgcctaatttataaggtttctaaccgggactctggggtcccagacagattcagcggcagtgggtcaggcactgatttcacactgaaaatcagcagggtggaggctgaggatgttggggtttattactgcatgcaaggtacacactggcctccgacgttcggccaagggaccaaggtggaaatcaaac

SEQ ID NO: 2303 - DNA, 322 bp, Homo sapiens; identical to SEQ ID NO: 837

SEQ ID NO: 2304 - DNA, 325 bp, Homo sapiens
gacatccagatgacccagtctccatcctccctgtctgcatctgtaggagacagagtcaccatcacttgccgggcaagtcagagcattagcagctatttaaattggtatcagcagaaaccagggaaagcccctaagctcctgatctatgctgcatccagtttgcaaagtggggtcccatcaaggttcagtggcagtggatctgggacagatttcactctcaccatcagcagtctgcaacctgaagattttgcaacttactactgtcaacagagttacagtaccctccagaggacgttcggccaagggaccaaggtggaaatcaaac

SEQ ID NO: 2305 - DNA, 322 bp, Homo sapiens; identical to SEQ ID NO: 837

SEQ ID NO: 2306 - DNA, 334 bp, Homo sapiens; identical to SEQ ID NO: 1621

SEQ ID NO: 2307 - DNA, 322 bp, Homo sapiens; identical to SEQ ID NO: 927

SEQ ID NO: 2308 - DNA, 331 bp, Homo sapiens
cagtctgtgttgacgcagccgccctcagtgtctgcggccccaggacagaaggtcaccatctcctgctctggaagcagctccaacattgggaataattatgtatcctggtaccagcagctcccaggaacagcccccaaactcctcatttatgacaataataagcgaccctcagggattcctgaccgattctctggctccaagtctggcacgtcagccaccctgggcatcaccggactccagactggggacgaggccgattattactgcggaacatgggatagcagcctgagtgttgtggtattcggcggagggaccaagctgaccgtcctag

SEQ ID NO: 2309 - DNA, 334 bp, Homo sapiens
cagcctgtgctgactcaatcatcctctgcctctgctgccctgggatcctcggtcaagctcacctgcactctgagcagtgggcacagtaacttcgtcatcgcatggcatcagcagcagccagggaaggcccctcggtacttgatgaagcttgaaggtagtggaagctacaacaaggggagcggagttcctgatcgcttctcgggctccagctctggggctgaccgctacctcaccatctccaacctccagtctgaggatgaggctgattattactgtgagacctgggacagtaacacccgggtgttcggcggagggaccaagctgaccgtcctag

SEQ ID NO: 2310 - DNA, 331 bp, Homo sapiens
cagtctgtgctgactcagccaccctcagcgtctgggacccccgggcagagggtcaccatctcttgttctggaagcagctccaacatcgaaaataatattgtacactggtaccagcggctcccaggaacggcccccaaactcctcatctatagtaataatcagcggccctcaggggtccctgaccgattctctggctccaagtctggcacctcagcctccctggccatcagtgggctccagtctgaggatgaggctgattattactgtgcagcatgggatgacagcctgaatggtccggtattcggcggagggaccaagctgaccgtcctag

SEQ ID NO: 2311 - DNA, 331 bp, Homo sapiens
cagtctgccctgactcagcctgcctccgtgtctgggtctcctggacagtcgatcaccatctcctgcactggaaccagcagtgacgttggtggttataactatgtctcctggtaccaacaacacccaggcaaagcccccaaactcatgatttatgatgtcagtaatcggccctcaggggtttctaatcgcttctctggctccaagtctggcaacacggcctccctgaccatctctgggctccaggctgaggacgaggctgattattactgcagctcatataccagcagcagcactcgggtgttcggcggagggaccaagctgaccgtcctag

SEQ ID NO: 2312 - DNA, 340 bp, Homo sapiens
gacatcgtgatgacccagtctccagactccctggctgtgtctctgggcgagagggccaccatcaactgcaagtccagccagagtgttttatacagctccaacaataagaactacttagcttggtaccagcagaaaccaggacagcctcctaagctgctcatttactgggcatctacccgggaatccggggtccctgaccgattcagtggcagcgggtctgggacagatttcactctcaccatcagcagcctgcaggctgaagatgtggcagtttattactgtcagcaatattatagtactccttggacgttcggccaagggaccaaggtggaaatcaaac

SEQ ID NO: 2313 - DNA, 331 bp, Homo sapiens; identical to SEQ ID NO: 1021

SEQ ID NO: 2314 - DNA, 322 bp, Homo sapiens
gacatccagatgacccagtctccatcctccctgtctgcatctgtaggagacagagtcaccatcacttgccgggcaagtcagagcattagcagctatttaaattggtatcagcagaaaccagggaaagcccctaagctcctgatctatgctgcatccagtttgcaaagtggggtcccatcaaggttcagtggcagtggatctgggacagatttcactctcaccatcagcagtctgcaacctgaagattttgcaacttactactgtcaacagagttacagtacccctgtcacttttggccaggggaccaagctggagatcaaac

SEQ ID NO: 2315 - DNA, 322 bp, Homo sapiens
gaaatagtgatgacgcagtctccagccaccctgtctgtgtctccaggggaaagagccaccctctcctgcagggccagtcagagtgttagcagcaacttagcctggtaccagcagaaacctggccaggctcccaggctcctcatctatggtgcatccaccagggccactggtatcccagccaggttcagtggcagtgggtctgggacagagttcactctcaccatcagcagcctgcagtctgaagattttgcagtttattactgtcagcagtataataactggcctttcactttcggcggagggaccaaggtggagatcaaac

SEQ ID NO: 2316 - DNA, 337 bp, Homo sapiens
gatattgtgatgactcagtctccactctccctgcccgtcacccctggagagccggcctccatctcctgcaggtctagtcagagcctcctgcatagtaatggatacaactatttggattggtacctgcagaagccagggcagtctccacagctcctgatctatttgggttctaatcgggcctccggggtccctgacaggttcagtggcagtggatcaggcacagattttacactgaaaatcagcagagtggaggctgaggatgttggggtttattactgcatgcaagctctacaaactcctcccactttcggcggagggaccaaggtggagatcaaac

SEQ ID NO: 2317 - DNA, 322 bp, Homo sapiens
gacatccagatgacccagtctccatcctccctgtctgcatctgtaggagacagagtcaccatcacttgccgggcaagtcagagcattagcagctatttaaattggtatcagcagaaaccagggaaagcccctaagctcctgatctatgctgcatccagtttgcaaagtggggtcccatcaaggttcagtggcagtggatctgggacagatttcactctcaccatcagcagtctgcaacctgaagattttgcaacttactactgtcaacagagttacagtacccctgggacgttcggccaagggaccaaggtggaaatcaaac

SEQ ID NO: 2318 - DNA, 331 bp, Homo sapiens; identical to SEQ ID NO: 1754

SEQ ID NO: 2319 - DNA, 334 bp, Homo sapiens
aattttatgctgactcagccccactctgtgtcggagtctccggggaagacggtaaccatctcctgcacccgcagcagtggcaacattgccagcaactatatgcagtggtaccagcagcgcccgggcagtgcccccaccactgtgatctatgaggataagcaaagaccctctggggtccctgatcggttctctggctccatcgacagttcctccaactctgcctccctcaccatctctggactgaagactgaggacgaggctgactactactgtcagtcttataatagcagcaacctttgggtgttcggcggagggaccaagctgaccgtcctag

SEQ ID NO: 2320 - DNA, 325 bp, Homo sapiens
gaaattgtgttgacacagtctccagccaccctgtctttgtctccaggggaaagagccaccctctcctgcagggccagtcagagtgttagcagctacttagcctggtaccaacagaaacctggccaggctcccaggctcctcatctatgatgcatccaacagggccactggcatcccagccaggttcagtggcagtgggtctgggacagacttcactctcaccatcagcagcctagagcctgaagattttgcagtttattactgtcagcagcgtagcaactggcctccgctcactttcggcggagggaccaaggtggagatcaaac

SEQ ID NO: 2321 - DNA, 333 bp, Homo sapiens
atattgtgatgacccagactccactctctctgtccgtcacccctggacagccggcctccatctcctgcaagtctagtcagagcctcctgcatagtgatggaaagacctatttctattggtacctgcagaggccaggccagtctccacagctcctaatctatgaagtctccagccggttctctggagtgccagataggttcagtggcagcgggtcagggacagatttcacactgaaaatcagccgggtggaggctgaggatgttggggtttattactgcatgcaaggtatacacctcgtaacttttggccaggggaccaagctggagatcaaac

SEQ ID NO: 2322 - DNA, 334 bp, Homo sapiens
cagtctgccctgactcagcctgcctccgtgtctgggtctcctggacagtcgatcaccatctcctgcactggaaccagcagtgatgttggcagttataaccttgtctcctggtaccaacagcacccaggcaaagcccccaaactcatgatttatgagggcagtaagcggccctcaggggtttctaatcgcttctctggctccaagtctggcaacacggcctccctgacaatctctgggctccaggctgaggacgaggctgattattactgctgctcatatgcaggtagtagcacctatgtggtgttcggcggagggaccaagctgaccgtcctag

SEQ ID NO: 2323 - DNA, 325 bp, Homo sapiens
gacatccagatgacccagtctccatcctccctgtctgcatctgtaggagacagagtcaccatcacttgccgggcaagtcagagcattagcagctatttaaattggtatcagcagaaaccagggaaagcccctaagctcctgatctatgctgcatccagtttgcaaagtggggtcccatcaaggttcagtggcagtggatctgggacagatttcactctcaccatcagcagtctgcaacctgaagattttgcaacttactactgtcaacagagttacagtacctcctcgatcaccttcggccaagggacacgactggagattaaac

SEQ ID NO: 2324 - DNA, 333 bp, Homo sapiens
aattttatgctgactcagccccactctgtgtcggagtctccggggaagacggtaaccatctcctgcaccggcagcagtggcagcattgccagcaactatgtgcagtggtaccagcagcgcccgggcagtgcccccaccactgtgatctatgaggataaccaaagaccctctggggtccctgatcggttctctggctccatcgacagctcctccaactctgcctccctcaccatctctggactgaagactgaggacgaggctgactactactgtcagtcttatgatagcagcattcatgtggtattcggcggagggaccaagctgaccgtccta

SEQ ID NO: 2325 - DNA, 334 bp, Homo sapiens
cagtctgtgctgacgcagccgccctcagtgtctggggccccagggcagagggtcaccatctcctgcactgggagcagctccaacatcggggcaggttatgatgtacactggtaccagcagcttccaggaacagcccccaaactcctcatctatgataacaacaatcggccctcaggggtccctgaccgattctctgggtccaagtctggcacctcagcctccctggccatcactgggctccaggctgaggatgaggctgtttattactgccagtcctatgacagcagcctgaccggtgaggtattcggcggagggaccaagctgaccgtcctag

SEQ ID NO: 2326 - DNA, 331 bp, Homo sapiens
cagtctgccctgactcagcctgcctccgtgtctgggtctcctggacagtcgatcaccatctcctgcactggaaccagcagtgacgttggtggttataactatgtctcctggtaccaacaacacccaggcaaagcccccaaactcatgatttatgatgtcagtaatcggccctcaggggtttctaatcgcttctctggctccaagtctggcaacacggcctccctgaccatctctgggctccaggctgaggacgaggctgattattactgcagctcatatacaagcagcagcactcaggtattcggcggagggaccaagctgaccgtcctag

SEQ ID NO: 2327 - DNA, 322 bp, Homo sapiens
gccatccggatgacccagtctccatcctcattctctgcatctacaggagacagagtcaccatcacttgtcgggcgagtcagggtattagcagttatttagcctggtatcagcaaaaaccagggaaagcccctaagctcctgatctatgctgcatccactttgcaaagtggggtcccatcaaggttcagcggcagtggatctgggacagatttcactctcaccatcagctgcctgcagtctgaagattttgcaacttattactgtcaacagtattatagttaccctagaacgttcggccaagggaccaaggtggaaatcaaac

SEQ ID NO: 2328 - DNA, 322 bp, Homo sapiens
gaaattgttttgacacagtctccagccaccctgtctttgtctccaggggaaagagccaccctctcctgcagggccagtcagagtgttagcagctccttagcctggtaccaacagaaacctggccaggctcccaggctcctcatctatgatgcatccaacagggccactggcatcccagccaggttcagtggcagtgggtctgggacagacttcactctcaccatcagcagcctagagcctgaagattttgcagtttattactgtcagcagcgtagcaactggccccccactttcggcggagggaccaaggtggagatcaaac

SEQ ID NO: 2329 - DNA, 331 bp, Homo sapiens
cagtctgccctgactcagcctgcctccgtgtctgggtctcctggacagtcgatcgccatctcctgcactggaaccagcagtgatgttgggagttatgaccttgtctcctggtaccaacagcacccaggcaaaacccccaaactcatgatttatgaggtcactaagtggccctctggggtttctaatcgcttctctggctccaagtctggcaacacggcctccctgacaatctctgggctccaggctgaggacgaggctgattattactgctgctcatatgcaggtagtagcactttggtattcggcggagggaccaagctgaccgtcctag

SEQ ID NO: 2330 - DNA, 338 bp, Homo sapiens
gatattgtgatgactcagtctccactctccctgcccgtcacccctggagagccggcctccatctcctgcaggtctagtcagagcctcctgcatagtaatggatacaactatttggattggtacctgcagaagccagggcagtctccacagctcctgatctatttgggttctaatcgggcctccggggtccctgacaggttcagtggcagtggatcaggcacagattttacactgaaaatcagcagagtggaggctgaggatgttggggtttattactgcatgcaagctctacaaactcctattcactttcggccctgggaccaaagtggatatcaaac

SEQ ID NO: 2331 - DNA, 331 bp, Homo sapiens
cagtctgccctgactcagcctgcctccgtgtctgggtctcctggacagtcgatcaccatctcctgcactggaaccagcagtgacgttggtggttataactatgtctcctggtaccaacaacacccaggcaaagcccccaaactcatgatttatgatgtcagtaatcggccctcaggggtttctaatcgcttctctggctccaagtctggcaacacggcctccctgaccatctctgggctccaggctgaggacgaggctgattattactgcagctcatatacaagcagcagcactgtggtattcggcggagggaccaagctgaccgtcctag

SEQ ID NO: 2332 - DNA, 325 bp, Homo sapiens
tcctatgagctgacacagccaccctcggtgtcagtgtccccaggacaaacggccaggatcacctgctctggagatgcattgccaaaaaaatatgcttattggtaccagcagaagtcaggccaggcccctgtgctggtcatctatgaggacaccaaacgaccctccgggatccctgagagattctctggctccagctcagggacaatggccaccttgactatcagtggggcccaggtggaggatgaagctgactactactgtcactcaacagacagcagtgctaatcatagggtgttcggcggagggaccaagctgaccgtcctag

SEQ ID NO: 2333 - DNA, 346 bp, Homo sapiens
caggctgtgctgactcagccgtcttccctctctgcatctcctggagcatcagccagtctcacctgcaccttgcgcagtggcatcaatgttggtacctacaggatatactggtaccagcagaagccagggagtcctccccagtatctcctgaggtacaaatcagactcagataagcagcagggctctggagtccccagccgcttctctggatccaaagatgcttcggccaatgcagggattttactcatctctgggctccagtctgaggatgaggctgactattactgtatgatttggcacagcagcgctgtggtattcggcggagggaccaagctgaccgtcctag

SEQ ID NO: 2334 - DNA, 334 bp, Homo sapiens
cagtctgtgctgacgcagccgccctcagtgtctggggccccagggcagagggtcaccatctcctgcactgggagcagctccaacatcggggcaggttatgatgtacactggtaccagcagtttccaggaacagcccccaaactcctcatctatggtaacaacaatcggccctcaggggtccctgaccgattctctggctccaagtctggcacctcagcctccctggccatctctgggctccaggctgaggatgaggctgattattactgccagtcctatgacagcagcctgagtggttcggtgttcggcggagggaccaagctgaccgtcctag

SEQ ID NO: 2335 - DNA, 319 bp, Homo sapiens
gacatccagatgacccagtctccttccaccctgtctgcatctgtaggagacagagtcaccatcacttgccgggccagtcagagtattagtagctggttggcctggtatcagcagaaaccagggaaagcccctaagctcctgatctataaggcatctagtttagaaagtggagtcccatcaaggttcagcggcagtggatctgggacagaattcactctcaccatcagcagcctgcagcctgatgattttgcaacttattactgccaacagtataatagcccattcactttcggccctgggaccaaagtggatatcaaac

SEQ ID NO: 2336 - DNA, 325 bp, Homo sapiens
tcctatgagctgacacagccaccctcggtgtcagtgtccccaggacagacggccaggatcacctgctctggagatgcattgccaaagcaatatgcttattggtaccagcagaagccaggccaggcccctgtgctggtgatatataaagacagtgagaggccctcagggatccctgagcgattctctggctccagctcagggacaacagtcacgttgaccatcagtggagtccaggcagaagacgaggctgactattactgtcaatcagcagacagcagtggtacttattatgtcttcggaactgggaccaaggtcaccgtcctag

SEQ ID NO: 2337 - DNA, 331 bp, Homo sapiens
cagtctgccctgactcagcctcgctcagtgtccgggtctcctggacagtcagtcaccatctcctgcactggaaccagcagtgatgttggtggttataaatatgtctcctggtaccaacagcacccaggcaaagcccccaaactcatgatttatgatgtcagtaagcggccctcaggggtccctgatcgcttctctggctccaagtctgacaacaaggcctccctgaccatctctgggctccaggctgaggatgaggctgattattactgctgctcatatgcaggcaggtacacttatgtctgcggaactgggaccaaggtcaccgtcctag

SEQ ID NO: 2338 - DNA, 331 bp, Homo sapiens
cagtctgccctgactcagcctgcctccgtgtctgggtctcctggacagtcgatcaccatctcctgcactggaaccagcagtgacgttggtttttataactatgtctcctggtaccaacaacacccaggcaaagcccccaaactcatgatttatgatgtcagtaatcggccctcaggggtttctaatcgcttctctggctccaagtctggcaacacggcctccctgaccatctctgggctccaggctgaggacgaggctgattattactgcagttcatatacaagcagcagtactcgagtgttcggcggagggaccaagttgaccgtcctag

SEQ ID NO: 2339 - DNA, 316 bp, Homo sapiens
tcctatgagctgactcagccaccctcagtgtccgtgtccccaggacagacagccagcatcacctgctctggagataaattgggcaataaatatgcttgctggtatcaacagaagccaggccagtcccctgtgctggtcatctatcaaaatagcaagcggccctcagggatccctgagcgattctctggctccaactctgggaacacagccactctgaccatcagcgggacccaggctatggatgaggctgactattactgtcaggcgtgggacagcgggggagtcttcggaactgggaccaaggtcaccgtcctag

SEQ ID NO: 2340 - DNA, 346 bp, Homo sapiens
caggctgtgctgactcagccgtcttccctctctgcatctcctggagcatcagccagtctcacctgcaccttgcgcagtggcatcaatgttggcacctacaggatatactggtaccagcagaagccagggagtcctccccagtatctcctgaggtacagatcagactcagattaccagcagggctctggagtccccagccgcttctctggatccaaagatgcttcggccaatgcagggattttactcatctctgggctccagtctgaggatgaggctgactattactgtatgatttggcacagcagcgcttgggtgttcggcggagggaccaagctgaccgtcctag

SEQ ID NO: 2341 - DNA, 325 bp, Homo sapiens
gaaattgtgttgacgcagtctccaggcaccctgtctttgtctccaggggaaagagccaccctctcctgcagggccagtccgagtgttagcagcagccagttagcgtggtaccagcagaaacctggccaggctcccaggctcctcatctatggtgcatccagcagggccactggcatcccagacaggttcagtggcagtgggtctgggacagacttcactctcaccatcagcagactggagcctgaagattttgcagtgtattactgtcagcagtatggtagctcacaaggtacttttggccaggggaccaagctggagatcaaac

SEQ ID NO: 2342 - DNA, 331 bp, Homo sapiens
cagtctgccctgactcagcctgcctccgtgtctgggtctcctggacagtcgatcaccatctcctgcactggaaccagcagtgatgttgggaattataaccttgtctcctggtaccaacagcacccaggcaaagcccccaaactcatgatttttgaggtcagtaagcggccctcaggggtttctaatcgcttctctggctccaagtctggcaacacggcctccctgacaatctctgggctccaggctgaggacgaggctgattattactgctgctcatatgcaggtagtagcaccgtggtattcggcggagggagcaagctgaccgtcctag

SEQ ID NO: 2343 - DNA, 322 bp, Homo sapiens
gaaattgtgttgacgcagtctccaggcaccctgtctttgtctccaggggaaagagccaccctctcctgcagggccagtcagagtgttagcaggaactacttagcctggtaccagcagagacctggccagcctcccaggctcctcatctatagtgcatccaacagggccactgacatcccagacaggttcagtggcagttggtctgggacagacttcactctcaccatcagcagactggagcctgaggattttgcagtgtattactgtcagcagtatggtagctcacctcagacttttggccaggggaccaagctggagatca

SEQ ID NO: 2344 - DNA, 319 bp, Homo sapiens
gaaattgtgttgacacagtctccagccaccctgtctttgtctccaggggaaagagccaccctctcctgcagggccagtcagagtgttagcagctacttagcctggtaccaacagaaacctggccaggctcccaggctcctcatctatgatgcatccaacagggccactggcatcccagccaggttcagtggcagtgggtctgggacagacttcactctcaccatcagcagcctagagcctgaagattttgcagtttattactgtcagcagcgtagcaactggcccacttttggccaggggaccaagctggagatcaaac

SEQ ID NO: 2345 - DNA, 325 bp, Homo sapiens
gacatccagatgacccagtctccatcctccctgtctgcatctgtaggagacagagtcaccatcacttgccgggcaagtcagagcattagcagctatttaaattggtatcagcagaaaccagggaaagcccctaagctcctgatctatgctgcatccagtttgcaaagtggggtcccatcaaggttcagtggcagtggatctgggacagatttcactctcaccatcagcagtctgcaacctgaagattttgcaacttactactgtcaacagagttacagtacccttccgctcactttcggcggagggaccaaggtggagatcaaac

SEQ ID NO: 2346 - DNA, 325 bp, Homo sapiens
gacatccagatgacccagtctccatcctccctgtctgcatctgtaggagacagagtcaccatcacttgccgggcaagtcagagcattagcagctatttaaattggtatcagcagaaaccagggaaagcccctaagctcctgatctatgctgcatccagtttgcaaagtggggtcccatcaaggttcagtggcagtggatctgggacagatttcactctcaccatcagcagtctgcaacctgaagattttgcaacttactactgtcaacagagttacagtacccctcgggacacttttggccaggggaccaagctggagatcaaac

SEQ ID NO: 2347 - DNA, 331 bp, Homo sapiens
cagactgtggtgacccaggagccatcgttctcagtgtcccctggagggacagtcacactcacttgtggcttgagctctggctcagtctctactagttactaccccagctggtaccagcagaccccaggccaggctccacgcacgctcatctacagcacaaacactcgctcttctggggtccctgatcgcttctctggctccatccttgggaacaaagctgccctcaccatcacgggggcccaggcagatgatgaatctgattattactgtgtgctgtatatgggtagtggcatgtgggtgttcggcggagggaccaagctgaccgtcctag

SEQ ID NO: 2348 - DNA, 331 bp, Homo sapiens
cagtctgtgttgacgcagccgccctcagtgtctgcggccccaggacagaaggtcaccatctcctgctctggaagcagctccaacattgggaataattatgtatcctggtaccagcagctcccaggaacagcccccaaactcctcatttatgacaataataagcgaccctcagggattcctgaccgattctctggctccaagtctggcacgtcagccaccctgggcatcaccggactccagactggggacgaggccgattattactgcggaacatgggatagcagcctgagtgctggggtgttcggcggagggaccaagctgaccgtcctag

SEQ ID NO: 2349 - DNA, 325 bp, Homo sapiens
tcctatgtgctgactcagccaccctcggtgtcagtggccccaggaaagacggccaggattacctgtgggggaaacaacattggaagtaaaagtgtgcactggtaccagcagaagccaggccaggcccctgtgctggtcgtctatgatgatagcgaccggccctcagggatccctgagcgattctctggctccaactctgggaacacggccaccctgaccatcagcagggtcgaagccggggatgaggccgactattactgtcaggtgtgggatagtagtagtgatcatgtggtattcggcggagggaccaagctgaccgtcctag

SEQ ID NO: 2350 - DNA, 322 bp, Homo sapiens
gacatccagatgacccagtctccatctgccatgtctgcatctgtaggagacagagtcaccatcacttgtcgggcgagtcagggcattagcaattatttagcctggtttcagcagaaaccagggaaagtccctaagcgcctgatctatactgcatccagtttgcaaagtggggtcccatcaaggttcagcggcagtggatctgggacagaattcactctcacaatcagcagcctgcagcctgaagattttgcaacttattactgtctacagcataatagttaccctatcaccttcggccaagggacacgactggagattaaac

SEQ ID NO: 2351 - DNA, 331 bp, Homo sapiens; identical to SEQ ID NO: 1021

SEQ ID NO: 2352 - DNA, 322 bp, Homo sapiens
gacatccagatgacccagtctccatcttccgtgtctgcatctgtaggagacagagtcaccatcacttgtcgggcgagtccgggtattgacgactggttagcctggtatcagcagaaaccagggaaagcccctaagctcttgatatatggtgcatccactttgcaaactggggtcccatcaagattcagcggcagtggatctgggacagatttcactctcaccatcagcagcctgcagcctgaggattttgcaacttattattgtcaacaggctaacagtttgtcattcaccttcggccctgggaccaaagtggatctcaaac

SEQ ID NO: 2353 - DNA, 325 bp, Homo sapiens
gaaattgtgttgacacagtctccagccaccctgtctttgtctccaggggaaagagccaccctctcctgcagggccagtcagagtgttaacagctacttagcctggtaccaacagaaacctggccaggctcccagactcctcatctatgatgcatccaacagggccactggcatcccagccaggttcagtggcagtgggtctgggacagactttaccctcaccatcaacagcctagagcctgaagattttgcagtttattactgtcagcagcgtaacatctggcctcccatcaccttcggccaagggacacgactggagattaaac

SEQ ID NO: 2354 - DNA, 334 bp, Homo sapiens
cagtctgtgctgacgcagccgccctcagtgtctggggccccagggcagagggtcaccatctcctgcactgggagcagctccaacatcggggcaggttatgatgtacactggtaccagcagcttccaggaacagcccccaaactcctcatctatggtaacagcaatcggccctcaggggtccctgaccgattctctggctccaagtctggcacctcagcctccctggccatcactgggctccaggctgaggatgaggctgattattactgccagtcctatgacagcagcctgagtggttcggtgttcggcggagggaccaagctgaccgtcctag

SEQ ID NO: 2355 - DNA, 340 bp, Homo sapiens
gatgttgtgatgactcagtctccactctccctgcccgtcacccttggacagccggcctccatctcctgcaggtctagtcaaagcctcgtatacagtgatggaaacacctacttgaattggtttcagcagaggccaggccaatctccaaggcgcctaatttataaggtttctaaccgggactctggggtcccagacagattcagcggcagtgggtcaggcactgatttcacactgaaaatcagcagggtggaggctgaggatgttggggtttattactgcatgcaaggtacacactggcctccgatcaccttcggccaagggacacgactggagattaaac

SEQ ID NO: 2356 - DNA, 322 bp, Homo sapiens
gacatccagatgacccagtctccatcctccctgtctgcatctgtaggagacagagtcaccatcacttgccgggcaagtcagagcattagcagctatttaaattggtatcagcagaaaccagggaaagcccctaagctcctgatctatgctgcatccagtttgcaaagtggggtcccatcaaggttcagtggcagtggatctgggacagatttcactctcaccatcagcagtctgcaacctgaagattttgcaacttactactgtcaacagagttacagtaccccgcggacttttggccaggggaccaagctggagatcaaac

SEQ ID NO: 2357 - DNA, 319 bp, Homo sapiens
gacatccagttgacccagtctccatccttcctgtctgcatctgtaggagacagagtcaccatcacttgccgggccagtcagggcattagcagttatttagcctggtatcagcaaaaaccagggaaagcccctaagctcctgatctatgctgcatcctctttgcaaagtggggtcccatcaagcttcagcggcagtagatctgggacagaattcactctcacaatcagcagcctgcagcctgaagattttgcaacttattactgtcaacagcttaatagttacccccatttcggccctgggaccaaagtggatatcaaac

SEQ ID NO: 2358 - DNA, 325 bp, Homo sapiens; identical to SEQ ID NO: 872

SEQ ID NO: 2359 - DNA, 319 bp, Homo sapiens
tcctatgagctgacacagccaccctcggtgtcagtgtccccaggacagacggccaggatcacctgctctggagatgcattgccaagacaatatgcttattggtaccagcagaagccaggccaggcccctgtcctggtgatatataaagacactgagaggccctcagggatccctgagcgattctctgcctccagctcagggacaacaatcacgttgaccatcagtggagtccaggcagaagacgaggctgactattactgtcaatcagcagacagcagtggtgcggtattcggcggggggaccaagctgaccgtcctag

SEQ ID NO: 2360 - DNA, 322 bp, Homo sapiens
gccatccggatgacccagtctccatcctcattctctgcatctacaggagacagagtcaccatcacttgtcgggcgagtcagggtattagcagttatttagcctggtatcagcaaaaaccagggaaagcccctaagctcctgatctatgctgcatccactttgcaaagtggggtcccatcaaggttcagcggcagtggatctgggacagatttcactctcaccatcagctgcctgcagtctgaagattttgcaacttattactgtcaacagtattatagttaccctcagacgttcggccaagggaccaaggtggaaatcaaac

SEQ ID NO: 2361 - DNA, 322 bp, Homo sapiens
gacatccagatgacccagtctccatcctcactgtctgcatctgtaggagacagagtcaccatcacttgtcgggcgagtcagggcattagcaattatttagcctggtttcagcagaaaccagggaaagcccctaagtccctgatctatgctgcatccagtttgcaaagtggggtcccatcaaagttcagcggcagtggatctgggacagatttcactctcaccatcagcagcctgcagcctgaagattttgcaacttattactgccaacagtataatagttacctcatcaccttcggccaagggacacgactggagattaaac

SEQ ID NO: 2362 - DNA, 331 bp, Homo sapiens
cagtctgccctgactcagcctcgctcagtgtccgggtctcctggacagtcagtcaccatctcctgcagtggaaccagcagtgatgttggtggctataactatgtctcctggtaccaacagcacccaggcaaagcccccaaactcatgatttatgatgtcagtaagcggccctcaggggtccctgatcgcttctctggctccaagtctgacaacacggcctccctgaccatctctgggctccaggctgaggatgaggctgattattactgctgctcatatgcaggcagcttcactttggtgttcggcggagggaccaagctgaccgtcctag

SEQ ID NO: 2363 - DNA, 340 bp, Homo sapiens
gatgttgtgatgactcagtctccactctccctgcccgtcacccttggacagccggcctccatctcctgcaggtctagtcaaagcctcgtacacagtgatggaaacacctacttgaattggtttcagcagaggccaggccaatctccaaggcgcctaatttataaggtttctaaccgggactctggggtcccagacagattcagcggcagtgggtcaggcactgatttcacactgaaaatcagcagggtggaggctgaggatgttggggtttattactgcatgcaaggtacacactggcctccggggacgttcggccaagggaccaaggtggaaatcaaac

SEQ ID NO: 2364 - DNA, 332 bp, Homo sapiens
cagtctgccctgactcagcctcgctcagtgtccgggtctcctggacagtcagtcaccatctcctgcactgggagcagcactgatgttggtgtttataactatgtctcctggtaccaacagcacccaggcaatgcccccaaactcatgatttttgatgtcagtaagcggccctcaggggtccctgatcgcttctctggctccaagtctggcaacacggcctccctgaccatctctgggctccaggctgaggatgaggctgattattactgctgctcatatgcaggcacctacactcccgtggttttcggcggagggaccaagctgaccgtcct

SEQ ID NO: 2365 - DNA, 325 bp, Homo sapiens
gaaattgtgttgacgcagtctccaggcaccctgtctttgtctccaggggaaagagccaccctctcctgcagggccagtcagagtgttagcagcagctacttagcctggtaccagcagaaacctggccaggctcccaggctcctcatctatggtgcatccagcagggccactggcatcccagacaggttcagtggcagtgggtctgggacagacttcactctcaccatcagcagactggagcctgaagattttgcagtgtattactgtcagcagtatggtagctcacgggtcactttcggccctgggaccaaagtggatatcaaac

SEQ ID NO: 2366 - DNA, 319 bp, Homo sapiens
tcctatgagctgactcagccagtctcagtgtcagtggccctgggacagacggccaggattacctgtgggggagacaacattggaattgataatgtgcactggtaccagcaaaggccaggccaggcccctctactggtcatctataagaataccaagcggccctctgggatccctgagcgattctctggctccaactcggggaacacggcctccctgaccatcagcagagcccaggccggggatgaggctgactattattgtcaggtgtgggacggcagccctgccgttttcggcggagggaccgagctgaccgtcctag

SEQ ID NO: 2367 - DNA, 328 bp, Homo sapiens
gaaattgtgttgacacagtctccagccaccctgtctttgtctccaggggaaagagccaccctctcctgcagggccagtcagagtgttagcagctacttagcctggtaccaacagaaacctggccaggctcccaggctcctcatctatgatgcatccaacagggccactggcatcccagccaggttcagtggcagtgggtctgggacagacttcactctcaccatcagcagcctagagcctgaagattttgcagtttattactgtcagcagcgtagcaactggcctcccacgtggacgttcggccaagggaccaaggtggaaatcaaac

SEQ ID NO: 2368 - DNA, 331 bp, Homo sapiens
cagtctgccctgattcagcctccctccgtgtccgggtctcctggacagtcagtcaccatctcctgcactgaaaccagcagtgatgttgggagttatgataatgtctcctggttccaagagcacccaggcacagtccccaaacccatgatcttcaatgtcaatactcagccctcaggggtccctggtcgtttctctggctccaagtctggcaatacggcctccatgaccatctctggactccaggctgaggacgagactgattattagtgctgctcatatagaagcagtgccacccaggagttcggcggagggaccaagctgaccgtcctag

SEQ ID NO: 2369 - DNA, 319 bp, Homo sapiens
tcctatgtgctgactcagccaccctcggtgtcagtggccccaggacagacggccaggattacctgtgggggaaacaacattggaagtaaaagtgtgcactggtaccagcagaggccaggccaggcccctgtgctggtcgtctatgatgatagcgaccggccctcagggatccctgagcgattctctggttccaactctgggaacacggccaccctgaccatcagcagggtcgaagccggggatgaggccgactattactgtcaggtgtgggatagtagtagttgggtgttcggcggagggaccaagctgaccgtcctag

SEQ ID NO: 2370 - DNA, 334 bp, Homo sapiens
cagtctgccctgactcagcctgcctccgtgtctgggtctcctggacagtcgatcaccatctcctgcactggaaccagcagtgatgttgggagttataaccttgtctcctggtaccaacaccacccaggcaaagcccccaaactcttgattcacgaggtcagtaagcggccctcaggggtttctaatcgcttctctggctccaagtctggcaacacggcctccctgacaatctctgggctccaggctgaggacgaggctaattattactgctgctcatatgcagatagtagcacttcggtggtattcggcggagggaccaagctgaccgtcctag

SEQ ID NO: 2371 - DNA, 325 bp, Homo sapiens
tcctatgtgctgactcagccaccctcggtgtcagtggccccaggacagacggccaggattacctgtgggggaaacaacattggaagtaaaagtgtgcactggtaccagcagaagccaggccaggcccctgtgctggtcgtctatgatgatagcgaccggccctcagggatccctgagcgattctctggctccaactctgggaacacggccaccctgaccatcagcagggtcgaagccggggatgaggccgactattactgtcaggtgtgggatagtagtagtgatcattgggtgttcggcggagggaccaagctgaccgtcctag

SEQ ID NO: 2372 - DNA, 325 bp, Homo sapiens
gaaattgtgttgacgcagtctccaggcaccctgtctttgtctccaggggaaagagccaccctctcctgcagggccagtcagagtgttagcagcagctacttagcctggtatcagcagaaacctggccaggctcccaggctcctcatctatggtgcatccagcagggccactggcatcccagacaggttcagtggcagtgggtctgggacagacttcactctcaccatcagcagactggagcctgaagattttgcagtgtattactgtcagcagtatgggagctcaccgctcactttcggcggagggaccaaggtggagatcaaac

SEQ ID NO: 2373 - DNA, 325 bp, Homo sapiens
gaaattgtgttgacgcagtctccaggcaccctgtctttgtctccaggggaaagagccaccctctcctgcagggccagtcagagtgttagcagcagctacttagcctggtaccagcagaaacctggccaggctcccaggctcctcatctatggtgcatccagcagggccactggcatcccagacaggttcagtggcagtgggtctgggacagacttcactctcaccatcagcagactggagcctgaagattttgcagtgtattactgtcagcagtatggtagctcatcctggacgttcggccaagggaccaaggtggaaatcaaac

SEQ ID NO: 2374 - DNA, 325 bp, Homo sapiens
gacatccagatgacccagtctccatcctccctgtctgcatctgtaggagacagagtcaccatcacttgccaggcgagtcaggacattagcaactatttaaattggtatcagcagaaaccagggaaagcccctaagctcctgatctacgatgcatccaatttggaaacaggggtcccatcaaggttcagtggaagtggatctgggacagattttactttcaccatcagcagcctgcagcctgaagatattgcaacatattactgtcaacagtatgataatctcctcccgatcaccttcggccaagggacacgactggagattaaac

SEQ ID NO: 2375 - DNA, 328 bp, Homo sapiens
gaaattgtgttgacgcagtctccaggcaccctgtctttgtctccaggggaaagagccaccctctcctgcagggccagtcagagtgttagcagcagctacttagcctggtaccagcagaaacctggccaggctcccaggctcctcatctatggtgcatccagcagggccactggcatcccagacaggttcagtggcagtgggtctgggacagacttcactctcaccatcagcagactggagcctgaagattttgcagtgtattactgtcagcagtatggtagctcatcgacgtggacgttcggccaagggaccaaggtggaaatcaaac

SEQ ID NO: 2376 - DNA, 322 bp, Homo sapiens
gaaatagtgatgacgcagtctccagccaccctgtctgtgtctccaggggaaagagccaccctctcctgcagggccagtcagagtgttagcagcaagttagcctggtaccagcagagacctggccaggctcccaggctcctcttctatggtgcatccaccagggccactggtatcccagccaggttcagtggcagtgggtctgggacagagttcactctcaccatcagcagcctgcagtctgaagattttgcagtttattactgtcagcagtataataactggccactcactttcggcggagggaccaaggtggagatcaaac

SEQ ID NO: 2377 - DNA, 322 bp, Homo sapiens
tcctatgagctgactcagccaccctcagtgtccgtgtccccaggacagacagccagcatcacctgctctggagataaattgggggataaatatgcttgctggtatcagcagaagccaggccagtcccctgtgctggtcatctatcaagataacaagcggccctcagggatccctgagcgattctctggctccaactctgggaacacagccactctgaccatcagcgggacccaggctatggatgaggctgactattactgtcaggcgtgggacagcagcactgcaagtgtcttcggaactgggaccaaggtcaccgtcctag

SEQ ID NO: 2378 - DNA, 328 bp, Homo sapiens
gaaattgtgttgacgcagtctccaggcaccctgtctttgtctccaggggaaagagccaccctctcctgcagggccagtcagagtgttagcagcagctacttagcctggtaccagcagaaacctggccaggctcccaggctcctcatctatggtgcatccagcagggccactggcatcccagacaggttcagtggcagtgggtctgggacagacttcactctcaccatcagcagactggagcctgaagattttgcagtgtattactgtcagcagtatggtagctcacccccgtgcacttttggcccggggaccaagctggagatcaaac

SEQ ID NO: 2379 - DNA, 328 bp, Homo sapiens
tcctatgagctgacacagccaccctcggtgtcagtgtccccaggacaaacggccaggatcacctgctctggagatgcattgccaaaaaaatatgcttattggtaccagcaaaagtcaggccaggcccctgtgctggtcatctatgaggacagcaaacgaccctccgggatccctgagagattctctggctccagctcagggacaatggccaccttgactatcagtggggcccaggtggaggatgaagctgactactactgttcctcaacagacagcagtggtaatcatctaggggtgttcggcggagggaccaagctgaccgtcctag

SEQ ID NO: 2380 - DNA, 325 bp, Homo sapiens
tcctatgagctgacacagccaccctcggtgtcagtgtccccaggacaaatggccaggatcacctgctctggagatgcattgccaaacaaatatgtttattggtaccagcagaagtcaggccaggcccctgtgttggtcatctgtgaagacaccaaacgaccctccgggatccctgagagattctctggctccagctcagggacaatggccaccttgactgtcagtggggcccaggtggaggatgaagctgactactactgttactcaacagtcagcagtggtaatcgttgggtgttcggcggagggaccaagctgaccgtcctag

SEQ ID NO: 2381 - DNA, 309 bp, Homo sapiens
gatgttgtgatgactcagtctccactctccctgcccgtcacccttggacagtcggccaccatctcctgcaggtctagtcaaagcctcgtacacagtgatggaaacacctacttgaattggtttcagcagaggccaggccaatctccaaggcgcctaatttatacagattcagcggcagtgggtcaggcactgatttcacactgaaaatcagcagggtggaggctgaggatgttggggtttattactgcatgcaaggtacacactggccctctctcactttcggcggagggaccaaggtggagatcaaac

SEQ ID NO: 2382 - DNA, 340 bp, Homo sapiens
gatgttgtgatgactcagtctccactctccctgcccgtcacccttggacagccggcctccatctcctgcaggtctagtcaaagcctcgtacacagtgatggaaacacctccttgaattggtttcagcagaggccaggccaatctccaaggcgcctaatttataaggtttctaaccgggactctggggtcccagacagattcagcggcagtgggtcaggcactgatttcacactgaaaatcagcagggtggaggctgaggatgttggggtttattactgcatgcaaggtacacactggccctctctcactttcggcggagggaccaaggtggagatcaaac

SEQ ID NO: 2383 - DNA, 334 bp, Homo sapiens; identical to SEQ ID NO: 1670

SEQ ID NO: 2384 - DNA, 334 bp, Homo sapiens
cagtctgtgctgacgcagccgccctcagtgtctggggccccagggcagagggtcaccatcccctgcactgggagcagctccaacatcggggcaggttatgatgtacactggtaccagcagcttccaggaacagcccccaaactcctcatctatggtaacagcaatcggccctcaggggtccctgaccgattctctggctccaagtctggcacctcagcctccctggccatcactgggctccaggctgaggatgaggctgattattactgccagtcctatgacagcagcctgaatgagggggtgttcggcggagggaccaagttgaccgtcctag

SEQ ID NO: 2385 - DNA, 322 bp, Homo sapiens
gacatccagatgacccagtctccttccaccctgtctgcatctgtaggagacagagtcaccatcacttgccgggccagtcagagtattagtagttggttggcctggtatcagcagaaaccagggaaagcccctaagctcctgatctataaggcatctagtctagaaagtggagtcccatcaaggttcagcggcagtggatctgggacagagttcactctcaccatcagcagcctgcagcctgatgattttgcaacttattactgccaacagtataaaagttattatcagacgttcggccaagggaccaaggtggaaatcaaac

SEQ ID NO: 2386 - DNA, 320 bp, Homo sapiens
tcctatgagctgactcagccaccctcagtgtccgtgtccccaggacagacagccagcatcacctgctctggagataaattgggggataaatatgcttgctggtatcagcagaagccaggccagtcccctgtgctggtcatctatcaagatatcaagcggccctcagggatccctgagcgattctctggctccaactctgggaacacagccactctgaccatcagcgggacccaggctatggatgaggctgactattactgtcaggcgtgggacagcagctctttgggggtgttcggcggagggaccaagctgaccgtcct

SEQ ID NO: 2387 - DNA, 334 bp, Homo sapiens
cagtctgccctgactcagcctccctccgtgtccgggtctcctggacagtcagtcaccatctcctgcactggaaccagcagtgacgttggtagttataaccgtgtctcctggtaccagcagcccccaggcacagcccccaaactcatgatttatgaggtcactaatcggccctcaggggtccctgatcgcttctctgggtccaagtctggcaacacggcctccctgaccatctctgggctccaggctgaggacgaggctgattattactgcagctcatatagaagcagcagcactttcggggtcttcggaactgggaccaaggtcaccgtcctag

SEQ ID NO: 2388 - DNA, 334 bp, Homo sapiens
cagtctgtgctgacgcagccgccctcagtgtctggggccccagggcagagggtcaccatctcctgcactgggagcagctccaacatcggggcaggttatgatgtacactggtaccagcagcttccagggacagcccccaaactcctcatctatggtaactacaatcggccctcaggggtccctgaccgattctctggctccaagtctggcacctcagcctccctggccatcactgggctccaggctgaggatgaggctgattattactgccagtcctatgacagcagcctgagtggccatgtcttcggaactgggaccaaggtctccgtcctag

SEQ ID NO: 2389 - DNA, 334 bp, Homo sapiens
gaaatagtgatgacgcagtctccagccaccctgtctgtgtctccaggggaaagagccaccctctcctgcagggccagtcagagtgttagcagcaacttagcctggtaccagcagaaacctggccaggctcccaggctcctcatctatggtgcatccaccagggccactggtatcccagccaggttcagtggcagtgggtctgggacagagttcactctcaccatcagcagcctgcagtctgaagattttgcagtttattactgtcagcagtataataactggcctccgggcttaaagatcaccttcggccaagggacacgactggagattaaac

SEQ ID NO: 2390 - DNA, 325 bp, Homo sapiens
gacatccagatgacccagtctccatcctccctgtctgcatctgtaggagacagagtcaccatcacttgccgggcaagtcagagcattagcaggtatttaaattggtatcagctgaaaccagggaaagcccctaaactcctgatctatgctgcatccagtttgcaaagtggggtcccatcaaggttcagtggcagtggatctgggacagatttcactctcaccatcagcagtctgcaacctgaagattttgcaacttactactgtcaacagagttacgagacccctccgatcaccttcggccaagggacacgactggagattaaac

SEQ ID NO: 2391 - DNA, 322 bp, Homo sapiens
gacatccagatgacccagtctccatcctccctgtctgcatctgtaggagacagagtcaccatcacttgccgggcaagtcagagcattagcaactatttaaattggtatcagcagaaaccagggaaagcccctaagctcctgatctatgctgcatccagtttgcaaagtggggtcccatcaaggttcagtggcagtggatctgggacagatttcactctcaccatcagcagtctgcaacctgaagattttgcaacttactactgtcaacagagttacagtacccctaggacttttggccaggggaccaagctggagatcaaac

SEQ ID NO: 2392 - DNA, 322 bp, Homo sapiens
gacatccagatgacccagtctccatcctccctgtctgcatctgtaggagacagagtcaccatcacttgccgggcaagtcagggcattagaaatgatttaggctggtatcagcagaaaccagggaaagcccctaagcgcctgatctatgctgcatccagtttgcaaagtggggtcccatcaaggttcagcggcagtggatctgggacagaattcactctcacaatcagcagcctgcagcctgaagattttgcaacttattactgtctacagcataatagttaccctctgacgttcggccaagggaccaaggtggaaatcaaac

SEQ ID NO: 2393 - DNA, 331 bp, Homo sapiens
cagtctgccctgactcagcctgcctccgtgtctgggtctcctggacagtcgatcaccatctcctgcactggaaccagcagtgatgttgggagttataaccttgtctcctggtaccaacagcacccaggcaaagcccccaaactcatgatttatgagggcagtaagcggccctcaggggtttctaatcgcttctctggctccaagtctggcaacacggcctccctgacaatctctgggctccaggctgaggacgaggctgattattactgctgctcatatgcaggtagtagccttagggtgttcggcggagggaccgagctgaccgtcctag

SEQ ID NO: 2394 - DNA, 337 bp, Homo sapiens
cagtctgtgctgacgcagccgccctcagtgtctggggccccagggcagagggtcaccatctcctgcactgggagcagctccaacatcggggcaggttatgatgtacactggtaccagcagcttccaggaacagcccccaaactcctcatctatggtaacagcaatcggccctcaggggtccctgaccgattctctggctccaagtctggcacctcagcctccctggccatcactgggctccaggctgaggatgaggctgattattactgccagtcctatgacagcagcctgagtggttttgtggtattcggcggagggaccaagctgaccgtcctag

SEQ ID NO: 2395 - DNA, 340 bp, Homo sapiens
gacatcgtgatgacccagtctccagactccctggctgtgtctctgggcgagagggccaccatcaactgcaagtccagccagagtgttttatacagctccaacaataagaactacttagcttggtaccagcagaaaccaggacagcctcctaagctgctcatttactgggcatctacccgggaatccggggtccctgaccgattcagtggcagcgggtctgggacagatttcactctcaccatcagcagcctgcaggctgaagatgtggcagtttattactgtcagcaatattatagtactcctttcactttcggcggagggaccaaggtggagatcaaac

SEQ ID NO: 2396 - DNA, 322 bp, Homo sapiens; identical to SEQ ID NO: 2296

SEQ ID NO: 2397 - DNA, 331 bp, Homo sapiens
caggctgtggtgactcaggagccctcactaactgtgtccccaggagggacagtcactctcacctgtggctccagcactggagctgtcaccagtggtcattatccctactggttccagcagaagcctggccaagcccccaggacactgatttatgatacaagcaacaaacactcctggacacctgcccggttctcaggctccctccttgggggcaaagctgccctgaccctttcgggtgcgcagcctgaggatgaggctgagtattactgcttgctctcctatagtggtgctcggccagtgttcggcggagggaccaagctgaccgtcctag

SEQ ID NO: 2398 - DNA, 340 bp, Homo sapiens
gacatcgtgatgacccagtctccagactccctggctgtgtctctgggcgagagggccaccatcaactgcaagtccagccagagtgttttatacagctccaacaataagaactacttagcttggtaccagcagaaaccaggacagcctcctaagctgctcatttactgggcatctacccgggaatccggggtccctgaccgattcagtggcagcgggtctgggacagatttcactctcaccatcagcagcctgcaggctgaagatgtggcagtttattactgtcagcaatattatagtactcccctcactttcggccctgggaccaaagtggatatcaaac

SEQ ID NO: 2399 - DNA, 319 bp, Homo sapiens
tcctatgagctgactcagccaccctcagtgtccgtgtccccaggacagacagccagcatcacctgctctggagataaattgggggataaatatacttgctggtatcagcagaagccaggccagtcccctgtgctggtcatctatcaagatagcaagcggccctcagggatccctgagcgattctctggctccaactctgggaacacagccactctgaccatcagcgggacccaggttatggatgaggctgactattactgtcaggcgtgggacagcagcactggggtgttcggtggagggaccaagctgaccgtcctag

SEQ ID NO: 2400 - DNA, 340 bp, Homo sapiens
cagtctgtgctgacgcagccgccctcagtgtctggggccccagggcagagggtcaccatctcctgcactgggagcagctccaacatcggggcaggttatgatgtacactggtaccagcagcttccaggaacagcccccaaactcctcatctatggtaacagcaatcggccctcaggggtccctgaccgattctctggctccaagtctggcacctcagcctccctggccatcactgggctccaggctgaggatgaggctgattattactgccagtcctatgacagcagcctgagtggttcgagggcggtattcggcggagggaccaagctgaccgtcctag

SEQ ID NO: 2401 - DNA, 319 bp, Homo sapiens
gacatccagatgacccagtctccatcctccctgtctgcatctgtaggagacagagtcaccatcacttgccgggcaagtcagagcattagcagctatttaaattggtatcagcagaaaccagggaaagcccctaacctcctgatctatgctgcatccagtttgcaaagtggggtcccatcaaggttcagtggcagtggatctgggacagatttcactctcaccatcagcagtctgcaacctgaagattttgcaacttactactgtcaacagagttacagtaccctcactttcggcggagggaccaaggtggagatcaaac

SEQ ID NO: 2402 - DNA, 331 bp, Homo sapiens
cagtctgtgctgactcagccaccctcagcgtctgggacccccgggcagagggtcaccatctcttgttctggaagcagctccaacatcggaactaatactgtaaactggtaccagcagctcccaggaacggcccccaaactcctcatctatagtaataatcagcggccctcaggggtccctgaccgattctctggctccaagtctggcacctcagcctccctggccatcagtgggctccagtctgaggatgaggctgattattactgtgcagcatgggatgacagcctgaatggttatgtcttcggaactgggaccaaggtcaccgtcctag

SEQ ID NO: 2403 - DNA, 331 bp, Homo sapiens; identical to SEQ ID NO: 2348

SEQ ID NO: 2404 - DNA, 337 bp, Homo sapiens
gatattgtgatgactcagtctccactctccctgcccgtcgcccctggagagccggcctccatctcctgcaggtctagtcagagcctcctccatagtaatggatacaactatttggattggtacctgcagaagccagggcagtctccacagctcctgatctatttgggttctaatcgggcctccggggtccctgacaggttcagtggcagtggatcaggcacagattttacactgaaaatcagcagagtggaggctgaggatgttggggtttattactgcatgcaagctctacaaacttcgtacacttttggccaggggaccaagctggagatcaaac

SEQ ID NO: 2405 - DNA, 322 bp, Homo sapiens
gacatccagatgacccagtctccatcctccctgtctgcatctgtaggagacagagtcaccatcacttgccaggcgagtcaggacattagcaactatttaaattggtatcagcagaaaccagggaaagcccctaagctcctgatctacgatgcatccaatttggaaacaggggtcccatcaaggttcagtggaagtggatctgggacagattttactttcaccatcagcagcctgcagcctgaagatattgcaacatattactgtcaacagtatgataatctctcgctcactttcggcggagggaccaaggtggagatcaaac

SEQ ID NO: 2406 - DNA, 331 bp, Homo sapiens
cagtctgccctgactcagcctgcctccgtgtctgggtctcctggacagtcgatcaccatctcctgcactggaaccagcagtgacgttggtggttataactatgtctcctggtaccaacaacacccaggcaaagcccccaaactcatgatttatgatgtcagtaatcggccctcaggggtttctaatcgcttctctgcctccaagtctggcaacacggcctccctgaccatctctgggctccagggtgaggacgagggtgattattactgcagctcatttacaagcaccagcactgtggtattcggcggagggaccaagctgaccgtcctag

SEQ ID NO: 2407 - DNA, 325 bp, Homo sapiens
tcctatgtgctgactcagccaccctcggtgtcagtggccccaggacagacggccaggattacctgtgggggaaacaacattggaagtaaaagtgtgcactggtaccagcagaagccaggccaggcccctgtgctggtcgtctatgatgatagcgaccggccctcagggatccctgagcgattctctggctccaactctgggaacacggccaccctgaccatcagcagggtcgaagccggggatgaggccgactattactgtcaggtgtgggatagtagtagtgatcatccggtgttcggcggagggaccaagctgaccgtcctag

SEQ ID NO: 2408 - DNA, 337 bp, Homo sapiens
gatattgtgatgacccagactccactctctctgtccgtcacccctggacagccggcctccatctcctgcaagtctagtcagagcctcctgcatagtgatggaaagacctatttgtattggtacctgcagaagccaggccagtctccacagctcctgatctatgaagtttccaaccggttctctggagtgccagataggttcagtggcagcgggtcagggacagatttcacactgaaaatcagccgggtggaggctgaggatgttgggctttattactgcatgcaaagtatacagcttccgtacacttttggccaggggaccaagctggagatcaaac

SEQ ID NO: 2409 - DNA, 331 bp, Homo sapiens
cagtctgccctgactcagcctgcctccgtgtctgggtctcctggacagtcgatcaccatctcctgcactggaaccagcagtgacattggtggttataactatgtctcctggtaccaacaacacccaggcaaagcccccaaactcatgatttatgatgtcagtaatcggccctcaggggtttctaatcgcttctctggctccaagtctggcaacacggcctccctgaccatctctgggctccaggctgaggacgaggctgattattactgcagctcatatacaagcgacagcactcgagtgttcggcggagggaccaagctgaccgtcctag

SEQ ID NO: 2410 - DNA, 325 bp, Homo sapiens
gccatccggatgacccagtctccatcctcattctctgcatctacaggagacagagtcaccatcacttgtcgggcgagtcagggtattagcagttatttagcctggtatcagcaaaaaccagggaaagcccctaagctcctgatctatgctgcatccactttgcaaagtggggtcccatcaaggttcagcggcagtggatctgggacagatttcactctcaccatcagctgcctgcagtctgaagattttgcaacttattactgtcaacagtattatagttacccttggtacacttttggccaggggaccaagctggagatcaaac

SEQ ID NO: 2411 - DNA, 325 bp, Homo sapiens
tcctatgtgctgactcagccaccctcggtgtcagaggccccaggaaagacggccacgattacctgtgggggaaacaacattggaagtaaaagtgtgcactggtaccagcagaagccaggccaggcccctgtgctggtcgtctatgatgatagcgaccggccctcatggatccctgagcgattctctggctccaactctgggaacacggccaccctgaccatcagcagggtcgaagccggggatgaggccgactattactgtcaggtgtgggatagtagtagtgatcatgtggtattcggcggagggaccaagctgaccgtcctag

SEQ ID NO: 2412 - DNA, 337 bp, Homo sapiens
cagtctgtgttgacgcagccgccctcagtgtctgcggccccaggacagaaggtcaccatctcctgctctggaagcagctccaacattgggaataattatgtatcctggtaccagcagctcccaggaacagcccccaaactcctcatttatgacaataataagcgaccctcagggattcctgaccgattctctggctccaagtctggcacgtcagccaccctgggcatcaccggactccagactggggacgaggccgattattactgcggaacatgggatagcagcctgagtgcggggggttatgtcttcggaactgggaccaaggtcaccgtcctag

SEQ ID NO: 2413 - DNA, 322 bp, Homo sapiens
gacatccagatgacccagtctccatcctccctgtctgcatctgtaggagacagagtcaccatctcttgccgggcaagtcagaacattagcaactatttaaattggtatcagcagaaactagggaaagcccctaagctcctgatctatgctgcatccagtttgcaaagtggggtcccatcaaggttcagtggcagtggatctgggacagatttcactctcaccatcagcagtctgcaacctgaagattttgcaacttactactgtcaacagagttacagtatcccgtacacttttggccaggggaccaagctggagatcaaac

SEQ ID NO: 2414 - DNA, 319 bp, Homo sapiens
gacatccagatgacccagtctccttccaccctgtctgcatctgtaggagacagagtcaccatcacttgccgggccagtcagagtattagtaggtggttggcctggtatcagcagaaaccagggaaagcccctaagctcctgatctataaggcgtcaagtttagaaagtggggtcccatcaaggttcagcggcagtggatctgggacagaattcactctcaccatcagcagcctgcagcctgatgattttgcaacttattactgccaacactttaatacccggtggacgttcggccaagggaccaaggtggaaatcaaac

SEQ ID NO: 2415 - DNA, 325 bp, Homo sapiens
gacatccagatgacccagtctccatcctccctgtctgcatctgtaggagacagagtcaccatcacttgccgggcaagtcagagcattagcagttatttaaattggtatcagcagaaaccagggaaagcccctaagctcctgatctatgctgcatccagtttgcaaagtggggtcccatcaaggttcagtggcagtggatctgggacagatttcactctcaccatcagcagtctacaacctgaagattttgcaacttactactgtcaacagagttacagtacccttgcgctcactttcggcggagggaccaaggtggagatcaaac

SEQ ID NO: 2416 - DNA, 340 bp, Homo sapiens
gacatcgtgatgacccagtctccagactccctggctgtgtctctgggcgagagggccaccatcaactgcaagtccagccagagtgttttatacagctccaacaataagaactacttagcttggtaccagcagaaaccaggacagcctcctaagttgctcatttactgggcatctacccgggaatccggggtccctgaccgattcagtggcagcgggtctgggacagatttcactctcaccatcagcagcctgcaggctgaagatgtggcagtttattactgtcagcaatattatagtactcctttcactttcggcggagggaccaaggtggagatcaaac

SEQ ID NO: 2417 - DNA, 331 bp, Homo sapiens
cagtctgccctgactcagcctgcctccgtgtctgggtctcctggacagtcgatcaccatctcctgcactggaaccagcagtgacgttggtggttataactatgtctcctggtaccaacaacacccaggcaaagcccccaaattgacgatttatgatgtcagttatcggccctcaggggtttctgatcggttctctggctccaagtctggcaacacggcctccctgaccatctctgggctccaggctgaggacgaggctgattattactgcagctcatataccactagcaccactctggtattcggcggagggaccaagctgaccgtcctag

SEQ ID NO: 2418 - DNA, 322 bp, Homo sapiens
gaaattgtgttgacgcagtctccaggcaccctgtctttgtctccaggggaaagagccaccctctcctgcagggccagtcagagtgttagcagcagctacttagcctggtaccagcagaaacctggccaggctcccaggctcctcatctatggtgcatccagcagggccactggcatcccagacaggttcagtggcagtgggtctgggacagacttcactctcaccatcagcagactggagcctgaagattttgcagtgtattactgtcagcagtatggtagctcgtggacgttcggccaagggaccaaggtggaaatcaaac

SEQ ID NO: 2419 - DNA, 339 bp, Homo sapiens
gatattgtgatgactcagactccactctctctgtccgtcacccctggacagccggcctccatctcctgcaagtctagtcagagcctcctgcatggtgatggaaagacctatttgtattggtacctgcagaagccaggccagcctccacagctcctgatctatgaagtttccaaccggttctctggagtgccagataggttcagtggcagcgggtcagggacagatttcacactgaaaatcagccgggtggaggctgaggatgttggggtttattactgcatgcaaaatatacagcttccccgctcactttcggcggagggaccaaggtggagatcaaac

SEQ ID NO: 2420 - DNA, 334 bp, Homo sapiens
cagtctgccctgactcagcctgcctccgtgtctgggtctcctggacagtcgatcaccatctcctgcactggaaccagcagtgacgttggtggttataactatgtctcctggtaccaacaacacccaggcaaagcccccaaactcatgatttatgatgtcagtaatcggccctcaggggtttctaatcgcttctctggctccaagtctggcaacacggcctccctgaccatctctgggctccaggctgaggacgaggctgattattactgcagctcatatacaagcagcagcactctttatgtcttcggaactgggaccaaggtcaccgtcctag

SEQ ID NO: 2421 - DNA, 321 bp, Homo sapiens
gaaattgtgctgactcagtctccagactttcagtctgtgactccaaaggagaaagtcaccatcacctgccgggccagtcagagcattggtagtagcttacactggtaccagcagaaaccagatcagtctccaaagctcctcatcaagtttgcttcccagtccttctcaggggtcccctcgaggttcagtggcagtggatctgggacagatttcaccctcaccatcaatagcctggaagctgaagatgctgcaacctattactgtcatcagagtagtagtttacccctcacttttggccaggggaccaagctggagatcaaa

SEQ ID NO: 2422 - DNA, 322 bp, Homo sapiens
gaaattgtgttgacacagtctccagccaccctgtctttgtctccaggggaaagagccaccctctcctgcagggccagtcagagtattagcaggtacttagcctggtaccaacagaaacctggccaggctcccaggctcctcatctatgatgcatccaacagggccactggcatcccagccaggttcagtggcagtgggtctgggacagacttcactctcaccatcagcagcctagagtctgaagattttgcagtttattactgtcagcagcgtagcaactggcctctcactttcggcggagggaccaaggtggagatcaaac

SEQ ID NO: 2423 - DNA, 327 bp, Homo sapiens
cagtctgccctgactcagcctgcctccgtgtctgggtctcctggacagtcgatcaccatctcctgcactgggaccagcagtgatgttgggagttataaccttgtctcctggtaccaacaacacccaggcaaagcccccaaattcatgatttatgaggacagtaagcggccctcaggggtttctaatcgcttctctggctccaagtttggcaacacggcctccctgacaatctctgggctccaggctgaggacgaggctgattattactgctgctcatatgcaggtagtagcacttgggtgttcggcggagggaccaagctgaccgtc

SEQ ID NO: 2424 - DNA, 328 bp, Homo sapiens
tcctatgagctgacacagccaccctcggtgtcagtgtccccaggacaaacggccaggatcacctgctctggagatgcattgccaaaaaaatatgcttattggtaccagcagaagtcaggccaggcccctgtgctggtcatctatgaggacagcaaacgaccctccgggatccctgagagattctctggctccagctcagggacaatggccaccttgactatcagtggggcccaggtggaggatgaagctgactactactgttactcaacagacagcagtggtaatcatcggggggtgttcggcggagggaccaagctgaccgtcctag

SEQ ID NO: 2425 - DNA, 331 bp, Homo sapiens
cagtctgtgctgactcagccaccctcagcgtctgggacccccgggcagagggtcaccatctcttgttctggaagcagctccaacatcggaagtaattatgtatactggtaccagcagctcccaggaacggcccccaaactcctcatctataggaataatcagcggccctcaggggtccctgaccgattctctggctccaagtctggcacctcagcctccctggccatcagtgggctccggtccgaggatgaggctgattattactgtgcagcatgggatgacagcctgagtggttgggtgttcggcggagggaccaagctgaccgtcctag

SEQ ID NO: 2426 - DNA, 346 bp, Homo sapiens
gacatcgtgatgacccagtctccagactccctggctgtgtctctgggcgagagggccaccatcaactgcaagtccagccagagtgttttatacagctccaacaataagaactacttagcttggtaccagcagaaaccaggacagcctcctaagctgctcatttactgggcatctacccgggaatccggggtccctgaccgattcagtggcagcgggtctgggacagatttcactctcaccatcagcagcctgcaggctgaagatgtggcagtttattactgtcagcaacattatagtgctccccccgggtacacttttggccaggggaccaagctggagatcaaac

SEQ ID NO: 2427 - DNA, 331 bp, Homo sapiens
cagtctgtgctgactcagccaccctcagcgtctgggacccccgggcagagggtcaccatctcttgttctggaagcagctccaacatcggaagtaatactgtaaactggtaccagcagctcccaggaacggcccccaaactcctcatctatagtaataatcagcggccctcaggggtccctgaccgattctctggctccaagtctggcacctcagcctccctggccatcagtgggctccagtctgaggatgaggctgattattactgtgcagcatgggatgacagcctgaatggttgggtgttcggcggagggaccaagctgaccgtcctag

SEQ ID NO: 2428 - DNA, 333 bp, Homo sapiens
cagtctgccctgactcagcctcgctcagtgtccgggtctcctggacagtcagtcaccatctcctgcactggaaccagcagtgatgttggtggttataactatgtctcctggtaccaacaacatccaggcaaagcccccaaactcatgatttatgatgtcactaagcggccctcaggggtccctgatcgcttctctggctccaagtctggcaacacggcctccctgaccgtctctaggctccaggctgaggatgaggctgattattactgctgctcatatgcaggcagtgacactttcgtggttttcggcggagggaccaagctgaccgtccta

SEQ ID NO: 2429 - DNA, 318 bp, Homo sapiens
gacatccagatgacccagtctccatctgccatgtctgcatctgtaggagacagagtcaccatcacttgtcgggcgagtcagggcattagcaattatttagcctggtttcagcagaaaccagggaaagtccctaagcgcctgatctatgctgcatccagtttgcaaagtggggtcccatcaaggttcagcggcagtggatctgggacagaattcactctcacaatcagcagcctgcagcctgaagattttgcaacttattactgtctacagcataatagttacccggctttggccaggggaccaagctggagatcaaac

SEQ ID NO: 2430 - DNA, 322 bp, Homo sapiens
tcatatgagctgactcagccaccctcagtgtccgtgtccccaggacagacagccagcatcacctgctctggagataaattgggggataaatatacttgttggtatcagcagaagccaggccagtcccctgtgctggtcatctatcaagatttcaagcggccctcagggatccctgagcgattctctggctccaactctgggaacacagtcactctgaccatcagcgggacccaggctatggatgaggctgactattactgtcaggcgtgggacagcagcaccgcgatggtgttcggcggagggaccaagctgaccgtcctag

SEQ ID NO: 2431 - DNA, 325 bp, Homo sapiens
tcctatgtgctgactcagccaccctcggtgtcagtggccccaggacagacggccaggattacctgtgggggaaacaacattggaagtaaaagtgtgcactggtaccagcagaagccaggccaggcccctgtgctggtcgtctatgatgatagcgaccggccctcagggatccctgagcgattctctggctccaactctgggaacacggccaccctgaccatcagcagggtcgaagccggggatgaggccgactattactgtcaggtgtgggatagtagtagtgatcattatgtcttcggaactgggaccaaggtcaccgtcctag

SEQ ID NO: 2432 - DNA, 340 bp, Homo sapiens
cagtctgtgctgacgcagccgccctcagtgtctggggccccagggcagagggtcaccatctcctgcactgggagcagctccaacatcggggcaggttatgatgtacactggtaccagcagcttccaggaacagcccccaaactcctcatctatggtaacagcaatcggccctcaggggtccctgaccgattctctggctccaagtctggcacctcagcctccctggccatcactgggctccaggctgaggatgaggctgattattactgccagtcctatgacagcagcctgagtggttgggggtgggtgttcggcggagggaccaagctgaccgtcctag

SEQ ID NO: 2433 - DNA, 322 bp, Homo sapiens
gacatccagatgacccagtctccatcctccctgtctgcatctgtaggagacagagtcaccatcacttgccaggcgagtcaggacattaacaagtatttaaattggtatcagcagaaaccagggaaagcccctaagctcctgatcttcgatgcatccaatttggaaacaggggtcccatcaaggttcagtggaagtggatctgggacagattttactttcaccatcagcagcctgcagcctgaagatgttgcaacatattactgtcaacagtatgataatctccctcccacttttggccaggggaccaagctggagatcaaac

SEQ ID NO: 2434 - DNA, 337 bp, Homo sapiens
cagtctgtgctgacgcagccgccctcagtgtctggggccccagggcagagggtcaccatctcctgcactgggagcagctccaacatcggggcaggttatgatgtacactggtaccagcagcttccaggaacagcccccaaactcctcatctatggtaacagcaatcggccctcaggggtccctgaccgattctctggctccaagtctggcacctcagcctccctggccatcactgggctccaggctgaggatgaggctgattattactgccagtcctatcacagcagcctgagtgcttttgtggtattcggcggagggaccaagctgaccgtcctag

SEQ ID NO: 2435 - DNA, 331 bp, Homo sapiens
caggctgtggtgactcaggagccctcactgactgtcccccccggagggacagtcactctcacctgtggctccagcactggagctgtcaccagtggtcattatccctactggttacagcagaagcctggccaagcccccaggacactgatttatgatacaagcgacaaacactcctggacacctgcccggttctcaggctccctccttgggggcaaagctgccctgaccctttcgggtgcgcagcctgaggatgaggctgaatattactgcttgctctcctatactggtgcgcggcgggtcttcggcggagggaccaagctgaccgtcctag

SEQ ID NO: 2436 - DNA, 319 bp, Homo sapiens
gaaattgtgttgacacagtctccagccaccctgtctttgtctccaggggaaagagccaccctctcctgcagggccagtcagagtgttagaagctacttagcctggtaccaacagaaacctggccaggctcccaggctcctcatctatgatgcatccaacagggccactggcatcccagccaggttcagtggcagtgggtctgggacagacttcactctcaccatcagcagcctagagcctgaagattttgcagtttattactgtcagcagcgtagcaactggctcactttcggcggagggaccaaggtggagatcaaac

SEQ ID NO: 2437 - DNA, 319 bp, Homo sapiens
gaaattgtgctgactcagtctccagactttcagtctgtgactccaaaggagaaagtcaccatcacctgccgggccagtcagagcattggtagtagcttacactggtaccagcagaaaccagatcagtctccaaagctcctcatcaagtatgcttcccagtccatctcaggggtcccctcgaggttcagtggcagtggatctgggacagatttcaccctcaccatcaatagcctggaagctgaagatgctgcaacgtattactgtcatcagagtagtagtgcgtggacgttcggccaagggaccaaggtggaaatcaaac

SEQ ID NO: 2438 - DNA, 322 bp, Homo sapiens
gacatccagttgacccagtctccatcctcactgtctgcatctgtaggagacagagtcaccatcacttgtcgggcgagtcagggcattagctattatgttgcctggtttcagcagaaaccagggaaagcccctaagtccctgatctatgctgcatccagtttgcaaagtggggtcccatcaaagttcaccggcagtggatctgggacagatttcactctcaccatcaccagcctgcagcctgaagattttgcaacttattactgccaacagtataatagttacccgatcaccttcggccaagggacacgactggagattaaac

SEQ ID NO: 2439 - DNA, 322 bp, Homo sapiens
gacatccagatgacccagtctccatcctccctgtctgcatctgtaggagacagagtcaccatcacttgccgggcaagtcagagcattagcagctatttaaattggtatctgcagaaaccagggaaagcccctaagctcctgatctatgctgcatccaatttgcaaagtggggtcccatcaaggttcagtggcagtggatctgggacagatttcactctcaccatcagcagtctgcaacctgaagattttgcaacttactactgtcaacagagttacattacccctctcactttcggcggagggaccaaggtggagatcaaac

SEQ ID NO: 2440 - DNA, 318 bp, Homo sapiens
tcctatgagctgactcagccaccctcagtgtccgtgtccccaggacagacagccagcatcacctgctctggagataaattgggggataaatatgcttgctggtatcagcagaagccaggccagtcccctgtgctggtcatctatcaagatagcaagcggccctcagggatccctgagcgattctctggctccaactctgggaacacagccactctgaccatcagcgggacccaggctatggatgaggctgactattactgtcaggcgtgggacagcagcattgtggtcttcggcggagggaccaagctgaccgtccta

SEQ ID NO: 2441 - DNA, 337 bp, Homo sapiens
cagtctgccctgactcagcctcgctcagtgtccgggtctcctggacagtcagtcaccatctcctgcactggaaccagcagtgatgttggtggttataactatgtctcctggtaccaacagcacccaggcaaagcccccaaactcatgatttatgatgtcagtaagcggccctcaggggtccctgatcgcttctctggctccaagtctggcaacacggcctccctgaccatctctgggctccaggctgaggatgaggctgattattactgctgctcatatgcaggcagctacactttcgacggcgtcttcggaactgggaccaaggtcaccgtcctag

SEQ ID NO: 2442 - DNA, 322 bp, Homo sapiens
gacatccagatgacccagtctccatcctccctgtctgcatctgtaggagacagagtcaccatcacttgccgggcaagtcagagcattagcagctatttaaattggtatcagcagaaatcagggaaagcccctaagctcctgatctttgctgcatccagcttgcaaagtggagtcccatcaaggttcagtggcagtggatctgggacagatttcactctcaccatcagcagtctgcaacctgaagattttgcaacttactcctgtcaacagagttacactgccccgcggacgttcggccaagggaccaaggtggaaatcaaac

SEQ ID NO: 2443 - DNA, 322 bp, Homo sapiens
gacatccagatgacccagtctccatcctccctgtctgcatctgtaggagacagagtcaccatcacttgccaggcgagtcaggacattaacaactatttaaattggtatcagcagaaaccagggaaagcccctaagctcctgatctacgatgcatccaatttggaaacaggggtcccatcaaggttcagtggaagtggatcagggacagatttcacattcaccatcagcagcctgcagcctgaagatgttgcaacatattactgtcaaaactatgataatctccctccctctttcggccctgggaccaaagtggatatcaaac

SEQ ID NO: 2444 - DNA, 326 bp, Homo sapiens
catccagttgacccagtctccatcctccctgtctgcatctgtaggagacagagtcaccatcacttgccgggccagtcagggcattagcagttatttagcctggtatcagcaaaaaccagggaaagcccctaagctcctgatctatgatgcatccactttgcaaagtggggtcccatcaaggttcagcggcagtggatctgggacagatttcgctctcaccatcagcagcctgcagcctgaagattttgcaacttattactgtcaacagcttaatagttacccctctatgtacacttttggccaggggaccaagctggagatcaaac

SEQ ID NO: 2445 - DNA, 331 bp, Homo sapiens
gaaatagtgatgacgcagtctccagccaccctgtctgtgtctccaggggaaagagccaccctctcctgcagggccagtcagagtgttagcagcaacttagcctggtaccagcagaaacctggccaggctcccaggctcctcatctatggtgcatccaccagggccactggtatcccagccaggttcagtggcagtgggtctgggacagagttcactctcaccatcagcagcctgcagtctgaagattttgcagtttattactgtcagcagtataataactggccgataaacgggtacacttttggccaggggaccaagctggagatcaaac

SEQ ID NO: 2446 - DNA, 337 bp, Homo sapiens
cagtctgtgctgacgcagccgccctcagtgtctggggccccagggcagagggtcaccatctcctgcactgggagcagctccaacatcggggcaggttatgatgtacactggtaccagcagcttccaggaacagcccccaaactcctcatctatggtaacagcaatcggccctcaggggtccctgaccgattctctggctccaagtctggcacctcagcctccctggccatcactgggctccaggctgaggatgaggctgattattactgccagtcctatgacagcagcctgagtgtttccgtggtgttcggcggagggaccaagctgaccgtcctag

SEQ ID NO: 2447 - DNA, 334 bp, Homo sapiens
cagtctgccctgactcagcctgcctccgtgtctgggtctcctggacagtcgatcaccatctcctgcactggaaccagcagtgatgttgggagttataaccttgtctcctggtaccaacagcacccaggcaaagcccccaaactcatgatttatgaggtcagtaagcggccctcaggggtttctaatcgcttctctggctccaagtctggcaacacggcctccctgacaatctctgggctccaggctgaggacgaggctgattattactgctgctcatatgcaggtagtagcactctcggggtattcggcggagggaccaagctgaccgtcctag

SEQ ID NO: 2448 - DNA, 328 bp, Homo sapiens
gacatccagttgacccagtctccagccttcttgtctgcatctgtaggagacagagtcaccatcacttgccgggccagtcagggcattagcagttatttagcctggtatcaacaaagaccagggaaagcccctaagctcctgatctatgctgcatccactttgcaaagtggggtcccatcaaggttcagcggcagtggatctgggacagaattcactctcacaatcagcagcctgcagcctgaagattttgcaacttattactgtcaacagcttaatagttcccctggctcgctcactttcggcggtgggaccaaggtggagatcaaac

SEQ ID NO: 2449 - DNA, 319 bp, Homo sapiens
tcctatgagctgactcagccaccctcagtgtccgtgtccccaggacagacagccagcatcacctgctctggagataaattggataataaatatgcttgctggtatcagcagaagccaggccagtcccctctgctggtcatctatcaagataccaagcggccctcagggatccctgagcgattctctggctccaactctgggaacacagccactctgaccatcagcgggacccaggctatggatgaggctgactattactgtcaggcgtgggacagaagcactgtggtgttcggcggagggaccaagctgaccgtcctag

SEQ ID NO: 2450 - DNA, 325 bp, Homo sapiens
gaaattgtgttgacgcagtctccaggcaccctgtctttgtctccaggggaaagagccaccctctcctgcagggccagtcagagtgttagcagtacctacttaggctggtaccagcagaaatctggccaggctcccaggctcctcatctatggtgcatctagcagggccactggcatcccagacaggttcagtggcagtgggtctgggacggacttcactctcaccatcagcagactggagcctgaagattttgcagtgtattactgtcagcagtatggtagttcacctgggacgttcggccaagggaccaaggtggaaatcaaac

SEQ ID NO: 2451 - DNA, 322 bp, Homo sapiens
gacatccagatgacccagtctccatcttccgtgtctgcatctgtaggagacagagtcaccatcacttgtcgggcgagtcagggtattagcagctggttagcctggtatcagcagaaaccagggaaagcccctaagctcctgatctatgctgcatccagtttgcaaagtggggtcccatcaaggttcagcggcagtggatctgggacagatttcactctcaccatcagcagcctgcagcctgaagattttgcaacttactattgtcaacaggctaacagtttccctttcactttcggccctgggaccaaagtggatatcaaac

SEQ ID NO: 2452 - DNA, 331 bp, Homo sapiens
cagtctgccctgactcagcctccctccgtgtccgggtctcctggacagtcagtcaccatctcctgcactggaaccagcagtgacgttggtagttataaccgtgtctcctggtaccagcagcccccaggcacagcccccaaactcatgatttatgaggtcagtaatcggccctcaggggtccctgatcgcttctctgggtccaagtctggcaacacggcctccctgaccatctctgggctccaggctgaggacgaggctgattattactgcagctcatatacaagcagcagcacttgggtgttcggcggagggaccaagctgaccgtcctag

SEQ ID NO: 2453 - DNA, 322 bp, Homo sapiens
gacatccagatgacccagtctccatcctccctgtctgcatctgtaggagacagagtcaccatcacttgccgggcaagtcagggcattagaaatgatttaggctggtatcagcagaaaccagggaaagcccctaagcgcctgatctatgctgcatccagtttgcaaagtggggtcccatcaaggttcagcggcagtggatctgggacagaattcactctcacaatcagcagcctgcagcctgaagattttgcaacttattactgtctacagcataatagttaccctcgaacgttcggccaagggaccaaggtggaaatcaaac

SEQ ID NO: 2454 - DNA, 334 bp, Homo sapiens
gaaattgtgatgactcagtctccactctccctgcccgtcacccctggagagccggcctccatctcctgcaggtctagtcagagcctcctgcatagtaatggatacaattatttggattggtacctgcagaagccagggcagtctccacagctcctgatctatttgggttctaatcgggcctccggggtccctgacaggttcagtggcagtggatcaggcacagattttacactgaaaatcagcagagtggaggctgaggatgttggagtttattactgcatgcaagctctacaaactatcaccttcggccaagggacacgactggagattaaac

SEQ ID NO: 2455 - DNA, 328 bp, Homo sapiens
tcctatgagctgacacagccaccctcggtgtcagtgtccccaggacagacggccaggatcacctgctctggagatgcattgccaaagcaatatgcttattggtaccagcagaagccaggccaggcccctgtactggtgatatataaagacagtgagaggccctcagggatccctgagcgattctctggctccagctcagggacaacagtcacgttgaccatcagtggagtccaggcagaagacgaggctgactattactgtcaatcagcagacagcagtggtattcccgatgtggtgttcggcggagggaccaagctgaccgtcctag

SEQ ID NO: 2456 - DNA, 322 bp, Homo sapiens
gacatccagatgacccagtctccaccctccctgtctgcatctctaggagacagagtcaccatcacttgccaggcgagccaggacattagcaactctttaaattggtatcaacagagaccagggaaagcccctaagctcctgatctacgatgcattccgtttggaaacaggggtcccatcaaggttcagtggaagtggatctgggacagattttactttcaccatcagcagcctgcagcctgaagatactgcaacatattactgtcaacagtatgataatctcccgctcactttcggcggagggacggcggtggacatcaaac

SEQ ID NO: 2457 - DNA, 335 bp, Homo sapiens
cagcttgtgctgactcaatcgccctctgcctctgcctccctgggagcctcggtcaagctcacctgcactctgagcagtgggcacagcagctacgccatcgcatggcatcagcagcagccagagaagggccctcggtacttgatgaagcttaacagtgatggcagccacagcaagggggacgggatccctgatcgcttctcaggctccagctctggggctgagcgctacctcaccatctccagcctccagtctgaggatgaggctgactattactgtcagacctggggcactggcccagggggtattcggcggagggaccaagctgaccgtcctag

SEQ ID NO: 2458 - DNA, 319 bp, Homo sapiens
gccatccggataacccagtctccatcctcactctctgcatctacaggagacagagtcaccatcacttgtcgggcgagtcagggtattagcagttatttagcctggtatcagcaaaaaccagggaaagcccctaagctcctgatctatgctgcatccactttgcaaagtggggtcccatcaaggttcagcggcagtggatctgggacagatttcactctcaccatcagctgcctgcagtctgaagattttgcaacttattactgtcaacagtattatagttcctgcacttttggccaggggaccaagctggagatcaaac

SEQ ID NO: 2459 - DNA, 331 bp, Homo sapiens
cagtctgccccgactcagcctgcctccgtgtctgggtctcttggacagtcgatcaccatctcctgcactggaaccagcagtgatgttgggagttataaccttgtctcctggtaccaacagcacccaggcaaagcccccaaactcatgatttatgaggtcactaagcggccctcaggggtttctaatcgcttctctggctccaagtctggcaacacggcctccctgacaatctctgggctccaggctgaggacgaggctgattattactgctgctcatatgcaggtagtagcactttagtattcggcggagggaccaagctgaccgtcctag

SEQ ID NO: 2460 - DNA, 325 bp, Homo sapiens
gaaattgtgttgacgcagtctccaggcaccctgtctttgtctccgggggaaagagccaccctctcctgcagggccagtcagagtgttcccagcagctacttagcctggtaccagcagaaacctggccaggctcccaggctcctcatctatggtgcatccagcagggccactggcatcccagacaggttcagtggcagtgggtctgggacagacttcactctcaccatcagcagactggagcctgaagattttgcagtgtattactgtcagcagtatggtagccctatgtacacttttggccaggggaccaagctggagatcaaac

SEQ ID NO: 2461 - DNA, 334 bp, Homo sapiens
cagtctgtgctgacgcagccgccctcagtgtctggggccccagggcagagggtcaccatctcctgcactgggagcagctccaacatcggggcaggttatgatgtacactggtaccagcagcttccaggaacagcccccaaactcctcatctatggtaacagcaatcggccctcaggggtccctgaccgattctctggctccaagtctggcacctcagcctccctggccatcactgggctccaggctgaggatgaggctgattattactgccagtcctatgacagcagcctgagtggttcagtcttcggaactgggaccaaggtcaccgtcctag

SEQ ID NO: 2462 - DNA, 334 bp, Homo sapiens; identical to SEQ ID NO: 2354

SEQ ID NO: 2463 - DNA, 331 bp, Homo sapiens; identical to SEQ ID NO: 881

SEQ ID NO: 2464 - DNA, 322 bp, Homo sapiens; identical to SEQ ID NO: 2235

SEQ ID NO: 2465 - DNA, 331 bp, Homo sapiens
cagtctgccctgactcagcctcgctcagtgtccgggtctcctgaacagtcagtcaccatctcctgcactggaaccagcagtaatgttggtggttataactatgtctcctggtaccaacagcacccaggcaaagcccccaaactcatgatttctgatgtcagtaagcggccctcaggggtccctgatcgcttctctggctccaagtctggcaacacggcctccctgaccatctctgggctccaggctgaggatgaggctgattattactgctgctcatatgcaggcagatacacttgggtgttcggcggagggaccaagctgaccgtcctag

SEQ ID NO: 2466 - DNA, 334 bp, Homo sapiens
cagactgtggtgacccaggagccatcgttctcagtgtcccctggagggacagtcacactcacttgtggcttgagctctggctcagtctctactgattactaccccagctggtaccagcagaccccaggccaggctccacgcacgctcatctacagcacaaacactcgctcttctggggtccctgatcgcttctctggctccatccttgggaacaaagctgccctcaccatcacgggggtccaggcagatgatgaatctcattatcactgtgtgctgtatatgggtagtggcatatcgtgggtgttcggcggggggaccaaactgaccgtcctag

SEQ ID NO: 2467 - DNA, 331 bp, Homo sapiens
tcctatgtgctgactcagccaccctcggtgtcagtggccccaggaaagacggccaggattacctgtgggggaaacaacattggaagtaaaagtgtgcactggtaccagcagaagccaggccaggcccctgtgctggtcgtctatgatgatagcgaccggccctcagggatccctgagcgattctctggctccaactctgggaacacggccaccctgaccatcagcagggtcgaagccggggatgaggccgactattactgtcaggtgtgggatagtagtagtgatcatccttgggtggtattcggcggagggaccaagctgaccgtcctag

SEQ ID NO: 2468 - DNA, 322 bp, Homo sapiens
gacatccagatgacccagtctccttccaccctgtctgcatctgtaggagacagagtcaccctcacttgccgggccagtcacagtattagtaactggttggcctggtatcaacagaaaccagggaaagcccctaagctcctgatctataaggcgtctagtttagaaagtggggtcccatcaaggttcagcggcagtggatctgggacagaattcactctcaccatcagcagcctgcagcctgatgattttgcaacttattactgccaacagtatagtacttactcgtggacgttcggccaagggtccaaggtggaaatcaaac

SEQ ID NO: 2469 - DNA, 320 bp, Homo sapiens
gaaattgtgttgacacagtctccagccaccctgtctttgtctccaggggaaagagccaccctctcctgcagggccagtcagagtgttagcagctacttagcctggtaccaacagaaacctggccaggctcccaggctcctcatctatgatgcatccaacagggccactggcatcccagccaggttcagtggcagtgggtctgggacagacttcactctcaccatcagcagcctggagcctgaagattttgcagtttattactgtcagcagcgtagcaactgacatcaccttcggccaagggacacgactggagattaaac

SEQ ID NO: 2470 - DNA, 322 bp, Homo sapiens
gacatccagatgacccagtctccatcctccctgtctgcatctgtaggagacagagtcaccatcacttgccgggcaagtcagggcattagaaatgatttaggctggtatcagcagaaaccagggaaagcccctaagcgcctgatctatgctgcatccagtttgcaaagtggggtcccatcaaggttcagcggcagtggatctgggacagaattcactctcacaatcagcagcctgcagcctgaagattttgcaacttattactgtctacagcataatagttaccctcccactttcggcggagggaccaaggtggagatcaaac

SEQ ID NO: 2471 - DNA, 325 bp, Homo sapiens
cagtctgccctgactcagcctcgctcagtgtccgggtctcctggacagtcagtcaccatctcctgcactggaaccagcagtgatgttggtggttataactatgtctcctggtaccaacagcacccaggcaaagcccccaaactcatgatttatgatgtcagtaagcggccctcaggggtccctgatcgcttctctggctccaagtctggcaacacggcctccctgaccatctctgggctccaggctgaggatgaggctgattattactgctgctcatatgcaggcagctacacattcggcggagggaccaagctgaccgtcctag

SEQ ID NO: 2472 - DNA, 319 bp, Homo sapiens
tcctatgaggtgactcagccaccctcagtgtccgtgtccccaggacagacagccagcatcacctgctctggagataaattgggggataaatatactttctggtatcagcagaagccaggccagtcccctgtgctggtcatctatcaagataccaagcggccctcagggatccctgagcgattctctggctccaactctgggaacacagccactctgaccatcagcgggacccaggctatggatgaggctgactattactgtcaggcgtgggacagcagcactgtggtattcggcggagggaccaagctgaccgtcctag

SEQ ID NO: 2473 - DNA, 325 bp, Homo sapiens
gacatccagatgacccagtctccatcctccctgtctgcatctgtaggagacagagtcaccatcacttgccgggcgagtcagggcattagcaattctttagcctggtatcagcagaaaccagggaaagcccctaagctcctgctctatgctgcatccacattggaaagtggggtcccatccaggttcagtggcagtggatctgggacgcattacactctcaccatcagcagcctgcagcctgaagattttgcaacttattactgtcaacagtattatagttccgacatgtacacttttggccaggggaccaagctggagatcaaac

SEQ ID NO: 2474 - DNA, 322 bp, Homo sapiens
gaaattgtgttgacgcagtctccaggcaccctgtctttgtctccaggggaaagagccaccctctcctgcagggccagtcagagtgttagcagcagctacttagcctggtaccagcagaaacctggccaggctcccaggctcctcatctatggtgcatccagcagggccactggcatcccagacaggttcagtggcagtgggtctgggacagacttcactctcaccatcagcagactggagcctgaagattttgcagtgtattactgtcagcagtatggtagctctcggacgttcggccaagggaccaaggtggaaatcaaac

SEQ ID NO: 2475 - DNA, 319 bp, Homo sapiens
gacatccagatgacccagtctccatcctcactgtctgcatctgtaggagacagagtcaccatcacttgtcgggcgagtcagggcattagcaattttttagcctggtttcagcagaaaccagggaaagcccctaagtccctaatctatgctgcatccagtttgcaaagtggggtcccatcaaggttcagcggcagtggatctgggacagatttcactctcaccatcaccagcctgcagcctgaagattttgccacttattactgccaacagtatgatagttacccctacacttttggccaggggaccaagctggagatca

SEQ ID NO: 2476 - DNA, 331 bp, Homo sapiens
cagtctgccctgactcagcctgcctccgtgtctgggtctcctggacagtcgatcaccatctcctgcactggaaccagcagtgacgttggtggttataactatgtctcctggtaccaacaacacccaggcaaagcccccaaactcttgatttatgatgtcagtaatcggccctcaggggtttctaatcgcttctctggctccaagtctggcaacacggcctccctgaccatctctgggctccaggctgaggacgaggctgattattactgcagctcatttacaagcatcagcactcttgtcttcggaactgggaccaaggtcaccgtcctag

SEQ ID NO: 2477 - DNA, 325 bp, Homo sapiens
gacatccagatgacccagtctccttccaccctgtctgcatctgtaggagacagagtcaccatcacttgccgggccagtcagagtattagtagctggttggcctggtatcagcagaaaccagggaaagcccctaagctcctgatctataaggcgtctagtttagaaagtggggtcccatcaaggttcagcggcagtggatctgggacagaattcactctcaccatcagcagcctgcagcctgatgattttgcaacttattactgccaacagtataatagttatattatgtacacttttggccaggggaccaagctggagatcaaac

SEQ ID NO: 2478 - DNA, 343 bp, Homo sapiens
gatattgtgatgactcagtctccactctccctgcccgtcacccctggagagccggcctccatctcctgcaggtctagtcagagcctcctgcatagtaatggatacaactatttggattggtacctgcagaagccagggcagtctccacagctcctgatctatttgggttctaatcgggcctccggggtccctgacaggttcagtggcagtggatcaggcacagattttacactgaaaatcagcagagtggaggctgaggatgttggggtttattactgcatgcaagctctacaaactcctccgaagctcactttcggcggagggaccaaggtggagatcaaac

SEQ ID NO: 2479 - DNA, 325 bp, Homo sapiens
tcctatgagctgacacagccaccctcggtgtcagtgtccccaggacagacggccaggatcacctgctctggagatgcattgccaaagcaatatgcttattggtaccagcagaagccaggccaggcccctgtgttggtgatatataaagacagtgagaggccctcagggatccctgagcgattctctggctccagctcagggacaacagtcacggtgaccatcagtggagtccaggcagaagacgaggctgactattattgtcaatcaacagacactggtggttcctctgtggttttcggcggagggaccaagctgaccgtcctag

SEQ ID NO: 2480 - DNA, 328 bp, Homo sapiens
cagtctgccctgactcagcctgcctccgtgtctgggtctcctggacagtcgatcaccatctcctgcactggaaccagcagtgatgttgggagttataaccttgtctcctggtaccaacagcacccaggcaaagcccccaaactcatgatttatgagggcagtaagcggccctcaggggtttctaatcgcttctctggctccaagtctggcaacacggcctccctgacaatctctgggctccaggctgaggacgaggctgattattactgctgctcatatgcaggtagtaccgtggtattcggcggagggaccaagctgaccgtcctag

SEQ ID NO: 2481 - DNA, 325 bp, Homo sapiens
tcctatgtgctgactcagccaccctcggtgtcagtggccccaggacagacggccaggattacctgtgggggaaacaacattggaactaaaagtgtgcactggtaccagcagaagccaggccaggcccctgtgctggtcgtctatgatgatagcgaccggccctcagggatccctgagcgattctctggctccaactctgggaacacggccaccctgaccatcagcagggtcgaagccggggatgaggccgactattactgtcaggtgtgggatagtagtagtgatcatgtggtattcggcggagggaccaagctgaccgtcctag

SEQ ID NO: 2482 - DNA, 322 bp, Homo sapiens
gacatccagatgacccagtctccatcctcactgtctgcatctgtaggagacagagtcaccatcacttgtcgggcgagtcagggcattagcaattatttagcctggtttcagcagaaaccagggaaagcccctaagtccctgatctatgctgcatccagtttgcaaagtggggtcccatcaaagttcagcggcagtggatctgggacagatttcactctcaccatcagcagcctgcagcctgaagattttgcaacttattactgccaacagtataatagttaccctcgtactttcggcggagggaccaaggtggagatcaaac

SEQ ID NO: 2483 - DNA, 340 bp, Homo sapiens
gacatcgtgatgacccagtctccagactccctggctgtgtctctgggcgagagggtcaccatcaactgcaagtccagccagactgttttatacagctccaacaataagaactacttagcttggtaccagcagaaaccaggacagcctcctaagctgctcatttactgggcatctacccgggaatccggggtccctgaccgattcagtggcagcgggtctgggacagatttcactctcaccatcagcagcctgcaggctgaagatgtggcagtttattactgtcagcaattttatcttactccgatcaccttcggccaagggacacgactggagattaaac

SEQ ID NO: 2484 - DNA, 328 bp, Homo sapiens
gaaattgtgttgacacagtctccagccaccctgtctttgtctccaggggaaagagccaccctctcctgcagggccagtcagagttttgccggctacttagcctggtaccaacagaaacctggccaggctcccaggctcctcatctatgatgcatccaacagggccactggcatcccagccaggttcagtggcagtgggtctgggacagacttcactctcaccatcagcagcctagagcctgaagattttgcagtttattactgtcagcagcgtagcaactggcctcccatgtacacttttggccaggggaccaagctggagatcaaac

SEQ ID NO: 2485 - DNA, 323 bp, Homo sapiens
gacatccagatgacccagtctccttccaccctgtctgcatctgtaggagacagagtcaccatcacttgccgggccagtcagagtattagtagctggttggcctggtatcagcagaaaccagggaaagcccctaagttcctgatctataaggcgtctagtttagaaagtggggtcccatcaaacttcagcggcagtggatctgggacagaattcactctcaccatcagcagcctgcagcctgatgatcttacaacttattactgccaacagtataatagttataacgtcgacgttcggccaagggaccaaggtggaaatcaaac

SEQ ID NO: 2486 - DNA, 325 bp, Homo sapiens
tcctatgagctgacacagccaccctcggtgtcagtgtccccaggacagacggccaggatcacctgctctggagatgcattgccaaagcaatatgcttattggtaccagcagaagccaggccaggcccctgtgctggtgatatataaagacagtgagaggccctcagggatccctgagcgattctctggctccagctcagggacaacagtcacgttgaccatcagtggagtccaggcagaagacgaggctgactattactgtcaatcagcagacagcagtggtacttataaggtattcggcggagggaccaagctgaccgtcctag

SEQ ID NO: 2487 - DNA, 324 bp, Homo sapiens
gacatccagttgacccagtctccatccttcctgtctgcatctgtaggagacagagtcaccatcacttgccgggccagtcagggcattagcagttgtttagcctggtatcagcaaaaaccagggaaagcccctaagctcctgatctatgctgcatccactttgcaaagtggggtcccatcaaggttcagcggcagtggatctgggacagaattcactctcacaatcagcagcctgcagcctgaagattttgcaacttattactgtcaacagcttaatagttacccctgctcactttcggcggagggaccaaggtggagatcaaac

SEQ ID NO: 2488 - DNA, 319 bp, Homo sapiens
tcctatgagctgactcagccaccctcagtgtccgtgtccccaggacagacagccagcatcacctgctctggagataaattgggggataaatatgcttgctggtatcagcagaagccaggccagtcccctgtgctggtcatctatcaagatagcaagcggccctcagggatccctgagcgattctctggctccaactctgggaacacagccactctgaccatcagcgggacccaggctatggatgaggctgactattactgtcaggcgtgggacagcagcacgggggtcttcggaactgggaccaaggtcaccgtcctag

SEQ ID NO: 2489 - DNA, 325 bp, Homo sapiens
gaaattgtgttgacgcagtctccaggcaccctgtctttgtctccaggggaaagagccaccctctcctgcagggccagtcagagtgttaacagcagctacttagcctggtaccagcagaaacctggccaggctcccaggctcctcatctatggtgcatccagcagggccactggcatcccagacaggttcagtggcagtgggtctgggacagacttcactctcaccatcagcagactggagcctgaagattttgcagtgtattactgtcagcagtatggtagctcaccggggacttttggccaggggaccaagctggagatcaaac

SEQ ID NO: 2490 - DNA, 325 bp, Homo sapiens
gaaattgtgttgacgcagtctccaggcaccctgtctttgtctccaggggaaagagccaccctctcctgcagggccagtcagagtgttagcagcagctacttagcctggtaccagcagaaacctggccaggctcccaggctcctcatctatggtgcatccagcagggccactggcatcccagacaggttcagtggcagtgggtctgggacagacttcactctcaccatcagcagactggagcctgaagattttgcagtgtattactgtcagcagtatggtagctcactgctcactttcggcggagggaccaaggtggagatcaaac

SEQ ID NO: 2491 - DNA, 325 bp, Homo sapiens
gaaatagtgatgacgcagtctccagccaccctgtctgtgtctccaggggaaagagccaccctctcctgcagggccagtcagagtgttagcagcaacttagcctggtaccagcagaaacctggccaggctcccaggctcctcatctatggtgcatccaccagggccactggtatcccagccaggttcagtggcagtgggtctgggacagagttcactctcaccatcagcagcctgcagtctgaagattttgcagtttattactgtcagcagtataataactggcccccggccactttcggccctgggaccaaagtggatatcaaac

SEQ ID NO: 2492 - DNA, 334 bp, Homo sapiens
cagtctgtgctgacgcagccgccctcagtgtctggggccccagggcagagggtcaccatctcctgcactgggagcacctccaacatcggggcaggttatgatgtacactggtaccagcagcttccaggagcagcccccaaactcctcatctatggtagcagcaatcggccctcaggggtccctgaccgattctctggctccaagtctggcacctcagcctccctggccatcactgggctccaggctgaggatgaggctgattattactgccagtcctttgacagcagcctgagtggttgggttttcggcggagggaccagcgtgaccgtcctag

SEQ ID NO: 2493 - DNA, 325 bp, Homo sapiens
tcctatgtgctgactcagccaccctcggtgtcagtggcccccggaaagacggccaggatttcctgtgggggaaacaacattggaagtaaaaatgtccactggtaccagcagaagccaggccaggcccctgtgttggtcgtctatgatgatagcgaccggccctcagggatccctgagcgattctctggctccaactctgggaacacggccaccctgaccatcagcagggtcgaagccggggatgaggccgacttttactgtcaggtgtgggatggtagtagtgagcctgtgctattcggcggagggaccaagctgaccgtcctag

SEQ ID NO: 2494 - DNA, 328 bp, Homo sapiens
gaaatagagatgacgcagtctccagccaccctgtctgtgtctccaggggaaggggccaccctctcctgcagggccagtcagagtattaatagtaacttagcctggtaccagcagaaacctggccagcctcccaggctcctcatctatggtgcatccacgagggccactggtatcccagccaggttcagtggcagtgggtctggtacagagttcactctcaccatcagcagcctgcagtctgaagattttgcaatttattactgtcagcagtatcatgagtggcctccggcgtacacttttggccaggggaccaagctggagatcaaac

SEQ ID NO: 2495 - DNA, 319 bp, Homo sapiens
gacatccagatgacccagtctccatcctccctgtctgcatctgtaggagacagagtcaccatcacttgccgggcaagtcagagcattagcagctatttaaattggtatcagcagaaaccagggaaagcccctaagctcctgatctatgctgcatccagtttgcaaagtggggtcccatcaaggttcagtggcagtggatctgggacagatttcactctcaccatcagcagtctgcaacctgaagattttgcaacttactactgtcaacagagttacagtacccggacgttcggccaagggaccaaggtggaaatcaaac

SEQ ID NO: 2496 - DNA, 331 bp, Homo sapiens
cagtctgtgctgacgcagccgccctcagtgtctggggccccagggcagagggtcaccatctcctgcactgggagcagctccaacatcggggcaggttatgatgtacactggtaccagcagcttccaggaacagcccccaaactcctcatctatggtaacagcaatcggccctcaggggtccctgaccgattctctggctccaagtctggcacctcagcctccctggccatcactgggctccaggctgaggatgaggctgattattactgccagtcctatgacagcagcctgagtgtggtattcggcggagggaccaagctgaccgtcctag

SEQ ID NO: 2497 - DNA, 319 bp, Homo sapiens
tcctatgagctgactcagccaccctcagtgtccgtgtccccaggacagacagccagcatcacctgctctggagataaattgggggataaatatgcttgctggtatcagcagaagccaggccagtcccctgtgctggtcatctatcaagatagcaagcggccctcagggatccctgagcgattctctggctccaactctgggaacacagccactctgaccatcagcgggacccaggctatggatgaggctgactattactgtcaggcgtgggacagcagcactgaggtgttcggcggagggaccaagctgaccgtcctag

SEQ ID NO: 2498 - DNA, 331 bp, Homo sapiens
cagtctgccctgactcagcctcgctcagtgtccgggtctcctggacagtcagtcaccatctcctgcactggaaccagcagtgatgttggtggttataactatgtctcctggtaccaacagcacccaggcaaagcccccaaactcatgatttatgatgtcagtaagcggccctcaggggtccctgatcgcttctctggctccaagtctggcaacacggcctccctgaccatctctgggctccaggctgaggatgaggctgattattactgctgctcatatgcaggcacctacacctgggtgttcggcggagggaccaagctgaccgtcctag

SEQ ID NO: 2499 - DNA, 331 bp, Homo sapiens
cagtctgccctgactcagcctcgctcagtgtccgggtctcctggacagtcagtcaccatctcctgcactggaaccagcagtgatattggtggttataactatgtctcctggtaccgtcaccacccaggcaaagcccccaaactcatgatttatgatatcaataagcggccctcaggggtccctgatcgcttctctggctccaagtctggcaacacggcctccctgaccatctctgggctccagactgaggatgaggctgattattactgctgctcatatgcagccatctacactgtgctattcggcggggggaccaagctgaccgtcctag

SEQ ID NO: 2500 - DNA, 319 bp, Homo sapiens
tcctatgagctgacacagccaccctcggtgtcagtgtccccaggacagacggccaggatcacctgctctggagatgccttgccaaagcaatatgcttattggtaccagcagaagccaggccaggcccctgttctagtgatatataaagacagtgagaggccctcagggatccctgagcgattctctggctccagctcagggacagcagtcacgttgaccatcagtggagtccaggcagaagacgaggctgactattactgtcaatcagcagacagcagtggttatgtcttcggaactgggaccaaggtcaccgtcctag

SEQ ID NO: 2501 - DNA, 334 bp, Homo sapiens
caggctgtggtgactcaggagccctcactgactgtgtccccaggagggacagtcactctcacctgtggctccagcactggagctgtcaccagtggtcattatcccttctggttccagcagaggcctggccaagcccccaggacactgatttatgatacaagcaacaaacactcctggacacctgcccggttctcaggctccctccttgggggcaaagctgccctgaccctttcgggtgcgcagcctgaggatgaggctgagtattactgcttgctctcctatagtggtgctcgggaagtggtattcggcggagggaccaagctgaccgtcctag

SEQ ID NO: 2502 - DNA, 322 bp, Homo sapiens
gccatccggataacccagtctccatcctcactctctgcatctacaggagacagagtcaccatcacttgtcgggcgagtcagggtattagcagttatttagcctggtatcagcaaaaaccagggaaagcccctaagctcctgatctatgctgcatccactttgcaaagtggggtcccatcaaggttcagcggcagtggatctgggacagatttcactctcaccatcagctgcctgcagtctgaagattttgcaacttattactgtcaacagtattatagttaccctcccactttcggcggagggaccaaggtggagatcaaac

SEQ ID NO: 2503 - DNA, 322 bp, Homo sapiens
gacatccagttgacccagtctccatccttcctgtctgcatctgtaggagacagagtcaccatcacttgccgggccagtcagggcattagcagttatttagcctggtatcagcaaaaaccagggaaagcccctaagctcctgatctatgctgcatccactttgcaaagtgaagtcccatcaaggttcagcggcagtggatctgggacagaattcactctcacaatcagcagcctgcagcctgaagattttgcaacttattactgtcaacagcttaatagttaccttttcaccttcggccaagggacacgactggagattaaac

SEQ ID NO: 2504 - DNA, 328 bp, Homo sapiens
gacatccagatgacccagtctccatcctccctgtctgcatctgtaggagacagagttaccatcagttgccgggcaagtgagagtatcagcggcgctttaaattggtatcagcacaatccagggaaagcccccaagatcctgatatctgctgcatccaatttggaacctggggtcccaccaaggttcagtggcagtggatctgggacagatttcactctcaccatcaccagtctgcaacctgaagattttgcaacttactactgtcaacagacttaccttaacccccccatgtacacttttggccaggggaccaaactggagatcaaac

SEQ ID NO: 2505 - DNA, 331 bp, Homo sapiens
tcctatgagctgacacagccaccctcggtgtcagtgtccccaggacaaacggccaggatcacctgctctggagatgcattgccaaaaaaatatgcttattggtaccagcagaagtcaggccaggcccctgtgctggtcatctatgaggacaccaaacgaccctccgggatccctgagagattctctggctccagctcagggacaatggccaccttgactatcagtggggcccgggtggacgatgaagctgactactactgttactcaacagacagtagtggtaatcatatcttgggcgtattcggcggagggaccaagctgaccgtcctag

SEQ ID NO: 2506 - DNA, 331 bp, Homo sapiens
caggcagggctgactcagccaccctcggtgtccaagggcttgagacagaccgccacactcacctgcactgggaacagcaacaatgttggcaaccaaggagcagcttggctgcagcagcaccagggccaccctcccaaactcctatcctacaggaataacaaccggccctcagggatctcagagagaatctctgcatccaggtcaggaaacacagcctccctgaccattactggactccagcctgaggacgaggctgactattactgctcagcatgggacagcagcctcagtgcctgggtgttcggcggagggaccaagctgaccgtcctag

SEQ ID NO: 2507 - DNA, 322 bp, Homo sapiens; identical to SEQ ID NO: 837

SEQ ID NO: 2508 - DNA, 331 bp, Homo sapiens
cagtctgccctgactcagtctcgctcagtgtccgggtctcctggacagtcagtcaccatctcctgcactggaagcatcagtgatattggtagttataactatgtctcctggtaccaacagcacccaggcaaagcccccaaactcatgatttttgatgtcagtgatcggccctcaggggtccctgatcgcttctctggctccaagtctggcaacacggcctccctgaccatctctgggctccaggctgaggatgaggctgattattactgctgttcatatgcaggcaggtactcttgggtgttcggaggagggaccaagctgaccgtcctag

SEQ ID NO: 2509 - DNA, 343 bp, Homo sapiens
gacatcgtgatgacccagtctccagactccctggctgtgtctctgggcgagagggccaccatcaactgcaagtccagccagagtgttttatacaggtccaacaataagaactacttagcttggtaccagcagaaaccaggacagcctcctaagctgctcatttactgggcatctacccgggaatccggggtccctgaccgattcagtggcagcgggtctgggacagatttcactctcaccatcagcagcctgcaggctgaagatgtggcagtttattactgtcagcaatattatagtactcctccgaaaacgttcggccaagggaccagggtggaaatcaaac

SEQ ID NO: 2510 - DNA, 322 bp, Homo sapiens
gacatccagatgacccagtctccatcttccgtgtctgcatctgtaggagacagagtcaccatcacttgtcgggcgagtcagggtattagcagctggttagcctggtatcagcagaaaccagggaaagcccctaagctcctgatctatgctgcatccagtttgcaaagtggggtcccatcaaggttcagcggcagtggatctgggacagatttcactctcaccatcagcagcctgcagcctgaagattttgcaacttactattgtcaacaggctaacagtttccccttcactttcggcggagggaccaaggtggagatcaaac

SEQ ID NO: 2511 - DNA, 322 bp, Homo sapiens
gacatccagatgacccagtctccatcctccctgtctgcatctgtaggagacagagtcaccatcacttgccgggcaagtcagagcattagcagctatttaaattggtatcagcagaaaccagggaaagcccctaagctcctgatctatgctgcatccagtttgcaaagtggggtcccatcaaggttcagtggcagtggatctgggacagatttcactctcaccatcagcagtctgcaacctgaagattttgcaacttactactgtcaacagagttacagtacccctgtgacgttcggccaagggaccaaggtggaaatcaaac

SEQ ID NO: 2512 - DNA, 337 bp, Homo sapiens
cagtctgtgctgactcagccaccctcagcgtctgggacccccgggcagagggtcaccatctcttgttctggaagcagctccaacatcggaagtaatactgtaaactggtaccagcagctcccaggaacggcccccaaactcctcatctatagtaataatcagcggccctcaggggtccctgaccgattctctggctccaagtctggcacctcagcctccctggccatcagtgggctccagtctgaggatgaggctgattattactgtgcagcatgggatgacagcctgaatggccctaattgggtgttcggcggagggaccaagctgaccgtcctag

SEQ ID NO: 2513 - DNA, 322 bp, Homo sapiens
gacatccagatgacccagtctccatcctccctgtctgcatctgtaggagacagagtcaccatcacttgccgggcaagtcagagcattagcagctatttaaattggtatcagcagaaaccagggaaagcccctaagctcctgatctatgctgcatccagtttgcaaagtggggtcccatcaaggttcagtggcagtggatctgggacagatttcactctcaccatcagcagtctgcaacctgaagattttgcaacttactactgtcaacagagttacagtaccctgatcaccttcggccaagggacacgactggagattaaac

SEQ ID NO: 2514 - DNA, 334 bp, Homo sapiens
cagtctgccctgactcagcctgcctccgtgtctgggtctcctggacagtcgatcaccatctcctgcactggaaccagcagtgacgttggtggttataactatgtctcctggtaccagcaacacccaggcaaagcccccaaactcttgatttatgatgtcactaatcggccctcaggggtttctaatcgcttctctggctccaagtctggcaacacggcctccctgaccatctctgggctccaggctgaggacgaggctgattattactgcagctcatatacaagcagcagcactcttgtggttttcggcggagggaccaagctgaccgtcctag

SEQ ID NO: 2515 - DNA, 336 bp, Homo sapiens
cagtctgccctgattcagcctccctccgtgtccgggtctcctggacagtcagtcaccatctcctgcactggaaccagcagtgatgttgggagttatgactatgtctcctggtaccaacagcacccaggcacagtccccaaacccatgatctacaatgtcaatactcggccctcaggggtccctgatcgtttctctggctccaagtctggcaacacggcctccatgaccatctctggactccaggctgaggacgaggctgattattagtgctgctcatatacaagcagtgccactcccaggtggtattcggcggagggaccaagctgaccgtcctag

SEQ ID NO: 2516 - DNA, 334 bp, Homo sapiens
cagtctgtgctgactcagccaccctcagcgtctgggacccccgggcagagggtcaccatctcttgttctggaagcagctccaacatcggaagtaattatgtatactggtaccagcagctcccaggaacggcccccaaactcctcatctataggaataatcagcggccctcaggggtccctgaccgattctctggctccaagtctggcacctcagcctccctggccatcagtgggctccggtccgaggatgaggctgattattactgtgcagcatgggatgacagcctgagtggtcttgtggtattcggcggagggaccaagctgaccgtcctag

SEQ ID NO: 2517 - DNA, 331 bp, Homo sapiens
cagtctgtgctgactcagccaccctcagcgtctgggacccccgggcagagggtcaccatctcttgttctggaagcagctccaacatcggaattaatactgtaaactggtaccagcagctcccaggaacggcccccaaactcctcatctatagtaataatcaggggccctcaggggtccctgaccgattctctggctccaagtctggcacctcagcctccctggccatcaacgggctgcagtctgaggatgaggctgattattactgtgcagcatgggatgacagcctgaatggtgtcatattcggcggagggaccaagctgaccgtcctag

SEQ ID NO: 2518 - DNA, 322 bp, Homo sapiens
gacatccagatgacccagtctccatcctccctgtctgcatctgtaggagacagagtcaccatcacttgccgggcaagtcagagcattagcagctatttaaattggtatcagcagaaaccagggaaagcccctaagctcctgatctatgctgcatccagtttgcaaagtggggtcccatcaaggttcagtggcagtggatctgggacagatttcactctcaccatcagcagtctgcaacctgaagattttgcaacttactactgtcaacagagttacagtacccccctaacgttcggccaagggaccaaggtggaaatcaaac

SEQ ID NO: 2519 - DNA, 334 bp, Homo sapiens; identical to SEQ ID NO: 1029

SEQ ID NO: 2520 - DNA, 322 bp, Homo sapiens
tcttctgagctgactcaggaccctgctgtgtctgtggccttgggacagacagtcaggatcacatgccaaggagacagcctcagaagctattatgcaagctggtaccagcagaagccaggacaggcccctgtacttgtcatctatggtaaaaacaaccggccctcagggatcccagaccgattctctggctccagctcaggaaacacagcttccttgaccatcactggggctcaggcggaagatgaggctgactattactgtaactcccgggacagcagtgcctcggaggtattcggcggagggaccaagctgaccgtcctag

SEQ ID NO: 2521 - DNA, 331 bp, Homo sapiens
cagtctgccctgactcagcctcgctcagtgtccgggtctcctggacagtcagtcaccatctcctgcactggaaccagcagtgatgttggtggttataactatgtctcctggtaccaacaacagtcaggcaaagcccccaaactcatgatttatgatgtcagtaagtggccctcaggggtccctgatcgcttctctggctccaagtctggcaacacggcctccctgaccatctctgggctccaggctgaggatgaggctgattattactgctgctcatatgcaggcgcctacaaatgggtgttcggcggagggacgaagctgaccgtcctag

SEQ ID NO: 2522 - DNA, 337 bp, Homo sapiens
gatgttgtgatgactcagtctccactctccctgcccgtcacccttggacagccggcctccatctcctgcaggtctagtcaaagcctcgtacacagtgatggaaacacctacttgaattggtttcagcagaggccaggccaatctccaaggcgcctaatttataaggtttctaaccgggactctggggtcccagacagattcagcggcagtgggtcaggcactgatttcacactgaaaatcagcagggtggaggctgaggatgttggggtttattactgcatgcaaggtacacactggcctcacaccttcggccaagggacacgactggagattaaac

SEQ ID NO: 2523 - DNA, 325 bp, Homo sapiens
gaaattgtgttgacgcagtctccaggcaccctgtctttgtctccaggggaaagagccaccctctcctgcagggccagtcagagtgttagcagcagctacttagcctggtaccagcagaaacctggccaggctcccaggctcctcatctatggtgcatccagcagggccactggcatcccagacaggttcagtggcagtgggtctgggacagacttcactctcaccatcagcagactggagcctgaagattttgcagtgtattactgtcagcagtatggtagctcagcgctcactttcggcggagggaccaaggtggagatcaaac

SEQ ID NO: 2524 - DNA, 319 bp, Homo sapiens
tcctatgtgctgactcagccaccctcggtgtcagtggccccaggacagacggccaggattacctgtgggggaaacaacattggaagtaaaagtgtgcactggtaccagcagaagccaggccaggcccctgtgctggtcgtctatgatgatagcgaccggccctcagggatccctgagcgattctctggctccaactctgggaacacggccaccctgaccatcagcagggtcgaagccggggatgaggccgactattactgtcaggtgtgggatagtagtagtaatgtcttcggaactgggaccaaggtcaccgtcctag

SEQ ID NO: 2525 - DNA, 325 bp, Homo sapiens
cctatgttctgactcagccaccctcggtgtcagtggccccaggacagacggccaccattacctgtgggggaaacaacattggaagtaaaactgtccactggtaccagcagaggccaggccaggcccctgtcctggtcgtctatgatgataccgaccggccctcagggatccctgaacgattctctggctccaactctgggaacacggccaccctgaccgtcagcagggtcgaagccggggatgaggccgactattattgtcaggtgtgggatatcagtagtgatcatcattgggtgttcggcggagggaccaagctgaccgtcct

SEQ ID NO: 2526 - DNA, 331 bp, Homo sapiens; identical to SEQ ID NO: 881

SEQ ID NO: 2527 - DNA, 338 bp, Homo sapiens
gatattgtgatgagtcagtctccactctccctgcccgtcacccctggagagccggcctccatctcctgcaggtctagtcagagccccctgcatagtaatggatacaagtatttggattggtacctgcagaagcaggggagtctccacaactcatgatctacttgggttctaatcgggcctccggggtccctgacaggttcagtggcagtggatcaggcacagattttacactgaaaatcagcagagtggaggctgaggatgttggggtttattactgcatgcaagctctacaaactcctcgctcactttcggcggagggaccaaggtggagatcaaac

SEQ ID NO: 2528 - DNA, 328 bp, Homo sapiens
gaaattgtgttgacgcagtctccaggcaccctgtctttgtctccaggggaaagagccaccctctcctgcagggccagtcagagtgttagcagcagcgatttggcctggtaccagcagaaacctggccaggctcccaggctcctcatctatggtgcatccagcagggccactggcatcccagacaggttcagtggcagtgggtctgggacagacttcactctcaccatcaccagactggagcctgaagattttgcagtgtattactgtcagcactatggtacctcacctccgtacacttttggccaggggaccaagctggagatcaaac

SEQ ID NO: 2529 - DNA, 316 bp, Homo sapiens
gaaattgtgttgacgcagtctccaggcaccctgtctttgtctccaggggaaagagccaccctctcctgcagggccagtcagagtgttagcagcagctacttagcctggtaccagcagaaacctggccaggctcccaggctcctcatctatggtgcatccagcagggccactggcatcccagacaggttcagtggcagtgggtctgggacagacttcactctcaccatcagcagactggagcctgaagattttgcagtgtattactgtcagcagtatggtcgcactttcggccctgggaccaaagtggatatcaaac

SEQ ID NO: 2530 - DNA, 328 bp, Homo sapiens
tcctatgtgctgactcagccaccctcggtgtcagtggccccaggaaagacggccagaattacctgtgggggaaacaacattggaagtaaaagtgtgcactggtaccagcagaagccaggccaggcccctgagttggtcgttaatgatgatagcgcccggccctcagggatccctgagcgattctctggctccaactctgggaacatggccaccctgaccatcagcagggtcgaagccggggatgaggccgactatcactgtcaagtgtgggatagtagtagtgatcatcgtgtggtattcggcggagggaccaagctgaccgtcctag

SEQ ID NO: 2531 - DNA, 319 bp, Homo sapiens
gacatccagatgacccagtctccttccaccctgtctgcatctgtaggagacagagtcatcatcacttgccgggccagtcagagtattaatagcttgttggcctggtatcaacacaaaccagggaaagcccctagactcctgatctataaggcatctactttagaaagtggagtcccatcaaggttcagcggcagtggatctgggacagagttaactctcaccatcagcaacctgcagcctgatgattctgcaacttattactgccaacaatataatactgattggacgttcggccaagggaccaaggtggaaatcaaac

SEQ ID NO: 2532 - DNA, 319 bp, Homo sapiens
gacatccagatgacccagtctccttccaccctgtctgcatctgtaggagacagagtcaccatcacttgccgggccagtcagagtattagtaggtggttggcctggtatcagcagaaaccagggaaagcccctaaactcctgatctataaggcgtctagtttagaaagtggggtcccatcaaggttcagcggcagtggatctgggacagaattcactctcaccatcagcagcctgcagcctgatgattttgcaacttattactgccaacagtataatacttatcggtggacgttcggccaagggaccaaggtggaaatca

SEQ ID NO: 2533 - DNA, 322 bp, Homo sapiens
gacatccagatgacccagtctccttccaccctgtctgcatctgtaggagacagagtcaccatcacttgccgggccagtcacagtattagtagctggttggcctggtatcagcagaaaccagggaaagcccctaagctcctgatctataaggcgtctagtttagaaagtggggtcccatcaaggttcagcggcagtggatctgggacagaattcactctcaccatcagcagcctgcagcctgatgattttgcaacttattactgccaacagtataatacttattcgtggacgttcggccaagggaccaaggtggaaatcaaac

SEQ ID NO: 2534 - DNA, 334 bp, Homo sapiens
gatattgtgatgactcagtctccactctccctgcccgtcacccctggagagccggcctccatctcctgcaggtctagtcagagcctcctgcatagtaatggatacaactatttggattggtacctgcagaagccagggcagtctccacagctcctgatctatttgggttctaatcgggcctccggggtccctgacaggttcagtggcagtggatcaggcacagattttacactgaaaatcagcagagtggaggctgaggatgttggggtttattactgcatgcaagctctacaaactccgacgttcggccaagggaccaaggtggaaatcaaac

SEQ ID NO: 2535 - DNA, 325 bp, Homo sapiens
gacatccagatgacccagtctccatcctccctgtctgcatctgtaggagacagagtcaccatcacttgccgggcaagtcagagcattagcagctatttaaattggtatcagcagaaaccagggaaagcccctaagctcctgatctatgctgcatccagtttgcaaagtggggtcccatcaaggttcagtggcagtggatctgggacagatttcactctcaccatcagcagtctgcaacctgaagattttgcaacttactactgtcaacagagttacagtaccccgccgatcaccttcggccaagggacacgactggagattaaac

SEQ ID NO: 2536 - DNA, 331 bp, Homo sapiens
cagtctgccctgactcagcctgcctccgtgtctgggtctcctggacagtcgatcaccatctcctgcactggaaccagcagtgatgttgggagttataaccttgtctcctggtatcaataccacccaggcaaagcccccaaactcatgatttatgagggcactaagcggccctcaggggtttctaatcgcttctttggctccaagtctggcaacacggcctccctgacaatctctgggctccaggctgaggacgaggctgattattactgctgctcatatgcaggtcgtagcactccttgggtgttcggcggagggaccaagctgaccgtcc

SEQ ID NO: 2537 - DNA, 322 bp, Homo sapiens
gacatccagatgacccagtctccatcctccctgtctgcatctgtaggagacagagtcaccatcacttgccaggcgagtcaggacattagcaactatttaaattggtatcagcagaaaccagggaaagcccctaagctcctgatcttcgatgcatccaattcggaaacaggggtcccatcaaggttcagtggaagtggatctgggacagattttactttcaccatcagcagcctgcagcctgaagatattgcaacatattactgtcaacagtatgataatctccctcccacttttggccaggggaccaagctgcagatcaaac

SEQ ID NO: 2538 - DNA, 322 bp, Homo sapiens
gccatccggataacccagtctccatcctcactctctgcatctacaggagacagagtcaccatcacttgtcgggcgagtcagggtattagcagttatttagcctggtatcagcaaaaaccagggaaagcccctaagctcctgatctatgctgcatccactttgcaaagtggggtcccatcaaggttcagcggcagtggatctgggacagatttcactctcaccatcagctgcctgcagtctgaagattttgcaacttattactgtcaacagtattatagttaccctcgaacttttggccaggggaccaagctggagatcaaac

SEQ ID NO: 2539 - DNA, 331 bp, Homo sapiens
tcttctgagctgactcaggaccctgctgtgtctgtggccttgggacagacagtcaggatcacatgccaaggagacagcctcagaagctattatgcaagctggtaccagcagaagccaggacaggcccctgtacttgtcatctatggtaaaaacaaccggccctcagggatcccagaccgattctctggctccagctcaggaaacacagcttccttgaccatcactggggctcaggcggaagatgaggctgactattactgtaactcccgggacagcagtggtaaccatctaggctgggtgttcggcggagggaccaagctgaccgtcctag

SEQ ID NO: 2540 - DNA, 331 bp, Homo sapiens
cagtctgccctgactcagcctgcctccgtgtctgggtctcctggacagtcgatcaccatctcctgcactggaaccagcagtgacgttggtggttataactatgtctcctggtaccaacaacacccaggcaaagcccccaaactcatgatttatgatgtcactactcggccctcaggggtttctaatcgcttctctggctccaagtctggcaacacggcctccctgaccatctctgggctccaggctgaggacgaggctgattattactgcagctcatatacaagcatcagcactctcgagttcggcggagggaccaagctgaccgtcctag

SEQ ID NO: 2541 - DNA, 340 bp, Homo sapiens
gatattgtgatgactcagtctccactctccctgcccgtcacccctggagagccggcctccatctcctgcaggtctagtcagagcctcctgcatagtaatggatacaactacttggattggtacctgcagaagccagggcagtctccacagctcctgatctctttgggttctaatcgggcctccggggtccctgacaggttcagtggcagtggatcaggcacagattttacactgaaaatcagcagagtggaggctgaggatgttggggtttattactgcatgcaagctctacaaactcccgcgctcactttcggcggagggaccaaggtggagatcaaac

SEQ ID NO: 2542 - DNA, 334 bp, Homo sapiens
gatattgtgatgactcagtctccactctccctgcccgtcacccctggagagccggcctccatctcctgcaggtctagtcagagcctcctgcatagtaatggatacaactatttggattggtacctgcagaagccagggcagtctccacagctcctgatctatttgggttctaatcgggcctccggggtccctgacaggttcagtggcagtggatcaggcacagattttacactgaaaatcagcagagtggaggctgaggatgttggggtttattactgcatgcaagctctacaaactcctactttcggcggagggaccaaggtggagatcaaac

SEQ ID NO: 2543 - DNA, 319 bp, Homo sapiens
gacatccagatgacccagtctccttccaccctgtctgcatctataggagacagagtcaccatcacttgccgggccagtcagagtattagtagctggttggcctggtatcagcagaaaccagggaaagcccctaagctcctgatctataaggcctctagtttagaaagtggggtcccatcaaggttcagcggcagtggatctgggacagagttcactctcaccatcagcagcctgcagcctgatgattttgcaacttattactgccaacagtataatagttattggacgttcggccaagggaccacggtggaaatcaaac

SEQ ID NO: 2544 - DNA, 337 bp, Homo sapiens
cagtctgccctgactcagcctgcctccgtgtctgggtctcctggacagtcgatcaccatctcctgcactggaaccagcagtgacgttggtggttataactatgtctcctggtaccaacaacacccaggcaaagcccccaaactcatgatttatgatgtcagtaatcggccctcaggggtttctaatcgcttctctggctccaagtctggcaacacggcctccctgaccatctctgggctccaggctgaggacgaggctgattattactgcagctcatatacaagcagcagcactctctcctatgtcttcggaactgggaccaaggtcaccgtcctag

SEQ ID NO: 2545 - DNA, 322 bp, Homo sapiens
gacatccagatgacccagtctccttccaccctgtctgcatctgtaggagacagagtcaccatcacttgccgggccagtcacagtattagtagctggttggcctggtatcagcagaaaccagggaaagcccctaagctcctgatctataaggcgtctagtttagaaagtggggtcccatcaaggttcagcggcagtggatctgggacagaattcactctcaccatcagcagcctgcagcctgatgattttgcaacttattactgccaacagtataatacttatgcccggacgttcggccaagggaccaaggtggaaatcaaac

SEQ ID NO: 2546 - DNA, 331 bp, Homo sapiens
cagtctgccctgactcagcctcgctcagtgtccgggtctcctggacagtcagtcaccatctcctgcactggaaccaacagtgatgttggtggttatagctatgtctcctggtaccaacagcacccaggcaaagcccccaaattgatgatttatgatgtcagtaagcggccctcaggggtccctgatcgcttctctggctccaagtctggcaacacggcctccctgaccatctctggactccaggctgaggatgaggctgattattactgctgctcatatgcaggcaggtacacttcggtgttcggcggagggaccaagctgaccgtcctag

SEQ ID NO: 2547 - DNA, 329 bp, Homo sapiens
cagtctgccctgactcagcctcgctcagtgtccgggtctcctggacagtcagtcaccatcgcctgcactggaaccagcagcgatgttggtgcttataattatgtctcctggtatcaacaacacccaggcaaggcccccaaactcataatttatgatgtcaataagtggccctcaggggtccctgatcgcttctctggttccaagtctggcaacacggcctccctgaccatctctgggctccagactgacgatgaggctgattattactgctgctcatatgcaggcaggttcacttggatgttcggcggagggtccaagctgtccgtcct

SEQ ID NO: 2548 - DNA, 325 bp, Homo sapiens
gaaattgtgttgacgcagtctccaggcaccctgtctttgtctccaggggaaagagccaccctctcctgcagggccagtcagagtgttagcagcagctacttagcctggtaccagcagaaacctggccaggctcccaggctcctcatctatggtgcatccagcagggccactggcatcccagacaggttcagtggcagtgggtctgggacagacttcactctcaccatcagcagactggagcctgaagattttgcagtgtattactgtcagcagtatggtagctcaccctggacgttcggccaagggaccaaggtggaaatcaaac

SEQ ID NO: 2549 - DNA, 331 bp, Homo sapiens
cagtctgtgctgactcagccaccctcagcgtctgggacccccgggcagagggtcaccatctcttgttctggaggcagctccaacatcggaagtaatactgtaaactggtaccagcaactccccggatcggcccccaaactcctcatctataataataatcagcggccctcaggggtccctgaccgattctctggctccaagtctggcacctcagcctccctggccatcagtgggctccagtctgaggatgaggctgattattactgtgcaacatgggatgacagcctgaatggtccggtgttcggcggagggaccaagctgaccgtcctag

SEQ ID NO: 2550 - DNA, 337 bp, Homo sapiens
gatattgtgatgagtcagtctccactctccctgcccgtcacccctggagagccggcctccatctcctgcaggtctagtcagagcctcctgcatagtaatggatacaactatttggattggtacctgcagaagccagggcagtctccacagctcctgatctatttgggttctgatcgggcctccggggtccctgacaggttcagtggcagtggatcaggcacagattttacactgaaaatcagcagagtggaggctgaggatgttggggtttattactgcatgcaagctctacaaactccttggacgttcggccaagggaccaaggtggaaatcaaac

SEQ ID NO: 2551 - DNA, 337 bp, Homo sapiens
cactctgccctgactcagcctgcctccgtgtctgggtctcctggacagtcgatcaccatctcctgcactggaaccagcagtgacgttggtggttataactatgtctcctggtaccaacaacacccaggcaaagcccccaaactcatgatttatgatgtcagtactcggccctcaggggtttctcatcgcttctctggctccaagtctggcaacacggcctccctgaccatctctgggctccaggctgaggacgaggctgattattactgcagctcatatacaagcagcagcacccccctttatgtcttcggaactgggaccacggtcatcgtcctag

SEQ ID NO: 2552 - DNA, 340 bp, Homo sapiens; identical to SEQ ID NO: 2363

SEQ ID NO: 2553 - DNA, 322 bp, Homo sapiens
gccatccggataacccagtctccatcctcactctctgcatctacaggagacagagtcaccatcacttgtcgggcgagtcagggtattagcagttatttagcctggtatcagcaaaaaccagggaaagcccctaagctcctgatctatgctgcatccactttgcaaagtggggtcccatcaaggttcagcggcagtggatctgggacagatttcactctcaccatcagctgcctgcagtctgaagattttgcaacttattactgtcaacagtattatagttacccgctcactttcggcggagggaccaaggtggagatcaaac

SEQ ID NO: 2554 - DNA, 325 bp, Homo sapiens
tcctatgagctgacacagccaccctcggtgtcagtgtccccaggacaaacggccaggatcacctgctctggagatgcattgccaaaaaaatatgctttttggtaccagcagaagtcaggccaggcccctgtgctggtcatctttgaggacagcaaacgaccctccgggatccctgagagattctctggctccagctcagggacaatggccaccttgactatcagtggggcccaggtggaggatgaagctgactactactgttactcaacagacagcagtggtaatcattgggtgttcggcggagggaccaagctgaccgtcctag

SEQ ID NO: 2555 - DNA, 334 bp, Homo sapiens
aattttatgctgactcagccccactctgtgtcggagtctccggggaagacggtaaccatctcctgcacccgcagcagtggcagcattgccagcaactatgtgcagtggtaccagcagcgcccgggcagtgcccccaccactgtgatctatgaggataaccaaagaccctctggggtccctgatcggttctctggctccatcgacagctcctccaactctgcctccctcaccatctctggactgaagactgaggacgaggctgactactactgtcagtcttatgatagcagcacccgttgggtgttcggcggagggaccaagctgaccgtcctag

SEQ ID NO: 2556 - DNA, 331 bp, Homo sapiens
cagtctgtgctgactcagccaccctcagcgtctgggacccccgggcagagggtcaccatctcttgttctggaagcaactccaacatcggaattaattatgtatactggtaccagcagctcccaggaacggcccccaaactcctcatctataggaataatcagcggccctcaggggtccctgaccgattctctggctccaagtctggcacctcagcctccctggccatcagtggcctccggtccgaggatgaggctgattattactgtgcagcatgggatgacagcctgagtgtcgtggtattcggcggagggaccaagctgaccgtcctag

SEQ ID NO: 2557 - DNA, 334 bp, Homo sapiens
cagtctgtgctgacgcagccgccctcactgtctggggccccagggcagagggtcaccatctcctgcactgggggcagctccaacatcggggcaggttatgatgtacactggtaccagcagcttccaggaacagcccccaaactcctcatctatggtaacagcaatcggccctcaggggtccctgaccgattctctggctccaagtctggcacctcagcctccctggccatcactgggctccaggctgaggatgagggtgattattactgccagtcctttgacagcagcctgactggtgtggttttcggcggagggaccaagctgaccgtcctag

SEQ ID NO: 2558 - DNA, 331 bp, Homo sapiens
cagtctgccctgactcagcctgcctccgtgtctgggtctcctggacagtcgatcaccatctcctgcactggaaccagcagtgacgttggtggttataactatgtctcctggtaccaacaacacccaggcaaagcccccaaactcatgatttatgatgtcagtaatcggccctcaggggtttctaatcgcttctctggctccaagtctggcaacacggcctccctgaccatctctgggctccaggctgaggacgaggctgattattactgcagctcatatacaagcagcagcactcgggaattcggcggagggaccaagctgaccgtcctag

SEQ ID NO: 2559 - DNA, 325 bp, Homo sapiens
gacatccagatgacccagtctccatcctccctgtctgcatctgtaggagacagagtcaccatcacttgccgggcaagtcagagcattagctcctatttaaattggtatcagcagaaaccagggaaagcccctaagctcctgatctctgctgcatccagtttgcgaagtggggtcccatcaaggttcagtggcagtggatctgggacagattacactctcaccatcagcagtctgcaacctgaagattttgcaacttactactgtcaacagagttacagtacccctatgtacacttttggccaggggaccaagctggagatcaaac

SEQ ID NO: 2560 - DNA, 340 bp, Homo sapiens
gatgttgtgatgactcagtctccactctccctgcccgtcacccttggacagccggcctccatctcctgcaggtctagtcaaagcctcgtacacagtgatggaaacacctacttgaattggtttcagcagaggccaggccaatctccaaggcgcctaatttataaggtttctaaccgggactctggggtcccagacagattcagcggcagtgggtcaggcactgatttcacactgaaaatcagcagggtggaggctgaggatgttggggtttattactgcatgcaaggtacacactggcctccctggacgttcggccaagggaccaaggtggaaatcaaac

SEQ ID NO: 2561 - DNA, 331 bp, Homo sapiens
cagtctgtgctgacgcagccgccctcagtgtctggggccccagggcagagggtcaccatctcctgcactgggagcagctccaacatcggggcaggttatgatgtacactggtaccagcagcttccaggaacagcccccaaactcctcatgtatggtaacagcaatcggccctcaggggtccctgaccgattctctggctccaagtctggcacctcagcctccctggccatcactgggctccaggctgaggatgaggctgattattactgccagtcctatggcagcagcctgagtgtgctattcggcggagggaccaagctgaccgtcctag

SEQ ID NO: 2562 - DNA, 322 bp, Homo sapiens
tcctatgagctgactcagccaccctcagtgtccgtgtccccaggacagacagccaccatcacctgctccggagaaaaattgggggataaatatgcttgctggtatcagcagaggccaggccagtcccctgtgctggtcatctatcaagataccaagcggccctcagggatccctgagcgattctctggctccaactctgggaacacagccactctgaccatcagcgggacccaggctatggatgaggctgactattactgtcaggcgtgggacagcagcaccctttatgtcttcggaactgggaccaaggtcaccgtcttag

SEQ ID NO: 2563 - DNA, 323 bp, Homo sapiens
gaaatagtgttgacgcagtctccaggcaccctgtctttgtctccggggcaaagagcctccctctcctgcagggccagtcagagtgttaataggtactatatagcctggtaccaacagaagtctggccagcctcccaggctcctcatctatggtgcgtccgacagggccactggcgtcccagacagattcagtggcagtgggtctgggacagacttcactctcaccattgacagactggagcctgaagacttagcagtgtattactgtcagctgtatgatagttacgtgttcactttcggccctgggaccaaagtggaaatcaa

SEQ ID NO: 2564 - DNA, 322 bp, Homo sapiens
tcctatgtgctgactcagccaccctcggtgtcagtggccccaggaaagacggccaggattacctgtgggggaaacaacattggaagtaaaagtgtgcactggtaccagcagaagccaggccaggcccctgtgctggtcgtctatgatgatagcgaccggccctcagggatccctgagcgattctctggctccacctctgggaacacggccaccctgaccatcaccagggtcgaagccggggatgaggccgactattattgtcaggtgtgggatagtagtagtgatcgagtattcggcggagggaccaagctgaccgtcctag

SEQ ID NO: 2565 - DNA, 328 bp, Homo sapiens
gaaattgtgttgacgcagtctccaggcaccctgtctttgtctccaggggaaagagccaccctctcctgcagggccagtcagagtgttagcagcagctacttagcctggtaccagcagaaacctggccaggctcccaggctcctcatctatggtgcatccagcagggccactggcatcccagacaggttcagtggcagtgggtctgggacagacttcactctcaccatcagcagactggagcctgaagattttgcagtctattactgtcaccagtttggtgtctcacctccgaacacttttggccaggggaccaagctggagatcaaac

SEQ ID NO: 2566 - DNA, 327 bp, Homo sapiens
gaaattgtgttgacgcagtctccaggcaccctgtctttgtctccaggggaaagagccaccctctcctgcagggccagtcagagtgttagcagcagctacttagcctggtaccagcagaaacctggccaggctcccaggctcctcatctatggtgcatccagcagggccactggcatcccagacaggttcagtggcagtgggtctgggacagacttcactctcaccatcagcagactggagcctgaagattttgcagtgtattactgtcagcagtatggtagctcacctgaggcactttcggccctgggaccaaagtggatatcaaac

SEQ ID NO: 2567 - DNA, 317 bp, Homo sapiens
catccagttgacccagtctccatcctccctgtctgcatctgtaggagacagagtcaccatcacttgccgggccagtcagggcattagcagttatttagcctggtatcagcaaaaaccagggaaagcccctaagctcctgatctatgctgcatccactttgcaaagtggggtcccatcaaggttcagcggcagtggatctgggacagatttcactctcaccatcagcagcctgcagcctgaagattttgcaacttattactgtcaacagcttaatagttacctttctttcggcggagggaccaaggtggagatcaaac

SEQ ID NO: 2568 - DNA, 325 bp, Homo sapiens
gaaatagtgatgacgcagtctccagccaccctgtctgtgtctccaggggaaagagccaccctctcctgcagggccagtcagagtgttagcagcaacttagcctggtaccagcagaaacctggccaggctcccaggctcctcatctatggtgcatccaccagggccactggtatcccagccaggttcagtggcagtgggtctgggacagagttcactctcaccatcagcagcctgcagtctgaagattttgcagtttattactgtcagcagtataataactggcctccgatcaccttcggccaagggacacgactggagattaaac

SEQ ID NO: 2569 - DNA, 328 bp, Homo sapiens
cagtctgccctgactcagcctgcctccgtgtctgggtctcctggacagtcgatcaccatctcctgcactggaaccagcagtgatgttgggacttataaccttgtctcctggtaccaacagcacccaggcaaagcccccaaactcatgatttatgaggtcagtaagcggccctcaggggtttctaatcgcttctctggctccaagtctggcaacacggcctccctgacaatctctgggctccaggctgaggacgaggctgattattactgctgctcatatgcaggtagtagaactttgccattcggcggagggaccaagctgaccgtcc

SEQ ID NO: 2570 - DNA, 316 bp, Homo sapiens
gatattgtgatgacccagaccccactctctctgtccgtcacccctggacagccggcctccatctcctgcaagtctagtcagagcctcctgcatagtgatggaaagacctatctgtattggtacctgcagaagccaggccagtctccacagctcctgatctatgaagtttccagccggttctctggagtgccagataggttcagtggcagcgggtcagggacagatttcacactgaaaatcaggcgggtggaggctgaggatgttggggtttattagtgaatgcaaggtatacaccttcgtggactggagattaaac

SEQ ID NO: 2571 - DNA, 331 bp, Homo sapiens; identical to SEQ ID NO: 874

SEQ ID NO: 2572 - DNA, 328 bp, Homo sapiens
gagattgtgttgacgcagtctccaggcaccctgtctttgtctccaggggaaagagccaccctctcctgcagggccagtcagagtgttagcagtagctacttagcctggtaccagcagaaacctggccaggctcccaggctcctcatctatggtgcatccagcagggccactggcatcccagacaggttcagtggcagtgggtctgggacagacttcactctcaccatcagcagactggagcctgaagattttgcagtgtattactgtcagcagtatggtagctcacctccgatcaccttcggccaagggacacgactggagattaaac

SEQ ID NO: 2573 - DNA, 328 bp, Homo sapiens
gaaatagtgatgacgcagtctccagccaccctgtctgtgtctccaggggaaagagttgccctctcctgcagggccagtcagagtgttagcagcaacttagcctggtaccagcagaaacctggccaggctcccaggctcctcatctatggtgcatccaccagggccactgatatcccagccaggttcagtggcagtgggtctgggacagagttcactctcagcatcagcagcctgcagtctgaagattttgcagtttattactgtcagcagtatgataactggccacctgtattcactttcggccctgggaccaaagtggatttcaaac

SEQ ID NO: 2574 - DNA, 334 bp, Homo sapiens
aattttatgctgactcagccccactctgtgtcggagtctccggggaagacggtaaccatctcctgcaccggcagcagtggcagcattgccagcaactatgtgcagtggtaccagcagcgcccgggcagtgcccccaccactgtgatctatgaggataaccaaagaccctctggggtccctgatcggttctctggctccatcgacagctcctccaactctgcctccctcaccatctctggactgaagactgaggacgaggctgactactactgtcagtcttatgatggcagcatcggtgtggtattcggcggagggaccaagctgaccgtcctag

SEQ ID NO: 2575 - DNA, 322 bp, Homo sapiens
gacatccagatgacccagtctccatcctccctgtctgcatctgtaggagacagagtcaccatcacttgccaggcgagtcaggacattagtaattatttaaattggtatcagcagaaaccagggaaagcccctaagctcctgatctacgatgcatccaatttggaaacaggggtcccatcaaggttcagtggaagtggatctgggacagattttactttcaccatcagcagcctgcagcctgaagatattgcaacatattactgtcaacagtatgataatctcccgatcaccttcggccaagggacacgactggagattaaac

SEQ ID NO: 2576 - DNA, 325 bp, Homo sapiens
gacatccagatgacccagtctccatcctccctgtctgcatctgtaggagacagagtcaccatcacttgccgggcaagtcagagcattagcagctatttaaattggtatcagcagaaaccagggaaagcccctaagctcctgatctatgctgcatccagtttgcaaagtggggtcccatcaaggttcagtggcagtggatctgggacagatttcactctcaccatcagcagtctgcaacctgaagattttgcaacttactactgtcaacagagttacagtacccctatattcactttcggccctgggaccaaggtggatatcaaac

SEQ ID NO: 2577 - DNA, 331 bp, Homo sapiens
aattttatgctgactcagccccactctgtgtcggagtctccggggaagacggtaaccatctcctgcaccggcagcagtggcagcattgccagcaactatgtgcagtggtaccagcagcgcccgggctgtgcccccaccactgtgatctatgaagataaccaaagaccctctggggtccctgatcggttctctggctccgtcgacagctcctccaactctgcctccctcaccatctctggactgaagactgaggacgaggctgactactactgtcagtcttatgatggcagcaatgtggtcttcggcggagggaccaagctgaccgtcctag

SEQ ID NO: 2578 - DNA, 319 bp, Homo sapiens
gacatccagatgacccagtctccttccaccctgtctgcatctgtaggagacagagtcaccatcacttgccgggccagtcagagtattagtagctggttggcctggtatcagcagaaaccagggaaagcccctaagctcctgatctataaggcatctagtttagaaagtggagtcccatcaaggttcagcggcagtggatctgggacagaattcactctcaccatcagcggcctgcagcctgatgattttgcaacttattactgccaacagtataatagttatttctctttcggccctgggaccaaagtggatatcaaac

SEQ ID NO: 2579 - DNA, 322 bp, Homo sapiens
gacatccagatgacccagtctccagcctccctgtctgcatctgtaggagacagagtcaccatcacttgccgggcaagtcagagtgttagtagttatttaaattggtatcagcaaaaaccagggaaagcccctaagctcctgatctttactgcatccagtttgcaaagtggggtcccatcaaggttcagtggcagtggatctgggacacatttcactctcaccatcagcagtctgctgcctgaggattttgcaacttactactgtcagcacagtttcagtaccccgtacacttttggccaggggaccaagctggagatcaaac

SEQ ID NO: 2580 - DNA, 340 bp, Homo sapiens; identical to SEQ ID NO: 905

SEQ ID NO: 2581 - DNA, 328 bp, Homo sapiens
cagtctgccctgactcagcctgcctccgtgtctgggtctcctggacagtcgatcaccatctcctgcactggaaccagcagtgacgttggtggttataactatgtctcctggtaccaacaacacccaggcaaagcccccaaactcatgatttatgatgtcagtaatcggccctcaggggtttctaatcgcttctctggctccaagtctggcaacacggcctccctgaccatctctgggctccaggctgaggacgaggctgattattactgcagctcatatacaagcagcagcgtggtattcggcggagggaccaagctgaccgtcctag

SEQ ID NO: 2582 - DNA, 319 bp, Homo sapiens
tcctatgagctgactcagccaccctcagtgtccgtgtccccaggacagacagccagcattacctgctctggagataaattgggggataaatatgcttgctggtatcagcagaagccaggccagtcccctgtgctggtcatctatcaagatagcaagcggccctcagggatccctgagcgattctctggctccaactctgggaacacagccactctgaccatcagcgggacccaggctatggatgaggctgactattactgtcagacgtgggacagcagccctgtggtattcggcggagggaccaggctgaccgtcctag

SEQ ID NO: 2583 - DNA, 325 bp, Homo sapiens
gacatccagatgacccagtctccatcctccctgtctgcatctgtaggagacagcgtcaccatcacttgccgggcaggtcagaccattggcagctatttaaattggtatcagcagagaccagggaaagcccctaagctcctgatctatgctgcatccagtttgcaaagtggggtcccatcaaggttcagtggcagtggatctgggacagatttcactctcaccatcagcagtctgcaacctgcagattttgcaacttactactgtcaacagagttacagtagccccccgtggacgttcggccaagggaccaaagtggaaatcaaac

SEQ ID NO: 2584 - DNA, 325 bp, Homo sapiens
gaaattgtgttgacgcagtctccaggcaccctgtctttgtctccaggggaaagagccaccctctcctgcagggccagtcagagtgttagcagcagctacttagcctggtaccagcagaaacctggccaggctcccaggctcctcatctatggtgcatccagcagggccactggcatcccagacaggttcagtggcagtgggtctgggacagacttcactctcaccatcagcagactggagcctgaagattttgcagtgtattactgtcagcagtatggtagctcattttggacgttcggccaagggaccaaggtggaaatcaaac

SEQ ID NO: 2585 - DNA, 328 bp, Homo sapiens
gaaattgtgttgacgcagtctccaggcaccctgtctttgtctccaggggaaagagccaccctctcctgcagggccagtcagagtattagcagcagctacttagcctggtaccagcagaaacctggccaggctcccaggctcctcatctatggtgcatccaacagggccactggcatcccagacaggttcactggcagtgggtctgggacagacttcactctcaccatcagcagactggagcctgaagattttgcagtgtattactgtcagcagtatggtaactcacctccctggacgttcggccaagggaccaaggtggaaatcaaac

SEQ ID NO: 2586 - DNA, 322 bp, Homo sapiens; identical to SEQ ID NO: 1737

SEQ ID NO: 2587 - DNA, 319 bp, Homo sapiens; identical to SEQ ID NO: 1658

SEQ ID NO: 2588 - DNA, 319 bp, Homo sapiens
tcctatgagctgactcagccaccctcagtgtccgtgtccccaggacagacagccagcatcacctgctctggagataaaatgggggataaatatgcttgctggtatcaacagaagccaggccagtcccctgtgctggtcatctatcaagatagcaagcggccctcagggatccctgagcgattctctggctccaactctgggaacacagccactctgaccatcagcgggacccaggctatggatgaggctgactattactgtcaggcgtgggacagcagcactggggtcttcggaactgggaccaaggtcaccgtcctag

SEQ ID NO: 2589 - DNA, 325 bp, Homo sapiens
gaaattgtgttgacgcagtctccaggcaccctgtctttgtctccaggggaaagagccaccctctcctgcagggccagtcagagtgttagcagcagctacttagcctggtaccagcagaaacctggccaggctcccaggctcctcatctatggtgcatccagcagggccactggcatcccagacaggttcagtggcagtgggtctgggacagacttcactctcaccatcagcagactggagcctgaagattttgcagtgtattactgtcagcagtatggtagctcaacgggaacttttggccaggggaccaagctggagatcaaac

SEQ ID NO: 2590 - DNA, 334 bp, Homo sapiens
cagcttgtgctgactcaatcgccctctgcctctgcctccctgggagcctcggtcaagctcacctgcactctgagcagtgggcacagcagctacgccatcgcatggcatcagcagcagccagagaagggccctcggtacttgatgaagcttaacagtgatggcagccacagcaagggggacgggatccctgatcgcttctcaggctccagctctggggctgagcgctacctcaccatctccagcctccagtctgaggatgaggctgactattactgtcagacctggggcactggcattcaggtattcggcggagggaccaagctgaccgtcctag

SEQ ID NO: 2591 - DNA, 325 bp, Homo sapiens
gacatccagatgacccagtctccatcctccctgtctgcatctgtaggagacagagtcaccatcacttgccgggcaagtcagagcattagcagctatttaaattggtatcagcagaaaccagggaaagcccctaagctcctgatctatgctgcatccagtttgcaaagtggggtcccatcaaggttcagtggcagtggatctgggacagatttcactctcaccatcagcagtctgcaacctgaagattttgcaacttactactgtcaacagagttacagtacccccatgtacacttttggccaggggaccaagctggagatcaaac

SEQ ID NO: 2592 - DNA, 328 bp, Homo sapiens
tcctatgtgctgactcagccaccctcggtgtcactggccccaggaaagacggccaggattacctgtgggggaaacgacattggaagtaaaagtgtgcactggtaccagcagaagccaggccaggcccctgtgctggtcgtctatgatgatagcgaccggccctcagggatccctgagcgattctctggctccaactctgggaacacggccaccctgaccatcagcagggtcgaggccggggatgaggccgactattactgtcaggtgtgggatagtagtggtgatcatttttatgtcttcggaactgggaccaaggtcaccgtcctag

SEQ ID NO: 2593 - DNA, 325 bp, Homo sapiens
gaaattgtgttgacacagtctccagccaccctgtctttgtctccaggggaaagagccaccctctcctgcagggccagtcagagtgttagcagctacttagcctggtaccaacagaaacctggccaggctcccaggctcctcatctatgatgcatccaacagggccactggcatcccagccaggttcagtggcagtgggtctgggacagacttcactctcaccatcagcagcctagagcctgaagattttgcagtttattactgtcagcagcgtagcaactggcctcccctcactttcggcggagggaccaaggtggagatcaaac

SEQ ID NO: 2594 - DNA, 322 bp, Homo sapiens
gccatccagatgacccagtctccatcctccctgtctgcatctgtaggagacagagtcaccatcacttgccgggcaagtcagggcattagaaatgatttaggctggtatcagcagaaaccagggaaagcccctaagctcctgatctatgctgcatctagtttacaaagtggggtcccatcaaggttcagcggcagtggatctggcacagatttcactctcaccatcagcagcctgcagcctgaagattttgcaacttattactgtctacaagattacaattacccgtacacttttggccaggggaccaagctggagatcaaac

SEQ ID NO: 2595 - DNA, 331 bp, Homo sapiens
cagtctgccctgactcagcctgcctccgtgtctgggtctcctggacagtcgatcaccatctcctgcactggaaccagcagtgacgttggtaattataagtatgtctcctggtaccaacaacacccaggcaaagcccccaaactcatgatttatgatgtcagtaaacggccctcaggggtttctaatcgcttctctggctccaagtctggctacacggcctccctgaccatctctgggctccaggctgaggacgaggctgattattactgcagctcatatacaagcagcggcactctgctattcggcggagggaccaagctgaccgtcctag

SEQ ID NO: 2596 - DNA, 325 bp, Homo sapiens
gacatccagatgacccagtctccatcctccctgtctgcatctgtaggagacagagtcaccatcacttgccgggcaagtcagagcattagcagctatttaaattggtatcagcagaaaccagggaaagcccctaagctcctgatctatgctgcatccagtttgcaaagtggggtcccatcaaggttcagtggcagtggatctgggacagatttcactctcaccatcagcagtctgcaacctgaagattttgcaacttactactgtcaacagagttacagtacccctttgtacacttttggccaggggaccaagctggagatcaaac

SEQ ID NO: 2597 - DNA, 334 bp, Homo sapiens
cagtctgccctgactcagcctgcctccgtgtctgggtctcctggacagtcgatcaccatctcctgcactggaaccagcagtgacgttggtggttataactatgtctcctggtaccaacaacacccaggcaaagcccccaaactcatgatttatgatgtcagtagtcggccctcaggggtttctaatcgcttctctggctccaagtctggcaacacggcctccctgaccatctctgggctccaggctgaggacgaggctgattattactgcagctcatatataagcagcaacaccccctatgtcttcggaactgggaccaaggtcaccgtcctag

SEQ ID NO: 2598 - DNA, 337 bp, Homo sapiens
gatattgtgatgactcagtctccactctccctgcccgtcacccctggagagccggcctccatctcctgcaggtctagtcagagcctcctgcatagtaatggatacaactatttggattggtacctgcagaagccagggcagtctccacagctcctgatctatttgggttctaatcgggcctccggggtccctgacaggttcagtggcagtggatcaggcacagattttacactgaaaatcagcagagtggaggctgaggatgttggggtttattactgcatgcaagctctacaaactccgtacacttttggccaggggaccaagctggagatcaaac

SEQ ID NO: 2599 - DNA, 321 bp, Homo sapiens
gaaattgtgttgacacagtctccagccaccctgtctttgtctccaggggaaagagccaccctctcctgcagggccagtcagagtgttagcagctacttagcctggtaccaacagaaacctggccaggctcccaggctcctcatctatgatgcatccaacagggccactggcatcccagccaggttcagtggcagtgggtctgggacagacttcactctcaccatcagcagcctagagcctgaagattttgcagtttattactgtcagcagcgtagcaactggcctcgtctttcggccctgggaccaaagtggatatcaaac

SEQ ID NO: 2600 - DNA, 319 bp, Homo sapiens
gacttccagatgacccagtctccatcctccctgtctgcatctgtaggagacagagtcaccatcacttgccgggcaagtcagagcattagcagctatttaaattggtatcagcagaaaccagggaaagcccctaagctcctgatctatgctgcatccagtttgcaaagtggggtcccatcaaggttcagtggcagtggatctgggacagatttcactctcaccatcagcagtctgcaacctgaagattttgcaacttactactgtcaacagagttacagtaccttcactttcggccctgggaccaaagtggatatcaaac

SEQ ID NO: 2601 - DNA, 331 bp, Homo sapiens
cagtctgtgctgactcagccaccctcagcgtctgggacccccgggcagagggtcaccatctcttgttctggaagcagctccaacatcggaagtaatactgtaaactggtaccagcagctcccaggaacggcccccaaactcctcatctatagtaataatcagcggccctcaggggtccctgaccgattctctggctccaagtctggcacctcagcctccctggccatcagtgggctccagtctgaggatgaggctgattattactgtgcagcatgggatgacagcctgaatggtcgggtgttcggcggagggaccaagctgaccgtcctag

SEQ ID NO: 2602 - DNA, 322 bp, Homo sapiens; identical to SEQ ID NO: 851

SEQ ID NO: 2603 - DNA, 322 bp, Homo sapiens
gacatccagatgacccagtctccatcctccctgtctgcatctttaggagacagagtcaccatcacttgccgggcgagtcagggcattagtaattatttagcccggtatcagcagaaaccagggaaagttcctaagctcctgatctatgctgcatgcgctttgcaatcaggggtcccatctcggttcagtggcagtggatctgggacagatttcactctcaccatcagcagcctgcagcctgaagatgttgcaacttattactgtcaacagtattatagttaccctcggacgttcggccaagggaccaaggtggaaatcaaac

SEQ ID NO: 2604 - DNA, 322 bp, Homo sapiens
tcctatgagctgactcagccaccctcagtgtccgtgtccccaggacagacagccagcatcacctgctctggagataaattgggaaataaatatgcttgctggtatcagcagaagccaggccagtctgctgtgttggtcatctatcaagatgacaagcggccctcagggatccctgagcgattctctggctccaactctgggaacacagccactctgaccatcagcgggacccagcctatggatgaggctgactattactgtcagtcgtgggacagcagcactgaaggggcattcggcggagggaccaagctgaccgtcctag

SEQ ID NO: 2605 - DNA, 328 bp, Homo sapiens
gaaattgtgttgacacagtctccagccaccctgtctttgtctccaggggaaagagccaccctctcctgcagggccagtcagagtgttagcagctacttagcctggtaccaacagaaacctggccaggctcccaggctcctcatctatgatgcatccaacagggccactggcatcccagccaggttcagtggcagtgggtctgggacagacttcactctcaccatcagcagcctagagcctgaagattttgcagtttattactgtcagcagcgtagcaactggcctccggggtacacttttggccaggggaccaagctggagatcaaac

SEQ ID NO: 2606 - DNA, 328 bp, Homo sapiens; identical to SEQ ID NO: 894

SEQ ID NO: 2607 - DNA, 323 bp, Homo sapiens
gacatccagatgacccagtctccatcctcactgtctgcatctgtaggagacagagtcaccatcacttgtcgggcgagtcagggcattagcaattatttagcctggtttcagcagaaaccagggaaagcccctaagtccctgatctatgctgcatccagtttgcaaagtggggtcccatcaaagttcagcggcagtggatctgggacagatttcactctcaccatcagcagcctgcagcctgaagattttgcaacttattactgccaacagtataatagttaccccgtacacttttggccaggggaccaagctggagatcaaac

SEQ ID NO: 2608 - DNA, 322 bp, Homo sapiens; identical to SEQ ID NO: 932

SEQ ID NO: 2609 - DNA, 325 bp, Homo sapiens
tcctatgagctgacacagccaccctcggtgtcagtgtccccaggacaaacggccaggatcacctgctctggagatgcattgccaaaaaaatatgcttattggtaccagcagaagtcaggccaggcccctgtgctggtcatctatgaggacagcaaacgaccctccgggatccctgagagattctctggctccagctcagggacaatggccaccttgactatcagtggggcccaggtggaggatgaagctgactactactgctactcaacagacagcagtggtaatcatagggtattcggcggagggaccaagctgaccgtcctag

SEQ ID NO: 2610 - DNA, 325 bp, Homo sapiens
gaaattgtgttgacgcagtctccaggcaccctgtctttgtctccaggggaaagagccaccctctcctgcagggccagtcagagtgttagcagcagctacttagcctggtaccagcagaaacctggccaggctcccaggctcctcatctatggtgcatccagcagggccactggcatcccagacaggttcagtggcagtgggtctgggacagacttcactctcaccatcagcagactggagcctgaagattttgcagtgtattactgtcagcagtatggtagctcacctaagacttttggccaggggaccaagctggagatcaaac

SEQ ID NO: 2611 - DNA, 337 bp, Homo sapiens
gatgttgtgatgactcagtctccactctccctgcccgtcacccttggacagccggcctccatctcctgcaggtctagtcaaagcctcgtacacagtgatggaaacacctacttgaattggtttcagcagaggccaggccaatctccaaggcgcctaatttataaggtttctaaccgggactctggggtcccagacagattcagcggcagtgggtcaggcactgatttcacactgaaaatcagcagggtggaggctgaggatgttggggtttattactgcatgcaaggtacacactggcctaggactttcggccctgggaccaaagtggatatcaaac

SEQ ID NO: 2612 - DNA, 325 bp, Homo sapiens
tcttctgagctgactcaggaccctgctgtgtctgtggccttgggacagacagtcaggatcacatgccaaggagacagcctcagaagctattatgcaagctggtaccagcagaagccaggacaggcccctgtacttgtcatctatggtaaaaacaaccggccctcagggatcccagaccgattctctggctccagctcaggaaacacagcttccttgaccatcactggggctcaggcggaagatgaggctgactattactgtaactcccgggacagcagtggtaaccatgaagtgttcggcggagggaccaagctgaccgtcctag

SEQ ID NO: 2613 - DNA, 322 bp, Homo sapiens
gacatccagatgacccagtctccatcctccctgtctgcatctgtaggagacagagtcaccatcacttgccgggcaagtcagagcattagcagctatttaaattggtatcagcagaaaccagggaaagcccctaagctcctgatctatgctgcatccagtttccaaagtggggtcccatcaaggttcagtggcagtggatctgggacagatttcactctcaccatcagcagtctgcaacctgaagattttgcaacttactactgtcaacagagttacagtaccccgtacacttttggccaggggaccaaggtggagatcaaac

SEQ ID NO: 2614 - DNA, 334 bp, Homo sapiens
cagtctgccctgactcagcctgcctccgtgtctgggtctcctggacagtcgatcaccatctcctgcactggaaccagcagtgacgttggtggttatgactttgtctcctggtaccaacaacacccaggcaaagcccccaaactcatgatttatgatgacattaatcggccctcaggggtttctaatcgcttctctggctccaagtctggcaacacggcctccctgaccatctctgggctccaggctgaggacgaggctgattattactgcagctcatatacaagcagcagcacttcttcggtgttcggcggagggaccaagctgaccgtcctag

SEQ ID NO: 2615 - DNA, 331 bp, Homo sapiens
cagtctgtgctgactcagccaccctcagcgtctgggacccccgggcagagggtcaccatctcttgttctggaagcagctccaacatcggaagtaatactgtaaactggtaccagcagctcccaggaacggcccccaaactccgcatctatagtaatgatcagcggccctcaggggtccctgaccgattctctggctccaagtctggcacctcagcctccctggccatcagtgggctccagtctgaggatgaggctgattattactgtgcagcatgggatgacagcctaaatggtcctgtgttcggaggaggcacccagctgaccgtcctcg

SEQ ID NO: 2616 - DNA, 334 bp, Homo sapiens
cagtctgtgctgacgcagccgccctcagtgtctggggccccagggcagagggtcaccatctcctgcactgggagcagctccaacatcggggcaggttatgatgtacactggtaccagcagcttccaggaacagcccccaaactcctcatctatggtaacagcaatcggccctcaggggtccctgaccgattctctggctccaagtctggcacctcagcctccctggccatcactgggctccagggtgaggatgaggctgattattactgccagtcctatgacagcagcctgagtgccgtggtattcggcggagggaccaagctgaccgtcctag

SEQ ID NO: 2617 - DNA, 322 bp, Homo sapiens
gaaatagtgatgacgcagtctccagccaccctgtctgtgtctccaggggaaagagccaccctctcctgcagggccagtcagagtgttagcagcaacttagcctggtaccagcagaaacctggccaggctcccaggctcctcatctatggtgcatccaccagggccactggtatcccagccaggttcagtggcagtgggtctgggacagagttcactctcaccatcagcagcctgcagtctgaagattttgcagtttattactgtcagcagtataataactgggccctcacttttggccaggggaccaagctggagatcaaac

SEQ ID NO: 2618 - DNA, 326 bp, Homo sapiens
gaaatagtgatgacgcagtctccagccaccctgtctgtgtctccaggggaaagagccaccctctcctgcagggccagtcagagtgttagcagcaacttagcctggtaccagcagaaacctggccaggctcccaggctcctcatgtatggtgcatccaccagggccactggtctcccagccaggttcagtggcagtgggtctgggacagagttcactctcaccatcagcagcctgcagtctgaagattttgcagtttattactgtcagcagtatgataactggcctccggggcccacttttggccaggggaccaagctggagatcaa

SEQ ID NO: 2619 - DNA, 331 bp, Homo sapiens
cagtctgccctgactcagcctcgctcagtgtccgggtctcctggacagtcagtcaccatctcctgcactggaaccagcagtgatgttggtggttataagtatgtctcctggtaccaacagcacccaggcaaagcccccaaactcatgatttatgatgtcagtgagcggccctcaggggtccctgatcgcttctctggctccaagtctggcaacacggcctccctgaccatctctgggctccaggctgaggatgaggctgattattactgctgctcatatgcaggcaggttcactaaggtcttcggaactgggaccaaggtcaccgtcctag

SEQ ID NO: 2620 - DNA, 325 bp, Homo sapiens
gaaattgtgttgacgcagtctccaggcaccctgtctttgtctccaggggaaagagccaccctctcctgcagggccagtcagagtgttagcagcagctacttagcctggtaccagcagaaacctggccaggctcccaggctcctcatctatggtgcatccagcagggccactggcatcccagacagattcagtggcagtgggtctgggacagacttcactctcactatcagtagactggagcctgaagattttgcagtgttttactgtcagcagtatggttcctcaccgcagacgttcggccaagggaccaaggtggaaatcaaac

SEQ ID NO: 2621 - DNA, 334 bp, Homo sapiens
cagtctgtgctgacgcagccgccctcagtgtctggggccccagggcagagggtcaccatctcctgcactgggagcagctccaacatcggggcaggttatgatgtacactggtatcagcagcttccaggaacagcccccaaactcctcatctatggtaacagcaatcggccctcaggggtccctgaccgattctctggctccaagtctggcacctcagcctccctggccatcactgggctccaggctgaggatgaggctgattattactgccagtcctatgacagcagcctgagtacttcgatgttcggcggagggaccaagctgaccgtcctag

SEQ ID NO: 2622 - DNA, 322 bp, Homo sapiens
gacatccagatgacccagtctccatcctccctgtctgcatctgtaggagacagagtcaccatcacttgccgggcaagtcagagcattagcagctatttaaattggtatcagcagaaaccagggaaagcccctaagctcctgatctatgctgcatccagtttgcaaagtggggtcccatcaaggttcagtggcagtggatctgggacagatttcactctcaccatcagcagtctgcaacctgaagattttgcaacttactactgtcaacagagttacagtaccccttgcactttcggccctgggaccaaagtggatatcaaac

SEQ ID NO: 2623 - DNA, 337 bp, Homo sapiens
gatattgtgatgactcagtctccactctccctgcccgtcacccctggagagccggcctccatctcctgcaggtctactcagagcctcctgcatagtgatggatacaactatttggattggtacctgcagaagccagggcagtctccacagctcctgatctatttgggttctaatcgggcctccggggtccctgacaggttcagtggcagtacatcaggcacagattttacactgaaaatcagcagagtggaggctgaggatgttggggtttattactgcatgcaagctctacaaactcccatcaccttcggccacgggacacgactggagattaaac

SEQ ID NO: 2624 - DNA, 337 bp, Homo sapiens
cagtctgccctgactcagcctgcctccgtgtctgggtctcctggacagtcgatcaccatctcctgcactggaaccagcagtgacgttggtgattataactatgtctcctggtaccaacaacacccaggcaaagcccccaaactcatgatttttgatgtcagtaatcggccctcaggggtttctattcgcttctctggctccaagtctggcaacacggcctccctgaccatctctgggctccaggctgaggacgaggctgattattactgcagctcatatacaagcagcagcacttccaattgggtgttcggcggagggaccaaggtgaccgtcctag

SEQ ID NO: 2625 - DNA, 325 bp, Homo sapiens
gacatccagttgacccagtctccatccttcctgtctgcatctgtaggagacagagtcaccatcacttgccgggccagtcagggcattagcagttatttagcctggtatcagcaaaaaccagggaaagcccctaagctcctgatctatgctgcatccactttgcaaagtggggtcccatcaaggttcagcggcagtggatctgggacagaattcactctcacaatcagcagcctgcagcctgaagattttgcaacttattactgtcaacagcttaatagttaccctccgatcaccttcggccaagggacacgactggagattaaac

SEQ ID NO: 2626 - DNA, 319 bp, Homo sapiens
tcctatgagctgactcagccaccctcagtgtccgtgtccccaggacagacagccagcatcacctgctctggagataaattgggggataaatatgcttcctggtatcagcagaagccaggccagtcccctgtactggtcatctatcaagatgacaagcggccctcagggatccctgagcgattctctggctccaactctgggaacacagccactctgaccatcagcgggccccaggctatggatgaggctgactatttctgtcaggcgtgggacagcaccactggggtgttcggcggagggaccaggttgaccgtcctag

SEQ ID NO: 2627 - DNA, 322 bp, Homo sapiens
gacatccagatgacccagtctccatcctccctgtctgcatctgtaggagacagagtcaccatcacttgccgggcaagtcagagcattagcagctatttaaattggtatcagcagaaaccagggaaagcccctaaactcctgatctatgctgcatccagtttgcaaagtggggtcccatcaaggttcagtggcagtggatctgggacagatttcactctcaccatcagcagtctgcaacctgaagattttgcaacttactactgtcaacagagttacagtacccctcagacgttcggccaagggaccaaggtggaaatcaaac

SEQ ID NO: 2628 - DNA, 331 bp, Homo sapiens
cagtctgccctgactcagcctcgctcagtgtccgggtctcctggacagtcagtcaccatctcctgcactggaaccagcagtgatgttggtggttataactatgtctcctggtaccaacagcacccaggcaaagcccccaaactcatgatttatgatgtcagtaagcggccctcaggggtccctgatcgcttctctggctccaagtctggcaacacggcctccctgaccatctctgggctccaggctgaggatgaggctgattattactgctgctcatatgcaggcagatacacttgggtgttcggcggagggaccaagctgaccgtcctag

SEQ ID NO: 2629 - DNA, 331 bp, Homo sapiens
cagtctgccctgactcagcctcgctcagtgtccgggtctcctggacagtcagtcaccatctcctgcactggaaccagcagtgatgttggtggttataactatgtttcctggtaccaacagcacccaggcaaagcccccaaactcatgatttatgatgtcactaagcggccctcaggggtccctgatcgcttctctggctccaagtctggcaacacggcctccctgaccatctctgggctccaggctgaggatgaggctgattattattgctgctcatatgcaggcaggtacaccctggtattcggcggagggaccaagctgaccgtcctag

SEQ ID NO: 2630 - DNA, 331 bp, Homo sapiens
cagtctgtgctgactcagccaccctcagcgtctgggacccccgggcagagggtcaccatctcttgttctggaagcagctccaacatcggaagtaatactgtaaactggtaccagcagctcccaggaacggcccccaaactcctcatctatagtaataatcagcggccctcaggggtccctgaccgattctctggctccaagtctggcacctcagcctccctggccatcactgggctccagtctgaggatgaggctgattattactgtgcagcatgggatgacagcctgaatggttgggtgttcggcggagggaccaagctgaccgtcctag

SEQ ID NO: 2631 - DNA, 322 bp, Homo sapiens
gccatccggatgacccagtctccatcctcattctctgcatctacaggagacagagtcaccatcacttgtcgggcgagtcagggtattagcagttatttagcctggtatcagcaaaaaccagggaaagcccctaagctcctgatctatgctgcatccactttgcaaagtggggtcccatcaaggttcagcggcagtggatctgggacagatttcactctcaccatcagctgcctgcagtctgaagattttgcaacttattactgtcaacagtattatagttaccccctcactttcggcggagggaccaaggtggagatcaaac

SEQ ID NO: 2632 - DNA, 322 bp, Homo sapiens
gccatccggataacccagtctccatcctcactctctgcatctacaggagacagagtcaccatcacttgtcgggcgagtcagggtattagcagttatttagcctggtatcagcaaaaaccagggaaagcccctaagctcctgatctatgctgcatccactttgcaaagtggggtcccatcaaggttcagcggcagtggatctgggacagatttcactctcaccatcagctgcctgcagtctgaagattttgcaacttattactgtcaacagtattatagttacccattcactttcggccctgggaccaaagtggatatcaaac

SEQ ID NO: 2633 - DNA, 328 bp, Homo sapiens
tcctatgagctgacacagccaccctcggtgtcagtgtccccaggacaaacggccaggatcacctgctctggagatgcattgccaaaaaaatatgcttattggtaccagcagaagtcaggccaggcccctgtgctggtcatctatgaggacaccaaacgaccctccgggatccctgagagattctctggctccagctcagggacaatggccaccttgactatcagtggggcccaggtggaggatgaggctgactactactgttactcaacagacagcagtgataatcatagaagggtgttcggcggagggaccaagctgaccgtcctag

SEQ ID NO: 2634 - DNA, 331 bp, Homo sapiens
cagtctgccctgactcagcctgcctccgtgtcggggtctcctggacagtcgatcaccatctcctgcactggaaccagcagtgacgttggtggttataactatgtctcgtggtaccaacaacacccaggcaaagcccccaaactcatgacttatgatgtcagtaatcggccctcaggggtttctaatcgcttctctggctccaagtctggcaacacggcctccctgaccatctctgggctccaggctgaggacgaggctgattattactgcagctcatatacaagcagcgccacttgggtgttcggcggagggaccaagctgaccgtcctag

SEQ ID NO: 2635 - DNA, 319 bp, Homo sapiens
gaaatagtgatgacgcagtctccagccaccctgtctgtgtctccaggggaaagagccaccctctcctgcagggccagtcagagtgttagcagcaccttagcctggtaccagcagaaacctggccaggctcccaggctcctcatctatggtgcatccaccagggccactggtatcccagccaggttcagtggcagagggtctgggacagagttcactctcaccatcagcagcctgcagtctgaagattttgcagtttattactgtcagcagtataataactggttcactttcggccctgggaccaaagtggatatcaaac

SEQ ID NO: 2636 - DNA, 325 bp, Homo sapiens; identical to SEQ ID NO: 2297

SEQ ID NO: 2637 - DNA, 328 bp, Homo sapiens
gacatccagatgacccagtctccatcctccctgtctgcatctgtaggagacagagtcaccatcacttgccaggcgagtcaggacattagcaactatttaaattggtatcagcagaaaccagggaaagcccctaagctcctgatctacgatgcatccaatttggaaacaggggtcccatcaaggttcagtggaagtggatctgggacagattttactttcaccatcagcagcctgcagcctgaagatattgcaacatattactgtcaacagtatgataatctccctccagggctcactttcggccctgggaccaaagtggatatcaaac

SEQ ID NO: 2638 - DNA, 316 bp, Homo sapiens
tcctatgtgctgactcagccaccctcggtctcagtggccccaggacagacggccaggattacctgtgggggagacagcattggaagtaaaagtgtgcactggtaccagcagaggccaggccaggcccctgtgctggtcgtctatgatgatagcgaccggccctcagggatccctgagcgattctctggctccaactctgggaacacggccaccctgaccatcagcagggtcgaagccggggatgaggccgactattactgtgaggtgtgggatagtagttgggtgttcggcggagggaccaagctgaccgtcttag

SEQ ID NO: 2639 - DNA, 331 bp, Homo sapiens; identical to SEQ ID NO: 881

SEQ ID NO: 2640 - DNA, 340 bp, Homo sapiens
cagtctgtgctgacgcagccgccctcagtgtctggggccccagggcagagggtcaccatctcctgcactgggactagctccaacatcggggcaggttatgatgtccactggtaccagcagcttccaggaacagcccccaaactcctcatatatggtaacagccatcggccctcaggggtccctgaccgattctctggctccaagtctggcacctcagcctccctggccatcactgggctccaggctgaggatgaggctgattattactgccagtcctatgacagcagcctgagtggtccggggagggtattcggtggagggaccaagctgaccgtcctag

SEQ ID NO: 2641 - DNA, 376 bp, Homo sapiens
gaagtgcagctggtgcagtccggagcagaggtgaaaaagcccggggagtctctgaggatctcctgtaaggcttctggatacagctttaccacatactggatcagctgggtgcgccagatgcccgggaaaggcctggagtggatggggaggattgatcctagtgactcttataccaactacagcccgtccttccaaggccgcgtcaccatgtcagttgacaagtccatcaccactgccttcctgcagtggagtcgcctgaaggcctcggacaccgctttctattactgtgcgaggcacccgtattactatgatggcagtggtttccatccacattttgacaagtggggccagggaagcctggtcaccgtctcctcag

SEQ ID NO: 2642 - DNA, 376 bp, Homo sapiens; identical to SEQ ID NO: 2641

SEQ ID NO: 2643 - DNA, 376 bp, Homo sapiens; identical to SEQ ID NO: 2641

SEQ ID NO: 2644 - DNA, 376 bp, Homo sapiens; identical to SEQ ID NO: 2641

SEQ ID NO: 2645 - DNA, 376 bp, Homo sapiens; identical to SEQ ID NO: 2641

SEQ ID NO: 2646 - DNA, 376 bp, Homo sapiens; identical to SEQ ID NO: 2641

SEQ ID NO: 2647 - DNA, 376 bp, Homo sapiens
gaagtgcagctggtgcagtccggaacagaggtgaaaaagcccggggagtctctgaggatctcctgtaaggcttctggatacagctttaccgcatactggatcagctgggtgcgccagatgtccgggaaaggcctggagtggatggggagaattgatcctagtgactcttataccaactacagtccgtccttccaaggccgcgtcaccatgtcagttgacaagtccatcaccactgcctacctgcagtggagcagcctgaagacctcggacaccgctttgtattactgtgcgaggcacccctactattttgatggtagtggtttccatccacattttgacaactggggccagggaagcctggtcaccgtctcgtcag

SEQ ID NO: 2648 - DNA, 376 bp, Homo sapiens; identical to SEQ ID NO: 2641

SEQ ID NO: 2649 - DNA, 376 bp, Homo sapiens; identical to SEQ ID NO: 2641

SEQ ID NO: 2650 - DNA, 376 bp, Homo sapiens; identical to SEQ ID NO: 2641

SEQ ID NO: 2651 - DNA, 376 bp, Homo sapiens; identical to SEQ ID NO: 2641

SEQ ID NO: 2652 - DNA, 376 bp, Homo sapiens; identical to SEQ ID NO: 2641

SEQ ID NO: 2653 - DNA, 376 bp, Homo sapiens; identical to SEQ ID NO: 2641

SEQ ID NO: 2654 - DNA, 376 bp, Homo sapiens; identical to SEQ ID NO: 2641

SEQ ID NO: 2655 - DNA, 376 bp, Homo sapiens; identical to SEQ ID NO: 2641

SEQ ID NO: 2656 - DNA, 376 bp, Homo sapiens; identical to SEQ ID NO: 2641

SEQ ID NO: 2657 - DNA, 376 bp, Homo sapiens; identical to SEQ ID NO: 2641

SEQ ID NO: 2658 - DNA, 376 bp, Homo sapiens; identical to SEQ ID NO: 2641

SEQ ID NO: 2659 - DNA, 376 bp, Homo sapiens; identical to SEQ ID NO: 2641

SEQ ID NO: 2660 - DNA, 376 bp, Homo sapiens; identical to SEQ ID NO: 2641

SEQ ID NO: 2661 - DNA, 376 bp, Homo sapiens; identical to SEQ ID NO: 2641

SEQ ID NO: 2662 - DNA, 376 bp, Homo sapiens; identical to SEQ ID NO: 2641

SEQ ID NO: 2663 - DNA, 376 bp, Homo sapiens; identical to SEQ ID NO: 2641

SEQ ID NO: 2664 - DNA, 376 bp, Homo sapiens; identical to SEQ ID NO: 2641

SEQ ID NO: 2665 - DNA, 376 bp, Homo sapiens; identical to SEQ ID NO: 2641

SEQ ID NO: 2666 - DNA, 376 bp, Homo sapiens; identical to SEQ ID NO: 2641

SEQ ID NO: 2667 - DNA, 376 bp, Homo sapiens; identical to SEQ ID NO: 2641

SEQ ID NO: 2668 - DNA, 376 bp, Homo sapiens; identical to SEQ ID NO: 2641

SEQ ID NO: 2669 - DNA, 376 bp, Homo sapiens; identical to SEQ ID NO: 2641

SEQ ID NO: 2670 - DNA, 376 bp, Homo sapiens; identical to SEQ ID NO: 2641

SEQ ID NO: 2671 - DNA, 376 bp, Homo sapiens; identical to SEQ ID NO: 2641

SEQ ID NO: 2672 - DNA, 371 bp, Homo sapiens
gaagtgcagctggtgcagtccggaacagaggtgaaaaagcccggggagtctctgaggatctcctgtaaggcttctggatacagctttaccgcatactggatcagctgggtgcgccagctgtccgggaaaggcctggagtggatggggagaattgatcctagtgactcttataccaactacagtccgtccttccaaggccgcgtcaccatgtcagttgacaagtccctcaccactgcctacctgcagtggagcagcctgaagacctcggacaccgctttatattactgtgcgaggcacccctactattttgatggtagtggtttccatccacattttgacaactggggccagggaagcctggtcaccgtctc

SEQ ID NO: 2673 - DNA, 376 bp, Homo sapiens; identical to SEQ ID NO: 2641

SEQ ID NO: 2674 - DNA, 376 bp, Homo sapiens; identical to SEQ ID NO: 2641

SEQ ID NO: 2675 - DNA, 376 bp, Homo sapiens; identical to SEQ ID NO: 2641

SEQ ID NO: 2676 - DNA, 376 bp, Homo sapiens; identical to SEQ ID NO: 2641

SEQ ID NO: 2677 - DNA, 376 bp, Homo sapiens; identical to SEQ ID NO: 2641

SEQ ID NO: 2678 - DNA, 376 bp, Homo sapiens; identical to SEQ ID NO: 2641

SEQ ID NO: 2679 - DNA, 371 bp, Homo sapiens; identical to SEQ ID NO: 2672

SEQ ID NO: 2680 - DNA, 376 bp, Homo sapiens; identical to SEQ ID NO: 2641

SEQ ID NO: 2681 - DNA, 376 bp, Homo sapiens; identical to SEQ ID NO: 2641

SEQ ID NO: 2682 - DNA, 371 bp, Homo sapiens
gaagtgcagctggtgcagtccggaacagaggtgaaaaagcccggggagtctctgaggatctcctgtaaggcttctggatacagctttaccgcatactggatcagctgggtgcgccagctgtccgggaaaggcctggagtggatggggagaattgatcctagtgactcttataccaactacagtccgtccttccaaggccgcgtcaccatgtcagttgacaagtccctcacctctgcctacctgcagtggagcagcctgaagacctcggacaccgctttatatttctgtgcgaggcacccctactattttgatggtagtggtttccatccacattttgacaactggggccagggaagcctggtcaccgtctc

SEQ ID NO: 2683 - DNA, 376 bp, Homo sapiens; identical to SEQ ID NO: 2641

SEQ ID NO: 2684 - DNA, 376 bp, Homo sapiens; identical to SEQ ID NO: 2641

SEQ ID NO: 2685 - DNA, 376 bp, Homo sapiens
caggtcaccttgagggagtctggtcctgcgctggtgaaacccacacagaccctcacactgacctgctccttctctgggttctcactcagcactagaggaatgtgtgtgagctggatccgtcagcccccagggaaggccctggagtggcttacgctcattgattgggatggtgataaatactacagcacatctctgaagaccaggctcaccatcttcaaggacacctccaaagaccaggtggtccttacaatgaccaatatggaccctgtggacacagccacgtattactgtgcacgggcctatcaacatctaatggatacacctatggcgatctttgactactggggccagggaatcctggtcaccgtctcctcag

SEQ ID NO: 2686 - DNA, 376 bp, Homo sapiens
caggtcaccttgagggagtctggtcctgcgctggtgaaacccacacagaccctcacactgacctgcaccttctctgggttctcactcagcactagaggaatgtgtgtgagctggatccgtcagcccccagggaaggccctggagtggcttacactcattgattgggatgatgataaatactacagcacatctctgaagaccaggctcaccatctccaaggacacctccaaaaaccaggtggtccttacaatgaccaacatggaccctgtggacacagccacgtattactgtgcacgggcctatcaacatcttatggatacacctatggtgatctttgactactggggccagggaaccctggtcaccgtctcctcag

SEQ ID NO: 2687 - DNA, 376 bp, Homo sapiens; identical to SEQ ID NO: 2686

SEQ ID NO: 2688 - DNA, 376 bp, Homo sapiens
caggtcaccttgagggagtctggtcctgcgctggtgaaacccacacagaccctcacactgacctgcaccttctctgggttctcactcagcactagaggaatgtgtgtgagctgggtccgtcagcccccagggaaggccctggagtggcttacactcattgattgggatgatgataaatactacagcacatctctgaagaccagactcaccatctccaaggacacctccaaaaaccaggtggtccttacaatgaccaacatggaccctgtggacacagccacgtattactgtgcacgggcctatcaacatcttatggatacacctatggcgatctttgactactggggccagggaaccctggtcaccgtctcctcag

SEQ ID NO: 2689 - DNA, 376 bp, Homo sapiens
caggtcaccttgagggagtctggtcctgcgctggtgaaacccacacagaccctcacactgacctgcagcttctctgggttctcactcagcactagaggaatgtgtgtgagctggatccgtcagcccccagggaaggccctggagtggcttacactcattgattgggatgatgataaatactacagcacatctctgaagaccaggctcaccatctccaaggacacctccaaaaaccaggtggtccttacagtgaccaacatggaccctgtggacacagccacatattactgtgcacgggcctatcaacatcttatggatacacctatggcgatctttgactactggggccagggaaccctggtcaccgtctcctcag

SEQ ID NO: 2690 - DNA, 376 bp, Homo sapiens
caggtcaccttgagggagtctggtcctgcgctggtgaaacccacacagaccctcacactgacctgcaccttctctgggttctcactcagcactagaggaatgtgtgtgagctggatccgtcagcccccagggaaggccctggagtggcttacactcattgattgggatgatgataaatactacagcacatctctgaagaccaggctcaccatctccaaggacacctccaaaaaccaggtggtccttacaatgaccaacatggaccctgtggacacagccacctattactgtgcacgggcctatcaacatcttatggatacacctatggtgatctttgactactggggccagggaaccctggtcaccgtctcctcag

SEQ ID NO: 2691 - DNA, 364 bp, Homo sapiens
gaggtgcagctggtggagtctgggggaggcctggtcaagcctggggggtccctgagactctcctgtgcagcctctggattcagcttcagtagctatagcatgaactgggtccgccaggctccagggaaggggctggagtgggtctcatccattagtagtagtagtagttacatatactacgcagactcagtgaagggccgattcaccatctccagagacaacgccaagaactcactgtatctgcaaatgaacagcctgagagccgaggacacggctgtgtattactgtgcgagagacccagtagagatggctacaaatgcccttgactactggggccagggaaccctggtcaccgtctcctcag

SEQ ID NO: 2692 - DNA, 364 bp, Homo sapiens; identical to SEQ ID NO: 2691

SEQ ID NO: 2693 - DNA, 364 bp, Homo sapiens
gaggtgcagctggtggagtctgggggaggcctggtcaagcctggggggtccctgagactctcctgtgcagcctctggattcagcttcagtgtctataccatgaactgggtccgccaggctccagggaaggggctggagtgggtctcatccattagtagtagtagtagttacatatactacgcagactcagtgaagggccgattcaccatctccagagacaacgccaagaactcactgtatctgcaaatgaacagcctgagagccgaggacacggctgtgtattactgtgcgagagacccagtagagatggctacaaatgcccttgactactggggccagggaaccccggtcaccgtctcctcag

SEQ ID NO: 2694 - DNA, 364 bp, Homo sapiens; identical to SEQ ID NO: 2691

SEQ ID NO: 2695 - DNA, 364 bp, Homo sapiens; identical to SEQ ID NO: 2691

SEQ ID NO: 2696 - DNA, 376 bp, Homo sapiens
caggtgcagctgcaggagtcgggcccaggactggtgaagccttcggagaccctgtccctcacctgcactgtctctggtggctccatcaggagttactactggagctggatccggcagcccccagggaagggactggagtggattgggtatatctattacagtgggagcaccaactacaacccctccctcaagagtcgagtcaccatatcagtagacacgtccaagaatgagttctccctgaagctgagctctgtgaccgctgcggacacggccgtgtattactgtgcgagagagggttactatgatagtagtggttattaccaacatgatgcttttgatatctggggccaagggacaatggtcaccgtctcttcag

SEQ ID NO: 2697 - DNA, 376 bp, Homo sapiens
caggtgcagctgcaggagtcgggcccaggactggtgaagccttcggagaccctgtccctcacctgcactgtctctggtggctccatcagtagttactactggagctggatccggcagcccccagggaagggactggagtggattgggtatatctattacagtgggagcaccaactacaacccctccctcaagagtcgagtcaccatatcagtagacacgtccaagaaccagttctccctgaagctgagctctgtgaccgctgcggacacggccgtgtattactgtgcgagagagggttactatgatagtagtggttattatcaacatgatgcttttgatatctggggccaagggacaatggtcaccgtctcttcag

SEQ ID NO: 2698 - DNA, 376 bp, Homo sapiens
caggtgcagctgcaggagtcgggcccaggactggtgaagccttcggagaccctgaccctcacctgcactgtctctggtggctccatcaggagttactactggagctggatccggcagcccccagggaagggaccggagtggattggatatatccattacagtgggagcaccaactacaacccctctctcaagagtcgagtcacattatctttagactcgtccaagaaccagtgttccctgaagctgagctctgtgaccgctgcggacacggccgtgtattactgtgcgagagagggttattatgatagtagtggttattaccaacatgacgcttttgatatctggggcccagggacaatggtcaccgtctcttcag

SEQ ID NO: 2699 - DNA, 376 bp, Homo sapiens
caggtgcagctgcaggagtcgggcccaggactggtgaagccttcggagaccctgtccctcacctgcagtgtctctggtggctccatcagtagttactactggagctggatccggcagcccccagggaagggactggagtggattgggtatatctattacagtgggagttccaactacaacccctccctcaagagtcgagtcaccatatcagcagacacgtccaagaaccaggtctccctgaagctgagctctgtgaccgctgcggacacggccgtgtattactgtgcgagagaggggtactatgatagtagtggttattaccatcatgatgcttttgatatctggggccaagggacaatggtcaccgtctcttcag

SEQ ID NO: 2700 - DNA, 376 bp, Homo sapiens
caggtgcagctgcaggagtcgggcccaggactggtgaagccttcggagaccctgtccctcacctgcactgtctctggtggctccgtcactagttactactggagctggatccggcagcccccagggaagggactggagtggattgggtatatctattacagcgggagcaccaactacaacccctccctcaagagtcgagtcaccatatcagtagacacgtccaagaaccagttctccctgaagctgagctctgtgaccgctgcggacacggccgtgtattactgtgcgagagaggggtactatgatagtagtggttcttaccatcatgatgcttttgatatctggggccaagggacaatggtcaccgtctcttcag

SEQ ID NO: 2701 - DNA, 358 bp, Homo sapiens
cagatcaccttgaaggagtctggtcctacgctggtgaaacccacacagaccctcacgctgacctgcaccttctctgggttctcactcagcactagtggagtgggtgtgggctggatccgtcagcccccaggaaaggccctggagtggcttgcactcatttattgggatgatgataagcgctacagcccatctctgaagagcaggctcaccatcaccaaggacacctccaaaaaccaggtggtccttacaatgaccaacatggaccctgtggacacagccacatattactgtgcacacatgacagtggctacgattgttgactactggggccagggaaccctggtcaccgtctcctcag

SEQ ID NO: 2702 - DNA, 358 bp, Homo sapiens; identical to SEQ ID NO: 2701

SEQ ID NO: 2703 - DNA, 358 bp, Homo sapiens; identical to SEQ ID NO: 2701

SEQ ID NO: 2704 - DNA, 358 bp, Homo sapiens; identical to SEQ ID NO: 2701

SEQ ID NO: 2705 - DNA, 358 bp, Homo sapiens; identical to SEQ ID NO: 2701

SEQ ID NO: 2706 - DNA, 370 bp, Homo sapiens
caggtgcagctggtggagtctgggggaggcgtggtccagcctggggggtccctgagactctcctgtgcagcgtctggattcaccttcagtagttatggcatgcactgggtccgccaggctccaggcaaggggctggtatgggtggcatttatacggtatgatggaagtgataaatactatgcagactccgtgaagggccgattcaccatctccagagacaattccaagaacactctgtatctgcaaatgaacaccctgagagctgaggacacggctacttatttctgtgcgaaagatctattcgggcggtgggaactacatgagtggggtgactactggggccagggaaccctggtcaccgtctcctcag

SEQ ID NO: 2707 - DNA, 370 bp, Homo sapiens; identical to SEQ ID NO: 2706

SEQ ID NO: 2708 - DNA, 370 bp, Homo sapiens; identical to SEQ ID NO: 2706

SEQ ID NO: 2709 - DNA, 370 bp, Homo sapiens; identical to SEQ ID NO: 2706

SEQ ID NO: 2710 - DNA, 379 bp, Homo sapiens
cagatcaccctgaaggagtctggtcctacgctggtgaaacccacacagaccctcacgctgacttgcaccttctctgggttctcactcaggactagtggagtgggtgtgggctggatccgtcagcccccaggaaaggccctggagtggcttgcagtcatttattggaatgatgataagcgctacagcccatctctgaagagcaggctcaccatcaccaaagacacctccaaaaaccaggtggtccttacaatgaacaacatggaccctgtggacacagccacatattactgtgcacacagacggtacgacacttcggggaatccctatgcggcgggatttgactactggggccagggaaccctggtcaccgtctcctcag

SEQ ID NO: 2711 - DNA, 377 bp, Homo sapiens
cagatcaccttgaaggagtctggtcctacgctggtgaaacccacacagaccctcacgctgacctgcaccttctctgggttctcactcaccactagtggagtgagtgtgggctggatccgtcagcccccaggaaaggccctggagtggcttgcactcatttattggaatgatgatgagcactacagcccatctctgaagagcaggctcaccatcaccaaggacacctccaaaaaccaggtggtccttacaatgaccaacatggaccctgtggacacagccacatattactgtgcacacagacggtacgacacatcggggaatccctatgcggcgggatttgactactggggccagggaaccctggtcaccgtctcctc

SEQ ID NO: 2712 - DNA, 379 bp, Homo sapiens
cagatcaccctgaaggagtctggtcctacgctggtgaaacccacacagaccctcacgctgacttgcaccttctctgggttctcactcaggactagtggagtgggagtgggctggatccgtcagcccccaggaaaggccctggagtggcttgcagtcatttattggaatgatgataagcgctacagcccatctctgaagagcaggctcaccatcaccaagggcacctccaaaaaccaggtggtccttacaatgaccaacatggaccctgtggacacagccacatattactgtgcacacagacggtacgacacttcggggaatccctatgcggcgggatttgactactggggccagggaaccctggtcaccgtctcctcag

SEQ ID NO: 2713 - DNA, 379 bp, Homo sapiens
cagatcaccttgaaggagtctggtcctacgctggtgaaacccacacagaccctcacgctgagttgcaccttctctgggttctcactcagcactagtggagtgggtgtgggctggatccgtcagcccccaggaaaggccctggagtggcttgcactcatttattggagtgatgataaacactacagcccatctctgaagagcaggctcaccatcaccaaggacacctccaaaaaccaggtggtccttacaatgaccaaaatggaccctgtggacacagccacatattactgtgcacacagacggtacgacacttcggggaatccctatgcggcgggatttgactactggggccagggaaccctggtcaccgtctcctcag

SEQ ID NO: 2714 - DNA, 358 bp, Homo sapiens
gaggtgcagctggtggagtctggaggaggcttgatccagcctggggggtccctgagactctcctgtgcagcctctgggttcaccgtcagtagcaactacatgagctgggtccgccaggcttcagggaaggggctggagtgggtctcaattatttatagtggtggtaccacatattacgcagactccgtgaagggccgattcaccatctccagagacagttccaagaacaccctgtatcttcaaatgaacagcctgagagccgaggacacggccgtgtattactgtgcgagatatacggtgactacgctgtgggcttttgatatttggggccaagggacaatggtcaccgtctcttcag

SEQ ID NO: 2715 - DNA, 358 bp, Homo sapiens; identical to SEQ ID NO: 2714

SEQ ID NO: 2716 - DNA, 358 bp, Homo sapiens; identical to SEQ ID NO: 2714

SEQ ID NO: 2717 - DNA, 362 bp, Homo sapiens
caggtgcagctgcaggagtcgggcccaggactggtgaagccttcggagaccctgtccctcacctgcactgtctctggtggctccatcagtggtcactactggagctggatccggcaggcccccagggaagggactggagtggattggctatatctcttacagtgggagcaccaattacagcccctccctcaagagtcgagtcaccatatcagtagacacgtccaagaaccagttctccctgaagctgatgtctgtgaccgctgcggacacggccgtttattactgtgcgagatattattgtactaccaactgctactactttgaacactggggccagggaaccctggtcaccgtctcctcag

SEQ ID NO: 2718 - DNA, 361 bp, Homo sapiens
caagtgcagctgcaggagtcgggcccaggactggtgaagccttcggagaccctgtccctcacctgcactgtctctggtggctccatcagtagttactactggagctggatccggcaggccccagggaagggactggagtggattggctatatctcttacagtgggagcaccaattacagcccctccctcaagagtcgagtcaccatgtcagtagacacgtccaagaaccagttctccctgaagctgatgtctgtgaccgctgcggacacggccgtttattactgtgcgagatattattgtactaccaactgctactactttgaatactggggccagggaacccttgtcaccgtctcctcag

SEQ ID NO: 2719 - DNA, 361 bp, Homo sapiens
caggtgcagctgcaggagtcgggcccaggactggtgaagccttcggagaccctgtccctcacctgcactgtctctggtggctccatcagtggtcactactggagctggatccggcaggccccagggaagggactggagtggattggctatatctcttacagtgggagcaccaattacagcccctccctcaagagtcgagtcaccatatcagtagacacgtccaagaaccagttctccctgaagctgatgtctgtgaccgctgcggacacggccgtttattactgtgcgagatattattgtactaccaactgctactactttgaacactggggccagggaaccctggtcaccgtctcctcag

SEQ ID NO: 2720 - DNA, 358 bp, Homo sapiens
caggtgcagctggtggagtctgggggaggcgtggtccagcctgggaggtccctgagactctcctgtgcagcctctggattcaccttcagtagctatgctatgcactgggtccgccaggctccaggcaaggggctggagtgggtggcagttatatcatatgatggaagcaataaatactacgcagactccgtgaagggccgattcaccatctccagagacaattccaagaatacgctgtatctgcaagggaacagcctgagagctgaggacacggctgtgtattactgtgcgagaggagatggctacaattccgtctttgactactggggccagggaaccctggtcaccgtctcctcag

SEQ ID NO: 2721 - DNA, 358 bp, Homo sapiens; identical to SEQ ID NO: 2720

SEQ ID NO: 2722 - DNA, 358 bp, Homo sapiens; identical to SEQ ID NO: 2720

SEQ ID NO: 2723 - DNA, 355 bp, Homo sapiens
gaggtgcagctggtggagactggaggaggcttgatccagcctggggggtccctgagactctcctgtgcagcctctgggttcaccgtcagtagcaactacatgagctgggtccgccaggctccagggaaggggctggagtgggtctcagttatttatggcggtgataacacatattatgcagactccgtgaagggccgattcaccatctccagagacaattccaagaacacggtatatcttcaaatgaacagcctgagagccgaggacacggccgtatattactgcgcgagaggcctgggggagttgaaccgcttcgactactggggccagggaaccctggtcaccgtctcctcag

SEQ ID NO: 2724 - DNA, 355 bp, Homo sapiens
gaggtgcagctggtggagactggaggaggcttgatccagcttggggggtccctgagactctcctgtgcagcctctgggttcaccgtcagtagtaactacatgagctgggtccgccaggctccagggaaggggctggagtgggtctcagttatttatggcggtgataacacatattatgcagactccgtgaagggccgattcaccatctccagagacaattccaagaacacggtgtatcttcaaatgaacagcctgagagccgaggacacggccgtatattactgcgcgagaggcctgggggagttgaaccgcttcgactactggggccagggaaccctggtcaccgtctcctcag

SEQ ID NO: 2725 - DNA, 353 bp, Homo sapiens
ggtgcagctggtggagactggaggaggctcgatccagccgggggggtccctgagactctcctgtgcagcctctgggttcaccgtcagtagcaactacatgagctgggtccgccaggctccagggaaggggctggagtgggtctcagttatttatggcggtgataacacattctacgcagactccgtgaagggccgattcaccatctccagagacaattccaagaacacggtgtatcttcaaatgaacagcctgagagccgaggacacggccgtatattactgcgcgagaggcctgggggagttgaaccgcttcgactactggggccagggaaccctggtcaccgtctcctcag

SEQ ID NO: 2726 - DNA, 379 bp, Homo sapiens
caggtgcagttggtgcagtctggggctgacgtgaagaagcctggggcctcagtgaaggtctcctgcaaggcttctggatacaccttcagcggctactatatatactgggtgcgacaggcccctggacaagggcttgagtggatgggatggatcaaccctaacagtggtggcacagcctatgcacagaagtttcagggcagggtcaccatgacgagggacacgtccatcagcacagccaaaatggagctgaccagtctgagatctgacgacacggccgtgtattactgtgcgagaggggaaggaatgggcacatattacgatttatggagtggttattaccattattggggccagggaaccctggtcaccgtctcctcag

SEQ ID NO: 2727 - DNA, 379 bp, Homo sapiens
caggtgcagttggtgcagtctggggctgacgtgaagaagcctggggcctcagtgaaggtctcctgcaaggcttctggatactccttcagcggctactatatatactgggtgcgacaggcccctggacaagggcttgagtggatgggatggatcaaccctaacagtggtggcacagcctatgcacagaagtttcagggcagggtcaccatgacgagggacacgtccatcagcacagccaaaatggagctgagcagtctgagatctgacgacacggccgtgtattactgtgcgagaggggaaggaatgggcacatattacgatttatggagtggttattaccattattggggccagggaaccctggtcaccgtctcctcag

SEQ ID NO: 2728 - DNA, 379 bp, Homo sapiens
caggtgcagttggtgcagtctggggctgacgtgaagaagcctggggcctcagtgaaggtctcctgcaaggcttctggatacaccttcagcggctactatatatactgggtgcgacaggcccctggacaagggcttgagtggatgggatggatcaaccctaacagtggtggcacagcctatgcacagaagtttcagggcagggtcaccatgacgagggacacgtccatcagcacagccaaaatggagctgagcagtctgagatctgacgacacggccgtgtattactgtgcgagaggggaaggaatgggcacatattacgatttatggagtggttattaccattattggggccagggaaccctggtcaccgtctcctcag

SEQ ID NO: 2729 - DNA, 367 bp, Homo sapiens
gaaatgcagctggtggagtctgggggagtcgtggtacagcctggggggtccctgagactctcctgtgcagcctctggattcacctttgatgattataccatgcactgggtccgtcaagctccggggaagggtctggagtgggtctctctttttagttgggatggtggtagcacatactatgcagactctgtgaagggccgattcaccatctccagagacaacagcaaaaactccctgtatctgcaaatgaacagtctgagaactgaggacaccgccttctattactgtgccaagtcgactggtgggagctactccgaggttgcttttgatatctggggccaagggacaatggtcaccgtctcttcag

SEQ ID NO: 2730 - DNA, 367 bp, Homo sapiens
gaagtgcagctggtggagtctgggggagtcgtggtacagcctggggggtccctgagactctcctgtgcagcctctggattcacctttgatgattataccatgcactgggtccgtcaagctccggggaagggtctggagtgggtctctctttttagttgggatggtggtagcacatactatgcagactctgtgaagggccgattcaccatctccagagacagcagcaaaaactccctgtatctgcaaatgaacagtctgagaactgacgacaccgccttctattactgtgccaagtcgactggtgggagctactccgaggttgcttttgatatctggggccaagggacaatggtcaccgtctcttcag

SEQ ID NO: 2731 - DNA, 367 bp, Homo sapiens
gaagtgcagctggtggagtctgggggagtcgtggtacagcctggggggtccctgagactctcctgtgcagcctctggattcacctttgatgattataccatgcactgggtccgtcaagctccggggaagggtctggagtgggtctctctttttagttgggatggtggtagcacatactatgcagactctgtgaagggccgattcaccatctccagagacaacagcaaaaactccctgtatctgcaaatgaacagtctgagaactgaggacaccgccttctattactgtgccaagtcgactggtgggagctactccgaggttgcttttgatatctggggccaagggacaatggtcaccgtctcttcag

SEQ ID NO: 2732 - DNA, 372 bp, Homo sapiens
caggtgcagctggtgcagtctgggggaggcgtggtccagcctgggaggtccctgagactctcctgtgcagcctctggattcgtcttcagtagctatcctatgcactgggtccgccaggctccaggcaagggactggagtggatggcagttatatcatatgatggaagcaataagtatttcgcagactccgtgaagggccgattcaccatctccagagacaattccaagaacacgctgtatttggagatgaacagtctgagagctgacgacacggctgtgtattactgtgcgagcaaccacggtgactacagttatcactactactactacatggacgtctggggcaaggggaccacggtcaccgtctcctca

SEQ ID NO: 2733 - DNA, 372 bp, Homo sapiens; identical to SEQ ID NO: 2732

SEQ ID NO: 2734 - DNA, 372 bp, Homo sapiens
caggtgcagctggtggagtctgggggaggcgtggtccagcctgggaggtccctgagactctcctgtgcagcctctggattcgtcttcagtagctatcctatgcactgggtccgccaggctccaggcaagggactggagtggatggcagttatatcatatgatggaagcaataagtatttcgcagactccgtgaagggccgattcaccatctccagagacaattccaagaacacgctgtatttggaaatgaacagtctgagagctgacgacacggctgtgtattactgtgcgagcaaccacggtgactacagttatcactactactactacatggacgtctggggcaaggggaccacggtcaccgtctcctca

SEQ ID NO: 2735 - DNA, 361 bp, Homo sapiens
caggtgcagctggtggagtctgggggaggcgtggtccagcctgggaggtccctgagactctcctgtgcagcctctggattcaccttcagtagctatgctatgcactgggtccgccaggctccaggcaaggggctggagtgggtggcagttatatcatatgatggaagcaataaatactacgcagactccgtgaagggccgattcaccatctccagagacaattccaagaacacgctgtatctgcaaatgaacagcctgagagctgaggacacggctgtgtattactgtgcgagagaggtgttgcagctgggccacccttttgactactggggccagggaaccctggtcaccgtctcctcag

SEQ ID NO: 2736 - DNA, 361 bp, Homo sapiens; identical to SEQ ID NO: 2735

SEQ ID NO: 2737 - DNA, 358 bp, Homo sapiens
caggtgcagctacagcagtggggcgcaggactgttgaagccttcggagaccctgtcccgcacctgcgctgtctatggtgggtccttcagtcgttattactggagttggatccgccagcccccagggaaggggctggagtggattggagaaatcaatcatagtggaagcaccaactacaacccgtccctcaagagtcgagtcaccatatcagtcgacacgtccaagaaccagttctccctgacgctgagttctgtgaccgccgcggacacggctgtgtattactgtgcgagagttagagtgggaggtaccgatgcttttgatatgtggggccaagggacaatggtcaccgtctcttcag

SEQ ID NO: 2738 - DNA, 358 bp, Homo sapiens
caggtgcaactacagcagtggggcgcaggactgttgaagccttcggagaccctgtcccgcacctgcgctgtctatggtgggtccttcagtccttattactggagttggatccgccagcccccagggaaggggccggagtggattggagaaatcaatcctagtggaagcaccaactacaacccgtccctcaagagtcgagtcatcatatcagtcgacacgtccaagaaccagttctccctgacgctgagttctgtgaccgccgcggacacggctgtatattactgtgcgagagttagactgggaggtaccgatgcgttcgatatgtggggccaagggacattggtcaccgtctcttcag

SEQ ID NO: 2739 - DNA, 385 bp, Homo sapiens
caggtgcaactggtgcagtctggggctgaggtgaagaagcctggggcctcagtgaaggtctcctgcaaggcatctggatacaccttcaccggctactatatgcactgggtgcgacaggcccctggacaagggcttgagtgggtgggatggatcaaccctaacagtggtggcacaaactatgcacagaagtttcagggcagggtcaccatgaccagggacacgtccagcagcacagcctacatggaactgagcaggctgagatctgacgacacggccgtgtattattgtgcgagcgcagaccaaagcctacaatattgtcgtagtggtacatgcctccctttgggtggcgactggggccagggaaccctggtcaccgtctcctcag

SEQ ID NO: 2740 - DNA, 385 bp, Homo sapiens
caggtgcaactggtgcagtctggggctgaggtgaagaagcctggggcctcagtgaaggtctcctgcaaggcatctggatacaccttcaccggctactatatgcactgggtgcgacaggcccctggacaagggcttgagtgggtgggatggatcaaccctaacagtggtggcacaaactatgcacagaagtttcagggcagggtcaccatgaccagggacacgtccagcagcacagcctacatggagctgagcaggctgagatctgacgacacggccgtgtattactgtgcgagcgcagaccaaagcctacaatattgtcgtagtggtacatgcctccctttgggtggcgactggggccagggaaccctggtcaccgtctcctcag

SEQ ID NO: 2741 - DNA, 364 bp, Homo sapiens
caggtgcagctggtgcagtctggggctgaggtgaagaagcctggggcctcagtgaaggtttcctgcaaggcatctggatacaccttcaccaactactatatacactgggtgcgacaggcccctggacaagggcttgagtggatgggaacaatcaaccctagtggtggtagcacaagctacgcacagaagttccagggcagagtcaccatgaccagggacacgtccacgagcacagtctacatggagctgagcagcctgagatctgaggacacggccgtgtattactgtgcgagagtggcagacagctatggttacaactggttcgacccctggggccagggaaccctggtcaccgtctcctcag

SEQ ID NO: 2742 - DNA, 364 bp, Homo sapiens
caggtgcagctggtgcagtctggggctgaggtgaagaagcctggggcctcagtgaaggtttcctgcaaggcatctggatacaccttcaccagctactatatgcactgggtgcgacaggcccctggacaagggcttgagtggatgggagtaatcaaccctactggtgatagcacaagctacgcacagaagttccagggcagagtcaccatgaccagggacacgtccacgagcacagtctacatggagctgagcagcctgagatctgaggacacggccgtgtactactgtgcgagagtggcggacagatatggttacaactggttcgacccctggggccagggaaccctggtcagcgtctcctcag

SEQ ID NO: 2743 - DNA, 381 bp, Homo sapiens
gaggtgcagctggtggagtctgggggaggcctggtcaagcctggggggtccctgagactctcctgtgcagcctctggattcaccttcagtagctatagcatgaactgggtccgccaggctccagggaaggggctggagtgggtctcatccattagtagtactagtcgtttcatatactacgcggactcagtgaggggccgattcaccatctccagagacaacgccaagaactcactgtatctgcaaatgaacagcctgagagccgaggacacggctgtgtattactgtgcgagagatctggatagcagcggctggtcccctaactactactactactacatggacgtctggggcaaggggaccacggtcaccgtctcctca

SEQ ID NO: 2744 - DNA, 381 bp, Homo sapiens
gaggtgcagctggtggagtcggggggaggcctggtcaagcctggggggcccctgagactctcctgtgcagcctctggattcacctttagtagctatagcatgaactgggtccgccaggctccagggaaggggctggagtgggtctcatccattagtagtagtagtactttcatatactccgcagactcagtgaagggccgattcaccatctccagagacaacgccaagaactcactgtatctgcaaatgaacagcctgagagccgaggacacggctgtgtattactgtgcgagagatctggatagcagcaactggtcccctaactactactactactacatggacgtctggggcaaagggaccacggtctccgtctcctca

SEQ ID NO: 2745 - DNA, 382 bp, Homo sapiens
caggtgcagctggtggagtctgggggaggcgtggtccagcctgggaggtccctgagactctcctgtgcagcctctggattcaccttcagtagctatgccatgcactgggtccgccaggctccaggcaaggggctggagtgggtggcagttatatcatatgatggaagtgataaatattatgcagactccgtgaagggccgattcaccatctccagagacgattccaagaagacgctgtatctgcaaatgaacagcctgagagctgaggacacggctgtgtattcctgtgcgaaagcaatggggagttactgtagtggtggtaggtgttccagcgggagaattgactactggggccagggaaccctggtcaccgtctcctcag

SEQ ID NO: 2746 - DNA, 382 bp, Homo sapiens; identical to SEQ ID NO: 2745

SEQ ID NO: 2747 - DNA, 355 bp, Homo sapiens
gaggtgcagctggtggagtctggaggaggcttgatccagcctggggggtccctgagactctcctgtgcagcctctgggttcaccgtcagtagcaactacatgagctgggtccgccaggctccagggaaggggctggagtgggtctcagttatttatagcggtggtagcacatactacgcagactccgtgaagggccgattcaccatctccagagacaattccaagaacacgctgtatcttcaaatgaacagcctgagagccgaggacacggccgtgtattactgtgcgagagatcttccccagtttgatgcttttgatatctggggccaagggacaatggtcaccgtctcttcag

SEQ ID NO: 2748 - DNA, 355 bp, Homo sapiens; identical to SEQ ID NO: 2747

SEQ ID NO: 2749 - DNA, 355 bp, Homo sapiens
caggtgcaactgcaggagacgggcccaggactggtgaagccttcggagaccctgtccctcacctgcagtgtctctgatgactccatcattaaaaactactggacgtggatccggcagcccccagggaagggactggactggattgggtatatacattacagtggttacagcaactacaatctctccctcaagagtcgcgtcagcctgtcacttgacaagtccaagaagcagatctccctgaaactgacctctgtaaccgctgcggacacggccgtgtattactgtgtgagtggctacggtgactactactggttcgacccctggggccagggaaccctggtcaccgtctcctcag

SEQ ID NO: 2750 - DNA, 355 bp, Homo sapiens
caggtgcagctgcaggagacgggcccaggactggtgaagccttcggagaccctgtccctcacctgcagtgtctctgatgactccatcattaaaaactactggacgtggatccggcagcccccagggaagggactggactggattggctatatacattacaatggttacagcaactacaatctctccctcaagagtcgcgtcagcctgtcacttgacaagtccaagaggcagatctccctgaaactgacctctgtaaccgctgcggacacggccgtgtattactgtgtgagtggctacggtgactactactggttcgacccctggggccagggaaccctggtcaccgtctcctcag

SEQ ID NO: 2751 - DNA, 355 bp, Homo sapiens
caggtgcagctgcaggagacgggcccaggactggtgaagccttcggagaccctgtccctcacctgcagtgtctctgatgactccatcattaaaaactactggacgtggatccggcagcccccagggaagggactggactggattgggtatatacattacagtggttacagcaactacaatctctccctcaagagtcgcgtcagcctgtcacttgacaagtccaagaagcagatctccctgaaactgacctctgtaaccgctgcggacacggccgtgtattactgtgcgagtggctacggtgactactcctggttcgacccctggggccagggaaccctggtcaccgtctcctcag

SEQ ID NO: 2752 - DNA, 355 bp, Homo sapiens; identical to SEQ ID NO: 2751

SEQ ID NO: 2753 - DNA, 376 bp, Homo sapiens
caggtgcagctggtggagtctgggggaggcgtggtccagcctgggaggtccctgagactctcctgtgcagcctctggattcaccttcagtagctatgctatgcactgggtccgccaggctccaggcaaggggctggagtgggtggcagttatttcatatgatggaagcaataaatactacccagactccgtgaggggccgattcaccatctccagagacaattccaagaacacgctgtttttgcaaatgaacagcctgacacctgaggacacggctgtatattactgtgggagtggggcaggaatctatggttcggcaacttattcgagtgcatttgatatctggggccaagggacaacggtcaccgtctcttcag

SEQ ID NO: 2754 - DNA, 376 bp, Homo sapiens; identical to SEQ ID NO: 2753

SEQ ID NO: 2755 - DNA, 376 bp, Homo sapiens
caggtgcagctgcaggagtcgggcccaggactggtgaagccttcggagaccctgtccctcacctgcactgtctctggtggctccatcagtagttactactggagctggatccggcagtccccagggaaggcactggagtggattgggtatatctattacagtgggagcaccaattacaacccctccctcaagagtcgagtcaccatatcagtagacacgtccaagaaccagttctccctgaagctgagctctgtgaccgctgcggacacggccgtgtattactgtgcgagagatggttactatgatagtagaggttattactcaaatgatgcttttgatatctggggccaagggacaatggtcaccgtctcttcag

SEQ ID NO: 2756 - DNA, 376 bp, Homo sapiens
caggtgcagctgcaggagtcgggcccaggactggtgaagccttcggagaccctgtccctcacctgcactgtctctggtggctccatcagtagttactactggagctggatccggcagcccccagggaagggactggagtggattgggtatatctattacagtgggagcaccaactacaacccctccctcaagagtcgagtcaccatatcagtagacacgtccaagaaccagttctccctgaagctgagctctgtgaccgctgcggacacggccgtctattactgtgcgagagatggctactatgatagtagtggttattacatgaatgatgcttttgatatctggggccaagggacaatggtcaccgtctcttcag

SEQ ID NO: 2757 - DNA, 382 bp, Homo sapiens
caggtgcagctgcaggagtcgggcccaggactggtgaagccttcggagaccctgtccctcacctgcactgtctctggtggctccgtcagcagtggtagttactactggagctggatccggcagcccccagggaagggactggagtggattgggtatatctattacagtgggagcaccaactacaacccctccctcaagagtcgagtcaccatatcagtagacacgtccaagaaccagttctccctgaagctgagctctgtgaccgctgcggacacggccgtgtattactgtgcggtcgcagcgtgtggtggtgactgctattttctccattactggtacttcgatctctggggccgtggcaccctggtcactgtctcctcag

SEQ ID NO: 2758 - DNA, 382 bp, Homo sapiens
caggtgcagctgcaggagtcgggcccaggactggtgaagccttcggagaccctgtccctcacctgcactgtctctggtggctccgtcagcagtggtagttactactggagctggatccggcagcccccagggaagggactggagtggattgggtatatctattacagtgggagcaccaactacaacccctccctcaagagtcgagtcaccatatcagtagacacgtccaagaaccagttctccctgaagctgaactctgtgaccgctgcggacacggccgtgtattactgtgcggtcgcagcgtgtggtggtgactgctattttctccattactggtacttcgatctctggggccgtggcaccctggtcactgtctcctcag

SEQ ID NO: 2759 - DNA, 355 bp, Homo sapiens
cagatcaccttgaaggagtctggtcctacgctggtgaaacccacacagaccctcacgctgacctgcaccttctctgggttctcactcagcactagtggagtgggtgtgggctggatccgtcagcccccaggaaaggccctggaatggcttgcactcgtttcttgggatgatgaaaagcgctacagcccatctctgaagagcaggctcaccgtcaccaaggacacctccaaaaaccaggtggtccttacaatgaccagcgtggaccctgtggacacagccacatattactgtacatatcgtcgctgggggccggtgatctactggggccagggagccctggtcaccgtctcctcag

SEQ ID NO: 2760 - DNA, 355 bp, Homo sapiens
cagatcaccttgaaggagtctggtcctacgctggtgaaacccacacagaccctcacgctgacctgcaccttctctgggttctcactcagcactagtggagtgggtgtgggctggatccgtcagcccccaggaaaggccctggaatggcttgcactcgtttcttgggatgatgaaaagcgctacagcccatctctgaagagcaggctcaccgtcaccaaggacacctccaaaaaccaggtggtccttacaatgaccagcgtggaccctgtggacacagccacatattactgtacatatcgtcgctgggggccggtgatctactggggccagggaaccctggtcaccgtctcctcag

SEQ ID NO: 2761 - DNA, 373 bp, Homo sapiens
gaagtgcagctggtgcagtccggagcagaggtgaaaaagcccggggagtctctgaggatctcctgtaagtgctctggatacagctttaccaactactggatcagctgggtgcgccagatgcccgggaaaggcctggagtggatggggaggattgatcctcgtgactcttataccacctacaacccgtccttccaaggccacgtcaccatctcagctgacaagtccatcagcactgcctacctgcagtggggcagcccgaaggcctcggacaccgccatgtattactgtgcgagacccatatttactggaaatactaattctgatgatgcttttgatatctggggccaagggacaatggtcaccgtctcttcag

SEQ ID NO: 2762 - DNA, 373 bp, Homo sapiens
gaagtgcagctggtgcagtccggagctgaggtgaaaaagcccggggagtctctgacgatctcctgtaagggttctggatacagctttaccaactactggatcagctgggtgcgccagatgcccgggaaaggcctggagtggatggggaggattgatcctagtgactcttataccacctacaacccgtccttccaaggccacgtcaccatctcagctgacaagtccatcagcactgcctacctgcagtggggcagcctgaaggcctcggacaccgccatgtattactgtgcgagacccatatttactggaaatactaattctgatgatgcttttgatatctggggccaagggacaatggtcaccgtctcttcag

SEQ ID NO: 2763 - DNA, 370 bp, Homo sapiens
gaggtgcagctggtgcagtctggagcagaggtgaaaaagccgggggagtctctgaagatctcctgtaagggttctggatacagatttgccacctactggatcggctgggtgcgccagatgcccgggagaggcctggagtggatgggactgatctatcctggtgactctgataccagatatagcccgtccttccaaggccaggtcaccatctcagccgacaagtccatcaccaccgcctacttggagtggagcagcctgaaggcctcggacaccgccatttattactgtgcgagacatgacggtaccctaataccagcagttggttactttcaatactggggccagggaaccctggtcaccgtctcctcag

SEQ ID NO: 2764 - DNA, 370 bp, Homo sapiens
gaggtgcagctggtgcagtctggagcagaggtgaaaagacccggggagtctctgaggatctcctgtaagggttctggatacagatttgccacctcctggatcggctgggtgcgccagatgcccgggagaggcctggagtggatgggactgatctatcctggtgactctgataccagatatagcccgtccttccagggccaggtcaccatctcagccgacaagtccatcaccaccgcctacttggagtggagcagcctgaaggcctcggacaccgccatttattactgtgcgagacatgacggtaccctaataccagcagttggttactttcaatactggggccagggaaccctggtcaccgtctcctcag

SEQ ID NO: 2765 - DNA, 370 bp, Homo sapiens
caggtgcagctggtggagtctgggggaggcgtggtccaacctggggggtccctgagactctcctgtgcagcgtctggattcacttttagtatgtatgccatgcactgggtccgccaggctccaggcaaggggctggagtgggtgacattcatacggtatggtggaagtgatgaatactatgcagactccgtgaagggccgattcaccatctccagagacaattctaagaacacgctgtatctgcaaatgaacagcctgagagctgaggacacggctgtatattactgtgcgaaagcccgatctgcacgttattacgatttttggggctttgattcctggggccagggaaccctggtcaccgtctccccag

SEQ ID NO: 2766 - DNA, 370 bp, Homo sapiens; identical to SEQ ID NO: 2765

SEQ ID NO: 2767 - DNA, 337 bp, Homo sapiens
caggtgcagctgcaggagtcgggcccaggactggtgaagccttcggagaccctgtccctcacctgcactgtctctggtggctccatcagtagttactactggagctggatccggcagcccccagggaagggactggagtggattgggtatatctattacagtgggggcaccaactacaacccctccctcaagagtcgagtcaccatatcagtagacacgtccaagaaccagttctccctgaagctgagctctgtgaccgctgcggacacggccgtgtattactgtgcgagagggtttgactactggggccagggaaccctggtcaccgtctcctcag

SEQ ID NO: 2768 - DNA, 337 bp, Homo sapiens
caggtgcagctgcaggagtcgggcccaggactggtgaagccttcggagaccctgtccctcacctgcactgtctctggtggctccatcagtagttactactggagctggatccggcagcccccagggaagggactggagtggattgggtatatctattacactgggaccatcaactacaacccctccctcaagagtcgagtcaccatatcagtagacacgtccaagaaccagttctccctgaagctgagctctgtgaccgctgcggacacggccgtgtattactgtgcgaggggttttgactactggggccagggaaccctggtcaccgtctcctcag

SEQ ID NO: 2769 - DNA, 352 bp, Homo sapiens
gaggtgcagttggtggagtctggaggaggcttgatccagcctggggggtccctgagactctcctgtggagcctctgggttcaccgtcagtagcaactacatgagctgggtccgccaggctccagggaaggggctggagtgggtctcagttatttatagcggtggtagcacattctacgcagactccgtgaagggccgcttcaccatctccagagacaattccaagaacacgctgtatcttcaaatgaacagcctgagagccgaggacacggccgtgtattactgtgcgagagattggggggaattctactttgactactggggccagggaaccctggtcaccgtctcctcag

SEQ ID NO: 2770 - DNA, 352 bp, Homo sapiens
gaggtgcagctggtggagtctggaggaggcttgatccagcctggggggtccctgagactctcctgtgcagcctctgggatcaccgtcagtagtaactacatgagctgggtccgccaggctccagggaaggggctggagtgggtctcagttatttacagcggtggtagcacattctacgcagactccgtgaagggccgattcaccatctccagagactattccaagaacacgctgtatcttcaaatgaacagcctgagagccgaggacacggccgtttattactgtgcgagagattggggtgaattctactttgactactggggccagggaaccctggtcaccgtctcctcag

SEQ ID NO: 2771 - DNA, 358 bp, Homo sapiens
cagatcaccttgaaggagtctggtcctacgctggtcaaacccacacagaccctcacgctgacctgcaccttctctgggttctcactcaccgctagtggagtgggtgtgggctggatccgtcagcccccagggaaggccctggagtggcttgcactcatttattgggatgatgataagcgctacagcccatctctgaagagcaggctcaccatcaccaaggacacctccaaaaaccaggtggtccttacaatgaccaacatggaccctgtggacacagccacatattactgtgcgcgacatacaattactacgatatttgactactggggccagggaaccctggtcaccgtctcctcag

SEQ ID NO: 2772 - DNA, 358 bp, Homo sapiens
cagatcaccttgaaggagtctggtcctacgctggtcaaacccacacagaccctcacgctgacctgcaccttctctgggttctcactcaccgctagtggagtgggtgtgggctggatccgtcagcccccaggaaaggccctggagtggcttgcactcatttattgggatgatgataagcgctacagcccatctctgaagagcaggctcaccatcaccaaggacacctccaaaaaccaggtggtccttacaatgaccaacatggaccctgtggacacagccacatattactgtgcgcgacatacaattactacgatatttgactactggggccagggaaccctggtcaccgtctcctcag

SEQ ID NO: 2773 - DNA, 370 bp, Homo sapiens
caggtcaccttgagggagtctggtcctgcgctggtgaaacccacacagaccctcacactgacctgcaccttctctgggttctcactcagcactagtggaatctgtgtgagctggatccgtcagcccccagggaaggccctggagtggcttgcacgcattgattgggatggtgataaatattacagcacatctctgaagaccaggctcaccatctccaaggacacctccaaaaaccaggtggtccttataatgaccaacatggaccctgtggacacaggcacgtattactgtgcacggatacgtggggattactatggttcggggagctttgactactggggccagggaaccctggtcaccgtctccgcag

SEQ ID NO: 2774 - DNA, 370 bp, Homo sapiens
caggtcaccttgagggagtctggtcctgcgctggtgaaacccacacagaccctcacactgacctgcaccttctctgggttctcactcagcactagtggaatctgtgtgagctggatccgtcagcccccagggaaggccctggagtggcttgcacgcattgattgggatggtgataaatactacagcacatctctgaagaccaggctcaccatctccaaggacacctccaaaaaccaggtggtccttataatgaccaacatggaccctgtggacacaggcacgtattactgtgcacggatacgtggggattactatggttcggggagctttgactactggggccagggaaccctggtcaccgtctccgcag

SEQ ID NO: 2775 - DNA, 361 bp, Homo sapiens
caggtgcagctggtggagtctgggggaggcgtggtccagcctgggaggtccctgagactctcctgtgcagcctctggattcaccttcagttcctacgctatgcactgggtccgccaggctccaggcaaggggctggagtgggtggcagtgatctcatatgacggaagcaataaatattacgcagactccgtgaggggccgactcaccatctccagagacaattccaagaatatggtgtatctgcaaatgaacagcctgagagatgaggacacggcagtgtattactgtgcgagaggaggaggcacttatagtgggagctttagtgtggtgggccagggaaccctggtcaccgtctcctcag

SEQ ID NO: 2776 - DNA, 353 bp, Homo sapiens
gctggtggagtctgggggaggcgtggtccagcctgggaggtccctgagactctcctgtgcagcctctggattcaccttcagtacctatgctatgcactgggtccgccaggctccaggcaaggggctggagtgggtcgcagtcatatcatatgatggaagcaataaatactacgcagactccgtgaggggccgactcaccatctccagagacaattccaagagtacgctgtatctccaaatgaacagcctgagagttgaggacacggctgtgtattactgtgcgcgaggaggaggcacttatagtgggagctttagtgtcgtgggccagggaaccctggtcaccgtctcctcag

SEQ ID NO: 2777 - DNA, 391 bp, Homo sapiens
gaggtgcagctgttggagtctgggggaggcttggtacagcctggggggtccctgagactctcctgtgcagcctctggattcacctttagcagttatgccatgagctgggtccgccaggctccagggaaggggctggagtgggtctcaactattagtggtagtggtggtagcacatactacgcagactccgtgaagggccggttcaccatctccagagacaattccaagaacacgctgtatctgcaaatgaacagcctgagagccgaggacacggccgtatattactgtgcgaaagatagtattccgtattacgatttttggagtggttattatacgcccgaggactaccttgactactggggccagggaaccctggtcaccgtctcctcag

SEQ ID NO: 2778 - DNA, 391 bp, Homo sapiens; identical to SEQ ID NO: 2777

SEQ ID NO: 2779 - DNA, 367 bp, Homo sapiens
caggtgcagctggtgcagtctggggctgaggtgaagaagcctggggcctcagtgaaggtctcctgcaaggcttcgggatacactctcaccgactactatattcactgggttcggcaggcccctggacaagggtttgagtggatggcctggatcaaccctaacaatggtatgacagactatgcacagaagtcgaagtctcaggccagggtcaccttgaccatggacaggtccgtcagcacagcctacatggagttgagtggactgacatctgacgacacggccatctattactgtgcgagagctcccgggctctatatcagccctgctgactactggggccagggaaccctggtcaccgtctcctcag

SEQ ID NO: 2780 - DNA, 361 bp, Homo sapiens
caggtgcaactggtgcagtctggggctgaggtgaagaagcctggggcctcagtgaaggtctcctgcaaggcttcgggatacaccctcaccgactactatattcactgggttcggcaggcccctggacaagggtttgagtggatggcctggatcaaccctaacaatggtatgacagactatgcacagaagtctcaggccagggtcaccttgaccatggacacgtccgtcagcacagcctacatggagttgagtggactgacatctgacgacacggccgtctattactgtgcgagagctcccgggctctatatcagccctgctgactactggggccagggaaccctggtcaccgtctcctcag

SEQ ID NO: 2781 - DNA, 361 bp, Homo sapiens
caggtgcagctggtgcagtctgggactgaggtgaagaagcctggggcctcagtgaaggtctcgtgcaagtcctctggatacaccctcaccgactactacattcactgggttcgacaggcccctggacaagggtttgagtggatgacatggatcaaccctaaaactggtatgacagactacgcacaaaagtttcgggccagagtcaccgtgaccatggacacgtccatcagaacagcctacatggagttgagtgagctgagatctgacgacacggccgtctattactgtgcgagagctcccgggctctatgtcggccctgctgactactggggccagggaaccctggtcaccgtctcctcag

SEQ ID NO: 2782 - DNA, 361 bp, Homo sapiens
caggtgcagctggtgcagtctgggactgaggtgaagaagcctggggcctcagtgaaggtctcgtgcaagtcctctggatacaccctcaccgactactacattcactgggttcgacaggcccctggacaagggtttgagtggatgacatggatcaaccctaaaactggtatgacagactacgcacaaaagtttcgggccagagtcaccgtgaccatggacacgtccatcagaacagcctacatggagttgagtgaactgagatctgacgacacggccgtctattactgtgcgagagctcccgggctctatgtcggccctgctgactactggggccagggaaccctggtcaccgtctcctcag

SEQ ID NO: 2783 - DNA, 372 bp, Homo sapiens
caggtgcagctgcaggagtcgggcccaggactggtgaagccttcggagaccctgtccctcacctgcactgtctctggtggctccatcagtagttactactggagctggatccggcagcccccagggaagggactggagtggattgggtatatctattacagtgggagcaccaactacaacccctccctcaagagtcgagtcaccatatcagtagacacgtccaagaaccagttctccctgaagctgagctctgtgaccgccgcagacacggccgtgtattactgtgcgagacgggggttggagatggctacaattaccccctactactacatggacgtctggggcaaagggaccacggtcaccgtctcctca

SEQ ID NO: 2784 - DNA, 373 bp, Homo sapiens
gaggtgcagctggtggagactgggggaggcttgctccagcctggggggtccctgagactctcctgtgcagcctctgggttcaccgtctttaacaactacatgacctgggtccgccaggctccagggaaggggctggagtgggtctcgattatttataacgatgataatagatattacgcagactccgtgaagggccgattcaccatctccagagacaattccaagaacgccctgtatcttcaaatgagcaacctgagagccgaggacacggccgtttattactgtgcgaggaggcttcgattttgttgtggaaccggctgctcgtactactttgactcctggggccagggagccctggtcaccgtctcctcag

SEQ ID NO: 2785 - DNA, 361 bp, Homo sapiens
caggtgcagctggtggagtctgggggaggcgtggtccagcctgggaggtccctgagactctcctgtgcagcctctggattcaccttcagtagctatggtatgcactgggtccgccaggctccaggcaaggggctggagtgggtggcagttatatcatttgatggaagcaagaaatactacgcagactccgtgaagggccgattcaccatctccagagacaattccaagaacacgttgtatctgcaaatgaacagcctgagagctgaggacacggctgtgtattactgtgcgagagaggaacagtggcccgaccaagcgcttgactactggggccagggaaccctggtcaccgtctcctcag

SEQ ID NO: 2786 - DNA, 361 bp, Homo sapiens
caggtgcagctggtggagtctgggggaggcgtggtccagcctgggaggtccctgagactctcctgtgcagcctctggattcaccttcagtagctatgctatgcactgggtccgccaggctccaggcaaggggctggagtgggtggcagttatatcatatgatggaagcaataaatactacgcagactccgtgaagggccgattcaccatctccagagacaattccaagaacacgctgtatctgcaaatgaacagcctgagagctgaggacacggctgtgtattactgtgcgaggggatatagtgggagctacggggcttcggactactggggccagggaaccctggtcaccgtctcctcag

SEQ ID NO: 2787 - DNA, 361 bp, Homo sapiens
caggtgcagctggtggagtctgggggaggcgtggtccagcctgggaagtccctgagactctcctgtgcagcctctggattcaccttcagaaactatgctatgcactgggtccgccaggctccaggcaaggggctggagtgggtggcagttatatcatatgatggaaacaatgaatactacgcagactccgtgaagggccgattcaccatctccagagacaattccaagaacacgctgtatctgcagatggacagcctgagagctgaggacacggctgtgtattactgtgcgatggatagtagtggctggtacgggctctttgactactggggccagggaaccctggtcaccgtctcctcag

SEQ ID NO: 2788 - DNA, 361 bp, Homo sapiens
caggtgcagctggtggagtctgggggaggcgtggtccagcctgggaggtccctgagactctcctgtgcagcctctggattcaccttcagtagctatgctatgcactgggtccgccaggctccaggcaaggggctggagtgggtggcagttatatcatatgatggaagcaataaatactacgcagactccgtgaagggccgattcaccatctccagagacaattccaagaacacgctgtatctgcaaatgaacagcctgagagctgaggacacggctgtgtattactgtgcgagatcccatagtgggagctactactggttcgacccctggggccagggaaccctggtcaccgtctcctcag

SEQ ID NO: 2789 - DNA, 144 bp, Homo sapiens
gacagctctgccagcacaacatacctgcagatcagcagcctaaaggctgaggacatggccatgtattactgtgcgagataggggcatcactacgactactacatggacgtctggggcaaagggaccacggtcaccgtctcctca

SEQ ID NO: 2790 - DNA, 362 bp, Homo sapiens
ggagcagctggtggagtctgggggaggcttggtacagtctggggggtccctgagactctcctgtggagtctctggattcagcttcagcgactacgacatgcactgggtccgccatgcgacaggaaaaggtctggagtgggtctcagccattggtactttggaagacacattctatgcaggctccgtgaagggccgattcaccatctccagagaaaacgccaagaactccttgcatcttcaaatgaacagcctgagagccgaagacacggctgtgtattattgtgcaagggggggtgccgcaactcgtcgtacttgggacctccagtactggggccagggcaccctggtcaccgtctcctcag

SEQ ID NO: 2791 - DNA, 391 bp, Homo sapiens
cagctgcagctgcaggagtcgggcccaggactggtgaagccttcggagaccctgtccctcacctgcactgtctctggtggctccatcagcagtagtagttactactggggctggatccgccagcccccagggaaggggctggagtggattgggagtatctattatagtgggagcacctactacaacccgtccctcaagagtcgagtcaccatatccgtagacacgtccaagaaccagttctccctgaagctgagctctgtgaccgccgcagacacggctgtgtattactgtgcgagacatccggtctttgttggccaaatctatgatagtagtggttacaacacggcttttgatatctggggccaagggacaatggtcaccgtctcttcag

SEQ ID NO: 2792 - DNA, 360 bp, Homo sapiens
caggtgcagctggtggagtctgggggaggcgtggtccagcctgggaggtccctgagactctcctgtgcagcctctggattcaccttcagtagctatgctatgcactgggtccgccaggctccaggcaaggggctggagtgggtggcagttatatcatatgatggaagcaataaatactacgcagactccgtgaagggccgattcaccatctccagagacaattccaagaacacgctgtatctgcaaatgaacagcctgagagctgaggacacggctgtgtattactgtgcgaggaatgactattactactactacggtatggacgtctggggccaagggaccacggtcaccgtctcctca

SEQ ID NO: 2793 - DNA, 376 bp, Homo sapiens
caggtccagctggtgcagtctggggctgaggtgaagaagcctgggtcctcagtgaaggtctcctgcaaggcttctggaggcaccttcagcagctatgctatcagctgggtgcgacaggcccctggacaagggcttgagtggatgggagggatcatccctatcgttggtatagcaaactacgcacagaaattccagggcagagtcacgattatcgcggacaaatccacgagcacagcctacatggagctgagcagcctgagatctgaggacacggccatgtattactgtgcgaggaagttccggtattgtactaatggtgtatgctatacccactgggactactggggccagggaaccctggtcaccgtctcctcag

SEQ ID NO: 2794 - DNA, 388 bp, Homo sapiens
gaagtgcagctggtggagtctgggggaggcttggtacagcctggcaggtccctgagactctcctgtgcagcctctggattcacctttgatgattatgccatgcactgggtccggcaagctccagggaagggcctggagtgggtctcaggtatgacttggaatagtggtaccatagactatgcggactctgtgaagggccgattcaccatctccagagacaacgccaagaactccctgtatctgcaaatgaacagtctgagagctgaggacacggccttgtattactgtgcaaaagatggggtttacgggccacgcacgtattactatgataggagtgattatttctttgactcctggggccagggaaccctggtcaccgtctcctcag

SEQ ID NO: 2795 - DNA, 384 bp, Homo sapiens
gaggtgcagctggtggagtctggaggaggcctgatccagcctggggggtccctgagactctcctgtgcagcctctgggttcaccgtcagtagcaactacatgacctgggtccgccaggctccagggaaggggctggagtgggtctcagttatttacagcggtggtagcacatactacgcagactccgtgaagggccgattcaccatctccagagacaattccaagaacacgctgtatcttcaaatgaacagcctgagagccgaggacacggccgtgtattactgtgcgagacccaagcagggtattgtagtagtaccaactgcgattggggactacaacggtatagacgtctggggccaagggaccacggtcaccgtctcctca

SEQ ID NO: 2796 - DNA, 384 bp, Homo sapiens
gaggtgcagctggtggagtctgggggaggcttggtacagcctggggggtccctgagactctcctgtgcagcctctggattcaccttcagtagctacgacatgcactgggtccgccaagctacaggaaaaggtctggagtgggtctcagtcattggtactgctggtgacacatattatgcaggctccgtgaagggccgattcaccgtctccagagaaaatgccaagaactccttgtatcttcaaatgaacagcctgagagccggggacacggctgtatattattgtgcacgtagcgtggatacagctatggttagttcggggcggtactactactactactacatggacgtctggggcaaagggaccacggtcaccgtctcctca

SEQ ID NO: 2797 - DNA, 387 bp, Homo sapiens
caggtgcagctggtggagtctgggggaggcgtggtccagcctgggaggtccctgagactctcctgtgcagcctctggattcaccttcagtagctatggcatgcactgggtccgccaggctccaggcaaggggctggagtgggtggcagttatatcatatgatggaagtaataaatactatgcagactccgtgaagggccgattcaccatctccagagacaattccaagaacacgctgtatctgcaaatgaacagcctgagagctgaggacacggctgtgtattactgtgcgaaagacattatggtttcaccaccagaggtccccgattactactactactacggtatggacgtctggggccaagggaccacggtcaccgtctcctca

SEQ ID NO: 2798 - DNA, 367 bp, Homo sapiens
caggtgcagctggtggagtcggggggaggcgtggtccaacctgggaagtccctgagactctcctgtgaagcctctggattcaccttcagttactatggcctgtactgggtccgccaggctccaggcaaggggctggagtgggtggcagctatatcatatgatggaagtaataaatataatgcagactccgtgaagggccgattcaccatctccagagacaattccaagaacacgttgtatctgcaaatgaacagcctgagagttgaggacacggctgtgtattactgtgcgaaagacgttgaggagtggctggtaagcggctgcttcgacccctggggccagggaaccctggtcaccgtctcctcag

SEQ ID NO: 2799 - DNA, 367 bp, Homo sapiens
caggtgcagctggtggagtctgggggaggcgtggtccagcctggggggtccctgagactctcctgtgcagcgtctggattcaccttcagtagctatggcatgcactgggtccgccaggctccaggcaaggggctggagtgggtggcatttatacggtatgatggaagtaataaatactatgcagactccgtgaagggccgattcaccatctccagagacaattccaagaacacgctgtatctgcaaatgaacagcctgagagctgaggacacggctgtgtattactgtgcgaaagatcaccagcagctggtacccttgagctggttcgacccctggggccagggaaccctggtcaccgtctcctcag

SEQ ID NO: 2800 - DNA, 388 bp, Homo sapiens
caggtgctgctgcaggagtcgggcccaggactggtggagccttcacagaccctgtccctcacctgcactgtcaccggtggctccataagcagtggtgattactactggagttggatccgccagcccccagggaagggcctggggtggattgggtacatctattccagtgggagcacctactacaacccgtccctcaagagtcgactgaccatatcactagacacgtccaagaaccaattctccctgaagctgcgctctgtgactgccgcggacacggccacatattactgtgccagagtggtcgcggattactcatcttactatgagaggggggggaaatacttctttgactactggggccagggaaccctggtcgccgtctcctcag

SEQ ID NO: 2801 - DNA, 388 bp, Homo sapiens
cagctgcagctgcaggagtcgggcccaggactggtgaagccttcggagaccctgtccctcacctgcagtgtctctggtgactcaatcagcagtagaagttactactggggctggatccgccagcccccagggaaggggctggagtggattgtgagtatgttttatggtgggaacacctactacaacccgtccctcaagagtcgagtcaccatatcagttgacacgtccaagaaccagttctccctgaagctgagctctgtgaccgccgcggacacggccgtgtattactgtgcgagagatacatattgttctgatggtgtatgctacacgggatggttctttgggtttgaatactggggccagggaaccctggtcaccgtctcctcag

SEQ ID NO: 2802 - DNA, 385 bp, Homo sapiens
caggtgcagctgcaggagtcgggcccaggactggtgaggccttcggagaccctgtccctcacctgcactgtctctggttactccatcagcagtggttactactggggctggatccggcagccccccgggaaggggctggagtggattgggagtttctaccatagtgggagcacctactacagcccgtccctcaagagtcgagtcaccatatcagtagacacgtccaagaaccagttctccctgaggctgagctctgtgaccgccgcagacacggccatatattactgtgcgagagattatggatatatatataccagtggctggtaccggcgccgcgtatcttttgactactggggccagggaacccttgtcaccgtctcctcag

SEQ ID NO: 2803 - DNA, 385 bp, Homo sapiens
caggtgcagctggtggagtctgggggaggcgtggtccagcctgggaggtccctgagactctcctgtgcagcctctggattcaccttcagtacctatggcatgcactgggtccgccaggctccaggcaaggggctggagtgggtggcagttatatcatatgatggaagtaataaatactatgcagactccgtgaagggccgattcaccatctccagagacaattccaagaacacgctgtatctgcaaatgaacagcctgagaactgaggacacggctgtgtattactgtgcgaaagtgggggggggccgatattgtagtggtggtagctgcactagaggctactttgactactggggccagggaaccctggtcaccgtctcctcag

SEQ ID NO: 2804 - DNA, 373 bp, Homo sapiens
caggtgcagctgcaggagtcgggcccaggactggtgaagccttcggagaccctgtccctcacctgcactgtctctggtggctccatcagtagttactactggagctggatccggcagcccgccgggaagggactggagtggattgggcgtatctataccagtgggagcaccaactacaacccctccctcaagagtcgagtcaccatgtcagtagacacgtccaagaaccagttctccctgaagctgagctctgtgaccgccgcggacacggccgtgtattactgtgcgagagagggtattcgaaacaattactatgacgagtacaactggttcgacccctggggccagggaaccctggtcaccgtctcctcag

SEQ ID NO: 2805 - DNA, 394 bp, Homo sapiens
cagatcaccttgaaggagtctggtcctacgctggtgaaacccacacagaccctcacgctgacctgcaccttctctgggttctcactcagcactagtggagtgggtgtgggctggatccgtcagcccccaggaaaggccctggagtggcttacactcctttattgggatgatgataagcgctacagcccatctctgaagagcaggctcaccatcaccaaggacacctccaaaaaccaggtggtccttacaatgaccaacatggaccctgtggacacagccacatattactgtgcacactgggttgagtttgcggggtactatggtagtagtggttaccagcatcatgatgcttttgatatctggggccaagggacaatggtcaccgtctcttcag

SEQ ID NO: 2806 - DNA, 388 bp, Homo sapiens
caggtgcagctgcaggagtcgggcccaggactggtgaagccttcggagaccctgtccctcacctgcactgtctctggtggctccgtcagcagtggtagttactactggagctggatccggcagcccccagggaagggactggagtggattgggtatatctattacagtgggagcaccaactacaacccctccctcaagagtcgagtcaccatatcagtagacacgtccaacaaccagttctccctgaaggtgagctctgtgaccgctgcggacacggccgtgtattactgtgcgagagtcgcctgggacccgacctcgactatagcagctcgtcctattatttggtttgactactggggccagggaaccctggtcaccgtctcctcag

SEQ ID NO: 2807 - DNA, 381 bp, Homo sapiens
caggtgcagctgcaggagtcgggcccaggactggtgaagccttcggagaccctgtccctcacctgcactgtctctggtggctccatcagtaactactgttggagctggatccggcagcccgccgagaagggactggagtggattgggcatatctataccaatgggagcaccgactacaacccctccctcaaaagtcgagtcaccatgtcagtagacacgtccaagaaccagttctccctgaacctgggctctgtgaccgccgcggacacggccgtgtatttctgtgcgagagagcagactataaacggaactacccccaaattctggtactactactacattgacgtctggggcacagggaccacggtcaccgtctcctca

SEQ ID NO: 2808 - DNA, 361 bp, Homo sapiens
gaggtgcagctattggagtctgggggaggcttggtacagcctggggggtccctgagactctcctgtgcagcctctggattcacctttagcagctatgccatgagctgggtccgccaggctccagggaaggggctggagtgggtctcagctattagtggtagcggtggtagcacatactacgcagactccgtgaagggccggttcaccgtctccagagacaattccaagaacacgctgtatctgcaaatgaacagcctgagagccgaggacacggccgtatattactgtgcgaaagatatgaatccgctatggtcgatatttgactactggggccagggaaccctggtcaccgtctcctcag

SEQ ID NO: 2809 - DNA, 384 bp, Homo sapiens
caggtgcagctggtggagtctgggggaggcgtggtccagcctgggaggtccctgagactctcctgtgcagcctctggattcaccttcagtagctttggcatgcactgggtccgccaggctccaggcaaggggctggagtgggtggcaattatatcatatgatggaagtaataaatactatgcagactccgtgaagggccgattcaccatctccagagacaattccaagaacacgctgtatctgcaaatgaacagcctgagagctgaggacacggctgtgtattactgtgcgaaagatctagatcgacagtaccagctgctattcgcacctttgagctacggtatggacgtctggggccaagggaccacggtcaccgtctcctca

SEQ ID NO: 2810 - DNA, 384 bp, Homo sapiens
caggtgcagctggtggagtctgggggaggcgtggtccagcctgggaggtccctgagactctcctgtgcagcctctggattcaccttcagtagctatgctatgcactgggtccgccaggctccaggcaaggggctggagtgggtggcagttatatcatatgatggaagcaataaatactacgcagactccgtgaagggccgattcaccatctccagagacaattccaagaacacgctgtatctgcaaatgaacagcctgagagctgaggacacggctgtgtattactgtgcgagagaggggggtatagtgggagctaccgcatattactactactactacggtatggacgtctggggccaagggaccacggtcaccgtctcctca

SEQ ID NO: 2811 - DNA, 384 bp, Homo sapiens
caggtgcagctggtggagtctgggggaggcttggtcaagcctggagggtccctgagactctcctgtgcagcctctggattcaccttcagtgactactacatgagctggatccgccaggctccagggaaggggctggagtgggtttcatacattactagtagtggtatttacacaaactacgcagactctgtgaagggccgattcaccatctccagagacaacgccaagaactcactgtatctgcaaatgaacagcctgagagccgaggacacggctgtgtattactgtgcgagatgcgtagtagtaccagctgctatggagggttactactactactacggtatggacgtctggggccaagggaccacggtcaccgtctcctca

SEQ ID NO: 2812 - DNA, 358 bp, Homo sapiens
gaggtgcagctggtggagactggaggaggcttgatccagcctggggggtccctgagactctcctgtgcagcctctgagttcattgtcagtagcaactacatgagctgggtccgccaggctccagggaaggggctgaaatgggtctcagttatttatagcggtggtagcacatactacgcagactccgtgaagggccgattcaccatctccagagacaattccaagaacacactgtttcttcaaatgaacagcctgagagccgaggacacggccgtgtattactgtgcgagagttgttccgggtatagtcgactactttgactactggggccagggaaccctggtcaccgtctcctcag

SEQ ID NO: 2813 - DNA, 385 bp, Homo sapiens
gaggtgcagctgttggagtctgggggagacttggtacagcctggggggtccctgagactctcctgtgcagcctctggattcacctttagcagttatgccatgagctgggtccgccagcctccagggaaggggctggagtgggtctcagctgtcagtggtagtggtggtaccacatactacgcagattccgtgaagggccggttcaccatctccagagacgaatccaagaacacgctctttctgcaaatgaacagcctgagagccgaggacacggccgtatattactgtgcgaaagcggctttcgaaggatattgtagtagtgccaggtgttacgtcggctggttcgacccctggggccagggaaccccggtcaccgtctcctcag

SEQ ID NO: 2814 - DNA, 366 bp, Homo sapiens
caggtccagctggtacagtctggggctgaggtgaagaagcctggggcctcagtgaaggtctcctgcaaggtttccggatacaccctcactgaattatccatgcactgggtgcgacaggctcctggaaaagggcttgagtggatgggaggttttgatcctgaagatggtgaaacaatctacgcacagaagttccagggcagagtcaccatgaccgaggacacatctacagacacagcctacatggagctgagcagcctgagatctgaggacacggccgtgtattactgtgcaaggagtggttattataagtactactactacggtatggacgtctggggccaagggaccacggtcaccgtctcctca

SEQ ID NO: 2815 - DNA, 385 bp, Homo sapiens
caggtgcagctggtgcagtctggggctgaggtgaagaagcctggggcctcagtgaaggtttcctgcaaggcatctggatacaccttcaccagctactatatgcactgggtgcgacaggcccctggacaagggcttgagtggatgggaataatcaaccctagtggtggtagcacaagctacgcacagaagttccagggcagagtcaccatgaccagggacacgtccacgagcacagtctacatggagctgagcagcctgagatctgaggacacggccgtgtattactgtgcgagagatcggggagatacgtattactatgatagtagtggttattacaacgcttttgatatctggggccaagggacaatggtcaccgtctcttcag

SEQ ID NO: 2816 - DNA, 388 bp, Homo sapiens
cagctgcagctgcaggagtcgggcccaggactggtgaagccttcggagaccctgtccctcacctgcactgtctctggtggctccatcagcagtagtagttactactggggctggatccgccagcccccagggaaggggctggagtggattgggagtatctattatagtgggagcacctactacaacccgtccctcaagagtcgagtcaccatatcagtagacacgtccaagaaccagttctccctgaagctgagctctgtgaccgccgcggacacggccgtatattactgtgcgggagttctactgtattacgatattttgactggttattcgaggaccgatgcttttgatatctggggccaagggacaatggtcaccgtctcttcag

SEQ ID NO: 2817 - DNA, 363 bp, Homo sapiens
caggtgcagctggtggagtctgggggaggcgtggtccagcctgggaggtccctgagactctcctgtgcagcctctggattcaccttcagtagctatgctatgcactgggtccgccaggctccaggcaaggggctggagtgggtggcagttatatcttatgatggaagcaataaatactacgcagactccgtgaagggccgattcaccttctccagagacaattccaagaacacgctgtatctgcaaatgaacagcctgagagctgaggacacggctgtgtattactgtgcgagagggttggggggcaactactactacggtatggacgtctggggccaagggaccacggtcaccgtctcctca

SEQ ID NO: 2818 - DNA, 360 bp, Homo sapiens
caggtgcagctgcaggagtcgggcccaggactggtgaagccttcggagaccctgtccctcacctgcactgtctctggtggctccatcagtagttactactggagctggatccggcagcccccagggaagggactggagtggattgggtatatctattacagtgggagcaccaactacaacccctccctcaagagtcgagtcaccatatcagtagacacgtccaagaaccagttctccctgaagctgagctctgtgaccgccgcagacacggccgtgtattactgtgcgagacatagggaaaactactactactactacatggacgtctggggcaaagggaccacggtcaccgtctcctca

SEQ ID NO: 2819 - DNA, 363 bp, Homo sapiens
gaggtgcagctgttggagtctgggggaggcttggtacagcctggggggtccctgagactctcctgtgcagcctctggattcaactttagcagctatgccatgagctgggtccgccaggctccagggaaggggctggagtgggtctcagctattagtggtagtggtggtttcacatactacgcagactccgtgaagggccggttcaccatctccagagacaattccaagaacacgctgtatctgcaaatgaacagcctgagagccgaggacacggccgtatattactgtgcgaaagatgactacagtaattacttccacggtatggacgtctggggcccagggaacacggtcaccgtctcctca

SEQ ID NO: 2820 - DNA, 363 bp, Homo sapiens
caggtgcagctggtggagtctgggggaggcgtggtccagcctggggggtccctgagactctcctgtgcagcgtctggattctccttcagtagctatggcatgcactgggtccgccaggctccaggcaaggggctggagtgggtggcatttatacggtatgatggaagtgataaatactatgcagactctgtgaagggccgattcaccatctccagagacaattccaagaacacgctgtatctgcgaatgaacagcctgagagctgaggacacggctgtgtattactgtgcgaaagatagtaactactactactactactacatggacgtctggggcaaagggaccacggtcaccgtctcctca

SEQ ID NO: 2821 - DNA, 363 bp, Homo sapiens
caggtgcagctggtggagtctgggggaggcgtagtccagcctggggggtccctgagactctcctgtgtagcgtctggattcaccttcagtacctatggcatgcactgggtccgccaggctccaggcaaggggctggagtgggtggcatttatatcgtatgatggaagtaataaatattatgcagactccgtgaagggccgattcaccatctccagagacatttccaagaacacgctggatctgcaaatgaacagcctgagagctgaggacacggctgtgtattactgtgtgaaagcaggggccccgtactactactactacatggacgtctggggcaaagggaccacggtcaccgtctcctca

SEQ ID NO: 2822 - DNA, 390 bp, Homo sapiens
caggtgcagctgcaggagtcgggcccaggactggtgaagccttcggagaccctgtccctcacctgcactgtctctggtggctccgtcagcagtggtagttactactggagctggatccggcagcccccagggaagggactggagtggattgggtatatctattacagtgggagtatcaattacaacccctccctcaagagtcgagtcaccatatcagtagacacgtccaagaaccagttctccctgaagctgagctctgtgaccgctgcggacacggccgtgtattactgtgcgagagatcacgactacggtgactacgggtctttacgcggctaccactactacggtttggacgtctggggccaagggaccacggtcaccgtctcctca

SEQ ID NO: 2823 - DNA, 364 bp, Homo sapiens
caggtgcagctgcaggagtcgggcccaggactggtgaagccttcggagaccctgtccctcacctgcactgtctctggttactccatcagcagtggttactactggggctggatccggcagcccccagggaaggggctggagtggattgggagtatctatcatagtgggagcacctactacaacccgtccctcaagagtcgagtcaccatatcagtagacacgtccaagaaccagttctccctgaagctgagctctgtgaccgccgcagacacggccgtgtattactgtgcgagaacggccgatttttggagtggttatactgttgactactggggccagggaaccctggtcaccgtctcctcag

SEQ ID NO: 2824 - DNA, 366 bp, Homo sapiens
gaggtgcagctggtgcagtctggagcagaggtgaaaaagcccggggagtctctgaagatctcctgtaaggggtctggatacagctttaccacctactggatcgcctgggtgcgccagatgcccgggaaaggcctggagtggatggggatcatctatcctggtgactctgataccagatacagcccgtcattccaaggccaggtcaccatgtcagccgacaggtccaccagcaccgcctacttgcagtggagcagtctgaaggcctcggacaccgccatgtattattgtgcgaggcaagcagcagtggctggagtcggagtcggtctggacgtctggggccaagggaccacggtcaccgtctcctca

SEQ ID NO: 2825 - DNA, 364 bp, Homo sapiens
gaagtgcagctggtggagtctgggggaggcttggtacagcctggcaggtccctgagactctcctgtgcagcctctggattcacctttgatgattatgccatgcactgggtccggcaaggtccagggaagggcctggagtgggtctcaggtattagttggaatagtggtagtataggctatgcggactctgtgaagggccgattcaccatctccagagacaacgccaagaactccctatatctgcaaatgaacagtctgagagctgaggacacggccttgtattactgtgcaaaaacatcccgagcagacattactatgatagcggactactggggccagggaaccctggtcaccgtctcctcag

SEQ ID NO: 2826 - DNA, 364 bp, Homo sapiens
gaagtgcagctggtggagtctgggggagtcgtggtacagcctggggggtccctgagactctcctgtgcagcctctggattcacctttgatgattataccatgcactgggtccgtcaagctccggggaagggtctggagtgggtctctcttattagttgggatggtagtagcacatactatgcagactctgtgaagggccgattcaccatctccagagacaacagcaaaaactccctgtatctgcaaatgaacagtctgagaactgaggacaccgccttgtattactgtgcaaaagccgcggatagcagcagctggacccaccttgactactggggccagggaaccctggtcaccgtctcctcag

SEQ ID NO: 2827 - DNA, 364 bp, Homo sapiens
gaggtgcagctggtggagtctgggggaggcttggtccagcctggggggtccctgagactctcctgtgcagcctctggattcaccttcagtagctatgctatgcactgggtccgccaggctccagggaagggactggaatatgtttcagctattagtagtaatgggggtagcacatattatgcaaactctgtgaagggcagattcaccatctccagagacaattccaagaacacgctgtatcttcaaatgggcagcctgagagctgaggacatggctgtgtattactgtgcgagaggttctacagtaacgatttttagctactttgactactggggccagggaaccctggtcaccgtctcctcag

SEQ ID NO: 2828 - DNA, 385 bp, Homo sapiens
caggtgcagctggtgcagtctggggctgaggtgaagaagcctgggtcctcggtgaaggtctcctgcaaggcttctggaggcaccttcagcaactatgctatcacctgggtgcgacaggcccctggacaagggcttgagtggatgggagggatcatccctatctttggttcagcaaactacgcacagaagttccagggcagagtcacgattaccgcggacgaatccacgagcacagcctacatggagctgagcagcctgagatctgaggacacggccgtgtattactgtgcgagaccccagggagccttctattgtagtggtggtagctgctaccgttactactttgactactggggccagggaaccctggtcaccgtctcctcag

SEQ ID NO: 2829 - DNA, 362 bp, Homo sapiens
gaggtgcagttgttggagtctgggggaggcttggtccagcctggggggtccctgagactctcctgtgcagcctctgaattcacctttagcagacatgccatgggctgggtccgccaggccccagggaaggggctggagtggctctcatctattaatgatagtggtgatgactcatactacgcagactccgtgaacggccggttcaccatctccagagacaattccagggacacactgtatctgcaaatgaacagcctgagagccgaggacacggccgtatattactgtgcgaaggatcgtaacagctcgccctcggacggctttgactactggggccagggaaccctggtcaccgtctcctc

SEQ ID NO: 2830 - DNA, 364 bp, Homo sapiens
gaggtgcagctgttggagtctgggggaggcttggttcagcctggggggtccctgagactctcctgtgcagcctctggattcacctttagtaactatgccatgagctgggtccgccaggctccagggaaggggctggagtgggtctcagctattagtggtagtggtcatagcacatactacgcagactccgtgaagggccggttcaccatctccagagacaattccaagaataccctgtatctgcaaatgaacagcctgagagccgaggacacggccgtatattactgtgggaaacacgctagtggatacagctatggtacatttgacgactggggccagggaaccctggtcaccgtctcctcag

SEQ ID NO: 2831 - DNA, 364 bp, Homo sapiens
gaagtgcagctggtgcagtccggagcagaggtgaaaaagcccggggagtctctgaggatctcctgtaagggttctggatacagctttaccagctactggatcagctgggtgcgccagatgcccgggaaaggcctggagtggatggggaggattgatcctagtgactcttataccaactacagcccgtccttccaaggccacgtcaccatctcaactgacaagtccatcagcactgcctacctgcagtggagcagcctgaaggcctcggacaccgccatgtattactgtgcgagacaaatgccggggctgctactcaattggttcgacccctggggccagggaaccctggtcaccgtctcctcag

SEQ ID NO: 2832 - DNA, 364 bp, Homo sapiens
caggtccagctggtacagtctggggctgaggtgaagaagcctggggcctcagtgaaggtctcctgcaaggtttccggatacaccctcactgaattattcatgcactgggtgcgacaggctcctggaaaagggcttgagtggatgggaggttttgatcctgaagatggtgaaacaatctacgcacagaagttccagggcagaatcaccatgaccgaggacacatctacagacacagcctacatggagctgagcagcctgagatctgaggacacggccgtgtattactgtggaacagcgcctaacatgcagtggctggtacaacttgactactggggccagggaaccctggtcaccgtctcctcag

SEQ ID NO: 2833 - DNA, 363 bp, Homo sapiens
caggtgcagctgcaggagtcgggcccaggactggtgaagccttcggagaccctgtccctcacctgcactgtctctggtggctccatcagtagttactactggagctggatccggcagcccgccgggaagggactggagtggattgggcgtatctataccagtgggagcaccaactacaacccctccctcaagagtcgagtcaccatgtcagtagacacgtccaagaaccagttctccctgaagctgagctctgtgaccgccgcggacacggccgtgtattactgtgcgagatatagtgggagctactactactactactacatggacgtctggggcaaagggaccacggtcaccgtctcctca

SEQ ID NO: 2834 - DNA, 364 bp, Homo sapiens
caggtccagctggtacagtctggggctgaggtgaagaagcctggggcctcagtgaaggtctcctgcaaggtttccggatacaccctcactgaattatccatgcactgggtgcgacaggctcctggaaaagggcttgagtggatgggaggttttgatcctgaagatggtgaaacaatctacgcacagaagttccagggcagagtcaccatgaccgaggacacgtctacagacacagcctacatggagctgagcagcctgagatctgaggacacggccgtgtattactgtgcaacagcatatgcgattttaggagtggttacccctgactactggggccagggaaccctggtcaccgtctcctcag

SEQ ID NO: 2835 - DNA, 364 bp, Homo sapiens
caggtccagctggttcagtctggggctgaggtgaagaagcctggggcctcagtgaaggtctcctgcaaggtttccggatacaccctcactgaattatccatgcactgggtgcgacaggctcctggaaaagggcttgagtggatgggaggttttgatcctgaagatggtgaaacaatctacccacagaagttccagggcagagtcaccatgaccgaggacacatctacagacacagcctacatggagctgagcagcctcagatctgaggacacggccgtgtattactgtgcaactgcttttgccatccaccgtagaacctcacttcactactggggccagggaaccctggtcaccgtctcctcag

SEQ ID NO: 2836 - DNA, 384 bp, Homo sapiens
gaggtgctcctggtggagtctgggggaggcgtggtacggcctggggggtccctgagactctcctgtgcagcctctggattcacctttgatgattatggcatgagttgggtccgccaagctccagggaaggggctggagtgggtctctggtattaattggaatggtggtagtacaagttctgcagactctgtgaagggccgattcaccatctccagagacaacgccaagaactccctgtatctgcaaatgaacactctgagagccgaggacacggccttgtattactgtgcgagaggctattgtagtggtggtagctgctacacttactactactactactacatggacgtctggggcaaagggaccacggtcaccgtctcctca

SEQ ID NO: 2837 - DNA, 364 bp, Homo sapiens
gaggtgcagctggtgcagtctggagcagaggtgaaaaagcccggggagtctctgaagatctcctgtaagggttctggatacagctttaccaactactggatcggctgggtgcgccagatgcccggggaaggcctggagtggatggggatcatctatcctggtgactctgataccacatacagcccgtccttccaaggccaggtcatcatctcagtcgacaagtccatcagcaccgcctacctgcagtggagcagcctgaaggcctcggacaccgccatgtattactgtgcgagacgaaatacggtgactacctactggtacctcgatctctggggccggggcaccctggtcactgtctcctcag

SEQ ID NO: 2838 - DNA, 364 bp, Homo sapiens
caggtgcaactggtggagtctgggggaggcgtggtccagcctgggaggtccctgagactctcctgtgcagcctctggattcaccttcagtaggtgtgctatgcactgggtccgccaggctccaggcaaggggctggagtgggtggcagttatatcatatgatggaagcaataaatactacgcagactccgtgaagggccgattcaccatctccagagacaattccaagaacacgctgtatctgcaaatgaacagcctgagagctgaggacacggctgtgtattactgtgcgagagggtggagtgggaactactacgggtacttcgatctctggggccgtggcaccctcatcactgtctcctcag

SEQ ID NO: 2839 - DNA, 364 bp, Homo sapiens
caggtgcagctggtggagtctgggggaggcgtggtccagcctgggaagtccctgagactctcctgtgcagcctctaaatttaccttcagtacctatgctatgcactgggtccgccaggctccaggcaaggggctggagtgggtggcagttatatcatatgatggaagtaataaatactacgcagactccgtgaagggccgattcaccatctccagagacaattccaagaacaccctgtatctgcaagtgagcagcctgagagctgaggacacggctgtgtattactgtgcgagagggtggggtgggagctactacgggtacttcgatgtctggggccgtggcaccctggtcactgtctcctcag

SEQ ID NO: 2840 - DNA, 364 bp, Homo sapiens
gaggtgcagctggtggagtccgggggaggcttagttcagcctggggggtccctgagactctcctgtgcagcctctggattcaccttcagtagttattggatgcactgggtccgccaagctccagggaaggggctggtgtgggtctcacgtattaatagtgatgggagtagcacaagctacgcggactccgtgaagggccgattcaccatctccagagacaacgccaagaacacgctgtatctgcaaatgaacagtctgagagccgaggacacggctgtgtattactgtgtaaaaggacgcgggagctactcccaagatgcttttgatatctggggccaagggacaatggtcaccgtctcttcag

SEQ ID NO: 2841 - DNA, 364 bp, Homo sapiens
gaggagcagctgatggagtctgggggaggcttggtacagcctggggagtccctgagactctcctgtgcagcctctggattcaccttcagtgcctatagcatgaactgggtccgccaggctccagggaaggggctggagtgggttgcatacattagtagtagtaggagtaccatatactacgcagactctgtgaagggccgattcaccatctccagagacaacgccaagaactcactgtttctgcaaatgaacagcctgagagccgaggacacggctgtgtattactgtgcgagagatattgtagtggtaccccagaatgcttttgatatctggggccaagggacaatggtcaccgtctcttcag

SEQ ID NO: 2842 - DNA, 364 bp, Homo sapiens
caggtgcagctggtgcagtctggggctgaggtgaagaagcctgggtcctcggtgaaggtctcctgcaaggcttctggaggcaccttcagcagctatgctatcagctgggtgcgacaggcccctggacaagggcttgagtggatgggagggatcatccctatctttggtacagcaaactacgcacagaagttccagggcagagtcacgattaccgcggacgaatccacgagcacagcctacatggagctgagcagcctgagatctgaggacacggccgtgtattactgtgcgagagatctatcctggaactacgtcttgctgctggatatctggggccaagggacaatggtcaccgtctcttcag

SEQ ID NO: 2843 - DNA, 364 bp, Homo sapiens
gaggtgcagctggtggagtctggaggaggcttgatccagcctggggggtccctgagactctcctgtgcagcctctgggttcaccgtcagaagcgactacatgagctgggtccgccaggctccacggaaggggctggagtgggtctcacttatttatagcggtggtagcacatactacgcagactccgtgaagggccgattcaccatctccagagacaattccaagaacacgctgtatcttcaaatgaacagcctgagagccgaggacacggccgtgtattactgtgcgagagctgcgcgagtagcatctaaaaaaaatgcttttgatatctggggccaagggacaatggtcaccgtctcttcag

SEQ ID NO: 2844 - DNA, 364 bp, Homo sapiens
caggtccagctggtacagtctggggctgaggtgaagaagcctggggcctcagtgaaggtctcctgcaaggtttccggatacaccctcaatgaattatccatgcactgggtgcgacaggctcttggagaagggcttgagtggatgggaggttttgatcctgaagatggtgaaacagtctacgcacacaagttccagggcagagtcaccatgaccgaggacacatctacagacacagcctacatggaactgagcagcctgagatctgaggacacggccgtgtattactgtgcaacagatttcgcctggaactacgccctcaggttcggcttctggggccagggcaccctggtcaccgtctcctcag

SEQ ID NO: 2845 - DNA, 385 bp, Homo sapiens
caggtgcagctggtgcagtctggggctgaggtgaagaagcctggggcctcagtgaaggtctcctgcaaggcttctggatacaccttcaccagttatgatatcaactgggtgcgacaggccactggacaagggcttgagtggatgggatggatgaaccctaacagtggtaacacaggctatgcacagaagttccagggcagagtcaccatgaccaggaacacctccataagcacagcctacatggagctgagcagcctgagatctgaggacacggccgtgtattactgtgcgagaggccggatcccacaaacctattactatgatagtagtggttacaactggttcgacccctggggccagggaaccctggtcaccgtctcctcag

SEQ ID NO: 2846 - DNA, 367 bp, Homo sapiens
caggtcaccttgagggagtctggtcctgcgctggtgaaacccacacagaccctcacactgacctgcaccttctctgggttctcactcagcactagtggaatgtgtgtgagctggatccgtcagcccccagggaaggccctggagtggcttgcacgcattgattgggatgatgataaatactacagcacatttctgaagaccaggctcaccatctccaaggacacctccaaaaaccaggtggtccttacaatgaccaacatggaccctgtggacacagccacgtattattgtgcacggacgaaagtgggaggtacggatttctggttcgaccgctggggccagggaaccctggtcaccgtctcctcag

SEQ ID NO: 2847 - DNA, 367 bp, Homo sapiens
caggtcaccttgagggagtctggtcctgcgctggtgaaacccacacagaccctcacactgacctgcaccttctctgggttctcactcagcactagtggaatgtgtgtgagctggatccgtcagcccccagggaaggccctggagtggcttgcacgcattgattgggatgatgataaatactacagcacatctctgaagaccaggctcaccatctccaaggacacctccaaaaaccaggtggtccttacaatgaccaacatggaccctgtggacacagccacgtattactgtgcacggacgaaactgggaggtacggatttctggttcgacccctggggccagggaaccctggtcaccgtctcctcag

SEQ ID NO: 2848 - DNA, 364 bp, Homo sapiens
caggtgcagttggtggagtcggggggaggcgtggtccagcctgggaggtccctgagactctcctgtacagcctctggattcgctttcagtacctatggcatgcactgggtccgccaggctccaggcaaggggctggaatgggtggcatttatttcatatgatgaaagtagtaaatattatgcagactccgtgaagggccgattcaccatctccagagacaattccaagaacacgctgtctctgcaaatggacagcctgagagtagaggacacggctatatattactgtgcgaaaaccggctgtagttctgccatctgttatgcgaactcctggggccagggaaccctggtcaccgtctcctcag

SEQ ID NO: 2849 - DNA, 364 bp, Homo sapiens
caggtgcaactggtggagtctgggggaggcgtggtccagcctgggaggtccctgggactctcctgtgcagcctctggattcaccttcagtagctatggcatgcactgggtccgccaggctccaggcaaggggctggagtgggtggcagctatatcatatgatggaagtaatgaatactgtgcagactccgtgaagggccgattcaccatctccagagacaattccaagaacacgctgtatctgcaaatgaacagcctgagagctgaggacacggctgtgtattactgtgcgaaagatgggagtgggacctactacggctggttcgacccctggggccagggaaccctggtcaccgtctcctcag

SEQ ID NO: 2850 - DNA, 364 bp, Homo sapiens
gaggtgcagctggtggagtctgggggaggcttggtacagcctggggggtccctgagactctcctgtgcagcctctggattcaccttcagtagctatagcatgaactgggtccgccaggctccagggaaggggctggagtgggtttcatacattagtagtagtagtagtaccatatactacgcagactctgtgaagggccgattcaccatctccagagacaacgccaagaactcactgtatctgcaaatgaacagcctgagagccgaggacacggctgtgtattactgtgcgagagagggtagatacgcggtgggaccctatattgactactggggccagggaaccctggtcaccgtctcctcag

SEQ ID NO: 2851 - DNA, 364 bp, Homo sapiens
caggtgcagctggtgcagtctggggctgaggtgaagaagcctggggcctcagtgaaggtctcctgcaaggcttctggatacaccttcaccggctactatatgcactgggtgcgacaggcccctggacaagggcttgagtggatgggatggatcaaccctaacagtggtggcacaaactatgcacagaagtttcagggcagggtcaccatgaccagggacacgtccatcagcacagcctacatggagctgagcaggctgagatctgacgacacggccgtgtattactgtgcgagagggggttattacttaagggttggagattttgactactggggccagggaaccctggtcaccgtctcctcag

SEQ ID NO: 2852 - DNA, 382 bp, Homo sapiens
caggtgcagctggtggagtctgggggaggcgtggtccagcctgggaggtccctgagactctcctgtgcagcctctggattcaccttcagtagctatgctatgcactgggtccgccaggctccaggcaaggggctggagtgggtggcagttatatcatatgatggaagcaataaatactacgcagactccgtgaagggccgattcaccatctccagagacaattccaagaacacgctgtatctgcaaatgaacagcctgagagctgaggacacggctgtgtattactgtgcgagagattcgaggtcaggtagagatggctacaattatctaggggatgcttttgatatctggggccaagggacaatggtcaccgtctcttcag

SEQ ID NO: 2853 - DNA, 382 bp, Homo sapiens
gaggtgcagctggtgcagtctggagcagaggtgaaaaagcccggggagtctctgaagatctcctgtaagggttctggatacagctttaccagctactggatcggctgggtgcgccagatgcccgggagaggcctggagtggatggggatcatctatcctggtgactctgataccagatacagcccgtccttccaaggccaggtcaccatctcagccgacaagtccatcagcaccgcctacctgcagtggagcagcctgaaggcctcggacaccgccatgtattactgtgcgaggggggaaggttactatgatagtagtgcttacctacgtcttgatgcttttgatatctggggccaagggacaatggtcaccgtctcttcag

SEQ ID NO: 2854 - DNA, 375 bp, Homo sapiens
caggtgcagctggtggagtctgggggaggcgtggtccagcctgggaggtccctgagactctcctgtgcagcctctggattcaccttcagtagctatggcatgcactgggtccgccaggctccaggcaaggggctggagtgggtggcagttatatcatatgatggaagtaataaatactatgcagactccgtgaagggccgattcaccatctccagagacaattccaagaacacgctgtatctgcaaatgaacagcctgagagctgaggacacggctgtgtattactgtgcgaaagattatagcagcagctggtaccgtaccccactctacggtatggacgtctggggccaagggaccacggtcaccgtctcctca

SEQ ID NO: 2855 - DNA, 385 bp, Homo sapiens
caggtcaccttgagggagtctggtcctgcgctggtgaaacccacacagaccctcacactgacctgcaccttctctgggttctcactcagcactactggaatgtgtgtgagctggatccgtcagcccccagggaaggccctggagtggcttgcactcattgattggggtgatgatgaatactacagcacatctctgaagaccaggctcaccatctccaagggcacctccaaaaaccaggtggtccttacaatgaccaacatggaccctgtggacacagccacgtattactgtgcacggacgcacctatatgatggaagtggttataagtaccttggtgatgcctttgatatctggggccaagggacaatggtcaccgtctcttcag

SEQ ID NO: 2856 - DNA, 382 bp, Homo sapiens
caggtgcagctggtgcagtctggggctgaggtgaagaagcctggggcctcagtgaaagtctcctgcaaggcttctggatacaccttcaccggctactttatgcactgggtgcgacaggcccctggacaagggcttgagtggatgggatggatcaaccctaacagtggtggcacaaactatgcacagaagtttcagggcagggtcaccatgaccagggacacgtccatcagcacagcctacatggagctgagcaggctgagatctgacgacacggccgtgtattactgtgcgagtgccgagaccaagagtagagatggctacaatcccaccctggaggcctttgatatttggggccaagggacaatggtcaccgtctcttcag

SEQ ID NO: 2857 - DNA, 382 bp, Homo sapiens
gaagtgcagctggtggagtctgggggaggcttggtacagcctggcaggtccctgagactctcctgtgcagcctctggattcacctttgatgattatgccatgcactgggtccggcaagctccagggaagggcctggagtgggtctcaggtattagttggaatagtggtagcataggctatgcggactctgtgaagggccgattcaccatctccagagacaacgccaagaactccctgtatctgcaaatgaacagtctgagagctgaggacacggccttgtattactgtgcaaaagatatggggggtattactatggttcggggagttatgggggatgcttttgatatctggggccaagggacaatggtcaccgtctcttcag

SEQ ID NO: 2858 - DNA, 364 bp, Homo sapiens
gaggtgcagctggtgcagtctggagcagaggtgaaaaagccgggggagtctctgaagatctcctgtaagggttctggatacaactttaccagctactggatcggctgggtgcgccagatgcccgggaaaggcctggagtggatggggatcatctatcctggtgactctgataccagatacaggccgtccttccaaggccaggtcaccatctcagccgacaagtccatcagttccgcctacctgcagtggagcagcctgaaggcctcggacaccgccatgtattactgtgcgagacataataaatatagtggctacgacactcttgactattggggccagggaaccctggtcaccgtctcctcag

SEQ ID NO: 2859 - DNA, 364 bp, Homo sapiens
caggtgcagctggtgcagtctggggctgaggtgaagaagcctgggtcctcggtgaaggtctcctgcaaggcttctggaggcaccttcagcaactatgctttccactgggtgcgacaggcccctggacaagggcttgagtggatgggagggatcatccctgtctttggtgcagcaaactacgcacagaagttccagggcagaatcacgattaccgcggtcgaatccacgagcacagcctacatggagctgagcagcctgagatctgaggacacggccgtgtattactgtgcgagagcccagactagttcgggccggtttggctttgactactggggccagggaaccctggtcaccgtctcctcag

SEQ ID NO: 2860 - DNA, 364 bp, Homo sapiens
caggtgcagctggtgcagtctggggctgaggtgaagaagcctgggtcctcggtgaaggtctcctgcaaggcttctggaggcaccttcagcagctatgctatcagctgggtgcgacaggcccctggacaagggcttgagtggatgggagggatcatccctatctttggtacagcaaactacgcacagaagttccagggcagagtcacgattaccgcggacgaatccacgagcacagcctacatggagctgagcagcctgagatctgaggacacggccgtgtattactgtgcgagagacatgagcggttcggggagttatctctttgactactggggccagggaaccctggtcaccgtctcctcag

SEQ ID NO: 2861 - DNA, 364 bp, Homo sapiens
caggtgcagctggtgcagtctggggctgaggtgaagaagcctgggtcctcggtgaaggtctcctgcaaggcttctggaggcaccttcagcagctatgctatcagctgggtgcgacaggcccctggacaagggcttgagtggatgggagggatcatccctatctttggtacaacaaattacgcacagaagttccagggcagagtcacgattaccgcggacgaatccacgagcacagcctacatggagctgagcagcctgagatctgaggacacggccgtgtattactgtgcgagaggtccgtccggctggtacttggactactttgactactggggccagggaaccctggtcaccgtctcctcag

SEQ ID NO: 2862 - DNA, 364 bp, Homo sapiens
caggtgcagctggtgcagtctggggctgaggtgaagaggcctgggtcctcggtgaaagtctcctgcaaggcttctggaggcaccttcagcagctattctatcaactgggtgcgacaggcccctggacaagggcttgagtggatgggagggatcatccctttctttgctacaacaaactacgcacagaagttccagggcagagtcacgattaccgcggacgaatccacgagcacagcctacatggagctgagcagcctgagatctgaggacacggccatatattactgtgcgggagccacaggggggagccaccttacgaactttgactactggggccagggaaccctggtcaccgtctcctcag

SEQ ID NO: 2863 - DNA, 364 bp, Homo sapiens
caggtgcagctggtgcagtctggggctgaggtgaagaagcctgggtcctcggtgaaggtctcctgcaaggcttctggaggcaccttcagcagctatgctatcagctgggtgcgacaggcccctggacaagggcttgagtggatgggagaaatcatccctatgtttggtacagcaaactacgcacagaagttccagggcagagtcacgattaccgcggacgaatccacgagcacagcctacatggagctgagcagcctgagatctgaggacacggccgtatattactgtgcgagaggaggagggtccgtgggtttcaactggttcgacccctggggccagggaaccctggtcaccgtctcctcag

SEQ ID NO: 2864 - DNA, 360 bp, Homo sapiens
caggtgcagctggtgcagtctggggctgaggtgaagaggcctgggtcctcggtgaaggtctcctgcaaggcttctggaggcaccttcagcagctatgctatcggctgggtgcgacaggcccctggacaagggcttgagtggatgggagggatcatccctgtctttggtacaacaaactacgcacagaagttccagggcagagtcacgattaccgcggacgaatccacgagcacagcctacatggagctgagcagcctgagatctgaggacacggccgtgtattactgtgcgagagccttgagtggttattactacgggtggttcgacccctggggccagggaaccctggtcaccgtctcc

SEQ ID NO: 2865 - DNA, 375 bp, Homo sapiens
caggtgcagctggtggagtctgggggaggcgtggtccagcctgggaggtccctgagactctcctgtgcagcctctggattcaccttcagtagctatggcatgcactgggtccgccaggctccaggcaaggggctggagtgggtggcagttatatcatatgatggaagtaataaatactatgcagactccgtgaagggccgattcaccatctccagagacaattccaagaacacgctgtatctgcaaatgaacagcctgagagctgaggacacggctgtgtattactgtgcgaaagatcaatccggacgcctaaccgactactactactacggtatggacgtctggggccaagggaccacggtcaccgtctcctca

SEQ ID NO: 2866 - DNA, 382 bp, Homo sapiens
gaggtgcagctggtgcagtctggagcagaggtgaaaaagcccggggagtctctgaagatctcctgtaagggttctggatacagttttaccacctactggatcggctgggtgcgccagatgcccgggaaaggcctggagtgggtggggatcatctatcctggtgactctgacaccagatacagcccgtccttccaaggccaggtcaccatctcagccgacaagtccatcagcaccgcctacctgcagtggagcagcctggaggcctcggacaccgccatgtattactgtgcgagacatctttttcctatgtctgatagtagtacttactattatctaagctttgactactggggccagggaaccctggtcaccgtctcctcag

SEQ ID NO: 2867 - DNA, 382 bp, Homo sapiens
gagctgcagctggtggagtctgggggaggcctggtcaagcctggggggtccctgagactctcctgtgcagcctctgcgttcatcttcagtagctataggatgaactgggtccgccaggctccagggaaggggctggagtgggtctcatccattagcagtactggtagtaatacaaactacgcagactcagtgaagggccgattcaccatctccagagacaacgccaagaattcactgtatctgcaaatgaatagcctgagagccgaggacacggctgtgtattactgtgtgagagacacaggttactatgataggagtggttattattgggtcgactattttgactactggggccagggaatcctggtcagcgtctcctcag

SEQ ID NO: 2868 - DNA, 364 bp, Homo sapiens
caggtgcagctggtggagtctgggggaggcttggtcaagcctggagggtccctgagactctcctgtgcagcctctggattcaccttcagtgactactacatgagctggatccgccaggctccagggaaggggctggagtgggtttcatacattagtagtagtagtagttacacaaactacgcagactctgtgaagggccgattcaccatctccagagacaacgccaagaactcactgtatctgcaaatgaacagcctgagagccgaggacacggctgtgtattactgtgcgagagtttactatggttcggggagttatcagttcgacccctggggccagggaaccctggtcaccgtctcctcag

SEQ ID NO: 2869 - DNA, 387 bp, Homo sapiens
gaggtgcagctggtggagtctgggggaggcttggtacagccagggcggtccctgagactctcctgtacagcttctggattcacctttggtgattatgctatgagctggtttcgccaggctccagggaaggggctggagtgggtaggtttcattagaagcaaagcttatagtgggacaacagaatacgccgcgtctgtgaaaggcagattcaccatctcaagagatgattccaaaagcatcgcctatctgcaaatgaacagcctgaaaaccgaggacacagccgtgtattactgtactagagtcgcgctagtcgactacagtaacctttactactactactactacatggacgtctggggcaaagggaccacggtcaccgtctcctca

SEQ ID NO: 2870 - DNA, 364 bp, Homo sapiens
caggtgcagctggtggagtctgggggaggcgtggtccagcctgggaggtccctgagactctcctgtgcagcctctggattcaccttcagtagctatgctatgcactgggtccgccaggctccaggcaaggggctggagtgggtggcagttatatcatatgatggaagcaataaatactacgcagactccgtgaagggccgattcaccatctccagagacaattccaagaacacgctgtatctgcaaatgaacagcctgagagctgaggacacggctgtgtattactgtgcgagagagcaatacgatttttggagtggtgacgaggggggctggggccagggaaccctggtcaccgtctcctcag

SEQ ID NO: 2871 - DNA, 364 bp, Homo sapiens
caggtgcagctggtggagtctgggggaggcgtggtccagcctgggaggtccctgagactctcctgtgcagcctctggattcaccttcagtagcaatggtatgcactgggtccgccaggctccaggcaaggggctggagtgggtggcagtcatatcatatgatggaagcaatcagtactacgcagactccgtgaagggccgcttcaccatctccagagacaattccaagaacacgctgtatctgcaaatgaacagcctgagaggtgaggacacggctgtgtattactgtgcgagagaggattaccatgacagtagtggttcatttgactactggggccagggaaccctggtcaccgtctcctcag

SEQ ID NO: 2872 - DNA, 364 bp, Homo sapiens
caggtgcagctggtggagtctgggggaggcctggtccagcctgggaggtccctgagactctcctgtgcagcctctggattcaccttcagtacctatgctatgcactgggtccgccaggctccaggcaaggggctggagtgggtggcagttatatcatatgatggaagcaataaatactacgcagactccgtgaagggccgattcaccatctccagagacaattccaagaacacgctgtatctgcaaatgaacagcctgagagctgaggacacggctgtgtattactgtgcgagatccagtggatacagctatggtgacaaatttgactactggggccagggaaccctggtcaccgtctcctcag

SEQ ID NO: 2873 - DNA, 364 bp, Homo sapiens
caggtgcagctggtggagtctgggggaggcgtggtccagcctgggaggtccctgagactctcctgtgcagcctctggattcaccttcagtagctatgctatgcactgggtccgccaggctccaggcaaggggctggagtgggtggcagttatatcatatgatggaagcaataaatactacgcagactccgtgaagggccgattcaccatctccagagacaattccaagaacacgctgtatctgcaaatgaacagcctgagagctgaggacacggctgtgtattactgtgcgagagatcggagtgggagctactgggggggttttgactactggggccagggaaccctggtcaccgtctcctcag

SEQ ID NO: 2874 - DNA, 364 bp, Homo sapiens
caggtgcagctggtggagtctgggggaggcgtggtccagcctgggaggtccctgagactctcctgtgcagcctctggattcaccttcagtagctatgctatgcactgggtccgccaggctccaggcaaggggctggagtgggtggcagttatatcatatgatggaagcaataaatactacgcagactccgtgaagggccgattcaccatctccagagacaattccaagaacacgctgtatctgcaaatgaacagcctgagagctgaggacacggctgtgtattactgtgcgagaatacggggagggagctacttttcctactttgactactggggccagggaaccctggtcaccgtctcctcag

SEQ ID NO: 2875 - DNA, 364 bp, Homo sapiens
caggtgcagctggtggagtctgggggaggcgtggtccagcctgggaggtccctgagactctcctgtgcagcctctggattcaccttcagtagctatgctatgcactgggtccgccaggctccaggcaaggggctggagtgggtggcagttatatcatatgatggaagcaataaatactacgcagactccgtgaagggccgattcaccatctccagagacaattccaagaacacgctgtatctgcaaatgaacagcctgagagctgaggacacggctgtgtattactgtgcgagatgccatagtgggagctactacgactctattgactactggggccagggaaccctggtcaccgtctcctcag

SEQ ID NO: 2876 - DNA, 376 bp, Homo sapiens
gaggtgcagctgttggagtctgggggaggcttggtacagcctggggggtccctgagactctcctgtgcagcctctggattcacctttagcaactatgccatgagctgggtccgccaggctccagggaaggggctggagtgggtctcagctattagttatagtggtggtagcacatactacgcagactccgtgaagggccggttcaccatctccagagacaattccaagaacacgctgtatctgcaaatgaacagcctgagagccgaggacacggccgtgtattactgtgcgacccccaggagcgcgtattactatgatagtagtgattattcatttgactactggggccagggaaccctggtcaccgtctcctcag

SEQ ID NO: 2877 - DNA, 364 bp, Homo sapiens
caggtgcagctggtggagtctgggggaggcgtggtccagcctgggaggtccctgagactctcctgtgcagcctctggattcaccttcaggagctatgctatacactgggtccgccaggctccaggcaaggggctggagtgggtggcagttatatcatatgatggaagcaataaatactacgcagactccgtgaagggccgattcaccatctccagagacaattccaagaacacgctgtatctgcaaatgaacagcctgagagctgaggacacggctgtgtattactgtgcgagagaaatgatagggggtagtggttattactttgactactggggccagggaaccctggtcaccgtctcctcag

SEQ ID NO: 2878 - DNA, 364 bp, Homo sapiens
caggtgcagctggtggagtctgggggaggcgtggtccagcctgggaggtccctgagactctcctgtgcagcctctggattcaccttcagtagctatgctatgcactgggtccgccaggctccaggcaaggggctggagtgggtggcagttatatcatatgatggaagcaataaatactacgcagactccgtgaagggccgattcaccatctccagagacaattccaagaacacgctgtatctgcaaatgaacagcctgagagctgaggacacggctgtgtattactgtgcgagggggtatagtgggagctactggggacactttgactactggggccagggaaccctggtcaccgtctcctcag

SEQ ID NO: 2879 - DNA, 364 bp, Homo sapiens
caggtgcagctggtggagtctgggggaggcgtggtccagcctgggaggtccctgagactctcctgtgcagcctctggattcaccttcagtagctatgctatgcactgggtccgccaggctccaggcaaggggctggagtgggtggcagttatatcatatgatggaagcaataaatactacgcagactccgtgaagggccgattcaccatctccagagacaattccaagaacacgctgtatctgcaaatgaacagcctgagagctgaggacacggctgtgtattactgtgcgagggatagtagtggttattactacggtccctttgactactggggccagggaaccctggtcaccgtctcctcag

SEQ ID NO: 2880 - DNA, 382 bp, Homo sapiens
gaggtgcagctggtggagtctgggggaggcttggtccagccgggggggtccctgagactctcctgtgcagcctctggattcagttttagtacctattggatgagctgggtccgccagactccagggaaggggctggagtgggtggccaacataaaggaagatggaagtgaggaatactatgtggactctgtgaagggccgattcaccatctccagagacaacgccaagaactcactgtatctgcaaatgaacagcctgagagccgaggacacggctgtttattactgcgcgagagattcgcctaggcgtcttactatggttcggggagccgcgggatactttgactactggggcccgggaaccctggtcaccgtctcctcag

SEQ ID NO: 2881 - DNA, 382 bp, Homo sapiens
gaggtgcagctggcggagtctgggggaggcttggtccagcctggggggtccctgagactctcctgtgcagcctctggattcacctttagtacctactggatgacctgggtccgccaggctccagggaaggggctggagtgggtggccaacataaagcaagatggaagtgacaaatactatgtggactctgtgaagggccgattcaccatctccagagacaacgccaacaactcactgtatctgcaaatgaacagcctgagagccgaggacacggctgtgtattactgtgcgagagattcgcctaggcgtattactatgggtcggggaatttcgggatactttgactactggggccagggaaccctggtcaccgtctccacag

SEQ ID NO: 2882 - DNA, 382 bp, Homo sapiens
caggtgcagctggtggagtctgggggaggcgtggtccagcctgggaggtccctgagactctcctgtgcagcctctggattcaccttcagtagctatggcatgcactgggtccgccaggctccaggcaaggggctggagtgggtggcagttatatcatatgatggaagtaataaatactatgcagactccgtgaagggccgattcaccatctccagagacaattccaagaacacgctgtatctgcaaatgaacagcctgagagctgaggacacggctgtgtattactgtgcgaaatcggagggggcttattgtagtggtggtagctgctacactggcctctttgactactggggccagggaaccctggtcaccgtctcctcag

SEQ ID NO: 2883 - DNA, 382 bp, Homo sapiens
caggtgcagctggtggagtctgggggaggcgtggtccagcctgggaggtccctgagactctcctgtgcagcctctggattcaccttcagtagttatggcatgcactgggtccgccaggctccaggcaaggggctggagtgggtggcagtgatatcatatgatggaagtaataaataccatgcagactccgtgaagggccgattcaccatctccagagacaattccaagaacacgctgtatctgcaaatgaacagcctgagagctgaggacacggctgtatattactgtgcgaaaactctctcgccgtattgtagtggtggtagctgcacaaatgggtactttgactactggggccagggaaccctggtcaccgtctcctcag

SEQ ID NO: 2884 - DNA, 382 bp, Homo sapiens
caggtgcagctggtggagtctgggggaggcgtggtccagcctgggaggtccctgagactctcctgtgcagcctctggattcaccttcaggaactatggcatgcactgggtccgccaggctccaggcaaggggctggagtgggtggcagttatattatatgatggaagtgataaatactatgcagactccgtgaagggccgattcaccatctccagagacaattccaagaacacgctgtatctgcaaatgaacagcctgagaactgaggacacggctctgtattactgtgcgaaagtgaccggcccttattgtagtggtggtagctgctactccgccccctttgactactggggccagggaaccctggtcaccgtctcctcag

SEQ ID NO: 2885 - DNA, 377 bp, Homo sapiens
cagctgcagctgcaggagtcgggcccaggactggtgaagccttcggagaccctgtccctcacctgcactgtctctggtggctccatcagcagtaatggttacttctggggctggatccgccagcccccagggaagggcctggagtggattgggaatatctattatagtgggagcacctactacaacccgtccctcaagagtcgagtcaccatatcatcagacacgtccaagaaccagttctccctggagctgagctctgtgaccgccgcggacacggccgtgtatttctgtgcgagcgaggccgtggtaactgcggagtactcccacgactacggtatggacgtctggggccaagggaccgcggtcaccgtctcctc

SEQ ID NO: 2886 - DNA, 376 bp, Homo sapiens
gaggtgcagctgttggagtctgggggaggcttggtacagcctgggaggtccctgagactctcctgtgcagcctctggattcacctttagtaactatgccatgagctgggtccgccaggctccagggaaggggctggagtgggtgtcactaattagtggcagtggtggtagcacatactacgcagactccgtgaggggccggttcaccatctccagagacaattccaagaacacgctgtatctgcaaatgaacagcctgagagccgaggacacggccgtatatcactgtgcgaaagtggaatcaggatactgtagtggtggggcctgcacgtactttgactcctggggccagggaacccgggtcaccgtctcctcag

SEQ ID NO: 2887 - DNA, 381 bp, Homo sapiens
gaggtgcagctggtggagtctgggggaggcttggtacagcctggggggtccctgagactctcctgtgcagcctctggattcaccttcagtagctatagcatgaactgggtccgccaggctccagggaaggggctggagtgggtttcatacattagtagtagtagtagtaccatatactacgcagactctgtgaagggccgattcaccatctccagagacaacgccaagaactcactgtatctgcaaatgaacagcctgagagccgaggacacggctgtgtattactgtgcgagattacaatcatattgtggtggtgactgctatttcccggccttcggtatggacgtctggggccaagggaccacggtcaccgtctcctca

SEQ ID NO: 2888 - DNA, 381 bp, Homo sapiens
caggttcagctggtgcagtctggagctgaggtgaagaagcctggggcctcagtgaaggtctcctgcaaggcttctggttacacctttaccagctatggtatcagctgggtgcgacaggcccctggacaagggcttgagtggatgggatggatcagcgcttacaatggtaacacaaactatgcacagaagctccagggcagagtcaccatgaccacagacacatccacgagcacagcctacatggagctgaggagcctgagatctgacgacacggccgtgtattactgtgcgagacggtatagcagtggctgggacccgggattttactactactactacatggacgtctggggcaaagggaccacggtcaccgtctcctca

SEQ ID NO: 2889 - DNA, 364 bp, Homo sapiens
caggtgcagctggtggagtctgggggaggcgtggtccagcctgggaggtccctgagactctcctgtgcagcctctggattcaccttcagtagctatgctatgcactgggtccgccaggctccaggcaaggggctggagtgggtggcagttatatcatatgatggaagcaataaatactacgcagactccgtgaagggccgattcaccatctccagagacaattccaagaacacgctgtatctgcaaatgaacagcctgagagctgaggacacggctgtgtattactgtgcgagagatagaagcagtggctggggggatgcttttgatatctggggccaagggacaatggtcaccgtctcttcag

SEQ ID NO: 2890 - DNA, 364 bp, Homo sapiens
caggtgcagctggtggagtctgggggaggcgtggtccagcctgggaggtccctgagactctcctgtgcagcctctggattcaccttcattagctattctatgcactgggtccgccaggctccaggcaaggggctggagtgggtggcagttgtatcatatgatggaaccaataaatactacgcagactccgtgaggggccgattcaccatctccagagacaattccaagaacacgctgtatctgcaaatgaacagcctgagagctgaggacacggctgtctattactgtgcgagagcgcatagtgggacctactatggtgcttttgatatctggggccaagggacaatggtcagcgtctcttcag

SEQ ID NO: 2891 - DNA, 364 bp, Homo sapiens
caggtgcagctggtggagtctgggggaggcgtggtccagcctgggaggtccctgagactctcctgtgcagcctctggattcaccttcagtagctatgctatgcactgggtccgccaggctccaggcaaggggctggagtgggtggcagttatatcatatgatggaagcaataaatactacgcagactccgtgaagggccgattcaccatctccagagacaattccaagaacacgctgtatctgcaaatgaacagcctgagagctgaggacacggctgtgtattactgtgcgagcggcccgggtgggagctactatgatgcttttgatatctggggccaagggacaatggtcaccgtctcttcag

SEQ ID NO: 2892 - DNA, 364 bp, Homo sapiens
caggtgcagctggtggagtctgggggaggcgtggtccagcctgggaggtccctgagactctcctgtgcagcctctggattcaccttcagtagctatgctatgcactgggtccgccaggctccaggcaaggggctggagtgggtggcagttatatcatatgatggaagcaataaatactacgcagactccgtgaagggccgattcaccatctccagagacaattccaagaacacgctgtatctgcaaatgaacagcctgagagctgaggacacggctgtgtattactgtgcgagagcctatagtgggagctacggaggtgcttttgatatctggggccaagggacaatggtcaccgtctcttcag

SEQ ID NO: 2893 - DNA, 364 bp, Homo sapiens
gaggtgcagctggtggagtctgggggaggcttggtgcagccagggcggtccctgagactctcctgtacagcttctggattcacctttggtgattatgctatgagttggttccgccaggctccagggaaggggctggagtgggtcggtttcattagaagcaaagcttatggtgagacaacacaatacgccgcgtctgtgaaaggcagattcaccatatcaagagatgattccaaaagcatcgcctatgtgcaaatgaacagcctgaaaaccgaagacacagccgtgtattattgtactagagaggtcaccggggtcagcccgggggaccactggggccagggaaccctggtcaccgtctcctcag

SEQ ID NO: 2894 - DNA, 358 bp, Homo sapiens
caggttcagctggtgcagtctggagctgaggtgaagaagcctggggcctcagtgaaggtctcctgcaaggcttctggttacacctttaccagctatggtatcagttgggtgcgacaggcccctggacaagggcttgagtggatgggatggatcagcgcttacaatggtaacacaaactttgcacagaagctccagggcagagtcaccatgaccacagacacatccacgagcacagactacatggagctgaggaacctgagatctgacgacacggccgtgtattactgtgcgatggctacaggtggttatggctggttcgacccctggggccagggaaccctggtcaccgtctcctcag

SEQ ID NO: 2895 - DNA, 358 bp, Homo sapiens
caggtgcagctggtggagtctgggggaggcgtggtccagcctgggaggtccctgagactctcctgtgcagcctctggattcaccttcagtagctatggcatgcactgggtccgccaggctccaggcaaggggctggagtgggtggcagttatatcatatgatggaagtaataaatactatgcagactccgtgaagggccgattcaccatctccagagacaattccaagaacacgctgtatctgcaaatgaacagcctgagagctgaggacacggctgtatattactgtgcgagatgtagtggttattattctaactttgactactggggccagggaaccctggtcaccgtctcctcag

SEQ ID NO: 2896 - DNA, 364 bp, Homo sapiens
caggtgcagctggtgcagtctggggctgaggtgaagaagcctggggcctcagtgaaggtttcctgcaaggcatctggatacaccttcaccagctactatatgcactgggtgcgacaggcccctggacaagggcttgagtggatgggaataatcaaccctagtggtggtagcacaagctacgcacagaagttccagggcagagtcaccatgaccagggacacgtccacgagcacagtctacatggagctgagcagcctgagatctgaggacacggccgtgtattactgtgcgagagattttattatcagtgggagcttccgctttgactactggggccagggaaccctggtcaccgtctcctcag

SEQ ID NO: 2897 - DNA, 376 bp, Homo sapiens
caggtgcagctggtggagtctgggggaggcgtggtccagcctgggaggtccctgagactctcctgtgcagcctctggattcaccttcagtagctatgctatgcactgggtccgccaggctccaggcaaggggctggagtgggtggcagttatatcatatgatggaaccaataaatactacgcagactccgtgaagggccgattcaccatctccagagacaattccaagaacacgctgtatctgcaaatgaacagcctgagagctgaggacacggctgtgtattactgtgcgagagattcgtcgatttttggagtgcttattatgccctcctactttgactactggggccagggaaccctggtcaccgtctcctcag

SEQ ID NO: 2898 - DNA, 364 bp, Homo sapiens
caggtgcagttggtgcagtctggggctgaggtgaagaagcctggggcctcagtgaaggtttcctgcaaggcatctggatacaccttcaccaactactatatacactgggtgcgacaggcccctggacaagggcttgagtggatgggaataatcaaccctagtggtggtagcacaagctacgcacagaagttccagggcagagtcaccatgaccagggacacgtccacgagcacagtctacatggagctgagcagcctgagatctgaggacacggccgtgtatttctgtgcgagagattgggatatagcagataatgggtactttgactactggggccagggaaccctggtcaccgtctcctcag

SEQ ID NO: 2899 - DNA, 361 bp, Homo sapiens
cagctgcagctgcaggagtccggctcaggactggtgaagccttcacagaccctgtccctcacctgcgctgtctctggtggctccatcagcagtggtggttactcctggagctggatccggcagccaccagggaagggcctggagtggattgggtacatctatcatagtgggagcacctactacaacccgtccctcaagagtcgagtcaccatatcagtagacaggtccaagaaccagttctccctgaagctgagctctgtgaccgccgcggacacggccgtgtattactgtgccagagctttagtattacccacctactttgactactggggccagggaaccctggtcaccgtctcctcag

SEQ ID NO: 2900 - DNA, 358 bp, Homo sapiens
caggtgcagctggtgcagtctggggctgaggtgaagaagcctgggtcctcggtgaaggtctcctgcaaggcttctggaggcaccttcagcagctatgctatcagctgggtgcgacaggcccctggacaagggcttgagtggatgggagggatcatccctctctttggtacagcaaactacgcacagaagttccagggcagagtcacggttaccgcggacgactccacgagcacagcctacatggagctgagcagcctgagatctgaggacacggccgtgtattactgtgcgagagaaaggttggctatgggaactgttgactactggggccagggaaccctggtcaccgtctcctcag

SEQ ID NO: 2901 - DNA, 358 bp, Homo sapiens
caggtccagctggtgcagtctggggctgaggtgaagaagcctgggtcctcagtgaaggtctcctgcaaggcttctggaggcaccttcagcagctatgctatcagctgggtgcgacaggcccctggacaagggcttgagtggatgggagggatcatccctatccttggtatagcaaactacgcacagaagttccagggcagagtcacgattaccgcggacaaatccacgagcacagcctacatggagctgagcagcctgagatctgaggacacggccgtgtattactgtgcgagagatcggggaagtgggagctactacgattactggggccagggaaccctggtcaccgtctcctcag

SEQ ID NO: 2902 - DNA, 358 bp, Homo sapiens
caggtacagctgcaggagtcgggcccaggactggtgaagccttcggagaccctgtccctcagttgcactgtctctggctactccatcagcggtggctaccactggggctggatccggcagcgcccagggaaggggctggagtggattgggagtctgtctcaaagtgggagcacctactacaacccgtccctcaagagtcgagtcaccatgtcagtagacccgtccaaaaaccagttctccctgaagctgagctctgtgaccgccgcagacacggccgtgtattactgtgcgagagtcgcgaacggaggggaattttttgactactggggccagggaaccctggtcaccgtctcctcag

SEQ ID NO: 2903 - DNA, 358 bp, Homo sapiens
caggtgcagctggtggagtctgggggaggcgttgtccaacctgggaggtccctgagactctcctgtgcagcctctggattcaccttcagtagctatgctatgcactgggtccgccaggctccaggcaaggggctggagtgggtggcagttatatcatatgatggaagcaagaaatattatgaagattccgtgaagggccgattcaccatctccagagacaattccaagaacacgctgtatctgcaaatgaacagcctgagagctgaggacacggctgtatattactgtgcgggagccgggtatagcagtggctgggggggctactggggccagggaaccctggtcaccgtctcctcag

SEQ ID NO: 2904 - DNA, 358 bp, Homo sapiens
caggtacaactagtggagtctgggggaggcgtggtccagcctgggaggtccctgagactctcctgtgtagcctctggatacagcttcagcacctctgctatgcactgggcccgccaggctccaggcaaggggctggagtgggtggcagttatatcatatgatggaaacaataaatactacgcagactccgtgaagggccgattcaccatctccagagacaattccaagaacacgttgtatgtgcaaatgaacagcctgagagctgaggacacggctgtgtattactgtgcgagaggatatagtgcctataaatttcttgacttttggggccagggaaccctggtcaccgtctcctcag

SEQ ID NO: 2905 - DNA, 358 bp, Homo sapiens
gaggtgcagctggtggagtctgggggaggcctggtcaagcctggggggtccctgagactctcctgtgcagcctctggattcaccttcagtaactatgacatgaactgggtccgccaggctccagggaagggcctggagtgggtctcatccattagtagtactagtagttacatatactacgcagactcagtgaagggccgattcaccatctccagagacaacgccaagaactcactgtatctgcaagtgaacagcctgagagccgaggacacggctgtgtattactgtgcgagagcgggaacggtgaatctgggacttgactactggggccagggaaccctggtcaccgtctcctcag

SEQ ID NO: 2906 - DNA, 358 bp, Homo sapiens
gaggtgcagctggtggagtctgggggaggcttggtccagcctggggggtccctgagactctcctgtgcagcctctggattcacctttagtagctattggatgagctgggtccgccaggctccagggaaggggctggagtgggtggccaacataaagcaagatggaagtgagaaatactatgtggactctgtgaagggccgattcaccatctccagagacaacgccaagaactcactgtatctgcaaatgaacagcctgagagccgaggacacggccgtgtattactgtgcgagaatgtatagcagcagctggcattatgaaggctggggccagggaaccctggtcaccgtctcctcag

SEQ ID NO: 2907 - DNA, 375 bp, Homo sapiens
gacgtgcaggtggtgcagtctggagcagaggtgaagaggccgggggagtctctgaggatctcctgccgcgattctggagacaactttttcaacaagtgggtcggctgggtgcgccagacgcccggcaaaggcctagaatggatgggagtcatctatttcggtgactcgaagactagatacaatccgtccttccaaggccaggtcaccatgtccgccgacaagtccatctggaccgcctacttgcagtggagcagcctgaaggcctcggacaccgccacatattactgtgcgacgattcccgccggatttagtaattggtatacgagaagttattttaagatgtggggccaagggacaacggtcaccgtttcctca

SEQ ID NO: 2908 - DNA, 358 bp, Homo sapiens
gaggtgcagctggtggagtctgggggaggcttggtccagcctggggggtccctgagactctcctgtgcagcctctggattcacctttagtagctattggatgagctgggtccgccaggctccagggaaggggctggagtgggtggccaacataaagcaagatggaagtgagaaatactatgtggactctgtgaagggccgattcaccatctccagagacaacgccaagaactcactgtatctgcaaatgaacagcctgagagccgaggacacggccgtgtattactgtgcgagggtaccagccactacttggtactttgactactggggccagggaaccctggtcaccgtctcctcag

SEQ ID NO: 2909 - DNA, 361 bp, Homo sapiens
cagctgcagctgcaggagtcgggcccaggactggtgaagccttcggagaccctgtccctcacctgcactgtctctggtggctccatcagcagtagtagttactactggggctggatccgccagcccccagggaaggggctggagtggattgggagtttctattatagtgggagcacctactacaacccgtccctcaagagtcgagtcaccatatcagtagacacgtccaagaaccacttctccctgaagctgtcctctgtgaccgccgcggacacggccgtatattactgtgcgagagatgaatacggtgactattctgtcccgatttggggccagggaaccctggtcaccgtctcctcag

SEQ ID NO: 2910 - DNA, 361 bp, Homo sapiens
cagctgcagctgcaggagtcgggcccaggactggtgaagccttcggagaccctgtccctcacctgcactgtctctggtggctccatcagcagtagtagttactactggggctggatccgccagcccccagggaaggggctggagtggattgggagtatctattatagtgggagcacctactacaacccgtccctcaagagtcgagtcaccatatccgtagacacgtccaagaaccagttctccctgaagctgagctctgtgaccgccgcagacacggctgtgtattactgtgcgagacactcggactacggtggtaaccacgagtactggggccagggaaccctggtcaccgtctcctcag

SEQ ID NO: 2911 - DNA, 382 bp, Homo sapiens
caggtgcagctggtggagtctgggggaggcgtggtccagcctgggaggtccctgagactctcctgtgcagcctctggattcaccttcagtagctatgctatgcactgggtccgccaggctccaggcaaggggctggagtgggtggcagttatatcatatgatggaagcaataaatactacgcagactccgtgaagggccgattcaccatctccagagacaattccaagaacacgctgtatctgcaaatgaacagcctgagagctgaggacacggctgtgtattactgtgcgagtgagagaaccactacgtattactatgatagtagtggttattcaagttttgactactggggccagggaaccctggtcaccgtctcctcag

SEQ ID NO: 2912 - DNA, 354 bp, Homo sapiens
gaggtgcagctggtggagtctggaggaggcttgatccagcctggggggtccctgagactctcctgtgcagcctctgggttcgccgtcagtagcaactacatgatctgggtccgccaggctccagggaaggggctggagtgggtctcaattatttatagcgatggtagcccatcctacgcagactccgtgaagggccgattcaccatctccagagacaattccaagaacacgctgtatcttcaaatgaacaacctgaaaaccgaagacacggccgtgtactactgtgcgagagatcggtcgggggggtacggtttggacgtctggggcctagggaccacggtcaccgtctcctca

SEQ ID NO: 2913 - DNA, 357 bp, Homo sapiens
gaagtgcagctggtggagtctgggggagacttggtacagcctggcaggtccctgagactctcctgtgcagtctctggattcacctttgatgattatgccatgcactgggtccggcaagctccagggaagggcctggagtgggtctcaggtattagttggaatagtggtagcataggctatgcggactctgtgaagggccgattcaccatctccagagacaacaccaagaactccctgtatctgcaaatgaacagtctgagagctgaggacacggccttgtattactgtgctcgaggggatacgacttactactacatggacgtctggggcaaagggaccacggtcaccgtctcctca

SEQ ID NO: 2914 - DNA, 358 bp, Homo sapiens
caggtgcagctggtggagtctgggggaggcgtggtccagcctgggaggtccctgagactctcctgtgcagcctctggattcaccttcagtatctatgctatgcactgggtccgccaggctccaggcaaggggctggagtgggtggcagttatatcatatgatggaagcaataaatactacgcagactccgtgaagggccgattcaccatctccagagacaattccaagaacacgctgtatctgcaaatgaacagcctgagagctgaggacacggctgtgtattactgtagtgatagtagtggttattacaatgcttttgatatctggggccaagggacaatggtcaccgtctcttcag

SEQ ID NO: 2915 - DNA, 355 bp, Homo sapiens
caggtgcagctgcaggagtcgggcccaggactggtgaagccttcggagaccctgtccctcacctgcactgtctctggtggctccatcagtagttactactggagctggatccggcagcccccaggggagggactggagtggattgggtatatctattacactgggagcaccaactacaacccctccctcaagagtcgagtcaccatatcagtagacacgtccaagaaccagttctccctgaagctgagctctgtgaccgccgcagacacggccgtgtattactgtgcgagaactctgaattactttgatgaccgtgactattggggccagggaaccctggtcaccgtctcctcag

SEQ ID NO: 2916 - DNA, 361 bp, Homo sapiens
cagatcaccttgaaggagtctggtcctacgctggtgaaacccacacagaccctcacgctgacctgcaccttctctgggttctcactcagcactagtggagtgggtgtgggctggatccgtcagcccccaggaaaggccctggagtggcttgcactcatttattgggatgatgataagcgctacagcccatctctgaagagcaggctcaccatcaccaaggacacctccaaaaaccaggtggtccttacaatgaccaacatggaccctgtggacacagccacatattactgtgcacacagacgagctacctttgatgcttttgatatctggggccaagggacaatggtcaccgtctcttcag

SEQ ID NO: 2917 - DNA, 353 bp, Homo sapiens
caggtgcaactacagcagtggggcgcaggactgttgaagccttcggagaccctgtcccgcacctgcgctgtctacggtgggtccttcagtggttactcctggacctggatccgccagcccccagggaaggggctggagtggattggggacatcaataatagtggaagcaccaactacaatccgtccctcaagagtcgagtcaccatatcagtagacacgtccaagaaccagttctccctgaagctgacatctgtgaccgccgcggacacggctgtgtattactgtgcgagaacctggggaattcggtggtacttcgatgtctgggaccgtggcaccctggtcactgtctcctc

SEQ ID NO: 2918 - DNA, 375 bp, Homo sapiens
gaggtgcagctggtgcagtctggagcagaggtgaaaaagcccggggagtctctgaagatctcctgtaagggttctggatacagttttaccagctactggatcggctgggtgcgccagatgcccgggaaaggcctggagtggatggggatcatctatcctggtgactctgataccagatacagcccgtccttccaaggccaggtcaccatctcagccgacaagtccatcaacaccgcctacctgcagtggagcagcctgaaggcctcggacaccgccatgtattactgtgcgagattgacggcaataccagcagctggctactactactacggtatggacgtctggggccaagggaccacggtcaccgtctcctca

SEQ ID NO: 2919 - DNA, 361 bp, Homo sapiens
caggtcaccttgagggagtctggtcctgcgctggtgaaacccacacagaccctcacactgacctgcaccttctctgggttctcactcagcactagtggaatgtgtgtgagctggatccgtcagcccccagggaaggccctggagtggcttgcacgcattgattgggatgatgataaatactacagcacatctctgaggacgaggctcaccatctccaaggacacctccaaaaaccaggtggtccttacaatgaccaacatggaccctgtggacacagccacgtattactgtgcacggggactaagtatggtggtagcctttgactactggggccagggaaccccggtcaccgtctcctcag

SEQ ID NO: 2920 - DNA, 361 bp, Homo sapiens
caggtcaccttgagggagtctggtcctgcgctggtgaaacccacacagaccctcacactgacctgcaccttctctgggttctcactcagcactagtggaatgtgtgtgagctggatccgtcagcccccagggaaggccctggagtggcttgcacgcattgattgggacgatgataaatactacagcacatctctgaggaccaggctcaccatctccaaggactcctccaaaaaccaggtggtccttacaatgaccaacatggaccctgtggacacagccacgtattactgtgcacgagtaccagctgctatcactgccccggactactggggccagggaaccctggtcaccgtctcctcag

SEQ ID NO: 2921 - DNA, 379 bp, Homo sapiens
gaggtgcagctggtggagtctgggggaggcttggtccagcctggggggtccctgagactctcctgtgcagcctctggattcacctttagtagctattggatgagctgggtccgccaggctccagggaaggggctggagtgggtggccaacataaagcaagatggaagtgagaaatactatgtggactctgtgaagggccgattcaccatctccagagacaacgccaagaactcactgtatctgcaaatgaacagcctgagagccgaggacacggccgtgtattactgtgcgagagattcacacgatattttgactggttattatgccactgatgcttttgatatctggggccaagggacaatggtcaccgtctcttcag

SEQ ID NO: 2922 - DNA, 382 bp, Homo sapiens
cagctgcagctgcaggagtcgggcccaggactggtgaagccttcggagaccctgtccctcacctgcactgtctctggtggctccatcagcagtagtagttactactggggctggatccgccagcccccagggaaggggctggagtggattgggagtatctattatagtgggagcacctactacaacccgtccctcaagagtcgagtcaccatatccgtagacacgtccaagaaccagttctccctgaagctgagctctgtgaccgccgcagacacggctgtgtattactgtgcgagacataagcccaacgatattttgactggttattactatgatgcttttgatatctggggccaagggacaatggtcaccgtctcttcag

SEQ ID NO: 2923 - DNA, 355 bp, Homo sapiens
gaggtgcagctggtggagtctggaggaggcttgatccagcctggggggtccctgagactctcctgtgctgcctctgggctcaccgtcagtagcaactacatgagctgggtccgccaggctccagggaaggggctggagtgggtctcagttatttatagcggtggtagcacatactacgcagactccgtgaagggccgattcaccatctccagagacaattccaagaacacgctgtatcttcaaatgaacagcctgagagccgaggacacggccgtgtattactgtgcgagagatctggggccagtgggagccactacgtttgggggccaggggaccctggtcaccgtctcctcag

SEQ ID NO: 2924 - DNA, 355 bp, Homo sapiens
gaggtgcagctggtggagtctggaggaggcttgctccagcctggggggtccctgagactctcctgtgcagcctctgggttcaccgtcagtagcaactacatgagttgggtccgccaggctccagggaaggggctggagtgggtctcagttatttatagcggtggtagcacatactacgcagactccgtgaagggccgatttaccatctccagagacaattccaagaacacgctgtatcttcaaataaacagcctgagagccgaggacacggccgtgtattactgtgcgagaggagacgggtgggagcccccctttgactactggggccagggaaccctggtcaccgtctcctcag

SEQ ID NO: 2925 - DNA, 355 bp, Homo sapiens
gaggtgcagctggtggagtctggaggaggcttgatccagcctggggggtccctgagactctcctgtgcagcctctgggttcaccgtcagtagcaactacatgagctgggtccgccaggctccagggaaggggctggagtgggtctcacttatttacagtggtggtagcacatactacgcagactccgtgaagggccggttcaccatctccagagacaattccaagaacacgctgtatcttcaaatgaacagcctgagagccgaggacacggccgtgtattactgtgcgagagatggtatggcagtggctggtcacgactactggggccagggaaccctggtcaccgtctcctcag

SEQ ID NO: 2926 - DNA, 358 bp, Homo sapiens
caggtgcagctggtggagtctgggggaggcttggtcaagcctggagggtccctgagactctcctgtgcagcctctggattcaccttcagtgactactacatgagctggatccgccaggctccagggaaggggctggagtgggtttcatacattagtagtaggagtagttacacaaactacgcagactctgtgaagggccgattcaccatctccagagacaacgccaagaactcactgtatctgcaaatgaacagcctgagagccgaggacacggctgtgtattactgtgccagagcgggcagccgtccgtacaactttgaccactggggccagggaaccctggtcaccgtctcctcag

SEQ ID NO: 2927 - DNA, 379 bp, Homo sapiens
cagctgcagctgcaggagtcgggcccaggactggtgaagccttcggagaccctgtccctcacctgcactgtctctggtggctccatcagcagtggtagttactactggggctgggtccgccagcccccagggaaggggctggaatggattgggagtatctattatagtgggaccacctactacaacccgtccctcaagagtcgagtcaccatatccgtggacacatccaagaaccagttctccctgaagctgagctctgtgaccgccgcagacacggctgtgtattactgtgcgaaccgtccgattacgatttttggagtggttgttatggactggttcgacccctggggccagggaaccctggtcaccgtctcctcag

SEQ ID NO: 2928 - DNA, 379 bp, Homo sapiens
gaggtgcagctgttggagtctgggggaggcttggtacagcctggggggtccctgagactctcctgtgcagcctctggattcacctttaacacctatgccatgagctgggtccgccaggctccagggaaggggctggagtgggtctcggctattagtggtagtggtggtagcacatactacgcagactccgtgaagggccggttcaccatctccagagacaattccaagaacacgctgtatctgcacatgaacagcctgagagccgaggacacggccgtatatcactgtgcgaaagaagtgggatattgtattagtaccagctgctacccaggtgcttttgatatctggggccaagggacaatggtcaccgtctcttcag

SEQ ID NO: 2929 - DNA, 376 bp, Homo sapiens
caggtgcagctacagcagtggggcgcaggactgttgaagccttcggagaccctgtccctcacctgcgctgtctatggtgggtccttcagcggtttctactggacctggatccgccagcccccagggaaggggctggagtggattggagaaatcaatcatagtggaaccaccaactacaacccgtccctcaagagtcgagtgaccatatcagtagccacgtccaagaaccagttctccctgaagctgacctctgtgaccgccgcggacacggctgtatattactgtgcgaggacccccgattacgatattttgactggttcttattctgatggttttgatgtctggggccaagggacaagggtcaccgtctcttcag

SEQ ID NO: 2930 - DNA, 379 bp, Homo sapiens
gaagtgcagctggtgcagtccggagcagaggtgaaaaagcccggggagtctctgaggatctcctgtaagggttctggatacagctttaccagctactggatcagctgggtgcgccagatgcccgggaaaggcctggagtggatggggaggattgatcctagtgactcttataccaactacagcccgtccttccaaggccacgtcaccatctcagctgacaagtccatcagcactgcctacctgcagtggagcagcctgaaggcctcggacaccgccatgtattactgtgcgagactcggatactatgatagtagtggttattactaccatggggcttttgatatctggggccaagggacaatggtcaccgtctcttcag

SEQ ID NO: 2931 - DNA, 289 bp, Homo sapiens
agctatggcatgcactgggtccgccaggctccaggcaaggggctggagtgggtggcagatatatcatatgatggaagtaacaaatactatgcagactccgtgaagggccgattcaccatctccagagacaattccaagaacacgctgtatctgcaaatgaacagcctgagagctgaggacacggctgtgtattactgtgcgaaagcgggttactatgatagtagtggttattaccaagatgatgcttttgatatctggggccaagggacaatggtcaccgtctcttcag

SEQ ID NO: 2932 - DNA, 355 bp, Homo sapiens
caggtgcagctgcaggagtcgggcccagaactggtgaagccttcggagaccctgtccctcacctgcactgtctctggtggctccatcagtagttactactggagctggatccggcagcccccagggaagggactggagtggattgggtatatctattacagtgggagcaccaactacagcccctccctcaagagtcgactcaccatatcagtagacacgtccaagaaccagttctccctgaagctgagctctgtgaccgccgcagacacggccgtgtattactgtgcgtcatcttactccctgtacaactggttcgacccctggggccagggaaccctggtcaccgtctcctcag

SEQ ID NO: 2933 - DNA, 379 bp, Homo sapiens
gaggtgcagctgttggagtctgggggaggcttggtacagcctggggggtccctgagactctcctgtgcagcctctggattcacctttagcagctatgccatgagctgggtccgccaggctccagggaaggggctggagtgggtctcagctattagtggtagtggtggtagcacatactacgcagactccgtgaagggccggttcaccatctccagagacaattccaagaacacgctgtatctgcaaatgaacagcctgagagccgaggacacggccgtatattactgtgcgaaatgtcgggggagcgttaattacgatttttggagtggttatacccatgactactggggccagggaaccctggtcaccgtctcctcag

SEQ ID NO: 2934 - DNA, 379 bp, Homo sapiens
gaggtgcagttgttggagtctgggggaggcttggtacagcctggggggtccctgagactctcctgtgtagtctctgggatcccctttatcacttatgccatgagctgggtccgccaggctccagggaaggggctggagtgggtctcaagtatgagtaataggggtggtaatacatactacgcagactccgtgaagggccggttcaccatttccagagacagatccaagaacacgctgtatctgcaaatgaacagcctgagagccgaggacacggccgtatattactgtgcgaaagatccggattactatgataatagtggatatttcactgagggctttgactactggggccagggaaccctggtcaccgtctcctcag

SEQ ID NO: 2935 - DNA, 377 bp, Homo sapiens
caggtgcagctggtagagtctgggggaggcgtggtccagcctggggagtccctgagactctcctgtgcagcctctggattcgccttcaataactatgctatgcattgggtccgccaggctccagacaaggggctggagtgggtggcacttgtctcatatgacggaaacaaaagatactacgcagagtccgtgaagggccgattcaccatctccagagacaactccaagaacacgctgaatctgcaaatgaacagcctgagacctgaggacacggctgtgtattactgtgcgcgagagatgagtggtagtagttcttattattacccgtggaactggctcgacccctggggccagggaaccctggtcaccgtctcctc

SEQ ID NO: 2936 - DNA, 379 bp, Homo sapiens
gaagtgcagctggtggagtctgggggaggcttggtacagcctggcaggtccctgagactctcctgtgcagcctctggattcacctttgatgattatgccatgcactgggtccggcaagctctagggaaggggctggagtgggtctcaggtattagttggaatagtggtagcataggctatgcggactctgtgaagggccgattcaccatctccagagacaacgccaagaactccctgtatctgcaaatgaacagtctgagagttgaggacacggccttgtattactgtgcaaaagatgctttgtatagcagctcgttcgacccgagagattactactttgactactggggccagggaaccctggtcaccgtctcctcag

SEQ ID NO: 2937 - DNA, 379 bp, Homo sapiens
caggttcagctggtgcagtctggagctgaggtgaagaagcctggggcctcagtggaggtctcctgcaaggcttctgcttacacctttaccagctatggtatcagctgggtgcgacaggcccctggacaagggcttgagtggatgggatggatcagcgcttacaatggtaacacaaactatgcacagaagctccagggcagagtcaccatgaccacagacacatccacgagcacagcctacatggagctgaggagcctgagatctgacgacacggccgtgtattactgtgcgagagatctggggtattgtagtagttccacctgctaccgcaactggttcgacccctggggccagggaaccctggtcaccgtctcctcag

SEQ ID NO: 2938 - DNA, 376 bp, Homo sapiens
caggtgcaactgcagcagtcgggcccaggactggtgaagccttcggagaccctgtccctcacctgctctgtctctggtggctccatcattacttactactggagctggatccggcagcccccagggaagggactggagtggattggatatatctattacagtgggagcaccagctacaacccctccctcaagagtcgagtcaccatatcagtagacacgtccaagaaccagttctccctgaagctgacctctgtgaccgccgcagacacggccgtgttttactgtgcgagacatatcccttactatgatactagtggttattattatgatgcttttgatatctggggccaagggacaatggtcaccgtctcttcag

SEQ ID NO: 2939 - DNA, 379 bp, Homo sapiens
caggtgcagctggtggagtctgggggaggcgtggtccagcctgggaggtccctgagactctcctgtgcagcctctggattcaccttcaataggtatggcatgcactgggtccgccaggctccaggcaaggggctggagtgggtggcagttatattatatgatggaagtgatgaatactatgcagactccgtgaagggccgattcaccatctccagagacaattccaagaacacgctgtatctgcaaatgaacagcctgagagctgaggacacggctgtttattactgtgcgaaacgattaggctcatattgtggtggtgactgctatttgggctactttgactactggggccagggaaccctggtcaccgtctcctcag

SEQ ID NO: 2940 - DNA, 379 bp, Homo sapiens
caggtgcagctggtggagtctgggggaggcgtggtccagcctgggaggtccctgagactctcctgtgcagcctctggattcaccttcagtacctatggcatgcactgggtccgccaggctccaggcaaggggctggagtgggtggcacttatttcaaatgatggaagtgatgagtactatgcggactccgtgaagggccgattcaccatctccagagacaattccaagaacacgctgtatctgcaaatgaacagcctgagagctgaggacacggctgtgtattactgtgcgaaagatgtggggcagggagatggctacaatccagattccctatactttgactactggggccagggaaccctggtcaccgtctcctcag

SEQ ID NO: 2941 - DNA, 379 bp, Homo sapiens
caggtgcagctggtggagtctgggggaggcgtggtccagcctggggggtccctgagactctcctgtgcagcgtctggattcaccttcagtagctatggcatgcactgggtccgccaggctccaggcaaggggctggagtgggtggcatttatacggtatgatggaagtaataaatactatgaagactctgtgaagggccgattcaccatctccagagacaattccaagaacacgttgtatctgcaaatgaacagcctgagagctgaggacacgtctgtttattactgtgcgaaagatctttggggaggctatggttcgagaagttatggttcccctcttgactactggggccagggaaccctggtcaccgtctcctcag

SEQ ID NO: 2942 - DNA, 354 bp, Homo sapiens
caggtgcagctacagcagtggggcgcaggactgttgaagccttcggagaccctgtcccgcacctgcgctgtctatggtgggtccttcagtggttactactggagctggatccgccagcccccagggatggggctggagtggattggggagatcaatcatactggaggcaccaactacaacccgtccctcaagagtcgagtcaccatatcagtagacacgtctaagaaccagttctccctggagctgagctctgtgaccgccgcggacacggctgtctattactgtgcgagagtcgggggtttctactcctacatggacgtctggggcaaaggggccacggtcaccgtctcctca

SEQ ID NO: 2943 - DNA, 378 bp, Homo sapiens
caggtgcagctggtgcagtctggggctgaggtgaagaagcctggggcctcagtgaaggtctcctgcaaggcttctggatacaccttcaccagttatgatatcaactgggtgcgacaggccactggacaagggcttgagtggatgggatggatgaaccctaacagtggtaacacaggctatgcacagaagttccagggcagagtcaccatgaccaggaacacctccataagcacagcctacatggagctgagcagcctgagatctgaggacacggccgtgtattactgtgcgagaatggaaaatcgtagcagtggctggtttgtcaacaacgcctacatggacgtctggggcaaagggaccacggtcaccgtctcctca

SEQ ID NO: 2944 - DNA, 376 bp, Homo sapiens
caggtgcagctggtggagtctgggggaggcgtggtccagcctgggaggtccctgagactctcctgtgcagcctctggattcaccttcagtagctatgctatgcactgggtccgccaggctccaggcaaggggctggagtgggtggcagttatatcatatgatggaagcaataaatactacgcagactccgtgaggggccgattcaccatctccagagacaattccaagaacacgctgtatctgcaaatgaacagcctgagagctgaggacacggctgtgtgttactgtgcgagtggggcaggaatctacggttcggggacttactcgagtgcttttgatttctggggcctagggacaatggtcaccgtctcttcag

SEQ ID NO: 2945 - DNA, 379 bp, Homo sapiens
caggtgcagctggtgcagtctggggctgaggtgaagaagcctggggcctcagtgaaggtctcctgcaaggcttctggatacaccttcaccggctattttatgcactgggtgcgacaggcccctggacaagggcttgagtggatgggatggatcaaccctaacagtggtggcacaaattatgcacagaagtttcagggcagggtcaccatgaccagggacacgtccatcggcacagtctacatggagctgagcaggctgggatctgacgacacggccgtgtattactgtgcgaggggggtcgaaaattactatgtttcggggagtatttacccgatcattgactactggggccagggaaccctggtcaccgtctcctcag

SEQ ID NO: 2946 - DNA, 379 bp, Homo sapiens
caggtgcagctggtgcagtctggggctgaggtgaagaagcctggggcctcagtgaaggtctcctgcaaggcttctggatacaccttcaccggctactatatgcactgggtacgacaggcccctggacaagggcttgagtggatgggatggatcaaccctaacagtggtggcacaaactatgcacagaagtttcagggcagggtcaccatgaccagggacacgtccatcagcacagcctacatggagctgagcaggcttagatctgacgacacggccgtgtattactgtgcgaggggccccgcaacgtattacgatttttggagtgccccttctggctttgactactggggccagggaaccctggtcaccgtctcctcag

SEQ ID NO: 2947 - DNA, 378 bp, Homo sapiens
caggtgcagctggtggagtctgggggaggcgtggtccagcctgggaggtccctgagactctcctgtgcagcctctggattcaccttcagtacctatggcatgcactgggtccgccaggctccaggcaaggggctggagtgggtggcagttatatcatatgatggaagtgataaatactatgcagactccgtgaagggccgattcaccatctccagagacaattccaagaacacgctgtatctgcaaatgaacagcctgagagctgaggacacggctgtgtattattgtgcgaagggctctttctacggtgactacccttcggggtataactacggtatggacgtctggggccaagggaccacggtcaccgtctcctca

SEQ ID NO: 2948 - DNA, 382 bp, Homo sapiens
caggtcaccttgagggagtctggtcctgcgctggtgagacccacacagaccctcacactgacctgcaccttctctgggttctcactcagcactagtggaatgtctgtgagctggatccgtcagcccccagggaaggccctggagtggcttgcactccttgattggggtgatgatgaatactacagcacatctctgaagaccaggctcaccatctccaaggacacctccaaaaaccaggtggtccttacaatgaccaacatggaccctgtggacacagccacgtattattgtgcacggatactcacctcgggtttctatgataatagtggtaacgatgcttttgatatctggggccaagggacaatggtcaccgtctcttcag

SEQ ID NO: 2949 - DNA, 349 bp, Homo sapiens
gaggtgcagctggtggagactggaggaggcttgatccagcctggggggtccctgagactctcctgtgcagcctctgggttcaccgtcagtagcaactacatgagctgggtccgccaggctccagggaaggggctggagtgggtctcagttatttatagcggtggtagcacatactacgcagactccgtgaagggccgattcaccatctccagagacaattccaagaacacgctgtatcttcaaatgaacagcctgagagccgaggacacggccgtgtattactgtgcgagagatgtgctagatgcttttgatatctggggccaagggacaatggtcaccgtctcttcag

SEQ ID NO: 2950 - DNA, 352 bp, Homo sapiens
caggtgcaggtggtggagtctgggggaggcgtggtccagcctgggaggtccctgagactctcctgtgcagcctctggattcaccttcagtagctatgctatgcactgggtccgccaggctccaggcaaggggctggagtgggtggcagttatatcatatgatggaagcaataaatactacgcagactccgtgaagggccgattcaccatctccagagacaattccaagaacacgctgtatctgcaaatgaacagcctgagagttgaggacacggctgtgtattactgtgcgagagagacccgtagatccttggatgactggggccagggaaccctggtcaccgtctcctcag

SEQ ID NO: 2951 - DNA, 373 bp, Homo sapiens
caggttcagctggtgcagtctggagctgaggtgaagaagcctggggcctcagtgaaggtctcctgcaaggcttctggtgacacctttaccagctatggtatcacctgggtgcgacaggcccctggacaagggcttgagtggatgggatggatcagcgcttataatggtaacacaaactatgcacagaagctccagggcagagtcaccatgaccacagacacatccacgagcacagcctacatggagctgaggagcctgagatctgacgacacggccctgtattattgtgtgagagtaggggccaaatatgctgcggggacctacaactggttcgacccctggggccagggaaccctggtcaccgtctcctcag

SEQ ID NO: 2952 - DNA, 376 bp, Homo sapiens
gaagtgcagctggtgcagtccggagcagaggtgaaaaagcccggggagtctctgaggatctcctgtaagggttctggatacagctttaccagctactggatcagctgggtgcgccagatgcccgggaaaggcctggagtggatggggaggattgatcctagtgactcttataccaactacagcccgtccttccaaggccacgtcaccatctcagctgacaagtccatcagcactgcctacctgcagtggagcagcctgaaggcctcggacaccgccatgtattactgtgcgagacatttaggggatagtagtggttattaccttatcaactggttcgacccctggggccagggaaccctggtcaccgtctcctcag

SEQ ID NO: 2953 - DNA, 373 bp, Homo sapiens
cagattcagctggtgcagtctggagctgaggtgaagaagcctggggcctcagtgaaggtctcctgcaaggcttctggttacacctttaccagctatggcatcagctgggtgcgacaggcccctggacaagggcttgagtggatgggatggatcagcgcttacaatggtaacacaaactatgcacagaagctccagggcagagttaccatgaccacagacacatccacgagcacagcctacatggagctgaggagcctgagatctgacgacacggccgtctattactgtgcgagagtaggggccaaatatgcttcggggacctacaactggttcgacccctggggccagggaaccctggtcaccgtctcctcag

SEQ ID NO: 2954 - DNA, 376 bp, Homo sapiens
cagctgcagctgcaggagtcgggcccaggactggtgaagccgtcggagaccctgtccctcacctgcactgtctctggtggctccgtcagcagtagtagttactactggggctggatccgccagcccccagggaaggggctggagtggattgggaatatctattatagtgggagcacctactccaacccgtccctcaggagtcgagtcaccatatcagtagacacgtccaagaaccagttctccctgaggctgagctctgtgaccgccgcggacacggccgtgtattactgtgcgggcgtgaattactatggtgcggggagcaatgcgggctggttcgacccctggggccagggaaccctggtcaccgtctcctcag

SEQ ID NO: 2955 - DNA, 373 bp, Homo sapiens
gaagtgcagctggtggagtctgggggagtcgtggtacagcctggggggtccctgagactctcctgtgcagcctctggattcacctttgatgattacaccatgcactgggtccgtcaagctccggggaagggtctggagtgggtctctcttattagctgggatggtggtagcacatactatgcagactctatgaagggccgattcaccatctccagagacaacagcaaaaactccctgtatctgcaaatgaacagtctgagaactgaggacaccgccttgtattactgtgcaaaatcggtctttcgcggatacagctatgttgatgactactttgactcctggggccagggaaccctggtcaccgtctcctcag

SEQ ID NO: 2956 - DNA, 382 bp, Homo sapiens
cagatcaccttgaaggagtctggtcctacgctggtgaaacccacacagaccctcacgctgacctgcaccttctctgggttctcactcagcactagtggagtgggtgtgggctggatccgtcagcccccaggaaaggccctggagtggcttgcactcatttattggaatgatgataagcgaaacagcccatctctgaagagcaggctcaccatcaccaaggacacctccaaaaaccaggtggtccttacaatgaccaacatggaccctgtggacacaggcacatattactgtgcacacattggtggtacggatttttggagtggttatcggaaggatgcttttgatatgtggggccaagggacaatggtcaccgtctcttcag

SEQ ID NO: 2957 - DNA, 376 bp, Homo sapiens
caggtgcagctgcaggagtcgggcccaggactggtgaagccttcggagaccctgtccctcacctgcactgtctctggtggctccgtcagcagtggtagttactactggagctggatccggcagcccccagggaagggactggagtggattgggtatatctattacagtgggagcaccaactacaacccctccctcaagagtcgagtcaccatatcagtagacacgtccaagaaccagttctccctgaagctgagctctgtgaccgctgcggacacggccgtgtattactgtgcgagaggtgcaggagattacgatttttggagtggttattatgctgactactggggccagggaaccctggtcaccgtctcctcag

SEQ ID NO: 2958 - DNA, 373 bp, Homo sapiens
gaggtgcagctgttggagtctgggggaggcttggtacagcctggggggtccctgagactctcctgtgcagcctctggattcacctttagcaactatgccatgagctgggtccgccaggctccagggaaggggctggagtgggtctcaggaattagtggcagtggtggtagcacatactacgcagactccgtgaagggccggttcaccatctccagagacaattccaagaacacgctgcatctgcaaatgaacagcctgagagccgaggacacggccgtatattactgtgcgaaagatgggggtttttggagtggttattccccttcttactttgactactggggccagggaaccctggtcaccgtctcctcag

SEQ ID NO: 2959 - DNA, 269 bp, Homo sapiens
ctgggtccgccaggctccagggaaggggctggagtgggtctcaggtattagtggtagtgatgggagcacaaactacgcagactccgtgaagggccggttcaccatctccagagacaattccaagaacacgctgtatctgcaaatgaacagcctgagagccgaggacacggccatatatttctgtgcgaaagatcagtattacgatttttggagtggttactcgttatttgactactggggccatggaaccctggtcaccgtctcctcag

SEQ ID NO: 2960 - DNA, 373 bp, Homo sapiens
caggtgcagctggtggagtctgggggaggcgtggtccagcctgggaggtccctgagactctcctgtgcagcctctggattcaccttcagtaactatggcatgcactgggtccgccaggctccaggcaaggggctggagtgggtggcagttatatcatatgatggaagtaaaaaatactatgcagactccgtgaagggccgattcaccatctccagagacaattccaaggacacgctgtatctgcaagtgaacagcctgagagctgaagacgcggctgtgtattactgtgcgaaagatctcagcgtcggtagcagtggctggtacgggccaaatgactactggggccagggaaccctggtcaccgtctcctcag

SEQ ID NO: 2961 - DNA, 373 bp, Homo sapiens
caggtgcagctggtggagtctgggggaggcgtggtccagcctggggggtccctgagactctcctgtgcagcgtctggattcaccttcagtagctatggcatgcactgggtccgccaggctccaggcaaggggctggagtgggtggcatttatacggtatgatggaagtaataaatactatgcagactccgtgaagggccgattcaccatctccagagacaattccaagaacaccctgtatctgcaaatgaacagcctgagagctgaggacacggctgtgtattactgtgcgaagttaggatacagctatgcttatgacgatggatactactttgactactggggccagggaaccctggtcaccgtctcctcag

SEQ ID NO: 2962 - DNA, 373 bp, Homo sapiens
caggttcagctggtgcagtctggagctgaggtgaagaagcctggggcctcagtgaaggtctcctgcaaggcttctggttacacctttaccagctatggtatcagctgggtgcgacaggcccctggacaagggcttgagtggatgggatggatcagcgcttacaatggtaacacaaactatgcacagaagctccagggcagagtcaccatgaccacagacacatccacgagcacagcctacatggagctgaggagcctgagatctgacgacacggccgtgtattactgtgcgagcaccatgactacaacggcactaaggccccctctgacctttgactactggggccagggaaccctggtcaccgtctcctcag

SEQ ID NO: 2963 - DNA, 376 bp, Homo sapiens
gaagtgcagctggtgcagtccggagcagaggtgaaaaagcccggggagtctctgaggatctcctgtaagggttctggatacagctttaccagctactggatcagctgggtgcgccagatgcccgggaaaggcctggagtggatggggaggattgatcctagtgactcttataccacctacagcccgtccttccaaggccacgtcaccatctcagctgacaagtccatcagcactgcctacctgcagtggagcagcctgaaggcctcggacaccgccatgtattactgtgcgagacagtttgtgggggcagtggctggtactccactgagttggttcgacccctggggccagggaaccctggtcaccgtctcctcag

SEQ ID NO: 2964 - DNA, 381 bp, Homo sapiens
caggtcaccttgagggagtctggtcctgcgctggtgaaacccacacagaccctcacactgacctgcaccttctctgggttctcactcagcactagtggaatgtgtgtgagctggatccgtcagcccccagggaaggccctggagtggcttgcacgcattgattgggatgatgataaatactacagcacatctctgaagaccaggctcaccatctccaaggacacctccaaaaaccaggtggtccttacaatgaccaacatggaccctgtggacacagccacgtattactgtgcacgggatatagcagtggctggtatggattactactactactactacatggacgtctggggcaaagggaccacggtcaccgtctcctca

SEQ ID NO: 2965 - DNA, 369 bp, Homo sapiens
caggtgcagctaaagcagtggggcgcaggactgttgaagcctgcggagaccctgtcccgcacctgcgctgtatatggtgggcccttcaatgattactactggaactggatccgccagtccccagggaaggggctggagtggattggagaaattaatcatggtggaatcaccaattacaacccgtccctcaagagtcgagtcaccatgtcagtagacacgtccaagaatcagttctccctgacactgaggtctgtgaccgccgcggacacggctgtgtattactgtgcgagatcttctgttggagtggtgcaccactactttcactacatggatgtctgggacaaagggaccacggtcactgtctcctca

SEQ ID NO: 2966 - DNA, 376 bp, Homo sapiens
caggtcaccttgagggagtctggtcctgcgctggtgaaacccacacagaccctcacactgacctgcaccttctctgggttctcactcagcactagtggaatgtgtgtgagctggatccgtcagcccccagggaaggccctggagtggcttgcacgcattgattgggatgatgataaatactacagcacatctctgaagaccaggctcaccatctccaaggacacctccaaaaaccaggtggtccttacaatgaccaacatggaccctgtggacacagccacgtattactgtgcacggatggtagtggctggcgaccgctgggtcctggggggccttgactactggggccagggaaccctggtcaccgtctcctcag

SEQ ID NO: 2967 - DNA, 372 bp, Homo sapiens
caggtgcagctggtggagtctgggggaggcgtggtccagcctgggaggtccctgagactctcctgtgcagcctctggattcaccttcagtagctatggcatgcactgggtccgccaggctccgggcaaggggctggagtgggtggcagttatatcatatgatggaagtaataaatactatgcagactccgtgaagggccgattcaccatctccagagacaattccaagaacacgctgtatctgcaaatgaacggcctgagagctgaggacacggctgtgtattactgtgcgaaagatctgccccctcacgcttcctactactactacgctatggacgtctggggccaagggaccacggtcaccgtctcctca

SEQ ID NO: 2968 - DNA, 372 bp, Homo sapiens
caggtgcagctggtggagtctgggggaggcgtggtccagcctgggaggtccctgagactctcctgtgcagcctctggattcaccttcagtagctatggcatgcactgggtccgccaggctccaggcaaggggctggagtgggtggcagttatatcatatgatggaagtaataaatactatgcagactccgtgaagggccgattcaccatctccagagacaattccaagaacacgctgtatctgcaaatgaacagcctgagagctgaggacacggctgtgtattactgtgcgaaagatgttcgcagctatggggcatactactactacgctatggacgtctggggccaagggaccacggtcaccgtctcctca

SEQ ID NO: 2969 - DNA, 369 bp, Homo sapiens
gaggtgcagctggtggagtctggaggaggcttgatccagcctggggggtccctgagactctcctgtgcagcctctgggttcaccgtcagtagcaactacatgagctgggtccgccaggctccagggaaggggctggagtgggtctcagttatttatagcggtggtagcacatactacgcagactccgtgaagggccgattcaccatctccagagacaattccaagaacacgctgtatcttcaaatgaacagcctgagagccgaggacacggccgtgtattactgtgcgagagaaaaacgactaggacgcccttactactactacggtatggacgtctggggccaagggaccacggtcaccgtctcctca

SEQ ID NO: 2970 - DNA, 372 bp, Homo sapiens
gaggtacatctgttggagtctgggggaggcttggtacagcctggggggtccctgagactctcctgtgcagcctctggattcacctttagcaactatgccatgagctgggtccgccaggctccagtgaaggggctgcaatgggtctcaggtattagtggtagtggtggtagcacatactacgcagactccgtgaagggccggttcaccatctccagagacaattccaagaacaccctgtatctgcaaatgaacagcctgagagccgaggacgcggccgtatattactgtgcgaaagtctttgacgcggtgaccaccatttactactactacatggacgtctggggcaaagggaccacggtcaccgtctcctca

SEQ ID NO: 2971 - DNA, 378 bp, Homo sapiens
gaggtgcagctggtgcagtctggagcagaggtgaaaaagcccggggagtctctgaagatctcctgtaagggttctggatacagctttaccaactactggatcggctgggtgcgccagatgcccgggaaaggcctggagtggatggggatcatctatcctggtgactctgataccagatacagcccgtccttccaaggccaggtcaccatctcagccgacaagtccatcagcaccgccttcctgcagtggagcagcctgaaggcctcggacaccgccatgtattactgtgcgagactaacgttcggatacagctctggttactactactactacggtatggacgtctggggccaagggaccacggtcaccgtctcctca

SEQ ID NO: 2972 - DNA, 372 bp, Homo sapiens
gaagtgcagctggtggagtcgggggggggcttggtacagcctggcaggtccctgagactctcctgtgcagcctctggattcacctttgatgattatgccatgcactgggtccggcaagctccagggaagggcctggagtgggtctcaagtattacttggagtggtggtagcgtagactatgcggactctgtgaagggccgattcaccatctccagagacaacgccaagaactccctgtatctgcaaatgaacagtctgagacctgaggacacggccctctattactgtgcaagagactcactggtacgaagaaactactactactcctacatggacgtctggggccaagggaccacggtcaccgtctcctca

SEQ ID NO: 2973 - DNA, 372 bp, Homo sapiens
caggtgcagctggtggagtctgggggaggcttggtcaagcctggagggtccctgagactctcctgtgcagcctctggattcaccttcagtgactactacatgagctggatccgccaggctccagggaaggggctggagtgggtttcatacattagtagtagtagtagttacacaaactacgcagactctgtgaagggccgattcaccatctccagagacaacgccaagaactcactgtatctgcaaatgaacagcctgagagccgaggacacggctgtgtattactgtgcgagagcctactgtagtggtgactgctactactactacggtatggacgtctggggccaagggaccacggtcaccgtctcctca

SEQ ID NO: 2974 - DNA, 372 bp, Homo sapiens
gaggtgcagctggtggagtctgggggaggcttggtccagcctggggggtccctgagactctcctgttcagcctctggattcaccttcagtacctatgctatgcactgggtccgccaggctccagggaagggactggaatatgtttcaggtattactagtaatgggggtagtacatactacgcagactcagtgaagggcagattcaccatctccagagacaattccaagaacacgctgtatcttcaaatgagcagtctgagagctgaggacacggctgtgtattcctgtgtgaaggtgcatagtcgtgggagctactacggctattacggtatggacgtctggggccaagggaccacggtcaccgtctcctca

SEQ ID NO: 2975 - DNA, 370 bp, Homo sapiens
caggtgcagctgcaggagtcgggcccaggactggtgaagccttcggagaccctgtccctcacctgcactgtctctggtggctccatcagtagttactactggagctggatccggcagcccccagggaagggactggagtggattgggtatatctattacagtgggagcaccaactacaacccctccctcaagagtcgagtcaccatatcagtagacacgtccaagaaccagttctccctgaagctgagctctgtgaccgccgcagacacggccgtgtattactgtgcgaccacccaatattacgatttttggagtggtttaatatggttcgacccctggggccagggaaccctggtcaccgtctcctcag

SEQ ID NO: 2976 - DNA, 369 bp, Homo sapiens
caggtgcagctgcaggagtcgggcccaggactggtgaagccttcggagaccctgtccctcacctgcactgtctctggtggctccatcagtagttactactggagctggatccggcagcccccagggaagggactggagtggattgggtatatctattacagtgggagcaccaactacaacccctccctcaagagtcgagtcaccatatcagtagacacgtccaagaaccagttctccctgaagctgagctctgtgaccgccgcagacacggccgtgtattactgtgcgagggcagtggctggcaaggtgggctactactactactacatggacgtctggggcaaagggaccacggtcaccgtctcctca

SEQ ID NO: 2977 - DNA, 373 bp, Homo sapiens
caggtgcagttgttggagtctgggggaggcgtggtccagcctggggggtccctgagactctcctgtgcaacgtctggattcaccttttggaggtctgatatgcactgggtccgccaggctccaggcaaggggctggagtgggtggcctttatacgccttgacggaagcgattcagcctatgctgactccgtgaggggccgattcagcatctccagggacaattccgaaagcgcgctgtatatgcagatgcatagtttgagaccagaagacacggccgtttattactgtgcgaaagaagacaactttggtggcaactccgggggggatgctctgggtttctggggccaagggacaacggtcattgtctcttcag

SEQ ID NO: 2978 - DNA, 370 bp, Homo sapiens
caggtgcagctgcaggagtcgggcccaggactggtgaagccttcggagaccctgtccctcacgtgcgctgtctctggtggctccatcagtagttactactggagctggatccggcagccccctgggaagggactggagtggattggttatatttattacagtgggagcaccaactataacccctccctcaagagtcgagtcaccatgtcagtagacacgtccaagaaccagttctccctgaagctgacctctgtgaccgctgcggacacggccgtgtattactgtgcgagccatttctatgctagtagtggttattactatgatgcttttgatatctggggccaagggacaatggtcaccgtctcttcag

SEQ ID NO: 2979 - DNA, 370 bp, Homo sapiens
caggtgcagctgcaggagtcgggcccaggactggtgaagccttcggagaccctgtccctcacctgcactgtctctggtggctccatcagtagttactactggagctggatccggcagcccccagggaagggactggagtggattgggtatatctattacagtgggagcaccaactacaacccctccctcaagagtcgagtcaccatatcagtagacacgtccaagaaccagttctccctgaagctgagctctgtgaccgctgcggacacggccgtttattactgtgcgagccattactatactagtagtggttattactatgatgcttttgatatctggggccaagggacaatggtcaccgtctcttcag

SEQ ID NO: 2980 - DNA, 370 bp, Homo sapiens
caggtgcagctgcaggagtcgggcccaggactggtgaagccttcggagaccctgtccctcacctgctctgtctctggtggctccatcactagttacttctggagctggatccggcagcccccagggaagggactggagtggattgggtatatctattacagtgggagcaccaactacaacccctccctcaagagtcgagtcaccatatcagtagacacgtccaagaaccagttctccctgaagctgagctctgtgaccgctgcggacacggccgtgtattactgtgcggcccattactatgatagtagtggttattactatgatgcttttgatatctggggccaagggacaatggtcaccgtctcttcag

SEQ ID NO: 2981 - DNA, 370 bp, Homo sapiens
caggtgcagctgcaggagtcgggcccaggactggtgaagccttcggagaccctgtccctcacctgcactgtctctggtggctccatcagtagttactactggagctggatccggcagcccccagggaagggactggagtggattgggtatgtctattacagtgggagcaccaaccacaacccctccctcaagagtcgagtcaccatatcagtagacacgtccaagaaccagttctccctgaagctgagctctgtgaccgccgcagacacggccgtgtattactgtgcgagacacctttatgatactagtggttattactttgatgcttttgatatgtggggccaagggacaatggtcaccgtctcttcag

SEQ ID NO: 2982 - DNA, 373 bp, Homo sapiens
gaggtgcacctgttggagtctgggggaggcttggtgcagcctggggggtccctgagactctcctgtgcagcctctggattcacctttagcagctatgccatgagctgggtccgccaggctccagggaaggggctggagtgggtctcaagtattagtaaaagtgatggtagcacatactacgcagattccgtgaagggccgcttcaccatctccagagacaattccaagagcacgctgtatctccagatgaacagcctgagagtcgaggacacggccgtgtattactgtgtgagagttgtcgtcgggggaagcagtggctggtactggtacttcgatctctggggccgtggctccctggtcactgtctcctcag

SEQ ID NO: 2983 - DNA, 375 bp, Homo sapiens
caggtgcagctggtgcagtctggggctgaggtgaagaagcctgggtcctcggtgaaggtctcctgcaaggcttctggaggcaccttcagcagctatgctatcagctgggtgcgacaggcccctggacaagggcttgagtggatgggagggatcatccctatctttggtacagcaaactacgcacagaagttccagggcagagtcacgattaccgcggacgaatccacgagcacagcctacatggagctgagcagcctgagatctgaggacacggccgtgtattactgtgcgaggggtgtggatacagctatgaacagcgactactactacggtatggacgtctggggccaagggaccacggtcaccgtctcctca

SEQ ID NO: 2984 - DNA, 370 bp, Homo sapiens
cagatcaccttgaaggagtctggtcctacgctggtgaaacccacacagaccctcacgctgacctgcaccttctctgggttctcactcagcactaatggagtgggtgtgggctggatccgtcagcccccaggaaaggccctggagtggcttgcactcatttattgggatgatgataagcgctacagcccatctctgaagagcaggctcaccatcaccaaggacacctccaaaaaccaggtggtccttacaatgaccaacatggaccctgtggacacagccacatattactgtgcacacagtggagcgatagtactggttagtggtgcttttgatatctggggccaagggacaatggtcaccgtctcttcag

SEQ ID NO: 2985 - DNA, 398 bp, Homo sapiens
caggtgcagctggtgcagtctggggttgaggtgaagaagcctggggcctcagtgaaggtctcctgtaaggcttctggacgcaccttcaccggctactatatggactgggtgcgacaggcccctggacaaggacttgagtggatggaatgaatcaaccctaatagtggtggcacaaactatgcacagaactttcagggctgggtcaccatgaccaggggcacgtccatcagcacagtcttcatggagctgagccggctgagatctgacgacacggccgtctattactgtgggagagatcgtctgctaggatattgcactagtaccaactgctattcttactctactattactgcgttatggacgtcttgggccaagggaccacggtcaccgtctcctca

SEQ ID NO: 2986 - DNA, 373 bp, Homo sapiens
caggtgcagctggtgcagtctggggctgaggtgaagaagcctggggcctcagtgaaggtctcctgcaaggcttctggatacaccttcaccggctactatatgcactgggtgcgacaggcccctggacaagggcttgagtggatgggatggatcaaccctaacagtggtggcacaaactatgcacagaagtttcagggcagggtcaccatgaccagggacacgtccatcagcacagcctacatggagctgagcaggctgagatctgacgacacggccgtgtattactgtgcgagagatcgggggtattgtagtggtggtagctgcgttcacttccagcactggggccagggcaccctggtcaccgtctcctcag

SEQ ID NO: 2987 - DNA, 373 bp, Homo sapiens
caggtgcagctggtggagtctgggggaggcgtggtccagcctggggggtccctgagactctcctgtgcagcgtctggattcaccttcagtagctatggcatgcactgggtccgccaggctccaggcaaggggctggagtgggtggcatttatacggtatgatggaggtactaaatactatgcagactccgtgaagggccgattcaccatctccagagacaattccaagaacacgctgtatctgcaaatgaacagcctgagagctgaggacacggctgtgtattactgtgcgaaattttcggggcctgattactatggttcggggagttatctcgatccctggggccagggaaccctggtcaccgtctcctcag

SEQ ID NO: 2988 - DNA, 370 bp, Homo sapiens
caggtgcagctggtggagtctgggggaggcttggtcaagcctggagggtccctgagactctcctgtgcagcctctggattcaccttcagtgactactacatgagctggatccgccaggctccagggaaggggctggagtgggtttcatacattagtagtagtggtggtaccatatactacgcagactctgtgaagggccgattcaccatctccagggacaactccaagaactcattgtatctgcaaatgaacagcctgagagccgaggacacggccgtgtattactgtgcgacccatagggcgtttagggctattaaccccgtcggctttgactactggggccagggaaccctggtcaccgtctcctcag

SEQ ID NO: 2989 - DNA, 370 bp, Homo sapiens
gaggtgcagctggtggagtctgggggaggcctggtcaagcctggggggtccctgagactctcctgtgcagcctctggattcaccctcagtagctataacatgaactgggtccgccaggctccagggaaggggctggagtgggtctcatccattagtagtagtagttattacatatactacgcagactccgtgaagggccgattcaccatctccagagacaacgccaagaactcactgtatctgcaaatgaacagcctgagagccgaggacacggctgtgtattactgtgcgaggcatcgaacttatagcagcagctggtacgctctgtgtgactactggggccagggaaccctggtcaccgtctcctcag

SEQ ID NO: 2990 - DNA, 370 bp, Homo sapiens
gaagtgcagctggtggagtctgggggaggcttggtacagcctggcaggtccctgagactctcctgtgcagcctctggattcacctttgatgattatgccatgcactgggtccggcaagctccagggaagggcctggagtgggtctcaggtattagttggaatagtgttagtatagactatgcggactctgtgaagggccgattcaccatctccagagacaacgccaagaactccctgtatctgcaaatgaacagtctgagagctgaggacacggccttgtattactgttcaaaagatatgaggactgtagcagcagctggtattggctttgactactggggccagggaaccctggtcaccgtctcctcag

SEQ ID NO: 2991 - DNA, 375 bp, Homo sapiens
caggtgcagctgcaggagtcgggcccaggactggtgaagccttcacagaccctgtccctcacctgcactgtctctggtggctccatcagcagtggtgattactactggagctggatccgccagcccccagggaagggcctggagtggattgggtacatctattacagtgggagcacctactacaacccgtccctcaagagtcgagttaccatatcagtagacacgtccaagaaccagttctccctgaagctgagctctgtgactgccgcagacacggccgtgtattactgtgccagagtgcgggcagcagctgggccctatgtttcctactacatggacgtctggggcaaagggaccacggtcaccgtctcctca

SEQ ID NO: 2992 - DNA, 370 bp, Homo sapiens
caggtgcatctggtgcagtctggggctgaggtgaagaagcctgggtcctcggtgaaggtctcctgcaaggcttctggagacaccctcagcacctatgctatcagttgggtgcgacaggcccctggacaagggcttgagtggatgggagggatcatccctctctttggtacaacaacctacgcacagaagttccagggcagagtcacgattaccgcggacgaatccacgagcacagcctacatggagctgagcagcctgaaatctgaggacacggccatgtattactgtgcgagaggggaggtcacgtattacgatgccccgggaaactttcactactggggccagggaaccctggtcaccgtctcctcag

SEQ ID NO: 2993 - DNA, 370 bp, Homo sapiens
cagatcaccttgaaggagtctggtcctacgctagtgaaacccacacagaccctcacgctgacctgcaccttctctgggttctcactcagcactagtggagtgggtgtgggctggatccgtcagcccccaggaaaggccctggagtggcttgcactcatttattgggatgatgataagcgctacagcccatctctgaagagcaggctcaccatcaccaaggacacctccaaaaaccaggtggtccttacaatgaccaacatggaccctgtggacacagccacatattactgtgcacacagggggtcgcaactggggatttatggtgcttttgatatctggggccaagggacaatggtcaccgtctcttcag

SEQ ID NO: 2994 - DNA, 373 bp, Homo sapiens
cagctgcagctgcaggagtcgggcccaggactggtgaagccttcggagaccctgtccctcacctgcactgtctctggtggctccatcagcagtagtagttactactggggctggatccgccagcccccagggaaggggctggagtggattgggagtatctattatagtgggagcacctactacaacccgtccctcaagagtcgagtcaccatatcagtagacacgtccaagaaccagttctccctgaagctgagctctgtgaccgccgcggacacggccgtgtattactgtgcgaggagactttattactatgatagtagtggttcccactttgactactggggccagggaaccctggtcaccgtctcctcag

SEQ ID NO: 2995 - DNA, 370 bp, Homo sapiens
gaggtgcagctggtggagtctgggggaggcttggtccagcctggggggtccctgagactctcctgtgcagcctctggattcacctttagtaggtattggatgaactgggtccgccaggctccagggaaggggctggagtgggtggccaacataaagcaagatggaagtgagaaatactatgtggactctgtgaagggccgattcaccatctccagagacaacgccaagaactcattgtatctgcaaatgaacagcctgagagccgaggacacggctgtatattactgtgcgagactttacgatttttggagtggttctaactactactttgacttctggggccagggaaccctggtcaccgtctcctcag

SEQ ID NO: 2996 - DNA, 370 bp, Homo sapiens
caaatgcagctggtgcagtctgggcctgaggtgaagaagcctgggacctcagtgaaggtctcctgcaaggcttctggattcacctttactagctctgctgtgcagtgggtgcgacaggctcgtggacatcgccttgagtggataggatggatcgtcgctggcagtggtaacacaaactacgcacagaagttccaggaaagagtcaccattaccagggacatgtccacaagtacagcctacatggagctgagcagcctgagatccgaggacacggccgtgtattactgtgcggccccttattgtagtggtggtagctgccttgatggttttgatatctggggccaagggacaatggtcaccgtctcttcag

SEQ ID NO: 2997 - DNA, 370 bp, Homo sapiens
caggtgcagctggtgcagtctggggctgaggtgaagaagcctggggcctcagtgaaggtttcctgcaaggcatctggatacaccttcaccagctactatatgcactgggtgcgacaggcccctggacaagggcttgagtggatgggaataatcaaccctagtggtggtagcacaagctacgcacagaagttccagggcagagtcaccatgaccagggacacgtccacgagcacagtctacatggagctgagcagcctgagatctgaggacacggccgtgtattactgtgcgagagggaggcagcagccgcgattgggcgatgactactttgactactggggccagggaaccctggtcaccgtctcctcag

SEQ ID NO: 2998 - DNA, 370 bp, Homo sapiens
caggtgcagctggtggagtctgggggaggcgtggtccagcctgggaggtccctgagactctcctgtgcagcctctggattcaccttcagtagctatggcatgcactgggtccgccaggctccaggcaaggggctggagtgggtggcagttatatcatatgatggaagtaataaatactatgcagactccgtgaagggccgattcaccatctccagagacaattccaagaacacgctgtatctgcaaatgaacagcctgagagctgaggacacggctgtgtattactgtgcgaaagccccctcttactattgtggtggtgactgctattctgactactggggccagggaaccctggtcaccgtctcctcag

SEQ ID NO: 2999 - DNA, 376 bp, Homo sapiens
gaggtgcagctggtggagtctgggggaggcttggtccagcctggggggtccctgagactctcctgtgcagcctctgggttcaccttcagtggctctgctatgcactgggtccgccaggcttccgggaaagggctggagtgggttggccgtattagaagcaaagctaacagttacgcgacagcatatgctgcgtcggtgaaaggcaggttcaccatctccagagatgattcaaagaacacggcgtatctgcaaatgaatagcctgaaaaccgaggacacggccgtgtattactgtactagatcggcgtacgtggatacacctatggttaatgcttttgatatctggggccaagggacaatggtcaccgtctcttcag

SEQ ID NO: 3000 - DNA, 369 bp, Homo sapiens
gaggtgcagctgttggagtctgggggaggcttggtacagcctggggggtccctgagactctcctgtgcagcctctggattcacctttagcagctatgccatgagctgggtccgccaggctccagggaaggggctggagtgggtctcagctattagtggtagtggtggtagcacatactacgcagactccgtgaagggccggttcaccatctccagagacaattccaagaacacgctgtatctgcaaatgaacagcctgagagccgcggacacggccgtatattactgtgcgaaagattgggtaaacctcggatatccagggcactacatggacgtctggggcaaagggaccacggtcaccgtctcctca

SEQ ID NO: 3001 - DNA, 367 bp, Homo sapiens
caggtgcagctggtggagtctgggggaggcgtggtccagcctgggaggtccctgagactctcctgtgcagcctctggattcaccttcagtagctatgctatgcactgggtccgccaggctccaggcaaggggctggagtgggtggcagttatatcatatgatggaagcaataaatactacgcagactccgtgaagggccgattcaccatctccagagacaattccaagaacacgctgtatctgcaaatgaacagcctgagagctgaggacacggctgtgtattactgtgcgagagaccggggctacggcccctactcgtactactttgactactggggccagggaaccctggtcaccgtctcctcag

SEQ ID NO: 3002 - DNA, 370 bp, Homo sapiens
gaagtgcagctggtgcagtccggagcagaggtgaaaaagcccggggagtctctgaggatctcctgtaagggttctggatacagctttaccagctactggatcagctgggtgcgccagatgcccgggaaaggcctggagtggatggggaggattgatcctagtgactcttataccaactacagcccgtccttccaaggccacgtcaccatctcagctgacaagtccatcagcactgcctacctgcagtggagcagcctgaaggcctcggacaccgccatgtattactgtgcgagacataattttaacgggtatgacagtggctggtaccttgactactggggccagggaaccctggtcaccgtctcctcag

SEQ ID NO: 3003 - DNA, 366 bp, Homo sapiens
caggtgcagctgcaggagtcgggcccaggactggtgaagccttcggagaccctgtccctcacctgcactgtttctggtggctccatcagtagtaactactggagctggatccggcagcccgccgggaagggactggagtggattgggcgtgtctatagcagtgggagcaccaactacaacccctccctcaagagtcgagttaccatgtcagtagacacgtccaagaaccagttctccctgaagctgagctctgtgaccgccgcggacacggccgtgtattactgtgcgagttactactctgatagtagtggccactactacggtatggacgtctggggccaagggaccacggtcaccgtctcctca

SEQ ID NO: 3004 - DNA, 370 bp, Homo sapiens
gacgtgcaactgttggagtctgggggaggcttggtacagccgggggggtccctgagactctcctgtgcagtctccgggttcataataagcaactactccatgagttgggtccgccaggctccagggaagggactggagtgggtctcaggtattggtggcggtgatcatggcatattctatggagactccgtgaagggccggttcaccgtctccagagacacttttaagagcacactggatctgcaattgaacagcctgagagccgaggacacggccgtatattactgtgcgagagaagttcatgactacggagcctcattttggtacttcgatctctggggccgcggcaccctggtcactgtctcctcag

SEQ ID NO: 3005 - DNA, 370 bp, Homo sapiens
gaagtgcagctgttggagtctgggggaggcttggtccagccgggggggtccctgagactctcctgtgcaacctctggattcgcctttgtcgactatgccataagttgggtccgccaggctccagggaagggactggagtgggtctcaggtattggaggtggtgctcatggcaccttctacggagactccgtgaagggccggttcaccatctccagagacacttccgagaacacgctgtatctgcaaatgagcagcctgagaagcgaggacacggccgtatattattgtgcgaaagaagtttatgactccgctgcctcatactggtacttcgatctctggggccgcggcaccctagtcactgtctcctcag

SEQ ID NO: 3006 - DNA, 370 bp, Homo sapiens
caggtccagctggtgcagtctggggctgaggtgaagaagcctgggtcctcagtgaaggtctcctgcaaggcttctggaggcaccttcagcagctatgctatcagctgggtgcgacaggcccctggacaagggcttgagtggatgggagggatcatccctatccttggtatagcaaactacgcacagaagttccagggcagagtcacgattaccgcggacaaatccacgagcacagcctacatggagctgagcagcctgagatctgaggacacggccgtgtattactgtgcgggcagcgatattgtagtggtggtagctgcccaccggttcgacccctggggccagggaaccctggtcaccgtctcctcag

SEQ ID NO: 3007 - DNA, 370 bp, Homo sapiens
caggtccagctggtacagtctggggctgaggtgaagaagcctggggcctcagtgaaggtctcctgcaaggtttccggatacaccctcactgaattatccatgcactgggtgcgacaggctcctggaaaagggcttgagtggatgggaggttttgatcctggagatggtgaaacaatctacgcacagaagttccagggcagagtcaccatgaccgaggacacatctacagacacagcctacatggagctgagcagcctgagatctgaggacacggccctgtattactgtgcagcagatctaaagtttacgattttttcctcaggatggttcgacccctggggccagggaaccctggtcaccgtctcctcag

SEQ ID NO: 3008 - DNA, 370 bp, Homo sapiens
caggttcagctggtgcagtctggagctgaggtgaagaagcctggggcctcagtgaaggtctcctgcaaggcttctggttacacctttaccagctatggtatcagctgggtgcgacaggcccctggacaagggcttgagtggatgggatggatcagcgcttacaatggtaacacaaactatgcacagaagctccagggcagagtcaccatgaccacagacacatccacgagcacagcctacatggagctgaggagcctgagatctgacgacacggccgtgtattactgtgcgagagatcgagtacagcagcagctggtacccaactggttcgacccctggggccagggaaccctggtcaccgtctcctcag

SEQ ID NO: 3009 - DNA, 367 bp, Homo sapiens
gaggtgcagctggtggagtctggaggaggcttgatccagcctggggggtccctgagactctcctgtgcagcctctgggttcaccgtcagtagcaactacatgagctgggtccgccaggctccagggaaggggctggagtgggtctcacttatttatagcggtggtagcacatactacgcagactccgtgaagggccgattcaccatctccagagacaattccaagaacacgctgtatcttcaaatgaacagcctgagagccgaggacacggccgtgtattactgtgcgagagaggggggatattgtagtggtggtagctgctaccctacaagctggggccagggaaccctggtcaccgtctcctcag

SEQ ID NO: 3010 - DNA, 370 bp, Homo sapiens
gaggtgcagttgttggagtctgggggaggcttggtacagcctggggggtccctgagactctcctgtgcagcctctggattcacctttagcaccaatgccatgagctgggtccgccaggctccagggaaggggctggagtgggtctcagctattcatacgagtggagctaccacatactacgcagactccgtgaagggccgcttcaccatctccagagacaattccaagaacatgctgtatctgcaaatgaacagcctgagagccgaggacacggccctatattactgtgtgaaagaggggtctttacattggcatgactacggttcgtctgcctactggggccagggaaccctggtcaccgtctcgtcag

SEQ ID NO: 3011 - DNA, 367 bp, Homo sapiens
caggtgcagctacagcagtggggcgcaggactgttgaagccttcggagaccctgtccctcacctgcgctgtctatggtgggtccttcagtggttactactggagctggatccgccagcccccagggaaggggctggagtggattggggaaatcaatcatagtggaagcaccaactacaacccgtccctcaagagtcgagtcaccatatcagtagacacgtccaagaaccagttctccctgaagctgagctctgtgaccgccgcggacacggctgtgtattactgtgcgagaggcctgtattgtggtggtgattgcttcggttactttgactactggggccagggaaccctggtcaccgtctcctcag

SEQ ID NO: 3012 - DNA, 367 bp, Homo sapiens
gaggtgcagctggtggagtctgggggaggcttggtacagcctggggggtccctgagactctcctgtgcagcctctggattcaccttcaggaaccactggatgcactgggtccgccaaggcccagggaaggggctggtgtgggtttcacttatttttactgatgggagtggcacaaggtacgcggactccgtgaagggccgattcaccatctccagagacaacgccaagaacactgtgtatctgcaaatgaacagtctgagagccgaggacacggctgtgtattattgtgtaagagatgctagtgtcggcagtggctggtacagttttgactcctggggccagggaattcaggtcaccgtctcctcag

SEQ ID NO: 3013 - DNA, 346 bp, Homo sapiens
gaggtgcagctggtggagtctggaggaggcttgatccagcctggggggtccctgagactctcctgtgcagcctctgggttcaccgtcagtagcaactacatgagctgggtccgccaggctccagggaaggggctggagtgggtctcagttatttatagcggtggtagcacatactacgcagactccgtgaagggccgattcaccatctccagagacaattccaagaacacgctgtatcttcaaatgaacagcctgagagccgaggacacggccgtgtattactgtgcgagagatctaggttacattgactactggggccagggaaccctggtcaccgtctcctcag

SEQ ID NO: 3014 - DNA, 346 bp, Homo sapiens
gaggtgcagctggtggagtctggaggaggcttgatccagcctggggggtccctgagactctcctgtgcagcctctgggttcaccgtcagtagcaactacatgagctgggtccgccaggctccagggaaggggctggagtgggtctcagttatttatagcggtggtagcacattctacgcagactccgtgaagggccgattcaccatctccagagacaattccaagaacacgctgtatcttcaaatgaacagcctgagagccgaggacacggccgtgtattactgtgcgagagatatagactactttgactactggggccagggaaccctggtcaccgtctcctcag

SEQ ID NO: 3015 - DNA, 348 bp, Homo sapiens
caggtgcagctggtggagtctgggggaggcgtggtccagcctggggggtccctgagactctcctgtgcagcgtctggattcaccctcagtagttatggcatgcactgggtccgccaggctccaggcaaggggctggagtgggtggcatttatacggtatgacggaagtaataaataccatgcagactccgtgaagggccgattcaccatctccagagacaattccaagaacacgctgtatctgcaaatgaacagcctgagagctgaggacacggctgtgtattactgtgcgaaaggttctgactacatggacgtctggggcaaagggaccacggtcaccgtctcctca

SEQ ID NO: 3016 - DNA, 428 bp, Homo sapiens
caggtacagctgcagcagtcaggtccaggactggtgaagccctcgcagaccctctcactcacctgtgccatctccggggacagtgtctctaggaaaagtgctgcttggaactggatcaggcagtccccatcgagaggccttgagtgactgggaaggacatactacaggtccaagtggtataacgattatgcaatatctgtgaaaagtcgaataaccatcaaggcagacacatccaagaaccacttctccccacaactgacctctgtgactcccgaggacacggctgtgtataactgtgcaagagatccgacaaaactattgtagtagttccagttgggattttgtatgatggtagtggttactaatatcgtggtcgggatactactttgactgttggggccagggaaccctggtccccgtctcctcag

SEQ ID NO: 3017 - DNA, 367 bp, Homo sapiens
caggtggaactgcaggagtcgggcccaggactggtgaagccttcggagaccctgtccctcacatgcactgtgtctgatgtctacatcactaatcattattggagctggatcaggcaggccgccgggaagggaccggagtggatagggcgtatttcaacaagtgggagcaccacctaccgcccctccttcagaggtcgactcaccatgtccgtagacacggccaagaatcagctctccctgaacctgagctctgtgaccgccgcggacacggccgtgtattattgtgcgagagtctcgaacaacaactccgaacccctgaatacttttgatgtttggggccgaggtacaccggtcaccgtctcttcag

SEQ ID NO: 3018 - DNA, 337 bp, Homo sapiens
caggtgcagctgcaggagtcgggcccaggactggtgaagccttcggagaccctgtccctcacctgcactgtctctggtgcctccatcagtagttactactggagctggatccggcagcccccagggaagggactggagtggattgggtatatctattacagtgggagcaccaactacaacccctccctcaagagtcgagtcaccatatcagtagatacgtccaagaaccagttctccctgaagctgagctctgtgaccgctgcggacacggccgtgtattactgtgcgagaggcttcgatctctggggccgtggcaccctggtcactgtctcctcag

SEQ ID NO: 3019 - DNA, 340 bp, Homo sapiens
gaggtgcagctggtggagtctggaggaggcttgatccagcctggggggtccctgagactctcctgtgcagcctctgggttcaccgtcagtagcaactacatgagctgggtccgccaggctccagggaaggggctggagtgggtctcagttatttatagcggtggtagcacatactacgcagactccgtgaagggccgattcaccatctccagagacaattccaagaacacgctgtatcttcaaatgaacagcctgagagccgaggacacggccgtgtattactgtgcgagagagagtatccaggcatggggccagggaaccctggtcaccgtctcctcag

SEQ ID NO: 3020 - DNA, 343 bp, Homo sapiens
caggtgcagctggtgcagtctggggctgaggtgaagcagcctgggtcctcggtgaaggtctcctgcacggcttctggaggcaccttcagaagttatactatcaactgggtgcgacaggcccctggacaagggcttgagtggatgggagggatcatccctatgtttggcacaccaaaccacgcacagaagttccagggcagagtcacgattaccgcggacgaatccacgagcacagcctacatggagctgagcagcctgagatctgatgacacggccgtgtattattgtgcgagcccggtgactcccggctggggccagggaactcgggtcaccgtctcctcag

SEQ ID NO: 3021 - DNA, 343 bp, Homo sapiens
caggtgaagttggtgcagtctggggctgaggtgaagaagccaggggcctcagtaagggtctcctgcaaggcttctggatacaccttcaccggcaactatttgcactgggtgcgacaggcccctggacaagggcttgagtggatgggatggataaaccctaatgttggtggcacaatctatgcacagaaatttcggggcagggtcaccatgaccagggacacgtccatgagcacagcctacatggagttgaccaggctgagatctgacgacacggccgtctattactgtgcctttcttcggtggggccactggggccagggaaccctggtcaccgtctcctcag

SEQ ID NO: 3022 - DNA, 367 bp, Homo sapiens
caggtgcagctggtggagtctgggggaggcgtggtccagcctgggaggtccctgagactctcctgtgaagcctctggattcaccttcagtagctatggcatgcactgggtccgccaggctccaggcaaggggctggagtgggtggcagttatatcatatgatggaagtaataaatactatgcagactccgtgaagggccgattcaccatctccagagacaattccaagaacacgctgtatctgcgaatgaacagcctgagagctgaggacacggctgtgtattactgtgcgaaaggccaatggtatagcagcagctggtacacctttaactactggggccagggaaccctggtcaccgtctcctcag

SEQ ID NO: 3023 - DNA, 343 bp, Homo sapiens
gaagtgcagctggtgcagtccggagcagaggtgaaaaagcccggggagtctctgaggatctcctgtaagggttctgaatacagctttaccagctactggatcagctgggtgcgccagatgcccgggaaaggcctggagtggatggggaggattgatcctagtgactcttataccaactacagcccgtccttccaaggccacgtcaccatctcagctgacaagtccatcagcactgcctacctgcagtggagcagcctgaaggcctcggacaccgccatgtatttctgtgcgctggttggtagtcccggctggggccagggaaccctggtcaccgtctcctcag

SEQ ID NO: 3024 - DNA, 367 bp, Homo sapiens
caggtgcagctgcaggagtcgggcccaggactggtgaagccttcggagaccctgtccctcacctgcactgtctctggtgcctccatcagtagttactactggaactggatccggcagtccccagggaagggactggagtggattgggtatatccattacagtgggaactccaagtacaacccctccctcaagagtcgagtcaccatgtcagtagacacgtccaagaatcagttctccctgaagttgagctctgtgaccgctgcggacacggccgtgtattactgtgcgagatggggcgaaaccagttcgtccgcgattcgggcttttgatatttggggccaagggacaatggtcaccgtctcttcag

SEQ ID NO: 3025 - DNA, 367 bp, Homo sapiens
caggtgcagctgcaggagtcgggcccaggactggtgaagccctcggagaccctgtccctcacctgcactgtctctggtgcctccatcagtagctactactggagctggatccggcagccccccgggaagggactggagtggattgggtatatctattacagtgggagcaccaactacaacccctccctcaagagtcgagtcaccacatcagtagacacgtccaagaaccagttctccctgaagctgagctctgtgaccgccgcagacacggccgtgtattactgtgcgagacatctgtatagcagtggctggtactttgatgcttttgatatctggggccaagggacaatggtcaccgtctcttcag

SEQ ID NO: 3026 - DNA, 364 bp, Homo sapiens
caggtgcagctggtgcagtctggggctgaggtgaagaagcctggggcctcagtgaaggtttcctgcaaggcatctggatacaccttcaccagctactatatgcactgggtgcgacaggcccctggacaagggcttgagtggatgggaataatcaaccctagtggtggaagtgcaagctacgcacagaagttccagggcagagtcaccatgaccagggacacggccacgagcacagtctacatggagctgagcagcctgagatctgaggacacggccgtgtattactgtgcgagagaatgggtcaaattatactagtatcagttgctacccctcggccagggaaccctggtcaccgtctcctcag

SEQ ID NO: 3027 - DNA, 352 bp, Homo sapiens
gaggtgcagctggtggagtctggaggaggcttgatccagcctggggggtccctgagactctcctgtgcagcctctgggttcaccgtcagtagcaactacatgagctgggtccgccaggctccagggaaggggctggagtgggtctcagttatttatagcggtggtagcacacactacgcagactccgtgaagggccgattcaccatctccagagacaattccaagaacacgctgtatcttcaaatgcacagcctgagagccgaggacacggccgtgtattactgtgcgagacaaatctatgatgatgcttttgatgtctggggccaagggacaatggtcaccgtctcttcag

SEQ ID NO: 3028 - DNA, 349 bp, Homo sapiens
gaggtgcaactggtggagtctgggggaggtgtggtacggcctggggggtccctgagactctcctgtgcagcctctggattcacctttgatgattatggcatgagctgggtccgccaagctccaggaaagggcctggagtgggtctctggtattgattggaatggtggcagcacagattatgcagactttgtgaggggccggttcaccatctccagagacaacgcccagaactccctgtatctgcaaatgaacagtctgagagccgaggacacggccttgtattactgtgcgagaggaactttagttggtgactactggggccagggaaccctggtcaccgtctcctcag

SEQ ID NO: 3029 - DNA, 355 bp, Homo sapiens
caggttcagctggtgcagtctggagctgaggtgaagaagcctggggcctcagtgaaggtctcctgcaaggcttctggttacacctttatcagctatggtatcagctgggtgcgacaggcccctggacaagggcttgagtggatgggatggatcagcgcttacaatggtaacacaaactatgcacagaagttccagggcagagtcaccatgaccacagacacatccacgagcacagcctacatggagctgaggagcctgagatctgacgacacggccgtgtattactgtgcgagagcggttgattttggctggttcgacccctggggccagggaaccctggtcaccgtctcctcag

SEQ ID NO: 3030 - DNA, 358 bp, Homo sapiens
cagatcaccttgaaggagtctggtcctacgctggtgaaacccacacagaccctcacactgacctgcaccttctctgggttctcactcagcactactggagtgggtgtgggctggatccgtcagcccccaggaaaggccctggagtggcttgcactcatttattggaatgatgataagcgctacagcccatctctgaagagcaggctcaccatcaccaaggacacctctaaaaaccaggtggtccttacaatgaccaacatggaccctgtggacacagccacatattactgtgcacaccgccgttggataggcgtgatcgacccctggggccagggaaccccggtcaccgtctcctcag

SEQ ID NO: 3031 - DNA, 358 bp, Homo sapiens
cagctgcagctgcaggagtccggctcaggactggtgaagccttcacagaccctgtccctcacctgcgctgtctctggtggctccatcagcagtggtggttactcctggaactggatccggcagccaccagggaagggcctggagtggattgggaacatctatcatagtgggagcacctactacaacccgtccctccagagtcgagtcaccatatcagtggacaggtccaagaaccagttctccctgaaggtgagctctgtgaccgccgcggacacggccgtgtattactgtgccagagccgattacggcgctcccccgtcctcctggggccagggaaccctggtcaccgtctcctcag

SEQ ID NO: 3032 - DNA, 364 bp, Homo sapiens
caggtacagctgcagcagtcaggtccaggactggtgaagccctcgcagaccctctcactcacctgtgccatctccggggacagtgtctctagcaacagtgctgcttggaactggatcaggcagtccccatcgagaggccttgagtggctgggaaggacatactacaggtccaagtggtctaacgattatgcagtatctgtaaaaagtcgaataaccatcaacccagacacatccaagaaccagttctccctgcagctgaactctgtgactcccgacgacacggctgtgtattactgtgcaagaacacaatttggctggtacgtcgacttctggggccagggaaccctggtcaccgtctcctcag

SEQ ID NO: 3033 - DNA, 367 bp, Homo sapiens
caggtgcagctggtggagtctgggggaggcgtggtccagcctggggggtccctgagactctcctgtgcagcgtctggattcaccttcagtacctatggcatgcactgggtccgccaggctccaggcaaggggctggagtgggtggcatttatacgatctgatggaaataataaatactatgcagactccgtgaagggccgattcaccatctccagagacaattccaagcacacgctgtatctgcaaatgaacagcctgagagctgaggacacggctgtgtattactgtgcgaaagatcgattaatagtgggagctagtacgctctttgactactggggccagggaaccctggtcaccgtctcctcag

SEQ ID NO: 3034 - DNA, 355 bp, Homo sapiens
caggtgcagctggtgcaatctggggctgaggtgaagaagcctgggtcctcggtgaaggtctcctgcaaggcttctggaggcaccttcagcagctatgctatcagctgggtgcgacaggcccctggacaagggcttgagtggatgggagggatcatccctatctttggtacagcaaactacgcacagaagttccagggcagagtcacgattaccgcggacgaatccacgagcacagcctacatggaactgagcagcctgagatctgaggacacggccgtgtatcactgtgcgagagatacggttgagatggctacaatggactggggccagggaaccctggtcaccgtctcctcag

SEQ ID NO: 3035 - DNA, 352 bp, Homo sapiens
gaggtgcagctggtggagtctggaggaggcttggtccagcctggggggtccctgagactctcctgtgcagcctctgggttcatcgtcagtagaaactacatgagctgggtccgccaggctccagggaaggggctggagtgggtctcagttatttatagtggtggtagcacattctacgcagactccgtgaagggccgattcaccatctccagagacaattccaagaacacgctgaatctccaaatgagcggcctgagagccgatgacacggccgtgtattactgtgcgagggactacggtgacttctactttgactactggggccagggaaccctggtcaccgtctcctcag

SEQ ID NO: 3036 - DNA, 358 bp, Homo sapiens
caggtcaccttgagggagtctggtcctgcgctggtgaaacccacacagaccctcacactgacctgcaccttctctgggttctcactcagcactagtggaatgtgtgtgagctggatccgtcagcccccagggaaggccctggagtggcttgcacgcattgattgggatgatgataaatactacagcacatctctgaagactaggctcaccatctccaaggacacctccaaaaaccaggtggtccttacaatgaccaacatggaccctgtggacacagccacgtattactgtgcacgggagataatgactacgggaactgactattggggccagggaaccctggtcaccgtctcctcag

SEQ ID NO: 3037 - DNA, 349 bp, Homo sapiens
gaggtacaactggtggagtctgggggaactgtggtacggcctggggggtccctgagactctcctgtgcagcctctggattcacctttgatgattatggcatgagttgggtccgccaagtaccaggaaagggcctggagtgggtctctggtattgattggaatggtggcagcacagattatgcagactttgtgaggggccggttcaccatctccagagacaacgcccagaactccctgtatttgcaaatgaacagtctgagagccgaggacacggccttgtattactgtgcgagaggaactttagttggtgattcctggggccagggaaccctggtcaccgtctcctcag

SEQ ID NO: 3038 - DNA, 363 bp, Homo sapiens
caggtacagttgcagcagtcaggtccaggactgctgaagccctcgcagaccctctcactcacctgtgccatctccggggacagtgtcactagcaacagtgctgcttggtactggatcaggcagtccccatcgagaggccttgagtggctgggaaggacatactacaggtccaagtggtataatgattatgcagtatctgtgaaaagtcgaataaccatcaacccagacacatccaagaaccagttctccctgcagctgaactctgtgactcccgaggacacggctgtgtattactgtgcaaggatagtagtaccagcttcgatagacgtctggggccaagggaccacggtcaccgtctcctca

SEQ ID NO: 3039 - DNA, 337 bp, Homo sapiens
gaagtgcagctggtgcagtccggagcagaggtgaaaaagcccggggagtctctgaggatctcctgtaagggttctggatacagctttaccagctactggatcagctgggtgcgccatatgcccgggaaaggcctggagtggatggggaagattgatcctactgactcttataccaactacagcccgtccttccaaggccacgtcaccatctcagctgacaagtccatcagcactgcctacctgcagtggagcagcctgaaggcctcggacaccgccatgtattactgtgcgacaattgactactggggccagggaaccctggtcaccgtctcctcag

SEQ ID NO: 3040 - DNA, 402 bp, Homo sapiens
caggttcagctggtgcagtctggaactgaggtgaagaagcctggggcctcagtgaaggtctcctgcaaggcttctggttacacctttaccagctatggtatcagctgggtgcgacaggcccctggacaagggcttgagtggatgggatggatcagcgtttacaatggtaacacaaactatgcacagaagctccagggcagagtcaccatgaccacagacacatccacgagcacagcctacatggagctgaggagcctgagatctgacgacacggccgtgtattactgtgcgagagccaattactatggttcggggacttattataacgagaaggaatccaccatctactactactactacatggacgtctggggcaaagggaccacggtcaccgtctcctca

SEQ ID NO: 3041 - DNA, 402 bp, Homo sapiens
caggttcagctggtgcagtctggagctgaggtgaagaagcctggggcctcagtgaaggtctcctgcaaggcttctggttacacctttaccacctatggtttcagctgggtgcgacaggcccctggacaagggcttgagtggatgggatggatcagcgcttacaatggtaacacaaactatgcacagaagctccagggcagagtcaccatgaccacagacacatccacgagcacagcctacatggagctgaggagcctgagatctgacgacacggccgtgtattactgtgcgagagatcaaagtttccctcgattctattactatgatagtagtggttaccccgcttcttccgactacggtacggacgtctggggccaagggaccacggtcaccgtctcctca

SEQ ID NO: 3042 - DNA, 388 bp, Homo sapiens
gaggtgcagctggtggagtctgggggaggcttggtccagcctggggggtccctgagactctcctgtgcagcctctgggttcaccttcagtggctctgctatgcactgggtccgccaggcttccgggaaagggctggagtgggttggccgtattagaagcaaagctaacaattacgcgacagcatatgctgcgtcggtgaaaggcaggttcaccatctccagagatgattcaaagaacacggcgtctctgcaaatgaacagcctgaaaaccgaggacacggccgtttattactgtactagacgcgcctattaaattactatggttcggggaggttcactactactacatggacgtctggggcaaagggaccacggtcaccgtctcctca

SEQ ID NO: 3043 - DNA, 393 bp, Homo sapiens
gaggtgcagctggtggagtctgggggaggcttggtccagcctggggggtccctgagactctcctgtgcagcctctggattcacctttactagcttttggatgagctgggtccgccaggctccagggaaggggctggagtgggtggccaacataaagcaagatggaagtgagaagtactatgtggactctgtgaagggccgcttcaccatctccagagacaacgccaagaactcactgtatctgcaaatgaacagcctgagagccgaggacacggctgtgtattactgtgcgagagagagcagcaattacggtattttgactggttccacgggatactactactactactacatggacgtctggggcaaagggaccacggtcaccgtctcctca

SEQ ID NO: 3044 - DNA, 393 bp, Homo sapiens
gaggtgcagctggtggagtctgggggaggcttggtccagcctggggggtccctgagactctcctgtgcagcctctggattcacctttagtagctattggatgagctgggtccgccaggctccagggaaggggctggagtgggtggccaacataaagcaagatggaagtgagaaatactatgtggactctgtgaagggccgattcaccatctccagagacaacgccaagaactcactgtatctgcaaatgaacagcctgagagccgaggacacggctgtgtattactgtgcgagagagggtatgagttactatgatagtagtggttattacacttactactactactactacatggacgtctggggcaaagggaccacggtcaccgtctcctca

SEQ ID NO: 3045 - DNA, 323 bp, Homo sapiens
ggcctcagtgaaggtctcctgcaaagctctggatacaccttcgccagctacgacattcactgtgtgtgacaggcccctggataagggtttgaatggatggtagggagctactctggcaatggtaacacaggctatgcacagaagtttcagggcagagtcaccatgaccagggacacgtccacgagcacagcctacatggagctgagcagtcagagatctgaggacatagatgtgtactactgtgcgagaccggcctgggaagagcagctggtaagactactttgactactggggccagggaaccctggtcaccgtctcctcag

SEQ ID NO: 3046 - DNA, 396 bp, Homo sapiens
caggttcagctggtgcagtctggagctgaggtgaagaagcctggggcctcagtgaaggtctcctgcaaggcttctggttacacctttaccagctatggtatcagctgggtgcgacaggcccctggacaagggcttgagtggatgggatggatcagcgcttacaacggtaacacaaactatgcacagaagctccagggcagagtcaccatgaccacagacacatccacgagcacagcctacatggagctgaggagcctgagatctgacgacacggccgtgtattactgtgcgagaacccattataactgttactatgatagtagtggtcccggggcgtgctactactactacggtatggacgtctggggccaagggaccacggtcaccgtctcctca

SEQ ID NO: 3047 - DNA, 402 bp, Homo sapiens
gaggtacttctggtggagtctgggggaggcttggtccagcctggggggtccctgagactctcctgtgcagcctctgggttccccttcagtggctcttctatacactgggtccgccaggcctccgggaaagggctggagtgggtcggccatattagaagcaaaggtagtggtcacacgacaacatatgcagcgtcgctgaagggcagggtcaccatctccagagatgattcaaagaacacggtgtatctgcaaatgaacagcctgaacatcgaggacacggccgtatatttctgtactagacctgcatattgtagtgataaatggtgtcatgtggatggggacaactggaattactactacatggacgtctggggcaaagggaccacggtcaccgtctcctca

SEQ ID NO: 3048 - DNA, 354 bp, Homo sapiens
gaggtgcagctggtgcagtctggagcagaggtgaaaaagccgggggagtctctgaagatctcctgtaagggttctggatacagctttaccagctactggatcggctgggtgcgccagatgcccgggaaaggcctggagtggatggggatcatctatcctggtgactctgataccagatacagcccgtccttccaaggccaggtcaccatctcagccgacaagtccatcagcaccgcctacctgcagtggagcagcctgaaggcctcggacaccgccatgtattactgtgcgagactacactactactactacatggacgtctggggcaaagggaccacggtcaccgtctcctca

SEQ ID NO: 3049 - DNA, 376 bp, Homo sapiens
gaggtgtagatggtggagtctgggggaggcttggtaaagcctggggggtcccttagactccccatgtgcagcctctggattcacttttagaaacgcctggatgggctgggtccgccaggctccagggaaggggctggagtgggttggccgtattaaaagcaaaactgatggtgggacaacagatttcgctgcacccgtgaaaggcagattcaccatctcaagagatgattcaaaaaacacgctgtatctgcaaattaacagcctgaaaaccgaggacacagccgtgtgttactgtaccacattcacacgatttttggagtggttatcaactggttcgacccctggggccagggaaccctggtcaccgtctcctcag

SEQ ID NO: 3050 - DNA, 396 bp, Homo sapiens
caggtgcagctgcaggagtcgggcccaggactggtgaagccttcggagaccctgtccctcacctgcactgtctctggtggctccatcagtagttactactggagctggatccggcagcccccagggaagggactggagtggattgggtatatctattacagtgggagcaccaactacaacccctccctcaagagtcgagtcaccatatcagtagacacgtccaagaaccagttctccctgaagctgagctctgtgaccgctgcggacacggccgtgtattactgtgcgagagtccccacatcttacgatttttggagtggttattatgagggccggctctactactactacggtatggacgtctggggccaagggaccacggtcaccgtctcctca

SEQ ID NO: 3051 - DNA, 233 bp, Homo sapiens
ccagcaaccacatctgtcctctagagaatcccctgagagctccgttcctcaccgtggactggacctggaggaccctcttcttaaccaacagtaaaccatgtcagttggtggcataagagaaaactcaatcagagagtgctgaagacaggactgtggagacaccttagaaggacagactctgttccgaatcaccgatgcggcgtcagcaggactggccgagcggaggctctggg

SEQ ID NO: 3052 - DNA, 403 bp, Homo sapiens
caggtgcagctgcaggagtcgggcccaggactggtgaagccttcggagaccctgtccctcacctgcactgtctctggtggctccatcagtagttactactggagctggatccggcagcccccagggaagggactggagtggattgggtatatctattacagtgggagcaccaactacaacccctccctcaagagtcgagtcaccatatcagtagacacgtccaagaaccagttctccctgaagctgagctctgtgaccgccgcagacacggccgtgtattactgtgcgaggaccgcgagagacaaaacagggccggattacgatattttgactggttattataagatggacctttggtactttgactactggggccagggaaccctggtcaccgtctcctcag

SEQ ID NO: 3053 - DNA, 379 bp, Homo sapiens
cagatcaccctgaaggagtccggtcctacgctggtgaaccccacacagaccctcacgctgacctgcaccttctctggattctcgctcagtagtcgtggagtacatgtgggctggatccgtcagcccccaggaaaggccctcgcatggctcgcactcatttattggaatgatgataagcactacaatccatctcttgagagcaggctcgccatcaccaaggacgcctccaaaaaccaggtggtccttacaatgaccaacatggaccctgtggacacaggcacatatttttgtgcacacaggtggcactttggttcggggaacccctatgcggcgggttttggcttttggggccagggaaccctggtcaccgtctcctcag

SEQ ID NO: 3054 - DNA, 379 bp, Homo sapiens
cagatcaccttgaaggagtctggtcctacgctggtgaaacccacacagaccctcacgctgacctgcaccttctctgggttctcactcagcactagaggagtgggtgtgggctggatccgtcagcccccaggaaaggccctggagtggcttgcgctcatttattgggatgatgatcagcgttacagcccatctctgaagagcaggctcaccatcaccaaggacaccgccaaaaaccaggtggtccttacaatgaccaacatggaccctgtggacacagccacatattattgtgcacacagagatcgcgattgtagtagtggcaactgctatggctggttcgacccctggggccagggaaccctggtcaccgtctccccag

SEQ ID NO: 3055 - DNA, 376 bp, Homo sapiens
caggtgcggctggtggagtctgggggaggcgtggtccagcctgggaggtccctgagactctcctgtgcagcctctggattcaccttcagtaactatggcatgcactgggtccgccaggctccaggcaaggggctggagtgggtggcagttatatcatatgatggagattacaaatactatgcagactccgtgacgggccgattcaccatctccagagacacttccaagaacacgctgtatctgcaaatgaacagcctgagagctgaggacacggctgtgtattactgtgcgaaagatagcggttggaggatacagctatggttaagttttggaattgactactggggccagggaaccctggtcaccgtctcctcag

SEQ ID NO: 3056 - DNA, 367 bp, Homo sapiens
caggtgcagttggtgcagtctggggctgaggtgaagcagcctggggcctcagtgaaggtctcctgcaagacttctggatacaccttcaccgacttctatatgcactgggtgcgacaggcccctggacaagggcttgagtggatggggtggatcaaccctaacagtggtggcacaaactatgcacagaagtttaagggcagggtcaccatgacccgggacacgtccatcatcacagtctacatggagctgaacaggctgacatctaacgacacggccgtatattactgtgcgagagaccaaatacaaactcggctgacatattactttgactattggggccagggaaccgtggtcaccgtctcgtcag

SEQ ID NO: 3057 - DNA, 367 bp, Homo sapiens
caggtgcagctggtgcagtctggggctgaggtgaagaagcctggggcctcagtgaaggtctcctgcaaggcttctggatacaccttcaccggctactatatgcactgggtgcgacaggcccctggacaagggcttgagtggatgggatggatcaaccctgacagtggtggcacaaactatgcacagaagtttcagggcagggtcaccatgaccagggacacgtccatcagcacagcctacatggagctgagcaggctgggatctgacgacacggccgtgtattactgtgcgagagctctcgaatattactatgataagagtggttataaatactggggccagggaaccctggtcaccgtctcctcag

SEQ ID NO: 3058 - DNA, 367 bp, Homo sapiens
caggtgcagctggtgcagtctggggctgaggtgaagaagcctggggcctcagtgaaggtctcctgcaaggcttctggatacaccttcaccggctactatatgcactgggtgcgacaggcccctggacaagggcttgagtggatgggatggatcaaccctaacagtggtggcacaaactatgcacagaagtttcagggcagggtcaccatgaccagggacacgtccatcagcacagcctacatggagctgagcaggctgagatctgacgacacggccgtgtattactgtgcgagagtagcgcagctggtacgtccggatgggtggttcgacccctggggccagggaaccctggtcaccgtctcctcag

SEQ ID NO: 3059 - DNA, 367 bp, Homo sapiens
caggtgcagctgcaggagtcgggcccaggactggtgaagccttcggagaccctgtccctcacctgcactgtctctggttactccatcagcagtggttactactggggctggatccggcagcccccagggaaggggctggagtggattgggagtttctatcatagtgggatcacctactacaacccgtccctcaagagtcgagtcaccatatcagtagacacgtccacgaaccagttctccctgaagctgagctctgtgaccgccgcagacacggccgtgtattactgtgcgagagtcagtggcgggtatagtggctacgattcccttggttactggggccagggaaccctggtcaccgtctcctcag

SEQ ID NO: 3060 - DNA, 367 bp, Homo sapiens
caggtgcagctggtggagtctgggggaggcgtggtccagcctgggaggtccctgagactctcctgtgcagcctctggattcaccttcagtagctatggcatgcactgggtccgccaggctccaggcaaggggctggagtgggtggcagttctatcacatgatggaaataataaacactatgcagactccgtgaagggccgattcaccatctccagagacaattccaagaacacgctgtttctgcaaatgaacagcctgagagctgaggacacggctgtgtattactgtgcgaaagcttggtggatacagctttggagtgatgcttttgatatctggggccaagggacaatggtcaccgtctcttcag

SEQ ID NO: 3061 - DNA, 367 bp, Homo sapiens
caggtgcagctggtggagtctgggggaggcgtggtccagcctgggaggtccctgagactctcctgtgcagcctctggattcaccttcagtagttttgctatgcactgggtccgccaggctccaggcaaggggctggagtgggtggcagttatatcatatgatggaagtaatagatattacgcagactccgtgaagggccgattcaccatctccagagacaattccaagaacacgctgtatctgcaaatgaacagcctgagagctgaggacacggctatgtattactgtgcgagagccaagagtgggagctactatttggctgcttttgatatctggggccaagggacaatggtcaccgtctcttcag

SEQ ID NO: 3062 - DNA, 367 bp, Homo sapiens
caggtgcttctggtggagtctgggggaggcgtggtccagcctgggaggtccctgagactctcctgtgcagcctctggattcatcttcagtacctatagtatgcactgggtccgccaggctccaggcgaggggctggagtgggtggcagtcatatcacatgatggaagtgagacatacagcgcagactccgtaaagggccgattcaccatctccagagacaattccaagaacacgttgtttttgcaaatgaacagcctgagacctgaggacacggctatatattactgtgcgagaccgagaagcagtgtctggctcaatgatgcttttgatgtctggggccaagggacaatggtcaccgtctcttcag

SEQ ID NO: 3063 - DNA, 364 bp, Homo sapiens
caggtgcagctgcaggagtcgggcccaggactggtgaagccttcggagaccctgtccctcacctgcactgtctctggtggctccatcagtagttactactggagctggatccggcagcccccagggaagggactggagtggattgggtatatctattacagtgggagcaccaactacaacccctccctcaagagtcgagtcaccatatcagtagacacgtccaagaaccagttctccctgaagctgagctctgtgaccgccgcagacacggccgtgtattactgtgcggccgggtatagcagtggctggtacgagggttactttgactactggggccagggaaccctggtcaccgtctcctcag

SEQ ID NO: 3064 - DNA, 367 bp, Homo sapiens
caggtgcagctggtggagtctgggggaggcgtggtccagcctgggaggtccctgagactctcctgtgcagcctctggattcacgttcagtatctatgcaatgcactgggtccgccaggctccaggcaaggggctggagtgggtggcagttatatcatatgatggaaacaataaatactacgcagactccgtgaagggccgattcaccatctccagagacaattccaagaacacgctgtatctgcaaatgaacagcctgagagctgaggacacggctgtgtattactgtgcgagagtcgacggtgggacctactacgtctggtacttcgatctctggggccgtggcaccctggtcgctgtctcctcag

SEQ ID NO: 3065 - DNA, 367 bp, Homo sapiens
caggtgctactggtgcagtctgggtctgaggtgaggaagcctgggtcgtcggtgaaggtctcctgcaaggcttctggaggcacattcagcgactatgctatcacctgggtgcgacaggcccctggacagggacttgagtggatgggaggattcacccctatctttaattcaagaaaattggcgccgaagttccaggccagagtcaccttgaccgcggacgaatccacgaagacagcgttcatggaaatgagcagtctgaaatctgacgacacggccgtcttttactgtgcgagacaccgggatcacgactttggtgactccccaatcgacacttggggccagggaaccctagtcaccgtctcctcag

SEQ ID NO: 3066 - DNA, 376 bp, Homo sapiens
caggtgcagctggtgcagtctggggctgaggtgaagaagcctggggcctcagtgaaggtttcctgcaaggcatctggatacaccttcaccagctactatatgcactgggtgcgacaggcccctggacaagggcttgagtggatgggagtaatcaaccctagtggtggtagcacaagctacgcacagaggttccagggcagagtcaccatgacaagggacacgtccacgagcacagtctacatggagctgagcagcctgagatctgaggacacggccgtgtattactgtgcgagagatctggatagcgggagctactacgggtacaactttcgattcgacccctggggccagggaaccctggtcaccgtctcctcag

SEQ ID NO: 3067 - DNA, 367 bp, Homo sapiens
caggtgcagctggtgcagtctggggctgaggtgaagaagcctggggcctcagtgaaggtttcctgcaaggcatctggatacaccttcaccagctactatattcactgggtgcgacaggcccctggacaagggcttgagtggatgggaataatcaaccctagtggtggtagcacaagcttcgcacagaagttccagggcagagtcaccatgaccagggacacgtccacgagcacagtctacatggagctgagcagcctgagatctgaggacacggccgtgtattactgtgcgagagatattgcaggagtaccagcgcgcctagggttcgacccctggggccagggaaccctggtcaccgtctcctcag

SEQ ID NO: 3068 - DNA, 367 bp, Homo sapiens
caggtgcagatggtgcagtctggggctgaggtgaagaagcctgggtcctcggtgaaggtctcctgcaaggcttctggaggcaccttcagcagctatgctatcagctgggtgcgacaggcccctggacaagggcttgagtggatgggagggatcatccctatgtttggtacagcaaactatgcacagaagttccagggcagagtcacgattaccgcggacgaatccacgagcacagcctacatggagctgagcagcctgagatctgaggacacggccgtatattactgtgcgagatctggcgggtatgatagtagtggttattatgctgaccactggggcccgggaacccgggtcaccgtctcctcag

SEQ ID NO: 3069 - DNA, 367 bp, Homo sapiens
caggtgcagctggtgcagtctggggctgaggtgaagaagcctgggtcctcggtgaaggtctcctgcaaggcttctggaggcaccttcagtagttatgctatcagctgggtgcgacaggcccctggacaagggcttgagtggatgggagggatcatccctatctttggcacagcaaactacgcacagaggttccagggcagagtcacgattagcgcggacgaatccacgagcacagcctacatggagctgagcagcctgagatctgaggacacggccgtgtattactgtgcgagacaggacgcctatgatagtagtggtcattactatgactactggggccagggaaccctggtcaccgtctcctcag

SEQ ID NO: 3070 - DNA, 367 bp, Homo sapiens
caggtgcagctggtgcagtctggggctgaggtgaagaagcctgggtcctcggtgaaggtctcctgcaaggcttctggaggcaccttcagcagctatgctatcagctgggtgcgacaggcccctggacaagggcttgagtggatgggagggatcatccctatctttggtacagcaaactacgcacagaagttccagggcagagtcacgattaccgcggacgaatccacgggcacagcctacatggagctgagcagcctcagatctgaggacacggccgtgtattactgtgcgagagatggagcctatgatagtagtggttattatgttgactactggggccagggaaccctggtcaccgtctcctcag

SEQ ID NO: 3071 - DNA, 367 bp, Homo sapiens
caggtgcagctggtgcagtctggggctgaggtgaagaagcctgggtcctcggtgaaggtctcctgcaaggcttctggaggcacctacagcagctatgctgtcagctgggtgcgacaggcccctggacaagggcttgagtggatgggaagcgtcatccctatctttggtacagcaaactacgcacagaagttccagggcagagtcacgattaccgcggacgaatccacgagcactgcctacatggagctgaacagcctgagatctgaggacacggccgtgtattactgtgcgagagttctctcctatgatactagtggttattcaagggactactggggccagggaaccctggtcaccgtctcctcag

SEQ ID NO: 3072 - DNA, 367 bp, Homo sapiens
caggtccagctggtgcagtctggggctgaggtgaagaagcctgggtcctcaatgagggtctcctgcaaggcttctggaggcaccttcagcagctatgctatcagctgggtgcgacaggcccctggacaagggcttgagtggatgggagggatcatccctatccttggtttagcaaactacgcacagaagttccagggcagagtcacgattaccgcggacaaatccacgagcacagcctacatggagctgagcagcctgagatctgaggacacggccttatattactgtgcgagagttgggccctatgatagtagtggttattcctatgactactggggccagggaaccctggtcaccgtctcctcag

SEQ ID NO: 3073 - DNA, 367 bp, Homo sapiens
caggtgcagctggtgcagtctggggctgaggtgaagaagcctgggtcctcggtgaaggtctcctgcaaggcttctggaggcaccttcagcagctatgctatcagctgggtgcgacaggcccctggacaagggcttgagtggatgggagggatcatccctatctttggtacagcaaactacgcacagaagttccagggcagagtcacgattaccgcggacgaatccacgagcacagcctacatggagctgagcagcctgagatctgaggacacggccgtgtattactgtgcgagagtagacccatatgatggtagtggttactacgaggactactggggccagggaaccctggtcaccgtctcctcag

SEQ ID NO: 3074 - DNA, 373 bp, Homo sapiens
gaggtgcagctggtggagtctgggggagacttggtacagccagggcggtccctgagactctcctgtaaagcttctggattcacttttggtgattacgctatgaactggttccgtcaggctccagggaagggcctggagtgggtaagtttcattagaagcaaaacttttggtgggacatcagaatacgccgcgtctgtgaaagacagattcaccgtctcaagagatgattccagaggcatcgcctatctgcaaatgaacagcctggaaaccgacgacacagccgtgtattactgtgctagaggggtcgggcagtggctgcctccccaactagtcgccttctggggccagggaaccctggtcagcgtctcctcag

SEQ ID NO: 3075 - DNA, 373 bp, Homo sapiens
gaggtgcagctggtggagtctgggggaggcttggtacagccagggcggtccctgagactctcctgtacagcttctggattcacctttggtgattatgctatgagctggttccgccaggctccagggaaggggctggagtgggtaggtttcattagaagcaaagcttatggtgggacaacagaatacgccgcgtctgtgaaaggcagattcgccatctcaagagatgattccaaaagcatcgcctatctgcaaatgaacagcctgaaaaccgaggacacagccgtgtattactgtactaggaggggccagcagctggccatgggataccactttgactactggggccagggaatcctggtcaccgtctcctcag

SEQ ID NO: 3076 - DNA, 373 bp, Homo sapiens
caggtgcagctacagcagtggggcgcaggactgttgaagccttcggagaccctgtccctcacctgcgctgtctatggtgggtccttcagtggttactactggagctggattcgccagcccccagggaaggggctggagtggattggggaaatcaatcatagtggaagcaccaactacaacccgtccctcaagagtcgagtcaccatatcagcagacacgtccaagaaccagttctccctgaagctgagctctgtgaccgccgcggacacggctgtgtattactgtgcgagaggccttttaactacggtgactacaccgggcccctggtacttcgatctctggggccgtggcaccctggtcactgtctcctcag

SEQ ID NO: 3077 - DNA, 373 bp, Homo sapiens
gaggtgcagctggtggagtctgggggaatcttggtacagccagggcggtccctgagactctcctgtacaacttctggattcacctttggtgattatgctatgagctggttccgccaggctccagggaaggggctggagtgggtaggtttcattagaagcaaagcttttggtgggacagcagaatacgccgcgtctgtgaaaggcagattcaccatctctagagaagattccaaaagcatcgcccatctgcaaatgaacagcctgaagaccgaggacacagccgtgtattactgtactagagtggtcgggcagtggctgcctccccagctagccggctactggggccagggaaccctggtcaccgtctcctcag

SEQ ID NO: 3078 - DNA, 367 bp, Homo sapiens
caggttcagctggtgcagtctggagctgaggtgaagaagcctggggcctcagtgaaggtctcctgcaaggcttctggttacacctttaccagctatggtatcagctgggtgcgacaggcccctggacaagggcttgagtggatgggatggatcagcgcttacaatggtaacacaaactatgcacagaagctccagggcagagtcaccatgaccacagacacatccacgagcacagcctacatggagctgaggagcctgagatctgacgacacggccgtgtattactgtgcgagagattccagggtagtaaagtatgcgaactactttgactactggggccagggaaccctggtcaccgtctcctcag

SEQ ID NO: 3079 - DNA, 390 bp, Homo sapiens
gaggtgcagctggtggagtctgggggaggcttggtccagcctggggggtccctgagactctcctgtgcagcctctggattcacctttagtagttattggatgagctgggtccgccaggctccagggaaggggctgaagtgggtggccaacataaaacatgatggaagtgagaaatactctgtggactctgtgaagggccgattcaccatctccagagacaacgccaagaagtcagtgtatctgcaaatgaacagcctgagagccgaggacacggctgtgtattactgtgcgagagatatagttgagtctgagtatagcagtggctggtataagtactactactactacatggacgtctggggcaaagggacgacggtcaccgtctcctca

SEQ ID NO: 3080 - DNA, 387 bp, Homo sapiens
gaggtgcagctggtggagactggaggaggcttgatccagcctggggggtccctgagactctcctgtgcagcctctgggttcaccgtcagtagcaactacatgacctgggtccgccaggctccagggaaggggctggagtgggtctcagttatttatagcggtggtagcacatactacgcagactccgtgaagggccgattcaccatctccagagacaattccaagaacacgctgtatcttcatatgaacagcctgagagccgaggacacggccgtgtattactgtgcgagaggtggcgaaatcgatgtttggagtggttatggaacttattcctactactactacatggacgtctggggcaaagggaccacggtcaccgtctcctca

SEQ ID NO: 3081 - DNA, 367 bp, Homo sapiens
caggtccagctggtacagtctggggctgaggtgaagaagcctggggcctcagtgaaggtctcctgcaaggtttccggatacaccctcactgaattatccatgcactgggtgcgacaggctcctggaaaagggcttgagtggatgggaggttttgatcctgaagatggtgaaacaatctacgcacagaagttccagggcagagtcaccatgaccgaggacacatctacagacacagcctacatggaactgagcagcctgagatctgacgacacggccgtgtattactgtgtaacagatttcgcggtagtgggagctactgggacctttgactactggggccagggaaccctggtcaccgtctcctcag

SEQ ID NO: 3082 - DNA, 390 bp, Homo sapiens
gaggtgcagctggtgcagtctggagcagaggtgaaaaagcccggggagtctctgaagatctcctgtaagggttctgcaaacagctttagcggctactgggtcgcctggatgcgccagatgcccgggaaaggcctggagtggatggggatcatctatcctggtgactctgataccagatacagcccgtccttccaaggccaggtcaccatctcagtcggcgagtcctccagcaccgcctatttgcagtggagcagcctgaaggcctcggacagcgccacgtattactgtgcgaggcttaaagggtattacaatcctttgactggttattatacaacctactactccggcctggacgtctggggccaagggaccacggtcaccgtctcctca

SEQ ID NO: 3083 - DNA, 394 bp, Homo sapiens
cagctgcagctgcaggagtcgggcccaggactggtgaagccttcggagaccctgtccctcacctgcactgtctctggtggctccatcagcagtattagttactactggggctggatccgccagcccccagggaaggggctggagtggattgggagtatctattatagtgggagcacctactacaacccgtccctcaagagtcgagtcaccatatcagtagacacgtccaagaaccagttctccctgaagctgagctctgtgaccgccgcggacacggccgtgtattactgtgcgagagaagttcaccctacgtattacgatttttggagtggttatcacaggtacaactggttcgacccctggggccagggaaccctggtcaccgtctcctcag

SEQ ID NO: 3084 - DNA, 388 bp, Homo sapiens
gaggtgcagctggtggagtctggaggaggcttgatccagcctggggggtccctgagactctcctgtgcagcctctgggttcaccgtcagtagcaactacatgagctgggtccgccaggctccagggaaggggctggagtgggtctcagttatttatagcggtggtagcacatactacgcagactccgtgaagggccgattcaccatctccagagacaattccaagaacacgctgtatcttcaaatgaacagcctgagagccgaggacacggccgtgtattactgtgcgagagccctgataacgtattactatgatagtagtggttatacacgctcatcgacacactttgactactggggccagggaaccctggtcaccgtctcctcag

SEQ ID NO: 3085 - DNA, 361 bp, Homo sapiens
gaagtgcagctggtgcagtccggagcagaggtgaaaaagcccggggagtctctgaggatctcctgtaagggttctggatacacctttaccagctactggatcacctgggtgcgccagatgcccgggaaaggcctggagtggatggggaggattgatcctagtgactcttataccaactacagcccgtccttccaaggccacgtcaccatctcagctgacaagtccatccgcactgcctacctgcagtggagcagcctgaaggcctcggactccgccatgtattactgtgcgagacatgtttgtggtggtgactgctatcttgactactggggccagggaaccctggtcaccgtctcctcag

SEQ ID NO: 3086 - DNA, 373 bp, Homo sapiens
caggtgcagctacagcagtggggcgcaggactgttgaagccttcggagaccctgtccctcacctgcgctgtctatggtgggtccttcagtggttactactggagctggatccgccagcccccagggaaggggctggagtggattggggaaatcaatcatagtggaagcaccaactacaacccgtccctcaagagtcgagtcaccatatcagtagacacgtccaagaaccagttctccctgaagctgagctctgtgaccgccgcggacacggctgtgtattactgtgcgagaggcatgggacgatattttgactggttacagcctaactactttgactactggggccagggaaccctggtcaccgtctcctcag

SEQ ID NO: 3087 - DNA, 361 bp, Homo sapiens
caggtgcagctggtggagtctgggggaggcgtggtccagcctggggggtccctgagactctcctgtgcagcgtctggattcaccttcagtagctatggcatgcactgggtccgccaggctccaggcaaggggctggaatgggtggcatttatacggtataatggaggtaataaatactatgtagactccgtgaagggccgattcaccatctccagagacaattccgagaacacgctgtatctgcaaatgaacagcctgacagctgaggacacggctgtatattactgtgcgaaagacgacggtgactacgttattcccttcgatctctggggccgtggcaccctggtcactgtctcctcag

SEQ ID NO: 3088 - DNA, 358 bp, Homo sapiens
gaggtgcagctggtggagtctgggggaggcttggtacagcctggggggtccctgagactctcctgtgcagcctctggattcaccttcagtagctacgacatgcactgggtccgccaagctacaggaaaaggtctggagtgggtctcagctattggtactgctggtgacacatactatccaggctccgtgaagggccgattcaccatctccagagaaaatgccaagaactccttgtatcttcaaatgaacagcctgagagccggggacacggctgtgtattactgtgcaagagaccctggaacccgggactggtacttcgatctctggggccgtggcaccctggtcactgtctcctcag

SEQ ID NO: 3089 - DNA, 361 bp, Homo sapiens
gaagtgcagctggtggagtctgggggaggcttggtacagcctggcaggtccctgaggctctcctgtgcagcctcgggattcacctttgatgattatgccatgcactgggtccggcaagctccagggaagggcctggagtgggtctcagggattacttggaatagtggtagcataggctatgcggactctgtgaagggccgattcaccatctccagagacaacgccaagaactccctgtatctgcaaatggacagtctgagagctgatgacacggccttgtactactgtgcaaaagatatagggtatagtgggagcttctttgactgctggggccagggaaccctggtcaccgtctcctcag

SEQ ID NO: 3090 - DNA, 367 bp, Homo sapiens
caggtgcagctggtggagtctgggggaggcttggtcaagcctggagggtccctgagactctcctgtgcagcctctggattcaccttcagtgactactacatgagctggatccgccaggctccagggaaggggctggagtgggtttcatacattagtagtagtggtagtcccatatactacgcagactctgtgaagggccgattcaccatctccagggacaacgccaagaactcactgtatctgcaaatgaacagcctgagagccgaggacacggccgtgtattactgtgcgagaggatggggtggtggtgattgggctcgggtgggtgactactggggccagggaaccctggtcaccgtctcttcag

SEQ ID NO: 3091 - DNA, 367 bp, Homo sapiens
gaggtgcagctgttggagtctgggggaggcttggtacagcctggggggtccctgagactctcctgtgcagcctctggattcacctttaacagctatgccatgagctgggtccgccaggctccagggaaggggctggagtgggtctcagctattagtggtagtggtggtagcacatactacgcagactccgtgaagggccggttcaccatctccagagacaattccaagaacacgctgtatctgcaaatgaacagcctgagagccgaggacacgaccgtatattactgtgcgaaagtggatacagctatggtcacgcacgggtactttgacaactggggccagggaaccctggtcaccgtctcctcag

SEQ ID NO: 3092 - DNA, 367 bp, Homo sapiens
gaggtgcagctggtggagtctgggggaggcttggtacagccagggcggtccctgagactctcctgtacagcttctggattcacctttggtgattatgctatgagctggttccgccaggctccagggaaggggctggagtgggtaggtttcattagaagcaaagcttatggtgggacaacagaatacgccgcgtctgtgaaaggcagattcaccatctcaagagatgattccaaaagcatcgcctatctgcaaatgaacagcctgaaaaccgaggacacagccgtgtattactgtactagagagcggtatttggtacaatactactttgactactggggccagggaaccctggtcaccgtctcctcag

SEQ ID NO: 3093 - DNA, 361 bp, Homo sapiens
gaggtgcagttggtggagtctgggggaggcttggtacagcctggggggtccctgagactctcctgtgcagcctctggattcaccttcagtccctatagcatgaactgggtccgccaggctccagggaaggggctggagtggatttcatacatgagtggtagtagtagtgccataaactacgcagactctgtgaagggccgattcaccatctccagagacaacgccaagaactcactgtatctgcaaatgaacagcctgagagccgaggacacggctgtgtattactgtgcgagagatgggcccggtagcactcactactttgacttctggggccagggaaccctggtcaccgtctcctcag

SEQ ID NO: 3094 - DNA, 361 bp, Homo sapiens
gaggtgcagctggtgcagtctggagcagaggtgaaaaagcccggggagtctctgaagatctcctgtaagggttctggatacagctttaccagctactggatcggctgggtgcgccagatgcccgggaaaggcctggagtggatggggatcatctatcctggtgactctgataccagatacagcccgtccttccaaggccaggtcaccatctcagccgacaagtccatcagcaccgcctacctgcagtggagcagcctgaaggcctcggacaccgccatgtattactgtgcgagactggacgtagtagtggttaccggttttgactactggggccagggaaccctggtcaccgtctcctcag

SEQ ID NO: 3095 - DNA, 361 bp, Homo sapiens
gaggtgcagctggtgcagtctggagcagaggtgaaaaagccgggggagtctctgaagatctcctgtaagggttctggatacagctttaccagctactggatcggctgggtgcgccagatgcccgggaaaggcctggagtggatggggatcatctatcctggtgactctgataccagatacagcccgtccttccaaggccaggtcaccatctcagccgacaagtccatcagcaccgcctacctgcagtggagcagcctgaaggcctcggacaccgccatgtattactgtgcgagacccgcttacgatttttggagtggttattatcattggggccagggaaccctggtcaccgtctcctcag

SEQ ID NO: 3096 - DNA, 367 bp, Homo sapiens
gaggtgcagctggtgcagtctggagcagaggtgaaaaagcccggggagtctctgaagatctcctgtaagggttctggatacagctttaccagctactggatcggctgggtgcgccagatgcccgggaaaggcctggagtggatggggatcatctatcctggtgactctgataccagatacagcccgtccttccaaggccaggtcaccatctcagccgacaagtccatcagcaccgcctacctgcagtggagcagcctgaaggcctcggacaccgccatgtattactgtgcgagagccccatacagatataagagtggctgggtatttgactactggggccagggaaccctggtcaccgtctcctcag

SEQ ID NO: 3097 - DNA, 373 bp, Homo sapiens
gaggtgcagctggtggagtctgggggaggcttggtacagtctggggggtccctgagactctcctgtgcagcctctggattcacctttagtagatacgacatgcactgggtccgccatactacaggaaaacctctggagtgggtctcagccattggtactgctgctgacacatactatccagactccgtgaagggccgattcaccatctccagggacaatgccaagacttccgtgtatcttcagatgaacagcctgagggccgaggacacgggtgtttattactgtgtaagaggatcaacggataagaccaggtgccattggaggtgtgggttcgacccctggggccagggaaccctggtcaccgtctcctcag

SEQ ID NO: 3098 - DNA, 358 bp, Homo sapiens
caggtgcagctacagcagtggggcgcaggactgttgaagccttcggagaccctgtccctcatttgcggtgtctatggtgggtccttcaatggttactactggagctggatccgccagcccccagggaaggggctggagtggattggggaaatcaatcatagtggaagcaccaactacaacccgtccctcaagagtcgagtcaccatatcagtagacacgtccaagaaacagttctccctgaagctgagctctgtaatcgccgcggacacggctgtgtattactgtgcgagagccgagtatagcagctctggttactttgactactggggccagggaaccctggtcaccgtctcctcag

SEQ ID NO: 3099 - DNA, 361 bp, Homo sapiens
caggtgcagctggtgcagtctggggctgaggtgaagaagcctggggcctcagtgaaggtctcctgcaaggcttctggatacaccttcaccggctactatatgcactgggtgcgacaggcccctggacaagggcttgagtggatgggatggatcaaccctaacagtggtggcacaaactatgcacagaagtttcagggcagggtcaccatgaccagggacacgtccatcagcacagcctacatggagctgagcaggctgagatctgacgacacggccgtgtattactgtgcgagagagcgtatagcagcagctggccactttgactactggggccagggaaccctggtcaccgtctcctcag

SEQ ID NO: 3100 - DNA, 367 bp, Homo sapiens
gaggtgcagctggtgcagtctggagcagaggtgaaaaagcccggggagtctctgaagatctcctgtaagggttctggatacagctttaccaactactggatcggctgggtgcgccagatgcccgggaaaggcctggagtggatgggaatcatctatcctggtgactctgatgccagatacagtccgtccttccaaggccaggtcaccatctcagccgacaagtccatcagcaccgcctacttgcagtggagcagcctgaaggcctcggacaccgccatgtattattgtgcgagacatgcgggcaatggctggtattggaactggttcgacccctggggccagggaaccctggtcaccgtctcctcag

SEQ ID NO: 3101 - DNA, 361 bp, Homo sapiens
gaggtgcagctggtggagtctgggggaggcctggtcaagcctggggggtccctgagactctcctgtgcagcctctggattcaccttcagtagctatagcatgaactgggtccgccaggctccagggaaggggctggagtgggtctcatccattagtagtagtagtagttacatatactacgcagactcagtgaagggccgattcaccatctccagagacaacgccaagaactcactgtatctgcaaatgaacagcctgagagccgaggacacggctgtgtattactgtgcgagagatatagattgtggtggtgattgttttgactactggggccagggaaccctggtcaccgtctcctcag

SEQ ID NO: 3102 - DNA, 361 bp, Homo sapiens
gaggtgcagctggtggagtctgggggaggcctggtcaagcctggggggtccctgagactctcctgtgcagcctctggattcaccttcagtagctatagcatgaactgggtccgccaggctccagggaaggggctggagtgggtctcatccatcactagtagtagtacttacatatactacgcagactcagcgaggggccgattcaccatctccagagacgacgccaagaactcactgtatctgcaaatgaacagcctgagagccgaggacacggctgtgtattactgtgcgagagagacgggtagtggttatacactctttgactactggggccagggaaccctggtcaccgtctcctcag

SEQ ID NO: 3103 - DNA, 361 bp, Homo sapiens
gaggtgcagctggtggagtccgggggaggcttagttcagcctggggggtccctgagactctcctgtgcagcctctggattcaccttcagtagctactggatgcactgggtccgccaagctccagggaaggggctggtgtgggtctcacgtattaatagtgatgggagtagcacaagctacgcggactccgtgaagggccgattcaccatctccagagacaacgccaagaacacgctgtatctgcaaatgaacagtctgagagccgaggacacggctgtgtattactgtgcaagagatattctggacgtggcaactggaatcgactactggggccagggaaccctggtcaccgtctcctcag

SEQ ID NO: 3104 - DNA, 361 bp, Homo sapiens
gaggtgcagctggtggagtctgggggaggcttagttcagcctggggggtccctgagactctcctgtgcagcctctggattcaccttcagtagctactggatgcactgggtccgccaagctccaggaaaggggctggtgtgggtctcacgtatttttaatgatgggagtagcacaaactacgcggactccgtgaagggccgtttcaccatctccagagacaacgccaagaacacgctgtatctgcaaatggacagtctgagagccgaggacacggctgtgtattactgtacaagagataacgcgatttttggagtggttaacgactactggggccagggaaccctggtcaccgtctcctcag

SEQ ID NO: 3105 - DNA, 361 bp, Homo sapiens
gaggtgcagctggtggagtccgggggaggcttagttcagcctggggggtccctgagactctcctgtgcagcctctggattcaccttcagcagctactggatgcactgggtccgccaagctccagggaaggggctggtgtgggtctcacgtattaatactgatgggagtagcacaagctacgcggactccgtgaagggccgattcaccatctccagagacaacgccaagaacacgctgtatctgcaaatgaacagtctgagagccgaggacacggctgtgtattactgtgcaagggaggatattgtagtagtaccagcttttgactactggggccagggaaccctggtcaccgtctcctcag

SEQ ID NO: 3106 - DNA, 376 bp, Homo sapiens
gaagtgcagctggtggagtctgggggagtcgtggtacagcctggggggtccctgagactctcctgtgcagcctctggattcacctttgatgattataccatgcactgggtccgtcaagctccggggaagggtctggagtgggtctctcttattagttgggatggtggtagcacatactatgcagactctgtgaagggccgattcaccatctccagagacaacagcaaaaactccctgtatctgcaaatgaacagtctgagaactgaggacaccgccttgtattactgtgcaaaagatataaggcgagcttattttgactggttgtggaattactttgactactggggccagggaaccctggtcaccgtctcctcag

SEQ ID NO: 3107 - DNA, 361 bp, Homo sapiens
gaggtgcagctggtggagtccgggggaggcttagttcagcctggggggtccctgagactctcctgtgcagcctctggattcaccttcagtagcttctggatgcactgggtccgccaagctccagggaaggggctggtgtgggtctcacgtattaatactgatgggagtagcacaagctacgcggactccgtgaagggccgattcaccatctccagagacaacgccaagaacacgctgtatctgcaaatgaacagtctgagagccgaggacacggctgtgtattactgtgcaagagagtcggtgggagctaccctaagccttgactactggggccagggaaccctggtcaccgtctcctcag

SEQ ID NO: 3108 - DNA, 361 bp, Homo sapiens
caggtgcagctggtggagtctgggggaggcgtggtccagcctgggaggtccctgagactctcctgtgcagcctctggattcaccttcagaagctatgctatgcactgggtccgccaggctccaggcaaggggctggagtgggtggcagttatatcatatgatggaagcaataaatatcacgcagactccgtgaagggccgattcaccatctccagagacaattccaagaacacgctgtatctgcaaatgaacagcctgagagctgaggacacggctgtgtattactgtgcgagaaattactatgatagtagtgatgcttttgatatctggggccaagggacaatggtcaccgtctctccag

SEQ ID NO: 3109 - DNA, 373 bp, Homo sapiens
gaggtgcagctggtggagtctgggggaggcttggtaaagcctggggggtcccttagactctcctgtgcagcctctggattcactttcagtaacgcctggatgagctgggtccgccaggctccagggaaggggctggagtgggttggccgtattaaaagcaaaactgatggtgggacaacagactacgctgcacccgtgaaaggcagattcagcatctcaagagatgaatcaaaaaacacgctgtctctgcaaatgaacagcctgaaaaccgaggacacagccgtgtattactgtaccacagataccccagtgggagctcaacggggctactttgactactggggccagggaaccctggtcaccgtctcctcag

SEQ ID NO: 3110 - DNA, 361 bp, Homo sapiens
caggtgcagctggtggagtctgggggaggcgtggtccagcctgggaggtccctgagactctcctgtgcagcctctggattcaccttcagtagctattgcatgcactgggtccgccagactccaggcaaggggctggagtgggtggcagttatatcatatgatggaagtaataaatactatgcagactccgtgaagggccgattcaccatctccagagacaattccaagaacacgctgtatctgcaaatgaacagcctgagagctgaggacacggctgtgtattactgtgcgaattccgttgagctatggccatatacctttgactactggggccagggaaccctggtcaccgtctcctcag

SEQ ID NO: 3111 - DNA, 361 bp, Homo sapiens
caggtgcagctggtggagtctgggggaggcgtggtccagcctgggttgtccctgagactctcctgtgcagcgtctggattcaccttcagtacctatggcatgcactgggtccgccaggctccaggcaaggggctggagtgggtggcatttatacggtacgatggaactaataaatgctatgcagactccgtgaagggccgattcaccatctccagagacaattccaagaacacgctgtatctgcaaatgaacagcctgagatctgaggacacggctgtgtattattgtgcgaaggggggtcccctatacggtgactacggtgactactggggccagggaaccctggtcaccgtctcctcag

SEQ ID NO: 3112 - DNA, 360 bp, Homo sapiens
caggtgcagctggtggagtctgggggaggcgtggtccagcctggggggtccctgagactctcctgtgcagcgtctggattcaccttcagtgactatggcatgcactgggcccgccaggctccaggcaaggggctggagtgggtggcatttatacggtttgatgcaagtaaaaaatactacgcagactccgtgaagggccgcttcaccctctccagagacaattccaagaacacgctgtatctgcaaatgatcagcctgagacctgaggacacggctctctattactgtgcgaaggatcgaactggctgggagggagcctctgacttctggggccagggagccctggtcaccgtctcctca

SEQ ID NO: 3113 - DNA, 361 bp, Homo sapiens
caggtgcatctggtggagtctgggggaggcgtggtccagcctgggaggtccctgagactctcctgtacagcctctggattcacgttcagtagctactctatgcactgggtccgccaggctccaggcaaggggctggagtgggtggcagctatttcatatgatggaagcattaaatactccgcagactccgtgaagggccgattcaccatctccagagacaattccaagaacactctctatctccaaatgaacagcctgagagctgaggacacggctatatattactgtgcgaaattcccattcctggggccccggggctttgactactggggccagggaaccctggtcaccgtctcctcag

SEQ ID NO: 3114 - DNA, 361 bp, Homo sapiens
caggtgcagctggtggagtctgggggaggcgtggtccagcctgggaggtccctgagactctcctgtgcagcctctggattcaccttcagtagctatgctatgcactgggtccgccaatctccagacaaggggctggagtgggtggcagttatatcatatgatggaagcagtaaattctacacagactccgtgaagggccgattcaccatctccagagacaattccaagaacacgctgtctctgcaaatgaacagcctgagagctgaggacacggctgtgtattactgtgcgagagatggaaactggatcgtgtactactttgactactggggccagggaaccctggtcaccgtctcctcag

SEQ ID NO: 3115 - DNA, 361 bp, Homo sapiens
caggtgcagctggtggagtctgggggaggcgtggtccagcctgggaggtccctgagactctcctgtgcagcctctggattcaccttcagtagctatgctatgcactgggtccgccaggctccagggaaggggctggagtgggtggcagttatatcagatgatggaagcaataaatactacgcagactccgtgaagggccgattcaccatctccagagacaattccaagaacacgctgtatctgcaaatgaacagcctgagagctgaggacacggctgtgtattactgtgcgagagatagggacgacatagtagtggttattgactactggggccagggaaccctggtcaccgtctcctcag

SEQ ID NO: 3116 - DNA, 361 bp, Homo sapiens
caggtgcagctggtggagtctgggggaggcgtggtccagcctgggaggtccctgagactctcctgtgcagcctctggattcaccttcagtagctatgctatgcactgggtccgccaggctccaggcaaggggctggagtgggtggcagttatatcatatgatggaagcaataaatactacgcagactccgtgaagggccgattcaccatctccagagacaattccaagaacacgctgtatctgcaaatgaacagcctgagagctgaggacacggctgtgtattactgtgcgagatgttggagtggttattcgtccccatttgactactggggccagggaaccctggtcaccgtctcctcag

SEQ ID NO: 3117 - DNA, 306 bp, Homo sapiens
gacatccagatgacccagtctccatcctccctgtctgcatctgtgagacacagagtcaccttcacttgccaggcgagtcaggacattacaactatttatattggtatcagcaaaaaccagggaaagtccctaaactcctgatcttcgatgcatccaatttggcaacaggggtcccatcaaggttcagtggaagtggatctgggacaaattttactttcaccttgagcagcctgcagcctgaagatattgcaggatatttctgtcaacaatatgacattctccttcagtcgagactggagattaaac

SEQ ID NO: 3118 - DNA, 306 bp, Homo sapiens; identical to SEQ ID NO: 3117

SEQ ID NO: 3119 - DNA, 306 bp, Homo sapiens; identical to SEQ ID NO: 3117

SEQ ID NO: 3120 - DNA, 306 bp, Homo sapiens; identical to SEQ ID NO: 3117

SEQ ID NO: 3121 - DNA, 306 bp, Homo sapiens; identical to SEQ ID NO: 3117

SEQ ID NO: 3122 - DNA, 306 bp, Homo sapiens; identical to SEQ ID NO: 3117

SEQ ID NO: 3123 - DNA, 318 bp, Homo sapiens
gacatccagatgacccagtctccatcctccctgtctgcatctgtaagacacagagtcaccttcacttgccaggcgagtcaggacattccaactatttaaattggtatcaccagacaccagggaaagcccctaaactcctgatcttcgatgcatccaatttggcaacaggggtcccatgaaggttcagtggaagtggacctgggacagactttactttcaccttcaactgcctgcagcctgaagatattgcaagatatttctgtcaacggtatgagaatctccttcaccttcggccaagggacgcgactggagattaaa

SEQ ID NO: 3124 - DNA, 306 bp, Homo sapiens; identical to SEQ ID NO: 3117

SEQ ID NO: 3125 - DNA, 306 bp, Homo sapiens; identical to SEQ ID NO: 3117

SEQ ID NO: 3126 - DNA, 306 bp, Homo sapiens; identical to SEQ ID NO: 3117

SEQ ID NO: 3127 - DNA, 331 bp, Homo sapiens
cagtctgtgctgactcagccaccctcaacgtctgggacccccgggcagagggtcaccatctcttgttctggagccagctccaacatcggaagtaatactgtaaactggtaccagcagctcccaggaacggcccccaaactcctcatttatagtaatgatcagcggccctcaggggtccctgaccgattctctggctccaagtctggcacctcagcctccctggccatcagtggcctccagtccgaggatgaggctgattattattgtgtagcatgggatgacagcctaaatggatatgtcttcggaactgggaccaaggtcaccgtcctag

SEQ ID NO: 3128 - DNA, 306 bp, Homo sapiens; identical to SEQ ID NO: 3117

SEQ ID NO: 3129 - DNA, 306 bp, Homo sapiens; identical to SEQ ID NO: 3117

SEQ ID NO: 3130 - DNA, 306 bp, Homo sapiens; identical to SEQ ID NO: 3117

SEQ ID NO: 3131 - DNA, 306 bp, Homo sapiens; identical to SEQ ID NO: 3117

SEQ ID NO: 3132 - DNA, 331 bp, Homo sapiens; identical to SEQ ID NO: 3127

SEQ ID NO: 3133 - DNA, 306 bp, Homo sapiens; identical to SEQ ID NO: 3117

SEQ ID NO: 3134 - DNA, 306 bp, Homo sapiens; identical to SEQ ID NO: 3117

SEQ ID NO: 3135 - DNA, 306 bp, Homo sapiens; identical to SEQ ID NO: 3117

SEQ ID NO: 3136 - DNA, 306 bp, Homo sapiens; identical to SEQ ID NO: 3117

SEQ ID NO: 3137 - DNA, 306 bp, Homo sapiens; identical to SEQ ID NO: 3117

SEQ ID NO: 3138 - DNA, 306 bp, Homo sapiens; identical to SEQ ID NO: 3117

SEQ ID NO: 3139 - DNA, 331 bp, Homo sapiens; identical to SEQ ID NO: 3127

SEQ ID NO: 3140 - DNA, 306 bp, Homo sapiens; identical to SEQ ID NO: 3117

SEQ ID NO: 3141 - DNA, 306 bp, Homo sapiens; identical to SEQ ID NO: 3117

SEQ ID NO: 3142 - DNA, 331 bp, Homo sapiens; identical to SEQ ID NO: 3127

SEQ ID NO: 3143 - DNA, 306 bp, Homo sapiens; identical to SEQ ID NO: 3117

SEQ ID NO: 3144 - DNA, 306 bp, Homo sapiens; identical to SEQ ID NO: 3117

SEQ ID NO: 3145 - DNA, 306 bp, Homo sapiens; identical to SEQ ID NO: 3117

SEQ ID NO: 3146 - DNA, 307 bp, Homo sapiens
gacatccagatgacccagtctccatcctccctgtctgcatctgtgagacacagagtcaccttcacttgccaggcgagtcaggacattagcaactatttatattggtatcagcaaaaaccagggaaagtccctaaactcctgatcttcgatgcatccaatttggcaacaggggtcccatcaaggttcagtggaagtggatctgggacaaattttactttcaccttgagcagcctgcagcctgaagatattgcaggatatttctgtcaacaatatgacattctccttcagtcgagactggagattaaac

SEQ ID NO: 3147 - DNA, 306 bp, Homo sapiens; identical to SEQ ID NO: 3117

SEQ ID NO: 3148 - DNA, 318 bp, Homo sapiens
gacatccagatgacccagtctccatcctccctgtctgcatctgtgagacagagagtcaccttcacttgccaggcgagtcaggacattccaactttttaaattgtcatcaccagacaccagggaaagcccctaaactcctgatcttcgatgcatccaatttggcaacaggggtcccatgaaggttcagtggaagtggacctgggacagactttactttcaccttcaactggctgcagcctgaagatattggaagatatttctgtcaacgatatgagaatctccttcaccttcgcccaagggacgcggctggagattaaa

SEQ ID NO: 3149 - DNA, 331 bp, Homo sapiens; identical to SEQ ID NO: 3127

SEQ ID NO: 3150 - DNA, 306 bp, Homo sapiens; identical to SEQ ID NO: 3117

SEQ ID NO: 3151 - DNA, 306 bp, Homo sapiens; identical to SEQ ID NO: 3117

SEQ ID NO: 3152 - DNA, 306 bp, Homo sapiens; identical to SEQ ID NO: 3117

SEQ ID NO: 3153 - DNA, 306 bp, Homo sapiens; identical to SEQ ID NO: 3117

SEQ ID NO: 3154 - DNA, 331 bp, Homo sapiens; identical to SEQ ID NO: 3127

SEQ ID NO: 3155 - DNA, 318 bp, Homo sapiens; identical to SEQ ID NO: 3148

SEQ ID NO: 3156 - DNA, 331 bp, Homo sapiens; identical to SEQ ID NO: 3127

SEQ ID NO: 3157 - DNA, 306 bp, Homo sapiens; identical to SEQ ID NO: 3117

SEQ ID NO: 3158 - DNA, 318 bp, Homo sapiens
gacatccagatgacccagtctccagcctccctgtctgcatctgtgagacagagagtcaccttcacttgccaggcgagtcaggacattccaactttttaaattgtcatcaccagacaccagggaaagcccctaaactcctgatcttcgatgcatccaatttggcaacaggggtcccatgaaggttcagtggaagtggacctgggacagactttactttcaccttcaactggctgcagcctgaagatattggaagatatttctgtcaacgatatgagaatctccttcaccttcgcccaagggacgcggctggagattaaa

SEQ ID NO: 3159 - DNA, 306 bp, Homo sapiens; identical to SEQ ID NO: 3117

SEQ ID NO: 3160 - DNA, 306 bp, Homo sapiens; identical to SEQ ID NO: 3117

SEQ ID NO: 3161 - DNA, 322 bp, Homo sapiens
gacatccagatgacccagtctccatcttccgtgtctgcatctgtaggagacagagtcaccatcgcttgtcgggcgagtcaagatattcgcgtctcattagcctggtatcagcaaaaaccagggaaagcccctaatctcctgatctatgctggctccagtttacaaagtggggtcccatcaaggttcagcggcagtggatatgggacagatttcactctcaccatcagcagcctgcagcctgacgattttggcacttacttttgtcaacaggctggcagtttcccgctctctctcggcggggggaccaaggtggagatcaaac

SEQ ID NO: 3162 - DNA, 322 bp, Homo sapiens
gacatccagatgacccagtctccatcttccgtgtctgcatctgtaggagacagagtcaccatcacttgtcgggcgagtcagggtattagcggctcattagcctggtatcagcaaaaaccagggaaagcccctaatctcctgatctatgctgcatccagtttgcaaagtggggtcccatcaaggttcagcggcagtggatctgggacagatttcactctcaccatcagcagcctgcagcctgaagattttgcaacttacttttgtcaacaggctggcagtttcccgctctctttcggcggagggaccaaggtggagatcaaac

SEQ ID NO: 3163 - DNA, 322 bp, Homo sapiens; identical to SEQ ID NO: 3162

SEQ ID NO: 3164 - DNA, 322 bp, Homo sapiens
gacatccagatgacccagtctccatcttccgtgtctgcatctgtaggagacagagtcaccatcacttgtcgggcgagtcaggatattagcggctcattagcctggtatcagcaaaaaccacggaaagcccctaatctcctgatctatgctgcatccagtttgcaaagtggggtcccatcaaggttcagcggcagtggatctgggacagatttcactctcaccatcagcagcctgcagcctgaagattttgcaacttacttttgtcaacaggctggcagtttcccgctctctttcggcggagggaccaaggtggagatcaaac

SEQ ID NO: 3165 - DNA, 320 bp, Homo sapiens
gacatccagatgacccagtctccatcttccgtgtctgcatctgtaggagacagagtcatcatcacttgtcgggcgagtcaggatattagcggctcattagcctggtatcagcaaaaaccagggaaagcccctaatctcctgatctatggtgcatccgctttgcaaggtggggtcccatcaaggttcagcggcagtggatctgggacagatttcactctcaccatcagcagcctgcagcctgaagattttgcaacttactattgtcaacaggctggcagtttcccgctctctctcggcggagggaccaaggtggagatcaa

SEQ ID NO: 3166 - DNA, 322 bp, Homo sapiens
gacatccagatgacccagtctccatcttccgtgtctgcatctgtaggagacagagtcaccatcacttgtcgggcgagtcagggtattagcggctcgttagcctggtatcagcaaaaaccagggaaagcccctaatctcctgatctatgctgcatccagtttgcaaagtggggtcccatcaaggttcagcggcagtggatctgggacagatttcactctcaccatcagcagcctgcagcctgaagattttgcaacttacttttgtcaacaggctggcagttacccgctctctttcggcggagggaccaaggtggagatcaaac

SEQ ID NO: 3167 - DNA, 325 bp, Homo sapiens
gaaattgtgttgacacagtctccagccaccctgtctttgtctccaggggaaagagccaccctctcctgcagggccagtcagagtgttagcagcttcttagcctggtaccagcagaaacctggccagactcccaggctcctcatctatgatccatccaacagggccactggcatcccagccaggttcagtggcagtgggcctgggacagacttcactctcaccatcagcagcctagagcctgaagattttgcagtttattactgtcagcagcgtagcaactggcatccggttactttcggcggagggaccaaggtggagatcaaac

SEQ ID NO: 3168 - DNA, 319 bp, Homo sapiens
tcctatgagctgactcagccaccctcagtgtccgtgtccccaggacagacagccagcatcacctgctctggagataaattgggggataaatatgcttgctggtatcagcagaagccaggccagtcccctgtgctggtcatctatcaggatagcaagcggccctcagggatccctgagcgattctctggctccaactctgggaacacagccactctgaccatcagcgggacccaggctatggatgaggctgactattactgtcaggcgtgggacagcagcactgctgtcttcggaactgggaccaaggtcaccgtcctag

SEQ ID NO: 3169 - DNA, 319 bp, Homo sapiens; identical to SEQ ID NO: 3168

SEQ ID NO: 3170 - DNA, 325 bp, Homo sapiens
gaaattgtgttgacacagtctccagccaccctgtctttgtctccaggggaaagagccaccctctcctgcagggccagtcagagtgttagcagctacttagcctggtaccagcagaaacctggccaggctcccaggctcctcatctatgatccatccaacagggccactggcatcccagccaggttcagtggcagtgggcctgggacagacttcactctcaccatcagcagcctagagcctgaagattttgcagtttattactgtcagcagcgtagcaactggcatccggttactttcggcggagggaccaaggtggagatcaaac

SEQ ID NO: 3171 - DNA, 325 bp, Homo sapiens; identical to SEQ ID NO: 3170

SEQ ID NO: 3172 - DNA, 325 bp, Homo sapiens
gacatccagatgacccagtctccttccaccctgtctgcatctgtaggagacagagtcaccatcacttgccgggccagtcagagtattagtaactggttggcctggtatcagcagaaaccagggaaagcccctaaggtcctaatctataaggcgtctactttagaaagtggggtcccatcaaggttcagcggcagtggatctgggacagaattcactctcaccatcagcagcctgcagcctgatgattttgcaacttattactgccaacagtatagtggttattccacgtggacgttcggccaagggaccaaggtggaaatcaaac

SEQ ID NO: 3173 - DNA, 325 bp, Homo sapiens
gacatccagatgacccagtctccttccaccctgtctgcatctgtaggagacagagtcaccatcacttgccgggccagtcagagtattagtaactggttggcctggtatcagcagagaccagggaaagcccctaagctcctgatctataaggcgtctactttagaaattggggtcccatcaaggttcagcggcagtggatctgggacagaattcactctcaccatcagcagcctgcagcctgatgattttgcaacttattactgccaacagtataatagttattctccgtggacgttcggccaagggaccaaggtggaaatcaaac

SEQ ID NO: 3174 - DNA, 322 bp, Homo sapiens
gacatccagatgacccagtctccttccaccctgtctgcatctgtaggagacagagtcaccatcacttgccgggccagtcagagtattagtaactggttggcctggtatcagcagaaaccagggaaagcccctaagctcctgatctataaggcgtctactttagaaagtggggtcccatcaaggttcagcggcagtgtatctgggacagaattcactctcaccatcagcagcctgcagcctgatgattttgcaacttattactgccaacagtattatatttattcatggacgttcggccaagggaccaaggtggaaatcaaac

SEQ ID NO: 3175 - DNA, 322 bp, Homo sapiens
gacatccagatgacccagtctccttccaccctgtctgcatctgtaggagacagagtcaccatcacttgccgggccagtcagagtattagtagctggttggcctggtatcagcagaaaccagggaaagcccctaagctcctgatctataaggcgtctagtttagaaagtggggtcccatcaaggttcagcggcagtggatctgggacagaattcactctcaccatcagcagcctgcagcctgatgattttgcaacttattactgccaacagtatactagttattcgtggacgttcggccaagggaccaaggtggaaatcaaac

SEQ ID NO: 3176 - DNA, 322 bp, Homo sapiens
gacatccagatgacccagtctccttccaccctgtctgcatctgtaggagacagagtcaccatcacttgccgggccagtcagactattagtagctcgttggcctggtatcagcagaaaccagggaaagcccctaagctcctgatctataaggcgtctactttagaaagtggggtcccatcaaggttcggcggcagtggatctgggacagaattcactctcaccatcagcagcctgcggcctgatgattttgcaacttattactgccaacagtataatagttattcgtggacgttcggccaagggaccaaggtggaaatcaaac

SEQ ID NO: 3177 - DNA, 328 bp, Homo sapiens
cagtctgccctgactcagcctgcctccgtgtctgggtctcctggacagtcgatcaccatctcctgcactgcaaccagcagtgacgttggtgcttataactatgtctcctggtaccaacagcacccaggcaaagcccccaaactcatgatttatgatgtcagtaagcggccctcaggggtttctaatcgcttctctggctccaagtctggcaacacggcctccctcaccatctctgggctccaggctgaggacgaggctgattattactgcagctcatatacaagcagcagcgtggtgttcggcggagggaccaagctgaccgtcctag

SEQ ID NO: 3178 - DNA, 328 bp, Homo sapiens; identical to SEQ ID NO: 3177

SEQ ID NO: 3179 - DNA, 328 bp, Homo sapiens; identical to SEQ ID NO: 3177

SEQ ID NO: 3180 - DNA, 334 bp, Homo sapiens
aattttatgctgactcagccgcactctgtgtcggagtctccggggaagacggtaaccatctcctgcacccgcagcagtggcagcattgccagcaactatgtgcagtggtaccagcagcgcccgggcagtgcccccaccactgtgatctatgaggattaccaaagaccctctggggtccctgatcgcttctctggctccatcgacagctcctccaactctgcctccctcaccatctctggactgaagactgaggacgaggctgactactactgtcagtcttctgatagcagcgatcattgggtgttcggcggagggaccaagctgaccgtcctag

SEQ ID NO: 3181 - DNA, 334 bp, Homo sapiens; identical to SEQ ID NO: 3180

SEQ ID NO: 3182 - DNA, 334 bp, Homo sapiens; identical to SEQ ID NO: 3180

SEQ ID NO: 3183 - DNA, 334 bp, Homo sapiens; identical to SEQ ID NO: 3180

SEQ ID NO: 3184 - DNA, 328 bp, Homo sapiens; identical to SEQ ID NO: 3177

SEQ ID NO: 3185 - DNA, 328 bp, Homo sapiens; identical to SEQ ID NO: 3177

SEQ ID NO: 3186 - DNA, 321 bp, Homo sapiens
gacatccagttgacccagtctccatcgtccctgtcttcgtctgtgggagacagagtcaccatctattgccgggtgagtcagggcactaggggttctttaaattggtatcggccgaaaccagggaaaattcctaagttcctgatctacagtgcatccaatttgcaatctgggatcccgtctcggttcactggcattaaatctgcaacagatttcactctcactatcagccgcctgcagcctgcagatgtcacaacttattacggtcaacggacctacaatgcccctcgcccttcggccaggggacacggctggagattaaac

SEQ ID NO: 3187 - DNA, 319 bp, Homo sapiens
tcctatgacctgactcagccaccctcagtgtccgtgtccccaggacagacagccagcatcacctgctctggagataaattgggctatagatatgtttgctggtatcagcagaacccaggccagtcccctgtactggtcatctatcaagataccaagcggccctcagggatccctgagcgattctctggctccaactctgggagcacagccactctgaccatcagcgggacccaggctatggatgaggctgactattactgtcaggcgtgggacagcaatactgtggtattcggcggagggaccaagctgaccgtcctag

SEQ ID NO: 3188 - DNA, 319 bp, Homo sapiens
tcctatgacctgactcagccaccctcagtgtccgtgtccccaggacagacagccagcatcacctgctctggagataaattggggaatagatatgtttgctggtatcagcagaacccaggccagtcccctgtactggtcatctatcaagataccacgcggccctcagggatccctgagcgattctctggctccaactctgggaacacagccactctgaccatcaccgggacccaggctatggatgaggctgactattactgtcaggcgtgggacagcaatactgtggtgttcggcggagggaccaagctgaccgtcctag

SEQ ID NO: 3189 - DNA, 321 bp, Homo sapiens
gacatccagttgacccagtctccatcctccctgtcttcatctgtaggagacagagtcaccatcacttgccgggtgagccagggcattagcagttagttaaattaatatcggcagaaaccagggaaaattcctaacctcctgatctagagtgcatccaatttgcaatctggagtcccgtctcggttcagtggcagtggatctgggacagatttcactctcactatcagcagcctgcagcctgaagatgttgcaacttattacggtcaacggacttacaatgcccctcgcccttcggccaagggacacgactggagattaaac

SEQ ID NO: 3190 - DNA, 322 bp, Homo sapiens
gaatttgtgttgacgcagtctccaggcaccctgtctttgtctccaggggaaagagccaccctctcctgcagggccagtcagagtgttagcagcagctacttagcctggtaccagcagaaacctggccaggctcccaggctcctcatctatggtgctttcagcagggccactggcatcccagacaggttcagtggcagtgggtctgggacagacttcactctcaccatcagcagactggagcctgaagattttgcagtgtattactgtcagcagtatggttacttctggacgttcggccgagggaccaaggtggaattcaaac

SEQ ID NO: 3191 - DNA, 322 bp, Homo sapiens; identical to SEQ ID NO: 3190

SEQ ID NO: 3192 - DNA, 322 bp, Homo sapiens; identical to SEQ ID NO: 3190

SEQ ID NO: 3193 - DNA, 329 bp, Homo sapiens
cagactgtggtgacccaggagccatcgttctcagtgtcccctggagagactgtcacactcacttgtggcttgagctctggctcagtgtctactacttactaccccaactggtaccagcagaccccaggccaggctccacgcacgctcatctacaacacaaatactcgctcttctggggtccctgatcgcttctctggctccatccttgggggcaaggctgccctcaccatcacgggggcccaggcagatgatgaatctgattattactgtgtgctctatatgggtagtggcgtttgggtgttcggcggagggaccaaactgaccgtcct

SEQ ID NO: 3194 - DNA, 329 bp, Homo sapiens
cagactgtggtgacccaggagccatcgttctcagtgtcccctggagagacagtcacactcacttgtggcttgagctctggctcagtgtctactacttactaccccaactggtaccagcagaccccaggccaggctccacgcacgctcatctacaacacaaatactcgctcttctggggtccctgatcgcttctctggctccatccttggggacaaggctgccctcaccatcacgggggcccaggcagatgatgaatctgattattactgtgtgctatatatgggtagtggcgtttgggtgttcggcggagggaccaaactgaccgtcct

SEQ ID NO: 3195 - DNA, 329 bp, Homo sapiens; identical to SEQ ID NO: 3193

SEQ ID NO: 3196 - DNA, 325 bp, Homo sapiens
gaaattgtgttgacgcagtctccaggcaccctgtctttgtctccaggggaaagagccaccctctcctgcagggccagtcagagtgttagcagcagctacttagcctggtaccagcagaaacctggccaggctcccaggctcctcatctatggtgcatccagcagggccactggcatcccagacaggttcagtggcagtgggtctgggacagacttcactctcaccatcagcagactggagcctgaagattttgcagtgtatttctgtcagcagtatggtaggtcacccatcaccttcggccaagggacacgactggagattaaac

SEQ ID NO: 3197 - DNA, 325 bp, Homo sapiens
gacatccagatgacccagtctccatcctccctgtctgcatctgtaggagacagagtcaccatcacttgccgggcaagtcagggcattagaaatgatttaggctggtttcagcagaaaccagggaaagcccctaagcgcctgatctatgctgcatccagtttgcaaagtggggtcccatcaaggttcagcggcagtggatctgggacagaattcactctcacaatcagcagcctgcagcctgaagattttgcaacttattactgtctacagcataatagttaccccgcgctcactttcggcggagggaccaaggtggagatcaaac

SEQ ID NO: 3198 - DNA, 325 bp, Homo sapiens; identical to SEQ ID NO: 3196

SEQ ID NO: 3199 - DNA, 319 bp, Homo sapiens
tcctatgagctgactcagccaccctcagtgtccgtgtccccaggacagacagccagcatcacctgctctggagataaattgggggataaatatgcttgctggtatcagcagaagccaggccagtcccctgtgttggtcatctatcaagataccaagcggccctcagggatccctgagcgattctctggctccaactctgggaacacagccactctgaccatcagcgggacccagcctatggatgaggctgactattactgtcaggcgtgggacagcaacactgtggtattcggcggagggaccaagctgaccgtcctag

SEQ ID NO: 3200 - DNA, 319 bp, Homo sapiens
tcctatgagctgactcagccaccctcagtgtccgtgtccccaggacagacagccagcatcacctgctctggggataaattgggggataaatatgcttgctggtatcagcagaagccaggccagtcccctgtgctggtcatctatcaagataccaagcggccctcagggatccctgagcgattctctggctccaactctgggaacacagccactctgaccatcagcgggacccaggctatggatgaggctgactattactgtcaggcgtgggacagcaacactgtggtattcggcggagggaccaagctgaccgtcctag

SEQ ID NO: 3201 - DNA, 319 bp, Homo sapiens
tcctatgagctgactcagccaccctcagtgtccgtgtccccaggacagacagccagcatcacctgctctggagataaattgggggataaatatgcttgctggtatcagcagaggccaggccagtcccctgtgctggtcatctatcaagataccaagcggccctcagggatccctgagcgattctctggctccaactctgggaacacagccactctgaccatcagcgggacccaggctatggatgaggctgactattactgtcaggcgtgggacagcagcactgtggtattcggcggagggaccaagctgaccgtcctag

SEQ ID NO: 3202 - DNA, 324 bp, Homo sapiens
gaaattgtgttgacgcagtctccaggcaccctgtctttgtctccaggggaaagagccaccctctcctgcagggccagtcagagtgttggcagcaggtatttagcctggtaccagcagaaacctggccaggctcccaggctcctcatctatggtacatccaacagggccactggcatcccagaaaggttcagtggcagtgggtctgggacagacttcactctcaccatcagcagactggagcctgcagattttgcagtatattattgtcagcaatatgacagctcaccaaggacgttcggccaagggaccaaggtggaaatcaaa

SEQ ID NO: 3203 - DNA, 324 bp, Homo sapiens
gaaattgtgttgacgcagtctccaggcaccctgtctttgtctccaggggaaagagccaccctctcctgcagggccagtcagagtgttggcagcaggtatttagcctggtaccagcagaaacccggccaggctcccaggctcctcatctatggtacatccaacagggccactggcatcccagaaaggttcagtggcagtgggtctgggacagacttcactctcaccatcagcagactggagcctgcagattttgcagtatattattgtcagcaatatgacagctcaccaaggacgttcggccaagggaccaaggtagaaatcaaa

SEQ ID NO: 3204 - DNA, 324 bp, Homo sapiens
gaaattgtgttgacgcagtctccaggcaccctgtctttgtctccaggggaaagagccaccctctcctgcagggccagtcagagtgttggcagcaggtatttagcctggtaccagcagaaacccggccaggctcccaggctcctcatctatggtacatccaacagggccactggcatcccagaaaggttcagtggcagtgggtctgggacagacttcactctcaccatcagcagactggagcctgcagattttgcagtatattattgtcagcaatatgacagctcaccaaggacgttcggccaagggaccaaggtggaaatcaaa

SEQ ID NO: 3205 - DNA, 322 bp, Homo sapiens
tcctatgagctgactcagccaccctcagtgtccgtgtccccaggacagacagccagcatcacctgctctggagataaattgggaaataaatatgcttgctggtatcagcagaagccaggccagtcccctgtgctggtcatctatcaagataacaagcggccctcagggatccctgcgcgattctctggctccaactctgggaacacagccactctgaccatcagcgggacccaggctatggatgaggctgactattactgtcaggcgtgggacagcagcgcctattatgtcttcggaactgggaccaaggtcaccgtcctag

SEQ ID NO: 3206 - DNA, 322 bp, Homo sapiens; identical to SEQ ID NO: 3205

SEQ ID NO: 3207 - DNA, 325 bp, Homo sapiens
gacacccagatgacccagtctccatcctccctgtctgcatctgttggagacagactcaccatcacttgccaggcgagtcaggccattaacaactgtttaagttgctatcagcagaaaccagggaaagcccctaagcccctgatctacgatgcatccaatttggaaacaggggtcccatcaaggttcagtggaagtggatctgggacagattttactttcaccatcagcagcctgcagcctgaagatattgcaacatattactgtcaacagtatgataatctcccccggatcaccttcggccaagggacacgactggagattaaac

SEQ ID NO: 3208 - DNA, 318 bp, Homo sapiens
gacatccagatgacccagtctccatcctccctgtctgcatctgtaggagacagagtcaccatcacttgccgggcgagtcagggcatcagcaattatttagcctggtatcagcagaaaccagggaaagttcctaagctcctgatctttgctgcatccactttgcaatcaggggtcccatctcggttcagtggcagtggatctgggacatatttcactctcaccatcagcagcctgcagcctgaagatgttgcaacttattactgtcaaaagtatgacagtgcccctaagccggcggagggaccaaggtagagatcaaac

SEQ ID NO: 3209 - DNA, 322 bp, Homo sapiens
gaaattgtgttgacacagtctccagccaccctgtctttgtctccaggggaaagagccaccctctcctgcagggccagtcagagtgttagcggctacttagcctggtaccaacagaaacctggccaggctcccaggctcctcatctatgatgcatccaacagggccactggcatcccagccaggttcagtggcagtgggtctgggacagacttcactctcaccatcagcagcctagagcctgaagattttgcagtttattactgtcagcagcgtgacaactggcccctcactttcggcggagggaccaaggtggagatcaaac

SEQ ID NO: 3210 - DNA, 322 bp, Homo sapiens; identical to SEQ ID NO: 3209

SEQ ID NO: 3211 - DNA, 322 bp, Homo sapiens; identical to SEQ ID NO: 1695

SEQ ID NO: 3212 - DNA, 322 bp, Homo sapiens; identical to SEQ ID NO: 1695

SEQ ID NO: 3213 - DNA, 325 bp, Homo sapiens
gaaactgtgttgacgcagtctccaggcaccctgtctttgtctccaggggaaagagccaccctctcctgcagggccagtcagagtctcagcaggaattacatagcctggtaccagcagaaacctggccaggctcccaggctcctcatctatggtgcgtcaagcagggccactggcatcccagacaggttcagtggcagtgggtctgggacagacttcactctcaccatcaggagactggagcctgaagattttgcagtgtattactgtcagcagtatggtaactcactgctcagtttcggcggagggaccaaggtggagatcaaac

SEQ ID NO: 3214 - DNA, 325 bp, Homo sapiens
gaaactgtgttgacgcagtctccaggcaccctgtctttgtctccaggggaaagagccaccctctcctgcagggccagtcagagtctcaactggaatcacatagcctggtaccagcagaaacctggccaggctcccaggctcctcatttatgctgcgtcaagcagggccactggcatcccagacaggttcagtggcagtgggtctgggacagacttcactctcaccatcacgagactggagcctgaagattttgcagtgtattactgtcagcagtatggtactttactgctcagtttcggcggagggaccaaggtggagatcaaac

SEQ ID NO: 3215 - DNA, 331 bp, Homo sapiens
cagtctgccctgactcagcctgcctccgtgtctgggtctcctggacagtcgatcaccatctcctgcactggaaccagcagtgacgttggtggttatgactatgtctcctggttccaacagcacccaggcaaagcccccaaactcatgatttatgatgtcactaatcggccctcaggggtttctaatcgcttctctggctccaagtctggcaacacggcctccctgaccatctctgggctccaggctgaggacgaggctgattattactgcagctcatatacaagcagcagcacttgggtgttcggcggagggaccaagctgaccgtcctag

SEQ ID NO: 3216 - DNA, 331 bp, Homo sapiens; identical to SEQ ID NO: 3215

SEQ ID NO: 3217 - DNA, 334 bp, Homo sapiens
cagtctgtgctgacgcagccgccctcagtgtctggggccccagggcagagggtcaccatctcctgcagtgggagcagctccaacatcggggcaggttatgatgtacactggtaccagcagcttccaggaacagcccccaaactcctcatctatggtaacagcaatcggccctcagggatccctgaccgattctctggctccaagtctggcacctcagcctccctggccatcactgggctccaggctgaggatgaggctgattattactgccagtcctatgacagtagtctgagtggttctttgttcggcggagggaccaagctgaccgtcctag

SEQ ID NO: 3218 - DNA, 334 bp, Homo sapiens
cagtctgtgctgacgcagccgccctcagtgtctggggccccagggcagagggtcaccatctcctgcactgggagcagctccaacatcggggcaggttatgatgtacactggtaccagcagcttccaggaacagcccccaaactcctcatctatggtaacagcaatcggccctcaggggtccctgaccgattctctggctccaagtctggcacctcagcctccctggccatcactgggctccaggctgaggatgaggctgattattactgccagtcctatgacagcagcctgagtgattctttgttcggcggagggaccaagctgaccgtcctag

SEQ ID NO: 3219 - DNA, 319 bp, Homo sapiens
gaaattgtgttgacacagtctccagccaccctgtctttgtctccaggggaaagagccaccctctcctgcagggccagtcagagtgttagcagctacttaggctggtaccaacagaaatttggccaggctcccaggctcctcatctatgatgcatccaacagggccactggcatcccagccaggttcagtggcagtgggtctgggacagacttcactctcaccatcagcagcctagagcctgaagattttgcagtttattactgtcagcagcgtagcacctcgctcactttcggcggagggaccaaggtggagatcaaac

SEQ ID NO: 3220 - DNA, 319 bp, Homo sapiens
gaaattgtgttgacacagtctccagccaccctgtctttgtctccaggggaaagagccaccctctcctgcagggccagtcagagtgttagcagctacttagcctggtaccaacagaaacctggccaggctcccaggctcctcatctatgatgcatccaacagggccactggcatcgcagccaggttcagtggcagtgggtctgggacagacttcactctcaccatcagcagcctagagccagaagattttgcagcttattactgtcagcagcgtagcagctcgctcactttcggcggagggaccaaggtggagatcaaac

SEQ ID NO: 3221 - DNA, 322 bp, Homo sapiens
gacatccagatgacccagtctccgtcctccctgtctgcatctgtaggagccagaatcaccatcacttgccaggcgagtcaggacattagcaactatttaaattggtatcagcagaaaccagggaaagcccctaagctcctgatctacgatgcatccaatttggaaacaggggtcccatcaaggttcagtggacgtggatctgggacagattttactttcaccatcagcagcctgcagcctgaagatattgcaacatattactgtcaacagtatgataatctcccgtacacttttggccaggggaccaaactggagatcaaac

SEQ ID NO: 3222 - DNA, 322 bp, Homo sapiens; identical to SEQ ID NO: 3221

SEQ ID NO: 3223 - DNA, 321 bp, Homo sapiens
gacatccagatgacccagtctccatcctccctgtctgcatctgtaggagacagagtcaccatcacttgccgggcaagtcagagcattagcagctatttaaattggtatcagcagaaaccagggaaagcccctaagctcctgatctatgctgcatccagtttgcaaagtggggtcccatcaaggttcagtggcagtggatctgggacagatttcactctcaccatcagcagtctgcaacctgaagattttgcaacttactactgtcaacagagttacagtacccctcgagcttcggccaagggacacgactggagattaaac

SEQ ID NO: 3224 - DNA, 321 bp, Homo sapiens; identical to SEQ ID NO: 3223

SEQ ID NO: 3225 - DNA, 321 bp, Homo sapiens
gacatccagatgacccagtctccatcttccatgtctgtatctgttggagacagagtcaccatcacttgtcgggcgagtcaagatattaccagctggttagcctggtatcagcagaaaccagggaaagcccctaagctcctgatctatggtgcatccactttgaaaagtggagtcccatcaaggttcagcggcagtggatctgggacagacttcactctcaccatcaccagcctgcagcctgatgattttgcaacttactactgtcaacagggtaaaagtttcccattcactttcggccctgggaccagagtggatctcaaa

SEQ ID NO: 3226 - DNA, 321 bp, Homo sapiens
gacatccagatgacccagtctccatcttccatgtctgtatctgttggagacagagtcaccatcgcttgtcgggcgagtcaagatattaccagctggttagcctggtatcagcagaaaccagggaaagcccctaagctcctgatctatggtgcatccactttgaaaagtggagtcccatcaaggttcagcggcagtggatctgggacagacttcactctcaccatcagcagcctgcagcctgatgattttgcaacttactactgtcaacagggtaaaagtttcccattcactttcggccctgggaccagagtggatctcaaa

SEQ ID NO: 3227 - DNA, 321 bp, Homo sapiens
gacatccagatgacccagtctccatcttccatgtctgtatctgttggagacagagtcaccatcacttgtcgggcgagtcaagatattaccagctggttagcctggtatcagcagaaaccagggaaagcccctaagctcctgatctatggtgcatccagtttgaaaagtggagtcccatcaaggttcagcggcagtggatctgggacagacttcactctcaccatcagcagcctgcagcctgatgattttgcaacttactactgtcaacagggtaaaagtttcccattcactttcggccctgggaccagagtggatctcaaa

SEQ ID NO: 3228 - DNA, 321 bp, Homo sapiens; identical to SEQ ID NO: 3227

SEQ ID NO: 3229 - DNA, 334 bp, Homo sapiens
cagtctgccctgactcagcctgcctccgtgtctgggtctcctggacagtcgatcaccatctcctgcactggaaccagcagtgacgttggtgcttataactatgtctcctggtaccaacaacacccaggcaaagcccccaaactcatgatttatgaggtcactaatcggccctcaggggtttctaatcgcttctctggctccaagtctggcaacacggcctccctgaccatctctgggctccaggctgaggacgaggctgattattactgcagctcatatacacgtaccagcactctttggatgttcggcggagggaccaaggtgactgtcctag

SEQ ID NO: 3230 - DNA, 334 bp, Homo sapiens; identical to SEQ ID NO: 3229

SEQ ID NO: 3231 - DNA, 340 bp, Homo sapiens
gacatcgtgatgacccagtctccagactccctggctgtgtctctgggcgagagggccaccatcaactgcaagtccagccagagtgtttcatacagctccaacaataagaactacttagcttggtaccagcagaaaccaggacagcctcctaagctgctcatttactgggcatctacccgggaatccggggtccctgaccgattcagtggcagcgggtctgggacagacttcactctcagcatcagcagcctgcaggctgaagatgtggcagtttattactgtcagcaatattatagtactcctcggacgttcggccaagggaccaaggtggaaatcaaac

SEQ ID NO: 3232 - DNA, 340 bp, Homo sapiens
gacatcgtgatgacccagtctccagactccctggctgtgtctctgggcgagagggccaccatcaactgcaagtccagtcagagtgttttatacagctccaacaataagaactacttagcttggtaccagcagaaaccaggacagcctcctaagctgctcatttactgggcatctacccgggaatccggggtccctgaccgattcagtggcagcgggtctgggacagatttcactctcaccatcagcagcctgcaggctgaagatgtggcagtttattactgtcagcaatattatagtactcctctcactttcggccctgggaccaaagtggatatcaaac

SEQ ID NO: 3233 - DNA, 319 bp, Homo sapiens
gccatccggatgacccagtctccatcctcattctctgcatctacaggagacagagtcaccatcacttgtcgggcgagtcagggtattagcagttatttagcctggtatcagcaaaaaccagggaaagcccctaagctcctgatctatgctgcatccactttgcaaagtggggtcccatcaaggttcagcggcagtggatctgggacagatttcactctcaccatcagctgcctgcagtctgaagattttgcaacttattactgtcaacagtattatagttaccccctcactttcggcggagggaccaaggtggagatca

SEQ ID NO: 3234 - DNA, 322 bp, Homo sapiens; identical to SEQ ID NO: 2631

SEQ ID NO: 3235 - DNA, 340 bp, Homo sapiens
gacatcgtgatgacccagtctccagactccctggctgtgtctctgggcgagagggccaccatcaactgcaagtccagccagagtgttttatacagcgtcgacaataagaactacttagcttggtaccagcagaagccaggacagcctcctaagttgctcatttactgggcatctacccgggaatccggggtccctgaccgattcagtggcagcgggtctgggacagatttcactctcaccatcagcagcctgcaggctgaagatgtggcagtttattactgtcagcaatattatggtattccgtggacgttcggccaagggaccacggtggaaatcaaac

SEQ ID NO: 3236 - DNA, 340 bp, Homo sapiens
gacatcgtgatgacccagtctccagactccctggctgtgtctctgggcgagagggccaccatcaactgcaagtccagccagaatattttatacagcgtcgacaataagaactacttagcttggtaccagcagaagccaggacagcctcctaagttgctcatttactgggcatctacccgggaatccggggtccctgaccgattcagtggcaccgggtctgggacagatttcactcttaccatcagcagcctgcaggctgaagatgtggcagtttattactgtcagcaatattatagtattccgtggacgttcggccaagggaccacggtggaaatcaaac

SEQ ID NO: 3237 - DNA, 340 bp, Homo sapiens
gacatcgttatgacccagtctccagactccctggctgtgtctctgggcgagagggccaccatcaactgcaggtccagccagagtgttttatatagtatcaacaataagaactacttaacttggtaccagcagaaaccaggacagcctcctaagctgctcttttactgggcatctacccgggcatccggggtccctgaccgattcagtggcagcgggtctgggacagatttcactctcaccatcagcagcctgcagactgaagatgtggcagtttattactgtcagcaatattacagtacccctcgcactttcggcggagggaccaaggtggagatcaaac

SEQ ID NO: 3238 - DNA, 340 bp, Homo sapiens
gacatcgttatgacccagtctccagactccctggctgtgtctctgggcgagagggccaccatcaactgcaggtccagccagagtgttttatatagtaccaacaataagaactacttaacttggtaccagcagaaaccaggacagcctcctaagctgctcttttactgggcatctacccgggcatccggggtccctgaccgattcagtggcagcgggtctgggacagatttcactctcaccatcagcagcctgcagactgaagatgtggcagtttattactgtcagcaatattacactacccctcgcactttcggcggagggaccaaggtggagatcaaac

SEQ ID NO: 3239 - DNA, 331 bp, Homo sapiens
cagtctgccctgactcagcctgcctccgtgtctgggtctcctggacagtcgatcaccatctcctgcactggaaccagcagtgacgttggtggttataactatgtctcctggtaccaacaacacccaggcaaagcccccaaactcataatttatgatgtcagtaatcggccctcaggggtttctaatcgcttctctggctccaagtctggcaacacggcctccctgaccatctctgggctccaggctgaggacgaggctgattattactgcagctcatatacaagtagcagcactctcgaattcggcggagggaccaagctgaccgtcctag

SEQ ID NO: 3240 - DNA, 331 bp, Homo sapiens
cagtctgccctgactcagcctgcctccgtgtctgggtctcctggacagtcgatcaccatctcctgcactggaaccagcagtgacgttggtggttataactatgtctcctggtaccaacaacacccaggcaaagcccccaaactcataatttatgatgtcagtaatcggccctcaggggtttctaatcgcttctctggctccaagtctggcaacacggcctccctgaccatctctgggctccaggctgaggacgaggctgattattactgcagctcatatgcaagtagcagcactctcgaattcggcggagggaccaagctgaccgtcctag

SEQ ID NO: 3241 - DNA, 322 bp, Homo sapiens
gacatccagatgacccagtctccatcctccctgtctgcatctgtaggagacagagtcaccatcacttgccgggcgactcagggcgttagtaattctttagcctggtatcagcagaggccaggggaggttcctcagctcctgatctatgctgcatccactttgcaatcaggggtcccttctcggttcagtggcagtggatctgggacagatttcactctcaccatcagcagcctgcagcctgaagatgttgcaacttattactgtcaaaagtataacagtgccccattcactttcggccctgggaccaaagtggatatcaaac

SEQ ID NO: 3242 - DNA, 322 bp, Homo sapiens; identical to SEQ ID NO: 3241

SEQ ID NO: 3243 - DNA, 325 bp, Homo sapiens
gaaattgtgttgacgcagtctccaggcaccctgtctttgtctccaggggaaagagccaccctctcctgcagggccagtcagagtgttagcagcatctacttagcctggtaccagcagaaacctggccaggctcccaggctcctcatctatggtgcatccagcagggccactggcatcccagacaggttcagtggcagtgggtctgggacagacttcactctcaccatcagcagactggagcctgaagattttgcagtgtattactgtcagcagtatggtagctcaccgtggacgttcggccaagggaccaaggtggaaatcaaac

SEQ ID NO: 3244 - DNA, 325 bp, Homo sapiens
gaaattgtgttgacgcagtctccaggcaccctgtctttgtctccaggggaaagagccaccctctcctgcagggccagtcagagtgttagcagcagcttcttagcctggtaccagcagaaacctggccaggctcccaggctcctcatctttggtgcatccagcagggccattggcatcccagacaggttcagtggcagtgggtctgggacagacttcactctcaccatcagcagactggagcctgaagattttgcagtgtattactgtcagcagtttggtagctcaccgtggacgttcggccaagggaccaaggtggaaatccaac

SEQ ID NO: 3245 - DNA, 321 bp, Homo sapiens
gacatccagatgacccagtctccatcctccctgtctgcatctgtaggagacagagtcaccatcacttgccgggcgagtcagggcattagcaattatttagcctggtatcagcggaaaccagggaaagttcctaagctcctgatctatgctgcatgcactttgcaatcaggggtcccatctcggttcagtggcagtggatctgggacagatttcactctcaccatcagcagcctgcagcctgaagatgttgcaacttattactgtcaaaagtataacagtgcccctcgactttcggcggagggaccaaggtggagatcaaac

SEQ ID NO: 3246 - DNA, 325 bp, Homo sapiens
gaaattgtgttgacgcagtctccaggcaccctgtctttgtctccaggggaaagagccaccctctcctgcagggccagtcagagtgttagcaacagctacttagcctggtaccagcagaaacctggccaggctcccaggctcctcatctatggtgcatccagcagggccactggcatcccagacaggttcagtggcagtgggtctgggacagacttcactctcaccatcagcagactggagcctgaagattttgcagtgtattcctgccagcagtatggtagctcaactcggacgttcggccaagggaccaaggtggaaatcaaac

SEQ ID NO: 3247 - DNA, 330 bp, Homo sapiens
cagtctgccctgactcagcctgcctccgtgtctgggtctcctggacagtcgatcaccatctcctgcactggaaccaacagtgacattggtgattttaactatgtctcctggtaccaacaactcccgggcaaagcccccaaactcataatttatgatgtcagtgatcggccctcaggggcttctaatcgcttctctggctccaagtctggcaacacggcctccctgaccatctctgggctccaggctgaggacgaggctgattattactgcagctcatataccagcagcagcgctctggtgttcggcggagggacccaactgaccgtccta

SEQ ID NO: 3248 - DNA, 330 bp, Homo sapiens
cagtctgccctgactcagcctgcctccgtgtctgggtctcctggacagtcgatcaccatctcctgcactggaaccaacagtgacattggtgattttaactatgtctcctggtaccaacacctcccgggcaaagcccccaaactcataatttatgatgtcagtgatcggccctcaggggcttctaatcgcttctctggctccaagtctggcaacacggcctccctgaccatctctgggctccaggctgaggacgaggctgattattactgcagctcatatacaagcagcagcactctggtgttcggcggagggacccaactgaccgtccta

SEQ ID NO: 3249 - DNA, 325 bp, Homo sapiens
gaaattgtgttgacgcagtctccaggcaccctgtctttgtctccaggggaaagagccaccctctcctgcagggccagtcagagtgtgagcagcagctacttagcctggtaccagcagaaacctggccaggctcccaggctcctcatctatggtgcatccagcagggccactggcatcccagacaggttcagtggcagtgggtctgggacagacttcactctcaccatcagcagactggagcctgaagattttgcagtgtattactgtcagcagtatggtagttcaccggcgacgttcggccaagggaccaaggtggaaatcaaac

SEQ ID NO: 3250 - DNA, 325 bp, Homo sapiens
gaaattgtgttgacgcagtctccaggcaccctgtctttgtctccaggggaaagagccaccctctcctgcagggccagtcagagtgttagcagcagctacttagcctggtaccagcagaaacctggccaggctcccaggctcctcatctatggtgcatccaccagggccactggcatcccagacaggttcagtggcagtgggtctgggacagacttcactctcaccatcagcagactggagcctgaagattttgcagtgtattactgtcagcagtatggtagctcaccggcgacgttcggccaagggaccaaggtggaaatcaaac

SEQ ID NO: 3251 - DNA, 334 bp, Homo sapiens
cagtctgccctgactcagcctgcctccgtgtctgggtctcctggacagtcgatcaccatctcctgcactggaaccagcggtgacgttggtggttataaccatgtctcctggtaccagcagcacccaggcaaagcccccaaactcatgatttatgatgtcagtaatcggccctcagggttttctagtcgcttctctggctccaagtctggcaacacggcctccctgaccatctctgggctccaggctgaggacgaggctgattattactgcagctcatatacaagtagtagcactctttggatgttcggcggagggaccaagctgaccgtcctag

SEQ ID NO: 3252 - DNA, 334 bp, Homo sapiens
cagtctgccctgactcagcctgcctccgtgtctgggtctcctggacagtcgatcaccatctcctgcactggaaccagcggtgacgttggtggttataaccatgtctcctggtaccaacagcacccaggcaaagcccccaaactcatgatttatgatgtcagtaatcggccctcagggttttctaatcgcttctctggctccaagtctggcaacacggcctccctgaccatctctgggctccagactgaggacgaggctgattattactgcagctcatatacaagtagtagcactctttggatgttcggcggagggaccaagctgaccgtcctag

SEQ ID NO: 3253 - DNA, 322 bp, Homo sapiens
gacatccagatgacccagtctccttccaccctgtctgcatctgtaggagacagagtcaccatcacttgccgggccagtcagagtattactagctggttggcctggtatcagcagaaaccagggaaagcccctaagctcctgatctataaggcgtctagtttagaaagtggggtcccatcaaggttcagcggcagtggatctgggacagaattcactctcaccatcagcagcctgcagcctgatgattttgcaacttattactgccaacaatataatagttacctgctcactttcggcggagggaccaaggtggagatcaaac

SEQ ID NO: 3254 - DNA, 322 bp, Homo sapiens; identical to SEQ ID NO: 3253

SEQ ID NO: 3255 - DNA, 325 bp, Homo sapiens
gaaattgtgttgacgcagtctccaggcaccctgtctttgtctccaggggaaagagccaccctctcctgcagggccaatcagagtgttagcagcaactacttagcctggtaccagcagaaacctggccaggctcccaggctcctcatctatggtgcatccagcagggccactggcatcccagacaggttcagtggcagtgggtctgggacagacttcactctcaccatcagcagactggagcctggagattttgcagtgtattactgtcaacaatatggtgactcacccctcaccttcggccaagggacacgactggagattaaac

SEQ ID NO: 3256 - DNA, 325 bp, Homo sapiens; identical to SEQ ID NO: 3255

SEQ ID NO: 3257 - DNA, 325 bp, Homo sapiens
gaaattgtgttgacgcagtctccaggcaccctgtctttgtctccaggggaaagagccaccctctcctgcagggccaatcagagtgttagcagcagttacttagcctggtaccagcagaaacctggccaggctcccaggctccttatgtctgatgcatccagcagggccactggcatcccagacaggttcagtggcagtgggtctgggacagacttcactctcaccatcagcagactggagcctgaagattttgcagtgtattactgtcagcagtatggtgactcacccctcaccttcggccaagggacacgactggggattaaac

SEQ ID NO: 3258 - DNA, 325 bp, Homo sapiens
gaaattgtgttgacgcagtctccaggcaccctgtctttgtctccaggggaaagagccaccctctcctgcagggccaatcagagtgttagcagcagctacttagcctggtaccagcagaaacctggccaggctcccaggctcctcatgtctgatgcatccagcagggccactggcatcccagacaggttcagtggcagtgggtctgggacagacttcactctcaccatcagcagactggagcctgaagattttgcagtgtattactgtcagcagtatggtgactcacccctcaccttcggccaagggacacgactggggattaaac

SEQ ID NO: 3259 - DNA, 319 bp, Homo sapiens
tcctatgagctgactcagccaccctcagtgtccgtgtccccaggacagacagccagcatcacctgctctggagataaattgggggataaatatgcttgctggtatcagcagaagccaggccagtcccctgtgctggtcatctatcaagatagcaagcggccctcagggatccctgagcgattctctggctccaactctgggaacacagccactctgaccatcagcgggacccaggctatggatgaggctgactattactgtcaggcgtgggacagcagtcttgtggtattcggcggagggaccaagctgaccgtcctag

SEQ ID NO: 3260 - DNA, 337 bp, Homo sapiens
cagtctgtgctgacgcagccgccctcagtgtctggggccccagggcagtgggtcaccatctcctgcactgggagcagctccaacatcggggcaggttgtgatatacactggtaccagcagcttccaggaacggcccccaaactcctcatctatggtaccaacaatcggccctcaggggtccctgaccgattctctggctccaagtctggcacctcagcctccctggccatcgctgggctccaggctgaggatgaggctgattattactgccagtcctatgacagcagcctgagtggcccttatgtcttcggaactgggaccaaggtcaccgtcctag

SEQ ID NO: 3261 - DNA, 319 bp, Homo sapiens
tcctatgagctgactcagccaccctcagtgtccgtgtccccaggacagacagccagcatcacctgctctggagataaattgggggataaatatgcttgctggtttcagcagaagccaggccagtcccctgtgctggtcatctatcaagatagcaagcggccctcagggatccctgagcgattctctggctccaactctgggaacacagccactctgaccatcagcgggacccaggctatggatgaggctgactattactgtcaggcgtgggacagcagcacaggagtcttcggaactgggaccaaggtcaccgtcctag

SEQ ID NO: 3262 - DNA, 325 bp, Homo sapiens
gaaatagtgatgacgcagtctccagccaccctgtctgtgtctccaggggaaagagccaccctctcctgcagggccagtcagagtgttagcagcaacttagcctggtaccagcagaaacctggccaggctcccaggctcctcatctatggtgcatccaccagggccactggtatcccagccaggttcagtggcagtgggtctgggacagagttcactctcaccatcagcagcctgcagtctgaagattttgcagtttattactgtcagcagtataataactggcctccgaacacttttggccaggggaccaagctggagatcaaac

SEQ ID NO: 3263 - DNA, 337 bp, Homo sapiens
cagtctgtgctgacgcagccgccctcagtgtctggggccccagggcagagggtcaccatctcctgcactgggagcagctccaacatcggggcaggttatgatgtacactggtaccagcagcttccaggaacagcccccaaactcctcatctatggtaacagcaatcggccctcaggggtccctgaccgattctctggctccaagtctggcacctcagcctccctggccatcactgggctccaggctgaggatgaggctgattattactgccagtcctatgacagcagcctgagtgcccatgtggtattcggcggagggaccaagctgaccgtcctag

SEQ ID NO: 3264 - DNA, 337 bp, Homo sapiens
gatattgtgatgactcagtctccactctccctgcccgtcacccctggagagccggcctccatctcctgcaggtctagtcagagcctcctgcatagtaatggatacaactatttggattggtacctgcagaagccagggcagtctccacagctcctgatctatttgggttctaatcgggcctccggggtccctgacaggttcagtggcagtggatcaggcacagattttacactgaaaatcagcagagtggaggctgaggatgttggggtttattactgcatgcaagctctacaaactcctttcactttcggccctgggaccaaagtggatatcaaac

SEQ ID NO: 3265 - DNA, 325 bp, Homo sapiens
gacatccagatgacccagtctccatcctccctgtctgcatctgtaggagacagagtcaccatcacttgccgggcaagtcagagcattagcagctatttaaattggtatcagcagaaaccagggaaagcccctaacctcctgatctatgctgcatccagtttgcaaagtggggtcccatcaaggttcagtggcagtggatctgggacagatttcactctcaccatcagcagtctgcaacgtgaagattttgcaacttactactgtcaacagagttacagtacccccccgtggacttttggccaggggaccaagctggagatcaaac

SEQ ID NO: 3266 - DNA, 325 bp, Homo sapiens
gacatccaggtgacccagtctccatcctccctgtctgcatctgtaggagacagagtcaccatcacttgccggccaagtcagaacatcagcagctatctaatttggtatcaagatgaaccagggaaagccccagagctcctgatctatgctgcattccggtttgcaaagtggggtcccatcaaggttcagtggcagtggatctgggacagatttcactctcaccatcgacagtctgcaaactgaagattttgcaacttgctcctgtcaacagacttacagtaccccctgctcactttcggcggagggaccaaggtggagatccaac

SEQ ID NO: 3267 - DNA, 328 bp, Homo sapiens
gacatccagttgacccagtctccatccttcctgtctgcatctgtaggagacagagtcaccatcacttgccgggccagtcagggcattagcagttatttagcctggtatcagcaaaaaccagggaaagcccctaagctcctgatctatgctgcatccactttgcaaagtggggtcccatcaaggttcagcggcagtggatctgggacagaattcactctcacaatcagcagcctgcagcctgaagattttgcaacttattactgtcaacagcttaatagttaccctcgggcgatcaccttcggccaagggacacgactggagattaaac

SEQ ID NO: 3268 - DNA, 322 bp, Homo sapiens
gacatccagatgacccagtctccatcctccctgtctgcatctgtaggagacagagtcaccatcacttgccgggcaagtcagagcattagcagctatttaaattggtatcagcagaaaccagggaaagcccctaagctcctgatctatgctgcatccagtttgcaaagtggggtcccatcaaggttcagtggcagtggatctgggacagatttcactctcaccatcagcagtctgcaacctgaagattttgcaacttactactgtcaacagagttacagtacccagatcaccttcggccaagggacacgactggagattaaac

SEQ ID NO: 3269 - DNA, 322 bp, Homo sapiens
gacatccagatgacccagtctccatcctccctgtctgcgtctgtaggagacagagtcaccatcacttgccgggcaagtcagagcattagcacctatttaaattggtatcagcagaaaccagggaaagcccctaagctcctgatctatgctgcatccagtttgcaaagtggggtcccatcaaggttcagtggcagtggatctgggacagatttcactctcaccatcagcactctgcaacctgaagattttgcaacttactactgtcaacagagttacagtacccccctcactttcggcggagggaccaaggtggagatcaaac

SEQ ID NO: 3270 - DNA, 331 bp, Homo sapiens; identical to SEQ ID NO: 881

SEQ ID NO: 3271 - DNA, 319 bp, Homo sapiens
gacatccagatgacccagtctccatcctccctgtctgcatctgtaggagacagagtcaccatcacttgccaggcgagtcaggacatcagcaactatttaaattggtatcagcagaaaccagggaaagcccctaagctcctgatctacgatgcatccaatttggaaacaggggtcccatcaaggttcagtggaagtggatctgggacagattttactttcaccatcagcagcctgcagcctgaagatattgcaacatattactgtcaacagtatgataatctcgtcactttcggcggagggaccaaggtggagatcaaac

SEQ ID NO: 3272 - DNA, 323 bp, Homo sapiens
gacatccagatgacccagtctccatcctccctgtctgcatctgtaggagacagagtcaccatcacttgccgggcaagtcagaccattagcagctatttaaattggtatcagcagaaaccagggaaagcccctaaggtcctgatctatgctgcatccaatttgcaaagtggggtcccatcaaggttcagtggcagtggatctgggacagatttcactctcaccatcagcaatctgcaacctgaagattttgcaacttactactgtcaacagagttacagtaccctctcgatcaccttcggccaagggacacgactggagattaa

SEQ ID NO: 3273 - DNA, 319 bp, Homo sapiens
tcctatgagctgactcagccaccctcagtgtccgtgtccccaggacagacagccagcatcacctgctctggagataaattgggggataaatatgcttgctggtatcagcagaagccaggccagtcccctgtgctggtcatctatcaagatagcaagcggccctcagggatccctgagcgattctctggctccaactctgggaacacagccactctgaccatcagcgggacccaggctatggatgaggctgactattactgtcaggcgtgggacagcagcactgccccattcggcggagggaccaagctgaccgtcctag

SEQ ID NO: 3274 - DNA, 320 bp, Homo sapiens
gacatccagctgacccagtctccatcctcactgtctgcatctgtaggagacagagtcaccatcacttgtcgggcgagtcagggcattagcaattatctagcctggtttcagcagaagccagggaaagcccctaagtccctgatctatgctgcatccagtttgcaaagtggggtcccatccaagttcagcggcagtggatctgggacagatttcactctcaccatcaccaacctgcagcctgaagattttgcaacttattactgccaacagtataatttttacccactcactttcggcggagggaccaaggtggagatcaa

SEQ ID NO: 3275 - DNA, 319 bp, Homo sapiens
gaaattgtgttgacacagtctccagccaccctgtctttgtctccaggggaaagagccaccctctcctgcagggccagtcagagtgttagcagctacttagcctggtaccaacagaaacctggccaggctcccaggctcctcatctatgatgcatccaacagggccactggcatcccagccaggttcagtggcagtgggtctgggacagacttcactctcaccatcagcagcctagagcctgaagattttgcagtttattactgtcagcagcgtagcaactggtggacgttcggccaagggaccaaggtggaaatcaaac

SEQ ID NO: 3276 - DNA, 333 bp, Homo sapiens
cagtctgtgctgactcagccaccctcagcgtctgggacccccgggcagtgggtctccatctcttgttctgggagcacctccaacatcggaagtaatgctgtcaactggtaccagcacctcccaggaacggcccccaaactcctcatctatagtgataatcagcggccctctggggtccctgaccgattctctggctccaagtctggcacctcagcctccctggccattagtgggctccagtctggtgatgagtctgtttatttctgtgcagcatgggatgacagcctgaatggtgtttgggtgttcggcggagggaccaagctgaccgtccta

SEQ ID NO: 3277 - DNA, 330 bp, Homo sapiens
cagtctgccctgactcagcctgcctccgtgtctgggtctcctggacagtcgatcaccatctcctgcactggaaccagcagtgatgttgggagttttaatcttgtctcctggtaccaacagcacccaggcaaagcccccagactcatgatttatgaggtcagtaagcggccctcaggggtttctaatcgcttctctggctccaagtctggcaacacggcctccctgacaatctctgggctccaggctgaggacgaggctgattattactgctgctcatatgcaggtagtagcaccttgatattcggcggagggaccaagctgaccgcccta

SEQ ID NO: 3278 - DNA, 322 bp, Homo sapiens
gacatccagatgacccagtctccatcctccctgtctgcatctgtaggagacagagtcaccttcacttgccaggcgagtcaggacattagcaattatttaaattggtatcagcagaaaccagggaaagcccctaagctcctgatctacgatgcatccaatttggaaacaggggtcccatcaaggttcagtggaagtggatctgggacagattttactttcaccatcagcagcctgcagcctgaagatattgcaacatattactgtcaacagtatgataatctccctcgggtcaccttcggccaagggacacggctggagatta

SEQ ID NO: 3279 - DNA, 322 bp, Homo sapiens
gacatccagatgacccagtctccatcctccctgtctgcatctgtaggagacagagtcaccatcacttgccaggcgagtcaggacattagcaactatttaaattggtatcagcagaaaccagggaaagcccctaagctcctgatctacgatgcatccaatttggaaacaggggtcccatcaaggttcagtggaagtggatctgggacagattttactttcaccatcagcagcctgcagcctgaagatattgcaacatattactgtcaacagtatgataatctccctctcactttcggccctgggaccaaagtggatatcaaac

SEQ ID NO: 3280 - DNA, 322 bp, Homo sapiens; identical to SEQ ID NO: 837

SEQ ID NO: 3281 - DNA, 337 bp, Homo sapiens
gatattgtgatgactcagtctccactctccctgcccgtcacccctggagagccggcctccatctcctgcaggtctagtcagagcctcctgcatactaatggaaacaactatttggattggtacctacagaagccagggcagtctccacagctcctgatctatttgggttctaatcgggcctccggggtccctgacaggttcagtggcagtggatcaggcacagattttacactgaaaatcagcagagtggaggctgaggatgttggggtttattactgcatgcaagctctacaaacttcgtacacttttggccaggggaccaagctggagatcaaac

SEQ ID NO: 3282 - DNA, 325 bp, Homo sapiens
tcctatgagctgacacagccaccctcggtgtcagtgtccccaggacagacggccaggatcacctgctctggagatgcattgccaaagcaatatgcttattggtaccagcagaagccaggccaggcccctgtgctggtgatatataaagacagtgagaggccctcagggatccctgagcgattctctggctccagctcagggacaacagtcacgttgaccatcagtggagtccaggcagaagacgaggctgactattactgtcaatcagcagacagcagtggtttttcagtggtattcggcggagggaccaagctgaccgtcctag

SEQ ID NO: 3283 - DNA, 334 bp, Homo sapiens
cagcctgtgctgactcaagcatcctctgcctctgcttccctgggatcctcggtcaagctcacctgcactctgagcagtgggcacaggagctacatcatcgcatggcatcagcagcagccagggaaggcccctcgcttcctgatgaagcttgaaggtactggaatgtacaacaaggggagcggcgttcctgatcgcttctcaggctccagctctggggctgaccgctacctcaccatctccaacctccagtctgaggatgaggctgattatcattgtgagacctgggacactaacactcgggtgttcggcggagggaccaaggtgaccgtcctag

SEQ ID NO: 3284 - DNA, 322 bp, Homo sapiens
gtcttctggatgacccagtctccatccttactctctgcatctacaggagacagaattaccatcagttgtcgggtgagtcagggcattagcagtcgtttagcctggtatcagcaaaaaccagggaaagcccctgagctcctgatctatgttgcatccactttgcaaagtggggtcccatcaaggttcagtggcagtggatctgggacaaatttcactctcaccatcagtggcctgcagtctgaagattttgcaacttattactgtcaacagtattatagtttcccttggacgttcggccaagggaccaaggtggaaatcaaac

SEQ ID NO: 3285 - DNA, 334 bp, Homo sapiens
cagtctgccctgactcagcctgcctccgtgtctgggtctcctggacagtcgatcaccatctcctgcactggaaccagcagtgacgttggtggttataactatgtctcctggtaccaacagcacccaggcaaagcccccaaactcatgatttatgatgtcaataatcggccctcaggggtttctaatcgcttctctggctccaagtctggcaacacggcctccctgaccatctctgggctccaggctgaggacgaggctgattattactgcagctcatatacaagcagcagcactcttgtggtattcggcggagggaccaagctgaccgtcctag

SEQ ID NO: 3286 - DNA, 328 bp, Homo sapiens
gaaattgtgttgacgcagtctccaggcaccctgtctttgtctccaggggaaagagccaccctctcctgcagggccagtcagagtgttagcagcagctacttagcctggtaccagcagaaacctggccaggctcccaggctcctcatctatggtgcatccagcagggccactggcatcccagacaggttcagtggcagtgggtctgggacagacttcactctcaccatcagcagactggagcctgaagattttgcagtgtattactgtcagcagtatggtagctctcctatgtacacttttggccaggggaccaagctggagatcaaac

SEQ ID NO: 3287 - DNA, 322 bp, Homo sapiens
gacatccagatgacccagtctccatcctccctgtctgcatctgtaggagacagagtcaccatcacttgccgggcaagtcagagcattagcagctatttaaattggtatcagcagaaaccagggagagcccctaagctcctgatctatgctgcatccagtttgcaaagtggggtcccatcaaggttcagtggcagtggatctgggacagatttcactctcaccatcagcagtctgcaacctgaagattttgcaacttactactgtcaacagagttacagtaccctattcactttcggccctgggaccaaagtggatatcaaac

SEQ ID NO: 3288 - DNA, 334 bp, Homo sapiens
cagtctgtgctgacgcagccgccctcagtgtctggggccccagggcagagggtcaccatctcctgcactgggagcagctccaacatcggggcaggttatgatgtacactggtaccagcagcttccaggaacagcccccaaactcctcatctatggtaataccaatcggccctcaggggtccctgaccgattctctggctccaagtctggcacctcagcctccctggccatcactgggctccaggctgaggatgaggctgattattactgccagtcctatgacagcagcctgagcccttgggtgttcggcggagggaccaagctgaccgtcgtag

SEQ ID NO: 3289 - DNA, 322 bp, Homo sapiens
gacatccagatgacccagtccccatcctccctgtctgcatctgtaggagacagagtcaccatcacttgccgggcaggtcagagcattagtacttatttaaattggtatcagcagaaaccagggaaagcccctaacctcctgatatatgatgcatccagtttgcaaagtggggtcccatcaaggttcagaggcagtggatctgggacagatttcactctcaccatcagcaatctgcaacctgaagattttgcaaattactactgtcaacagagttacagtagccccgtgacttttggccaggggaccaagctggagatcaaac

SEQ ID NO: 3290 - DNA, 323 bp, Homo sapiens
gacatccagatgacccagtctccatcctccctgtctgcatctgtaggagacagagtcaccatcacttgccgggcaagtcagagcattagcagctatttaaattggtatcagcagaaaccagggaaagcccctaagctcctgatctatgctgcatccagtttgcaaagtggggtcccatcaaggttcagtggcagtggatctgggacagatttcactctcaccatcagcagtctgcaacctgaagattttgcaacttactactgtcaacagagttacagtaccccgcgacacttttggccaggggaccaagctggagatcaaac

SEQ ID NO: 3291 - DNA, 324 bp, Homo sapiens
gacatccagatgacccagtctccatcctccctgtctgcatctgtaggagacagagtcaccatcacttgccaggcgagtcaggacattagcaactatttaaattggtatcagcagaaaccagggaaagcccctaagctcctgatctacgatgcatccaatttggaaacaggggtcccatcaaggttcagtggaagtggatctgggacagattttactttcaccatcagcagcctgcagcctgaagatattgcaacatattactgtcaacagtatgataatctccccctctcaccttcggccaagggacacgactggagattaaac

SEQ ID NO: 3292 - DNA, 331 bp, Homo sapiens
cagtctgccctgactcagcctgcctccgtgtctgggtctcctggacagtcgatcaccatctcctgcactggaaccagcagtgacgttggtggttatagctatgtctcctggtaccaacagcacccaggcaaagcccccaaactcatgatttatgaggtcagtaatcggccctcaggggtttctaatcgcttctctggctccaagtctggcaacacggcctccctgaccatctctgggctccaggctgaggacgaggctgattattactgcagctcatatacaagcagcagcactaatgtcttcggaactgggaccaaggtcaccgtcctag

SEQ ID NO: 3293 - DNA, 324 bp, Homo sapiens
gacatccagatgacccagtctccatcctcactgtctgcatcggtgggagacagagtcaccatcacttgtcgggcgagtcagggcattagcaattatttagcctggtttcagcagaaaccagggaaagcccctaagtccctgatctatgctgcatccagtttgcaaagtggggtcccatcaaaattcagcggcagtggatctgggacagatttcactctcaccatcagcagcctgcagcctgaagattttgcaacttattattgccaacagtataatagttactttcgatcaccttcggccaagggacacgactggagattaaac

SEQ ID NO: 3294 - DNA, 322 bp, Homo sapiens; identical to SEQ ID NO: 1520

SEQ ID NO: 3295 - DNA, 328 bp, Homo sapiens
gacatccagatgacccagtctccatcctccctgtctgcatctgtaggagacagagtcaccatcacttgccaggcgagtcaggacattagcaactatttaaattggtatcagcacaaaccagggaaagcccctaagctcctgatcttcgatgcatccaatttggaaacaggggtcccatcaaggttcagtggaagtggatctgggacagattttactttcaccatcagcagcctgcagcctgaagatattgcaacatattactgtcaacagtatgatactctccccccgacgtacacttttggccaggggaccaagctggagatcaaac

SEQ ID NO: 3296 - DNA, 334 bp, Homo sapiens
cagtctgccctgactcagcctgcctccgtgtctgggtctcctggacagtcgatcaccatctcctgcactggaaccagcagtgatgttgggagttataaccttgtctcctggtaccaacagcacccaggcaaagcccccaaactcatgatttatgagggcagtaagcggccctcaggggtttctaatcgcttctctggctccaagtctggcaacacggcctccctgacaatctctgggctccaggctgaggacgaggctgattattactgctgctcatatgcaggtagtagcacttttgtggtattcggcggagggaccaagctgaccgtcctag

SEQ ID NO: 3297 - DNA, 322 bp, Homo sapiens
gacatccagatgacccagtctccatcctccctgtctgcatctgtaggagacagagtctccatcacttgccaggcgagtcaggacattagcaactatttaaattggtatcagcagaaaccagggaaagcccctaagctcctgatctacgatgcatccaatttggaaacaggggtcccatcaaggttcagtggaagtggatctgggacagattttacttttaccatcagcagcctgcagcctgaagatattgcaacatattactgtcaacagtatgataatctccctctcactttcggcggagggaccaaggtggagatcaaac

SEQ ID NO: 3298 - DNA, 337 bp, Homo sapiens
gatattgtgatgactcagtctccactctccctgcccgtcacccctggagagccggcctccatctcctgcaggtctagtcagagcctcctgcatagtaatggaaacaactatttggattggtacctgcagaagccagggcagtctccacagctcctgatctatttgggttctaatcgggcctccggggtccctgacaggttcagtggcagtggatcaggcacagattttacactgaaaatcagcagagtggaggctgaggatgttggggtttattcctgcatgcaagctctacaaactcctaacacttttggccaggggaccaagctggagatcaaac

SEQ ID NO: 3299 - DNA, 325 bp, Homo sapiens
gacatccagttgacccagtctccatccttcctgtctgcatctgtaggagacagagtcaccatcacttgccgggccagtcagggcattagcagttatttagcctggtatcagcaaaaaccagggaaagcccctaagctcctgatctatgctgcatccactttgcaaagtggggtcccatcaaggttcagcggcagtggatctgggacagaattcactctcacaatcagcagcctgcagcctgaagattttgcaacttattactgtcaacagcttaatagttaccctccggtcactttcggcggagggaccaaggtggagatcaaac

SEQ ID NO: 3300 - DNA, 322 bp, Homo sapiens
gaaatagtgatgacgcagtctccagccaccctgtctgtgtctccaggggagagagccaccctctcctgcagggccagtcagagtgttagcagcaacctagcctggtaccagcagaaacctgggcaggctcccaggctcctcatcaatggcgcatccaccagggccactggtatcccagccaggttcagtggcagtgggtctgggatagacttcactctcaccatcagcagcctgcagtctgaagattttgcagtttattactgtcagcagtataataactggccgtggacattcggccaagggaccaaggtggaaatcaaac

SEQ ID NO: 3301 - DNA, 325 bp, Homo sapiens
gacatccagatgacccagtctccatcctccctgtctgcatctgtaggagacagagtcaccatcacttgccgggcaagtcagagcattagcagctatttaaattggtatcagcagaaaccagggaaagcccctaaactcctgatctatgctgcatccagtttgcaaagtggggtcccatcaaggttcagtggcagtggatctgggacagatttcactctcaccatcagcagtctgcaacctgaagattttgcaacttactactgtcaacagagttacagaacccccccgtgcacttttggccaggggaccaagctggagatcaaac

SEQ ID NO: 3302 - DNA, 331 bp, Homo sapiens
cagtctgccctgactcagcctccctccgcgtccgggtctcctggacagtcagtcaccatctcctgcactggaaccagcagtgacgttggtggttataactatgtctcctggtaccaacagcacctaggcaaagcccccaaactcatgatttatgaggtcagtaagcggccctcaggggtccctgatcgcttctctggctccaagtctggcaacacggcctccctgaccgtctctgggctccaggctgaggatgaggctgattattactgcagctcatatgcaggcagcaacaagggggtcttcggaactgggaccaaggtcaccgtcctag

SEQ ID NO: 3303 - DNA, 337 bp, Homo sapiens
gacatcgtgatgacccagtctccagactccctggctgtgtctctgggcgagagggccaccatcaactgcaagtccagccagagtgttttatacagctccaacaataagaactacttagcttggtaccagcagaaaccaggacagcctcctaagctgctcatttactgggcatctacccgggaatccggggtccctgaccgattcagtggcagcgggtctgggacagatttcactctcaccatcagcagcctgcaggctgaagatgtggcagtttattactgtcagcaatattatagtaccatcaccttcggccaagggacacgactggagattaaac

SEQ ID NO: 3304 - DNA, 322 bp, Homo sapiens
gaaattgtgttgacgcagtctccaggcaccctgtctttgtctccaggggaaagagccaccctctcctgcagggccagtcagagtgttagcagcagcttcttagcctggtaccagcagaaacctggccaggctcccagactcctcatctatggtgcctccagcagggccactggcgtcccagacaggttcagtggcagtgggtctgggacagacttcactctcaccatcagcagactggagcctgaagattttgcagtgtattactgtcagcagtatggtggctcgatcaccttcggccaagggacacgactggagattaaac

SEQ ID NO: 3305 - DNA, 322 bp, Homo sapiens
gacatccacatgacccagtctccttccaccctgtctgcatctgtaggagacagagtcaccatcacttgccgggccagtcaatttattaatgtctggttggcctggtatcagcagagaccagggaaagcccctaagttcctgatctataaggcgtctactttaggaagtggggtcccatcaaggttcagcggcagtggatctggcacagaattcactctcaccatcagcagcctgcagcctgatgattttgcaatttattactgccaacagtataatagttacccgctcactttcggcggagggaccaaggtggagatcaaac

SEQ ID NO: 3306 - DNA, 325 bp, Homo sapiens
gacatccagatgacccagtctccatcctccctgtctgcatctgtaggagacagagtcaccatcacttgccgggcaagtcagagcattagtagcaacttaaattggtatcagcaaaatccagggaaggcccctaagctcctgatctatggtgcatccagtttgcaaagtggggtcccatcaaggttcagtggcagtggatctgggacagatttcactctcaccatcagcagtctgcaacctgaagattttgcaacttactactgtcaacagagttacaaaacccccccgatcaccttcggccaggggacacgactggagattaaac

SEQ ID NO: 3307 - DNA, 322 bp, Homo sapiens
gacatccagatgacccagtctccatcctccctgtctgcatctgtaggagacagagtcaccatcacttgccgggctagtcagagcattagcacctatttaaattggtatcagcagaaaccagggaaagcccctaagctcctgatctatgctgcatccagtttgcaaagtggggtcccatcaaggttcagtggcagtggatctgggacagatttcactctcaccatcagcagtctgcaacctgaagattttgcaacttactactgtcaaaagagttacagtaccccgtggacgttcggccaagggaccaaggtggaaatcaaac

SEQ ID NO: 3308 - DNA, 325 bp, Homo sapiens
tcctatgagctgactcagccaccctcagtgtccgtgtccccaggacagacagccagcatcacctgctctggagataaattgggggataaatatgcttgctggtatcagcagaagccaggccagtcccctgtgctggtcatctatcaagatggcaaacgaccctcagggatccctgagcgattctctggctccaactctgggaacacagccactctgaccatcagcgggacccaggctatggatgaggctgactattactgtcaggcgtgggacagcagcactagggatgtggtattcggcggagggaccaagctgaccgtcctag

SEQ ID NO: 3309 - DNA, 337 bp, Homo sapiens
gagattgtgatgacccagactccactctccttgtctatcacccctggagagcaggcctccatgtcctgcaggtctagtcagagcctcctgcatagtgatggatacacctatttgtattggtttctgcagaaagccaggccagtctccacgctcctgatctatgaagtttccaaccggttctctggagtgccagataggttcagtggcagcgggtcagggacagatttcacactgaaaatcagccgggtggaggctgaggattttggagtttattactgcatgcaagatgcacaagatcctctcactttcggcggagggaccaaggtggagatcaaac

SEQ ID NO: 3310 - DNA, 325 bp, Homo sapiens
gacatccagatgacccagtctccatcctccctgtctgcatctgtaggagacagagtcaccatcacttgccaggcgagtcaggacattagcacctatttagattactatcaacagaaaccagggaaagtccctaagctcctgatccacgatgcatccaatttggaaacaggggtcccatcaaggttcagttgcagtggatctgggacagattttactttcagcatcagcagcctgcagcctgaagatattgcaacatattactgtcaacagcatgataatctccctcggctcactttcggcggagggaccaaggtggagatcaaac

SEQ ID NO: 3311 - DNA, 319 bp, Homo sapiens
tcctatgacctggctcagccaccctcagtgtccgtgtccccacaacagacagccagcatcacctgctctggagataaattggggaataaatatggttgctggtatcagcagaagccaggccagtcccctgtggtggtcatctatcaagatagcaagcggccctcagggatccctgagcgattctctggctccaactctgggaacacagccactctgaccatcagcgggacccaggctatggatgaggctgactattactgtcaggcgtgggacgacagcactgtggtattcggcggagggaccaagctgaccgtcctag

SEQ ID NO: 3312 - DNA, 322 bp, Homo sapiens
gacatccagatgacccagtctccatcttccgtgtctgcatctgtaggagacagagtcaccatcacttgtcgggcgagtcagggtattagcagctggttaggctggtatcagcagaaaccagggaaagcccctaagctcatgatctatggtgcatccagtctgcaaagtggggtcccatcaaggttcagcggcagtggatctgggacagatttcactctcaccatcagcagcctgcagcctgaagattttgcaacttactattgtcaacaggctaacagtttcccgtggacgttcggccaagggaccaaggtggaaatcaaac

SEQ ID NO: 3313 - DNA, 322 bp, Homo sapiens
gaaatagtgatgacgcagtctccagccaccctgtctgtgtctccaggggaaagagccaccctctcctgcagggccagtcagagtgttagcagcaacttagcctggtaccagcagagacctggccaggctcccaggctcctcatctatggtgcatccacccgggccactggtgtgccacccagattcagtggcagtgggtctgggacagagttcactctcaccatcagcagcctgcagtctgaagattttgcagtttattactgtcagcagtataataactggctttacacttttggccaggggaccaagctggagatcaaac

SEQ ID NO: 3314 - DNA, 322 bp, Homo sapiens
gaaattgtgttgacgcagtctccaggcaccctgtctttgtctccaggggaaagagccaccctctcctgcagggccagtcagagcgttagcagcagctacttagcctggtaccagcagaaacctggccaggctcccaggctcctcatctatggtgcatccagcagggccactggcatcccagacaggttcagtggcagtgggtctgggacagacttcactctcaccatcagcagactggagcctgaagattttgcagtgtattactgtcagcagtatggtagctcgtacacttttggccaggggaccaagctggagatcaaac

SEQ ID NO: 3315 - DNA, 322 bp, Homo sapiens
gaaattgtgttgacgcagtctccaggcaccctgtctttgtctccaggggaaagagccaccctctcctgcagggccagtcagagtgttagcagcagctacttagcctggtaccagcagaaacctggccaggctcccaggctcctcatctatggtgcatccaacagggccactggcatcccagacaggttcagtggcagtgggtccgggacagacttcactctcaccatcagcagactggagcctgaagattttgcagtgtattactgtcagcagtatgatacctcgtacacctttggccaggggaccaagctggagatcaaac

SEQ ID NO: 3316 - DNA, 328 bp, Homo sapiens
cagtctgccctgactcagcctcgctcagtgtccgggtctcctggacagtcagtcaccatctcctgcactggaaccagcagtgatgttggttattataactatgtctcctggtaccaacagcacccaggcaaagcccccaaactcatgatttatgctgtcagtaagcggccctcaggggtccctgatcgcttctctggctccaagtctggcaacacggcctccctgaccatctctgggctccaggctgaggatgaggctgattattactgctgctcatatgcaggcacctatgtactattcggcggagggaccaagctgaccgtcctag

SEQ ID NO: 3317 - DNA, 328 bp, Homo sapiens
tcctatgaactgactcagccaccctcagtgtccgtgtccccaggacagacagccagcatcacctgctctggacataaattgggggataaatatgcttgttggtatcaacagaagccaggccagtcccctgtgttggtcatctatcaagataacaagcggccctcagggatccctgagcgattctctggctccaactctgagaacacagccactctgaccatcagcgggacccaggctatggatgaggctgactattattgtcaggcgtgggacagcagcactgcccctggtgtggttttcggcggagggaccaagctgaccgtcctag

SEQ ID NO: 3318 - DNA, 325 bp, Homo sapiens
gaaatagtgatgacgcagtctccagccaccctgtctgtgtctccaggggaaagagccaccctctcctgcagggccagtcagagtgttagcagcaacttagcctggtaccagcagaaacctggccaggctcccaggctcctcatctatggtgcatccaccagggccactggtatcccagccaggttcagtggcagtgggtctgggacagagttcactctcaccatcagcagcctgcagtctgaagattttgcagtttattactgtcagcagtataataactggcctccaatcaccttcggccaagggacacgactggagattaaac

SEQ ID NO: 3319 - DNA, 325 bp, Homo sapiens
gacatccagatgacccagtctccatcctccctgtctgcatctgtaggagacagagtcaccatcacttgccaggcgagtcaggacattagcaactatttaaattggtatcagcagaaaccagggaaagcccctaagctcctgatctacgatgcatccaatttggaaacaggggtcccatcaaggttcagtggaagtggatctgggacagattttactttcaccatcagcagcctgcagcctgaagatattgcaacatattactgtcaacagtatgataatctccctccgctcactttcggcggagggaccaaggtggagatcaaac

SEQ ID NO: 3320 - DNA, 328 bp, Homo sapiens
cagtctgccctgactcagcctcgctcagtgtccgggtctcctggacagccagtcaccatctcctgcactggaaccagcagtaatgttggtggtgataactatgtctcctggtaccaacaggacccaggcaaagcccccaaactcatgatttatgatgtcagtaagcggccctccggggtccctgatcgcttctctggctccaagtctggcaatacggcctccctcaccatctctggactccaggctgaggatgaggcttattattactgccgttcatctgcaggcagctacaatctattcggcggcgggaccaagctgaccgtcgtag

SEQ ID NO: 3321 - DNA, 319 bp, Homo sapiens
tcctatgagctgactcagccaccctcagtgtccgtgtccccaggacagacagccagcatcacctgctctggagataaattgggggataaatatgcttgctggtatcagcagaagccaggccagtcccctgtgctggtcatctatcaagatagcaagcggccctcagggatccctgagcgattctctggctccaactctgggaacacagccactctgaccatcagcgggacccaggctatggatgaggctgactattactgtcaggcgtgggacacgaagaatgtggtattcggcggagggaccaagctgaccgtcctag

SEQ ID NO: 3322 - DNA, 324 bp, Homo sapiens
gccatccggatgacccagtctccattctccctgtctgcatctgtaggagacagagtcaccatcacttgctgggccagtcagggcattagcaattaattaggcaggtatcagcaaaaaccagcaaaagcccctaaggtcttcatctactatgcatccagtttgcaaagtggggtcccatcaaggttcagcggcagtggatctgggacggattacactctcaccatcagcagcctgcagcctgaagattttgcaacttattgctgtcaacagtattatagtacccctcaatcaccttcggccaagggacacgactggagattaaac

SEQ ID NO: 3323 - DNA, 264 bp, Homo sapiens
gccatccggatgacccagtctccattctccctgtctgcatctgttggagacagagtcaccatcactatttagcctggtatcagcaaaaaccagcaaaagcccctaagctcttcatctattatgcatccagtttgcaaagtggggtcccatcaaggttcagcggcagtggatctgggacggattacactctcaccatcatactgtcaactgtattatactacccctcagtcaccttcggccaagggacacgactggagactaaac

SEQ ID NO: 3324 - DNA, 337 bp, Homo sapiens
gacatcgtgatgacccagtctccagactccctggctgtgtctctgggcgagagggccaccctcaactgcaagtccaggcagagtgttttaaacagctccaacaataggaactacttagcttggtaccagcagaagccaggacagcctcctaagttgctcatctactgggcatctacccgggaatccggggtccctgaccgattcagtggcagcgggtctgggacagatttcactctcaccatcagcagcctgcaggctgaagatgtggcactttattattgtcagcaatacctaagtagagtctctttcggccctgggaccaaagtggatatcaaac

SEQ ID NO: 3325 - DNA, 322 bp, Homo sapiens
gaaattgtgttgacacagtctccagccaccctgtctttgtctccaggggaaagagtcaccctctcctgcagggccagtcagagtgttagcagccacttagcctggtaccaacagaaacctggccaggctcccaggctcctcatctatgatgcatccaacagggccactggcatcccagccaggttcagtggcagtgggtctgggacagacttcactctcaccatcagcagcctagagcctgaagattttgcagtttattactgtcagcagcgtagcaactggcctctcactttcggcggagggaccaaggtggagatcaaac

SEQ ID NO: 3326 - DNA, 322 bp, Homo sapiens
gaaattgtgttgacacagtctccagccaccctgtctttgtctccaggggaaagagccaccctctcctgcagggccagtcagagtgttagcagctacttagcctggtaccaacagaaacctggccaggctcccaggctcctcatctatgatgcatccaacagggccactggcatcccagccaggttcagtggcagtgggtctgggacagacttcactctcaccatcagcagcctagagcctgaagattttgcagtttattactgtcagcagcgtagcaactggcccatcaccttcggccaagggacacgactggagattaaac

SEQ ID NO: 3327 - DNA, 331 bp, Homo sapiens
cagtctgccctgactcagcctgcctccgtgtctgggtctcctggacagtcgatcaccatctcctgcactggaaccagcagtgacgttggtggttataactatgtctcctggtaccaacagcacccaggcaaagcccccaaactcatgatttatgatgtcagtaatcggccctcaggggtttctaatcgcttctctggctccaagtctggcaacacggcctccctgaccatctctgggctccaggctgaggacgaggctgattattactgcagctcatatacaagcagcagcactcgggtattcggcggagggaccaagctgaccgtcctag

SEQ ID NO: 3328 - DNA, 325 bp, Homo sapiens
gacatccagatgacccagtctccatcctccctgtctgcatctgtaggagacagagtcaccatcacttgccaggcgagtcaggacattagcaactatttaaattggtatcagcagaaaccagggaaagcccctaagctcctgatctacgatgcatccaatttggaaacaggggtcccatcaaggttcagtggaagtggatctgggacagattttactttcaccatcagcagcctgcagcctgaagatattgcaacatattactgtcaacagtatgataatctccctcggctcactttcggcggagggaccaaggtggagatcaaac

SEQ ID NO: 3329 - DNA, 331 bp, Homo sapiens
cagtctgccctgactcagcctgcctccgtgtctgggtctcctggacagtcgatcaccatctcctgcactggaaccagcagtgatgttgggagttataaccttgtctcctggtaccaacagcacccaggcaaagcccccaaactcatgatttatgaggtcagtaagcggccctcaggggtttctaatcgcttctctggctccaagtctggcaacacggcctccctgacaatctctgggctccaggctgaggacgaggctgattattactgctgctcatatgcaggtagtagcactttggtattcggcggagggaccaagctgaccgtcctag

SEQ ID NO: 3330 - DNA, 328 bp, Homo sapiens
tcctatgagctgacacagccaccctcggtgtcagtgtccccaggacagacggccaggatcacctgctctggagatgcattgccaaagcaatatgcttattggtaccagcagaagccaggccaggcccctgtgttggtgatatataaagacagtgagaggccctcagggatccctgagcgattctctggctccagctcagggacaacagtcacgttgaccatcagtggagtccaggcagaagacgaggctgactattactgtcaatcagcagacaacagtgatacttcttatgtggtattcggcggagggaccaagctgaccgtcctag

SEQ ID NO: 3331 - DNA, 322 bp, Homo sapiens
gacatccagatgacccagtctccatcctccctgtctgcatctgtaggagacagagtcaccatcacttgccgggcaagtcagggcattaggaatgatttaggctggtatcagcagaaaccagggaaagcccctaagcgcctgatctatgctgcatccagtttgcaaagtggggtcccgtcaaggttcagcggcagtggatctgggacagaattcactctcacaatcagcagcctgcagcctgaagattttgcaacttattactgtctacaacataatagttaccctctcactttcggcggagggaccaaggtggagatcaaac

SEQ ID NO: 3332 - DNA, 331 bp, Homo sapiens
cagtctgccctgactcagcctgcctccgtgtctgggtctcctggacagtcgatcaccatctcctgcactggaaccagcagtgatgttgggagttataaccttgtctcctggtaccaacagcacccaggcaaagcccccaaactcatgatttatgaggtcagtaagcggccctcaggggtttctaatcgcttctctggctccaagtctggcaacacggcctccctgacaatctctgggctccaggctgaggacgaggctgattattactgctgctcatatgcaggtagtagcacttgggtgttcggcggagggaccaagctgaccgtcctag

SEQ ID NO: 3333 - DNA, 334 bp, Homo sapiens
cagtctgccctgactcagcctgcctccgtgtctgggtctcctggacagtcgatcaccatctcctgcactggaaccagcagtgacgttggtggttataactatgtctcctggtaccaacagcacccaggcaaagcccccaaactcatgatttatgatgtcagtaatcggccctcaggggtttctaatcgcttctctggctccaagtctggcaacacggcctccctgaccatctctgggctccaggctgaggacgaggctgattattactgcagctcatatacaagcagcagcactttttatgtcttcggaactgggaccaaggtcaccgtcctag

SEQ ID NO: 3334 - DNA, 325 bp, Homo sapiens
gaaatagtgatgacgcagtctccagccaccctgtctgtgtctccaggggaaagagccaccctctcctgcagggccagtcagagtgttagcagcaacttagcctggtaccagcagaaacctggccaggctcccaggctcctcatctatggtgcatccaccagggccactggtatcccagccaggttcagtggcagtgggtctgggacagagttcactctcaccatcagcagcctgcagtctgaagattttgcagtttattactgtcagcagtataataactggcctccattcactttcggccctgggaccaaagtggatatcaaac

SEQ ID NO: 3335 - DNA, 321 bp, Homo sapiens
aaatagtgatgacgcagtctccagccaccttgtctgtgtctccaggggaaagagccaccctctcctgcagggccagtcagagtattagcaccaacttagcctggtaccagcagaaacctggccaggctcccaggctcctcatctatgatgcatccaccagggccactggtatcccagccaggttcagtggcagtgggtctgggacagagttcactctcaccatcagcagcctgcagtctgaagattttgcagtttattactgtcaccagtataataactggcctccggctttcggcggagggaccaaggtggagatcaaac

SEQ ID NO: 3336 - DNA, 331 bp, Homo sapiens
gacatccagatgacccagtctccatcctccctgtctgcatctgtaggagacagagtcaccatcacttgccgggcaagtcagagcattagcacctatttaaattggtatcagcagaaaccagggaaagcccctaagctcctgatctatgctacatccagtttgcaaagtggggtcccatcaaggttcagtggcagtggatctgggacagatttcactctcaccatcagcagtctgcaacctgaagattttgcaacttactactgtcaacagacttacattacccctccaaccccccaaacttttggccaggggaccaagctggagatcaaac

SEQ ID NO: 3337 - DNA, 325 bp, Homo sapiens
gaaattgtgttgacgcagtctccaggcaccctgtctttgtctccaggggaaagagccaccctctcctgcagggccagtcagagtgttagcagcagctacttagcctggtaccagcagaaacctggccaggctcccaggctcctcatctatggtgcatccagcagggccactggcatcccagacaggttcagtggcagtgggtctgggacagacttcactctcaccatcagcagactggagcctgaagattttgcagtgtattactgtcagcagtatggtagcttaccgatcaccttcggccaagggacacgactggagattaaac

SEQ ID NO: 3338 - DNA, 319 bp, Homo sapiens
tcctatgacctgactcagccaccctcagtgtccgtgtccccaggacagacagccagcatcacctgctctggagataaattgggggataaatatgcttgctggtatcagcagaagccaggccagtcccctgtggtggtcatctatcaagatagcaagcggccctcagggatccctgagcgattctctggctccaactctgggaacacagccactctgaccatcagcgggacccaggctatggatgaggctgactattactgtcaggcgtgggactccagcactgtggtattcggcggagggaccaagctgaccgtcctag

SEQ ID NO: 3339 - DNA, 322 bp, Homo sapiens
gacatccagatgacccagtctccagcctccctgtctgcatttgtaggagacagagtcaccatcacttgccgggcaagtcagagcatcagcagctatttaaattggtatcagcagaaaccagggaaagcccctaagttcctgatttatggtgcatccaatttgcaaagtggggtcccatcaaggttcagtggcagtggatctgggacagatttcactctcaccatcagcagtctgcaacctgaagatttggcaacttactactgtcaacagagttacagtatcccgtggacgttcggccaagggaccaaggtggaaatcaaac

SEQ ID NO: 3340 - DNA, 325 bp, Homo sapiens
gaaattgtgttgacgcagtctccaggcaccctgtctttgtctccaggggaaagagccaccctctcctgcagggccagtcagagtgttagcagcaccgacttagcctggtaccagcacaaacctggccaggctcccaggctcctcatctatggtgcatccagcagggccaatggcatcccagacaggttcagtggcagtgggtctgggacagacttcactctcaccatcagcagactggagcctgaagattttgcagtgtattactgtcagcagtatggtagctcaccggggacgttcggccaagggaccaaggtggaaatcaaac

SEQ ID NO: 3341 - DNA, 319 bp, Homo sapiens; identical to SEQ ID NO: 1688

SEQ ID NO: 3342 - DNA, 337 bp, Homo sapiens
gacatccagatgacccagtctccatcctccctgtctgcatctgtaggagacagagtcaccatcacttgccgggcaagtcagagcattagcatctatttaacttgctatcagcaaattggtatcagcagaaaccagggaaaacccctaagctcctaatctatactgcatccagtttgcaaagtggggtcccatcaaggttcagtggcagtggatctgggacagatttcactctcaccatcagcagtctgcaacctgaagattttacaactcactactgtcaacagagttacagttccctcgtggccgttcggccaagggaccaaagtggaagtcaaac

SEQ ID NO: 3343 - DNA, 320 bp, Homo sapiens
catccagatgacccagtctccatcctccctgtctgcatctgtaggagacagagtcgccatcacttgccgggcaagtcaggacattagaaatgatttaggctggtatcagcagaaaccagggagagctcctaaggtcctgatctctgctgcatccactttacgaagtggggtcccatcgaggttcagcggcactcaatctggcacagaattcactctcatcatcagcaacctgcagcctgaagactctgcaacttatttctgtctacaagattacagataccctctcactttcggcggagggaccaaggtggagatcaaac

SEQ ID NO: 3344 - DNA, 337 bp, Homo sapiens
cagtctgccctgactcagcctgcctccgtgtctgggtctcctggacagtcgatcaccatctcctgcactggaaccagcagtgacgttggtggttataactttgtctcctggtaccaacaacacccagacaaagcccccaaactcatgctttatgatgtcagttatcggccctcaggggtttctaatcgcttctctggctccaagtctggcaacacggcctccctgaccatctctgggctccaggctgaggacgaggctgattattactgcagctcatatacaagcagcagcactcttgatgtggtattcggcggagggaccaagctgaccgtcctag

SEQ ID NO: 3345 - DNA, 319 bp, Homo sapiens
tcctatgagctgactcagccaccctcagtgtccgtgtccccaggacagacagccagcatcacctgctctggagatgaattgggggataaatatgcttgctggtatcagcagaagccaggccagtcccctgtgctggtcatctatcaagatagcaagcggccctcagggatccctgagcgattctctggctccaactctgggaacacagccactctgaccatcagcgggacccaggctatggatgaggctgactattactgtcaggtgtgggacagcagcactgtcgtattcggcggagggaccaagctgaccgtcctag

SEQ ID NO: 3346 - DNA, 325 bp, Homo sapiens
gacatccagatgacccagtctccatcctccctgtctgcatctgtaggagacagagtcaccatcacttgccgggcaagtcagggcattagaaatgatttaggctggtatcagcagaaaccagggaaagcccctaagcgcctgatctatgctgcatccagtttgcaaagtggggtcccatcaaggttcagcggcagtggatctgggacagaattcactctcacaatcagcagcctgcagcctgaagattttgcaacttattactgtctacagcataatagttaccccacgtggacgttcggccaagggaccaaggtggaaatcaaac

SEQ ID NO: 3347 - DNA, 331 bp, Homo sapiens
cagtctgccctgactcagcctgcctccgtgtctgggtctcctggacagtcgatcaccatctcctgcactggaaccagcagtgacgttggtggttataactatgtctcctggtaccaacagctcccaggcaaagcccccaaactcatgatttatgatgtcagtaatcggccctcaggggtttctaatcggttctctggctccaagtctggcaacacggcctccctgaccatctctgggctccaggctgaggacgaggctgattattactgcagctcatatacaagcagcagctcttgggtgttcggcggagggaccaagctgaccgtcctag

SEQ ID NO: 3348 - DNA, 337 bp, Homo sapiens
gatattgtgatgacccagactccactctcctcacctgtcacccttggacagccggcctccatctcctgcaggtctagtcaaagcctcgtacacagtgatggaaacacctacttgagttggcttcagcagaggccaggccagcctccaagactcctaatttataagatttctaaccggttctctggggtcccagacagattcagtggcagtggggcagggacagatttcacactgaaaatcagcagggtggaagctgaggatgtcggggtttattactgcatgcaagctacacaatttccttggacgttcggccaagggaccaaggtggaaatcaaac

SEQ ID NO: 3349 - DNA, 325 bp, Homo sapiens
gaaatagtgatgacgcagtctccagccaccctgtctgtgtctccaggggaaagagccaccctctcctgcagggccagtcagagtgttagcagcaacttagcctggtaccagcagaaacctggacaggctcccaggctcctcatctatggtgcatccaccagggccactggtatcccagccaggttcagtggcagtgggtctgggacagagttcactctcaccatcagcagcctgcagtctgaagattttgcagtttattactgtcagcagtataataactggcctctgtacacttttggccaggggaccaagctggagatcaaac

SEQ ID NO: 3350 - DNA, 322 bp, Homo sapiens
gaaatagtgatgacgcagtctccagccaccctgtctgtgtctccaggggaaagagccaccctctcctgcagggccagtcagagtgttagcagcaacttagcctggtaccagcagaaacctggccaggctcccaggctcctcatctatggtgcatccaccagggccactggtatcccagccaggttcagtggcagtgggtctgggacagagttcactctcaccatcagcagcctgcagtctgaagattttgcagtttattactgtcagcagtataataactggcctttcactttcggccctgggaccaaagtggatatcaaac

SEQ ID NO: 3351 - DNA, 343 bp, Homo sapiens
gatattgtgatgacccagactccactctccctgcccgtcacccctggagagccggcctccatctcctacaggtctagtcagagtttcttggatagtgatgatggaaacacctatttggactggtacctgcagaagccagggcagtctccacagctcctgatccatacgctttcctatcgggcctctggagtcccagacaggttcagtggcagtgggtcaggcactgatttcacactgaaaatcagcagggtggaggctgaggatgttggagtttattactgcatgcaacgtatggagtctcccacgtggacgttcggccaagggaccaaggtggaaatcaaac

SEQ ID NO: 3352 - DNA, 322 bp, Homo sapiens
gacatccagatgacccagtctccatcctccctgtctgcatctgtaggagacagagtcaccatcacttgccaggcgagtcaggacattagcaactctttaaattggtatcagcagaaaccagggaaagcccctgagctcctgatctacgatgcatccaatttggaaacaggggtcccatcaaggttcagtggaagtggatctgggacagattttactttcaccatcagcagcctgcagcctgaagatattgcaacatattactgtcaacaggatgataatctcccgctcactttcggcggagggaccaaggtggagatcaaac

SEQ ID NO: 3353 - DNA, 322 bp, Homo sapiens
tcctatgagctgactcagccaccctcagtgtccgtgtccccaggacagacagccagcatcacctgctctggagataaattgggggataaatatgtttgctggtatcagcagaagccaggccagtcccctgtgctggtcatctatcaagataccaagcggccctcagggatccctgagcgattctctggctccaactctgggaacacagccactctgaccatcagcgggacccaggctatggatgaggctgactattactgtcaggcgtgggacagcagcactggaggggtattcggcggagggaccaagctgaccgtcctag

SEQ ID NO: 3354 - DNA, 322 bp, Homo sapiens
gacatccagttgacccagtctccatccttcctgtctgcatctgtaggagacagagtcaccatcacttgccgggccagtcagggcattagcagttatttagcctggtatcagcaaaaaccagggaaagcccctaagctcctgatctatgctgcatccactttgcaaagtggggtcccatcaaggttcagcggcagtggatctgggacagaattcactctcacaatcagcagcctgcagcctgaagattttgcaacttattactgtcaacagcttaatagttaccccctcactttcggcggagggaccaaggtggagatcaaac

SEQ ID NO: 3355 - DNA, 325 bp, Homo sapiens
gacatccagatgacccagtctccatcctccctgtctgcatctgtaggagacagagtcaccatcacttgccgggcaagtcagagcattagcagctatttaaattggtatcagcagaaaccagggaaagcccctaagctcctgatctatgctgcatccagtttgcaaagtggggtcccatcaaggttcagtggcagtggatctgggacagatttcactctcaccatcagcagtctgcaacctgaagattttgcaacttactactgtcaacagagttacagtactttagcgctcactttcggcggagggaccaaggtggagatcaaac

SEQ ID NO: 3356 - DNA, 322 bp, Homo sapiens
gacatccagatgacccagtctccatcctccctgtctgcatctgtaggagacagagtcaccatcacttgccgggcaagtcagagtattagtagttatttaaattggtatcagcagaaaccagggaaagcccctaaactcctgatgtttgctgcatccagtttgcaaaatggggtcccatcaaggctcagtggcagtggatctgggacagatttcactctcaccatcaacagtctgcaacctgaagattttgcaacttactactgtcaacagagttacactacccctccgacgttcggccaagggaccaaggtggaaatgaaac

SEQ ID NO: 3357 - DNA, 322 bp, Homo sapiens
gacatccaggtgacccagtctccatcctccctgtctgcatctgtaggagacagagtcaccatcacttgccgggcaagtcagagcatcagcagctatttaaattggtatcagcagaaaccagggaaagcccctaagctcctgatctatgctacatccactttgcaaagtggggtcccatcacgcttcagtggcagtggatctgggacagatttcactctcaccatcagcagtctgcaacctgaggattttgcaacttactactgtcagcagaattacattacccctccgacgttcggccaagggaccaaggtggaaatcaaac

SEQ ID NO: 3358 - DNA, 325 bp, Homo sapiens
gacatccagatgacccagtctccatcctccctgtctgcatctgtaggagacagagtcaccatcacttgccaggcgagtcaggacattagcaactatttaaattggtatcagcagaaaccagggaaagcccctaagctcctgatctacgatgcatccaatttggaaacaggggtcccatcaaggttcagtggaagtggatctgggacagattttactttcaccatcagcagcctgcagcctgaagatattgcaacatattactgtcaacagtatgataatctccccccgtacacttttggccaggggaccaagctggagatcaaac

SEQ ID NO: 3359 - DNA, 322 bp, Homo sapiens
gacatccagatgacccagtctccatcctccctgtctgcatctgtaggagacagagtcaccatcacttgccaggcgagtcaggacattagcaactatttaaattggtatcagcagaaaccagggaaagcccctaagctcctgatctacgatgcatccaatttggaagcaggggtcccatcaaggttcagtggaagtggatctgggacagattttactttcaccatcagcaacctgcagcctgaggatattgcaacatattactgtcaacagtatgataatgtcccggtcaccttcggccaagggacacgactggagattaaac

SEQ ID NO: 3360 - DNA, 322 bp, Homo sapiens
gacatccagatgacccagtctccatcctccctgtctgcatctgtaggagacagagtcaccatcacttgccaggcgagtcaggacattagcaactatttaaattggtatcagcagaaaccagggaaagcccctaagctcctgatctacgatgcatccaatttggaaacaggggtcccatcaaggttcagtggaagtggatctgggacagattttactttcaccatcagcagcctgcagcctgaagatattgcaacatattactgtcaacagtatgataatctccccctcaccttcggccaagggacacgactggacattaaac

SEQ ID NO: 3361 - DNA, 331 bp, Homo sapiens
cagtctgccctggctcagcccgcctccgtgtctgggtctcctggacagtcgatcaccatctcctgcactggaaccagcagtgacgttggtacttataattatgtctcctggtatcaacagcacccaggcaaagcccccaaactcatgatttatgaggtcaggaatcggccctcaggggtttctaatcgcttctctggctccaagtctggcaacacggcctccctgaccatctctgggctccaggctgaggacgagggtgattattattgcagctcgtatacaagaagcagcactcttgtcttcggcggagggaccaagctgaccgtcctag

SEQ ID NO: 3362 - DNA, 328 bp, Homo sapiens
gaaattgtgttgacacagtctccagccaccctgtctttgtctccaggggaaagagccaccctctcctgcagggccagtcagagtgttagcagctacttagcctggtaccaacagaaacctggccaggctcccaggctcctcatctatgatgcatccaacagggccactggcatcccggccaggttcagtggcagtgggtctgggacagacttcactctcaccatcagcagcctagagcctgaagattttgcagtttattactgtcagcagcgtagcaactggcctccggcattcactttcggccctgggaccaaagtggatatcaaac

SEQ ID NO: 3363 - DNA, 328 bp, Homo sapiens
gaaattgtgttgacgcagtctccaggcaccctgtctttgtctccaggggaaagagccaccctctcctgcagggccagtcagagtgttagcagcagctacttagcctggtaccagcagaaacctggccaggctcccaggctcctcatctatggtgcatccagcagggccactggcatcccagacaggttcagtggcagtgggtctgggacagacttcactctcaccatcagcagactggagcctgaagattttgcagtgtattactgtcagcagtatggtagctcacctgggtacacttttggccaggggaccaagctggagatcaaac

SEQ ID NO: 3364 - DNA, 314 bp, Homo sapiens
gccatccggatgacccagtctccatcctcattctctgcatctacaggagacagagtcaccatcacttgtcgggcgagtcagggtattagcagttatttagcctggtatcagcaaaaaccagggaaagcccctaagctcctgatctatgctgcatccactttgcaaagtggggtcccatcaaggttcagcggcagtggatctgggacagatttcactctcaccatcagctgcctgcagtctgaagattttgcaacttattactgtcaacagtattatagttttctttggccaggggaccaagctggagatcaaac

SEQ ID NO: 3365 - DNA, 322 bp, Homo sapiens
gacatccagatgacccagtctccatcctccctgtctgcatctgtaggagacagagtcaccatcacttgccgggcaagtcagagcattagcagctatttaaattggtatcagcagaaaccagggaaagcccctaagctcctgatctatgctgcatccagtttgcaaagtggggtcccatcaaggttcagtggcagtggatctgggacagatttcactctcaccatcagcagtctgcaacctgaagattttgcaacttactactgtcaacagagttacagtacccggaggacgttcggccaagggaccaaggtggaaatcaaac

SEQ ID NO: 3366 - DNA, 325 bp, Homo sapiens
gaaatagtgatgacgcagtctccagccaccctgtctgtgtctccaggggaaagagccaccctctcctgcagggccagtcagagtgttagcagcaacttagcctggtaccagcagaaacctgggcaggctcccaggctcctcatctatggtgcatccaccagggccactggtatcccagccaggttcagtggcagtgggtctgggacagagttcactctcaccatcagcagcctgcagtctgaagattttgcagtttattactgtcagcagtataataactggcctccgaacacttttggccaggggaccaagctggagatcaaac

SEQ ID NO: 3367 - DNA, 322 bp, Homo sapiens
gacatccagatgacccagtctccttccaccctgtctgcatctgtaggagacagagtcaccatcacttgccgggccagtcagagtattagtagctggttggcctggtatcagcagaaaccagggaaagcccctaagctcctgatctataaggcgtctagtttagaaagtggggtcccatcaaggttcagcggcagtggatctgggacagaattcactctcaccatcagcagcctgcagcctgatgattttgcaacttattactgccaacagtataatagttatccgctcactttcggcggagggaccaaggtggagatcaaac

SEQ ID NO: 3368 - DNA, 340 bp, Homo sapiens
gatattgtgatgactcagtctccactctccctgcccgtcacccctggagagccggcctccatctcctgcaggtctagtcagagcctcctgcatagtaatggatacaactatttggattggtacctgcagaagccagggcagtctccacagctcctgatctatttgggttctaatcgggcctccggggtccctgacaggttcagtggcagtggatcaggcacagattttacactgaaaatcagcagagtggaggctgaggatgttggggtttattactgcatgcaagctctacaaacccccatgtacacttttggccaggggaccaagctggagatcaaac

SEQ ID NO: 3369 - DNA, 316 bp, Homo sapiens
gacgtccagatgacccagtctccttccaccctgtctgcatctgtaggagacagagtcaccatcacttgccgggccagtcagagtattagtatttggttggcctggtatcagcagaaaccagggaaagcccctaggctcctgatctataaggcgtctactttacaaagtggggtcccatcaaggttcagcggcgctggatctgggacagaattcactctcaccataagcagcctgcagcctgatgattttgcaacttattactgcctacagtataattattatatttttggccaggggaccaagctggagatcaaac

SEQ ID NO: 3370 - DNA, 334 bp, Homo sapiens
cagtctgtgctgacgcagccgccctcagtgtctggggccccagggcagagggtcaccatctcctgcactgggagcaactccaacatcggggcaggttatgatgtacactggtaccagcagcttccaggaacaacccccaaactcctcatctatggtaacagcaatcggccctcaggggtccctgaccgattctctgcctccaagtctggcacctcagcctccctggccatcactgggctccaggctgaggatgaggctgattattactgccagtcctatgacagcagcctgagtggttcagtgttcggcggagggaccaagctgaccgtcctag

SEQ ID NO: 3371 - DNA, 322 bp, Homo sapiens
gaaattgtgctgactcagtctccagactttcagtctgtgactccaaaggagaaagtcaccatcacctgccgggccagtcagagcattggtagtagcttacactggtaccagcagaaaccagatcagtctccaaagctcctcatcaagtatgcttcccagtccatctcaggggtcccctcgaggttcagtggcagtggatctgggacagatttcaccctcaccatcaatagcctggaagctgaagatgctgcagcgtattactgtcatcagagtagtagtttacccgtcactttcggcggagggaccaaggtggagatcaaac

SEQ ID NO: 3372 - DNA, 331 bp, Homo sapiens
cagtctgtgctgactcagccaccctcagcgtctgggacccccgggcagagggtcaccatctcttgttctggaagcagctccaacatcggaagtaatactgtaaactggtaccagcagctcccaggaacggcccccaaactcctcatctatagtaataatcagcggccctcaggggtccctgaccgattctctggctccaagtctggcacctcagcctccctggccatcagtgggctccagtctgaggatgaggctgattattactgtgcagcatgggatgacagcctgaatggtccggtgttcggcggagggaccaagctgaccgtcctag

SEQ ID NO: 3373 - DNA, 337 bp, Homo sapiens
cagtctgtgctgacgcagccgccctcagtgtctggggccccagggcagagggtcaccatctcctgcactgggagcagctccaacatcggggcaggttatgatgtacactggtaccagcagcttccaggaacagcccccaaactcctcatctatggtaacagcaatcggccctcaggggtccctgaccgattctctggctccaagtctggcacctcagcctccctggccatcactgggctccaggctgaggatgaggctgattattactgccagtcctatgacagcagcctgagtggtccttatgtcttcggaactgggaccaaggtcaccgtcctag

SEQ ID NO: 3374 - DNA, 340 bp, Homo sapiens
gacatcgtgatgacccagtctccagactccctggctgtgtctctgggcgagagggccaccatcaactgcaagtccagccagagtgttttatacagctccaacaataagaactacttagcttggtaccagcagaaaccgggacagcctcctaagctgctcatttactgggcatctacccgggaatccggggtccctgaccgattcagtggcagcgggtctgggacaggtttcactctcaccatcagcagcctgcaggctgaagatgtggcagtttattactgtcagcaatattatagtactcctcgaacgttcggccaagggaccaaggtggagatcaaac

SEQ ID NO: 3375 - DNA, 324 bp, Homo sapiens
gacatccagatgacccagtctccatcctccctgtctgcatctgtaggagacagagtcaccatcacttgccaggcgagtcaggacattagcaactatttaaattggtatcagcagaaaccagggaaagcccctaagctcctgatctacgatgcatccaatttggaaacaggggtcccatcaaggttcagtggaagtggatctgggacagattttactttcaccatcagcagcctgcagcctgaagatattgcaacatattactgtcaacagtatgataatctccccctggcactttcggccctgggaccaaagtggatatcaaac

SEQ ID NO: 3376 - DNA, 326 bp, Homo sapiens
gaagttgtgttgacacagtctccagccaccctgtctttgtctccaggggaaagagccaccctctcctgcagggccagtcagagtgttagcaacttcttagcctggtaccaacagaagcctggccaggctcccaggctcctcatctatgatgcatccaacagggccactggcatcccagccaggttcagtggcagtgggtctgggacagacttcactctcaccatcagcagcctagagcctgaggattttgcagtttattactgtcagcagcgtagcaactggcctcccgcgctcactttcggcggagggaccaaggtggagatcaa

SEQ ID NO: 3377 - DNA, 322 bp, Homo sapiens; identical to SEQ ID NO: 1052

SEQ ID NO: 3378 - DNA, 340 bp, Homo sapiens
gacatcgtgatgacccagtctccagactccctggctgtgtctctgggcgagagggccaccatcaactgcaagtccagccagagtgttttatacagctccaacaataagaactacttaggttggtaccagcagaaaccaggacagcctcctaagttactcatttactgggcatctacccgggaatccggggtccctgaccgattcagtggcagcgggtctgggacagatttcactctcaccatcagcagcctgcaggctgaagatgtggcagtttattactgtcagcaatattataatactccgtgcacttttggccaggggaccaagctggagatcaaac

SEQ ID NO: 3379 - DNA, 334 bp, Homo sapiens
cagtctgccctgactcagcctcgctcagtgtccgggtctcctggacagtcagtcaccatctcctgcactggaaccagcagtgatgttggtggttataactatgtctcctggtaccaacagcacccaggcaaagcccccaaactcatgatttatgatgtcattcagcggccctcaggggtccctgatcgcttctctggctccaagtctggcaacacggcctccctgaccatctctgggctccaggctgaggatgaggctgattattactgctgctcatatgcaggcagctacactaattatgtcttcggaactgggaccaaggtcaccgtcctag

SEQ ID NO: 3380 - DNA, 328 bp, Homo sapiens
gaaattgtgttgacgcagtctccaggcaccctgtctttgtctccaggggaaagagccaccctctcctgccgggccagtcagagtgttagcagcagctacttagcctggtaccagcagaaacctggccaggctcccaggctcctcatctatggtgcatccaccagggccactggcatcccagacaggttcagtggcagtgggtctgggacagacttcactctcaccatcagcagactggagtccgaagattttgcagtgtattactgtcaggggtatgctacctcacccgcgctcactttcggcggagggaccaaggtggagatcaaac

SEQ ID NO: 3381 - DNA, 322 bp, Homo sapiens
gacatccagatgacccagtctccatcctccctgtctgcatctgtgggagacagagtcaccatcacttgccgggcaagtctgagcattagcagctatttaaattggtatcagcagaaaccagggaaagcccctaagctcctgatctatgctgcatccagtttgcaaagtggggtcccatcaaggttcagtggcagtggatctgggacagatttcactctcaccatcagcagtctgcaacctgaagattttgcaacttactactgtcaacagagttacagtaccccattccctttcggccctgggaccaaagtggatatcaaac

SEQ ID NO: 3382 - DNA, 305 bp, Homo sapiens
gacatccagatgacccagtctccatcctccctgtctgcatctgtaggagacagagtcaccatcacttgccgggcgagtcagggcattagcaattatttagcctggtatcagcagaaaccagggaaagttcctaagctcctgatctatgctgcatccactttgcaatcaggggtcccatctcggttcagtggcagtggatctgggacagatttcactctcaccatcagcagcctgcagcctgaagatgttgcaacttattacttccctggtggctttcggccctgggaccaaagtggatatcaaac

SEQ ID NO: 3383 - DNA, 322 bp, Homo sapiens
gacatccagatgacccagtctccatcctccctgtctgcatctgtgggagacagagtcaccatcacctgccgggcaagtcaaggtgtttccagcgatttaaattggtatcaacaaaagccaggcaaagcccctcaactcatcatttatggtgcattccatttgcaacgtggtgtcccatcgaggttcacaggcagtggatctgggacagatttcgctctcaccatcagtagtctgcaacctgaagactccgcaacttattattgtcaacagacttatacaaccccgataactttcggcggagggagcaaggtggaggtcaaac

SEQ ID NO: 3384 - DNA, 319 bp, Homo sapiens
tcctatgagctgactcagccaccctcagtgtccgtgtccccaggacagacagccagcatcacctgctctggagataaattgggggataaatatgcttgctggtatcagcagaagccaggccagtcccctgtgctggtcatctatcaagatagcaagcggccctcagggatccctgagcgattctctggctccaactctgggaacacagccactctgaccatcagcgggacccaggctatggatgaggctgactattactgtcaggcgtgggacagcagcactggggtattcggcggagggaccaagctgaccgtcctag

SEQ ID NO: 3385 - DNA, 337 bp, Homo sapiens
cagtctgtgctgacgcagccgccctcagtgtctggggccccagggcagagggtcaccatctcctgcactgggagcagctccaacttcggggcaggttatgatgtacactggtaccagcaacttccaggaacagcccccaaactcctcatctatggtaacagcaatcggccctcaggggtccctgaccgattctctggctccaagtctggcacctcagcctccctggccatcactgggctccaggctgaggatgaggctgattattactgccagtcctatgacaccagcctgagtgcccattgggtgttcggcggagggaccaagctgaccgtcctag

SEQ ID NO: 3386 - DNA, 319 bp, Homo sapiens
tcctatgagctgacacagccatcctcagtgtcagtgtctccgggacagacagccaggatcacctgctcaggagatgtactggcaaaaaaatatgctcggtggttccagcagaagccaggccaggcccctgtgctggtgatttataaagacagtgagcggccctcagggatccctgagcgattctccggctccagctcagggaccacagtcaccttgaccatcagcggggcccaggttgaggatgaggctgactattactgttactctgcggctgacaacaatctggtattcggcggagggaccaagctgaccgtcctag

SEQ ID NO: 3387 - DNA, 322 bp, Homo sapiens
gacatccagatgacccagtctccttccaccctgtctgcatctgtaggagacagagtcaccatcacttgccgggccagtcagagtattagtagctggttggcctggtatcagcagaaaccagggaaagcccctaagctcctgatctataaggcgtctagtttagaaagtggggtcccatcaaggttcagcggcagtggatctgggacagaattcactctcaccatcagcagcctgcagcctgatgattttgcaacttattactgccaacagtataatagttaccctttcactttcggccctgggaccaaagtggatatcaaac

SEQ ID NO: 3388 - DNA, 325 bp, Homo sapiens
tcctatgacctgactcagccaccgtcagtgtccgtgtccccaggacagacagccagcatcacctgctctggagatgaattgggggataaatatgtttgctggtatcagcagaagccaggccagtcccctgtcttggtcatctatcaggataccaagcggccctcagggatccctgagcgattctctggctccaactctgggaacacagccactctgaccatcagcgggacccaggctatggatgaggctgactatcactgtcaggcgtggggcagcagcactgcccctgctgtgttcggcgggggcacccagctgaccgtcctcg

SEQ ID NO: 3389 - DNA, 322 bp, Homo sapiens
gacatccagatgacccagtctccatcttctgtgtctgcatctgtaggagacagagtcaccatcacttgtcgggcgagtcagggtattagcagctggttagcctggtatcagcagaaaccagggaaatcccctaagctcctgatctatgctgcatccagtttgcaaagtggggtcccatcaaggttcagcggcagtggatctgggacagatttcactctcactatcagcagcctgcagcctgaagattttgcaacttactattgtcaacaggctaacagtttcccgatcaccttcggccaagggacacgactggagattaaac

SEQ ID NO: 3390 - DNA, 322 bp, Homo sapiens; identical to SEQ ID NO: 1803

SEQ ID NO: 3391 - DNA, 322 bp, Homo sapiens
gacatccagatgacccagtctccatcctcactgtctgcatctgtaggagacagagtcaccatcacttgtcgggcgagtcagggcattagcaattatttagcctggtttcagcagaaaccagggaaagcccctaagtccctgatctatgctgcatccagtttgcaaagtggggtcccatcaaagttcagcggcagtggatctgggacagatttcactctcaccatcagcagcctgcagcctgaagattttgcaacttattactgccaacagtataatagttacccgatcaccttcggccaagggacacgactggagattaaac

SEQ ID NO: 3392 - DNA, 322 bp, Homo sapiens
tcctatgagctgactcagccaccctcagtgtccgtgtccccaggacagacagccagcatcacctgctctggagataaattgggggataaatatgcttgctggtatcagcagaagccaggccagtcccctgtgctggtcatctatcaagatagcaagcggccctcagggatccctgagcgattctctggctccaactctgggaacacagccactctgaccatcagcgggacccaggctatggatgaggctgactattactgtcaggcgtgggacagcagcactggggatgtcttcggaactgggaccaaggtcaccgtcctag

SEQ ID NO: 3393 - DNA, 319 bp, Homo sapiens
gacatccagctgacccagtctccatcctccctgtctgcttttgtaggggacagagtcaccatcacttgccgggcaagtcagagcattgacatctatttaaattggtatcagcaatacccaggaaaaggccctaggctcctgatccatgttgcatccactttacaaaatggggtcccatcaagattcagtggcagtggatctgggacggatttcactctcaccatcaacagtctgcaacctgaagattctgcaacttattactgtcaacagagttacaatacccctttcactttcggccctgggaccaaagtggaaatca

SEQ ID NO: 3394 - DNA, 325 bp, Homo sapiens
gaaattgtgttgacgcagtctccaggcaccctgtctttgtctccaggggaaagagccaccctctcctgcagggccagtcagagtgttagcagcaggtccttagcctggtaccagcagaaacctggccaggctcccaggctcctcatctatggtgcatccagcagggccactggcatcccagacaggttcagtggcagtgggtctgggacagacttcactctcaccatcagcagactggagcctgaagattttgcagtgtattactgtcagcaatatggtaactcactggggacgttcggccaagggaccaaggtggaaatcaaac

SEQ ID NO: 3395 - DNA, 322 bp, Homo sapiens
gacatccagatgacccagtctccatcctccctgtctgcatctgtaggagacagagtcaccatcacttgccgggcaagtcagagcattagcaactatttaaattggtatcagcagagaccagggaaagcccctaaactcctgatctatgctgcatccagtttgcaaagtggggtcccatcaaggttcagtggccgtggatctgggacagatttcactctcaccatcagcagtctgcaacctgaagattttgcaacttactactgtcaacagagttacagtacccctcggacgttcggccaagggaccaaggtggaaatcaaac

SEQ ID NO: 3396 - DNA, 322 bp, Homo sapiens
gacatccagatgacccagtctccatcctccctgtctgcatctgtaggagacagagtcaccatcacttgccgggcaagtcagagcattagtaggtatttaaattggtatcagcagaaaccagggaaagcccctaagctcctgatctatgctgcatccagtttgcaaagtggggtcccatcaaggttcagtggcagtggatctgggacagatttcactctcaccatcagcagtctgcaacctgaagattttgcaacttactactgtcaacagagttacagtaccccccgaactttcggccctgggaccaaagtggatatcaaac

SEQ ID NO: 3397 - DNA, 325 bp, Homo sapiens
gacatccagatgacccagtctccttccaccctgtctgcatctgtaggagacagagtcaccatcacttgccgggccagtcagagtattagtagctggttggcctggtatcagcagaaaccagggaaagcccctaagctcctgatctataaggcgtctagtttagaaagtggggtcccatcaaggttcagcggcagtggatctgggacagaattcactctcaccatcagcagcctgcagcctgatgattttgcaacttattactgccaacagtataatagccattctgggttcactttcggccctgggaccaaagtggatatcaaac

SEQ ID NO: 3398 - DNA, 340 bp, Homo sapiens; identical to SEQ ID NO: 803

SEQ ID NO: 3399 - DNA, 328 bp, Homo sapiens
gaaatagtgatgacgcagtctccagccaccctgtctgtgtctccaggggaaagagccaccctctcctgcagggccagtcagagtgttagcagcaacttagcctggtaccagcagaaacctggccaggctcccaggctcctcatctatggtgcatccaccagggccactggtatcccagccaggttcagtggcagtgggtctgggacagagttcactctcaccatcagcagcctgcagtctgaagattttgcagtttattactgtcagcagtataataactggcctccggggtacacttttggccaggggaccaagctggagatcaaac

SEQ ID NO: 3400 - DNA, 330 bp, Homo sapiens
cagtctgccctgactcagcctccctccgcgtccgggtctcctggacagtcagtcaccatctcctgcactggagccagcagtgacgttggtggttataactttgtctcctggtaccaacagcacccaggcaaagcccccaaactcataatttatgaggtcagtaagcggccctcaggggtccctgatcgcttctctggctccaagtctggcaacacggcctccctgaccgtctctgggctccaggctgaggatgaggctgattattactgcagctcatatgcaggcaacaacaatttggtattcggcggagggaccaagctgaccgtccta

SEQ ID NO: 3401 - DNA, 322 bp, Homo sapiens
gacatccagatgacccagtctccatcctccctgtctgcatctgtaggagacagagtcaccatcacttgccaggcgagtcaggacattagcaagtatttaaattggtatcagcagaaaccagggaaagcccctaagctcctgatctacgatgcatccaatttggaaacaggggtcccatcaagattcagtggaagtggatctgggacagattttactttcaccatcagcagcctgcagcctgaagatattgcaacattttactgtcaacaatatgattatctccctcggactttcggcggagggaccaaggtggagatcaaac

SEQ ID NO: 3402 - DNA, 325 bp, Homo sapiens
gacatccagatgacccagtctccatcctccctgtctgcatctgtaggagacagagtcaccatcacttgccaggcgagtcaggacattagcagctatttaaattggtatcagcagaaaccagggaaagcccctaagttcgtgatctacgatgcatgcaatttgcaaacaggggtcccatcagggttcagtggaagtggatctgggacagattttactttcaccatcagcagcctgcagcctgaagatattgcaacatattactgtcaacagtatgataatctcccggcgatcaccttcggccaagggacacgactggagattaaac

SEQ ID NO: 3403 - DNA, 325 bp, Homo sapiens
gaaatagtgatgacgcagtctccagccaccctgtctgtgtctccaggggaaagagccaccctctcctgcagggccagtcagagtgttagcagcaacttagcctggtaccagcagaaacctgggcaggctcccaggctcctcatctatggtgcatccaccagggccactggtatcccacccaggttcagtggcagtgggtctgggacagagttcactctcaccatcagcagcctgcagtctgaagattttgcagtttattactgtcagcagtataataactggctcgcgctcactttcggcggagggaccaaggtggagatcaaac

SEQ ID NO: 3404 - DNA, 334 bp, Homo sapiens
cagtctgccctgactcagcctgcctccgtgtctgggtctcctggacagtcgatcaccatctcctgcactggaaccagcagtgacgttggtggttataactatgtctcctggtaccaacagcacccaggcaaagcccccaaactcatgatttatgatgtcagtaatcggccctcaggggtttctaatcgcttctctggctccaagtctggcaacacggcctccctgaccatctctgggctccaggctgaggacgaggctgattattactgcaactcatatacaagcagcagcacccttgtactattcggcggagggaccaagctgaccgtcctag

SEQ ID NO: 3405 - DNA, 322 bp, Homo sapiens
gacatccagatgacccagtctccttccaccctgtctgcagctgtaggagacagagtcaccatcacttgccgggccagtcagagtgttagtagttggttggcctggtatcagcagaaaccagggaaagcccctaagctcctgatgtataaggtgtctactttagaaagtggggtcccctcaaggttcagcggcagtggatctgggacagaattcactctcaccatcagcaacctgcagcctgatgattttgcaacttatcactgccaacagtattatagttattccctcactttcggcggagggaccaaggtggagatgaaac

SEQ ID NO: 3406 - DNA, 325 bp, Homo sapiens
gacatccagatgacccagtctccatcctccctgtctgcatctgtaggagacagagtcaccatcacttgccaggcgagtcaggacattagcaactatttaaattggtatcagcagaaaccagggaaagcccctaagctcctgatctacgatgcatccaatttggaaacaggggtcccatcaaggttcagtggaagtggatctgggacagattttactttcaccatcagcagcctgcagcctgaagatattgcaacatattactgtcaacagtatgataatctccccatattcactttcggccctgggaccaaagtggatatcaaac

SEQ ID NO: 3407 - DNA, 340 bp, Homo sapiens
gacatcgtgatgacccagtctccagactccctggctgtgtctctgggcgagagggccaccatcaactgcaagtccagccagagtgttttatacagctccaacaataagaactacttagcttggtaccagcagaaaccaggacagcctcctaagctgctcatttactgggcatctacccgggaatccggggtccctgaccgattcagtggcagcgggtctgggacagatttcactctcaccatcagcagcctgcaggctgaagatgtggcagtttattactgtcagcaatattatagtactcctctgacgttcggccaagggaccaaggtggaaatcaaac

SEQ ID NO: 3408 - DNA, 337 bp, Homo sapiens
cagtctgtgctgacgcagccgccctcagtgtctggggccccagggcagagggtcaccatctcctgcactgggagcagctccaacatcggggcaggttatgatgtacactggtaccagcagcttccaggaacagcccccaaactcctcatctatggtaacagcaatcggccctcaggggtccctgaccgattctctggctccaagtctggcacctcagcctccctggccatcactgggctccaggctgaggatgaggctgattattactgccagtcctatgacagcagcctgagtgcccctgtggtattcggcggagggaccaagctgaccgtcctag

SEQ ID NO: 3409 - DNA, 322 bp, Homo sapiens
gacatccagatgacccagtctccatcctccctgtctgcatctgtaggagacagagtcaccatcacttgccgggcgagtcagggcattagcaattatttagcctggtatcagcagaaaccagggaaagttcctaagctcctgatctatgctgcatccactttgcaatcaggggtcccatctcggttcagtggcagtggatctgggacagatttcactctcaccatcagcagcctgcagcctgaagatgttgcaacttattactgtcaaaagtataacagtgcccccctcactttcggcggagggaccaaggtggagatcaaac

SEQ ID NO: 3410 - DNA, 337 bp, Homo sapiens
gatgttgtgatgactcagtctccactctccgtgcccgtcacccttggacagccggcctccatctcctgcaggtctagtcaaagcctcgtatacactgatggaaaaacctacttgaattggtttcagcagaggccaggccaatctccaaggcgcctcatttacaaggtttctaaccgggactctggggtcccagacagattcagcggcagtgggtcaggcactgatttcacactgaaaatcagcagggtggaggctgaggatgttggggtttattactgcatgcaaggtacacactggcctccctcattcggccaagggaccaaggtggaaatcaaac

SEQ ID NO: 3411 - DNA, 325 bp, Homo sapiens
gaaatagtgatgacgcagtctccagcctccctgtctgtgtctccaggggaaagagtcaccctctcctgcagggccagtcagagtgttggcagctacttagcctggtaccagcagaaacctgggcaggctcccaggctcctcatgtatggtacatccaccagggccactggtatcccagccaggttcagtggcagtgggtctgggacagagttcactctcaccatcagcagcctgcagtctgaagactttgcaatttattactgtcagcagtataatgactggcctccactcactttcggcggagggaccaaggtggagatcaaac

SEQ ID NO: 3412 - DNA, 325 bp, Homo sapiens
tcctatgtgctgactcagccaccctcagtgtcagtggccccaggaaagacggccaggattacctgtggggaaaacaacattggaagtaaaagtgtacactggtaccagcagaagccaggccaggcccctgtgctggtcatctattatgatagtgaccggccctcagggatccctgagcgattctctggctccaactctgggaacacggccaccctgaccatcagcagggtcgaagccggggatgaggccgactattattgtcaggtgtgggatagtagtactgatcatggggtgttcggcggagggaccaagctgaccgtcctag

SEQ ID NO: 3413 - DNA, 331 bp, Homo sapiens
cagtctgtgctgactcagccaccctcagcgtctgggacccccgggcagagggtcaccatctcttgttctggaagcagctccaacatcggaagtaatactgtaaactggtacaagcagctcccaggaacggcccccaaactcctcatctatagtaataatcagcggccctcaggggtccctgaccgattctctggctccaagtctggcacctcagcctccctggccatcagtgggctccagtctgaggatgaggctgattattactgtgcagcatgggatgacagcctgaatggttgggtgttcggcggagggaccaagctgaccgtcctag

SEQ ID NO: 3414 - DNA, 325 bp, Homo sapiens
gaagttgtgttgacgcagtctccaggcaccctgtctttgtctccaggggaaagagccaccctctcctgcagggccagtcagagtgttagcagcagctacttagcctggtaccagcagaaacctggccaggctccccggctcctcatctatggtgcatccagcagggccactggcatcccagacaggttcagtggcagtgggtctgggacagacttcactctcaccatcagcagactggagcctgaagattttgcagtgtattactgtcagcagtatggtagctcaccccggacgttcggccaagggaccaaggtggaaatcaaac

SEQ ID NO: 3415 - DNA, 322 bp, Homo sapiens
gacatccagatgacccagtctccatcctccctgtctgcatctgtaggagacagagtcaccatcacttgccaggcgagtcaggacattaccaactatttaaattggtatcagcagaaaccagggaaagcccctaagctcctgatctacgatgcatccaatttggaaacaggggtcccatcaaggttcagtggaagtggatctgggacagattttactttcaccatcagcagcctgcagcctgaagatattgcaacatattactgtcaacagtatgataatctcccgatcaccttcggccaagggacacgactggagattaaac

SEQ ID NO: 3416 - DNA, 322 bp, Homo sapiens
gaagttgtgttgacacagtctccagccaccctgtctttgtctccaggggaaagagccaccctctcctgcagggccagtcagagtgttagcaactacttagcctggtaccaacagaaacctggccaggctcccaggctcctcatctatgatgcatccaacagggccactggcatcccagccaggttcagtggcagtgggtctgggacagacttcactctcaccatcagcagcctagagcctgaagattttgcaatttattactgtcagcagcgtagcaactggcctctcactttcggccctgggaccaaagtggatctcaaac

SEQ ID NO: 3417 - DNA, 325 bp, Homo sapiens
gaaattgtgttgacacagtctccagtcaccctgtctttgtctccaggggaaagagccaccctctcctgcagggccagtcagagtgttagcagctacttagcctggtaccaacagaagcctggccgggctcccaggctcctcatctatgatgcatccagcagggccactggcatcccagccaggttcagtggcagtgggtctgggacagacttcactctcaccatcagcagcctagagcctgaagattttgcagtttattactgtcagcagcgtggcaactggcctccgtacacttttggccaggggaccaagctggagatcaaac

SEQ ID NO: 3418 - DNA, 325 bp, Homo sapiens
gaaattgtgttgacgcagtctccaggcgccgtgtctttgtctccaggggaaagagccaccctctcctgcagggccagtcagagtgttagcagcagctacttagcctggtaccagcagaaacctggccaggctcccaggctcctcatctatggtgcatccagcagggccactggcatcccagacaggttcagtggcagtgggtctgggacagacttcactctcaccatcagcagactggagcctgaagatgttgcagtgtattactgtcagcactatggtagttcacctaagactttcggcggagggaccaaggtggagatcaaac

SEQ ID NO: 3419 - DNA, 323 bp, Homo sapiens
gacatccagatgacccagtctccatcctccctgtctgcatctgtaggagacagagtcaccatcacttgccgggcaagtcagagcattagcagctatttaaattggtatcagcagaaaccagggaaagcccctaagctcctgatctatgctgcatccagtttgcaaagtggggtcccatcaaggttcagtggcagtggatctgggacagatttcactctcaccatcagcagtctgcaacctgaagattttgcaacttactactgtcaacagagttacagtacccttgtgcacttttggccaggggaccaagctggagatcaaac

SEQ ID NO: 3420 - DNA, 334 bp, Homo sapiens
cagtctgccctgactcagcctgcctccgtgtctgggtctcctggacagtcgatcaccatctcctgcactggaaccagcggtgacattggtgtttataattatgtctcctggtaccaacagcacccaggcaaagcccccaaactcatgatttatgaggtcagtaatcggccctcaggggtttctaatcgcttctctggctccaagtctggcaacacggcctccctgaccatctctgggctccaggctgaggacgaggctgattattactgcagctcatatacaagcagcagcactctttgggtgttcggcggagggaccaaggtggccgtcctag

SEQ ID NO: 3421 - DNA, 331 bp, Homo sapiens
cagtctgccctgactcagcctgcctccgtgtctgggtctcctggacagtcgatcaccatctcctgcactgggaccagcagtgacgttggtggttataactttgtctcctggtaccaacagcacccaggcaaagcccccaaactcatgatttatgaggtcaataatcggccctcaggaatttctaatcgcttctctggctccaagtctggcaacacggcctccctgaccatctctgggctccaggctgaggacgaggctgattattactgcagctcatatacaagcaggagcaccgtggcactcggcggagggaccaagctgaccgtcctag

SEQ ID NO: 3422 - DNA, 340 bp, Homo sapiens
gacatcgtgatgacccagtctccagactccctggctgtgtctctgggcgagagggccaccatcaactgcaagtccagccagagtgttttatacagctccaacaataagaacttcttaacttggtaccagcagaaaccaggacagcctcctaagctgctcatttactgggcatctacccgggaatccggggtccctgaccgattcagtggcagcgggtctgggacagatttcactctcaccatcagcagcctgcaggctgaagatgtggcagtttattactgtcagcaatattatagtactcctccggcgttcggccaagggaccaaggtggaaatcaaac

SEQ ID NO: 3423 - DNA, 325 bp, Homo sapiens
gaaatagtgatgacgcagtctccagccaccctgtctgtgtctccaggggaaagagccaccctctcctgcagggccagtcagagtgttagcagcaacttagcctggtaccagcagaaacctgggcaggctcccaggctcctcatgtatggtgcatccaccagggccactggtatcccagccaggttcagtggcagtgggtctgggacagagttcactctcaccatcagcagcctgcagtctgaagattttgcagtttattactgtcagcagtataatcactggcccccgtggacgttcggcctagggaccaaggtggaaatcaaac

SEQ ID NO: 3424 - DNA, 322 bp, Homo sapiens
gacatccagatgacccagtctccttccaccctgtctgcatctgtaggagacagagtcaccatcacttgccgggccagtcagagtattagtagctggttggcctggtatcagcagaaaccagggaaagcccccaagctcctgatctataaggcgtctagtttagaaagtggggtcccatcaaggctcagaggcagtggatctgggacagaattcactctcaccatcagcagcctgcagcctgatgattttgcaacttattactgccagcagtataatagttacccgtacacttttggccaggggaccaagctggagttcaaac

SEQ ID NO: 3425 - DNA, 328 bp, Homo sapiens
gacatccagttgacccagtctccatccttcctgtctgcatctgtaggagacagagtcaccatcacttgccgggccagtcagggcattagcagttatttagcctggtatcagcaaaaaccagggaaagcccctaagctcctgatctatgctgcatccactttgcaaagtggggtcccatcaaggttcagcggcagtggatctgggacagaattcactctcacaatcagcagcctgcagcctgaagattttgcaacttattactgtcaacagcttaatagttaccccccccgattcactttcggccctgggaccaaagtggatatcaaac

SEQ ID NO: 3426 - DNA, 322 bp, Homo sapiens
gacatccagatgacccagtctccatcttctgtgtctgcatctgtaggagacagagtcaccatcacttgtcgggcgagtcagggtattagcagctggttagcctggtatcagcagaaaccggggaaagcccctaagctcctgatctatgctgcatccagtttgcaaagtggggtcccatcaaggttcagcggcagtggatctgggacagatttcactctcactatcagcagcctgcagcctgaagattttgcagcttactattgtcaacaggctaacagtcccctattcactttcggccctgggaccaaagtggatatcaaac

SEQ ID NO: 3427 - DNA, 334 bp, Homo sapiens
cagtctgtgctgacgcagccgccctcagtgtctggggccccagggcagagggtcaccatctcctgcactgggagcagctccaacatcggggcaggttatgatgtacactggtaccagcaacttccaggaacagcccccaaactcctcatctatggtaacaccaatcggccctcaggggtccctgaccgattctctggctccaagtctggcacctcagcctccctggccatcactgggctccaggctgaagatgaggctgattattactgccagtcctatgacagcagcctgagtgagggagtcttcggaactgggaccaaggtcaccgtcctag

SEQ ID NO: 3428 - DNA, 325 bp, Homo sapiens
gaaattgtgttgacgcagtctccaggcaccctgtctttgtctccaggggaaagagccaccctctcctgcagggccagtcagagtgttagcagcagatacttagcctggtaccagcagaaacctggccaggctcccaggctcctcatctatggtgcatccagcagggccactggcatcccagacaggttcagtggcagtgggtctgggacagacttcactctcaccatcagcagactggagcctgaagattttgcagtgtattactgtcagcagtatggtagctcacccttcactttcggcggagggaccaaggtggagatcaaac

SEQ ID NO: 3429 - DNA, 331 bp, Homo sapiens
cagtctgtgctgacgcagccgccctcagtgtctggggccccagggcagagagtcaccatctcctgcactgggagcagctccaacatcggggcaggttatgatgtacactggtaccagcagcttccaggaacagcccccaaactcctcatctatggtaacagcaatcggccctcaggggtccctgaccgattctctggctccaagtctggcacctcagcctccctggccatcactgggctccaggctgaggatgaggctgattatcactgccagtcctatgacaacagcctgagtgagggagtcttcggaactgggaccaaggtcaccgtcc

SEQ ID NO: 3430 - DNA, 322 bp, Homo sapiens
gacatccagatgacccagtctccatcctccctgtctgcatctgtaggagacagagtcaccatcacttgccaggcgagtcaggacattagcaactatttaaattggtatcagcagaaaccagggaaagcccctaagctcctgatctacgatgcatccaatttggaaacaggggtcccatcaaggatcagtggaagtggatctgggacagattttactttcaccatcagcagcctgcagcctgaagatattgcaacatattactgtcaacagtatgataatctccctctcactttcggccctgggaccaaagtggatatcaaac

SEQ ID NO: 3431 - DNA, 337 bp, Homo sapiens
aattttatgctgactcagccgcactctgtgtcggagtctccggggaagacggtaaccatctcctgcacccgcagcagtggcagcattgccagcaactatgtgcagtggtaccagcagcgcccgggcagtgcccccaccactgttatctatgaggatgaccaaagaccctctggggtccctgatcggttctctggctccatcgacagctcctccaactctgcctccctcaccatctctggactgaagactgaggacgaggctgactactactgtcagtcttatgataccagcaatccccatgtggtattcggcggtgggaccaagctgaccgtcctag

SEQ ID NO: 3432 - DNA, 325 bp, Homo sapiens
gacatccagatgacccagtctccatcctccctgtctgcatctgtaggagacagagtcaccatcacttgccgggcaagtcagagcattagcagctatttaaattggtatcagcagaaaccagggaaagcccctaagctcctgatctatgctgcatccagtttgcaaagtggggtcccatcaaggttcagtggcagtggatctgggacagatttcactctcaccatcagcagtctgcaacctgaagattttgcaacttactactgtcaacaaagttacagtaccctcctgctcactttcggcggagggaccaaggtagagatcaaac

SEQ ID NO: 3433 - DNA, 350 bp, Homo sapiens
caggctgtgctgactcagccgtcttccctctctgcatctcctggagcatcagccagtctcacctgcaccttgtgcagtggcatcaatgttggtacctacaggatatactggtaccagcagaagccagggagtcctccccagtatctcctgaggtacaaatcagactcagataagcagcagggctctggagtccccagccgcttctctggatccaaagatgcttcggccaatgcagggattttactcatctctgggctccagtctgaggatgaggctgactattactgtatgatttggcacagcagcgcccccttatgtcttcggaactgggaccaaggtcaccgtcctag

SEQ ID NO: 3434 - DNA, 325 bp, Homo sapiens
gaaatcgtgttgacgcagtctccaggcaccctgtctttgtctccaggggaaagagccaccctctcctgcagggccagtcagagtgttgccggcacctacttagcctggtaccagcagaaacgtggccagtctcccagcctcctcatctacggtgcatccagcagggccactggcatcccagacaggttcagtggcagtgggtctgggacagacttcactctcaccatcagcagactggagcctgaagattttgcagtgtattactgtcagcagtatggtagctcacctcctacttttggccaggggaccaagctggagatcaaac

SEQ ID NO: 3435 - DNA, 331 bp, Homo sapiens
cagtctgtgctgactcagccaccctcagcgtctgggacccccgggcagagggtcaccatctcttgttctggaggcaactccaacatcggaagcagtactgtaaactggtaccagcaactcccaggaacggcccccaaactcctcatctatagtagtgatcagcggccctcaggggtccctgaccgattctctggctccaagtctggcacctcagcctccctggccatcagtaggctccagtctgaggatgaggctgattattactgtgcagcatgggatgacagcctgaatggtccggtgttcggcggagggaccaagctgaccgtcctag

SEQ ID NO: 3436 - DNA, 322 bp, Homo sapiens
gacatccagatgacccagtctccatcctccctgtctgcatctgtaggagacagagtcaccatcacttgccgggcaagtcagagcataagcagcattttaaattggtatcagcagaaaccagggaaagcccctaagctcctgatctatgctgcatccagtttgcatagtggggtcccatcaaggttcagcggcagtggttttgggacagatttcactctcatcatcaacagtctgcaacctgaagattttgcaacttactactgtcaacagagttacaatacccctcggacgttcggccaagggaccaaggtggaagtcaaac

SEQ ID NO: 3437 - DNA, 337 bp, Homo sapiens
aattttatgctgactcagccccactctgtgtcggagtctccggggaagacggtaaccatctcctgcacccgcagcagtggcagcattgccagcaactatgtgcagtggtaccagcagcgcccgggcagttcccccaccactgtgatctatgaggatcaccaaagaccctctggggtccctgatcggttctctggctccatcgacagctcctccaactctgcctccctcaccatctctggactgaagactgaggacgaggctgactactactgtcagtcttatgatagcagcaatcatgggggggtgttcggcggagggaccaagctgaccgtcctag

SEQ ID NO: 3438 - DNA, 325 bp, Homo sapiens
gaaatagtgatgacgcagtctccagccaccctgtctgtgtctccaggggaaagagccaccctctcctgcagggccagtcagagtgttagcagcaacttagcctggtaccagcagaaacctggccaggctcccaggctcctcatctatggtgcatccaccagggccactggtatcccagccaggttcagtggcagtgggtctgggacagagttcactctcaccatcagcagcctgcagtctgaagattttgcagtttattactgtcagcagtataataactggcctccgctcactttcggcggagggaccaaggtggagatcaaac

SEQ ID NO: 3439 - DNA, 328 bp, Homo sapiens
gaaattgtgttgacgcagtctccaggcaccctgtctttgtctccaggggaaagagccaccctctcctgcagggccagtcagagtgttagcagcagctacttagcctggtaccagcagaaacctggccaggctcccaggctcctcatctatggtgcatccagcagggccactggcatcccagacaaattcagtggcagtgggtctgggacagacttcactctcaccatcagcagactggagcctgaagattttgcagtgtattactgtcagcagtatggtagctcacctccgtacacttttggccaggggaccaagctggagatcaaac

SEQ ID NO: 3440 - DNA, 337 bp, Homo sapiens; identical to SEQ ID NO: 2598

SEQ ID NO: 3441 - DNA, 331 bp, Homo sapiens
cagtctgtgttgacgcagccgccctctgtgtctgcggccccaggacagaaggtcaccgtctcctgctctggaagcagctccaacattgggaataattatgtatcctggtatcagcacctcccaggagcagcccccaaactcctcatttatgacaataatgagcgaccctcagggattcctgatcgattctctggctccaagtctggcacgtcagccaccctgggcatcaccggactccagactggggacgaggccgattattattgcggaacgtgggatagcagcctgaattctgtgctattcggcggagggaccaagctgaccgtcctag

SEQ ID NO: 3442 - DNA, 322 bp, Homo sapiens
gaaatagtgatgacgcagtctccagccaccctgtctgtgtctccaggggaaagagccaccctctcctgcagggccagtcagagtgttagcagcaacttagcctggtaccagcagaaacctgggcaggctcccaggctcctcatctatggtgcatccaccagggccactggtatcccagccaggttcagtggcagtgggtctgggacagagttcactctcaccatcagcagcctgcagtctgaagattttgcagtttattactgtcagcagtataataactggctatggacgttcggccaagggaccaaggtggaaatcaaac

SEQ ID NO: 3443 - DNA, 331 bp, Homo sapiens
cagtctgtgctgactcagccaccctcagcgtctgggacccccgggcagagggtcaccatctcttgttctggaagcagctccaacatcggaagtaatactgtaaactggtaccagcagctcccaggaacggcccccaaactcgtcatctatagtaataatcagcggccctcaggggtccctgaccgattctctggctccaagtctggcacctcagcctccctggccatcagtgggctccagtctgaggatgaggctgattattactgtgcagcatgggatgacagcctgaatgctctggtattcggcggagggaccaagctgaccgtcctag

SEQ ID NO: 3444 - DNA, 331 bp, Homo sapiens
cagtctgtgctgactcagccaccctcagcgtctgggacccccgggcagagggtcaccatctcttgttctggaagcagctccaacatcggaagtaatactgtaaactggtaccagcagctcccaggaacggcccccaaactcctcatctatagtaataatcagcggccctcaggggtccctgaccgattctctggctccaagtctggcacctcagcctccctggccatcagtgggctccagtctgaggatgaggctgattattactgtgcagcatgggatgacagcctgagtgggtgtgtcttcggaactgggaccaaggtcaccgtcctag

SEQ ID NO: 3445 - DNA, 322 bp, Homo sapiens
gaaattgtgttgacgcagtctccaggcaccctgtctttgtctccaggggaaagagccaccctctcctgcagggccagtcagagtgttagcagcagctacttagcctggtaccagcagaaacctggccaggctcccaggctcctcatctatggtgcatccagcagggccactggcatcccagacaggttcagtggcagtgggtctgggacagacttcactctcaccatcagcagactggagcctgaagattttgcagtgtattactgtcagcagtatggtagctcccccactttcggcggagggaccaaggtggagatcaaac

SEQ ID NO: 3446 - DNA, 322 bp, Homo sapiens
gaaatagtgatgacgcagtctccagccaccctgtctgtgtctccaggggaaagagccaccctcacctgcagggccagtgagagtgttggtagtaacttagcctggtaccagcagaaacctggccaggctcccaggctcctcatctatggcgcatccaccagggccactggtatcccagccaggttcagtggcagtgggtctgggacagagttcactctcaccatcagctacctgcagtctgaagatcttgcagtttattactgtcagcagtataataactggcccctccctttcggcggagggaccaaggtggagatcaaac

SEQ ID NO: 3447 - DNA, 325 bp, Homo sapiens
gaaattgtgttgacgcagtctccaggcaccctgtctttgtctccaggggaaagagccaccctctcctgcagggccagtcagagtgttagaagcagctacttagcctggtaccagcagaaacctggccaggctcccaggctcctcatctatggtgcatccagcagggccactggcatcccagacaggttcagtggcagtgggtctgggacagacttcactctaatcatcagcagactggagcctgaagattttgcagtgtattactgtcagcagtatggtagctcactggggacttttggccaggggaccaagctggagatcaaac

SEQ ID NO: 3448 - DNA, 341 bp, Homo sapiens
cagtctgtgctgacgcagccgccctcagtgtctggggccccagggcagagggtcaccatctcctgcactgagagcagctccaacatcggggcaggttatgatgtacactggtaccagcaacttccaggaacagcccccaaactcctcatctatgataatagcaatcggccctcaggggtccctgaccgattctctggctccaagtctggcacctcagcctccctggccatcactgggctccaggctgaggatgaggctgattatttctgccagtcctatgacagcagcctgagtggtcggggctatgtggtattcggcggagggaccaagctgaccgtcct

SEQ ID NO: 3449 - DNA, 331 bp, Homo sapiens
cagtctgccctgactcagcctgcctccgtgtctgggtctcctggacagtcgatcaccatctcctgcactggaaccagcagtgacgttggtggttataactatgtctcctggtaccaacagcacccaggcaaagcccccaaactcatgatttatgaggtcagtaatcggccctcaggggtttctaatcgcttctctggctccaagtctggcaacacggcctccctgaccatctctgggctccaggctgaggacgaggctgattattactgcagctcatatacaagcagcagcactcgggtattcggcggagggaccaagctgaccgtcctag

SEQ ID NO: 3450 - DNA, 328 bp, Homo sapiens
gaaattgtgttgacgcagtctccaggcaccctgtctttgtctccaggggaaagagccaccctctcctgcagggccagtcagagtgttagcagcagctacttagcctggtatcagcagaaacctggccaggctcccaggctcctcatctatggtgcatccagcagggccactggcatcccagacaggttcagtggcagtgggtctgggacagacttcactctcaccatcagcagactggagcctgaagattttgcagtgtattactgtcagcagtatggtagctcacctccgtacacttttggccaggggaccaagctggagatcaaac

SEQ ID NO: 3451 - DNA, 328 bp, Homo sapiens
gaaattgtgttgacacagtctccagccaccctgtctttgtctccaggggaaagagccaccctctcctgcagggccagtcagagtgttagcagctacttagcctggtaccaacagaaacctggccaggctcccaggctcctcatctatgatgcatccaacagggccactggcatcccagccaggttcagtggcagtgggtctgggacagacttcactctcaccatcagcagcctagagcctgaagattttgcagtttattactgtcagcagcgtagcaactggcctccctcgatcaccttcggccaagggacacgactggagattaaac

SEQ ID NO: 3452 - DNA, 322 bp, Homo sapiens
gccatccggatgacccagtctccatcctcattctctgcatctacaggagacagagtcaccatcacttgtcgggcgagtcagggtattagcagttatttagcctggtatcagcaaaaaccagggaaagcccctaagctcctgatctatgctgcatccactttgcaaagtggggtcccatcaaggttcagcggcagtggatctgggacagatttcactctcaccatcagctgcctgcagtctgaagattttgcaacttattactgtcaacagtattatagttacccgtggacgttcggccaagggaccaaggtggaaatcaaac

SEQ ID NO: 3453 - DNA, 339 bp, Homo sapiens
gagattgtgttgacccagactccactctccttgtctatcacccctggagagcaggcctccatgtcctggaggtctagtcagagcctcctgcatagcggtgagtacacctcctaatattggtttctgcagacagacaggccagtctccacaagtcctgatctctgaagtttccaaccgactctctggagagccagatcggtgcagtggcagcgggtcagggacagacttcacaatgaaaatcagccggtggggtctgaggatgctggagtttacttctgcttgcaagatgcacaagatcttccgtcaccttcggccaagggacacgactggagattaaac

SEQ ID NO: 3454 - DNA, 325 bp, Homo sapiens
gaaattgtgttgacgcagtctccaggcaccctgtctttgtctccaggggaaagagccaccctctcctgcagggccagtcagagtgttaggagcagctacttagcctggtaccagcagaaacctggccaggctcccaggctcctcatctatggtgcatccagcagggccactggcatcccagacaggttcagtggcagtgggtctgggacagacttcactctcaccatcagcagactggagcctgaagattttgcagtgtattactgtcagcagtatggtagctcaccgtggacgttcggccaagggaccaaggtggaaatcaaac

SEQ ID NO: 3455 - DNA, 325 bp, Homo sapiens
gaaattgtgttgacgcagtctccaggcaccctgtctttgtctccaggggaaagagccaccctctcctgcagggccagtcagagtgttaggagcagctacttagcctggtaccagcagaaacctggccaggctcccaggctcctcatctatggtgcatccagcagggccactggcatcccagacaggttcagtggcagtgggtctgggacagacttcactctcaccatcagcagactggagcctgaagattttgcagtatattactgtcagcagtatggtagctcactgtggacgttcggccaagggaccaaggtggaaatcaaac

SEQ ID NO: 3456 - DNA, 325 bp, Homo sapiens
gaaattgtgttgacgcagtctccaggcaccctgtctttgtctccaggggaaagagccaccctctcctgcagggccagtcagagtgttagcaggagctacttagcctggtaccagcagaaacctggccaggctcccaggctcctcatctatggtgcatccagcagggccactggcatcccagacaggttcagtggcagtgggtctgggacagacttcactctcaccatcagcagactggagcctgaagattttgcagtgtattactgtcagcagtatggtagctcaccgatcaccttcggccaagggacacgactggagattaaac

SEQ ID NO: 3457 - DNA, 325 bp, Homo sapiens
gaaattgtgttgacgcagtctccaggcaccctgtctttgtctccaggggaaagagccaccctctcctgcagggccagtcagagtgttagcaggaggtacttagcctggtaccagcagaaacctggccaggctcccaggctcctcatctatggtgcatccagcagggccactggcatcccagacaggttcagtggcagtgggtctgggacagacttcactctcaccatcagcagactggagcctgaagattttgcagtgtattcctgtcagcagtatggtagctcatcgtggacgttcggccaagggaccaaggtggaaatcaaac

SEQ ID NO: 3458 - DNA, 331 bp, Homo sapiens
aattttatgctgactcagccccactctgtgtcggagtctccggggaagacggtaaccatctcctgcacccgcagcagtggcagcatttccagcaactatgtacagtggtaccagcagcgcccgggcacttcccccaccactgtgatctatgaggatcatcgaagaccctctggggtccctgatcggttctctggttccatcgacagttcctccaactctgcctccctcaccgtctctgggctgaagactgaggacgaggctgactactactgtcagtcttatgatggcagcagtcaggtgttcggcggagggaccaagctgaccgtcctag

SEQ ID NO: 3459 - DNA, 322 bp, Homo sapiens; identical to SEQ ID NO: 1779

SEQ ID NO: 3460 - DNA, 322 bp, Homo sapiens
tcctatgagctgactcagccaccctcagtgtccgtgtccccaggacagacagccagcatcacctgctctggagataaattgggggataaatatgcttgctggtatcagcagaagccaggccagtcccctgtgctggtcatctatcaagatagcaggcggccctcagggatccctgagcgattctctggctccaactctggaaacacagccactctgaccatcagcgggacccaggctatggatgaggctgactattactgtcaggcgtgggacagcagcaccccaagggtattcggcggagggaccaagctgaccgtcctag

SEQ ID NO: 3461 - DNA, 336 bp, Homo sapiens
cagtcttccctgactcagcctccctccgtgtccgggtctcctggacagtcagtcaccatctcctgcactggaaccagcagtgacgttggtagttatgaccgtgtctcctggtaccagcagcccccaggcacagcccccaaactcataatttatgaggtcactaatcggccctcaggggtccctgatcgcttctctgggtccaagtctggcaacacggcctccctgaccatctctgggctccaggctgaggacgaggctgattattactgcagctcatatacaagtatcagcactttagatgtgatattcggcggagggaccaagctggccgtccta

SEQ ID NO: 3462 - DNA, 322 bp, Homo sapiens
gacatccagatgacccagtctccatcttccgtgtctgcatctgtaggagacagagtcaccatcacttgtcgggcgagtcagggtattagcagctggttagcctggtatcagcagaaaccagggaaagcccctaagctcctgatctatgctgcatccagtttgcaaagtggggtcccatcaaggttcagcggcagtggatctgggacagatttcactctcaccatcagcagcctgcagcctgaagattttgcaacttactattgtcaacaggctaacagtttccctccgacttttggccaggggaccaagctggagatcaaac

SEQ ID NO: 3463 - DNA, 319 bp, Homo sapiens; identical to SEQ ID NO: 1688

SEQ ID NO: 3464 - DNA, 320 bp, Homo sapiens
catccagatgacccagtctccatcctccctgtctgcatctgtaggagacagagtcaccatcacttgccaggcgagtcaggacattagcaactatttaaattggtatcagcagaaaccagggaaagcccctgagctcatgatctacgatgcatccaatttggaaacaggggtcccatcaaggttcagtggaagtggatctgggacagattttactttcaccatcagcagcctgcagcctgaagatattgcaacatattactgtcaacagtatgataatctcccgatcaccttcggccaagggacacgcctggagattaaac

SEQ ID NO: 3465 - DNA, 337 bp, Homo sapiens
cagtctgccctgactcagcctgcctccgtgtctgggtctcctggacagtcgatcaccatctcctgcactggaaccagcagtgacgttgatggttataactatgtctcctggtaccaacagcacccaggcaaagcccccaaactcatgatttatgatgtcagtaatcggccctcaggggtttctaatcgcttctctggctccaagtctggcaacacggcctccctgaccatctctgggctccaggctgaggacgaggctgattattactgcagctcatatacaagcagcagcaccccccatgtggtgttcggcggagggaccaagctgaccgtcctag

SEQ ID NO: 3466 - DNA, 325 bp, Homo sapiens
tcctatgagctgactcagccaccctcagtgtccgtgtccccaggacagacagccagcatcacctgctctggagataaattgggggataaatatgcttgctggtatcagcagaagccaggccagtcccctgtattggtcatctatcaagataccaagcggccctcagggatccctgagcgattctctggctccaactctgggaacacagccactctgaccatcagcgggacccaggctatggatgaggctgactattactgtcaggcgtgggacagcagcactgcttcttatgtcttcggagctgggaccaaggtcaccgtcctag

SEQ ID NO: 3467 - DNA, 337 bp, Homo sapiens
aattttatgctgactcagccgcactctgtgtcggagtctccggggaagacggtaaccatctcctgcacccgcagcagtggcagcattgccagcaactatgtgcagtggtaccagcagcgcccgggcagtgcccccaccactgtgatctatgaggataaccaaagaccctctggggtccctgatcggttctctggctccatcgacagctcctccaactctgcctccctcaccatctctggactgaagactgaggacgaggctgactactactgtcagtcttatgatagcagcaatcaaaattgggtgttcggcggagggaccaagctgaccgtcctag

SEQ ID NO: 3468 - DNA, 325 bp, Homo sapiens
gaaattgtgttggcgcagtctccaggcaccctgtctttgtctccaggggaaagagccaccctctcctgcagggccagccagagtgttagcggcaactacttagcctggtaccagcagaaacctggccaggctcccaggctcctcatctatggtgcatctagcagggccactggcatcccagacaggttcagtggcagtgggtctgggacagacttcactctcaccatcagcagactggagcctgaagattttgcagtgtattactgtcagcagtatggtagctcacctatcaccttcgcccaagggacacgactggagattaaac

SEQ ID NO: 3469 - DNA, 322 bp, Homo sapiens
tcctatgagctgactcagccaccctcagtgtccgtgtccccaggacagacagccagcatcacctgctctggagataaattgggggataaatatgcttgctggtatcagcagaagccaggccagtcccctgtcctggtcatctatcaagatagcaagcggccctcagggatccctgagcgattctctggctccaactctgggaacacagccactctgaccatcagcgggacccaggctatggatgaggctgactattactgtcaggcgtgggacagcagcactgattgggtgttcggcggagggaccaagctgaccgtcctag

SEQ ID NO: 3470 - DNA, 322 bp, Homo sapiens; identical to SEQ ID NO: 2631

SEQ ID NO: 3471 - DNA, 325 bp, Homo sapiens
gacatccagatgacccagtctccatcctccctgtctgcatctgtaggagacagagtcaccatcacttgccgggcaagtcagagcattagtagttatttaaattggtatcagcagaaaccagggaaagcccctgaactcctgatctatgctgcatccagtttgcaaagtggggtcccatcaaggttcagtggcagtggatctgggacagctttcactctcaccatcagcagtctgcaacctgaagattttgcaacttactactgtcaacagagttacagtacccgctcgatcaccttcggccaagggacacgactggagattaaac

SEQ ID NO: 3472 - DNA, 325 bp, Homo sapiens
gaaattgtgttgacgcagtcttcaggcaccctgtctttgtctccaggggaaagagccaccctctcctgcagggccagtcagagtgttagcagcagctacttagcctggtaccagcagaaacctggccaggctcccaggctcctcatctatggtgcatccagcagggccactggcatcccagacaggttcagtggcagtgggtctgggacagacttcactctcaccatcagcagactggagcctgaagattttgcagtgtattactgtcagcagtatggtagctctccgtggacgttcggccaagggaccaaggtggaaatcaaac

SEQ ID NO: 3473 - DNA, 322 bp, Homo sapiens
tcctatgagctgactcagccaccctcagtgtccgtgtccccaggacagacagccagcatcacctgctctggagataaattgggggataaatatgcttgctggtatcagcagaagccaggccagtcccctgtgctggtcatctatcaagatagcaagcggccctcagggatccctgagcgattctctggctccaactctgggaacacagccactctgaccatcagcgggacccaggctatggatgaggctgactattactgtcaggcgtgggacagcagcactttttatgtcttcggaactgggaccaaggtcaccgtcctag

SEQ ID NO: 3474 - DNA, 337 bp, Homo sapiens
gatgttgtgatgactcagtctccactctccctgcccgtcacccttggacagccggcctccatctcctgcaggtctagtcaaagcctcgtatacagtgatggaaacacctacttgaattggtttcagcagaggccaggccaatctccaaggcgcctaatttataaggtttctaaccgggactctggggtcccagacagattcagcggcagtgggtcaggcactgatttcacactgaaaatcagcagggtggaggctgaggatgttggggtttattactgcatgcaaggtacacactggccctggacgttcggccaagggaccaaggtggaaatcaaac

SEQ ID NO: 3475 - DNA, 337 bp, Homo sapiens
gatattgtgatgactcagtctccactctccctgcccgtcacccctggagagccggcctccatctcctgcaggtctagtcagagcctcctgcatagtagtggatacaactatttggattggtacctgcagaagccagggcagtctccacagctcctgatctatttgggttctaatcgggcctccggggtccctgacaggttcagtggcagtggatcaggcacagattttacactgagaatcagcagagtggaggctgaggatgttggggtttattactgcatgcaagctctacaaactcctcagactttcggcggagggaccaaggtggagatcaaac

SEQ ID NO: 3476 - DNA, 334 bp, Homo sapiens
cagtctgccctgactcagcctgcctccgtgtctgggtctcctggacagtcgatcaccatctcctgcactggaaccagcagtgacgttggtggttataactatgtctcctggtaccaacagcacccaggcaaagcccccaaactcatgatttatgatgtcagtaatcggccctcaggggtttctaatcgcttctctggctccaagtctggcaacacggcctccctgaccatctctgggctccaggctgaggacgaggctgattattactgcagctcatatacaagcagcagcactccctatgtcttcggaactgggaccaaggtcaccgtcctag

SEQ ID NO: 3477 - DNA, 310 bp, Homo sapiens
gacatccagatgacccagtctccttccaccctgtctgcatctgtaggagacagagtcaccatcacttgccgggccagtcagagtattagtagctggttggcctggtatcagcagaaaccagggaaagcccctaagctcctgatctataaggcgtctagtttagaaagtggggtcccatcaaggttcagcggcagtggatctgggacagaattcactctcaccatcagcagcctgcagcctgatgattttgcaacttattactgccaacaccgggacacttttggccaggggaccaagctggagatcaaac

SEQ ID NO: 3478 - DNA, 328 bp, Homo sapiens
gaaattgtgttgacgcagtctccaggcaccctgtctttgtctccaggggaaagagccaccctctcctgcagggccagtcagagtgttagcagcagctacttagcctggtaccagcagaaacctggccaggctcccaggctcctcatctatggtgcgtccagcagggccactggcatcccagacaggttcagtggcagtgggtctgggacagacttcactctcaccatcagcagactggagcctgaagattttgcagtgtattactgtcagcagtatgttaactcaccttcgctcactttcggcggaggggccaaggtggagatcaaac

SEQ ID NO: 3479 - DNA, 325 bp, Homo sapiens
gacatccagttgacccagtctccatccttcctgtctgcatctgtaggagacagagtcaccatcacttgccgggccagtcagggcattagcagttatttagcctggtatcagcaaaaaccagggaaagcccctaagctcctgatctatgctgcatccactttgcaaagtggggtcccatcaaggttcagcggcagtggatctgggacagaattcactctcacaatcagcagcctgcagcctgaagattttgcaacttattactgtcaacagcttaatagttacgggggattcactttcggccctgggaccaaagtggatatcaaac

SEQ ID NO: 3480 - DNA, 323 bp, Homo sapiens
gaaattgtgctgacgcaatctccaggctccctgtctttgtctccaggacatacagccaccctctcctgtagggccagtcagagccttagtaggaggttcttagcctggtatcagcagagacctggccaggctcccaggctcctcatctatggtgcatctagcagggccactggcatcccagacaggttcagtggcagtgggtctgggacagacttcaccctcgccatcagcagactggagcctgaagattttgcaatatattactgtcagcagtatgaatcctccccgctcactttcggcggcgggaccaaggtggagatcaa

SEQ ID NO: 3481 - DNA, 325 bp, Homo sapiens
gaaatcgtgttgacgcagtctccaggcaccctgtctttgtctccaggaggaagagccaccctctcctgcagggccagtcagagcgttagaagcggcttcttagcctggtatcagcagaagcctggccaggctcccaggctcctcatttatggtgcatcgaacagggccactgacatcccagacaggttcagtggcagtgggtctgggacagacttcaccctcgccatcagcagactggagcctgaagactttgcagtgtattactgtcagcaatatgatagccccccgctcactttcggcggcgggaccaaggtggagatcaaac

SEQ ID NO: 3482 - DNA, 334 bp, Homo sapiens
cagtctgccctgactcagcctgcctccgtgtctgggtctcctggacagtcgatcaccatctcctgcactggaaccagcagtgacgttggtggttataactatgtctcctggtaccaacagcacccaggcaaagcccccaaactcatgatttatgaggtcagtaatcggccctcaggggtttctaatcgcttctctggctccaagtctggcaacacggcctccctgaccatctctgggctccaggctgaggacgaggctgattattactgcagctcatatacaagcagcagcacttccgtggtcttcggaactgggaccaaggtcaccgtcctag

SEQ ID NO: 3483 - DNA, 322 bp, Homo sapiens
gaaatagtgatgacgcagtctccagccaccctgtctgtgtctccaggggaaagagccaccctctcctgcagggccagtcagagtgttagcagcaacttagcctggtaccagcagaagcctgggcaggctcccaggctcctcatctatggtgcatccaccagggccactggtatcccggccaggttcagtggcagtgggtctgggacagagttcactctcaccatcagcagcctgcagtctgaagattttgcagtttattactgtcagcagtataataactggcccctgacgttcggccaagggaccaaggtggaaatcaaac

SEQ ID NO: 3484 - DNA, 316 bp, Homo sapiens
gacatccagatgacccagtctccttccaccctgtctgcatctgtaggagacagagtcaccatcacttgccgggccagtcagagtattagtagctggttggcctggtatcagcagaaaccagggaaagcccctaagctcctgatctataaggcgtctagtttagaaagtggggtcccatcaaggttcagcggcagtggatctgggacagaattcactctcaccatcagcagcctgcagcctgatgattttgcaacttattactgccaacagtataatagttaccggttcggccaagggaccaaggtggaaatcaaac

SEQ ID NO: 3485 - DNA, 322 bp, Homo sapiens
gacatccagatgacccagtctccatcctccctgtctgcatctgtaggagacagagtcaccatcacttgccagccgagtcaggacattagcaactatttaaattggtatcagcagaaaccagggaaagcccctaaggtcctgatctacgatgcatccaatttggaaacaggggtcccatcaaggttcagtggaagtggatctgggacagattttactttcaccatcagcagcctgcagcctgaagatattgcaacatattactgtcaacagtatgataatctccctcaaactttcggcggagggaccaaggtggagatcaaac

SEQ ID NO: 3486 - DNA, 322 bp, Homo sapiens
gacatccagatgacccagtctccttccaccctgtctgcatctgtaggagacagagtcaccatcacttgccgggccagtcagagtgttagtacctggttggcctggtatcagcagaaaccagggaaagcccctaagctcctgatctataaggcgtctagtttagaaaatggggtcccatcaaggttcagcggcagtggatctgggacagaattcactctcaccatcagcggcctgcagcctgatgattttgcaacttatttctgccaccagtataatacttatttgtggacgttcggccaagggaccaaggtggaaatcaaac

SEQ ID NO: 3487 - DNA, 338 bp, Homo sapiens
gacatcgtgatgacccagtctccagactccctggctgtgtctctgggcgagagggccaccatcaactgcaagtccagccagagtgttttatacagctccaacaataagaactacttagcttggtaccagcagaaaccaggacagcctcctaagctgctcatttactgggcatctacccgggaatccggggtccctgaccgattcagtggcagcgggtctgggacagatttcactctcaccatcagcagcctgcaggctgaagatgtggcagtttattactgtcagcaatattatagtactcctcactttcggcggagggaccaaggtggagatcaaac

SEQ ID NO: 3488 - DNA, 329 bp, Homo sapiens
cagtctgccctgactcagcctgcctccgtgtctgggtctcctggacagtcgatcaccatctcctgcactggaaccagtagtgacgttggtggttataactatgtctcctggtaccaacagcacccaggcaaagcccccaaactcattatttatgatgtcagtaatcggccctcaggtgtttctaatcgcttctctggctccaagtctggcaacacggcctccctgaccatctctgggctccaggctgaggacgaggctgattattcctgttgctcatatacaagcacctcctcctgggtattcggcggagggaccaagctgaccgtcct

SEQ ID NO: 3489 - DNA, 325 bp, Homo sapiens
gacatccagatgacccagtctccatcctccctgtctgcatctgtaggagacagagtcaccatcacttgccgggcgagtcagggcattagcaattatttagcctggtatcagcagaaaccagggaaagttcctaagctcctgatctatgctgcatccactttgcaatcaggggtcccatctcggttcagtggcagtggatctgggacagatttcactctcaccatcagcagcctgcagcctgaagatgttgcaacttattactgtcaaaagtataacagtgcccctccgtggacgttcggccaagggaccaaggtggaaatcaaac

SEQ ID NO: 3490 - DNA, 326 bp, Homo sapiens
gacatccagttgacccagtctccatccttcctgtctgcatctgtaggagacagagtcaccatcacttgccgggccagtcagggcattagcagttatttagcctggtatcagcaaaaaccagggaaagcccctaagctcctgatctatgctgcatccactttgcaaagtggggtcccatcaaggttcagcggcagtggatctgggacagaattcactctcacaatcagcagcctgcagcctgaagattttgcaacttattactgtcaacagcttaatagttaccctccgcgttacacttttggccaggggaccaagctggagatcaa

SEQ ID NO: 3491 - DNA, 337 bp, Homo sapiens
cagtctgtgctgactcagccaccctcagcgtctgggacccccgggcagagggtcaccatctcttgttctggaagcagctccaacatcggaagtaattatgtatactggtaccagcagctcccaggaacggcccccaaactcctcatctataggaataatcagcggccctcaggggtccctgaccgattctctggctccaagtctggcacctcagcctccctggccatcagtgggctccggtccgaggatgaggctgattattactgtgcagcatgggatgacagcctgagtggtcagaattgggtgttcggcggagggaccaagctgaccgtcctag

SEQ ID NO: 3492 - DNA, 327 bp, Homo sapiens
cagtctgccctgactcagcctgcctccgtgtctgggtctcctggacagtcgatcaccatctcctgcactggaaccaacagtgacattggtgattttatctatgtctcctggtaccaacacctcccgggcaaagcccccaaactcataatttatgatgtcagtgatcggccctcaggggcttctaatcgcttctctggctccaagtctggcaacacggcctccctgaccatctctgggctccaggctgaggacgaggctgattattactgcagctcatatacaagcagcagtctggtgttcggcggagggacccagctgaccgtccta

SEQ ID NO: 3493 - DNA, 319 bp, Homo sapiens
gaaattgtattgacacagtctccagacaccctgtctttgtctccaggggaaagggccaccctctcctgcagggccagtcagagtgttctcagctacttagcctggtaccaacaaaaacctggccaggctcccaggctcctcatctatgatacatccaatagggccactggcatcccagccaggttcagtggcagtgggtctgggacagacttcactctcaccatcaacaacctagagcctgaagattttgcactttattactgtcagcagcgtaacagctggcctctgacgttcggccaagggaccagggtggagatca

SEQ ID NO: 3494 - DNA, 325 bp, Homo sapiens
gaaattgtgttgacgcagtctccaggcaccctgtctttgtctccaggggaaagagccaccctctcctgcagggccagtcagagtgttagcagcagctacttagcctggtaccagcagaaacctggccaggctcccaggctcctcatctatgctgcatccagcagggccactggcatcccagacaggttcagtggcagtgggtctgggacagacttcactctcaccatcagcagactggagcctgaagattttgcagtgtattactgtcagcagtatggtaactcaccgtggacgttcggccaagggaccaaggtggaaatcaaac

SEQ ID NO: 3495 - DNA, 320 bp, Homo sapiens
gacatccagatgacccagtctccttccaccctgtctgcatctgtaggagacagagtcaccatcacttgccgggccagtcagagtattagtagttggttggcctggtatcagcagaaaccagggaaagcccctaagctcctgatctatgaggcgtctagtttagaaagtggggtcccatcaaggttcagtggcagtggatctgggacagaattcactctcaccatcagcagcctgcagcctgatgattttgcaacttattactgccaacagtataatagttacccgtggacgttcggccaagggaccaaggtggaaatcaa

SEQ ID NO: 3496 - DNA, 343 bp, Homo sapiens
gatattttgatgactcagtctcctctctccctgtccgtcacccttggacagccggcctccatctcctgcaggtctaatcaaagcctcgtatacaatgatgcaaacacctacttgaattggtgtcaccagaggccaggccaatctccaaggcgcctaatttataaggtttctaaccgggactctggggtcccagacagattcagcggcagtgggtcaggcactgatttcacactgaaaatcagcagggtggaggctgaggatgttggagtttattactgcattctagttacacgctggcctccagcgctcactttcggcggagggaccaaggtggagatcaaac

SEQ ID NO: 3497 - DNA, 344 bp, Homo sapiens
gacatcgtgatgacccagtctccagactccctggctgtgtctctgggcgagagggccaccatcaactgcaagtccagccagaatgttttgtacagctccaacaatgagaacttcttacttggtaccagcagaaattaggacagcctcctaaactgctcatttactgggcatctacccgggaatccggggtccctgaccgattcggtggcagcgggtctgggacagatttcactcccatcatcagcggcctgcaggctgaagatgtggcagcttattactgtcagcaatattacagtagtcttccggggtcactttcggcggagggaccaaggtggagatcaaac

SEQ ID NO: 3498 - DNA, 319 bp, Homo sapiens
gacatccagatgacccagtctccatcctccctgtctgcatctgtaggagacagagtcaccatcacttgccaggcgagtcaggacattagcaactatttaaattggtatcagcagaaaccagggaaagcccctaagctcctgatctacgatgcatccaatttggaaacaggggtcccatcaaggttcagtggaagtggatctgggacagattttactttcaccatcagcagcctgcagcctgaagatattgcaacatattactgtcaacaatatgataatctcccctccttcggcggagggaccaaggtggagatcaaac

SEQ ID NO: 3499 - DNA, 331 bp, Homo sapiens
aattttatgctgactcagccccactctgtgtcggagtctccggggaagacggtaaccatctcctgcacccgcagcagtggcagcattgccagcaactatgtacagtggtaccagcagcgcccgggcagttcccccaccactgtgatctatgaggataaccaaagaccctctggggtccctgatcggttctctggctccatcgacagctcctccaactctgcctccctcaccatctctggactgaagactgaggacgaggctgattattactgtcagtcttatgataccagcaacgtggtattcggcggagggaccaagctgaccgtcctag

SEQ ID NO: 3500 - DNA, 328 bp, Homo sapiens
gaaattgtgttgacgcagtctccaggcaccctctctttgtctccaggggaaagagccaccctctcctgcagggccagtcagagtgttagcagcagctacttagcctggtaccagcagaaacctggccaggctcccaggctcctcatctatggtgcatccagcagggccactggcatcccagacaggttcagtggcagtgggtctgggacagacttcgctctcaccatcagcagactggagcctgaagattttgcagtgtattactgtcagcagtatggtagttcatcccccctcactttcggccctgggaccaaagtggatatcaaac

SEQ ID NO: 3501 - DNA, 325 bp, Homo sapiens
gaaattgtgttgacgcagtctccaggcaccctgtctttgtctccaggggaaagagccaccctctcctgcagggccagtcagagtgttagcagcagctacttagcctggtaccagcagaaacctggccaggctcccaggctcctcatctacggtgcatccagcagggccactggcatcccagacaggttcagtggcagtgggtctgggacagacttcactctcaccatcagcagactggagcctgaagattttgcagtgtattactgccagcagtatggtagctcatctaaaacttttggccaggggaccaagctggagatcaaac

SEQ ID NO: 3502 - DNA, 322 bp, Homo sapiens
gacatccagatgacccagtctccatcctccctgtctgcatctgtaggagacagagtcaccatcacttgccgggcaagtcagagcattagcagctttttaaattggtatcagcagaaaccagggaaagcccctaagctcctgatctatgctgcatccagtttgcaaagtggggtcccatccaggttcagtggcagtggatctgggacagatttcactctcaccatcagcagtctgcaacctgaagattttgcaacttactactgtcaacagagttacagtaccccgctcactttcggcggagggaccaaggtggagatcaaac

SEQ ID NO: 3503 - DNA, 325 bp, Homo sapiens
gacatccagttgacccagtctccatccttcctgtctgcatctgtaggagacagagtcaccatcacttgccgggccagtcagggcattagcagttatttagcctggtatcagcaaaaaccagggaaagcccctaagctcctgatctatgctgcatccactttgcaaagtggggtcccatcaaggttcagcggcagtggatctgggacagaattcactctcacaatcagcagcctgcagcctgaagattttgcaacttattactgtcaacagcttaatagttacccgggattcactttcggccctgggaccaaagtggatatcaaac

SEQ ID NO: 3504 - DNA, 325 bp, Homo sapiens
gaaattgtgttgacgcagtctccaggcaccctgtctttgtctccaggggaaagagccaccctctcctgcagggccagtcagagtgttagcagcagctacttagcctggtaccagcagaaacctggccaggctcccaggctcctcatctatggtgcatccagcagggccactggcatcccagacaggttcagtggcagtgggtctgggacagacttcactctcaccatcagcagactggagcctgaagatgttgcagtgtattattgtcagcaatatggtagctcacctcggacttttggccaggggaccaagctggagatcaaac

SEQ ID NO: 3505 - DNA, 340 bp, Homo sapiens
gacatcgtgatgacccagtctccagactccctggctgtgtctctgggcgagagggccaccatcaactgcaagtccagccagagtgttttatacagctccaacaataagaacttcttagcttggtaccagcagaaaccaggacagcctcctaagctgctcatttactgggcatctacccgggaatctggggtccctgaccgattcagtggcagcgggtctgggacagatttcactctcaccatcagcagcctgcaggctgaagatgtggcagtttattactgtcagcaatattatagtagtccattcactttcggccctgggaccaaagtggatatcaaac

SEQ ID NO: 3506 - DNA, 328 bp, Homo sapiens
gaaatagtgatgacgcagtctccagccaccctgtctgtgtctccaggggaaagagccaccctctcctgcagggccagtcagattattagcaccaacttagcctggtaccaacagaaacctgggcaggctcccaggctcctcatctatggtgcatccaccagggccactggtatcccagccaggttcactggcagtgggtctgggacagacttcactctcaccatcaccagcctgcagtctgaagattttgcagtttattactgtcagcagtataataactggcctccggtcgagacgttcggccaagggaccaaggtggaaatcaaac

SEQ ID NO: 3507 - DNA, 325 bp, Homo sapiens
gaaattgtgttgacgcagtctccaggcaccctgtctttgtctccaggggaaagagccaccctctcctgcagggccagtcagagtgttagcagcagctacttagcctggtaccagcagaaacctggccaggctcccaggctcctcatctatggtgcatccagcagggccactgccatcccagacaggttcagtggcagtgggtctgggacagacttcactctcaccatcagcagactggagcctgaagattttgcagtgtattactgtcagcagtatggtcggtcacctgacactttcggccctgggaccaaagtggatatcaaac

SEQ ID NO: 3508 - DNA, 340 bp, Homo sapiens
gacatcgtgatgacgcagtctccagactccctggctgtgtctctgggcgagagggccaccatcaactgcaagtccagccagagtgttttatacagctccaacaataagaactacttagcttggtaccagcagaaaccaggacagcctcctaagctgctcatttcctgggcatctacccgggaatccggggtccctgaccgattcagtggcagcgggtctgggacagatttcattctcaccatcagcagcctgcaggctgaagatgtggcagtttattactgtcagcaatattatgatactcctccggctttcggcggagggaccaaggtggagatcaaac

SEQ ID NO: 3509 - DNA, 310 bp, Homo sapiens
gacatccagatgacccagtctccatcctccctgtctgcatctgtaggagacagagtcaccatcacttgccaggcgagtcaggacattagcaactatttaaattggtatcagcagaaaccagggaaagcccctaaactcctgatctacgatgcatctaatttggaaacaggggtcccatcaaggttcagtggaagtggatctgggacagattttactttcaccatcagcagcctgcagcctgaagatattgcaacatattactgtcaactcttctccgctttcggcggagggaccaaggtgcagatcaaac

SEQ ID NO: 3510 - DNA, 328 bp, Homo sapiens
gaaattgtgttgacacagtctccagccaccctgtctttgtctccaggggaaagagccaccctctcctgcagggccagtcagagtgttagcagctacttagcctggtaccaacagaaacctggccaggctcccaggctcctcatctatgatgcatccaacagggccactggcatcccacccaggttcagtggcagtgggtctgggacagacttcactctcaccatcagcagcctagagcctgaagattttgcagtttattactgtcagcagcgtcgcaactggcctccggcgctcactttcggcggagggaccaaggtggagatcaaac

SEQ ID NO: 3511 - DNA, 325 bp, Homo sapiens
gaaattgtgttgacgcagtctccaggcaccctgtctttgtctccaggggaaagagccaccctctcctgcagggccagtcagagtgttggcagcagctacttagcctggtaccagcagaaacttggccaggctcccaggctcctcatctatggtgcatccagcagggccactggcatcccagacaggttcagtggcagtgggtctgggacagacttcactctcaccatcagcagactggagcctgaagattttgcagtgtattactgtcagcagtatggtaactcacctcgaacgttcggccaagggaccaaggtggaaatcaaac

SEQ ID NO: 3512 - DNA, 322 bp, Homo sapiens
gacatccagatgacccagtctccatcctccctgtctgcatctgtaggagacagagtcaccatcacttgccgggcaagtcagagcattagcagctatttaaattggtatcagcagaaaccagggaaagcccctaagctcctgatctatgttgcatctagtttgcaaagtggggtcccatcaaggttcagtggcagtggatctgggacagatttcactctcaccatcagcagtctgcaacctgaagattttgcaacttactactgtcaacagagttacagtacccctcggacgttcggccaagggaccaaggtggaaatcaaac

SEQ ID NO: 3513 - DNA, 325 bp, Homo sapiens
gaaattgtgttgacgcagtctccaggcaccctgtctttgtctccaggggaaagagccaccctctcctgcagggccagtcagaatattaggagcaactacttagcctggtaccagcagcaacctggccaggctcccaggctcctcatctatggtgcatccagcagggccactggcatcccagacaggttcagtggcagtgggtctgggacagacttcactctcaccatcagcagactggagcctgaagatgttgcagtgtattattgtcagcaatatggtagctcacctcggacttttggccaggggaccaagctggagatcaaac

SEQ ID NO: 3514 - DNA, 340 bp, Homo sapiens
gatattgtgatgactcagtctccactctccctgtccgtcacccctggagagccggcctccatctcctgcaggtctagtcagagcctcctgcatagtaatggatacaagtatttggattggtacctgcagaagccagggcagtctccacagctcctgatctatttgggttctaatcgggcctccggggtccctgacaggttcagtggcagtggatcaggcacagactttacactgaaaatcagcagagtggaggctgaggatgttggggtttattattgcatgcaagctctacaaactcctcggatcaccttcggccaagggacacgactggagattaaac

SEQ ID NO: 3515 - DNA, 331 bp, Homo sapiens
aattttatgctgactcagccccactctgtgtcggagtctccggggaagacggtaaccatctcctgcacccgcagcagtggcagcattgccagcaactatgtgcagtggtaccagcagcgcccgggcagttcccccaccactgtgatctatgaggatgaccaaagaccctctggggtccctgatcggttctctggctccatcgacagctcctccaactctgcctccctcaccatctctggactgaagactgaggacgaggctgactactactgtcagtcttatgatagcaccaattgggtgttcggcggagggaccaagctgaccgtcctag

SEQ ID NO: 3516 - DNA, 322 bp, Homo sapiens
gaaatagtgatgacgcagtctccagccaccctgtctgtgtctccaggggaaagagccaccctctcctgcagggccagtcagagtgttagcagcaacttagcctggtaccagcagaaacctggccaggctcccaggctcctcatctatggtgcatccaccacggccactggtatcccagccaggttcagtggcagtgggtctgggacagagttcactctcaccatcagcagcctgcagtctgaagattttgcagtttattactgtcagcagtataataactggccgatcaccttcggccaggggacacgactggagattaaac

SEQ ID NO: 3517 - DNA, 322 bp, Homo sapiens
gaaattgtgttgacacagtctccagccaccctgtctttgtctccaggggaaagagccaccctctcctgcagggccagtcagagtgttagcagctacttagcctggtatcaacagaaacctggccaggctcccaggctcctcatctatgatgcatccaacagggccactggcatcccagccaggttcagtggcagtgggtctgggacagacttcactctcaccatcagcagcctagagcctgaagattttgcagtttattattgtcagcagcgtagcaactggcctcgcacttttggccaggggaccaagctggagatcaaac

SEQ ID NO: 3518 - DNA, 337 bp, Homo sapiens
gatattgtgatgactcagtctccactctccctgcccgtcacccctggagagccggcctccatctcctgcaggtctagtcagagcctcctgcatagtaatggatacaactatttggattggtacctgcagaagccagggcagtctccacagctcctgatctatttgggttctaatcgggcctccggggtccctgacaggttcagtggcagtggatcaggcacagattttacactgaaaatcagcagagtggaggctgaggatgttggggtttattactgcatgcaaggtctacaaattcctctcactttcggcggagggaccaaggtggagatcaaac

SEQ ID NO: 3519 - DNA, 325 bp, Homo sapiens
tcttctgagctgactcaggacccagctgtgtctgtggccttgggacagacagtcaggatcacatgccaaggagacagcctcagaagctattatgcaaactggtaccagcagaagccaggacaggcccctgtccttgtcatctatggtcaaaacaaccggccctcagggatcccagaccgattctctggctccacctcaggaaacacagcttccttgaccatcactggggctcaggcggaagatgaggctgactattactgtaactcccgggacagcagtggtaacccttgggtgttcggcggagggaccaagctgaccgtcctag

SEQ ID NO: 3520 - DNA, 322 bp, Homo sapiens; identical to SEQ ID NO: 1798

SEQ ID NO: 3521 - DNA, 328 bp, Homo sapiens
tcctatgagctgacacagccaccctcggtgtcagtgtccccaggacaaacggccaggatcacctgctctggagatgcattgccaaaaaaatatgcttattggtaccagcagaagtcaggccaggcccctgtgctggtcatctatgaggacagcaaacgaccctccgggatccctgagagattctctggctccagctcagggacaatggccaccttgactatcagtggggcccaggtggaggatgaagctgactactactgttactcaacagacagcagtggtcatcataggggggtattcggcggagggaccaagctgaccgtcctag

SEQ ID NO: 3522 - DNA, 322 bp, Homo sapiens
gacatccagatgacccagtctccatcctccctgtctgcatctgtaggagacagagtcaccatcacttgccgggcgagtcagggcattagcaattatttagcctggtatcagcagaaaccagggaaagttcctaagctcctgatctatgctgcatccactttgcaatcaggggtcccatctcggttcagtggcagtggatctgggacagatttcactctcaccatcagcagcctgcagcctgaagatgttgcaacttattactgtcaaaagtataacagtgcccctctcactttcggcggagggaccaaggtggagatcaaac

SEQ ID NO: 3523 - DNA, 322 bp, Homo sapiens
gacatccagatgacccagtctccatcctccctgtctgcatctgtaggagaccgagtcaccatcacttgccgggcgagtcaagacattaacaattatttagcctggtatcagcagaaaccagggacagttcctaaggtcctgatctatgctgcatccactttgcagtcagaggtcccatctcggttcagtggcagtgggtctgggacagatttcactctcaccatcagcagcctgcagcctgaagatgttgcaacctattactgtcaaaagtataacgatgtccctcggacgttcggccaagggaccaaggtggaaatcaaac

SEQ ID NO: 3524 - DNA, 319 bp, Homo sapiens
gacatccagatgacccagtctccatcctccctgtctgcatctgtaggagacagagtcaccatcacttgccgggcaagtcagagcattagcagctatttaaattggtatcagcagaaaccagggaaagcccctaagctcctgatctatgctgcatccagtttgcaaagtggggtcccatcaaggttcagtggcagtggatctgggacagatttcactctcaccatcagcagtctgcaacctgaagattttgcaacttactactgtcaacagagttacagtaccccttccttcggccaagggacacgactggagattaaac

SEQ ID NO: 3525 - DNA, 322 bp, Homo sapiens
gacatccagatgacccagtctccttccaccctgtctgcatctgtaggagacagagtcaccatcacttgccgggccagtcagaatattagtagctggttggcctggtatcagcagaaaccagggaaagcccctaaggtcctgatctatgaggcgtctagtttagaaagtggggtcccatcaaggttcagcggcagtggatctgggacagaattcactctcaccatcagcagcctgcagcctgatgattttgcaacttattgctgccaacactataatagttatccccccactttcggcggagggaccaaggtggagatcaaac

SEQ ID NO: 3526 - DNA, 322 bp, Homo sapiens
gacatccagttgacccagtctccatccttcctgtctgcatctgtaggagacagagtcaccatcacttgccgggccagtcagggcattagcagttatttagcctggtatcagcaaaaaccagggaaagcccctaagctcctgatctatgctgcatccactttgcaaagtggggtcccatcaaggttcagcggcagtggatctgggacagaattcactctcacaatcagcagcctgcagcctgaagattttgcaacttattactgtcaacagcttaatagttaccccccgaccttcggccaagggacacgactggagattaaac

SEQ ID NO: 3527 - DNA, 323 bp, Homo sapiens
gacatccagatgacccagtctccaacgttcctgactgcatctgtaggagacagagtcaccatcgcttgccaggcgagtcaggacatttcccactatttaatttgctatcagcttaaaccagggatagccccaaagctcctgatcaacggtgcatcctcgtcggaaacagggatgccatgaaggttcagtggaagtggatctgggacagactttaccttccccatcagcggcctgctgcctgaggatgctgcaacatataactgtcaacagtctgataatctcgtccctcacttttggccaggggaccaacctggagatcaaac

SEQ ID NO: 3528 - DNA, 325 bp, Homo sapiens; identical to SEQ ID NO: 1809

SEQ ID NO: 3529 - DNA, 319 bp, Homo sapiens
tcctatgagatgactcagacgcagtcagtgtccgtgtccccaggacagacagccagcattacctgctctggagatagattgggtgaaagatatgtttgttggtatcaacagaggccaggccagtctcctgttctagtcatctatcaagacaacaagcggccctcagggatccctgagcgattctctggctccaactccgggaacacagccactctgaccatcagcggggcccaggctatggatgagggtgactattactgtcaggcgtgggacgacaacactgtggtgttcggcggagggaccaagctgaccgtcctag

SEQ ID NO: 3530 - DNA, 332 bp, Homo sapiens
cagtctgccctgactcagcctgcctccgtgtctgggtctcctggacagtcgatcagcatctcctgcactggaaccagcagtgacgttggtggttataactatgtctcctgctaccagcagcacccaggcaaagcccccaaactcctgacttgtgaggtcagtgatcggccctcaggggtttctagtcgcttctctggctccgagtctggcaacacggcctccctgaccatctctgggctccaggctgaggacgagactgattattactgcagttcatatacaaacagcaccactctcgaaattcggcggggggaccaacctgaccgtcctag

SEQ ID NO: 3531 - DNA, 331 bp, Homo sapiens
cagtctgtgttgacgcagccgccctcagtgtctgcggccccaggacagaaggtcaccatctcctgctctggaagcagctccaacattgggaataattatgtatcctggtaccagcagctcccaggaacagcccccaaactcctcatttatgacaataataagcgaccctcagggattcctgaccgattctctggctccaagtctggcacgtcagccaccctgggcatcaccggactccagactggggacgaggccgattattactgcggaacatgggataccagcctgagtgctgtggtattcggcggagggaccaagctgaccgtcctag

SEQ ID NO: 3532 - DNA, 340 bp, Homo sapiens
gacatcgtgatgacccagtctccagactccctggctgtgtctctgggcgagagggccaccgtcaactgcaagtccagccagagtgttttatacacctccaacaataagaactacttagcttggtaccagcagaaaccaggacagcctcctaagctgctcatttactgggcatctacccgggaatccggggtccctgaccgattcagtggcagcgggtctgggacagatttcactctcaccatcaacagcctgcaggctgaagatgtggcagtttattactgtcagcaacattatagtactccgctcactttcggcggagggaccacggtggagatcaaac

SEQ ID NO: 3533 - DNA, 322 bp, Homo sapiens
gacatccagatgacccagtctccatcctccctgtctgcatctgtaggaggcagagtcaccatcacttgccgggcgagtcagggcattagcaattatttagcctggtatcagcagaaaccagggaaagttcctaagctcctgatctatgctgcattcactttgcaatcaggggtcccatctcgtttcagtggcagtgcatctgggacagatttcactctcaccatcagcagcctgcagcctgaagatgttgcaacttattactgtcaaaagtataacagtgccccgatcaccttcggccaagggacacgactggagattaaac

SEQ ID NO: 3534 - DNA, 340 bp, Homo sapiens
gacatcgtgatgacccagtctccagactccctggctgtgtctctgggcgagagggccaccatcaactgcaagtccagccagagtgttttatacagctccaacaataagaactacttagcttggtaccagcagaaaccaggacagcctcctaagctgctcatttactgggcatctacccgggaatccggggtccctgaccgattcagtggcagcgggtctgggacagatttcactctcaccatcagcagcctgcaggctgaagatgtggcagtttattactgtcagcaatattatagtactccctacacttttggccaggggaccaagctggagatcaaac

SEQ ID NO: 3535 - DNA, 322 bp, Homo sapiens
gacatccagatgacccagtctccatcctccctgtctgcatctgtaggagacagagtcaccatcacttgccgggcaagtcagggcattagaaatgatttaggctggtatcagcagaaaccagggaaagcccctaagcgcctgatctatgctgcatccagtttgcaaagtggggtcccatcaaggttcagcggcagtggatctgggacagaattcactctcacaatcagcagcctgcagcctgaagattttgcgacttatttctgtctacagcataatagttaccctatcaccttcggccaagggacacgactggagattaaac

SEQ ID NO: 3536 - DNA, 334 bp, Homo sapiens
cagtctgtgctgactcagccaccctcagcgtctgggacccccgggcagagggtcaccatctcttgttctggaagcagctccaacatcggaggaagtaattatgtatactggtaccagcagctcccaggaacggcccccaaactcctcatctataataatcatcagcggccctcaggggtccctgaccgattctctggctccaagtctggcacctcagcctccctggccatcagtgggctccggtccgaggatgaggctgattattactgtgcaacatgggatgacagtctgattggtgtggtcttcggcggagggaccaagctgaccgtcctag

SEQ ID NO: 3537 - DNA, 331 bp, Homo sapiens
cagtctgtgctgactcagccaccctcagcgtctgggacccccgggcagagggtcaccatctcttgttctggaagcagctccaacatcggaagtaatactgtaaactggtaccagcagctcccaggaacggcccccaaactcctcatctatagtaataatcagcggccctcaggggtccctgaccgattctctggctccaagtctggcacctcagcctccctggccatcagtgggctccagtctgaggatgaggctgattattactgtgcagcatgggatgacagcctgaatgatgtggtattcggcggagggaccaagctgaccgtcctag

SEQ ID NO: 3538 - DNA, 325 bp, Homo sapiens
gacatccagatgacccagtctccttccaccctgtctgcatctgtaggagacagagtcaccatcacttgccgggccagtcagagtattagtagttggttggcctggtatcagcagaaaccagggaaagcccctaagctcctgatctataaggcgtctagtttacagagtggggtcccatcaaggttcagcggcactggctctgggacagaattcactctcaccatcagcagcctgcagcctgacgattttgcaagttattactgccaacagtataaaactgattccgcgtatacttttggccaggggaccaagctggagatcaaac

SEQ ID NO: 3539 - DNA, 322 bp, Homo sapiens
gacatccagatgacccagtctccttccaccctgtctgcatctgtaggagacagagtcaccatcacttgccgggccagtcagagtattaatacctggttggcctggtatcagcagaaaccagggaaagcccctaagctcctgatctataaggcgtctactttagaaactggggtcccatcaaggttcagcggcagtggatctgggacagatttcactctcaccatcagctgcctgcagtctgaagattttgcaacttattactgtcaacagtattatagttacccgtggacgttcggccaagggaccaaggtggaaatcaaac

SEQ ID NO: 3540 - DNA, 340 bp, Homo sapiens
gacatcgtgatgacccagtctccagactccctggctgtgtctctgggcgagagggccaccatcaactgcaagtccagccagagtgttttagacagctccaacaataagaactacttagcttggtaccagcagaaaccaggacagcctcctaagctgctcatttactgggcatctacccgggaatccggggtccctgaccgattcagtggcagcgggtctgggacagatttcactctcaccatcagcagcctgcaggctgaagatgtggcagtttattactgtcagcaatattatagtcgtcctccgacgttcggccaagggaccaaggtggaaatcaaac

SEQ ID NO: 3541 - DNA, 335 bp, Homo sapiens
aattttctgctggctcagccgcactctgtgtcggagtctccggggaagacagtaaccatcacctgcacccgcagcagtggcagcattgtctcccactatgtgcagtggtatcagcaccgcccgggcagtgcccccaccgctgtgatttttcaggatgaccaaagaccctctggggtccctgatcgattttctggctccgtcgacagctcctccaattctgcctccctcaccatctctggactgaagactgaggacgaagctgactattactgtcagtcttatgatagcagtgatcatcaacttgtgttcggcggagggaccaagctgtccgtcct

SEQ ID NO: 3542 - DNA, 326 bp, Homo sapiens
gacatccagatgacccagtctccatcctccctgtctgcatctgtaggagacagagtcaccatcacttgccaggcgagtcaggacattagcaactatttaaattggtatcagcagaaaccagggaaagcccctaagctcctgatctacgatgcatccaatttggaaacaggggtcccatcaaggttcagtggaagtggatctgggacagattttactttcaccatcagcagcctgcagcctgaagatattgcaacatattactgtcaacagtatgataatctccccctcattcactttcggccctgggaccaaagtggatatcaaac

SEQ ID NO: 3543 - DNA, 325 bp, Homo sapiens
gacatccagatgacccagtctccatcctccctgtctgcatctgtaggagacagagtcaccatcacttgccgggcaagtcagagcattagcagctatttaaattggtatcagcagaaaccagggaaagcccctaagctcctgatctatgctgcatccagtttgcagggtggggtcccatcaaggttcagtggcagtggatctgggccagatttcactctcaccatcagcagtctgcaacctgaagattttgcaacttactactgtcaacagagttacagtacccctaagtacacttttggccaggggaccaagctggagatcaaac

SEQ ID NO: 3544 - DNA, 328 bp, Homo sapiens
gaaattgtgttgacacagtctccagccaccctgtctttgtctccaggggaaagagccaccctctcctgcagggccagtcagagtgttagcaacttcttagcctggtaccaacagaaacctggccaggctcccaggctcctcatctatgatgcatccaacagggccactggcatcccagccaggttcagtggcagtgggtctgggacagacttcactctcaccatcagcagcctagagcctgaagattttgcagtttattactgtcagcagcgtagcaactggcctccgaagatcaccttcggccaagggacacgactggagattaaac

SEQ ID NO: 3545 - DNA, 325 bp, Homo sapiens
gaaattgtgttgacgcagtctccaggcaccctgtctttgtctccaggggaaagagccaccctctcctgcagggccagtcagactgttagcagcagctacttagcctggtaccagcagaaacctggccaggctcccaggctcctcatctatggtgcatccagcagggccactggcatcccagacaggttcagtggcagtgggtctgggacagacttcactctcaccatcagcagactggagcctgaagattttgcagtgtattactgtcagcagtatggtagctcaccttgggcgttcggccaagggaccaaggtggaaatcaaac

SEQ ID NO: 3546 - DNA, 328 bp, Homo sapiens
gaaattgtgttgacacagtctccagccaccctgtctttgtctccaggggaaagagccaccctctcctgcagggccagtcagagtgttagcagcttcttagcctggtaccaacagaaacctgaccaggctcccaggctcctcatctatgatgcatccaacagggccactggcatcccagccaggttcagtggcagtgggtctgggacagacttcactctcaccatcagcagcctagagcctgaagattttgcagtttattactgtcaccagcgtagcaactggcctccggcgctcactttcggcggagggaccaaggtggagatcaaac

SEQ ID NO: 3547 - DNA, 328 bp, Homo sapiens
gaaattgtgttgacacagtctccagccaccctgtctttgtctccaggggaaagagccaccctctcctgcagggccagtcagagtgttagcagcttcttagcctggtaccaacagaaacctggccaggctcccaggctcctcatctatgatgcatccaacagggccactggcatcccagccaggttcagtggcagtgggtctgggacagacttcactctcaccatcagcagcctagagcctgaagattttgcagtttattactgtcagcagcgtagcaactggcctccgagggcgacttttggccaggggaccaagctggagatcaaac

SEQ ID NO: 3548 - DNA, 304 bp, Homo sapiens
gccatccggatgacccagtctccattctccctgtctgcatctgtaggagacagagtcaccatcacttgctgggccagtcagggcattagcagttatttagcctggtatcagcaaaaaccagcaaaagcccctaagctcttcatctattatgcatccagtttgcaaagtggggtcccatcaaggttcagcggcagtggatctgggacggattacactctcaccatcagcagcctgcagcctgaagattttgcaacttattactgtcaacagtattttcctcgggggaccaagctggagatcaaac

SEQ ID NO: 3549 - DNA, 328 bp, Homo sapiens
gaaattgtgttgacacagtctccagccaccctgtctttgtctccaggggaaagagccaccctctcctgcagggccagtcagagtgttagcaacttcttagcctggtaccagcagaaacctggccaggctcccaggctcctcatctatgattcatccaacagggccactggcatcccagccaggttcagtggcagtgggtctgggacagacttcactctcaccatcagcagcctagagcctgaagattttgcactttattactgtcagcagcgtagcaactggcctcccgccctcactttcggcggagggaccaaggtggagatcaaac

SEQ ID NO: 3550 - DNA, 337 bp, Homo sapiens
gacatcgtgatgacccagtctccagactccctgggtgtgtctctgggcgagagggccaccatcaactgcaagtccaaccagagtgttttatacaactccaacaataagaactacttagcttggtaccagcagagaccaggacagcctcctaagttactcatttactgggcatctacccgggaatccggggtccctgaccgattcagtggcagcggatctgggacagatttcactctcaccatcagcagcctgcaggctgaagatgtgacaatgtattactgtcagcaatattatagtcttccgtacacttttggccaggggaccaagctggacatca

SEQ ID NO: 3551 - DNA, 319 bp, Homo sapiens
gaaatagtgatgacgcagtctccagccaccctgtctgtgtctccaggggaaagagccaccctctcctgcagggccagtcagagtgttagcagcaacttagcctggtaccagcagaaacctgggcaggctcccaggctcctcatctatggtgcatccaccagggccactggtatcccagccaggttcagtggcagtgggtctgggacagagttcactctcaccatcagcagcctgcagtctgaagattttgcagtttattactgtcagcagtatcataactggttcactttcggcggagggaccaaggtggagatcaaac

SEQ ID NO: 3552 - DNA, 337 bp, Homo sapiens
gatattgtgatgactcagtctccactctccctgcccgtcacccctggagagccggcctccatctcctgcaggtctagtcagagcctcctgcatagtaatggatacaactatttggattggtacctgcagaagccagggcagtctccacagctcctgatctatttggtttctaatcgggcctccggggtccctggcaggttcagtggcagtggatcaggcacagattttacactgaaaatcagcagagtggaggctgaggatgttggggtttattactgcatgcaagctctacaaactccgtgtacttttggccaggggaccaagctggagatcaaac

SEQ ID NO: 3553 - DNA, 340 bp, Homo sapiens; identical to SEQ ID NO: 905

SEQ ID NO: 3554 - DNA, 322 bp, Homo sapiens
gacatccagatgacccagtctccttccaccctgtctgcatctgtaggagacagagtcaccatcacttgccgggccagtcagagtattagtagctggttggcctggtatcagcagaaaccagggaaagcccctaagctcctgatctataaggcgtctagtttagaaagtggggtcccatcaaggttcagcggcagtggatctgggacagaattcactctcaccatcagcagcctgcagcctgatgattttgcaacttattactgccaacagtataatagttacccgtggacgttcggccaagggaccaaggtggaaatcaaac

SEQ ID NO: 3555 - DNA, 331 bp, Homo sapiens
aattttatgctgactcagccccactctgtgtcggagtctccggggaagacggtaaccatctcctgcacccgcagcagtggcagcattgccagcaactatgtgcagtactaccagcagcgcccgggcagttcccccaccgctgtgatctatgaggataaccaaagaccctctggggtccctggccggctctctggctccatcgacagctcctccaactctgcctccctcaccatctctggactgaagactgaggacgaggctgactactactgtcagtcttatcataccagccccagggtgttcggcggagggaccaagctgaccgtcctag

SEQ ID NO: 3556 - DNA, 325 bp, Homo sapiens
gacatccagttgacccagtctccatccttcctgtctgcatctgtaggagacagagtctccatcacttgccgggccagtcagggcattagcagttatttagcctggtatcagcaaagaccagggaaagcccctaagctcctgatctatgctgcatccactttgcaaagtggggtcccatcaaggttcagcggcagtggatctgggacagaattcactctcacaatcagcagcctgcagcctgaagattttgcaacttattactgtcaacagcttaataattaccctccattcactttcggccctgggaccaaagtggatatcaaac

SEQ ID NO: 3557 - DNA, 326 bp, Homo sapiens
gaaattgtgttgacacagtctccagccaccctgtctttgtctccaggggaaagagccaccctctcctgcagggccagtcagagtgttagcagctacttagcctggtaccaacagaaacctggccagggtcccaggctcctcatctatgatgcatccaacagggccactggcatcccagccaggttcagtggcagtgggtctgggacagacttcactctcaccatcagcagcctagagcctgaagattttgcagtttattactgtcagcagcgtagcaactggccctacgtggacgttcggccaagggaccaaggtggaaatcaaac

SEQ ID NO: 3558 - DNA, 337 bp, Homo sapiens
gatattgtgatgactcagtctccactctccctgcccgtcacccctggagagccggcctccatctcctgcaggtctagtcagagcctgcacagtaatggatacaactatttggattggtacctgcagaagccagggcagtctccacagctcctgatctatttgggttctaatcgggcctccggggtccctgacaggttcagtggcagtggatcaggcacagattttacactgagaatcagcagagtggaggctgaggatgtcgggatttattactgcatgcaagctctacaaattcctctgatcaccttcggccaagggacacgactggagattaaac

SEQ ID NO: 3559 - DNA, 331 bp, Homo sapiens
cagtctgtgttgacgcagccgccctcagtgtctgcggccccaggacagaaggtcaccatctcctgctctggaagcagctccaacattgggaataattatgtatcctggtaccagcagctcccaggaacagcccccaaactcctcatttatgacaataataagcgaccctcagggattcctgaccgattctctggctccaagtctggcacgtcagccaccctgggcatcaccggactccagactggggacgaggccgattattactgcggagcatgggatagcagcctgagtgtttgggtgttcggcggagggaccaagctgaccgtcctag

SEQ ID NO: 3560 - DNA, 325 bp, Homo sapiens
tcctatgagctgacacagccaccctcggtgtcagtgtccccaggacagacggccaggatcacctgctctggagatgcattgccaaagcaatatgcttattggtaccagcagaagccaggccaggcccctgtgctggtgatatataaagacagtgagaggccctcagggatccctgagcgattctctggctccagctcagggacaacagtcacgttgaccatcagtggagtccaggcagaagacgaggctgactattactgtcaatcagcagacagcagtggtacttatgtggtattcggcggagggaccaagctgaccgtcctag

SEQ ID NO: 3561 - DNA, 322 bp, Homo sapiens
gacatccagatgacccagtctccatcctccctgtctgcatctgtaggagacagagtcaccatcacttgccaggcgagtcaggacattagcaatcatttaaattggtatcagcagaaaccagggaaagcccctaagctcctgatctacgatgcatccaatttggaaacaggggtcccatcaaggttcagtggaagtggatctgggacagattttactttcaccatcagcagcctgcagcctgaagattttgcaacatattactgtcaacagtatgttaatctcccgtggacgttcggccaagggaccaaggtggaaatcaaac

SEQ ID NO: 3562 - DNA, 328 bp, Homo sapiens
gacatccagatgacccagtctccatcctccctgtctgcatctgtaggagacagagtcaccatcacttgccgggcaagtcagagcattagcagctatttaaattggtatcagcagaaaccagggaaagcccctaagctcctgatctatgctgcatccagtttgcaaagtggggtcccatcaaggttcagtggcagtggatctgggacagatttcactctcaccatcagcagtctgcaacctgaagattttgcaacttactactgtcaacagagttacagtaccccccccatgtacacttttggccaggggaccaagctggagatcaaac

SEQ ID NO: 3563 - DNA, 322 bp, Homo sapiens
gacatccagatgacccagtctccatcttctgtgtctgcatctgtaggagacagagtcaccatcacttgtcgggcgagtcagggtattagcagctggttagcctggtatcagcagaaaccagggaaagcccctaagctcctgatctatgctgcatccagtttgcaaagtggggtcccatcaaggttcagcggcagtggatctgggacagatttcactctcactatcagcagcctgcagcctgaagattttgcaacttactattgtcaacaggctaacagtttcccgtacacttttggccaggggaccaagctggagatcaaac

SEQ ID NO: 3564 - DNA, 325 bp, Homo sapiens
gacatccagatgacccagtctccatcctccctgtctgcatctgtaggagacagagtcaccatcacttgccgggcaagtcagagcattagcagctatttaaattggtatcagcagaaaccagggaaagcccctaagctcctgatctatgctgcatccagtttgcaaagtggggtcccatcaaggttcagtggcagtggatctgggacagatttcactctcaccatcagcagtctgcaacctgaagattttgcaacttactactgtcaacagagttacagtacccctccgatcaccttcggccaagggacacgactggagattaaac

SEQ ID NO: 3565 - DNA, 322 bp, Homo sapiens
gaaatagtgatgacgcagtctccagccaccctgtctgtgtctccaggggaaagagccaccctctcctgcagggccggtcagagtgttagcagcaccttagcctggtaccagcagaaacctgggcaggctcccaggctcctcatctatgattcatccaccagggccactggtatcccagtcaggttcagtggcagtgggtctgggacagacttcactctcaccatcagcagcctgcagtctgaagattttgcagtttattactgtcagcagtataataactggcctctcactttcggcggagggaccaaggtggagatcaaac

SEQ ID NO: 3566 - DNA, 322 bp, Homo sapiens
gaaatagtgatgacgcagtctccagccaccctgtctgtgtctccaggggaaagagccaccctctcctgcagggccagtcagagtgttagcagcaacttagcctggtaccagcagaaacctggccaggctcccaggctcctcatctatggtgcatccaccagggccactggtatcccagccaggttcagtggcagtgggtctgggacagagttcactctcaccatcagcagcctgcagtctgaagattttgcagtttattactgtcagcagtataataactggccgtggacgttcggccaagggaccaaggtggaaatcaaac

SEQ ID NO: 3567 - DNA, 326 bp, Homo sapiens
gacatcgtgatgacccagtctccagactccctggctgtgtctctgggcgagagggccaccatcaacggcaagaccagccagagtgttttatatagctccaacgcttggtaccagcagaaaccaggacagcctcctaagctgctcatttactgggcatctacccgggaatccggggtccctgaccgattcagtggcagcgggtctgggacagatttcactctcaccatcagcagcctgcaggctgaagatgtggcagtttattactgtcagtaatattgtagtactcctctacacttttggccaggggaccaaactggagatcaaac

SEQ ID NO: 3568 - DNA, 322 bp, Homo sapiens
gacatccagatgacccagtctccatcctccctgtctgcatctgtaggagacagagtcaccatcacttgccgggcaagtcagagcattagcagctatttaaattggtatcagcagaaaccagggaaagcccctaagctcctgatctatgctgcatccagtttgcaaagtggggtcccatcaaggttcagtggcagtggatctgggacagatttcactctcaccatcagcagtctgcaacctgaagattttgcaacttactactgtcaacagagttacagtacccctcggactttcggccctgggaccaaagtggatatcaaac

SEQ ID NO: 3569 - DNA, 319 bp, Homo sapiens
tcctatgagctgactcagccaccctcagtgtccgtgtccccaggacagacagccagcatcacctgctctggagataacttgggggataaatatgcttgctggtatcagcagaagccaggccagtcccctgtgctggtcatctatcaagataacaagcggccctcagggatccctgagcgattctctggctccaactctgggaacacagccactctgaccatcagcgggacccaaggtatggatgaggccgactattactgtcaggcgtgggacagcagcactgtggtattcggcggagggaccaagctgaccgtcctag

SEQ ID NO: 3570 - DNA, 323 bp, Homo sapiens
gaaattgtgttgacacagtctccagccaccctgtctttgtctccaggggaaagagccaccctctcctgcagggccagtcagagtgttagcagctacttagcctggtaccaacagaaacctggccaggctcccaggctcctcatctatgatgcatccaacagggccactggcatcccagccaggttcagtggcagtgggtctgggacagacttcactctcaccatcagcagcctagagcctgaagattttgcagtttattactgtcagcagcgtagcaactggcctctttctcttcggccaagggacacgactggagattaaac

SEQ ID NO: 3571 - DNA, 325 bp, Homo sapiens
tcctatgagctgacacagccaccctcggtgtcagtgtccccaggacagacggccaggatcacctgctctggagatgcattgccaaagcaatatgcttattggtaccagcagaagccaggccaggcccctgtgctggtgatatataaagacagtgagaggccctcagggatccctgagcgattctctggctccagctcagggacaacagtcacgttgaccatcagtggagtccaggcagaagacgaggctgactattactgtcaatcagcagacagcagtggtacttataatgtcttcggaactgggaccaaggtcaccgtcctag

SEQ ID NO: 3572 - DNA, 322 bp, Homo sapiens
gacatccagatgacccagtctccatcctccctgtctgcatctgtaggagacagagtcaccatcacttgccaggcgagtcaggacattagcaactatttaaattggtatcagcagaaaccagggaaagcccctaagctcctgatctacgatgcatccaatttggaaacaggggtcccatcaaggttcagtggaagtggatctgggacagattttactttcaccatcagcagcctgcagcctgaagatattgcaacatattactgtcaacagtatgataatctccccctcactttcggcggagggaccaaggtggagatcaaac

SEQ ID NO: 3573 - DNA, 322 bp, Homo sapiens
gacatccagatgacccagtctccgtcctccctgtctgtatttgtaggagacagagtcaccatcacttgccgggcaagtcagaccattaacagttatttaaattggtatcaacagaaaccagggaaagcccctgagctcctgatctatggtgcatccagtttgcaaagtggggtcccatcaagattcagtggcagtggatctgggacagatttcactctcaccatcagcagtctgcaacgtgaagattttgcaacttactactgtcaacaaagttacaatatgccatttactttcggccctgggaccaaactggatttcaaac

SEQ ID NO: 3574 - DNA, 319 bp, Homo sapiens
tcctatgagctgactcagccaccctcagtgtccgtgtccccaggacagacagccagcatcacctgctctggagataaattgggggataaatattcttgctggtatcagcagaagccaggccagtcccctgtgctggtcatctatcaagataacaagcggccctcagggatccctgagcgattctctggctccaactctgggaacacagccactctgaccatcagcgggacccaggctatggatgaagctgactattactgtcaggcgtgggacagcagcactgtggtcttcggcggagggaccaagctgaccgtcctag

SEQ ID NO: 3575 - DNA, 322 bp, Homo sapiens
gacatccagatgacccagtctccatcctccctgtctgcatctgtaggagacagagtcaccatcacttgccgggcaagtcagagcattagcagctatttaaattggtatcagcagaaaccagggaaagcccctaagctcctgatctatgctgcatccagtttgcaaagtggggtcccatcaaggttcagtggcagtggatctgggacagatttcactctcaccatcagcagtctgcaacctgaagattttgcaacttactactgtcaacagagttacagtacccctttcactttcggccctgggaccaaagtggatatcaaac

SEQ ID NO: 3576 - DNA, 331 bp, Homo sapiens
cagtctgccctgactcagcctgcctccgtgtctgggtctcctagacagtcgatcaccatctcctgcactggaaccagcagtgacgttggtggttataactatgtctcctggtaccaacaacacccaggcaaagcccccaaagtcatgatttatgaggtcagtaatcggccctcaggggtttctaatcgcttctctggctccaagtctggcaacacggcctccctgaccatctctgggctccaggctgaggacgaggctgattattattgcagctcatatacaagtagcggctcttgtgtgttcggcggagggaccaagctgaccgtcctag

SEQ ID NO: 3577 - DNA, 325 bp, Homo sapiens
gacatccagatgacccagtctccatcctccctgtctgcatctgtaggagacagagtcaccatcacttgccgggcaagtcagagcattagcagctatttaaattggtatcagcagaaaccagggaaagcccctaagctcctgatctatgctgcatccagtttgcaaagtggggtcccatcaaggttcagtggcagtggatctgggacagatttcactctcaccatcagcagtctgcaacctgaagattttgcaacttactactgtcaacagagttacagtacccctccgtacacttttggccaggggaccaagctggagatcaaac

SEQ ID NO: 3578 - DNA, 320 bp, Homo sapiens
gacatccagatgacccagtctccatcctccctgtctgcttctgtaggagacagagtcaccatcacttgccgggcaggtcggttcattagccactatttaaattggtatcagcagaaacccgggaaagcccctgagctcctgatctatgctgcatccagtttgcaaagtggggtcccatcaaggttcagtggcagtggatctgggacagatttcactctcaccatcagcagtctgcaacctgaagattttgcaacttactattgtcaacagagttacagtactcccctcactttcggccctgggaccaaggtgcatatcaa

SEQ ID NO: 3579 - DNA, 319 bp, Homo sapiens
tcctatgagctgactcagccaccctcagtgtccgtgtccccaggacagacagccagcatcacctgctctggagataaattgggggataaatatgcttgctggtatcagcagaagccaggccagtcccctgtgctggtcatctatcaagatagcaagcggccctcagggatccctgagcgattctctggctccaactctgggaacacagccactctgaccatcagcgggacccaggctatggatgaggctgactattactgtcaggcgtgggacagcagctccgtggtattcggcggagggaccaagctgaccgtcctag

SEQ ID NO: 3580 - DNA, 319 bp, Homo sapiens
tcctatgagctgactcagccaccctcagtgtccgtgtccccaggacagacagccagcatcacctgctctggagataaattgggggataaatatgcttgctggtatcagcagaagccaggccagtcccctgtgttggtcatctatcaagataataagcggccctcagggatccctgagcgattctctggctccaactctgggaacacagccactctgaccatcagcgggacccaggctatggatgaggctgactattactgtcaggcgtgggacagcagcactggggtattcggcggagggaccaagctgaccgtcctag

SEQ ID NO: 3581 - DNA, 319 bp, Homo sapiens
tcctatgagctgactcagccaccctcagtgtccgtgtccccaggacagacagccagcatcacctgctctggagataaattgggggataaatatgcttgctggtttcagcagaagccaggccagtcccctgtgctggtcatctatgaagataccaagcggccctcagggatccctgagcgattctctggctccaactctgggaacacagccactctgaccatcagcgggacccagactatggatgaggctgactattactgtcaggcgtgggacagcagccatgtggtattcggcggagggaccaagctgaccgtcctag

SEQ ID NO: 3582 - DNA, 322 bp, Homo sapiens
gacatccagatgacccagtctccatcctccctgtctgcatctgtaggagacagagtcaccatcacttgccgggcaagtcagagcattagcagctatttaaattggtatcagcagaaaccagggaaagcccctaagctcctgatctatgctgcatccagtttgcaaagtggggtcccatcaaggttcagtggcagtggatctgggacagatttcactctcaccatcagcagtctgcaacctgaagattttgcaacttactactgtcaacagagttacagtaccccctacacttttggccaggggaccaagctggagatcaaac

SEQ ID NO: 3583 - DNA, 316 bp, Homo sapiens
tcctatgagctgactcagccaccctcagtgtccgtgtccccaggacagacagccagcatcacctgctctggagataaattgggggatagatatgcttgctggtatcagcagaagccaggccagtcccctgtgctggtcatctatcaagataccaagcggccctcagggatccctgagcgattctctggctccaactctgggaacacagccactctgaccatcagcgggacccaggcaatggatgaggctgactattactgtcaggcgtgggacagcagcgtggtattcggcggagggaccaagctgaccgtcctag

SEQ ID NO: 3584 - DNA, 322 bp, Homo sapiens
tcctatgagctgacacagccaccctcggtgtcagtgtccccaggacagacggccaggatcacctgctctggagatgcattgccaaagcaatatgcttattggtaccagcagaagccaggccaggcccctgtgctggtgatatataaagacagtgagaggccctcagggatccctgagcgattctctggctccagctcagggacaacagtcacgttgaccatcagtggagtccaggcagaagacgaggctgactattactgtcaatcaccagacagcagtggtacttatccattcgccggagggaccaagctgaccgtcctag

SEQ ID NO: 3585 - DNA, 336 bp, Homo sapiens
cagtctgtgttgacgcagccgccctcagtgtctgcggccccaggacagaaggtcaccatctcctgctctggaagcagctccaacattgggaataattatgtatcctggtaccagcagctcccagaaacagcccccaaactcctcatttatgacagtaataagcgaccctcagggattcctgaccgattctctggctccaagtctggcacgtcagccaccctgggcatcaccggactccagactggggacgaggccgattattactgcggaacatgagatagcagcctgagtgcggcgatgtggtattcggcggagggaccaagctgaccgtcctag

SEQ ID NO: 3586 - DNA, 337 bp, Homo sapiens
gatattgtgatgacccagactccactctcctcacctgtcacccttggacagccggcctccatctcctgcaggtctagtcaaaggctcgtacacagtgatggaaacacctacttgagttggcttcagcagaggccaggccaggctccaagactcctaatttataagatttctaaccggttctctggggtcccagacagattcagtggcagtggggcagggacagatttcacactgaaaatcagcagggtggaagctgaggatgtcggggtttattactgcatgcaagctacacaatttcccccgacgttcggccaagggaccaaggtggaaatcaaac

SEQ ID NO: 3587 - DNA, 322 bp, Homo sapiens
gacatccagatgacccagtctccatcctccctgtctgcatctgtaggagacagagtcaccatcacttgccaggcgagtcaggacattagcaactgtttaaattggtatcagcagaaaccagggaaagcccctaagctcctgatctacgatacatccaatttggaaacaggggtcccatcaaggttcagtggaagtggatctgggacagattttactttcaccatcagcagcctgcagcctgaagatattgcaacatattactgtcaacagtatgataatctccctcgggctttcggcggagggaccaaggtggagatcaaac

SEQ ID NO: 3588 - DNA, 322 bp, Homo sapiens
gacatccagatgacccagtctccttccaccctgtctgcatctgtaggagacagagtcaccatcacttgtcgggccagtcagagtattagtggctggttggcctggtatcagcagaaatcaggggaagcccctaagctcctgatctataaggcgtctagtttagaaagtggggtcccatcaaggttcagcggcagtggatctgggacagaattcactctcaccatcaccagcctgcagcctgatgattttgcaacttattactgtcaacagtataatacttactcgtacacttttggccaggggaccaagctggagatcaaac

SEQ ID NO: 3589 - DNA, 325 bp, Homo sapiens
gaaattgtgttgacacagtctccaggcaccctggctttgtctccaggggaaagagccaccctctcctgcagggccagtcagagtgttagcagctacttagcctggtaccaagttaaacctggccaggctccccggctcctcatctatgatacatccaacagggcccctggcatcccagccaggttcagtggcagtgggcctgggacagacttcactctcaccatcagcagcctagaacctgaagattttgcagtttattactgtcagcagcgtagcaactggcacttgatcaccttcggccaagggacacgactggagattaaac

SEQ ID NO: 3590 - DNA, 325 bp, Homo sapiens
gacatccagatgacccagtctccatcctccctgtctgcatctgtaggagacagagtcaccatcacttgccgggcaagtcagagcattagcagctatttaaattggtatcagcagaaaccagggaaagcccctaagctcctgatctatgctgcatccagtttgcaaagtggggtcccatcaaggttcagtggcagtggatctgggacagatttcactctcaccatcagcagtctgcaacctgaagattttgcaacttactactgtcaacagagttacagtaccctctcgctcactttcggcggagggaccaaggtggagatcaaac

SEQ ID NO: 3591 - DNA, 325 bp, Homo sapiens
gacatccagatgacccagtctccatcctccctatctgcatctgtaggagacagagtcaccatcacttgccgggcaagtcagagcattagcagctatttaaattggtatcagcagaaaccagggaaagcccctaagctcctgatctatgctgcatccactttgcaaagtggggtcccatcaaggttcagtggcagtggatctgggacagatttcactctcaccatcagcagtctgcaacctgacgattttgcaacttactactgtcaacagagttacagtacccccccgatcaccttcggccaagggacacgactggagattaaac

SEQ ID NO: 3592 - DNA, 328 bp, Homo sapiens
gaaattgtgttgacgcagtctccaggcaccctgtctttgtctccaggggaaagagccaccctctcctgcagggccagtcagagtgttagcagcagctacttagcctggtaccagcagaaacctggccaggctcccaggctcctcatctatggtgcatccagcagggccactggcatcccagacaggttcagtggcagtgggtctgggacagacttcactctcaccatcagcagactggagcctgaagattttgcagtgtattactgtcagcagtatggtagctcaccggtgtacacttttggccaggggaccaagctggagatcaaac

SEQ ID NO: 3593 - DNA, 361 bp, Homo sapiens
gacgtgcagctgttggagtcggggggaggcctggtacagccgggggggtccctgagactctcctgtgcagcctctggattcagctttagcagctatgccatgacctgggtccgccaggctccagggaaggggctggagtgggtctcatatataagtggtaatggtggtagtagatactacgcagagtccgtgaagggccggttcaccatctccagagacaattccaggaacacgctgtctctgcaaatggacagcctgagagccgaggacacggccgtatattactgtgcgaaatcaagggtgtctagcagtgcctcatgtgaccactggggccagggaaccctggtcaccgtctcctcag

SEQ ID NO: 3594 - DNA, 361 bp, Homo sapiens
gaggtgcagctgttggagtctgggggaggcttggtacagcctggggggtccctgagactctcctgtgcagcctctggattcacctttaataactatgccatgacctgggtccgccaggctccagggaaggggctggagtgggtctcacatataagtggtaatggtgatagtagacactacgcagactccgtgaagggccggttcaccatctccagagacagttccaagagcacggtgtctctggaaatgaacaacctgagagccgaggacacggccgtatattactgtgcgaaatcaagggtgtctagcagtgcctcatgtgaccactggggccagggaaccctggtcaccgtctcctcag

SEQ ID NO: 3595 - DNA, 361 bp, Homo sapiens
cagctgcagctgcaggagtcgggcccaggactggtgaagccttcggagaccctgtccctcacctgcactgtctctggtggctccgtcagcagtagtactttttactggggctggatccgccagcccccagggaaggggctggagtggattggatgtgtttattataatgggaacacctactacagcccgtccctcaagagtcgagtcaccatatccctagacacgtccaagaaccagttctccctgaggctgagctctgtgagcgccgcagacacggctgtatattactgtgcgagtataagaaaatcggatacagctttgtactactggggccagggaaccctggtcaccgtctcctcag

SEQ ID NO: 3596 - DNA, 361 bp, Homo sapiens
cagctgcagctgcaggagtcgggcccaggactggtgaagccttcggagaccctgtccctcacctgcactgtctctggtggctccatcagcagtagtagttattactggggctggatccgccagcccccagggaaggggctggagtggattggatgtgtttattataatgggaacacctactacaacccgtccctcaagagtcgagtcaccatatccctagacacgtccaagaaccagttctccctgaagctgagctctgtgaccgccgcagacacggctgtatattactgtgcgagtataagaaaatcggatacagctttgtactactggggccagggaaccctggtcaccgtctcctcag

SEQ ID NO: 3597 - DNA, 376 bp, Homo sapiens
caggtgcagctggtggagtctgggggaggcttggtcaagcctggagggtccctgagactctcctgtgcagcctctggattcaccttcagtgactactacatgagctggatccgccaggctccagggaaggggctggagtgggtttcatacattagtagtagtggtagtaccatatactatgcagactctgtgaagggccgattcaccatctccagggacaacgccaagaactcactgtatctgcaaatgaacagcctgagagccgaggacacggccgtgtattactgtgcgagagatggttccccgtttcactatgaaagaaacggccgatggttcgacccctggggccagggaaccctggtcaccgtctcctcag

SEQ ID NO: 3598 - DNA, 376 bp, Homo sapiens; identical to SEQ ID NO: 3597

SEQ ID NO: 3599 - DNA, 382 bp, Homo sapiens
gaggtgcagctggtggagtctgggggaggcttggtccagcctggggggtccctgagactctgctgtgcagcctctggattcacctttagtagctattggatgagctgggtccgccaggctccagggaaggggctggagtgggtggccaacataaaacaagatggaagtgacaaacactatgtggactctgtgaagggccgattcaccatctccagagacaacgccaagagctcactgtgtctgcaaatgaacagcctgagagccgaggacacggctgtatattactgtgcgagagatggcctgtattactatgatagtagtggctattatttggctggaattgactactggggccagggaaccctggtcaccgtctcctcag

SEQ ID NO: 3600 - DNA, 382 bp, Homo sapiens; identical to SEQ ID NO: 3599

SEQ ID NO: 3601 - DNA, 376 bp, Homo sapiens
cagctgcagctgcaggagtcgggcccaggactggtgaagccttcggagaccctgtccctcacctgcactgtctctggtgcctccatctacagtactacttactactggggctggatccgccagcccccagggaaggggccggagtggattgggagtatctattatagtggaaacacttactacaacccgtcgctcaacagtcgagtcaccatatccatagacacgtccaacaataagttctccctgaaactgagctctgtgaccgccgcagacacggctgtgtattactgtgcgagacacatccgtattgcaggaggtggagtgttgggttggttcgacccctggggccagggagccctggtcaccgtctcctcag

SEQ ID NO: 3602 - DNA, 376 bp, Homo sapiens; identical to SEQ ID NO: 3601

SEQ ID NO: 3603 - DNA, 370 bp, Homo sapiens
gaagtgcagttgttggaatctgggggaggcttggtacagccgggggggtccctgagactctcctgcgcagcctctggattcgactttagggccgatgccatgagctgggtccgccaggctccagggaagggactggagtggatctcatctattagtggtcgtggtggcagtacgtactacgcaggctccgcgaggggccggttcttcatctccagagacagttccaaggacacattgtatctacagatgaacaacctgagagtcgacgacacggccctatatttttgtgtaaaaggaggcggctggggttggaacgacaacacttggttcgacccctggggccagggaaccctggtcaccgtctcctcag

SEQ ID NO: 3604 - DNA, 370 bp, Homo sapiens
gaggtgcagttgttggagtctgggggaggcttggtacagtcgggggggtccctgagactctcctgcgcagcctctggattcgactttagggccgatgccatgagctgggtccgccaggctccagggaagggactggagtggatctcatctattagtggtcgtggtggtagtacatactacgcaggctccgcgaggggccggttcttcatctccagagacagctccaagaacacgttgtatctacaaatgaacaacctgagagtcgaggacacggccctatattattgtgtgaaaggaggcggctggggttggaacgacaacacttggttcgacccctggggccagggaaccctggtcaccgtctcctcag

SEQ ID NO: 3605 - DNA, 373 bp, Homo sapiens
gaggtgcaactgttggagtctgggggaggcctggaacagcctggggggtccctgagactctcctgtgcagcctctggattcacctttagcacctatgccatgagctgggtccgccaggctccagggaaggggctggagtgggtctcaggtattagtggtagtggtggtagaacatactacgcagactccgtgaagggccggttcaccatctccagagacaattccaagaacacgctgtatctgcaaatgaacagcctgagagccgaggacacggccgtatattactgtgcgaaaggagggggaccgatagtagcagctggtacgtcccactttgactactggggccagggaaccctggtcaccgtctcctcag

SEQ ID NO: 3606 - DNA, 373 bp, Homo sapiens; identical to SEQ ID NO: 3605

SEQ ID NO: 3607 - DNA, 384 bp, Homo sapiens
caggtccagttggtacagtctggggctgaggtgaagaagcctggggcctcagtgaaggtctcctgcaaggtttccggatacaccctcactgaattatccatgcactgggtgcgacaggctcctggaaaagggcttgagtggatgggaggttttgatcctgaagatggtgaaacaatctacgcacagaagttccagggcagagtcaccatgaccgaggacacatctacagacacaccctacatggagttgagcagcctgaaatctgaggacacggccgtgtattactgtgcaacagccccagctgttatcggaaacccaaaacaatattactactactatggtatggacgtctggggccaagggaccacggtcaccgtctcctca

SEQ ID NO: 3608 - DNA, 384 bp, Homo sapiens
caggtccagctggtacagtctggggctgaggtgaagaagcctggggcctcagtgaaggtctcctgcaaggtttccggatacaccctcactgaattatccatgcactgggtgcgacaggctcctggaaaagggcttgagtggatgggaggttttgatcctgaagatggtgaaacaatctacgcacagaagttccagggcagagtcaccatgaccgaggacacatctacagacacagcctacatggagctgagcagcctgagatctgaggacacggccgtgtattactgtgcaacagccccagctgttatcggaaacccaaaacaatattactactatcacggtatggacgtctggggccaagggaccacggtcaccgtctcctca

SEQ ID NO: 3609 - DNA, 340 bp, Homo sapiens
gaggtgcagctgttggagtctgggggaggcttggtacagcctggggggtccctgagactctcctgcgcagcctctggattcacgtttaccagctatgccatgagttgggtccgccaggctccagggagggggctggagtgggtctcagttattagtggtagtggtggtagcacaaagtacgcagactttgtgaagggccggttcagcatctccagagacaattccaagaacacgctgtatctgcaaatgaacagcctgagagccgaggacacggccgtatattactgtgcgaccatccccagattttggggccagggaaccctggtcaccgtctcctcag

SEQ ID NO: 3610 - DNA, 340 bp, Homo sapiens; identical to SEQ ID NO: 3609

SEQ ID NO: 3611 - DNA, 355 bp, Homo sapiens
caggtgcagctggtggagtctgggggaggcttggtcaagcctggagggtccctgagactctcctgtgcagcctctggattcaccttcagtgactactacatgagctggatccgccaggctccagggaaggggctggagtgggtttcatacattagtagtagtggtagtaccatatactacgcagactctgtgaagggccgattcaccatctccagggacaacgccaagaactcactgtatctgcaaatgaacagcctgagagccgaggacacggccgtgtattactgtgcgaggggaaggtatagtggctacgatggctactggggccagggaaccctggtcaccgtctcctcag

SEQ ID NO: 3612 - DNA, 352 bp, Homo sapiens
gaggtgcagctggtggagactggaggaggcttgatccagcctggggggtccctgagactctcctgtgcagcctctgagttcaccgtcagtagcaactacatgagctgggtccgccaggctccagggaaggggctggagtgggtctcagttatttatcccggtggtagcacattctacgcagactccgtgaagggccgattcaccatctccagagacaattcaaagaacacgctgtatcttcaaatgaacagcctgagagccgaggacacggccgtgtattactgtgcgagagatttgggggagttctactttgactactggggccagggaaccctggtcaccgtctcctcag

SEQ ID NO: 3613 - DNA, 355 bp, Homo sapiens
gaggtgcagctggtggagtctgggggaggcctggtcaagccgggggggtccctgagactctcctgtgcagcctctggattcaccttcagtccctttggcatgacctgggtccgccaggctccagggcagggactggaatgggtctcaaccattagtgccagtggcgttactttattctacgcagactcagtgaagggccgattcacaatctccagagacgacgccaagcagtcagtctttctgcaaatgaacagcctgagagccgaggacacggctgtctattattgtgcgagagacggcagtggctggtcccgggactactggggccagggaaccctggtcaccgtctccccag

SEQ ID NO: 3614 - DNA, 351 bp, Homo sapiens
gaggtgcagctggtggagactggaggaggcttgatccagcctggggggtccctgagactctcctgtgcagcctctggtttcaccgtcagtagcaactacatgacctgggtccgccaggctccagggaaggggctggagtgggtctcacttatttatagcggtggtagcacattctacgcagactccgtgaagggccgattcaccatctccagagacaattccaagaacacgctgtttcttcaaatggacagcctgagagccgaggacacggccgtgtattactgtgcgagagacctcgagatctacggtatggacgtctggggccaagggaccacggtcaccgtctcctca

SEQ ID NO: 3615 - DNA, 355 bp, Homo sapiens
gaggtgcagctggtggagtctgggggaggcttggtccagcctggggggtccctgagactctcctgtgcagcctctggattcacctttagtagctattggatgagctgggtccgccaggctccagggaaggggctggagtgggtggccaacataaagcaagatggaagtgagaaatactatgtggactctgtgaagggccgattcaccatctccagagacaacgccaagaactcactgtatctgcaaatgaacagcctgagagccgaggacacggctgtgtattactgtgcgagagtaatgcccggctatggggaagttacttggggccagggaaccctggtcaccgtctcctcag

SEQ ID NO: 3616 - DNA, 358 bp, Homo sapiens
cagatcaccttgaaggagtctggtcctacgctggtgaaacccacacagaccctcacgctgacctgcaccttctctgggttctcactcaggattagtggagtgggtgtgggctggatccgtcagcccccaggaaaggccctggagtggcttgcactcatttattgggatgatgataagcgctacagcccatctctgaagagcaggctcaccatcaccaaggacacctccaaaaaccaggtggtcctaacaatgaccaacatggaccctgtggacacagccacatattactgtgcacaccatacggtgactaaaatctttgactactggggccagggaaccctggtcaccgtctcctcag

SEQ ID NO: 3617 - DNA, 355 bp, Homo sapiens
gaggtgcagctggtgcagtctggagcagaggtgaaaaagcccggggaatctctaaagatctcctgtaaggtttctggatacaactttaccacctactggatcggctgggtgcgccagatgcccgggaaaggcctggagtggatggggctcatctatcctagtgactctgataccagatacagcccgtccttccaaggccaggtcaccatctcagccgacaagtccatcagcaccgcctacctgcagtggagcagcctgaaggcctcggacaccgccgtgtattactgtgcgacctcacgtggatacagctatggttacgactggggccagggaaccctggtcaccgtctcctcag

SEQ ID NO: 3618 - DNA, 352 bp, Homo sapiens
caggtgcagctgcaggagtcgggcccaggactggtgaagccttcggagaccctgtccctcacctgcactgtctctggtggctccatcagtagttactactggagctggatccggcagcccccagggaagggactggagtggattgggtatatctattacagtgggagcaccaactacaacccctccctcaagagtcgagtcaccatatcagtagacacgtccaagaaccagttctccctgaagctgagctctgtgaccgctgcggacacggccgtgtattactgtgcgagagcagtggctggtaccgtctgtgactactggggccagggaaccctggtcaccgtctcctcag

SEQ ID NO: 3619 - DNA, 355 bp, Homo sapiens
caggtgcagctggtgcagtctggggctgaggtgaagaagcctgggtcctcggtgaaggtctcctgcaaggcttctggaggcaccttcagcagctatgctatcagctgggtgcgacaggcccctggacaagggcttgagtggatgggagggatcatccctatctttggtacagcaaactacgcacagaagttccagggcagagtcacgattaccgcggacgaatccacgagcacagcctacatggagctgagcagcctgagatctgaggacacggccgtgtattactgtgcgagaggggggggttacgacgtccttagaccctggggccagggaaccctggtcaccgtctcctcag

SEQ ID NO: 3620 - DNA, 393 bp, Homo sapiens
caggtgcagctggtgcagtctggggctgaggtgaagaagcctgggtcctcggtgaaggtctcctgcaaggcttctggaggcaccttcaacagctatgctatcgcctgggtgcgacaggcccctggacaagggcttgagtggatgggagggatcatccttgtctttggaacagcaaactacgcacagaagttccagggcagagtcacgattaccgcggacgaatccacgagcacagcctacatggagctgagcagcctgagatctgaggacacggccgtttattactgtgcgagagtaggggcggaacgggggatgactacagtaaactgggcctactactactactacggtatggacgtctggggccaagggaccacggtcaccgtctcctca

SEQ ID NO: 3621 - DNA, 352 bp, Homo sapiens
gaggtgcagctggtggagtctggaggaggcttgatccagcctggggggtccctgagactctcctgtgcagcctctgggctcaccgtcagtagcaactacatgagctgggtccgccaggctccagggaaggggctggagtgggtctcagttatttatagcggtggtagtacattctacgcagactccgtgaagggccgattcaccatctccagagacagttccaagaacatgctgtatcttcaaatgaacagcctgagagccgaggacacggccgtgtattactgtgcgagagactcgggtaatagtgaattcgacccctggggccagggaaccctggtcaccgtctcctcag

SEQ ID NO: 3622 - DNA, 355 bp, Homo sapiens
caggtgcagctggtggagtctgggggaggcgtggtccagcctgggaggtccctgagagtctcctgtgcagcctctggattcaccctcagtagctatggcatgcactgggtccgccaggccccaggcaaggggctggagtgggtggcagttatatcatatgatggaagtaacaaatactatgcagactccgtgaagggccgattcaccatctccagagacatatccaagaacacactgtatctgcaaatgaacagcctgagagctgaggacacggctgtgtattactgtgcgaaaggattgacgatcggtgacttcgtcgacgggggccagggaaccctggtcaccgtctcctcag

SEQ ID NO: 3623 - DNA, 358 bp, Homo sapiens
caggtcaccttgagggagtctggtcctgcgctggtgaaacccacacagaccctcaccctgacctgcaccttctctgggttctcactcactactaatggaatgtctgtgacctgggtccgtcagcccccaggggaggccctggagtggcttgcgcgcattgattgggatgatgataaatactacagcacatctctgagggccaggctcaccatctccaaggacccctccaaaaaccaggtggtccttacaatgaccaacgtggacactgtggacacaggcacgtattactgtgcacggtcgtacggtgatggggcgacggattactggggcccgggaaccctggtcaccgtctcctcag

SEQ ID NO: 3624 - DNA, 358 bp, Homo sapiens
caggtgcagctgcaggagtcgggcccaggactggtgaagccttcacagaccctgtccctcacctgcactgtctctggtggctccatcagcagtggtggttactactggagctggatccgccagcacccagggaagggcctggagtggattgggtacatctattacagtgggagcacctactacaacccgtccctcaagagtcgagttaccatatcagtagacacgtctaagaaccagttctccctgaagctgagctctgtgactgccgcggacacggccgtgtattactgtgcgagaatggacccgagtggtcccattgactactggggccagggaaccctggtcaccgtctcctcag

SEQ ID NO: 3625 - DNA, 394 bp, Homo sapiens
gaggtgcagctggtggagtctgggggaggcttggtccagcctggggggtccctgagactctcctgtgcagcctctggattcacctttagtagctattggatgagctgggtccgccaggctccagggaaggggctggagtgggtggccaacataaagcaagatggaagtgagaaatactatgtggactctgtgaagggccgattcaccatctccagagacaacgccaagaactcactgtatctgcaaatgaacagcctgagagccgaggacacggctgtgtattactgtgcgagagaggcagagacgtattactatgatagtagtggttattactacgtccctaagattgcttttgatatctggggccaagggacaatggtcaccgtctcttcag

SEQ ID NO: 3626 - DNA, 364 bp, Homo sapiens
cagctacaactacaggagtcgggcccaggactggtgaagccttcggagaccctgtccctcacctgcactgtctctggtggctccatcagcaatagtaattactactgggcctggattcgccagcccccagggaaggggctggagtggattgggactatctcttatagtgggagcacctactacaacccctccctcaagagtcgagtcaccatatctgtggacacgtccaagaatcaattctccctgaagctgagctctgtgaccgccgcagacacggctgtctatttctgtgcgagacgacccctgggtatagtggttctttttgatttctggggccagggaaccctggtcaccgtctcctcag

SEQ ID NO: 3627 - DNA, 393 bp, Homo sapiens
caggttcaactggtgcagtctggaggtgaggtgaggaagcctggggcctcagtgaaggtctcctgcaaggcttctggttatacctttaccacctatggtatcagttgggtgcgacaggcccctggacaagggcttgagtggatggggtggatcagcccttacaatggtaacacaaactatatagagaacctccagggcagagtcaccatgaccacagacacatccacgaacacagcctacatggagttgaggagcctgagatctgacgacacggccgtgtattactgtgcgagagacggatattgtactggtagtatatgcaaaataggagactactaccactataacggtatggacgtctggggccaagggaccacggtcaccgtctcctca

SEQ ID NO: 3628 - DNA, 367 bp, Homo sapiens
gaggtgcagctggtggagtctgggggaggcttggtacagccagggcggtccctgagactctcctgtacaggttctggattcacctttggtgattatgctatgagctgggtccgccaggctccagggaaggggctggagtgggtgggtttcattagaagcaaagtttatggtgggacaacacaatacgccgcgtctgtgaaaggcagattcaccatctcaagagatgattccaaaagcatcgcctatctgcaaatgaacagcctgaaaaccgaggacacagccgtgtattactgtactagaggggcctggagtgggagttaccgcttcgactactggggccagggaaccctggtcaccgtctcctcag

SEQ ID NO: 3629 - DNA, 397 bp, Homo sapiens
caggtgcagctgcaggagtcgggcccaggactggtgaagccttcacagaccctgtccctcacctgcactgtctctggtggctccatcagcagtggtggttactactggagctggatccgccagcacccagggaagggcctggagtggattgggtacatctattacagtgggagcacctactacaacccgtccctcaagagtcgagttaccatatcagtagacacgtctaagaaccagttctccctgaagctgagctctgtgactgccgcggacacggccgtgtattactgtgcgagagcacatcttcacgcgtattactatggttcagggagttattcccctagaccagatgcttttgatatctggggccaagggacaatggtcaccgtctcttcag

SEQ ID NO: 3630 - DNA, 361 bp, Homo sapiens
gaggtgcagctggtgcagtctggagcagaggtgaaaaagcccggggagtctctgaagatctcctgtaagggttctggatacacttttaccgacaactggatcggctgggtgcgccagatgtccgggaaaggcctggagtggatggggaccatctatcctggtgactctgataccagatacagcccgtccttccaaggccaggtcatcatctcagccgacaagtccatcagcaccgcctacctgcagtggaacagcctgaaggcctcggacaccgccatgtattactgtgcgagggccggctatagcagtggctggtactatgactactggggccagggagccctggtcaccgtctcctcag

SEQ ID NO: 3631 - DNA, 367 bp, Homo sapiens
gaggtgcagctggtggagtctgggggaggcttggtaaagcctggggggtcccttagactctcctgtgcagcctctggattcactttcagtaacgcctggatgagctgggtccgccaggctccagggaaggggctggagtgggttggccgtattaaaagcaaaactgatggtgggacaacagactacgctgcacccgtgaaaggcagattcaccatctcaagagatgattcaaaaaacacgctgtatctgcaaatgaacagcctgaaaaccgaggacacagccgtgtattactgtaccacatactcggtagtggtggtagctgcatttgactactggggccagggaaccctggtcaccgtctcctcag

SEQ ID NO: 3632 - DNA, 396 bp, Homo sapiens
cagctgcagctgcaggagtcgggcccaggactggtgaagccttcggagaccctgtccctcacctgcactgtctctggtggctccatcagcagtagtagttactactggggctggatccgccagcccccagggaaggggctggagtggattgggagtatctattatagtgggagcacctactacaacccgtccctcaagagtcgagtcaccatatccgtagacacgtccaagaaccagttctccctgaagctgagctctgtgaccgccgcagacacggctgtgtattactgtgcgagatactatatatttattcacgatttttggagtggttatccaataaggaactactacggtatggacgtctggggccaagggaccacggtcaccgtctcctca

SEQ ID NO: 3633 - DNA, 396 bp, Homo sapiens
cagctgcagctgcaggagtcgggcccaggactggtgaagccttcggagaccctgtccctcacctgcactgtctctggtggctccatcagcagtagtagttactactggggctggatccgccagcccccagggaaggggctggagtggattgggagtatctattatagtgggagcacctactacaacccgtccctcaagagtcgagtcaccatatccgtagacacgtccaagaaccagttctccctgaagctgagctctgtgaccgccgcagacacggctgtgtattactgtgcgagacagggatattgtactaatggtgtatgctgggattttcccacctactactactacggtatggacgtctggggccaagggaccacggtcaccgtctcctca

SEQ ID NO: 3634 - DNA, 364 bp, Homo sapiens
caggtcaccttgagggagtctggtcctgcgctggtgaaacccacacagaccctcacactgacctgcaccttctctgggttctcactcagcactagtggaatgtgtgtgagctggatccgtcagcccccagggaaggccctggagtggcttgcacgcattgattgggatgatgataaatactacagcacatctctgaagaccaggctcaccatctccaaggacacctccaaaaaccaggtggtccttacaatgaccaacatggaccctgtggacacagccacgtattactgtgcacggggagctttggcagcagctgtcggctatgactactggggccagggaaccctggtcaccgtctcctcag

SEQ ID NO: 3635 - DNA, 364 bp, Homo sapiens
caggtgcagctggtgcagtctggggctgaggtgaagaagcctggggcctcagtgaaggtctcctgcaaggcttctggatacaccttcaccagttatgatatcaactgggtgcgacaggccactggacaagggcttgagtggatgggatggatgaaccctaacagtggtaacacaggctatgcacagaagttccagggcagagtcaccatgaccaggaacacctccataagcacagcctacatggagctgagcagcctgagatctgaggacacggccgtgtattactgtgcgagccaacccgagtatagcagctcgtgggctatgggctactggggccagggaaccctggtcaccgtctcctcag

SEQ ID NO: 3636 - DNA, 364 bp, Homo sapiens
gaggtgcagctggtggagtctgggggaggcctggtcaagcctggggggtccctgagactctcctgtgcagcctctggattcaccttcagtagctatagcatgaactgggtccgccaggctccagggaaggggctggagtgggtctcatccattagtagtagtagtagttacatatactacgcagactcagtgaagggccgattcaccatctccagagacaacgccaagaactcactgtatctgcaaatgaacagcctgagagccgaggacacggctgtgtattactgtgcgagagatcattacgatttttggagtggttattggaactactggggccagggaaccctggtcaccgtctcctcag

SEQ ID NO: 3637 - DNA, 360 bp, Homo sapiens
caggtgcagctggtgcagtctggggctgaggtgaagaagcctggggcctcagtgaaggtctcctgcaaggcttctggatacaccttcaccggctactatattcactgggtgcgacaggcccctggacaagggcttgagtggatgggatggatcaaccctaacagtggtggcacaaactatgcacagaagtttcagggctgggtcaccatgaccagggacacgtccatcaccacagcctacatggagctgagcaggctaaaatctgacgacacggccgtgtattactgtgcgagagagaattactatgactttgacggtatggacgtctggggccaagggaccacggtcaccgtctcctca

SEQ ID NO: 3638 - DNA, 360 bp, Homo sapiens
caggtgcagctgcaggtgtcgggcccaggactggtgaagccttcggggaccctgtccctcacctgcgctgtctctggtgactccatcagcactagtaactggtggacttgggtccgccagcccccagggaaggggctggagtggattggggagatccatcatagtgggagcaccaactacatcccgtccctcaagagtcgagtcaccatatcaatagacaagtccaagaacgagatctccctgaaggtgaggtctgtgaccgccgcggacacggccgtgtattactgtgcgagagaacaagtgggctactactacggtatggacgtctggggccaagggaccacggtcaccgtctcctca

SEQ ID NO: 3639 - DNA, 361 bp, Homo sapiens
caggtgcaactgatacagtctggggctgaggtgaagaagcctgggtcctcggtgaaggtctcctgccaggcttctggaggcaccttcagcagctatgctatcagctgggtgcgacaggcccctggacaagggcttgagtggatgggagggatcatccctatctttgatacaacaaactacgcacagaagttccagggcagggtcacgattaccgcggacgactccacgagcacagcctacatggagctgagcagcctgagatctgaagacacggccgtgtattactgtgcgaggcatgtggtgatgactgaaaagtactttgactactggggccagggaaccctggtcaccgtctcctcag

SEQ ID NO: 3640 - DNA, 361 bp, Homo sapiens
caggtgcagctggtgcagtctggggctgaggtgaagaagcctgggtcctcggtgaaggtctcctgcaaggcttctggaggcaccttcagcagctatgctatcagctgggtgcgacaggcccctggacaagggcttgagtggatgggagggatcatccctatctttggtacagcaaactacgcacagaagttccagggcagagtcacgattaccgcggacgaatccacgagcacagcctacatggagctgagcagcctgagatctgaggacacggccgtgtattactgtgcgagagttggagatggctccctctactactttgactactggggccagggaaccctggtcaccgtctcctcag

SEQ ID NO: 3641 - DNA, 361 bp, Homo sapiens
gaggtgcagctggtggagtctgggggaggcctggtcaagcctggggggtccctgagactctcctgtgcagcctctggattcaccttcagtagctatagcatgaactgggtccgccaggctccagggaaggggctggagtgggtctcatccattagtagtagtagtagttacatatactacgcagactcagtgaagggccgattcaccatctccagagacaacgccaagaactcactgtatctgcaaatgaacagcctgagagccgaggacacggctgtgtattactgtgcgagagcccttagcagtggctggtactactttgactactggggccagggaaccctggtcaccgtctcctcag

SEQ ID NO: 3642 - DNA, 361 bp, Homo sapiens
gaggtgcagctgttggagtctgggggaggcttggtacagcctggggggtccctgagactctcctgtgcagcctctggattcacctttagcagctatgccatgagctgggtccgccaggctccagggaaggggctggagtgggtctcagctattagtggtagtggtggtagcacatactacgcagactccgtgaagggccggttcaccatctccagagacaattccaagaacacgctgtatctgcaaatgaacagcctgagagccgaggacacggccgtatattactgtgcgaaagattctatattgtggtgggttggggttgactactggggccagggaaccctggtcaccgtctcctcag

SEQ ID NO: 3643 - DNA, 361 bp, Homo sapiens
gaggtgcagctgttggagtctgggggaggcttggtacagcctggggggtccctgagactctcctgtgcagcctctggattcacctttagtagttatggcatgacctgggtccgccagactccagggaagggactggagtgggtctcaggaattagtggtagtggtggtagcacatactacgcagactccgtgaagggccggttcaccatctccagagacaattccaagaacacggtgtatctgcaaatgaacagcctgagagccgaggacacggccttatattactgtgcaaaatcaagggtctctaattcagggagttgcgactactggggccagggaaccctggtcaccgtctcctcag

SEQ ID NO: 3644 - DNA, 361 bp, Homo sapiens
caggtgcagctggtggagtctgggggcggcgtggtccggcctgggaggtccctgcgactctcctgtgcagcctctggattcatcttcagtaactacggcttccactgggtccgccaggctccaggcaaggggctggagtgggttgcaactatttcatatgaagggagttatcaattctatggagactccgtgaagggccgatccaccatctccagagacaattccaagaacacgctgtctctgcaaatggacggtcttagatatgaggacacggctgtttattactgtgcgaggggggcagtggctggttcgggtgcttttgatacttggggccaaggcacaatggtcaccgtctcttcag

SEQ ID NO: 3645 - DNA, 367 bp, Homo sapiens
gaggagcaattggtggagtctgggggaggcttggtccagcctggagggtccctgagactctcctgcttagcctctggattccccttcagtgaccactacatggactgggtccgccaggctccagggaaggggctggagtgggttgcccgttgtagaaacagagctaagggttacaccacagaatacgccgcgtctgtgaaaggcagattcaccgtctcaagagatgattccaagaactcactgtatctgcaaatgagcagcctgcaaaccgaggacacggccttatattactgtgcgaggtccgactacagtgggaactggtacttcgatctctggggccggggcaccctggtcactgtctcctcag

SEQ ID NO: 3646 - DNA, 367 bp, Homo sapiens
cagatcaccttgaaggagtctggtcctacgctggtgaaacccacacagaccctcacgctgacctgcaccttctctgggttctcagtcagtactagtggagtgggtgtgggctggatccgtcagcccccaggaaaggccctggaatggcttgcactcatttattgggatgatgataagcgctacagcccatctctgaagagcaggctcaccatcaccaaggacacctccaaaaaccaggtggtccttacaatgaccaacatggaccctgtggacacagccacatatttctgtgcacacagaccgaattacgatattttgactggttattccaactggggccagggaaccctggtcaccgtctcctcag

SEQ ID NO: 3647 - DNA, 361 bp, Homo sapiens
caggagcagctggtggagtcggggggaggcgtggtccagcctgggaggtccctgagactctcctgtgcagcctctggattcaccttcagtagttttgctatgcactgggtccgccaggctccaggcaaggggctgcagtgggtcgcaattgtattatatgatggaaccgagaaatattacgcagactccgtgaagggccgattcaccatctccagagacaattccaagaacacgctgtatctgcaaatggacagcctgagagatgaggacacggctgtgtactactgtgcgagagggcgccgtagcgggagctacttcgggttgttctggggccagggaaccctggtcaccgtctcctcag

SEQ ID NO: 3648 - DNA, 361 bp, Homo sapiens
caggtgcagctggtggagtctgggggaggcgtggtccagcctgggaggtccctgagactctcctgtgcagcctctggattcaccttcagtagctatgctatgcactgggtccgccaggctccaggcaaggggctggagtgggtggcagttatatcatatgatggaagcaataaatactacgcagactccgtgaagggccgattcaccatctccagagacaattccaagaacacgctgtatctgcaaatgaacagcctgagagctgaggacacggctgtgtattactgtgcgagagatcccaattactatgatagtaactttgactactggggccagggaaccctggtcaccgtctcctcag

SEQ ID NO: 3649 - DNA, 361 bp, Homo sapiens
caggtgcagctggtggagtctgggggaggcgtggtccagcctgggaggtccctgagactctcctgtgcagcctctggattcaccttcagtagctatactatgcactgggtccgccaggctccaggcaaggggctggagtgggtgacagctgtatcatatgttgcaagcaatacatattatgcagactccgtgaagggccgattaaccatctccagagacaattccgagaacacgctgtatctgcaaatgaacagcctgagacctgaggacacggctgtgtattactgtgcgagagagacccccgaaaattggttgttctttgacaactggggccagggaaccctggtcaccgtctcctcag

SEQ ID NO: 3650 - DNA, 364 bp, Homo sapiens
caggtgcagctgcaggagtcgggcccaggactggtgaagccttcggggaccctgtccctcacctgcgctgtctctggtggctccatcagcagtagtaactggtggagttgggtccgccagcccccagggaaggggctggagtggattggggaaatctatcatagtgggagcaccaactacaacccgtccctcaagagtcgagtcaccatatcagtagacaagtccaagaaccagttctccctgaagctgagctctgtgaccgccgcggacacggccgtgtattactgtgcgagagccgagagtagagctggtacggactactttgactactggggccagggaaccctggtcaccgtctcctcag

SEQ ID NO: 3651 - DNA, 364 bp, Homo sapiens
caggtgcagctggtggagtctgggggaggcgtggtccagcctgggaggtccctgagactctcctgtgcagcctctggattcaccttcagtagctatgccatgcaatgggtccgccaggctccaggcaaggggctggagtgggtggcagttatatcatatgatggaagtaatcaatattatgcagactccgtgaagggccgattcaccatctccagagacaattccaagaacacgctgtatctgcaaatgaacagcctgagagctgaggacacggctgtctattactgtgcgaaagcttatgatggtggttattactcttggattgactactggggccagggaaccctggtcaccgtctcctcag

SEQ ID NO: 3652 - DNA, 364 bp, Homo sapiens
caggtgcagctggtggagtctgggggaggcgtggtccagcctgggaggtccctgagactctcctgtgcagcctctggattcaccttcagtagctatggcatgcactgggtccgccaggctccaggcaaggggctggagtgggtggcagttatatcatatgatggaagtaataaatactatgcagactccgtgaagggccgattcaccatctccagagacaattccaagaacacgctgtatctgcaaatgaacagcctgagagctgaggacacggctgtgtattactgtgcgcattcctattcggggagttattatactccacttgactactggggccagggaaccctggtcaccgtctcctcag

SEQ ID NO: 3653 - DNA, 367 bp, Homo sapiens
caggtgcagctgcaggagtcgggcccaggactggtgaagccttcacagaccctgtccctcacctgcactgtctctggtggctccatcagcagtggtgattactactggagttggatccgccagcccccagggaagggcctggagtggattgggtacatctattacagtgggagcacctactacaacccgtccctcaagagtcgagttaccatatcaatagacacgtccaagaagcagttctccctgaagctgaactctgtgactgccgcagacacggccgtgtattactgtgccagagggagcggtagtggccccagatactaccttgactactggggccagggaaccctggtcaccgtctcctcag

SEQ ID NO: 3654 - DNA, 370 bp, Homo sapiens
gaggtgcagctggtggagtccgggggaggcttggtccagcctggggggtccctgaaactctcctgtgcagcctctgggttcaccttcagtggctctgctatgcactgggtccgccaggcttccgggaaagggctggagtgggttggccgtattagaagcaaagctaacagttacgcgacagcatatgctgcgtcggtgaaaggcaggttcaccatctccagagatgattcaaagaacacggcgtatctgcaaatgaacagcctgaaaaccgaggacacggccgtgtattactgtactacctattgtagtggtggtagctgctattcgggagactactggggccagggaaccctggtcaccgtctcctcag

SEQ ID NO: 3655 - DNA, 361 bp, Homo sapiens
gaggtgcagctggtggagtctggaggaggcttgatccagcctggggggtccctgagactctcctgtgcagcctctggattaaccgtcagtagcaactacatgagctgggtccgccaggctccagggaaggggctggagtgggtctcacttatttatagcggtggtagcacattctacgcagactccgtgaagggccgattcaccctctccagagacaattccaagaacacgctgtatcttcaaatgaacagcctgagagccgaggacacggccgtgtattactgtgcgaggggcccgtacggtgactacgtggaggtctttgactactggggccagggaaccctggtcaccgtctcctcag

SEQ ID NO: 3656 - DNA, 364 bp, Homo sapiens
caggtgcagctgcaggaggtgggcccaggagtggtgaagccttcggagaccctgtctctaatttgtaatgtctctggcgggtccgtcgccaatcctaactggtgggtttgggtccgccagccacccgggaagggactggagtggattggggaagtctatcatactgggacgacccagaacaggccgtccctgaagagtcgaacctccatttcgatggacaagactaagaatcagttgtccctccgcctgacgtctgtgaccgccgcggacacggccatatattattgtgcgaaaaggggggacggaaggtacaccaggttcttcgatgtttggggccggggcgccctggtcactgtctcctcag

SEQ ID NO: 3657 - DNA, 400 bp, Homo sapiens
caggtgcagctacagcagtggggcgcaggactgttgaagccttcggagaccctgtccctcacctgcgctgtctatggtgggtccttcagtggttactactggagctggatccgccagcccccagggaaggggctggagtggattggggaaatcaatcatagtggaagcaccaactacaacccgtccctcaagagtcgagtcaccatatcagtagacacgtccaagaaccagttctccctgaagctgagctctgtgaccgccgcggacacggctgtgtattactgtgcgagaggcggcatgaccggatattgtagtagtaccagctgttcccactggaactaccgacctcaaaactggttcgacccctggggccagggaaccctggtcaccgtctcctcag

SEQ ID NO: 3658 - DNA, 364 bp, Homo sapiens
caggtgcagctggtggagtctgggggaggcgtggtccagcctgggaggtccctgagactctcctgtgcagcctctggattcatcttcactagctatgttatgcactgggtccgccaggctccaggcaaggggctggagtgggtggcagttatttcatatgatggatccaataaattttacgcagactccgtgaagggccgattcaccttctccagagacaattccaagaacacgctgtctctgcaaatgatcagcctgagagctgaggacacggctgtttattactgtgcgagaggggaggggaaacagctttggaccaaccttgactactggggccagggaacccttgtcaccgtctcctcag

SEQ ID NO: 3659 - DNA, 364 bp, Homo sapiens
caggtgcagctggtggagtctgggggaggcgtggtccagcctgggatgtccctgagactctcctgtgcagcctctggattcatcttcagtagctttgctatgcactgggtccgccaggctccaggcaagggactggagtgggtggcagttatatcctatgatggaagcaataaatactacgctgactccgtgaagggccgattcaccttctccagggacaattccaagaacacgctgtatctgcaaatgaacagcctgagagccgaggacacggctgtttattactgtgcgaggtcccatagtgggaactacaaatcacactttgactactggggccagggaaccctggtcaccgtctcctcag

SEQ ID NO: 3660 - DNA, 364 bp, Homo sapiens
caggtgcagctggtggagtctgggggaggcgtggtccagcctgggaggtccctgagactctcctgtgcagcgtctggattcaccttcagtagctatggcatgcactgggtccgccaggctccaggcaaggggctggagtgggtggcagttatatggtatgatggaactaataaatactatgcagactccgtgaagggccgattcaccatctccagagacaattccaagaacacgctgtatctgcagatgaacagcctgagagccgaggacacggctgtgtattactgtgcgagagagggtctgggtgcagtggttcagggcctggatctctggggccgtggcaccctggtcactgtctcctcag

SEQ ID NO: 3661 - DNA, 364 bp, Homo sapiens
gaggtgcagctgttggagtctgggggaggcttggtacagcctggggggtccctgagactctcctgtgcagcctctggattcacctttagcagctatgccatgagctgggtccgccaggctccagggaaggggctggagtgggtctcagctattagtggtagtggtggtagcacatactacgcagactccgtgaagggccggttcaccatctccagagacaattccaagaacacgctgtatctgcaaatgaacagcctgagagccgaggacacggccgtatattactgtgcgaaagaatgggggagtatagtgggagctactattgactactggggccagggaaccctggtcaccgtctcctcag

SEQ ID NO: 3662 - DNA, 364 bp, Homo sapiens
gaggtgcaactattggagtctgggggaggcttggtacagcctggggggtccctgagactctcctgtgcagcctctggattcacctttagcagctatgccatgagctgggtccgccaggctccagggaaggggctggagtgggtctcagctattagtggtagtggtggtagcacatactacgcagactccgtgaagggccggttcaccatctccagagacaattccaagaacacgctgtatctgcaaatgaacagcctgagagccgaggacacggccgtatattactgtgcgaaacacgtcggctacgatgactacgatggttatgactattggggccagggaaccctggtcaccgtctcctcag

SEQ ID NO: 3663 - DNA, 361 bp, Homo sapiens
caggtgctgctgcaggagtcgggcccaggactggtgaagccttcggagaccctgtctctcacctgcactgtctctggtggctccatgagtaattactactggagctggatccggcagcccccagggaagggactggagtggattgggtatatctattataatgggaacaccaactccaacccctccctcaagagtcgagtcaccacatcagtagacacggccaagaagcagttctccctgaaggtgagctctgtgaccgctgcggacacggccgtgtattactgtgcgaggggtggatacacctataattacccaagttttgatgtctggggccaagggacaacggtcatcgtgtcttcag

SEQ ID NO: 3664 - DNA, 364 bp, Homo sapiens
caggtgcagctggtggagtctgggggaggcgtggtccagcctgggaggtccctgagactctcctgtgcagcctctggattcaccttcagtagctatggcatgcactgggtccgccagggtccaggcaaggggctggagtgggtggcagtcacatcatatgatgggagtaataagtactatgcagactccgtgaagggccgattcaccatctccagagacaattccaagaacacgctgtatctgcaaatgaacagcctgagagctgaggacatggctgtgtattactgtgcgaagtcgtatagtgggagttaccgggatggttttgatatctggggccaagggacaatggtcaccgtctcttcag

SEQ ID NO: 3665 - DNA, 364 bp, Homo sapiens
gaggtgcagctggtggagtctgggggaggcttggtacagcctggggggtccctgagactctcctgtgcagcctctggattcaccttcagtagctatagcatgaactgggtccgccaggctccagggaaggggctggagtgggtttcatacattagtagtagtagtagtaccatatactacgcagactctgtgaagggccgattcaccatctccagagacaatgccaagaactcactgtatctgcaaatgaacagcctgagagccgaggacacggctgtgtattactgtgcgagattcggggggggaccttactcgacctcccttgactactggggccagggaaccctggtcaccgtctcctcag

SEQ ID NO: 3666 - DNA, 364 bp, Homo sapiens
gaggtgcagctggtggagtctgggggaggcttggtacagcctggagggtccctgagactctcctgtgcagcctctggattcaccttcagtagttatgaaatgaactgggtccgccaggctccagggaaggggctggagtgggtttcatacattagtagtagtggtagtaccatatactacgcagactctgtgaagggccgattcaccatctccagagacaacgccaagaactcactgtatctgcaaatgaacagcctgagagccgaggacacggctgtttattactgtgcgagagatggcccctggctggccacaggtgcttttgatatctggggccaagggacaatggtcaccgtctcttcag

SEQ ID NO: 3667 - DNA, 367 bp, Homo sapiens
caggtcaccttgagggagtctggtcctgcgctggtgaaagccacacagaccctcacactgacctgctccttctctggcctctcactcagcaccagtggaatgtgtgtgagctggatccgtcagcccccagggaaggccctggagtggcttgcacgcattgattgggatgatgatacatattacagcacatctttgatgaccaggctcaccatctccaaggacacctccaaaaaccaggtggtccttacaatgaccaacatggaccctgtggacacagccacgtattactgtgcacggctcagagtgggtggcttcgactactactttgactactggggccagggagccctggtcaccgtctcctcag

SEQ ID NO: 3668 - DNA, 363 bp, Homo sapiens
gaggtgcagctggtgcagtctggagcagaggtgaaaaagcccggggagtctctgaagatctcctgtaagggttctggatacagctttaccagctactggatcggctgggtgcgccagatgcccgggaaaggcctggagtggatggggatcatctatcctggtgactctgataccagatacagcccgtccttccaaggccaggtcaccatctcagccgacaagtccatcagcaccgcctacctgcagtggagcagcctgaaggcctcggacaccgccatgtattactgtgcggttgggagcagcagctactactactacggtatggacgtctggggccaagggaccacggtcaccgtctcctca

SEQ ID NO: 3669 - DNA, 361 bp, Homo sapiens
caggtgcagctgcaggagtcgggcccaggactggtgaagccttcggagaccctgtccctcacctgcactgtctctggtggctccatcagtagttactactggagctggatccggcagccgccagggaagggactggagtggattgggtatatctattccagtgggagcgccaactacaacccctccctcaagagtcgagtcgccatatcagtagacacgtccaagaaccagttctccctgaaggtgagctctgtgaccgctgcggacgcggccgtgtattactgtgcgagagtctactactacggtggtaactcctgctttgactcctggggccagggaaccctggtcaccgtctcctcag

SEQ ID NO: 3670 - DNA, 364 bp, Homo sapiens
gaggtgcagctggtggagtctgggggagacttggtacagccgggggggtccctgagactctcctgtgcagcctctggattcaccttcagtacctctaacatgaactgggtccgccaggctccagggaaggggctggagtgggtttcatacattggttctagtggtactcccatattttacgcagactctgtgaagggccgattcaccatctccagagacaatgccaagaactcgctgtatctgcaattgaacagcctgagagtcgaggacacggctgtgtattactgtgcgagagacgttgtgcggggagatggctacaatttcgcctcctggggccagggaaccctggtcaccgtctcctcag

SEQ ID NO: 3671 - DNA, 357 bp, Homo sapiens
gaagtgcagctggtggagtctgggggaggcgtggtacagcctggcaggtccctgagactctcctgtatagcctctggattcatctttgaagattatgccatgcactgggtccggcaggttccagggaagggcctggagtgggtctcaggtattagttggaatagtggcaacattgcctatgcggactccgtgaagggccgattcaccatctccagagacaacgccaagaactccctgtatctgcaaatgaacagtctgagagatgaagacacggccttttattattgtgcaaaagaggccccttggtattacggtatggacgtctggggccttgggaccccggtcaccgtctcctca

SEQ ID NO: 3672 - DNA, 356 bp, Homo sapiens
gaggtgcaactggtggagtctgggggaggcctggtcaagcctggggggtccctgagactctcctgtgcagcctctggattcaccttcactacgtctaacatgaactgggtccgcctggctcctgggagggggctggagtgggtctcatccattagtagtagtagcagttacatattctacgcagactcagtgaagggccgattcaccgtctccagagacaacggcaagaactcactgtatctgcaaatgagcagcctgagagccgaggacacggctgtgtattactgtgcgagagaccacagcagcgatccgtacttcgatctctggggccgtggcgccctggtcactgtctcctc

SEQ ID NO: 3673 - DNA, 358 bp, Homo sapiens
caggtgcagctgcaggagtcgggcccaggactggtgaagccttcggggaccctgtccctcacctgcactgtctctggtggctccatcagcagtagtacctggtggagttgggtccgccagcccccagggaaggggctggagtggattggggaaatctatcatagtgggagcaccaactacaacccgtccctcaagagtcgagtcaccatatcagtagacaagtccaggaaccagttctccctgaagctgagctctgtgaccgccgcggacacggccgtgtattactgtgcatctagaacgacggctagggacccatttgactactggggccagggaaccctggtcaccgtctcctcag

SEQ ID NO: 3674 - DNA, 358 bp, Homo sapiens
gaggtgcagctggtggagtctgggggaggctcggtacagcctggggggtccctgagactctcctgtgcagcctctggattcaacttcagtgtctatagcatgaactgggtccgccaggctccagggaaggggctggagtgggtttcatacattagtagtaggagtagtgccatatactacgcagactctgtgaagggccgattcaccatctccagagacaatgccaagaactcactgcatctgctaatgaacagcctgagagccgaggacacggctgtgtattactgtgcgagagtaggatacatctatggttattctgactactggggccagggaaccctggtcaccgtctcctcag

SEQ ID NO: 3675 - DNA, 361 bp, Homo sapiens
caggtgcagctgcaggagtcgggcccaggactggtgaagccttcggagaccctgtccctcacctgcactgtctctggtggctccgtcagcagtggtagttactactggagctggatccggcagcccccagggaagggactggagtggattgggtatatctattacagtgggagcaccaactacaacccctccctcaagagtcgagtcaccatatcagtagacacgtccaagaaccagttctccctgaagctgagctctgtgaccgctgcggacacggccgtgtattactgtgcgattattacgatttttggagtggtctctgactactggggccagggaaccctggtcaccgtctcctcag

SEQ ID NO: 3676 - DNA, 364 bp, Homo sapiens
gaggtgcagctggtggagtctgggggaggcctggtcaagcctggggggtccctgagactctcctgtgcagcctctggattcaccttcagtagctatagcatgaactgggtccgccaggctccagggaaggggctggagtgggtctcatccattagtagtagtagtagttacatatactacgcagactcagtgaagggccgattcaccatctccagagacaacgccaagaactcactgtatctgcaaatgaacagcctgagagccgaggacacggctgtgtattactgtgcgagagatatcgtggctggtgagggagatgcttttgatatctggggccaagggacaatggtcaccgtctcttcag

SEQ ID NO: 3677 - DNA, 358 bp, Homo sapiens
caggtgcagctggtggagtctgggggaggcgtggtccagcctgggaggtccctgagactctcctgtgcagcctctggattcaccttcagtatctatgctatgcactgggtccgccaggctccaggcaaggggctggactgggtggcagtgatatcatatgatggaaacaataaatatcacgcagactccgtgaagggccggttcaccatctccagagacgattccaagaacacactctttttgcaaatgaacagcctgagagatgaggacacggctatctattactgtgcgagaggcgggggtggctaccgctactttgacttctggggccagggaaccctggtcaccgtctcctcag

SEQ ID NO: 3678 - DNA, 369 bp, Homo sapiens
gaggtgcagctggtggagtctgggggaggcttggtacagccagggcggtccctgagactctcctgtacagcttctggattcacctttggtgattatgctatgagctggttccgccaggctccagggaaggggctggagtgggtaggtttcattagaagcaaagcttatggtgggacaacagaatacgccgcgtctgtgaaaggcagattcaccatctcaagagatgattccaaaagcatcgcctatctgcaaatgaacagcctgaaaaccgaggacacagccgtgtattactgtcaagtgtatgctatggactactactactacggtatggacgtctggggccaagggaccacggtcaccgtctcctca

SEQ ID NO: 3679 - DNA, 358 bp, Homo sapiens
gaggtgcagctggtgcagtctggagcagaggtgaaaaagcccggggagtctctgaagatctcctgtaagggttctggatacagctttaccagctactggatcggctgggtgcgccagatgcccgggaaaggcctggagtggatggggatcatctatcctggtgactctgataccagatacagcccgtccttccaaggccaggtcaccatctcagccgacaagtccatcagcaccgcctacctgcagtggagcagcctgaaggcctcggacaccgccatgtattactgtgcgagactgaggctcgtcggttattaccttgactactggggccagggaaccctggtcaccgtctcctcag

SEQ ID NO: 3680 - DNA, 364 bp, Homo sapiens
gaggtgcagttgctggagtctgggggaggcttggtacagcctggggggtccctgagactctcctgtgcagcctctggattcacctttagcaattatgtcatgacctgggtccgccaggctccagggaaggggctggagtgggtctcaattattagtggtggtggtgagaccacatactacgcagactccctgaagggccggttctccatctccagagacaattccaagaacacgctgtatctgcaaatgaacagcctgagagccgaggacacggccgtatattactgtgcgggacgtattagtaccacctcccttaggtacttcgatctctggggccgtggcaccctggtcactgtctcctcag

SEQ ID NO: 3681 - DNA, 286 bp, Homo sapiens
gggttctcactcagcactagtggaatgtgtgtgagctggatccgtcagcccccagggaaggccctggagtggcttgcacgcattgattgggatgatgataaatactacagcacatctctgaagaccaggctcatcatctccaaggacacctccaagaaccaggtggtccttacaatgaccaacatggaccctgtggacacagccacgtattactgtgcacggattctagcagccacggtaaccattgactactggggccagggaaccctggtcaccgtctcctcag

SEQ ID NO: 3682 - DNA, 355 bp, Homo sapiens
caggtgcagctgcaggagtcgggcccaggactggtgaagccttcggagaccctgtccctcacctgcactgtctctggtggctccatcagtagttactactggagctggatccggcagcccccagggaagggactggagtggattgggtatatctattacagtgggagcaccaactacaacccctccctcaagagtcgagtcaccatatcagtagacacgtccaagaaccagttctccctgaagctgagctctgtgaccgctgcggacacggccgtgtattactgtgcgagagagctatacattggaaactggttcgacccctggggccagggaaccctggtcaccgtctcctcag

SEQ ID NO: 3683 - DNA, 358 bp, Homo sapiens
gaggtgcagctggtggagtctgggggaggcttggtccagcctggggggtccctgagactctcctgtgcagcctctggattcacctttagtagttattggatgagctgggtccgccaggctccagggaaggggctggagtgggtggccaacataaagcaagatggaagtgagaaatactatgtggtctctgtgaagggccgattcaccatctccagagacaacgccaagaactcactgtatcttcaaatgaacagcctgagagccgaggacacggctgtgtatttctgtgcgaagaagagatggctacaagccgactttgactactggggccagggaaccctggtcaccgtctcctcag

SEQ ID NO: 3684 - DNA, 358 bp, Homo sapiens
gaggtgcagctgttggagtctgggggaggcttggtacagcctggggggtccctgagactctcctgtgcagcctctggattcacctttagcagctatgccatgagctgggtccgccaggctccagggaaggggctggagtgggtctcagctattagtggtagtggtggtagcacatactacgcagactccgtgaagggccggttcaccatctccagagacaattccaagaacacgctgtatctgcaaatgaacagcctgagagccgaggacacggccgtatattactgtgcgaaagacgtattactatggttcggggagttattatggggccagggaaccctggtcaccgtctcctcag

SEQ ID NO: 3685 - DNA, 355 bp, Homo sapiens
caggtgcagctgcaggagtcgggcccaggactggtgaagccttcggagaccctgtccctcgcctgcactgtctctgatgactccatcaggacctaccactggaactggatccggcagtccccaggaaagggactggagtggattgggtatgtctatcacagtgggagcaccaactacaacccctccctcaagagtcgagtcaccatgtcagtagacacgtccaagaagcaggtctccctgaggctgagctctgtgaccgctgcggacacggccctgtattattgtgcgaaatgggacgattcccatcgtgcttttgatatttggggacaggggacaatggtcaccgtctcttcag

SEQ ID NO: 3686 - DNA, 358 bp, Homo sapiens
caggtgcagctggtgcagtctggggctgaggtgaagaagcctgggtcctcggtgaaggtctcctgcaaggcttctggaggcaccttcagcagctatgctatcagctgggtgcgacaggcccctggacaagggcttgagtggatgggagggatcatccctatctttggtacagcaaactacgcacagaagttccagggcagagtcacgattaccgcggacgaatccacgagcacagcctacatggagctgagcagcctgagatctgaggacacggccgtgtattactgtgcgagggttgggagctactcggagaagactgactactggggccagggaaccctggtcaccgtctcctcag

SEQ ID NO: 3687 - DNA, 375 bp, Homo sapiens
caggtgcagctggtggagtctgggggaggcttggtcaagcctggagggtccctgagactctcctgtgcagcctctggattcaccttcagtgactactacatgagctggatccgccaggctccagggaaggggctggagtgggtttcatacattagtagtagtggtagtaccatatactacgcagactctgtgaagggccgattcaccatctccagggacaacgccaagaactcactgtatctgcaaatgaacagcctgagagccgaggacacggccgtgtattactgtgcgagaactactacggtgactacgataggatactactactacggtatggacgtctggggccaagggaccacggtcaccgtctcctca

SEQ ID NO: 3688 - DNA, 375 bp, Homo sapiens
gaggtgcagctggtggagtccgggggaggcttagttcagcctggggggtccctgagactctcctgtgcagcctctggattcaccttcagtagctactggatgcactgggtccgccaagctccagggaaggggctggtgtgggtctcacgtattaatagtgatgggagtagcacaagctacgcggactccgtgaagggccgattcaccatctccagagacaacgccaagaacacgctgtatctgcaaatgaacagtctgagagccgaggacacggctgtgtattactgtgcaagagatggtttggagtggtttaattactactactactacggtatggacgtctggggccaagggaccacggtcaccgtctcctca

SEQ ID NO: 3689 - DNA, 357 bp, Homo sapiens
caggtgcagctggtgcagtctggggctgaggtgaagaagcctggggcctcagtgaaggtctcctgcaaggcttctggatacaccttcaccggctactatatgcactgggtgcgacaggcccctggacaagggcttgagtggatgggatggatcaaccctaacagtggtggcacaaactatgcacagaagtttcagggctgggtcaccatgaccagggacacgtccatcagcacagcctacatggagctgagcaggctgagatctgacgacacggccgtgtattactgtgcgagagatttaagtggattatacggtatggacgtctggggccaagggaccacggtcaccgtctcctca

SEQ ID NO: 3690 - DNA, 355 bp, Homo sapiens
caggtgcagctgcaggagtcgggcccaggactggtgaagccttcggagaccctgtccctcacctgcactgtctctggtggctccatcagtagttactactggagctggatccggcagcccccagggaagggactggagtggattgggtatatctattacagtgggagcaccaactacaacccctccctcaagagtcgagtcaccatatcagtagacacgtccaagaaccagttctccctgaagctgagctctgtgaccgctgcggacacggccgtgtattactgtgcgagagtgcagtggccgtcgtactactttgactactggggccagggaaccctggtcaccgtctcctcag

SEQ ID NO: 3691 - DNA, 355 bp, Homo sapiens
caggtgcagctgcaggagtcgggcccaggactggtgaagccttcggagaccctgtccctcacctgcactgtctctggtggctccatcagtagttactactggagctggatccggcagcccccagggaagggactggagtggattgggtatatctattacagtgggagcaccaactacaacccctccctcaagagtcgagtcaccatatcagtagacacgtccaagaaccagttctccctgaagctgagctctgtgaccgctgcggacacggccgtgtattactgtgcgagagggggctacggtgatgggtactttgactactggggccagggaaccctggtcaccgtctcctcag

SEQ ID NO: 3692 - DNA, 375 bp, Homo sapiens
gaagtgcagctggtggagtctgggggaggcttggtacagcctggcaggtccctgagactctcctgtgcagcctctggattcacctttgatgattatgccatgcactgggtccggcaagctccagggaagggcctggagtgggtctcaggtattagttggaatagtggtaccataggctacgcggactctgtgaagggccgattcaccatctccagagacaacgccaagaactccctgtttctgcaaatgaacagtctgagagctgaggacacggccttgtattactgtgcaaaagatctcggggactacggtgtcaacagggactactacgttatggacgtctggggccaagggaccacggtcaccgtctcctca

SEQ ID NO: 3693 - DNA, 375 bp, Homo sapiens
gaggtgcagctgttggagtctgggggaggcttggtacagcctggggggtccctgagactctcctgtgcagcctctggattcacctttagcagctatgccatgagctgggtccgccaggctccagggaaggggctggagtgggtctcagctattagtggtagtggtggtagcacatactacgcagactccgtgaagggccggttcaccatctccagagacaattccaagaacacgctgtatctgcaaatgaacagcctgagagccgaggacacggccgtatattactgtgcgaaagatgacgatttttggagtggtaggtactactactacggtatggacgtctggggccaagggaccacggtcaccgtctcctca

SEQ ID NO: 3694 - DNA, 375 bp, Homo sapiens
gaggtgcagctgttggagtctgggggaggcttggtacagcctggggggtccctgagactctcctgtgcagcctctggattcacctttagcagctatgccatgagctgggtccgccaggctccagggaaggggctggagtgggtctcagctattagtggtagtggtggtagcacatactacgcagactccgtgaagggccggttcaccatctccagagacaattccaagaacacgctgtatctgcaaatgaacagcctgagagccgaggacacggccgtatattactgtgcgaaagatacggccccctcgatttttggagtggttatttcgggtatggacgtctggggccaagggaccacggtcaccgtctcctca

SEQ ID NO: 3695 - DNA, 375 bp, Homo sapiens
caggtgcagctggtgcagtctggggctgaggtgaagaagcctggggcctcagtgaaggtctcctgcaaggcttctggatacaccttcaccggctactatatgcactgggtgcgacaggcccctggacaagggcttgagtggatgggatggatcaaccctaacagtggtggcacaaactatgcacagaagtttcagggctgggtcaccatgaccagggacacgtccatcagcacagcctacatggagctgagcaggctgagatctgacgacacggccgtgtattactgtgcgagagatttggggtggggttactatgatagtagtgactacggtatgggagtctggggccaagggaccacggtcaccgtctcctca

SEQ ID NO: 3696 - DNA, 376 bp, Homo sapiens
caggtccagcttgtgcagtctggggctgaggtgaagaagcctggggcctcagtgaaggtttcctgcaaggcttctggatacaccttcactagctatgctatgcattgggtgcgccaggcccccggacaaaggcttgagtggatgggatggatcaacgctggcaatggtaacacaaaatattcacagaagttccagggcagagtcaccattaccagggacacatccgcgagcacagcctacatggagctgagcagcctgagatctgaagacacggctgtgtattactgtgcgagagattcaattgtagtggtggtagctgacccggggttctggttcgacccctggggccagggaaccctggtcaccgtctcctcag

SEQ ID NO: 3697 - DNA, 376 bp, Homo sapiens
caggtgcagctggtggagtctgggggaggcgtggtccagcctgggaggtccctgagactctcctgtgcagcgtctggattcaccttcagtagctatggcatgcactgggtccgccaggctccaggcaaggggctggagtgggtggcagttatatggtatgatggaagtaataaatactatgcagactccgtgaagggccgattcaccatctccagagacaattccaagaacacgctgtatctgcaaatgaacagcctgagagccgaggacacggctgtgtattactgtgcgagggggtatagcagctcggtctttcgactccacgacaactggttcgacccctggggccagggaaccctggtcaccgtctcctcag

SEQ ID NO: 3698 - DNA, 375 bp, Homo sapiens
gaggtgcagctggtggagtctgggggaggcttggtacagcctggagggtccctgagactctcctgtgcagcctctggattcaccttcagtagttatgaaatgaactgggtccgccaggctccagggaaggggctggagtgggtttcatacattagtagtagtggtagtaccatatactacgcagactctgtgaagggccgattcaccatctccagagacaacgccaagaactcactgtatctgcaaatgaacagcctgagagccgaggacacggctgtttattactgtgcgagagacccttactatgatagtagtggttattactacgacggtatggacgtctggggccaagggaccacggtcaccgtctcctca

SEQ ID NO: 3699 - DNA, 373 bp, Homo sapiens
caggtgcagctacagcagtggggcgcaggactgttgaagccttcggagaccctgtccctcacctgcgctgtctatggtgggtccttcagtggttactactggagctggatccgccagcccccagggaaggggctggagtggattggggaaatcaatcatagtggaagcaccaactacaacccgtccctcaagagtcgagtcaccatatcagtagacacgtccaagaaccagttctccctgaagctgagctctgtgaccgccgcggacacggctgtgtattactgtgcgagaggcggcttaggttatgtggtggtgacccctctgggctggttcgacccctggggccagggaaccctggtcaccgtctcctcag

SEQ ID NO: 3700 - DNA, 376 bp, Homo sapiens
caggtgcagctgcaggagtcgggcccaggactggtgaagccttcggagaccctgtccctcacctgcgctgtctctggttactccatcagcagtggttactactggggctggatccggcagcccccagggaaggggctggagtggattgggagtatctatcatagtgggagcacctactacaacccgtccctcaagagtcgagtcaccatatcagtagacacgtccaagaaccagttctccctgaagctgagctctgtgaccgccgcagacacggccgtgtattactgtgcgagagaggccggggggagtggttattataggtcattgatctggttcgacccctggggccagggaaccctggtcaccgtctcctcag

SEQ ID NO: 3701 - DNA, 361 bp, Homo sapiens
caggtgcagctgcaggagtcgggcccaggactggtgaagccttcacagaccctgtccctcacctgcactgtctctggtggctccatcagcagtggtggttactactggagctggatccgccagcacccagggaagggcctggagtggattgggtacatctattacagtgggagcacctactacaacccgtccctcaagagtcgagttaccatatcagtagacacgtctaagaaccagttctccctgaagctgagctctgtgactgccgcggacacggccgtgtattactgtgcgagagcgcggagctacgggcccccatttgactactggggccagggaaccctggtcaccgtctcctcag

SEQ ID NO: 3702 - DNA, 379 bp, Homo sapiens
caggtgcagctgcaggagtcgggcccaggactggtgaagccttcacagaccctgtccctcacctgcactgtctctggtggctccatcagcagtggtggttactactggagctggatccgccagcacccagggaagggcctggagtggattgggtacatctattacagtgggagcacctactacaacccgtccctcaagagtcgagttaccatatcagtagacacgtctaagaaccagttctccctgaagctgagctctgtgactgccgcggacacggccgtgtattactgtgcgagacgcaggccccattgtagtagtaccagctgctggtactactttgactactggggccagggaaccctggtcaccgtctcctcag

SEQ ID NO: 3703 - DNA, 376 bp, Homo sapiens
caggtgcagctgcaggagtcgggcccaggactggtgaagccttcggggaccctgtccctcacctgcgctgtctctggtggctccatcagcagtagtaactggtggagttgggtccgccagcccccagggaaggggctggagtggattggggaaatctatcatagtgggagcaccaactacaacccgtccctcaagagtcgagtcaccatatcagtagacaagtccaagaaccagttctccctgaagctgagctctgtgaccgccgcggacacggccgtgtattactgtgcgagaggtctccgcccgtcttactatgatagtagtggccaatactccaactactggggccagggaaccctggtcaccgtctcctcag

SEQ ID NO: 3704 - DNA, 376 bp, Homo sapiens
caggtgcagctggtggagtctgggggaggcgtggtccagcctgggaggtccctgagactctcctgtgcagcctctggattcaccttcagtagctatgctatgcactgggtccgccaggctccaggcaaggggctggagtgggtggcagttatatcatatgatggaagcaataaacactacgctgactacgggaagggccgattcaccatctccagagacaattccaagaacacgctgcatctgcaaatgaacagcctgagaactgaagacacggctttgttttactgtgcgagagaagggggggcgctactagcagtggctggtacggggtactttgactactggggccagggaaccctggtcaccgtctcctcag

SEQ ID NO: 3705 - DNA, 379 bp, Homo sapiens
caggtgcagctgcaggagtcgggcccaggactggtgaagccttcacagaccctgtccctcacctgcactgtctctggtggctccatcagcagtggtgattactactggagttggatccgccagcccccagggaagggcctggagtggattgggtacatctattacagtgggagcacctactacaacccgtccctcaagagtcgagttaccatatcagtagacacgtccaagaaccagttctccctgaagctgagctctgtgactgccgcagacacggccgtgtattactgtgccagagatggggcctatagcagcagctggtacgaaccctccggttttgactactggggccagggaaccctggtcaccgtctcctcag

SEQ ID NO: 3706 - DNA, 376 bp, Homo sapiens
gaagtgcagctggtggagtctgggggaggcttggtacagcctggcaggtccctgagactctcctgtgcagcctctggattcacctttgatgattatgccatgcactgggtccggcaagctccagggaagggcctggagtgggtctcaggtattagttggaatagtggtagcataggctatgcggactctgtgaagggccgattcaccatctccagagacaacgccaagaactccctgtatctgcaaatgaacagtctgagagctgaggacacggccttgtattactgtgcaaaaggtccccccttgtattacgatttttggagtggttccccctttgactactggggccagggaaccctggtcaccgtctcctcag

SEQ ID NO: 3707 - DNA, 385 bp, Homo sapiens
caggtacagctgcagcagtcaggtccaggactggtgaagccctcgcagaccctctcactcacctgtgccatctccggggacagtgtctctagcaacagtgctgcttggaactggatcaggcagtccccatcgagaggccttgagtggctgggaaggacatactacaggtccaagtggtataatgattatgcagtatctgtgaaaagtcgaataaccatcaacccagacacatccaagaaccagttctccctgcagctgaactctgtgactcccgaggacacggctgtgtattactgtgcaagagatcccgggcaaggagaaccgtggctggtacgtttatactttgactactggggccagggaaccctggtcaccgtctcctcag

SEQ ID NO: 3708 - DNA, 376 bp, Homo sapiens
gaagtgcagctggtggagtctgggggagtcgtggtacagcctggggggtccctgagactctcctgtgcagcctctggattcacctttgatgattatgccatgcactgggtccgtcaagctccggggaagggtctggagtgggtctctcttattagttgggatggtggtagcacatactatgcagactctgtgaagggtcgattcaccatctccagagacaacagcaaaaactccctgtatctgcaaatgaacagtctgagagctgaggacaccgccttgtattactgtgcaaaagatgcgggaaatctgtatagcagcagctggtacggaggggtagactactggggccagggaaccctggtcaccgtctcctcag

SEQ ID NO: 3709 - DNA, 376 bp, Homo sapiens
gaggtgcagctggtggagtctgggggaggcttggtccagcctggggggtccctgagactctcctgtgcagcctctggattcacctttagtagctattggatgagctgggtccgccaggctccagggaaggggctggagtgggtggccaacataaagcaagatggaagtgagaaatactatgtggactctgtgaagggccgattcaccatctccagagacaacgccaagaactcactgtatctgcaaatgaacagcctgagagccgaggacacggctgtgtattactgtgcgagagatcaacatttcgtgggattttggagtggttaccccctaggggactactggggccagggaaccctggtcaccgtctcctcag

SEQ ID NO: 3710 - DNA, 376 bp, Homo sapiens
gaggtgcagctggtggagtctgggggaggcttggtccagcctggggggtccctgagactctcctgtgcagcctctggattcacctttagtagctattggatgagctgggtccgccaggctccagggaaggggctggagtgggtggccaacataaagcaagatggaagtgagaaatactatgtggactctgtgaagggccgattcaccatctccagagacaacgccaagaactcactgtatctgcaaatgaacagcctgagagccgaggacacggctgtgtattactgtgcgagagacggtgattgtagtggtggtagctgctactccggctactttgactactggggccagggaaccctggtcaccgtctcctcag

SEQ ID NO: 3711 - DNA, 379 bp, Homo sapiens
caggtgcagctgcaggagtcgggcccaggactggtgaagccttcacagaccctgtccctcacctgcactgtctctcgtggctccatcagcagtggtgattactactggaattggatccgccagcccccaggaaagggcctggagtggattgggtacatccattacagtgggaacacctacttcaacccgtccctctggagtcgaattaccatatcagtagacacgtccaagaaccacttctccctgaacctcagctctgtgactgccgcagacacggccgtatattactgtgccagagctttatacagtacaaggcggacggtgactatggatgcttttgatatctggggccaagggacaatggtcaccgtctcttcag

SEQ ID NO: 3712 - DNA, 387 bp, Homo sapiens
caggtgcagctggtgcagtctggggctgaggtgaagaagcctgggtcctcggtgaaggtctcctgcaaggcttctggaggcaccttcagcagctatgctatcagctgggtgcgacaggcccctggacaagggcttgagtggatgggagggatcatccctatctttggtacagcaaactacgcacagaagttccagggcagagtcacgattaccgcggacaaatccacgagcacagcctacatggagctgagcagcctgagatctgaggacacggccgtgtattactgtgcgagagagtcgtatggttcggggagttattataacgtggttatgtggtactacggtatggacgtctggggccaagggaccacggtcaccgtctcctca

SEQ ID NO: 3713 - DNA, 376 bp, Homo sapiens
caggtgcagctgcaggagtcgggcccaggactggtgaagccttcggggaccctgtccctcacctgcgctgtctctggtggctccatcagcagtagtaactggtggagttgggtccgccagcccccagggaaggggctggagtggattggggaaatctatcatagtgggagcaccaactacaacccgtccctcaagagtcgagtcaccatatcagtagacaagtccaagaaccagttctccctgaagctgagctctgtgaccgccgcggacacggccgtgtattactgtgcgagaggggaaaaagggggccgtacggtgactacccgaggctggttcgacccctggggccagggaaccctggtcaccgtctcctcag

SEQ ID NO: 3714 - DNA, 385 bp, Homo sapiens
caggtgcagctacagcagtggggcgcaggactgttgaagccttcggagaccctgtccctcacctgcgctgtctatggtgggtccttcagtggttactactggagctggatccgccagcccccagggaaggggctggagtggattggggaaatcaatcatagtggaagcaccaactacaacccgtccctcaagagtcgagtcaccatatcagtagacacgtccaagaaccagttctccctgaagctgagctctgtgaccgccgcggacacggctgtgtattactgtgcgagaggccgctcgagatattgtagtggtggtagctgctaccggggaagggactactttgactactggggccagggaaccctggtcaccgtctcctcag

SEQ ID NO: 3715 - DNA, 388 bp, Homo sapiens
caggtgcagctggtgcagtctggggctgaggtgaagaagcctgggtcctcggtgaaggtctcctgcaaggcttctggaggcaccttcagcagctatgctatcagctgggtgcgacaggcccctggacaagggcttgagtggatgggagggatcatccctatctttggtacagcaaactacgcacagaagttccagggcagagtcacgattaccgcggacgaatccacgagcacagcctacatggagctgagcagcctgagatctgaggacacggccgtgtattactgtgcgagagataggcggtccggatacgtggattactatgatagtagtggttaccaagcctttgactactggggccagggaaccctggtcaccgtctcctcag

SEQ ID NO: 3716 - DNA, 376 bp, Homo sapiens
gaggtgcagctgttggagtctgggggaggcttggtacagcctggggggtccctgagactctcctgtgcagcctctggattcacctttagcagctatgccatgagctgggtccgccaggctccagggaaggggctggagtgggtctcagctattagtggtagtggtggtagcacatactacgcagactccgtgaagggccggttcaccatctccagagacaattccaagaacacgctgtatctgcaaatgaacagcctgagagccgaggacacggccgtatattactgtgcgaaagccaacgtattacgatattttgactggccttacgatgcttttgatatctggggccaagggacaatggtcaccgtctcttcag

SEQ ID NO: 3717 - DNA, 376 bp, Homo sapiens
gaggtgcagctgttggagtctgggggaggcttggtacagcctggggggtccctgagactctcctgtgcagcctctggattcacctttagcagctatgccatgagctgggtccgccaggctccagggaaggggctggagtgggtctcagctattagtggtagtggtggtagcacatactacgcagactccgtgaagggccggttcaccatctccagagacaattccaagaacacgctgtatctgcaaatgaacagcctgagagccgaggacacggccgtatattactgtgcgaaaggaattctgtatgatagtagtggttactggggtcaggcttttgatatctggggccaagggacaatggtcaccgtctcttcag

SEQ ID NO: 3718 - DNA, 388 bp, Homo sapiens
caggtgcagctgcaggagtcgggcccaggactggtgaagccttcggggaccctgtccctcacctgcgctgtctctggtggctccatcagcagtagtaactggtggagttgggtccgccagcccccagggaaggggctggagtggattggggaaatctatcatagtgggagcaccaactacaacccgtccctcaagagtcgagtcaccatatcagtagacaagtccaagaaccagttctccctgaagctgagctctgtgaccgccgcggacacggccgtgtattactgtgcgagagtacccgaaatagcagtggctggccagccgaggaccaaaagacagaccaactttgactactggggccagggaaccctggtcaccgtctcctcag

SEQ ID NO: 3719 - DNA, 391 bp, Homo sapiens
caggtgcagctgcaggagtcgggcccaggactggtgaagccttcacagaccctgtccctcacctgcactgtctctggtggctccatcagcagtggtggttactactggagctggatccgccagcacccagggaagggcctggagtggattgggtacatctattacagtgggagcacctactacaacccgtccctcaagagtcgagttaccatatcagtagacacgtctaagaaccagttctccctgaagctgagctctgtgactgccgcggacacggccgtgtattactgtgcgagaggcccccactccggatattgtagtagtaccagctgctatgagccccatgcttttgatatctggggccaagggacaatggtcaccgtctcttcag

SEQ ID NO: 3720 - DNA, 381 bp, Homo sapiens
aggtgcagctggtggagtctgggggaggcctggtcaagcctggggggtccctgagactctcctgtgcagcctctggattcaccttcagtagttataccatgaactgggtccgccaggctccaggcaaggggctggagtgggtggcagttatatcatatgatggaagtaataaatactatgcagactccgtgaagggccgattcaccatctccagagacaacgccaagaactcactgtatctgcaaatgaacagcctgagagccgaggacacggctgtgtattactgtgcgagaatcccgtattattatgatagtagtggttattggagtgggggggacgttgactactggggccagggaaccctggtcaccgtctcctcag

SEQ ID NO: 3721 - DNA, 388 bp, Homo sapiens
caggtgcagctggtggagtctgggggaggcgtggtccagcctgggaggtccctgagactctcctgtgcagcctctggattcaccttcagtagctatgctatgcactgggtccgccaggctccaggcaaggggctggagtgggtggccgttatatcatatgatggaagcaataaatactacgcagactccgtgaagggccgattcaccatctccagagacaattccaagaacacgctgtatctgcaaatgaacagcctgagagctgaggacacggctgtgtattactgtgcgaggtcgccaagagattactatgatagtagtggttattactacgtcaactggtacttcgatctctggggccgtggcaccctggtcactgtctcctcag

SEQ ID NO: 3722 - DNA, 382 bp, Homo sapiens
gaggtgcagctgttggagtctgggggaggcttggtacagcctggggggtccctgagactctcctgtgcagcctctggattcacctttagcagctatgccatgagctgggtccgccaggctccagggaaggggctggagtgggtctcagctattagtggtagtggtggtagcacatactacgcagactccgtgaagggccggttcaccatctccagagacaattccaagaacacgctgtatctgcaaatgaacagcctgagagccgaggacacggccgtatattactgtgcgaaagatacgatggactcgtattactatgatagtagtggttaccagcccattgactactggggccagggaaccctggtcaccgtctcctcag

SEQ ID NO: 3723 - DNA, 382 bp, Homo sapiens
gaggtgcagctggtgcagtctggagcagaggtgaaaaagcccggggagtctctgaagatctcctgtaaggtttctggatacagctttaccaacttctggatcggctgggtgcgccagatgcccgggaaaggcctggagtggatggcgatcatttatcctggtgactctgataccaaatacagcccgtccttccaaggccaggtcaccatctcagccgacaagtccatcagcaccgcctacctgcagtggagcagcctgaaggcctcggacaccgccatgtattactgtgcgagacaactgggctattgtaatagtatcagctgctatccagatgatgcttttgatatctggggccaagggacaatggtcaccgtctcttcag

SEQ ID NO: 3724 - DNA, 382 bp, Homo sapiens
gaggtgcagctggtggagtctgggggaggcttggtacagccagggcggtccctgagactctcctgtacagcttctggattcacctttggtgattatgctatgagctggttccgccaggctccagggaaggggctggagtgggtaggtttcattagaagcaaagcttatggtgggacaacagaatacgccgcgtctgtgaaaggcagattcaccatctcaagagatgattccaaaagcatcgcctatctgcaaatgaacagcctgaaaaccgaggacacagccgtgtattactgtactagagtcaggagcagtggctggtacgccggggggacgcactactttgactactggggccagggaaccctggtcaccgtctcctcag

SEQ ID NO: 3725 - DNA, 381 bp, Homo sapiens
caggtgcagctggtggagtcggggggaggcttggtcaagcctggagggtccctgagactctcctgtgcagcctctggattcaccttcagtgactactacatgaactggatccgccaggctccagggaaggggctggagtgggtttcatacatcagtagtagtggtagtaccatataccacaaagactctgtgaagggccgattcaccatctccagggacaacgccaagaactcactgtatctgcaaatgaacagcctgagagccgaggacacggccgtgtattactgtgcgagagtcaggggcggtgaataccccggatcttactaccactactacggtatggacgtctggggccaagggaccacggtcaccgtctcctca

SEQ ID NO: 3726 - DNA, 381 bp, Homo sapiens
gaggtgcagctgttggagtctgggggaggcttggtacagcctggggggtccctgagactctcctgtgcagcctctggattcacctttagcagctatgccatgagctgggtccgccaggctccagggaaggggctggagtgggtctcagctattagtggtagtggtggtagcacatactacgcagactccgtgaagggccggttcaccatctccagagacaattccaagaacacgctgtatctgcaaatgaacagcctgagagccgaggacacggccgtatattactgtgcgaaagacaggacgatttttggagtggttatggactactactactacggtatggacgtctggggccaagggaccacggtcaccgtctcctca

SEQ ID NO: 3727 - DNA, 382 bp, Homo sapiens
gaggtgcagctggtggagtctgggggaggcttggtacagcctggggggtccctgagactctcctgtgcagcctctggattcaccttcagtagctatagcatgaactgggtccgccaggctccagggaaggggctggagtgggtttcatacattagtagtagtagtagtaccatatactacgcagactctgtgaagggccgattcaccatctccagagacaatgccaagaactcactgtatctgcaaatgaacagcctgagagccgaggacacggctgtgtattactgtgcgagagatgagtatgattacgtttgggggagttatcgtttctacaactggttcgacccctggggccagggaaccctggtcaccgtctcctcag

SEQ ID NO: 3728 - DNA, 382 bp, Homo sapiens
caggtgcagctgcaggagtcgggcccaggactggtgaagccttcggggaccctgtccctcacctgcgctgtctctggtggctccatcagcagtagtaactggtggagttgggtccgccagcccccagggaaggggctggagtggattggggaaatctatcatagtgggagcaccaactacaacccgtccctcaagagtcgagtcaccatatcagtagacaagtccaagaaccagttctccctgaagctgagctctgtgaccgccgcggacacggccgtgtattactgtgcgagagatcattgtactggtggtgtatgctatttctcgggggattaccggttcgacccctggggccagggaaccctggtcaccgtctcctcag

SEQ ID NO: 3729 - DNA, 378 bp, Homo sapiens
gaggtgcagctggtggagactggaggaggcttgatccagcctggggggtccctgagactctcctgtgcagcctctgggttcgccgtcagtagcaactacatgagctgggtccgccaggctccagggaaggggctggagtgggtctcagttatttatagcggtggtagcacatactacgcagactccgtgaagggccgattcaccatctccagagacaattccaagaacacggtgtatcttcaaatgaacaacctgagagccgaggacacggccgtgtattactgtgcgagtgccccaagactccacggtgactacgccgggggttactactacggtatggacgtctggggccaagggactacggtcaccgtctcctca

SEQ ID NO: 3730 - DNA, 372 bp, Homo sapiens
gaagtgcagctggtggagtctgggggaggcttggtacagcctggcaggtccctgagactctcctgtgcagcctctggattcacctttgatgattatgccatgcactgggtccggcaagctccagggaagggcctggagtgggtctcaggtattagttggaatagtggtagcataggctatgcggactctgtgaagggccgattcaccatctccagagacaacgccaagaactccctgtatctgcaaatgaacagtctgagagctgaggacacggccttgtattactgtgcaaaagtccgggggtcctacggtccttactactactacggtatggacgtctggggccaagggaccacggtcaccgtctcctca

SEQ ID NO: 3731 - DNA, 372 bp, Homo sapiens
gaggtgcagttggtggagtctgggggaggcttggtacagactggagggtccctgagactctcctgtgcagcctctggattcaccttcagtagttatgaaatgcattgggtccgccaggctccagggaaggggctggagtggctttcatacattactcgtagtgctacttccacttactacgcagactctgtgaggggccgattcaccatctccagagacgacgccaagaactcactgtttctgcaaatgaacagcctgagagccgaggactcggctatttattactgtgcgagagatcgatgtcatagtgccagctgctatgactacggtctggacgtctggggccaagggaccacggtcaccgtctcctca

SEQ ID NO: 3732 - DNA, 372 bp, Homo sapiens
gaggtgcagctggtggagtccgggggaggcttagttcagcctggggggtccctgagactctcctgtgcagcctctggattcaccttcagtagctactggatgcactgggtccgccaagctccagggaaggggctggtgtgggtctcacgtattaatagtgatgggagtagcacaagctacgcggactccgtgaagggccgattcaccatctccagagacaacgccaagaacacgctgtatctgcaaatgaacagtctgagagccgaggacacggctgtgtattactgtgcaagaggggcagcagcagcccgttggtactactactacggtatggacgtctggggccaagggaccacggtcaccgtctcctca

SEQ ID NO: 3733 - DNA, 375 bp, Homo sapiens
cagatcaccttgaaggagtctggtcccacgctggtgaaacccacacagaccctcacgctgacctgcaccttctctgggttctcactcagcactagtggagtgggtgtgggctggatccgtcagcccccaggaaaggccctggagtggcttgcactcatttattgggatgatgataagcgctacagtccatctctgaagagcagactcaccatcaccaaggacacctccaaaaaccaggtggtccttacaatgaccaacatggaccctgtggacacaggcacatattactgtgcacacaagttggggcagcagctgacccactactactacggtgtggacgtctggggccaagggaccacggtcaccgtctcctca

SEQ ID NO: 3734 - DNA, 372 bp, Homo sapiens
gaggtgcagctggtggagtctgggggaggcctggtcaagcctggggggtccctgagactctcctgtgcagcctctggattcaccttcagtagctatagcatgaactgggtccgccaggctccagggaaggggctggagtgggtctcatccattagtagtagtagtagttacatatactacgcagactcagtgaagggccgattcaccatctccagagacaacgccaagaactcactgtatctgcaaatgaacagcctgagagccgaggacacggctgtgtattactgtgcggggggggctcggcccgaatacatctactactactacggtatggacgtctggggccaagggaccacggtcaccgtctcctca

SEQ ID NO: 3735 - DNA, 382 bp, Homo sapiens
gaggtgcagctggtggagtctgggggaggcctggtcaagcctggggggtccctgagactctcctgtgcagcctctggattcaccttcagtagttataccatgaactgggtccgccaggctccagggaaggggctggagtgggtctcatccattagtagtagtagtagttacatatactacgcagactcagtgaagggccgattcaccatctccagagacaacgccaagaactcactgtatctgcaaatgaacagcctgagagccgaggacacggctgtgtattactgtgcgagaatcccgtattattatgatagtagtggttattggagtgggggggacgttgactactggggccagggaaccctggtcaccgtctcctcag

SEQ ID NO: 3736 - DNA, 372 bp, Homo sapiens
gaggtgcagctggtggagtctgggggaggcttggtccagcctggggggtccctgagactctcctgtgcagcctctggattcacctttagtagctattggatgagctgggtccgccaggctccagggaaggggctggagtgggtggccaacataaagcaagatggaagtgagaaatactatgtggactctgtgaagggccgattcaccatctccagagacaacgccaagaactcactgtatctgcaaatgaacagcctgagagccgaggacacggctgtgtattactgtgcgagaggcgccggctacggtgactccccatactactacggtatggacgtctggggccaagggaccacggtcaccgtctcctca

SEQ ID NO: 3737 - DNA, 372 bp, Homo sapiens
gaggtgcagctggtggagtccgggggaggcttggtccagcctggggggtccctgagactctcctgtgcagcctctggattcacctttactagttattggatgacctgggtccgccaggctccagggaaggggctggagtgggtggccaacataaagcaagatggaagtgagaaatactatgtggactctgtgaagggccgattcaccatctccagagacaacgccaagaactcattgtatctgcaaatgaacagcctgagagacgaggacacggctgtgtattactgtgcgagagagtgcgttccctatagcagtttgccctactacggtttggacgtctggggccaagggaccacggtcaccgtctcctca

SEQ ID NO: 3738 - DNA, 375 bp, Homo sapiens
caggtgcagctgcaggagtcgggcccaggactggtgaagccttcacagaccctgtccctcacctgcactgtctctggtggctccatcagcagtggtgattactactggagttggatccgccagcccccagggaagggcctggagtggattgggtacatctattacagtgggagcacctactacaacccgtccctcaagagtcgagttaccatatcagtagacacgtccaagaaccagttctccctgaagctgagctctgtgactgccgcagacacggccgtgtattactgtgccagagaggtcgctacggtgactcactactactactacggtatggacgtctggggccaagggaccacggtcaccgtctcctca

SEQ ID NO: 3739 - DNA, 372 bp, Homo sapiens
caggtgcagctggtgcagtctggggctgaggtgaagaagcctgggtcctcggtgaaggtctcctgcaaggcttctggaggcaccttcagcagctatgctatcagctgggtgcgacaggcccctggacaagggcttgagtggatgggagggatcatccctatctttggtacagcaaactacgcacagaagttccagggcagagtcacgattaccgcggacaaatccacgagcacagcctacatggagctgagcagcctgagatctgaggacacggccgtgtattactgtgcgagaggcgaaggggtgtggggaaactactactactacggtatggacgtctggggccaagggaccacggtcaccgtctcctca

SEQ ID NO: 3740 - DNA, 372 bp, Homo sapiens
caggtgcagttggtgcagtctggggctgaggtgaagaagcctgggtcctcggtgacggtctcctgcaaggcttctggagacaccttcagcacctatgctatcagctgggtgcgacaggcccctggacaagggcttgagtggatgggagggatcatccctatctttggtacaacaaactacgcacagaagttccagggcagagtcacgattaccgcggacgactcctcgagcacagcctacatggacctgagaagcctgacatctgaggacacggccgtttattattgtgcgagagatgtggggttcagggatggccaccactactacggtgtggacgtctggggccaagggaccacggtcaccgtctcctca

SEQ ID NO: 3741 - DNA, 370 bp, Homo sapiens
caggtgcacctacagcagtggggcgcaggactgttgaagcctgcggagaccctgtcccgcacctgcgctgtttatggtgggcccttcagtggttactactggagctggatccgccagcccccagggaaggggctggagtggattggggaaatcaatcatagtggaagcaccaagtacaacccgtccctcaagagtcgagtcaccatatcagtagacacgtccaagaaccagttctccctgattctgagctctctgaccgccgcggacacggctgtgtattactgtgcgagagtccccttctatgatcggagtggtacaacaggtccttttgatatctggggccaagggacgatggtcaccgtctcttcag

SEQ ID NO: 3742 - DNA, 373 bp, Homo sapiens
gaggtgcagctggtgcagtctggagcagaggtgaaaaagcccggggagtctctgaagatctcctgtaagggttctggatacagctttaccagctactggatcggctgggtgcgccagatgcccgggaaaggcctggagtggatggggatcatctatcctggtgactctgataccagatacagcccgtccttccaaggccaggtcaccatctcagccgacaagtccatcagcaccgcctacctgcagtggagcagcctgaaggcctcggacaccgccatgtattactgtgcgagcaattactatgatagtagtggttattcaaacgatgcttttgatatctggggccaagggacaatggtcaccgtctcttcag

SEQ ID NO: 3743 - DNA, 373 bp, Homo sapiens
gaggtgcagctggtgcagtctggagcagaggtgaaaaagcccggggagtctctgaagatctcctgtaagggttctggatacagctttgccacctactggatcggctgggtgcgccagatgcccgggaaaggcctggagtggatggggatcatgtatcctggtaactctgataccacatacagcccgtccttccaaggccaggtcaccatctcagccgacaagtccatcagcaccgcctacctgcagtggagcagcctgaaggcctcggacaccgccatgtattactgtgcgagtcgaacctcggatagagatgcctacaattgggatgcttttgatgtctggggccaggggacaatggtcaccgtctcttcag

SEQ ID NO: 3744 - DNA, 373 bp, Homo sapiens
caggtgcagctgcaggagtcgggcccaggactggtgaagccttcggggaccctgtccctcacctgcgctgtctctggtggctccatcagcagtagtaactggtggagttgggtccgccagcccccagggaaggggctggagtggattggggaaatctatcatagtgggagcaccaactacaacccgtccctcaagagtcgagtcaccatatcagtagacaagtccaagaaccagttctccctgaagctgagctctgtgaccgccgcggacacggccgtgtattactgtgcgagagatctcggggatattgtatctctcagcggtcatgcttttgatatctggggccaagggacaatggtcaccgtctcttcag

SEQ ID NO: 3745 - DNA, 373 bp, Homo sapiens
caggtgcagctggtggagtctgggggaggcgtggtccagcctgggaggtccctgagactctcctgtgcagcgtctggattcaccttcagtagctatggcatgcactgggtccgccaggctccaggcaaggggctggagtgggtggcagttatatggtatgatggaagtaataaatactatgcagactccgtgaagggccgattcaccatctccagagacaattccaagaacacgctgtatctgcaaatgaacagcctgagagccgaggacacggctgtgtattactgtgcgagagacgccgatattttgactggttattatacttattactttgactactggggccagggaaccctggtcaccgtctcctcag

SEQ ID NO: 3746 - DNA, 376 bp, Homo sapiens
caggtgcagctgcaggagtcgggcccaggactggtgaagccttcacagaccctgtccctcacctgcactgtctctggtggctccatcagcagtggtggttactactggagctggatccgccagcacccagggaagggcctggagtggattgggtacatctattacagtgggagcacctactacaacccgtccctcaagagtcgagttaccatatcagtagacacgtctaagaaccagttctccctgaagctgagctctgtgactgccgcggacacggccgtgtattactgtgcgagagtttatctccacgcctatgatagtagtagctactactttgactactggggccagggaaccctggtcaccgtctcctcag

SEQ ID NO: 3747 - DNA, 373 bp, Homo sapiens
caggtgcagctggtggagtctgggggaggcgtggtccagcctgggaggtccctgagactctcctgtgcagcctctggattcaccttcagtagctatgctatgcactgggtccgccaggctccaggcaaggggctggagtgggtggcagttatatcatatgatggaagcaataaatactacgcagactccgtgaagggccgattcaccatctccagagacaattccaagaacacgctgtatctgcaaatgaacagcctgagagctgaggacacggctgtgtattactgtgcgagaggtggatacagctatggttacggggtatggggtgcctatgactactggggccagggaaccctggtcaccgtctcctcag

SEQ ID NO: 3748 - DNA, 379 bp, Homo sapiens
gaagtccagctggtggagtctgggggagacttggtcaagcctggggggtcccttagactttcctgcgcagcctctggattcactttcactaacgcctggatgagctgggtccgccaggctccagggaaggggctggagtgggttggccgtattcatagggaaactgatggtgggacaaccgactacggtgcacccgtgaaaggcagattcgccatctcaagagatgattcaagaaacacgctatatctccaaatgaacagcctgaaaaccgaggacacagccgtctatttctgtaccacagcgacgacctattatgatttttggagtggttatcagtttgactactggggccagggaaccctggtcaccgtctcctcag

SEQ ID NO: 3749 - DNA, 372 bp, Homo sapiens
caggtgcagctggtggagtctgggggaggcgtggtccagcctgggaggtccctgagactctcctgtgcagcctctggattcaccttcagtagctatggcatgcactgggtccgccaggctccaggcaaggggctggagtgggtggcagttatatcatatgatggaagtaataaatactatgcagactccgtgaagggccgattcaccatctccagagacaattccaagaacacgctgtatctgcaaatgaacagcctgagagctgaggacacggctgtgtattactgtgcgaaagatcacagcagctggaaccgttactactactacggtatggacgtctggggccaagggaccacggtcaccgtctcctca

SEQ ID NO: 3750 - DNA, 373 bp, Homo sapiens
caggtgcagctggtgcagtctggggctgaggtgaagaagcctgggtcctcggtgaaggtctcctgcaaggcctctggaggcaccttcagcagttatgctatcagctgggtgcgacaggcccctggacaagggcttgagtggatgggagggatcatccctataattggtactacaaaggacgcacagaagttccagggcagagtcacgattatcgcggacaaatccacgaacatagcctacatggagttgagcagcctgagatctgaggacacggccgtgtattattgtgcgagagagcgtggatacagtggctatggggcccacgcatactttgacttctggggccagggaaccctggtcatcgtctcctcag

SEQ ID NO: 3751 - DNA, 370 bp, Homo sapiens
gaagtgcagctggtggagtctgggggaggcttggtacagcctggcaggtccctgagactctcctgtacagcctctggattcacctttgatgattacgccatgcactgggtccggcaagctccagggaagggcctggagtgggtctcaggtattagttggaatagtggtaccataggctatgcggactctgtgaagggccgattcaccatctccagagacaacgccaagaacgccctgtatttgcaaatgaacagtctgagagctgaggacacggccttctattactgtgcaaaaaatctagagtggaaggattgggggtggggacttgttgacttctggggccagggaaccctggtcaccgtctcctcag

SEQ ID NO: 3752 - DNA, 373 bp, Homo sapiens
gaggtgcagctgttggagtctgggggaggcttggtacagcctggggggtccctgagactctcctgtgcagcctctggattcacctttagcagctatgccatgagctgggtccgccaggctccagggaaggggctggagtgggtctcagctattagtggtagtggtggtagcacatactacgcagactccgtgaagggccggttcaccatctccagagacaattccaagaacacgctgtatctgcaaatgaacagcctgagagccgaggacacggccgtatattactgtgcgaaaagcttggtgccatttgactacggtgactccggggtgtttgactactggggccagggaaccctggtcaccgtctcctcag

SEQ ID NO: 3753 - DNA, 370 bp, Homo sapiens
caggtgcagctgcaggagtcgggcccaggactggtgaagccttcggggaccctgtccctcacctgcgctgtctctggtggctccatcagcagtagtaactggtggagttgggtccgccagcccccagggaaggggctggagtggattggggaaatctatcatagtgggagcaccaactacaacccgtccctcaagagtcgagtcaccatatcagtagacaagtccaagaaccagttctccctgaagctgagctctgtgaccgccgcggacacggccgtgtattactgtgcgagagttggtagcagtggctggtcagatctgggttggttcgacccctggggccagggaaccctggtcaccgtctcctcag

SEQ ID NO: 3754 - DNA, 370 bp, Homo sapiens
caggtgcagctggtggagtctgggggaggcgtggtccagcctgggaggtccctgagactctcctgtgcagcctctggattcaccttcagtagctatgctatgcactgggtccgccaggctccaggcaaggggctggagtgggtggcagttatatcatatgatggaagcaataaatactacgcagactccgtgaagggccgattcaccatctccagagacaattccaagaacacgctgtatctgcaaatgaacagcctgagagctgaggacacggctgtgtattactgtgcgagagggagactggactacggtgacactttgtactactttgactactggggccagggaaccctggtcaccgtctcctcag

SEQ ID NO: 3755 - DNA, 373 bp, Homo sapiens
caggtgcagctgcaggagtcgggcccaggactggtgaagccttcacagaccctgtccctcacctgcactgtctctggtggctccatcagcagtggtgattactactggagttggatccgccagcccccagggaagggcctggagtggattgggtacatctattacagtgggagcacctactacaacccgtccctcaagagtcgagttaccatatcagtagacacgtccaagaaccagttctccctgaagctgagctctgtgactgccgcagacacggccgtgtattactgtgccagagattattactatgatagtagtggttattacttttttgactactggggccagggaaccctggtcaccgtctcctcag

SEQ ID NO: 3756 - DNA, 370 bp, Homo sapiens
caggtgcagctggtgcagtctggggctgaggtgaagaagcctgggtcctcggtgaaggtctcctgcaaggcttctggaggcaccttcagcagctatgctatcagctgggtgcgacaggcccctggacaagggcttgagtggatgggagggatcatccctatctttggtacagcaaactacgcacagaagttccagggcagagtcacgattaccgcggacgaatccacgagcacagcctacatggagctgagcagcctgagatctgaggacacggccgtgtattactgtgcgagaggggttctaggtcagtggctggcgggggcccactttgactactggggccagggaaccctggtcaccgtctcctcag

SEQ ID NO: 3757 - DNA, 370 bp, Homo sapiens
caggtgcagctggtgcagtctggggctgaggtgaagaagcctgggtcctcggtgaaggtctcctgcaaggcttctggaggcaccttcagcagctatgctatcagctgggtgcgacaggcccctggacaagggcttgagtggatgggagggatcatccctatctttggtacagcaaactacgcacagaagttccagggcagagtcacgattaccgcggacaaatccacgagcacagcctacatggagctgagcagcctgagatctgaggacacggccgtgtattactgtgcgagagcagagatattgtactggtggtccccacaggcccttgactactggggccagggaaccctggtcaccgtctcctcag

SEQ ID NO: 3758 - DNA, 370 bp, Homo sapiens
gacgtgcagctggtggagtctgggggaggcttagtccagccgggggggtccctgagactctcctgtgcagcctctggattcgcctttagtaggtattggatgagttgggtccgccaggctccagggaaggggctggagtgggtggccaatataaaattagatggaagtgagaaatattatgcggactctgtgaagggccgattcaccatctccagagacaacgccaagaactcacagtatttgcaaatgaacagcctgagagccgaggacacggctgtgtattattgtgcgagggaagttattgtattagtaccatctgatagaccccttgacttctggggccagggaaccctggtcaccgtctcctcag

SEQ ID NO: 3759 - DNA, 370 bp, Homo sapiens
gaggtgcagctgttggagtctgggggaggcttggtacagcctggggggtccctgagactctcctgtgcagcctctggattcacctttagcagctatgccatgagctgggtccgccaggctccagggaaggggctggagtgggtctcagctattagtggtagtggtggtagcacatactacgcagactccgtgaagggccggttcaccatctccagagacaattccaagaacacgctgtatctgcaaatgaacagcctgagagccgaggacacggccgtatattactgtgcgaaatttccctcaactttggagtggttattatatgctattgactactggggccagggaaccctggtcaccgtctcctcag

SEQ ID NO: 3760 - DNA, 370 bp, Homo sapiens
gaggtgcagctgttggagtctgggggaggcttggtacagcctggggggtccctgagactctcctgtgcagcctctggattcacctttagcagctatgccatgagctgggtccgccaggctccagggaaggggctggagtgggtctcagctattagtggtagtggtggtagcacatactacgcagactccgtgaagggccggttcaccatctccagagacaattccaagaacacgctgtatctgcaaatgaacagcctgagagccgaggacacggccgtatattactgtgcgaaaggtgactacggtgactacgttgggaggtactactttgactactggggccagggaaccctggtcaccgtctcctcag

SEQ ID NO: 3761 - DNA, 373 bp, Homo sapiens
gaagtgcaggtggtggagtctgggggaggcttggtacagcctggcaggtccctgagactctcctgtgcagcctctggattcacctttgatgattatgccatgcactgggtccggcaagctccagggaagggcctggagtgggtctcaggtattacttggaatagtggtaccataggctatgcggactctgtgaagggccgattcaccatctccagagacaacgccaagaactccctgtatctgcaaatgaacagtctgagagctgaggacacggccttgtattactgtgcaaaagatctctattactatgatagtagtggttactcaaactttgactactggggccagggaaccctggtcaccgtctcctcag

SEQ ID NO: 3762 - DNA, 372 bp, Homo sapiens
caggtgcagctgcaggagtcgggcccaggactggtgaagccttcacagaccctgtccctcacctgcactgtctctggtggctccatcagcagtggtgattactactggagttggatccgccagcccccagggaagggcctggagtggattgggtacatctattacagtgggagcacctactacaacccgtccctcaagagtcgagttaccatatcagtagacacgtccaagaaccagttctccctgaagctgagctctgtgactgccgcagacacggccgtgtattactgtgccagagagtcgggcaggggattttggagcttctacggtatggacgtctggggccaagggaccacggtcaccgtctcctca

SEQ ID NO: 3763 - DNA, 369 bp, Homo sapiens
caggtgcagctggtggagtctgggggaggcgtggtccagcctgggaggtccctgagactctcctgtgcagcctctggattcaccttcagtagttatgctttacactgggtccgccagtgtccaggcaaggggctggagtgggtggtagttatatcatatgatggaagcaataaatattacgcagactccgtgaagggccgattcaccatctccagagacaattccaagagcacactatatctgcaaatgaacaacctgacagctgaggacacggctgtctattactgtgcgaaggcggagggagctaccacctactactactacggtatggacgtctggggccaagggaccacggtcaccgtctcctca

SEQ ID NO: 3764 - DNA, 365 bp, Homo sapiens
caggtgcagctggtgcagtctggggctgaggtgaagaagcctggggcctcagtgaaggtctcctgcaaggcttctggatacaccttcaccggctactatatgcactgggtgcgacaggcccctggacaagggcttgagtggatgggatggatcaaccctaacagtggtgacacaaactatgcacagaagtttcaggggtgggtcaccatgaccagggacacgtccatcaccacagcctacatggagctgagcaggctgaaatctgacgacacggccgtgtattactgtgcgagagatgacggcagtagcttacttccaccaaacggtatcgacgtctggggccaagggaccacggtcaccgtctc

SEQ ID NO: 3765 - DNA, 369 bp, Homo sapiens
gaggtgcagctgttggagtctgggggaggcttggtacagcctggggggtccctgagactctcctgtgcagcctctggattcacctttagcagctatgccatgagctgggtccgccaggctccagggaaggggctggagtgggtctcagctattagtggtagtggtggtagcacatactacgcagactccgtgaagggccggttcaccatctccagagacaattccaagaacacgctgtatctgcaaatgaacagcctgagagccgaggacacggccgtatattactgtgcgaaagggtcccttagctacaactactactactacggtatggacgtctggggccaagggaccacggtcaccgtctcctca

SEQ ID NO: 3766 - DNA, 370 bp, Homo sapiens
gaagtgcagctggtggagtctgggggaggcttggtacagcctggcaggtccctgagactctcctgtgcagcctctggattcacctttgatgattatgccatgcactgggtccggcaagctccagggaagggcctggagtgggtctcaggtattagttggaatagtggtagcataggctatgcggactctgtgaagggccgattcaccatctccagagacaacgccaagaactccctgtatctgcaaatgaacagtctgagagctgaggacacggccttgtattactgtgcaaaaggcgaactactatggttcagggagaggggaggttttgatatctggggccaagggacaatggtcaccgtctcttcag

SEQ ID NO: 3767 - DNA, 369 bp, Homo sapiens
caggtgcagctggtgcagtctggggctgaggtgaagaagcctgggtcctcggtgaaggtctcctgcaaggcttctggaggcaccttcagcagctatgctatcagctgggtgcgacaggcccctggacaagggcttgagtggatgggagggatcatccctatctttggtacagcaaactacgcacagaagttccagggcagagtcacgattaccgcggacaaatccacgagcacagcctacatggagctgagcagcctgagatctgaggacacggccgtgtattactgtgcgagagctagagggcagtggctccactactactacggtatggacgtctggggccaagggaccacggtcaccgtctcctca

SEQ ID NO: 3768 - DNA, 370 bp, Homo sapiens
gaggtgcagctggtggagtctgggggaggcttggtacagcctggagggtccctgagactctcctgtgcagcctctggattccccttcattacttatgaaatgaactgggtccgccaggctccagggaaggggctggagtgggtttcattcattagtagcagtagtcgtaccatatattatgcagactctgtgaagggccgattcaccatctccagagacaacgccaagaactcactgtttctgcaaatgaacagcctgagagccgaggacacggctgtttatttctgtgcgagagaccgctccagagatggctacagtcccgactcttttgatatctggggccaggggacaatggtcaccgtctcttcag

SEQ ID NO: 3769 - DNA, 369 bp, Homo sapiens
caggtgcagctggtggagtctgggggaggcttggtcaagcctggagggtccctgagactctcctgtgcagcctctggattcaccttcagtgactactacatgagctggatccgccaggctccagggaaggggctggagtgggtttcatacattagtagtagtggtagtaccatatactacgcagactctgtgaagggccgattcaccatctccagggacaacgccaagaactcactgtatctgcaaatgaacagcctgagagccgaggacacggccgtgtattactgtgcgagagataagcagctcggtctttactactactacggtatggacgtctggggccaagggaccacggtcaccgtctcctca

SEQ ID NO: 3770 - DNA, 349 bp, Homo sapiens
caggtgcagctggtgcagtctggggctgaggtgaagaagcctggggcctcagtgaaggtttcctgcaaggcatctggatacaccttcaccagctactatatgcactgggtgcgacaggcccctggacaagggcttgagtggatgggaataatcaaccctagtggtggtagcacaagctacgcacagaagttccagggcagagtcaccatgaccagggacacgtccacgagcacagtctacatggagctgagcagcctgagatctgaggacacggccgtgtattactgtgcggcccatctgtccggttttggctactggggccagggaaccctggtcaccgtctcctcag

SEQ ID NO: 3771 - DNA, 349 bp, Homo sapiens
gaggtgcaactggtgcagtctgggggaggcctggtcgagcctggggggtctctgacactctcctgtgaagcctctggcttcagcttcagttcctctaccatgacctgggtccgccaggctccagggaagggtctggagtgggtctcgtccatacgtggatatggttatgagacactttacgcagactcagtgcagggccgattcaccatctccagagacatcgccaagaattcactgtatcttcagatgggcagcctgagagtcgaggacacggctgtttattattgtgcgactgaatggaagctaacccccgactggggccagggagccctggtcaccgtctcttcag

SEQ ID NO: 3772 - DNA, 384 bp, Homo sapiens
caggtgcagctggtgcagtctggggctgaggtgaagaagcctggggcctcagtgaaggtctcctgcaaggcttctggatacaccttcaccggctactatatgcactgggtgcgacaggcccctggacaagggcttgagtggatgggatggatcaaccctaacagtggtggcacaaactatgcacagaagtttcagggctgggtcaccatgaccagggacacgtccatcagcacagcctacatggagctgagcaggctgagatctgacgacacggccgtgtattactgtgcgagagatttaaagtatagcagcagctggggcccaaagtactactactacggtatggacgtctggggccaagggaccacggtcaccgtctcctca

SEQ ID NO: 3773 - DNA, 370 bp, Homo sapiens
caggtgcagctggtgcagtctggggctgaggtgaagatgcctggggcctcagtgaaactttcctgcagggcatctggatacaacttcaggagctacaatatgcactgggtgcgacgggcccctggacaagggcttgagtggatgggaataatcaaccctagcagtagtagcacaagttacgcacagaaatttaagggcagagtcaccatgaccagggacacgtccacgggcacagtctacatggagctgagcagcctgagatctgaggacacggccgtgtattactgtgcgaggacatattgtggtggtgattgcaatttgcgctactttgactactggggccagggaaccctggtcaccgtctcctcag

SEQ ID NO: 3774 - DNA, 348 bp, Homo sapiens
caggtgcagctgcaggagtcgggcccaggactggtgaagccttcggggaccctgtccctcacctgcgctgtctctggtggctccatcagcagtagtaactggtggagttgggtccgccagcccccagggaaggggctggagtggattggggaaatctatcatagtgggagcaccaactacaacccgtccctcaagagtcgagtcaccatatcagtagacaagtccaagaaccagttctccctgaagctgagctctgtgaccgccgcggacacggccgtgtattactgtgcgagagattacggcggtatggacgtctggggccaagggaccacggtcaccgtctcctca

SEQ ID NO: 3775 - DNA, 349 bp, Homo sapiens
gaggtgcagctggtggagtctgggggaggcttggtccagcctggggggtccctgagactctcctgtgcagcctctggattcacctttagtagctattggatgagctgggtccgccaggctccagggaaggggctggagtgggtggccaacataaagcaagatggaagtgagaaatactatgtggactctgtgaagggccgattcaccatctccagagacaacgccaagaactcactgtatctgcaaatgaacagcctgagagccgaggacacggctgtgtattactgtgcgagagagaattactgggttgactactggggccagggaaccctggtcaccgtctcctcag

SEQ ID NO: 3776 - DNA, 384 bp, Homo sapiens
caggtgcagctggtggagtctgggggaggcgtggtccagcctgggaggtccctgagactctcctgtgcagcgtctggattcaccttcagtagctatggcatgcactgggtccgccaggctccaggcaaggggctggagtgggtggcagttatatggtatgatggaagtaataaatactatgcagactccgtgaagggccgattcaccatctccagagacaattccaagaacacgctgtatctgcaaatgaacagcctgagagccgaggacacggctgtgtattactgtgcgagagattcaacccgaggcccatattgtagtggtggtagctgctacaatggtatggacgtctggggccaagggaccacggtcaccgtctcctca

SEQ ID NO: 3777 - DNA, 384 bp, Homo sapiens
caggtgcagctggtgcagtctggggctgaggtgaagaagcctgggtcctcggtgaaggtctcctgcaaggcctctggaggcaccttcagcagctatgctatcagctgggtgcgacaggcccctggacaagggcttgagtggatgggagggatcatccctatttttggtacagcaagctacgcacagaagttccagggcagagtcacgattaccgcggacaaagccacgaacacagcctacatggagctgagcagcctgagatctgaggacacggccgtgtattactgtgcgagagatgagggatattgtcctggtggtgtatgctccaactactactacaatatggacgtctggggccaagggaccacggtcaccgtctcctca

SEQ ID NO: 3778 - DNA, 384 bp, Homo sapiens
gaggtgcagctggtggagtctgggggaggcttggtacagcctggagggtccctgagactctcctgtgcagcctctggattcaccttcagtagttatgaaatgaactgggtccgccaggctccagggaaggggctggagtgggtttcatacattagtagtagtggtagtaccatatactacgcagactctgtgaagggccgattcaccatctccagagacaacgccaagaactcactgtatctgcaaatgaacagcctgagagccgaggacacggctgtttattactgtgcgagagatcgggactactatggttcagggagttactactactactactacggtatggacgtctggggccaagggaccacggtcaccgtctcctca

SEQ ID NO: 3779 - DNA, 381 bp, Homo sapiens
caggtgcagctgcaggagtcgggcccaggactggtgaagccttcggagaccctgtccctcacctgcactgtctctggtggctccatcagtagttactactggaactggatccggcagcccccagggaagggactggagtggattggacatatctattacggtgggagcaccaactacaacccctccctcaagagtcgagtagccatatcagtagacacgtccaagaaccagttctccctgaaggtgaggtctgtgaccgctgcggacacggccgtatattactgtgcgaggaggggtgggggttattgtagtggtaccaactgctacttcgactacggtatggacgtctggggccaagggaccacggtcaccgtctcctca

SEQ ID NO: 3780 - DNA, 384 bp, Homo sapiens
gaggtgcagctgttggagtctgggggaggcttggtacagcctggggggtccctgagactctcctgtgcagcctctggattcacctttagcagctatgccatgagctgggtccgccaggctccagggaaggggctggagtgggtctcagctattagtggtagtggtggtagcacatactacgcagactccgtgaagggccggttcaccatctccagagacaattccaagaacacgctgtatctgcaaatgaacagcctgagagccgaggacacggccgtatattactgtgcgaaagatcggggctatgatagtagtggttattactacaactactactacggtatggacgtctggggccaagggaccacggtcaccgtctcctca

SEQ ID NO: 3781 - DNA, 384 bp, Homo sapiens
caggttcagctggtgcagtctggagctgaggtgaagaagcctggggcctcagtgaaggtctcctgcaaggcttctggttacacctttaccagctatggtatcagctgggtgcgacaggcccctggacaagggcttgagtggatgggatggatcagcgcttacaatggtaacacaaactatgcacagaagctccagggcagagtcaccatgaccacagacacatccacgagcacagcctacatggagctgaggagcctgagatctgacgacacggccgtgtattactgtgcgagagatgggtatgattacatttgggggagttatcgtcgctactactacggtatggacgtctggggccaagggaccacggtcaccgtctcctca

SEQ ID NO: 3782 - DNA, 385 bp, Homo sapiens
caggtgcagctggtgcagtctggggctgaggtgaagaagcctgggtcctcggtgaaggtctcctgcaaggcttctggaggcaccttcagcagctatgctatcagctgggtgcgacaggcccctggacaagggcttgagtggatgggagggatcatccctatctttggtacagcaaactacgcacagaagttccagggcagagtcacgattaccgcggacgaatccacgagcacagcctacatggagctgagcagcctgagatctgaggacacggccgtgtattactgtgcgagagatcagggaggggattacgatttttggagtggttacaaaatcaactggttcgacccctggggccagggaaccctggtcaccgtctcctcag

SEQ ID NO: 3783 - DNA, 340 bp, Homo sapiens
gaggtgcagctgttggagtctgggggaggcttggtacagcctggggggtccctgagactctcctgcgcagcctctggattcacgtttaccagctatgccatgagttgggtccgccaggctccagggagggggctggagtgggtctcagttattagtggtagtggtggtagcacaaactacgcagactttgtgaagggccggttcaccatctccagagacaattccaagaacacgctgtatctgcaaatgaacagcctgagagccgaggacacggccgtatattactgtgcgaccacccccagattttggggccagggaaccctggtcaccgtctcctcag

SEQ ID NO: 3784 - DNA, 385 bp, Homo sapiens
caggtgcaactggtgcagtctggggctgaggtgaagaagcctggggcctcagtgaaggtttcctgcaaggcatctggatacaccttcaccaactactacatgcactgggtgcgacaggcccctggacaagggcttgagtggatgggaataatcaaccctagtggtggtagcacaaggtacgcacagaaattccagggcagagtcaccatgaccagggacacgtccacgagcacagtatacatggagctgagcagcctgagatctgaagacacggccgtatattactgtgcgaaagatttgtgggacctttattgtaatcctgatagctgctatcactactactttgacttctggggccagggaaccctggtcaccgtctcctcag

SEQ ID NO: 3785 - DNA, 379 bp, Homo sapiens
gaggtgcagctggtggagtccgggggaggcttagttcagcctggggggtccctgagactctcctgtgcagcctctggattcaccttcagtagctactggatgcactgggtccgccaagctccagggaaggggctggtgtgggtctcacgtattaatagtgatgggagtagcacaagctacgcggactccgtgaagggccgattcaccatctccagagacaacgccaagaacacgctgtatctgcaaatgaacagtctgagagccgaggacacggctgtgtattactgtgcaagagatctgggttacgatttttggagtggttattccgctgggaccattgactactggggccagggaaccctggtcaccgtctcctcag

SEQ ID NO: 3786 - DNA, 385 bp, Homo sapiens
caggtgcagctgcaggagtcgggcccaggactggtgaagccttcggggaccctgtccctcacctgcgctgtctctggtggctccatcagcagtagtaactggtggagttgggtccgccagcccccagggaaggggctggagtggattggggaaatctatcatagtgggagcaccaactacaacccgtccctcaagagtcgagtcaccatatcagtagacaagtccaagaaccagttctccctgaagctgagctctgtgaccgccgcggacacggccgtgtattactgtgcgagcgtcgagccggattactatggttcggggagttattatccgaggtcctggttcgacccctggggccagggaaccctggtcaccgtctcctcag

SEQ ID NO: 3787 - DNA, 382 bp, Homo sapiens
caggtgcagctgcaggagtcgggcccaggactggtgaagccttcacagaccctgtccctcacctgcactgtctctggtggctccatcagcagtggtggttactactggagctggatccgccagcacccagggaagggcctggagtggattgggtacatctattacagtgggagcacctactacaacccgtccctcaagagtcgagttaccatatcagtagacacgtctaagaaccagttctccctgaagctgagctctgtgactgccgcggacacggccgtgtattactgtgcgagcaccctaacccgcggcagtattgtagtagtaccagctgctatgtttgactactggggccagggaaccctggtcaccgtctcctcag

SEQ ID NO: 3788 - DNA, 379 bp, Homo sapiens
gaggtgcagctggtggagtctgggggaggcttggtccagcctggggggtccctgagactctcctgtgcagcctctggattcacctttagtaggtattggatgagctgggtccgccaggctccagggaaggggctggagtgggtggccagcataaacctggatggaagtgagagatactatgtggactctgtgaagggccgattcaccatctccagagacaacgccaagaactcactgtatctgcaaatgaacagcctgagagccgaggacacggctgtgtattactgtgcgagatgggcatggtgggctactttggttccgggagtcacggcgtggtttgactactggggccagggaaccctggtcaccgtctcctcag

SEQ ID NO: 3789 - DNA, 382 bp, Homo sapiens
caggtgcagctgcaggagtcgggcccaggactggtgaagccttcacagaccctgtccctcacctgcactgtctctggtggctccatcagcagtggtgattactactggagttggatccgccagcccccagggaagggcctggagtggattgggtacatctattacagtgggagcacctactacaacccgtccctcaagagtcgagttaccatatcagtagacacgtccaagaaccagttctccctgaagctgagctctgtgactgccgcagacacggccgtgtattactgtgccagagacgagtattactatgatagtagtggttattactacgggggatttgactactggggccagggaaccctggtcaccgtctcctcag

SEQ ID NO: 3790 - DNA, 385 bp, Homo sapiens
gaggtgcagctggtggagtctgggggaggcttggtaaagcctggggggtcccttagactctcctgtgcagcctctggattcactttcagtaacgcctggatgagctgggtccgccaggctccagggaaggggctggagtgggttggccgtattaaaagcaaaactgatggtgggacaacagactacgctgcacccgtgaaaggcagattcaccatctcaagagatgattcaaaaaacacgctgtatctgcaaatgaacagcctgaaaaccgaggacacagccgtgtattactgtaccacaggaatgtattactatgatagtagtggacttgtaaatgatgcttttgatatctggggccaagggacaatggtcaccgtctcttcag

SEQ ID NO: 3791 - DNA, 379 bp, Homo sapiens
caggtccagctggtacagtctggggctgaggtgaagaagcctggggcctcagtgaaggtctcctgcaaggtttccggatacaccctcactgaattatccatgcactgggtgcgacaggctcctggaaaagggcttgagtggatgggaggttttgatcctgaagatggtgaaacaatctacgcacagaagttccagggcagagtcaccatgaccgaggacacatccacagacacagcctacatggagctgagcagcctgagatctgaggacacggccgtctattactgtgcaataacgactcctcattgtagtggtggtaactgccataagaactggttcgacccctggggccagggagccctggtcaccgtctcctcag

SEQ ID NO: 3792 - DNA, 379 bp, Homo sapiens
caggtgcagctggtggagtctgggggaggcgtggtccagcctgggaggtccctgagactctcctgtgcagcctctggattcaccttcagtagctatggcatgcactgggtccgccaggctccaggcaaggggctggagtgggtggcagttatatcatatgatggaagtaataaatactatgcagactccgtgaagggccgattcaccatctccagagacaattccaagaacacgctgtatctgcaaatgaacagcctgagagctgaggacacggctgtgtattactgtgcgaaaaacgaagttggttcagggagttattataacggaaacaactggttcgacccctggggccagggaaccctggtcaccgtctcctcag

SEQ ID NO: 3793 - DNA, 379 bp, Homo sapiens
caggtgcagctggtgcagtctggggctgaggtgaagaagcctggggcctcagtgaaggtttcctgcaaggcatctggatacaccttcaccagctactatatgcactgggtgcgacaggcccctggacaagggcttgagtggatgggaataatcaaccctagtggtggtagcacaagctacgcacagaagttccagggcagagtcaccatgaccagggacacgtccacgagcacagtctacatggagctgagcagcctgagatctgaggacacggccgtgtattactgtgcgagatcccgaaattactatgatagtagtggttctacgggtggatggttcgacccctggggccagggaaccctggtcaccgtctcctcag

SEQ ID NO: 3794 - DNA, 379 bp, Homo sapiens
gaggagcagctggtggagtctgggggaggcttggtacagcctggagggtccctgagactctcctgtgcagcctctggattcacattaagtagttatgaaatgaactgggtccgccaggctccagggaaggggctggagtgggtctcatatagtagtagtatgggaagtaccacatactacgcagactctgtgaagggccgattcaccttctccagagacaacgccgggaattcactgtatctgcaaatgaacagcctgagagccgacgacacggctgtttattactgtgcgagagggggacaaaattacgatttttggactgggcactctaattggttcgacccctggggccagggaaccctggtcaccgtctcctcag

SEQ ID NO: 3795 - DNA, 379 bp, Homo sapiens
caggtgcagctggtgcagtctggggctgaggtgaagaagcctgggtcctcggtgaaggtctcctgcaaggcttctggaggcaccttcagcagctatgctatcacctgggtgcgacaggcccctggacaagggcttgagtggatgggagggatcatccctatctttggtacagcaaactacgcacagaagttccagggcagagtcacgattaccgcggacgaatccacgagcacagcctacatggagctgagcagcctgagatctgaggacacggccgtgtattactgtgcctggtggatggggtacgatattttggccgacacccaagacgctcgctctgactactggggccagggaaccctggtcaccgtctcctcag

SEQ ID NO: 3796 - DNA, 375 bp, Homo sapiens
caggtgcagctacagcagtggggcgcaggactgttgaagccttcggagaccctgtcccgcacctgcgctgtctatggtgggtccttcagtggttggtactggagctgggtccgccagcccccagggaaggggctggagtggattgggggaatcgatcatagtggaagcaccaactacaacccgtccctcaagagtcgagtcaccatatccgtagacacgtccaagaagcagttctccctggagttgagatctgtgaccgccgcggacacggctgtatattactgtgcgagactgagggcggaggtgactacgttttactcttactaccacggtatggacgtctggggcctagggaccacggtcaccgtctcctca

SEQ ID NO: 3797 - DNA, 378 bp, Homo sapiens
caggtgcagctggtggaatctgggggaggcctggtcaagcctggagggtccctgagactctcctgtgcagcctctgcattcaccttcagtgactaccacatgagctggatccgccaggctccagggaaggggctggagtgggtttcatacattactagtagtggtagtaccatatactacgcagactctgtgaagggccgattcaccatctccagggacaacgccaagaactctctgtatctgcaaatgaacagcctgagagccgaggacacggccgtgtattactgtgcgcgatactcacgagggtattacgatattttgactggaccgtatggtatggacgtctggggccaagggaccacggtcaccgtctcctca

SEQ ID NO: 3798 - DNA, 378 bp, Homo sapiens
caggtgcagctggtggagtctgggggaggcttggtcaagcctggagggtccctgagactctcctgtgcagcctctggattcaccttcagtgactactacatgagctggatccgccaggctccagggaaggggctggagtgggtttcatacattagtagtagtggtagtaccatatactacgcagactctgtgaagggccgattcaccatctccagggacaacgccaagaactcactgtatctgcaaatgaacagcctgagagccgaggacacggccgtgtattactgtgcgagacggggaagctatggctctccatattactactactactacggtatggacgtctggggccaagggaccacggtcaccgtctcctca

SEQ ID NO: 3799 - DNA, 378 bp, Homo sapiens
caggtgcagctggtggagtctgggggaggcttggtcaagcctggagggtccctgagactctcctgtgcagcctctggattcaccttcagtgactactacatgagctggatccgccaggctccagggaaggggctggagtgggtttcatacattagtagtagtggtagtaccatatactacgcagactctgtgaagggccgattcaccatctccagggacaacgccaagaactcactgtatctgcaaatgaacagcctgagagccgaggacacggccgtgtattactgtgcgagagatacacagcccctatggttcagggcggacatggggtacggtatggacgtctggggccaagggaccacggtcaccgtctcctca

SEQ ID NO: 3800 - DNA, 395 bp, Homo sapiens
tgcagctggtggagtccgggggaggcttagttcagcctggggggtccctgagactctcctgtgcagcctctggattcaccttcagtagttactggatgcactgggtccgccaagctccagggaaggggctggtgtgggtctcacgtattaatagtgatgggagtagcacaagctacgtggactccgtgaagggccgattcaccatctccagagacaacgccaagaacacgctgtatctgcagatgaacagtctgagagccgaagacacggctgtgtattactgtgcaagagatcgttactatgatagtagtgctcattacgacccgagcggctattattactattactacggtatggacgtctggggccacgggaccacggtcaccgtctcctca

SEQ ID NO: 3801 - DNA, 376 bp, Homo sapiens
caggtgcagctacagcagtggggcgcaggactgttgaagccttcggagaccctgtccctcacctgcgctgtctatggtgggtccttcagtggttactactggagctggatccgccagcccccagggaaggggctggagtggattggggaaatcaatcatagtggaagcaccaactacaacccgtccctcaagagtcgagtcaccatatcagtagacacgtccaagaaccagttctccctgaagctgagctctgtgaccgccgcggacacggctgtgtattactgtgcgagacaaccctattgtagtagtaccagctgctattttgggggctggttcgacccctggggccagggaaccctggtcaccgtctcctcag

SEQ ID NO: 3802 - DNA, 376 bp, Homo sapiens
caggtgcagctacagcagtggggcgcaggactgttgaagccttcggagaccctgtccctcacctgcgctgtctatggtgggtccttcagtggttactactggagctggatccgccagcccccagggaaggggctggagtggattggggaaatcaatcatagtggaagcaccaactacaacccgtccctcaagagtcgagtcaccatatcagtagacacgtccaagaaccagttctccctgaagctgagctctgtgaccgccgcggacacggctgtgtattactgtgcgagaggcgaaaaggggagctactatttgacctccaattacaactggttcgacccctggggccagggaaccctggtcaccgtctcctcag

SEQ ID NO: 3803 - DNA, 375 bp, Homo sapiens
caggtgcagctgcaggagtcgggcccaggactggtgaagccttcggagaccctgtccctcacctgcactgtctctggtggctccatcagtagttactactggagctggatccggcagcccccagggaagggactggagtggattgggtatatctattacagtgggagcaccaactacaacccctccctcaagagtcgagtcaccatatcagtagacacgtccaagaaccagttctccctgaagctgagctctgtgaccgctgcggacacggccgtgtattactgtgcgagaggaagaggctacagtaactacgtcacaacctactactacggtatggacgtctggggccaagggaccacggtcaccgtctcctca

SEQ ID NO: 3804 - DNA, 399 bp, Homo sapiens
caggtgcagctggtgcagtctggggctgaggtgaagaagcctggggcctcagtgaaggtctcctgcaaggcttctggatacaccttcaccagttatgatatcaactgggtgcgacaggccactggacaagggcttgagtggatgggatggatgaaccctaacagtggtaacacaggctatgcacagaagttccagggcagagtcaccatgaccaggaacacctccataagcacagcctacatggagctgagcagcctgagatctgaggacacggccgtgtattactgtgcgagaggcgcggatcacccgtattactatgatagtagtggcacatacgctttgggctactactacggtatggacgtctggggccaagggaccacggtcaccgtctcctca

SEQ ID NO: 3805 - DNA, 367 bp, Homo sapiens
gaagagcaactggtggagtctgggggaggcctggtcaagccgggggggtccctgagactctcatgtgcaggctctggattcaccttcagtcgctatagcatcaactggatccgccaggttccagggaaggggctggactgggtctcttcgattaatagtaatactcattacatatactattcagactcggtgaagggccgattcatcatctccagagactacaccacgaactcagtgtctctgcacatgaacagcctgagagccgaggacacggctgtttattattgtgcgagagtcgctgggggtgactcagagacccccgcatttaatttgtggggccaagggacaatggtcaccgtctcttcag

SEQ ID NO: 3806 - DNA, 367 bp, Homo sapiens
caggtgcagctggtggagtctgggggaggcgtggtccagcctgggaggtccctgagactctcctgtgcagcctctggattcaccttcagtagctatggcatgcactgggtccgccaggctccaggcaaggggctggagtgggtggcagttatatcatatgatggaagtaataaatactatgcagactccgtgaagggccgattcaccatctccagagacaattccaagaacacgctgtatctgcaaatgaacagcctgagagctgaggacacggctgtgtattactgtgcgaaagacgggcagtggctggtactttctttctactttgactactggggccagggaaccctggtcaccgtctcctcag

SEQ ID NO: 3807 - DNA, 367 bp, Homo sapiens
gaggtgcagctggtggagtctgggggagacttggtccagccgggggggtccctgagactctcctgtgtagcctctggattcatctttaataattactggatgagttgggtccgccaggctccagggaaggggctggagtgggtggccaatataatacaagatggaagtgagaagttctatgtggattctgtgaagggccgattcaccatctccagagacaacgccaagaactcactgtttctgcaaatgaacagcctgagaggcgaggacacggctgtgtattactgtgcgagttggggtgacattaatggagttactacgcattatgaccgttggggccaggggacccgggtcaccgtctcgtcag

SEQ ID NO: 3808 - DNA, 367 bp, Homo sapiens
caggtgcagttggtgcagtctggggctgaggtgaagaagcctgggtcctcggtgaaggtctcctgcaaggcttctggaggcaccttcagcagtcatgctatcagctgggtgcgactggcccctggacaagggcttgagtgggtgggagggatcatccctctctttggtacagcaaactacgctcagaagttccagggcagagtcacaattattgcggacaaatccacgaccacagtgtacatggagctgagcagcctgagatctgaggacacggccgtgtattactgttcgagtgtgtcgcattatgatagtagtggttcatggggtgaccactggggccagggaaccctggtcaccgtctcctcag

SEQ ID NO: 3809 - DNA, 370 bp, Homo sapiens
cagctgcagctgcaggagtcgggcccaggactggtgaagccttcggagaccctgtccctcacctgcactgtctctggtggctccatcagcagtagtagttactactggggctggatccgccagcccccagggaaggggctggagtggattgggagtatctattatagtgggagcacctactacaacccgtccctcaagagtcgagtcaccatatccgtagacacgtccaagaaccagttctccctgaagctgagctctgtgaccgccgcagacacggctgtgtattactgtgcgagagtaggatattgtaataatggtgtatgctcctttgactactggggccagggaagcctggtcaccgtctcctcag

SEQ ID NO: 3810 - DNA, 367 bp, Homo sapiens
gagatgcagctgttggagtctgggggaggcttggtacagcctggggggtccctgagactctcctgtgcagcctctggattcacctttagcagttatgccatgagctgggtccgccaggctccagggaaggggctggagtgggtctcagctattagtggtagtggtggtagcacatactacgcagactccgtgaagggccggttcaccgtctccagagacgattccaagaacacactgtatctgctaatgaacagcctgagagccgaggacacggccgtatattattgtgcgaaaaatctaatggttcagggaattaccaatgcttttgatatctggggccaagggacaatggtcaccgtctcttcag

SEQ ID NO: 3811 - DNA, 373 bp, Homo sapiens
gaggtgcagctggtggagtctgggggaggcttggtaaagcctggggggtcccttagactctcctgtgcagcctctggattcactttcagtaacgcctggatgacctgggtccgccaggctccagggaaggggctggagtgggttggccatattaaaagcaaaactgatggtgggacaacagactacgctgcacccgtgaaaggcagattcaccatttcaagagatgattcaaaaaacacgctgtatctgcaaatgaacagcctgaaaaccgaggacacagccgtgtattactgtaccacaggcccttattgtcctggtggtgtatgctccgttgactactggggccagggaaccctggtcaccgtctcctcag

SEQ ID NO: 3812 - DNA, 367 bp, Homo sapiens
caggtgcagctgcaggagtcgggcccaggactggtgaagccttcggggaccctgtccctcacctgcgctgtctctggtggctccatcagcagtagtaactggtggagttgggtccgccagcccccagggaaggggctggagtggattggggaaatctatcatagtgggagcaccaactacaacccgtccctcaagagtcgagtcaccatatcagtagacaagtccaagaaccagttctccctgaagctgagctctgtgaccgccgcggacacggccgtgtattactgtgcgaggggtaccccagcagctggtatagggtactactttgactactggggccagggaaccctggtcaccgtctcctcag

SEQ ID NO: 3813 - DNA, 370 bp, Homo sapiens
caggtgcagctgcaggagtcgggcccaggactggtgaagccttcacagaccctgtccctcacctgcactgtctctggtggctccatcagcagtggtggttactactggagctggatccgccagcacccagggaagggcctggagtggattgggtacatctattacagtgggagcacctactacaacccgtccctcaagagtcgagttaccatatcagtagacacgtctaagaaccagttctccctgaagctgagctctgtgactgccgcggacacggccgtgtattactgtgcgagagaagtaccagctgctatggtgtctgggtggttcgacccctggggccagggaaccctggtcaccgtctcctcag

SEQ ID NO: 3814 - DNA, 370 bp, Homo sapiens
caggtgcagctgcaggagtcgggcccaggactggtgaagccttcacagaccctgtccctcacctgcactgtctctggtggctccatcagcagtggtggttactactggagctggatccgccagcacccagggaagggcctggagtggattgggtacatctattacagtgggagcacctactacaacccgtccctcaagagtcgagttaccatatcagtagacacgtctaagaaccagttctccctgaagctgagctctgtgactgccgcggacacggccgtgtattactgtgcgagagaaatgagcagcagctggtctggaaactggttcgacccctggggccagggaaccctggtcaccgtctcctcag

SEQ ID NO: 3815 - DNA, 367 bp, Homo sapiens
caggtgcagctggtgcagtctggggctgaggtgaagaagcctggggcctcagtgaaggtctcctgcaaggcttctggatacaccttcaccggctactatatgcactgggtgcgacaggcccctggacaagggcttgagtggatgggatggatcaaccctaacagtggtggcacaaactatgcacagaagtttcagggctgggtcaccatgaccagggacacgtccatcagcacagtttacatggagctgagcaggctgagatctgacgacacggccgtgtattactgtgcgagaggtcatgattacatttgggagcactactactttgactactggggccagggaaccctggtcaccgtctcctcag

SEQ ID NO: 3816 - DNA, 367 bp, Homo sapiens
gaggtgcagttgttggagtctgggggaggcttggtacagcctggggggtccctgagactctcctgtgcagcctccggattcaccttcagcagctatgccatgatctgggtccgccaggctccagtaaaggggctggagtgggtctcggctactagtaatagtggtgagtacatatactacgcagactccgtgaagggccggttcaccatctccagagacaactccaagaacacgctgcatctgcaaatgaacagcctgagagccgaggacacggccgtatattactgtgcgaaagtccgttattatggttcggggacctattatattgactactggggccagggaacccaggtcaccgtctcctcag

SEQ ID NO: 3817 - DNA, 367 bp, Homo sapiens
gaggtgcagctgttggagtctgggggaggcttggtacagcctggggggtccctgagactctcctgtgcagcctctggattcacctttagcagctatgccatgagctgggtccgccaggttccagggaaggggctggagtgggtctcagccattagtggtagtggtgttaatacatactacgcagactccgtgaagggccggttcaccatctccagagacaattccaagaacacactgtatctacaaatgaacagcctgagagccgaggacacggccgtatattactgtgcgagagttttatcggggaattcgggggccaaaggccttgactactggggccagggaaccctggtcaccgtctcctcag

SEQ ID NO: 3818 - DNA, 367 bp, Homo sapiens
gaggtgcagctgttggagtctgggggagacttggtgcagccgggggggtccctgagactctcctgtgcagcctctggactcacctttagcagctatgccatggactgggtccgccaggctccagggaagggcctggagtgggtctcaggtattagtggtagcggtgatagtacataccacgcagactccgtgaagggccggttcaccatctccagagacaattccaagaacaccctgtatctgcatatgaacagcctgagagccgaggacacggccgtatattactgtgcgaagactaagacgattctacagtggctggcctactttgactactggggccagggaacccaggtctccgtctcctcag

SEQ ID NO: 3819 - DNA, 367 bp, Homo sapiens
gaggtgcagctgttggagtctgggggaggcttggtacagcctggggggtccctgagactctcctgtgcagcctctggattcacctttagcagctatgccatgagctgggtccgccaggctccagggaaggggctggagtgggtctcagctattagtggtagtggtggtagcacatactacgcagactccgtgaagggccggttcaccatctccagagacaattccaagaacacgctgtatctgcaaatgaacagcctgagagccgaggacacggccgtatattactgtgcgaagggagcatggccgtatagcagtggctggtactttgactactggggccagggaaccctggtcaccgtctcctcag

SEQ ID NO: 3820 - DNA, 370 bp, Homo sapiens
cagctgcagctgcaggagtccggctcaggactggtgaagccttcacagaccctgtccctcacctgcgctgtctctggtggctccatcagcagtggtggttactcctggagctggatccggcagccaccagggaagggcctggagtggattgggtacatctatcatagtgggagcacctactacaacccgtccctcaagagtcgagtcaccatatcagtagacaggtccaagaaccagttctccctgaagctgagctctgtgaccgccgcggacacggccgtgtattactgtgccagagagtcgatatatggttcggggagttcggcctttgactactggggccagggaaccctggtcaccgtctcctcag

SEQ ID NO: 3821 - DNA, 366 bp, Homo sapiens
caggtgcagctggtggagtctgggggaggcgtggtccagcctgggaggtccctgagactctcctgtgcagcctctggattcaccttcagtagctatggcatgcactgggtccgccaggctccaggcaaggggctggagtgggtggcagttatatcatatgatggaagtaataaatactatgcagactccgtgaagggccgattcaccatctccagagacaattccaagaacacgctgtatctgcaaatgaacagcctgagagctgaggacacggctgtgtattactgtgcgaaagatccgatccgatactactactactacggtatggacgtctggggccaagggaccacggtcaccgtctcctca

SEQ ID NO: 3822 - DNA, 369 bp, Homo sapiens
caggtgcagctgcaggagtcgggcccaggactggtgaagccttcacagaccctgtccctcacctgcactgtctctggtggctccatcagcagtggtggttactactggagctggatccgccagcacccagggaagggcctggagtggattgggtacatctattacagtgggagcacctactacaacccgtccctcaagagtcgagttaccatatcagtagacacgtctaagaaccagttctccctgaagctgagctctgtgactgccgcggacacggccgtgtattactgtgcgagaggtcgatggggcagctggtacgtggacggtatggacgtctggggccaagggaccacggtcaccgtctcctca

SEQ ID NO: 3823 - DNA, 366 bp, Homo sapiens
caggtgcagctggtgcagtctggggctgaggtgaagaagcctgggtcctcggtgaaggtctcctgcaaggcttctggaggcaccttcagcagctatgctatcagctgggtgcgacaggcccctggacaagggcttgagtggatgggagggatcatccctatctttggtacagcaaactacgcacagaagttccagggcagagtcacgattaccgcggacaaatccacgagcacagcctacatggagctgagcagcctgagatctgaggacacggccgtgtattactgtgcgaggatcgattcggggagtttatactactacggtatggacgtctggggccaagggaccacggtcaccgtctcctca

SEQ ID NO: 3824 - DNA, 349 bp, Homo sapiens
caggcgcagctgctggagtcgggcccaggactggtgaagccttcggagaccctgtccctcacctgcactgtctccggtggctccatcagtggttacttctggagctggatccggcagcccccagggaagggactggagtggattgggtatatctatttcagtgggagcaccaattacaacccctccctcaagagtcgagtcaccatgtccgttgacacgtccaagaaccagttctccctgcagctgagctctgtgaccgctgcggacacggccgtatattactgtgcgaaatatggtgcctggtccttcgatctctggggccgtggcaccctggtcactgtctcctcag

SEQ ID NO: 3825 - DNA, 370 bp, Homo sapiens
caggtgcagctgcaggagtcgggcccaggactggtgaagccttcacagaccctgtccctcacctgcactgtctctggtggctccatcagcagtggtgattactactggagttggatccgccagcccccagggaagggcctggagtggattgggtacatctattacagtgggagcacctactacaacccgtccctcaagagtcgagttaccatatcagtagacacgtccaagaaccagttctccctgaagctgagctctgtgactgccgcagacacggccgtgtattactgtgccagagaagtattactagatttctctgggggctggttcgacccctggggccagggaaccctggtcaccgtctcctcag

SEQ ID NO: 3826 - DNA, 355 bp, Homo sapiens
caggtcaccttgaaggagtctggtcctgcgctggtgaaacccacacagaccctcacactgacctgcaccttctctgggttctcactcagcactcctggaatgcgtgtgagctggatccgtcagtccccagggaaggccctggagtggcttgcacgcattgattgggatgatgataaattctacagcacatctctgaagaccaggctcaccatctccaaggacacctccaaaaaccaggtggtccttacaatgaccaacatggaccctgtggacacagccacgtattactgtgcacggggacctagtgtatggcttgactactggggccagggaaccctggtcaccgtctcctcag

SEQ ID NO: 3827 - DNA, 352 bp, Homo sapiens
caggtgcagctggtgcagtctggggctgaggtgaagaagcctgggtcctcggtgaaggtctcctgcaaggcttctggaggcaccttcagcagctatgctatcagctgggtgcgacaggcccctggacaagggcttgagtggatgggagggatcatccctatctttggtacagcaaactacgcacagaagttccagggcagagtcacgattaccgcggacgaatccacgagcacagcctacatggagctgagcagcctgagatctgaggacacggccgtgtattactgtgcgagacgcaaggaagatgcttttgatatctggggccaagggacaatggtcaccgtctcttcag

SEQ ID NO: 3828 - DNA, 352 bp, Homo sapiens
gaggtgcagctggtggagtctgggggaggcttggtacagcctggagggtccctgagactctcctgtgcagcctctggattcaccttcagtagttatgaaatgaactgggtccgccaggctccagggaaggggctggagtgggtttcatacattagtagtagtggtagtaccatatactacgcagactctgtgaagggccgattcaccatctccagagacaacgccaagaactcactgtatctgcaaatgaacagcctgagagccgaggacacggctgtttattactgtgcgagaggccctgcctggcgatgggtctactggggccagggaaccctggtcaccgtctcctcag

SEQ ID NO: 3829 - DNA, 366 bp, Homo sapiens
gaggtgcagctgttggagtctgggggaggcttggtacagcctggggggtccctgagactctcctgtgcagcctctggattcaccgttagcagctatgccatgagctgggtccgccaggctccagggaaggggctggagtgggtctcagttgttagggagagtggtggtagcacaaactacgcagactccgtgaagggccggttcaccatctccagagacaattccaagaacacgctgtatctgcaaatgaacagcctgagagccgaggacacggccctatattactgtgcgaaaggagtgaggggaatctactactactacggtatggacgtctggggccaagggaccacggtcaccgtctcctca

SEQ ID NO: 3830 - DNA, 366 bp, Homo sapiens
gaggtgcagctgttggagtctgggggaggcttggtacagcctggggggtccctgagactctcctgtgcagcctctggattcacctttagcagctatgccatgagctgggtccgccaggctccagggaaggggctggagtgggtctcagctattagtggtagtggtggtagcacatactacgcagactccgtgaagggccggttcaccatctccagagacaattccaagaacacgctgtatctgcaaatgaacagcctgagagccgaggacacggccgtatattactgtgcgaattcccggggctcaaactactactactacggtatggacgtctggggccaagggaccacggtcaccgtctcctca

SEQ ID NO: 3831 - DNA, 390 bp, Homo sapiens
caaatgcagctggtgcagtctgggcctgaggtgaagaagcctgggacctcagtgaaggtctcctgcaaggcttctggattcacctttactagctctgctgtgcagtgggtgcgacaggctcgtggacaacgccttgagtggataggatggatcgtcgttggcagtggtaacacaaactacgcacagaagttccaggaaagagtcaccattaccagggacatgtccacaagcacagcctacatggagctgagcagcctgagatccgaggacacggccgtgtattactgtgcggcagaaaaacgtcagtattgtagtagtaccagcttttgtagcgtgtactactacggtatggacgtctggggccaagggaccacggtcaccgtctcctca

SEQ ID NO: 3832 - DNA, 390 bp, Homo sapiens
caggtgcagctggtgcaatctggggctgaggtgaaggagcctgggtcctcggtgaaggtctcctgcaaggcttctgggggcaccttcagcagctatgctatcagctgggtgcgacaggcccctggacaagggcttgagtggatgggagggatcgtccctatctttggtccagcaaactacgcacacaagttccagggcagagtcacgattaccgcggacaaatccacgaccacagcctacatggagctgagcagcctgagatctgaggacacggccgtgtattactgtgggagagggcgttccgctgtagtaccagctgccacgggttcttacttctactactacggtatggacgtctggggccaagggaccacggtcaccgtctcctca

SEQ ID NO: 3833 - DNA, 394 bp, Homo sapiens
cagatcaccttgaaggagtctggtcctacgctggtgaaacccacacagaccctcacgctgacctgcaccttctctgggttctcattcagcactagtggagtgggtgtgggctggatccgtcagccccccggaaaggccctggagtggcttgcactcatttattgggatgatgataagcgctacagcccatctctgaagagcaggctcaccatcaccaaggacacctccaaaaaccaggtggtccttacaatgaccaacatggaccctgtggacacagccacatattactgtgcacacagactcggggataaaggggacattgtagtagtaccagctactatagccggctggttcgacccctggggccagggaaccctggtcaccgtctcctcag

SEQ ID NO: 3834 - DNA, 390 bp, Homo sapiens
gaggtgcagctggtggagtctgggggaggcctggtcaagcctggggggtccctgagactctcctgtgcagcctctggattcaccttcagtagctatagcatgaactgggtccgccaggctccagggaaggggctggagtgggtctcatccattagtagtagtagtagttacatatactacgcagactcagtgaagggccgattcaccatctccagagacaacgccaagaactcactgtatctgcaaatgaacagcctgagagccgaggacacggctgtgtattactgtgcgagagaactaacgggatacagctatggttacgccaaaactgactactactactacggtatggacgtctggggccaagggaccacggtcaccgtctcctca

SEQ ID NO: 3835 - DNA, 390 bp, Homo sapiens
caggtgcagctggtggagtctgggggaggcgtggtccagcctgggaggtccctgagactctcctgtgcagcctctggattcaccttcagtagctatgttatgcactgggtccgccaggctccaggcaaggggctggagtgggtggcagttatatcatatgatggaagcaataaatactacgcagactccgtgaagggccgattcaccatctccagagacaattccaagaacacgctgtatctgcaaatgaacagcctgagagctgaggacacggctgtgtattactgtgcgagagaaaatcgtgtatacaactatggttatggtaagggggactactactactacggtatggacgtctggggccaagggaccacggtcaccgtctcctca

SEQ ID NO: 3836 - DNA, 399 bp, Homo sapiens
caggtgcagctgcaggagtcgggcccaggactggtgaagccttcacagaccctgtccctcacctgcactgtctctggtggctccatcagcagtggtggttactactggagctggatccgccagcacccagggaagggcctggagtggattgggtacatctattacagtgggagcacctactacaacccgtccctcaagagtcgagttaccatatcagtagacacgtctaagaaccagttctccctgaagctgagctctgtgactgccgcggacacggccgtgtattactgtgcgagagtctgtatccccgactatggttcggggagttattataacgtggactactactactacggtatggacgtctggggccaagggaccacggtcaccgtctcctca

SEQ ID NO: 3837 - DNA, 396 bp, Homo sapiens
gaggtgcagctggtggagtctgggggaggcctggtcaagcctggggggtccctgagactctcctgtgcagcctctggattcaccttcagtagctatagcatgaactgggtccgccaggctccagggaaggggctggagtgggtctcatccattagtagtagtagtagttacatatactacgcagactcagtgaagggccgattcaccatctccagagacaacgccaagaactcactgtatctgcaaatgaacagcctgagagccgaggacacggctgtgtattactgtgcgagagatcttgacaaccacagagactttagcgttcggcgggctatccggctctactactacggtatggacgtctggggccaagggaccacggtcaccgtctcctca

SEQ ID NO: 3838 - DNA, 390 bp, Homo sapiens
gaagtgcagctggtggagtctgggggaggcttggtacagcctggcaggtccctgagactctcctgtgcagcctctggattcacctttcatgattatgccatacactgggtccggcaagctccagggaagggcctggagtgggtctcaggtattagttggaatagtgatatcatagcctatgcggactctgtgaagggccgattcaccatctccagagacaacgtcaagaactccctgtctctgcaaatgagcagtctgagagctgaggacacggccttgtattactgtgcaaaggatcgtggtggagggtcagatggttcggggagttgggcgggctacgactacggtttggacgtctggggccaagggaccacggtcaccgtctcctca

SEQ ID NO: 3839 - DNA, 322 bp, Homo sapiens
gacatccagatgacccagtctccatcctccctgtctgcatctgtaggagacagagtcaccatcacttgccgggcaagtcagagcattggcagctatttaaattggtatcagcagataccagggaaagcccctaagctcttcatctctggtgtatccgatttgcaaagtggggtcccatcaaggttcagtggcagtggatctgggacagatttcactctcaccatcagcagtctgcaacctgaagattttgcaacttactactgtcaacagagttacagtaccccgtacacttttggccaggggaccaagctggagatcaaac

SEQ ID NO: 3840 - DNA, 322 bp, Homo sapiens
gacatccagatgacccagtctccatcctccctgtctgcatctgtaggagacagagtcaccatcacttgccgggcaagtcagagcattggcagctatgtgaattggtatcaacagataccagggaaagcccctaaactcttcatctacgctgtgtccagtttgcaaggtggggtcccatcgaggttcagtggcagcggatctgggacagatttcactctcaccatcagcagtctgcaacctgaagattttgcgacttactactgtcaacagagttacaataccccgtacacttttggccaggggaccaagctggagatcaaac

SEQ ID NO: 3841 - DNA, 322 bp, Homo sapiens
gacatccagatgacccagtctccatcttccgtgtctgcatctgtaggagacagagtcaccatcacttgtcgggcgagtcagggtattagcaactggttagcctggtatcagcagaaaccagggaaagcccctaacctcctgatctatgctgcatccaatttgcaaagtggggtcccatcaaggttcagcggcagtggatctgggacagatttcactctcaccatcagcagcctgcagcctgaagattctgcaacttactattgtcaacaggctaacattttcccgatcaccttcggccaagggacacgactggagattaaac

SEQ ID NO: 3842 - DNA, 322 bp, Homo sapiens
gacatccagatgacccagtctccatcttccgtgtctgcatctgtaggagacagagtcaccatcacttgtcgggcgagtcagggtattagcagctggttagcctggtatcagcagaaaccagggaaagcccctaagctcctgatctatgctgcatccaatttgcaaagtggggtcccatcaaggttcagcggcagtggatctgggacagatttcactctcaccatcagcagcctgcagcctgaagattttgcaacttactattgtcaacaggctaacagtttcccgatcaccttcggccaagggacacgactggagattaaac

SEQ ID NO: 3843 - DNA, 325 bp, Homo sapiens
gaaattgtgttgacgcagtctccaggcaccctgtctttgtctccaggggaaagagccaccctctcctgcagggccagtcagagtgttaccagcagctacttagcctggtaccagcagaaacctggccaggctcccaggctcctcatctttggtgcatccagcagggccactggcatcccagacaggttcagtggcagtgggtctgggacagacttcactctcaccatcagcagactggagcctgaagattttgcagtgtattactgtcagcagtatggtagctcacctctcactttcggcggagggaccaaggtggagatcaaac

SEQ ID NO: 3844 - DNA, 325 bp, Homo sapiens; identical to SEQ ID NO: 3843

SEQ ID NO: 3845 - DNA, 325 bp, Homo sapiens
tcctatgagctgacacagccaccctcggtgtcagtgtccccaggacaaacggccaggatcacctgctctggagatgcattgccaaaaaaatatgcttattggtaccagcagaagtcagaccaggcccctgtgttggtcatctatgaagacagcaaacgaccctccgggacccctgagagattctctggctccagttcagggacaatggccaccttgaccatcagtggggcccaggtggaggatgaagctgactactactgttactcaacagtcagcagtggtaatctctgggtgttcggcggagggaccaagctgaccgtcctag

SEQ ID NO: 3846 - DNA, 325 bp, Homo sapiens; identical to SEQ ID NO: 3845

SEQ ID NO: 3847 - DNA, 325 bp, Homo sapiens
gacattgtgttgacgcagtctccaggcaccctgtctttgtctccaggggaaagagccaccctctcctgcagggccagtcagagtgttagcagcagctacttagcctggtaccagcagaaacctggccaggctcccaggctcctcatctatggtgcatccagcagggccactggcatcccagacaggttcagtggcagtgggtctgggacagacttcactctcaccatcagcagactggagcctgaagattttgcagtgtattactgtcagcagtatggtagctcaccatacacttttggccaggggaccaagctggagatcaaac

SEQ ID NO: 3848 - DNA, 325 bp, Homo sapiens; identical to SEQ ID NO: 3847

SEQ ID NO: 3849 - DNA, 325 bp, Homo sapiens
gaaacagtgatgacgcagtctccagccaccctgtctttgtctccaggggcaagagccatcctctcctgcagggccagtcagagtattgccagcgacttagcctggtaccagcagaagcctggccaggctcccaggctcctcatctatggtgcatcttccagggcctctggtgttccagacaggttcagtggcagtgggtctgggacacagttcagtctcaccatcagcagcctgcagtctgaagactttgcagtttacttctgtcagcagtataatgactggcctccgctcaccttcggccaagggacacgactggacattaaac

SEQ ID NO: 3850 - DNA, 325 bp, Homo sapiens
gaaacagtgatgacgcagtctccagccaccctgtctatgtctccaggggagagagccatcctctcctgcagggccagtcagagtattgccagcgacttagcctggtaccagcagaagcctggccaggctcccagactcctcatctatggtgcatcttccagggccactggtgttccagccaggttcagtggcagtgggtctgggacacagttcactctcaccatcagcagcctgcagtctgaagattttgcagtttacttctgtcagcagtataatgactggcctccgctcaccttcggccaagggacacgactggagattaaac

SEQ ID NO: 3851 - DNA, 340 bp, Homo sapiens
gacatcgtgatgacccagtctccagactccctggctgtgtctctgggcgagagggccaccatcaactgcaagtccagccagagtgttttatacagctccaacaataagaactacttagcttggtaccagcagaaaccaggacagcctcctaacctgctcatttactgggcatctacccgggaatccggggtccctgaccgattcagtggcagcgggtctgggacagatttcactctcaccatcagcagcctgcaggctgaagatgtggcagtttattactgtcagcaatatttcattactccactcactttcggcggagggaccaaggtggagatcaaac

SEQ ID NO: 3852 - DNA, 324 bp, Homo sapiens
gaaattgtgttgacacagtctccagccaccctgtctttgtctccaggggaaagagccaccctctcctgcagggccagtcagagtgttagcagctacttagcctggtaccaacagaaatctggccaggctcccaggctcctcatctatgatgcatccaacagggccactggcatcccagccaggttcagtggcagtgggtctgggacagacttcactctcaccatcagcagcctagagcctgaagattttgcagtttattactgtcagcagcgtagcaactggcctcgatcaccttcggccaagggacacgactggagattaaac

SEQ ID NO: 3853 - DNA, 323 bp, Homo sapiens
gaaattgtgttgacgcagtctccaggcaccctgtctttgtctccaggggaaagagccaccctctcctgcagggccagtcagagaattagcagcagctacttagcctggtaccagcagaaacctggccaggctcccagggtcctcatctatggtgcatccagcagggccactggcatcccagacaggttccgtggcagtgggtctgggacagacttcactctcgcctccagcagactggaggctgaagattttgcagtgtattactgtcagcaatatggtggccccgctcactttcggcggagggaccaaggtggagatcaaac

SEQ ID NO: 3854 - DNA, 323 bp, Homo sapiens
gaaattgtgttgacgcaggttccaggcaccctgtctttgtctccaggggaaagagccaccctctcctgcagggccagtcagagagttagcagcagctacttagcctggtaccagcagaaacctggccaggctcccaggctcctcatctatggtgcatccagcagggccactggcatcacagacaggttcagtggcagtgggtctgggacagacctcactctcaccatcagcagactggagcctgaagattttgcagtgtattactgtcagcagtatggtagccccgctcactttcggcggagggaccaaggtggagatcaaac

SEQ ID NO: 3855 - DNA, 337 bp, Homo sapiens
cagcctgtgctgactcaatcatcctctgcctctgcttccctgggatcctcggtcaagctcacctgcactctgagcagtgggcacagtagctacatcatcgcatggcatcagcagcagccagggaaggcccctcggttcttgatgaagtttgagggtagtggaagctacaacaaggggagcggagttcctgatcgcttctcaggctccagctctggggctgaccactacctcaccatctccaacctccagtctgaggatgaggctgattattactgtgagacctgggacagtaacactcaaagagtgttcggcggagggaccaagctggccgtcctag

SEQ ID NO: 3856 - DNA, 337 bp, Homo sapiens; identical to SEQ ID NO: 3855

SEQ ID NO: 3857 - DNA, 325 bp, Homo sapiens
gaaattgtgttgacacagtctccagccaccctatctttgtctccaggggaaagagccaccctctcctgcagggccagtcagagtgttagcagctacttagcctggtaccaacagaaacctggccaggctcccaggctcctcatctatgatgcatccaacagggccactggcatcccagccaggttcagtggcagtgggtctgggacagacttcactctcaccatcagcagcctagagcctgaagattttgcagtttattactgtcagcagcgtagcaactggcctccgctcactttcggcggagggaccaaggtggagatcaaac

SEQ ID NO: 3858 - DNA, 322 bp, Homo sapiens
gacatccagatgacccagtctccatcctccctgtctgcatctgtaggagacagagtcaccatcacttgccgggcgagtcagggcattagcaattctttagcctggtatcagcagaaaccagggaaagcccctaagctcctgctctatgctgcatccagattggaaagtggggtcccatccaggttcagtggcagtggatctgggacggattacactctcaccatcagcagcctgcagcctgaagattttgcaacttatttctgtcaacattattatagtaccccccgaacgttcggccaagggaccaaggtggaaatcaaac

SEQ ID NO: 3859 - DNA, 331 bp, Homo sapiens
cagtctgccctgactcagcctgcctccgtgtctgggtctcctggacagtcgatcaccatctcctgcactggaagtagcggtgacattggatcttctaatgatgtctcctggtaccaacagcacccaggcgaagcccccaaactcatgatttatgaggtcactaatcggccctcaggggtttctaatcgcttctctgcctccaagtccggcaacacggcctccctgaccctctctgggctccaggcagaggacgaggctgactattactgcagttcatattcatccagcagaactctggtattcggcggagggaccaagctgaccgtcctag

SEQ ID NO: 3860 - DNA, 328 bp, Homo sapiens
gacatccagttgacccagtctccatccttcctgtctgcatctgtaggagacagagtcaccatcacttgccgggccagtcagggcattagcagttatttagcctggtatcagcaaaaaccagggaaagcccctaagctcctgatctatgctgcatccactttgcaaagtggggtcccatcaaggttcagcggcagtggatctgggacacaattcactctcacaatcagcagcctgcagcctgaagattttgcaacttattactgtcaacagcttaatagttaccttcccatgtacaattttggccaggggaccaagctggagatcaaac

SEQ ID NO: 3861 - DNA, 319 bp, Homo sapiens; identical to SEQ ID NO: 1688

SEQ ID NO: 3862 - DNA, 340 bp, Homo sapiens
cagtctgccctgactcagcctgcctccgtgtctgggtctcctggacagtcgatcaccatctcctgcactgcaaccagcagtgacgttggtggttataactatgtctcctggtaccaacagcacccaggcaaagcccccaaactcatgatttatgaggtcagtaatcggccctcaggggtttctaatcgcttctctggctccaagtctggcaacacggcctccctgaccatctctgggctccaggctgaggacgaggctgattattactgcagctcatatacaagtagcaccactctcgcccctgtggtattcggcggagggaccaagctgaccgtcctag

SEQ ID NO: 3863 - DNA, 333 bp, Homo sapiens
cagtctgccctgactcagcctgcctccgtgtctgggtctcctggacagtcgatcaccatctcctgcactggaaccagcagtgacgttggtggttataactatgtctcctggtaccaacatcacccaggcaaagcccccaaactcatgatttatgacgtcagtaatcggccctcaggggtttctaatcgcttctctggctccaagtctggcaacacggcctccctgaccatctctgggctccaggctgacgacgaggctgattattactgcagctcatatacaaccagcaggactgtttgggtgttcggcggagggaccaagctgaccgtccta

SEQ ID NO: 3864 - DNA, 322 bp, Homo sapiens; identical to SEQ ID NO: 837

SEQ ID NO: 3865 - DNA, 322 bp, Homo sapiens; identical to SEQ ID NO: 851

SEQ ID NO: 3866 - DNA, 337 bp, Homo sapiens
gatattgtgatgactcaatctccactctccctgcccgtcacccctggagagccggcctccatctcctgcaggtcaagtcagagcctcctgcatagtaaaggatacaactatttggattggtacctgcagaagccagggcagtctccacagctcctgatctatttgggttctaatcgggcctccggggtccctgacaggttcagtggcagtgggtcaggcacagattttacactgaaaatcagcagagtggaggctgaggatgctggggtttattactgcatgcaagctctacaaactcctcccacttttggccaggggaccaagctggagatcaaac

SEQ ID NO: 3867 - DNA, 328 bp, Homo sapiens
gacatccagttgacccagtctccatccttcctgtctgcatctgtaggagacagagtcaccatcacttgccgggccagtcagggcattagcagttatttagcctggtatcagcaaaaaccagggaaagcccctaagctcctgatctatgctgcatccactttgcaaagtggggtcccatcaaggttcagcggcagtggatctgggacagaattcactctcacaatcagcagcctgcagcctgaagattttgcaacttattactgtcaacagcttaatagttacccctcgatgtacacttttggccaggggaccaagctggagatcaaac

SEQ ID NO: 3868 - DNA, 328 bp, Homo sapiens
cagtctgccctgactcagcctgcctccgtgtctgggtctcctggacagtcgatcaccatctcctgcactggaaccagcagtgacattggtggttataactatgtctcctggtaccaacaacacccaggcaaagcccccaaactcatgatttatgatgtcagtaatcggccctcaggggtttctaatcgcttctctggctccaagtctggcaacacggcctccctgaccatctctgggctccaggctgaggacgaggctgattattactgcagctcatatacaagcagcagcgctctattcggcggagggaccaagctgaccgtcctag

SEQ ID NO: 3869 - DNA, 346 bp, Homo sapiens
gacatcgtgatgacccagtctccagactccctggctgtgtctctgggcgagagggccaccatcaactgcaggtccagccagagtgttttatacagctccaacaataagagctacttagcttggtaccagcagaaaccaggacagcctcctaaactgctcatttattgggcatctacccgggaatccggggtccctgaccgattcagtggcagcgggtccgggacagatttcactctcaccatcagcagcctgcaggctgaagatgtggcagtttattactgtcagcaatgttatagtactcctcgggggctcactttcggcggagggaccaaggtggagatcaaac

SEQ ID NO: 3870 - DNA, 322 bp, Homo sapiens
gccatccggatgacccagtctccatcctcattctctgcatctacaggagacagagtcaccatcacttgtcgggcgagtcagggtattagcagttatttagcctggtatcagcaaaaaccagggaaagcccctaagctcctgatctatgctgcatccactttgcaaagtggggtcccatcaaggttcagcggcagtggatctgggacagatttcactctcaccatcagctgcctgcagtctgaagattttgcaacttattactgtcaacagtattatagttaccctcgaacgttcggccaagggaccaaggtggaaatcaaac

SEQ ID NO: 3871 - DNA, 322 bp, Homo sapiens
gaaattgtgttgacacagtctccagccaccctgtctttgtctccaggggaaagagccaccctctcctgcagggccagtcagagtgttagcagctacttagcctggtaccaacagaaacctggccaggctcccaggctcctcatctatgatgcatccaacagggccactggcatcccagccaggttcagtggcagtgggtctgggacagacttcactctcaccatcagcagcctagagcctgaagattttgcagtttattactgtcagcagcgtagcaactggcctctcactttcggcggagggaccaaggtggagatcaaac

SEQ ID NO: 3872 - DNA, 325 bp, Homo sapiens
tcttctgagctgactcaggaccctgctgtgtctgtggccttgggacagacagtcaggatcacatgccaaggggacagcctcagaagctattatgcaagctggtaccagcagaaggcaggacaggcccctgtacttgtcatctatggtaaaaacaaccggccctcagggatcccagaccgattctctggctccagctcaggaaacacagcttccttgaccatcactggggctcaggcggaggatgaggctgactattactgtagctcccgggacagcagtggtaaccatgtggttttcggcggtgggaccaagctgaccgtcctag

SEQ ID NO: 3873 - DNA, 328 bp, Homo sapiens
gaaattgtgttgacgcagtctccaggcaccctgtctttgtctccaggggaaagagccaccctcttctgcagggccagtcagagtattaccaggaattctttagtctggtatcaacagagacctggccaggctcccaggctcctcatctttggtgcatccaccagggtcactggcatcccagacaggttcagtggcagtgggtctgggacagacttcactctcaccatcagcagactggagcctgaagattttgcaatgtattattgtcagcagtatggtggctcacctccctggacgttcggccaagggaccaaggtagaaatcaaac

SEQ ID NO: 3874 - DNA, 328 bp, Homo sapiens
gacatccagttgacccagtctccatccttcctgtctgcatctgtaggagacagagtcactatcacttgccgggccagtcagggcattagcagttatttagtctggtatcagcaaaaaccagggaaagcccctaagctcctgatctatgctgcatccactttgcaaagtggggtcccatcaaggttcagcggcagtggatctgggacagaattcactctcacaatcagcagcctgcagcctgaagattttgcaacttattactgtcaacaggttaatagtaacttggggcccctcactttcggcggagggaccaaggtggagatcaaac

SEQ ID NO: 3875 - DNA, 329 bp, Homo sapiens
cagtctgtgttgacgcagccgccctcagtgtctgcggccccaggacagaaggtcaccatctcctgctctggaagcagctccaacattgggaataattatgtatcctggtaccagcagctcccaggaacggcccccaaactcctcatctatgaaaataataagcgaccctcagggattcctgaccgattctctggctccaagtctggcacgtcagccaccctgggcatcaccggactccagactggggacgaggccgattattactgcggaacatgggatagcagcctgagtgctggtattcggcggagggaccaagctgaccgtcctag

SEQ ID NO: 3876 - DNA, 328 bp, Homo sapiens
gacatccagatgacccagtctccatcctccctgtctgcatctgtaggagacagagtcaccatcacttgccgggcaagtcagatcattaccaattatttaagttggtatcagcagaaaccagggaaagcccctaagctcctgatctatggtgcatccagtttgcaaagcggggtcccatcaaggttcagtggcagtggatctggaacagatttcactctcaccatcagcagtctgcaacctgaagattttgcaacttactactgtcaacagagtgacagttccctcccgaggctcactttcggcggagggaccaaggtggagatcaaac

SEQ ID NO: 3877 - DNA, 322 bp, Homo sapiens
tcctatgagctgactcagccaccctcagtgtccgtgtccccaggacagacagccagcatcacctgctctggagataaattgggggataaatatgcttgctggtatcagcagaagccaggccagtcccctgtgctggtcatctatcaagatagcaagcggccctcagggatccctgagcgattctctggctccaactctgggaacacagccactctgaccatcagcgggacccaggctatggatgaggctgactattactgtcaggcgtgggacagcagcactgatgtggtattcggcggagggaccaagctgaccgtcctag

SEQ ID NO: 3878 - DNA, 322 bp, Homo sapiens
gaaattgtgttgacacagtctccagccaccctgtctttgtctccaggggaaagagccaccctctcctgcagggccagtcagagtgttagcagctacttagcctggtaccaacagaaacctggccaggctcccaggctcctcatctatgatgcatccaacagggccactggcatcccagccaggttcagtggcagtgggtctgggacagacttcactctcaccatcagcagcctagagcctgaagattttgcagtttattactgtcagcagcgtagcaactggcccccgaccttcggccaagggacacgactggagattaaac

SEQ ID NO: 3879 - DNA, 322 bp, Homo sapiens
gacatccagatgacccagtctccatcctccctgtctgcatctgtaggagacagagtcaccatcacttgccgggcaagtcagagcattagcagctatttaaattggtatcagcagaaaccagggaaagcccctaagctcctgatctatgctgcatccagtttgcaaagtggggtcccatcaaggttcagtggcagtggatctgggacagatttcactctcaccatcagcagtctgcaacctgaagattttgcaacttactactgtcaacagagttacagtaccccgatcaccttcggccaagggacacgactggagattaaac

SEQ ID NO: 3880 - DNA, 322 bp, Homo sapiens
gacatccagatgacccagtctccatcctccctgtctgcatctgtaggagacagagtcaccatcacttgccgggcaagtcagagcattagcagctatttaaattggtatcagcagaaaccagggaaagcccctaagctcctgatctatgctgcatccagtttgcaaagtggggtcccatcaaggttcggtggcagtggatctgggacagatttcactctcaccatcagcagtctgcaacctgaagattttgcaacttactactgtcaacagagttacagtacccctaggacttttggccaggggaccaagctggagatcaaac

SEQ ID NO: 3881 - DNA, 319 bp, Homo sapiens
tcctatgagctgactcagccaccctcagtgtccgtgtccccaggacagacagccagcatcacctgctctggagataaattgggggataaatatgcttgctggtatcagcagaagccaggccagtcccctgtgctggtcatctatcaagatagcaagcggccctcagggatccctgagcgattctctggctccaactctgggaacacagccactctgaccatcagcgggacccaggctatggatgaggctgactattactgtcaggcgtgggacagcagcaatgtggtattcggcggagggaccaagctgaccgtcctag

SEQ ID NO: 3882 - DNA, 325 bp, Homo sapiens
gaaatagtgatgacgcagtctccagccaccctgtctgtgtctccaggggaaagagccaccctctcctgcagggccagtcagagtgttagcagcaacttagcctggtaccagcagaaacctggccaggctcccaggctcctcatctatggtgcatccaccagggccactggtatcccagccaggttcagtggcagtgggtctgggacagagttcactctcaccatcagcagcctgcagtctgaagattttgcagtttattactgtcagcagtataataactggcctcggtggacgttcggccaagggaccaaggtggaaatcaaac

SEQ ID NO: 3883 - DNA, 331 bp, Homo sapiens
cagtctgccctgactcagcctgcctccgtgtctgggtctcctggacagtcgatcaccatctcctgcactggaaccagcagtgatgttgggagttataaccttgtctcctggtaccaacagcacccaggcaaagcccccaaactcatgatttatgacgtcagtcagcggccctcaggcgtttctaatcgcttctctggctccaagtctggcaacacggcctccctgacaatctctgggctccaggctgaggacgaggctgattattactgctgctcatatgcaggtagtagcacccgggtgttcggcggagggaccaagctgaccgtcctag

SEQ ID NO: 3884 - DNA, 331 bp, Homo sapiens
cagtctgaactgactcagccaccctcagcgtctgggacccccgggcagagggtcaccatctcttgttctggaagcagctccaacatcggaaataatgctgtctactggtaccagcagctcccaggaacggcccccaaactcctcatccacagtagtaatcagcggccctcaggggtccctgaccgattctctgggtccaagtctggcacctcagcctccctggccatcagtgggctccagcccgaggatgaggctgattattactgtgcaacatgggctgacaccctgaatggtcgggtgttcggcggagggaccaagctgaccgtcctag

SEQ ID NO: 3885 - DNA, 328 bp, Homo sapiens
gaaattgtgttgacacagtctccagccaccctgtctttgtctccaggggaaagagccaccctctcctgcagggccagtcagagtgttagcagctacttagcctggtaccaacagaaacctggccaggctcccaggctcctcatctatgatgcatccaacagggccactggcatcccagccaggttcagtggcagtgggtctgggacagacttcactctcaccatcagcagcctagagcctgaagattttgcagtttattactgtcagtaccgcagcaactggccgccggtgctgactttcggcggagggaccaaggtggagatcaaac

SEQ ID NO: 3886 - DNA, 322 bp, Homo sapiens
gacatccagatgacccagtctccatcctccctgtctgcatctgtaggagacagagtcaccatcacttgccgggcaagtcagagcattagcagctatttaaattggtatcagcagaaaccagggaaagcccctaagctcctgatctatgctgcatccagtttgcaaagtggggtcccatcaaggttcagtggcagtggatctgggacagatttcactctcaccatcagcagtctgcaacctgaagattttgcaacttactactgtcaacagagttacagtacccctaaaacttttggccaggggaccaagctggagatcaaac

SEQ ID NO: 3887 - DNA, 325 bp, Homo sapiens
gaaattgtgttgacgcagtctccaggcaccctgtctttgtctccaggggaaagagccaccctctcctgcagggccagtcagagtgttagcagcagctacttagcctggtaccagcagaaacctggccaggctcccaggctcctcatctatggtgcatccagcagggccactggcatcccagacaggttcagtggcagtgggtctgggacagacttcactctcaccatcagcagactggagcctgaagattttgcagtgtattactgtcagcagtatggtagctcacctctcactttcggcggagggaccaaggtggagatcaaac

SEQ ID NO: 3888 - DNA, 322 bp, Homo sapiens
gacatccagttgacccagtctccatccttcctgtctgcatctgtaggagacagagtcaccatcacttgccgggccagtcagggcattagcagttatttagcctggtatcagcaaaaaccagggaaagcccctaagctcctgatctatgctgcatccactttgcaaagtggggtcccatcaaggttcagcggcagtggatctgggacagaattcactctcacaatcagcagcctgcagcctgaagattttgcaacttattactgtcaacagcttaatagttaccctcgtacttttggccaggggaccaagctggagatcaaac

SEQ ID NO: 3889 - DNA, 322 bp, Homo sapiens
gacatccagatgacccagtctccatcctccctgtctacatctgttggagacagagtcaccatcacttgccgggcaagtcagagcattagcagctatttaaattggtatcagcaaaaaccagggaaagcccctaacctcctgatctatgctacatccactttgcaaagtggggtcccatcaaggttcagtggcagtggatctgggacatatttcactctcaccatcagcagtctgcaacctgaagattttgcaacttactactgtcaacagagttacagtaccccgtacactcttggccaggggaccaagctggagatcaaac

SEQ ID NO: 3890 - DNA, 335 bp, Homo sapiens
gatgttctgatgactcagtctccactctccctgcccgtcacccttggacagccggcctccatctcctgcaggtctagtcaaagcctcgtctacagtgatggaaacacctacttgaattggtttcagcagaggccaggccaatctccaaggcgcctaatttataaggtttctaaccgggactctggggtcccagacagattcagcggcagtgggtcaggcactgaattcacactgaaaatcagcagggtggaggctgaagatgttggggtttattactgcatgcaaggtacacactggcctctcactttcggccctgggaccaaagtggatatcaa

SEQ ID NO: 3891 - DNA, 322 bp, Homo sapiens
gaaactgtgttgacacagtctccagtcaccctgtctttgtctccaggggatagagccaccctctcctgcagggccagtcggagtgttagtagctccttaggctggtaccaacagaaacctggccaggctcccagactcctcatctatgatgcatccaacagggccactggcatcccagccaggttcagtggcagtgggtctgggacagacttcactctcaccatcagcagtctagagcctgaagattttgccgtttattattgtcagcagcgtaacaactggcctctcactttcggcggcgggaccaaggtggaaatcaaac

SEQ ID NO: 3892 - DNA, 324 bp, Homo sapiens
tcctatgagctgactcagccaccctcagtgtccgtgtccccaggacagacagccagcatcacctgctctggagataaattgggggatcaatatgtttgttggtatcagcagaagccaggccagtcccctgtactggtcatccatcaagacaacaggcggccctcaggcatccctgagcgattctctggctccaactctgggaacacagccactctgaccatcagcgggacccaggctatggatgaggctgactatttctgtcaggcgtgggacaccagcactgagggggtggtattcggcggagggaccacgctgaccgtccta

SEQ ID NO: 3893 - DNA, 340 bp, Homo sapiens
gatattgtgatgactcagtctccactctccctgcccgtcacccctggagagccggcctccatctcctgcaggtctagtcagagcctcctgcatagtaatggatacaactatttggattggtacatgcagaagccagggcagtctccacagctcctgatccatttgggttctaatcgggcctccggggtccctgacaggttcagtggcagtggatcaggcacagattttacactgaaaatcagcagagtggaggctgaggatgttggggtttattactgcatgcaagctctacaaacttcggtttacacttttggccaggggaccaagctggagaacaaac

SEQ ID NO: 3894 - DNA, 325 bp, Homo sapiens
gacatccagatgacccagtctccatcctccctgtctgcatctgtaggagacagagtcaccatcacttgccgggcaagtcagagcattagcagctatttaaattggtatcagcagaaaccagggaaagcccctaagctcctgatctatgctgcatccagtttgcaaagtggggtcccatcaaggttcagtggcagtggatctgggacagatttcactctcaccatcagcagtctgcaacctgaagattttgcaacttactactgtcaacagagttacagtacccctcaattcacttttggccaggggaccaagctggagatcaaac

SEQ ID NO: 3895 - DNA, 328 bp, Homo sapiens
tcctatgagctgacacagccaccctcggtgtcagtgtccccaggacagacggccaggatcacctgctctggagatgcattgccaaagcaatatgcttattggtaccagcagaagccaggccaggcccctatggtggtgatatataaagacagtgagaggccctcagggatccctgagcgattctctggctccacctcagggacaacagtcacgttgaccatcagtggagtccaggcagaagatgaggctgactattactgtcaatcagcacacagcagtggtaattaccattgggtgttcggcggagggaccaagctgaccgtcctag

SEQ ID NO: 3896 - DNA, 322 bp, Homo sapiens
gacatccagatgacccagtctccatcctccctgtctgcatctgtaggagacagagtcaccatcacttgccgggcaagtcagagcattagcagctatttaaattggtatcagcagaaaccagggaaagcccctaagctcctgatctatgctgcatccagtttgcaaagtggggtcccatcaaggttcagtggcagtggatctgggacagatttcactctcaccatcagcagtctgcaacctgaagattttgcaacttactactgtcaacagagttacagtacccctcacacttttggccaggggaccaagctggagatcaaac

SEQ ID NO: 3897 - DNA, 340 bp, Homo sapiens
gacatcgtgatgacccagtctccagactccctggctgtgtctctgggcgagagggccaccatcaactgcaagtccggccagagtattttatacagctccaacaataagaactacttagcttggtaccagcagaaaccaggacagcctcctaagctgctcatttactgggcatctacccgggaatccggggtccctgaccgattcagtggcagcgggtctgggacagatttcactctcaccatcagcagcctgcaggctgaagatgtggcagtttattactgtcagcaatattatagtattcctcagactttcggccctgggaccaaagtggatatcaaac

SEQ ID NO: 3898 - DNA, 322 bp, Homo sapiens
gaaattgtgctgactcagtctccagactttcagtctgtgactccaaaggagaaagtcaccatcacctgccgggccagtcagagcattggtagtagcttacactggtaccagcagaaaccagatcagtctccaaagctcctcatcaagtatgcttcccagtccttctcaggggtcccctcgaggttcagtggcagtggatctgggacagatttcaccctcaccatcaatagcctggaagctgaagatgctgcaacgtattactgtcatcagagtagtagtttccccctcactttcggcggagggaccaaggtggagatcaaac

SEQ ID NO: 3899 - DNA, 328 bp, Homo sapiens
tcctatgtgctgactcagccaccctcagtgtcagtggccccaggaaagacggccaggattacctgtgggggaaacaagattggaagtaaaagtgtgcactggtaccagcagaagccaggccaggcccctgtgctggtcatctcttatgatagcgaccggccctcagggatccctgagcgattctctggctccaactctgggaacacggccaccctgaccatcagcagggtcgaagccggggatgaggccgactattactgtcaggtgtgggatagtggtggtgatcccccttatgtcttcggaactgggaccaaggtcaccgtcctag

SEQ ID NO: 3900 - DNA, 340 bp, Homo sapiens
gacatcgtgatgacccagtctccagactccctggctgtgtctctgggcgagagggccaccatcaactgcaagtccagccagagtgttttatacagctccaacaataagaactacttagcttggtaccagcagaaaccaggacagcctcctaagctgctcatttactgggcatctacccgggaatccggggtccctgaccgattcagtggcagcgggtctgggacagatttcactctcaccatcagcagcctgcaggctgaagatgtggcagtttattactgtcagcaatattatagtactccggatacgttcggccaagggaccaaggtggaaatcaaac

SEQ ID NO: 3901 - DNA, 334 bp, Homo sapiens
cagtctgccctgactcagcctgcctccgtgtctgggtctcctggacagtcgatcaccatctcctgcactggaaccagcagtgacgttggtggttataactatgtctcctggtaccaacagcacccaggcaaagcccccaaactcatgatttatgaggtcagtaatcggccctcaggggtttctaatcgcttctctggctccaagtctggcaacacggcctccctgaccatctctgggctccaggctgaggacgaggctgattattactgcagctcatatacaagcagcagcactccctacgtcttcggagctgggaccaaggtcaccgtcctag

SEQ ID NO: 3902 - DNA, 328 bp, Homo sapiens
cagtctgccctgactcaacctccctcaatgtccgcgtctcctgggcagtcagtcaccatttcctgcactggaaccagtgctgatgttggtggatataattatgtctcctggtaccaacaattcacaggcagagcccccaaactcattatttatgatgtttctgagcgggcctcaggggtccctgatcgcttctctggctccaagtctggcaacaccgcctccctgaccatctctgggctgcaggctgaagatgaggctgattattactgctgctcatatgcaggaatttttactttgtttggcggggggaccaaggtgaccgtcctag

SEQ ID NO: 3903 - DNA, 322 bp, Homo sapiens
gccatccggatgacccagtctccatcctcattctctgcatctacaggagacagagtcaccatcacttgtcgggcgagtcagggtattagcagttatttagcctggtatcagcaaaaaccagggaaagcccctaagctcctgatctatgctgcatccactttgcaaagtggggtcccatcaaggttcagcggcagtggatctgggacagatttcactctcaccatcagctgcctgcagtctgaagattttgcaacttattactgtcaacagtattatagttaccctcgtacttttggccaggggaccaagctggagatcaaac

SEQ ID NO: 3904 - DNA, 322 bp, Homo sapiens
gaaatagtgatgacgcagtctccagccaccctgtctgtgtctccaggggaaagagccaccctctcctgcagggccagtcagagtgttagcagcaacttagcctggtaccagcagaaacctggccaggctcccaggctcctcatgtatggtgcatctaccagggccactggtatcccagccaagttcagtggcagtgggtctgggacagagttcactctcaccatcagcagcctgcagtctgaagattttgcagtttattactgtcagcagtataataattggcctctcactttcggcggagggaccaaggtggagatcaaac

SEQ ID NO: 3905 - DNA, 325 bp, Homo sapiens; identical to SEQ ID NO: 2320

SEQ ID NO: 3906 - DNA, 319 bp, Homo sapiens
tcctatgagctgactcagccaccctcagtgtccgtgtccccaggacagacagccagcatcacctgctctggagataaattgggggataaatatgcttgctggtatcagcagaggccaggccagtcccctgtgctggtcatctctcaagatagcaagcggccctcagggatccctgagcgattctctggctccaactctgggaacacagccactctgaccatcagcgggacccaggctatggatgagactgactattactgtcaggcgtgggacagcagcactgtggtattcggcggagggaccaagctgaccgtcctag

SEQ ID NO: 3907 - DNA, 325 bp, Homo sapiens
tcctatgtgctgactcagccaccctcagtgtcagtggccccaggaaagacggccaggattacctgtgggggaaacaacattggaagtaaaagtgtgcactggtaccagcagaagccaggccaggcccctgtgctggtcatctattatgatagcgaccggccctcagggatccctgagcgattctctggctccaactctgggaacacggccaccctgaccatcagcagggtcgaagccggggatgaggccgactattactgtcaggtgtgggatagtagtagtgcccgtgtggtattcggcggagggaccaagctgaccgtcctag

SEQ ID NO: 3908 - DNA, 325 bp, Homo sapiens
gacatccagatgacccagtctccatcctccctgtctgcatctgtaggagacagagtcaccatcacttgccaggcgagtcaggacattaacaactttttaaattggtatcagcagaaaccagggaaagcccctaagctcctgatctacgatgcatccaatttggaaacaggggtcccatcaaggttcagtggaagtggatctgggacagattttactttcaccatcagcagcctgcagcctgaagattttgcaacatattactgtcaacagtatgataatctcccccctatcactttcggccctgggaccaaagtggatatcaaac

SEQ ID NO: 3909 - DNA, 331 bp, Homo sapiens
cagtctgccctgactcagcctccctccgcgtccgggtctcctggacagtcagtcaccatctcctgcactggaaccagcggtgacattggtgattataactatgtctcctggtaccaacagtattcaggcaaagcccccaaactcatgatttatgtggtcactaagcggccctcaggggtccctgatcgcttctctggctccaagtctggcaacacggccttcctgaccgtctctgggctccaggctgaggatgaggctgattattactgcacctcatatgcaggcagcaacaatgtggtgttcggcggagggaccaagctgaccgtcctag

SEQ ID NO: 3910 - DNA, 343 bp, Homo sapiens
gacatcgtgatgacccagtctccagactccctggctgtgtctctgggcgagagggccaccatcaactgcaagtccagccagagtgttttatacagctccaacaataggaactacttagcttggtaccagcagaaaccaggacagcctcctaagctgctcatttactgggcatctacccgggaatccggggtccctgaccgattcagtggcagcgggtctgggacagatttcactctcaccatcagcagcctgcaggctgaagatgtggcagtttattactgtcagcaatattatagtactcctccgctcactttcggcggagggaccaaggtggagatcaaac

SEQ ID NO: 3911 - DNA, 322 bp, Homo sapiens
tcctatgagctgactcagccactctcagtgtcagtggccctgggacagacggccaggattacctgtgggggaaacaacattggaagtaaaaatgtgcactggtaccagcagaagccaggccaggcccctgtgctggtcatctatagggatagcaaccggccctctgggatccctgagcgattctctggctccaactcggggaacacggccaccctgaccatcagcagagcccaagccggggatgaggctgactattactgtcaggtgtgggacagcagcactctttatgtcttcggaactgggaccaaggtcaccgtcctag

SEQ ID NO: 3912 - DNA, 325 bp, Homo sapiens; identical to SEQ ID NO: 1686

SEQ ID NO: 3913 - DNA, 327 bp, Homo sapiens
cagtctgtgctgactcagccaccctcagcgtctgggacccccgggcagagggtcaccatctcttgttctggaagcagctccaacatcggaagtaatactgtaaactggtaccagcagctcccaggaacggcccccaaactcctcatttatagtaataatcagaggccctcaggggtccctgaccgattctctggctccaagtctggcacctcagcctccctggccatcagtgggctccagtctgaggatgaggctgattattactgtgcagcatgggatgacagcctgaatggggtgttcggcggagggaccaagctgaccgtccta

SEQ ID NO: 3914 - DNA, 331 bp, Homo sapiens
cagtctgtgttgacgcagccgccctcagtgtctgcggccccaggacagaaggtcaccatctcctgctctggaagcagctccaacattgggaataattatgtatcctggtaccagcagctcccaggaacagcccccaaactcctcatctatgaaaataataagcgaccctcagggattcctgaccgattctctggctccaagtctggcacgtcagccaccctgggcatcaccggactccagactggggacgaggccgattattactgcggaacatgggatagcagcctgagtgctggggtattcggcggagggaccaagctgaccgtcctag

SEQ ID NO: 3915 - DNA, 322 bp, Homo sapiens
gacatccagatgacccagtctccatcctccctgtctgcatctgtaggagacagagtcaccttcacttgccgggcaagtcagagcattagcatctatttaaattggtatcagcagaaaccagggaaagcccctgagctcctgatctatgctgcatccagtttgcaaagtggggtcccatcaaggttcagtggcagtggatctgggacagatttcactctcaccatcagcagtctgcaacctgaagattttgcaacttactactgtcaacagagttacagtaccccgctcactttcggcggagggaccaaggtggagatcaaac

SEQ ID NO: 3916 - DNA, 322 bp, Homo sapiens
gacatccagatgacccagtctccatcttccgtgtccgcatctgtaggagacagactcaccatcacttgtcgggcgagtcagggtatcagcagcaggttagcctggtatcagcagaaaccagggaaagcccctaaacttctgatctatcttgcatccagtttggaaggtggggtcccatcaaggttcagcggcagtggatctgggacggatttcacgctcaccatcagcagcctgcagcctgaggattttgcaatttactattgtcaacagtgtaacagtttccctctcactgtcggcggagggaccagggtggagatcaaac

SEQ ID NO: 3917 - DNA, 322 bp, Homo sapiens
gaaatggtattgacacagtctccagccactctgtctttgtctccaggggaaagagccgccctctcctgcagggccagtcagagtgttagcagctacttagcctggtatcaacagaaacctggccaggctcccaggctcctcatctatggtacatccaacagggccactggcatcccagccaggttcagtggcagtgggtctgggacagacttcactctcaccatcagcagcctagagcctgaagattttgcagtttattactgtcaacatcgttccaactggcggatcaccttcggccaagggacacgactggagattaaac

SEQ ID NO: 3918 - DNA, 322 bp, Homo sapiens
gacatccagatgacccagtctccttccaccctgtctgcatctgtaggagacagagtcaccatcacttgccgggccagtcagagtattagtagcgggttggcctggtatcagcagaagccagggaaagcccctaacctcctgatctataaggcgtccactttaaaaagtggggtcccatcaaggttcagcggcagtggatctgggacagaattcactctcaccatcagcagcctgcagcctgatgattttgcaacttattactgccaacagtataatagttattctccaacgttcggccaagggaccaaggtggaaatcaaac

SEQ ID NO: 3919 - DNA, 331 bp, Homo sapiens
cagtctgccctgactcagcctgcctccgtgtctgggtctcctggacagtcgatcaccatctcctgcactggaaccagcagtgatgttgggagttataaccttgtctcctggtaccaacagcacccaggcaaagcccccaaactcatgatttatgaggtcagtaagcggccctcaggggtttctaatcgcttctctggctccaggtctggcaacacggcctccctgacaatctctgggctccaggctgaggacgaggctgattattactgcttctcatatgcaggtagtagcacttgggtgttcggcggagggaccaacctgaccgtcctag

SEQ ID NO: 3920 - DNA, 322 bp, Homo sapiens
gacatccagatgacccagtctccatcctccctgtctgcatctgtaggagacagagtcaccatcacttgccgggcgagtcagggcattagcaattatttagcctggtatcagcacaaaccagggaaagttcctaagctcctgatctatgctgcatccactttgcaatcaggggtcccatctcggttcagtggcagtggatctgggacagatttcactctcaccatcagcagcctgcagcctgaagatgttgcaacttattactgtcaaaagtataacagtgcccctcggacgttcggccaagggaccaaggtggaaatcaaac

SEQ ID NO: 3921 - DNA, 325 bp, Homo sapiens
gaaattgtgttgacacagtctccagccaccctgtctttgtctccaggggaaagagccaccctctcctgcagggccagtcagagtgttagcagctacttagcctggtaccaacagaaacctggccaggctcccaggctcctcatctatgatgcatccaacagggccactggcatcccagccaggttcagtggcagtgggtctgggacagacttcactctcaccatcagcagcctagagcctgaagattttgcagtttattactgtcagcagcgtagcaactggcctctattcactttcggccctgggaccaaagtggatatcaaac

SEQ ID NO: 3922 - DNA, 325 bp, Homo sapiens
gacatccagatgacccagtctccttccaccctgtctgcatctgtaggagacagagtcaccatcacttgccgggccagtcagagtattagtagctggttggcctggtatcagcagaaaccagggaaagcccctaagctcctgatctataaggcgtctagtttagaaagtggggtcccatcaaggttcagcggcagtggatctgggacagaattcactctcaccatcagcagcctgcagcctgatgattttgcaacttattactgccaacagtataatagttattcttcgtggacgttcggccaagggaccaaggtggaaatcaaac

SEQ ID NO: 3923 - DNA, 328 bp, Homo sapiens
gaaattgtgttgacgcagtctccaggcaccctgtctttgtctccaggggaaagagccaccctctcctgcagggccagtcagagtgttagtagcagctacttagcctggtaccaacagaaacctggccaggctcccaggctcctcatctatggtgcatccagcagggccactggcatcccagacaggttcagtggcagtgggtctgggacagacttcactctcaccatcagcagactggagtctgaagattttgcagtgtattactgtctccagtatggtacttcaccctcgtacacttttggccaggggaccaagctggagatcaaac

SEQ ID NO: 3924 - DNA, 331 bp, Homo sapiens
cagtctgtgctgactcagccaccctcagcgtctgggacccccgggcagagggtcaccatctcttgttctggaagcagctccaacatcggaagtaatactgtaaactggtaccagcagctcccaggaacggcccccaaactcctcatctatagtaataatcagcggccctcaggggtccctgaccgattctctggctccaagtctggcacctcagcctccctggccatcagtgggctccagtctgaggatgaggctgattattactgtgcagcatgggatgacagcctgaatggtcccgtattcggcggagggaccaagctgaccgtcctag

SEQ ID NO: 3925 - DNA, 331 bp, Homo sapiens
cagtctgccctgactcagcctgcctccgtgtctgggtctcctggacagtcgatcaccatctcctgcactggaaccagcagtgacgttggtggttataactatgtctcctggtaccaacaacacccaggcaaagcccccaaactcatgatttatgatgtcagtaatcggccctcaggggtttctaatcgcttctctggctccaagtctggcaacacggcctccctgaccatctctgggctccaggctgaggacgaggctgattattactgcagctcatatacaagcagcagcaatgtggtattcggcggagggaccaagctgaccgtcctag

SEQ ID NO: 3926 - DNA, 325 bp, Homo sapiens
gaaattgtgttgacgcagtctccaggcaccctgtctttgtctccaggggaaagagccaccctctcctgcagggccagtcagagtgttagcagcagctacttagcctggtaccagcagaaacctggccaggctcccaggctcctcatctatggtgcatccagcagggccactggcatcccagacaggttcagtggcagtgggtctgggacagacttcactctcaccatcagcagactggagcctgaagattttgcagtgtattactgtcagcagcatgttaatttcctttacatttttggccaggggaccaagctggagatcaaac

SEQ ID NO: 3927 - DNA, 322 bp, Homo sapiens
gacatccagatgacccagtctccatcctccctgtctgcatctgtaggagacagagtcaccatcacttgccgggcaagtcagagcattagcagctatttaaattggtatcagcagaaaccagggaaagcccctaagctcctgatctatgctgcatccagtttgcaaagtggggtcccatcaaggttcagtggcagtggatctgggacagatttcactctcaccatcagcagtctgcaacctgaagattttgcaacttactactgtcaacagagttacagtaacccgtacacttttggccaggggaccaagctggagatcaaac

SEQ ID NO: 3928 - DNA, 322 bp, Homo sapiens
gacatccagatgacccagtctccatcttccgtgtctgcatctgtaggagacagagtcaccatcacttgtcgggcgagtcagggtattagcagctggttagcctggtatcagcagaaaccagggaaagcccctaagctcctgatctatgctgcatccagtttgcaaagtggggtcccatcaaggttcagcggcagtggatctgggacagatttcactctcaccatcagcagcctgcagcctgaagattttgcaacttactattgtcaacaggctaacagtttcccgctcactttcggcggagggaccaaggtggagatcaaac

SEQ ID NO: 3929 - DNA, 334 bp, Homo sapiens
aattttatgctgactcagccccactctgtgtcggagtctccggggaagacggtaaccatctcctgcacccgcagcagtggcagcattgccagcaactatgtgcagtggtaccagcagcgcccgggcagttcccccaccactgtgatctatgaggataaccaaagaccctctggggtccctgatcggttctctggctccatcgacagctcctccaactctgcctccctcaccatctctggactgaagactgaggacgaggctgactactactgtcagtcttatgacaccagcaatcatggtgtgttcggaggaggcacccagctgaccgtcctcg

SEQ ID NO: 3930 - DNA, 322 bp, Homo sapiens
gccatccagatgacccagtctccatcctccctgtctgcatctgtaggagacagagtcaccatcacttgccgggcaagtcagggcattagaaatgatttaggctggtatcagcagaaaccagggaaagcccctaagctcctgatctatgctgcatccagtttacaaagtggggtcccatcaaggttcagcggcagtggatctggcacagatttcactctcaccatcagcagcctgcagcctgaagattttgcaacttattactgtctacaagattacaattacccgctcactttcggcggagggaccaaggtggagatcaaac

SEQ ID NO: 3931 - DNA, 325 bp, Homo sapiens
gaaattgtgttgacgcagtctccaggcaccctgtctttgtctccgggggaaagagccaccctctcctgcagggccagtcagagtgttagcagcagttatttagtctggtaccagcagaaacctggccaggctcccaggctcctcatctatggtgcatccagcagggccactggcatcccagacaggttcagtggcagtgggtctgggacagacttcactctcaccatcagcagactggagcctgaagattttgcagtgtattattgtcagcagtatggtagctcaccgctcactttcggcggagggaccaaggtggagatcaaac

SEQ ID NO: 3932 - DNA, 328 bp, Homo sapiens
gaaattgtgttgacacagtctccagccaccctgtctttgtctccaggggaaagagccaccctctcctgcagggccagtcagagtgttagcagctacttagcctggtaccaacagaaacctggccaggctcccaggctcctcatctatgatgcatccaacagggccactggcatcccagccaggttcagtggcagtgggtctgggacagacttcactctcaccatcagcagcctagagcctgaagattttgcagtttattactgtcagcagcgtagcaactggcctcccgcgctcactttcggcggagggaccaaggtggagatcaaac

SEQ ID NO: 3933 - DNA, 331 bp, Homo sapiens
cagactgtggtgactcaggagccctcactgactgtgtccccaggagggacagtcactctcacctgtgcttccagcactggagcagtcaccagtggttactatccaaactggttccagcagaaacctggacaagcacccagggcactgatttatagtacaagcaacaaacactcctggacccctgcccggttctcaggctccctccttgggggcaaagctgccctgacactgtcaggtgtgcagcctgaggacgaggctgagtattactgcctgctctactatggtggtgcccatgtggtattcggcggagggaccaagctgaccgtcctag

SEQ ID NO: 3934 - DNA, 322 bp, Homo sapiens
gacatccagatgacccagtctccatcctccctgtctgcatctgtaggagacagagtcaccatcacttgccgggcaagtcagagcattagcagctatttaaattggtatcagcagaaaccagggaaagcccctaagctcctgatctatgctgcatccagtttgcaaagtggggtcccatcaaggttcagtggcagtggatctgggacagatttcactctcaccatcagcagtctgcaacctgaagattttgcaacttactactgtcaacagagttacagtacccctccgacgttcggccaagggaccaaggtggaaatcaaac

SEQ ID NO: 3935 - DNA, 325 bp, Homo sapiens
tcctatgagctgacacagccaccctcggtgtcagtgtccccaggacagacggccaggatcacctgctctggagatgcattgccaaagcaatatgcttattggtaccagcagaagccaggccaggcccctgtgctggtgatatataaagacagtgagaggccctcagggatccctgagcgattctctggctccagctcagggacaacagtcacgttgaccatcagtggagtccaggcagaagacgaggctgactattactgtcaatcagcagacagcagtggtacttcctgggtgttcggcggagggaccaagctgaccgtcctag

SEQ ID NO: 3936 - DNA, 325 bp, Homo sapiens
gaaatagtgatgacgcagtctccagccaccctgtctgtgtctccaggggaaagagccaccctctcctgcagggccagtcagagtgttagcagcaacttagcctggtaccagcagaaacctggccaggctcccaggctcctcatctatggtgcatccaccagggccactggtatcccagccaggttcagtggcagtgggtctgggacagagttcactctcaccatcagcagcctgcagtctgaagattttgcagtttattactgtcagcagtataataactggcctccttgggcgttcggccaagggaccaaggtggaaatcaaac

SEQ ID NO: 3937 - DNA, 321 bp, Homo sapiens
gacatccagatgacccagtctccatcctccctgtctgcatctgtaggagacagagtcaccatcacttgccaggcgagtcaggacattagcaactatttaaattggtatcagcagaaaccagggaaagcccctaagctcctgatctacgatgcatccaatttggaaacaggggtcccatcaaggttcagtggaagtggatctgggacagattttactttcaccatcagcagcctgcagcctgaagatattgcaacatattactgtcaacagtatgataatctcccagggggttcggccaagggaccaaggtggaaatcaaac

SEQ ID NO: 3938 - DNA, 331 bp, Homo sapiens; identical to SEQ ID NO: 825

SEQ ID NO: 3939 - DNA, 334 bp, Homo sapiens
cagtctgccctgactcagcctgcctccgtgtctgggtctcctggacagtcgatcaccatctcctgcactggaaccagcagtgacgttggtggttataactatgtctcctggtaccaacagcacccaggcaaagcccccaaactcatgatttatgaggtcagtaatcggccctcaggggtttctaatcgcttctctggctccaagtctggcaacacggcctccctgaccatctctgggctccaggctgaggacgaggctgattattactgcagctcatatacaagcagcagcacccgtgtggtattcggcggagggaccaagctgaccgtcctag

SEQ ID NO: 3940 - DNA, 332 bp, Homo sapiens
cagtctgtgctgactcagccaccctcagcgtctgggacccccgggcagagggtcaccatctcttgttctggaagcagctccaacatcggaagtaattatgtatactggtaccagcagctcccaggaacggcccccaaactcctcatctataggaataatcagcggccctcaggggtccctgaccgattctctggctccaagtctggcacctcagcctccctggccatcagtgggctccggtccgaggatgaggctgattattactgtgcagcatgggatgacagcctgagtggtcagggtgttcggcggagggaccaagctgaccgtcctag

SEQ ID NO: 3941 - DNA, 331 bp, Homo sapiens
cagtctgccctgactcagcctgcctccgtgtctgggtctcctggacagtcgatcaccatctcctgcactggaaccagcagtgctgttgggagtgataaccttgtctcctggtaccaacagcacccaggcaaagcccccaaactcatgatttatgaggtcagtaagcggccctcaggggtttctaatcgcttctctggctccaagtctggcaacacggcctccctgacaatctctgggctccaggctgaggacgaggctgattattactgctgctcatatgcaggtagtagcactgtggtattcggcggagggaccaagctgaccgtcctag

SEQ ID NO: 3942 - DNA, 325 bp, Homo sapiens; identical to SEQ ID NO: 872

SEQ ID NO: 3943 - DNA, 322 bp, Homo sapiens
gaaattgtgctgactcagtctccagactttcagtctgtgactccaaaggagaaagtcaccatcacctgccgggccagtcagagcattggtagtagcttacactggtaccagcagaaaccagatcagtctccaaagctcctcatcaagtatgcttcccagtccttctcaggggtcccctcgaggttcagtggcagtggatctgggacagatttcaccctcaccatcaatagcctggaagctgaagatgctgcaacgtattactgtcatcagagtagtagtttaccgtacacttttggccaggggaccaagctggagatcaaac

SEQ ID NO: 3944 - DNA, 322 bp, Homo sapiens
gaaattgtgctgactcagtctccagactttcagtctgtgactccaaaggagaaagtcaccatcacctgccgggccagtcagagcattggtagtagcttacactggtaccagcagaaaccagatcagtctccaaagctcctcatcaagtatgcttcccagtccttctcaggggtcccctcgaggttcagtggcagtggatctgggacagatttcaccctcaccatcaatagcctggaagctgaagatgctgcaacgtattactgtcatcagagtagtagtttaccgtggacgttcggccaagggaccaaggtggaaatcaaac

SEQ ID NO: 3945 - DNA, 322 bp, Homo sapiens
gccatccggatgacccagtctccatcctcattctctgcatctacaggagacagagtcaccatcacttgtcgggcgagtcagggtattagcagttatttagcctggtatcagcaaaaaccagggaaagcccctaagctcctgatctatgctgcatccactttgcaaagtggggtcccatcaaggttcagcggcagtggatctgggacagatttcactctcaccatcagctgcctgcagtctgaagattttgcaacttattactgtcaacagtattatagttaccctcgcactttcggccctgggaccaaagtggatatcaaac

SEQ ID NO: 3946 - DNA, 316 bp, Homo sapiens
tcctatgagctgactcagccaccctcagtgtccgtgtccccaggacagacagccagcatcacctgctctggagataaattgggggataaatatgcttgctggtatcagcagaagccaggccagtcccctgtgctggtcatctatcaagatagcaagcggccctcagggatccctgagcgattctctggctccaactctgggaacacagccactctgaccatcagcgggacccaggctatggatgaggctgactattactgtcaggcgtgggacagcagcactgcattcggcggagggaccaagctgaccgtcctag

SEQ ID NO: 3947 - DNA, 325 bp, Homo sapiens; identical to SEQ ID NO: 1662

SEQ ID NO: 3948 - DNA, 337 bp, Homo sapiens
gatattgtgatgactcagtctccactctccctgcccgtcacccctggagagccggcctccatctcctgcaggtctagtcagagcctcctgcatagtaatggatacaactatttggattggtacctgcagaagccagggcagtctccacagctcctgatctatttgggttctaatcgggcctccggggtccctgacaggttcagtggcagtggatcaggcacagattttacactgaaaatcagcagagtggaggctgaggatgttggggtttattactgcatgcaagctctacaaactccttacacttttggccaggggaccaagctggagatcaaac

SEQ ID NO: 3949 - DNA, 322 bp, Homo sapiens
gccatccggatgacccagtctccatcctcattctctgcatctacaggagacagagtcaccatcacttgtcgggcgagtcagggtattagcagttatttagcctggtatcagcaaaaaccagggaaagcccctaagctcctgatctatgctgcatccactttgcaaagtggggtcccatcaaggttcagcggcagtggatctgggacagatttcactctcaccatcagctgcctgcagtctgaagattttgcaacttattactgtcaacagtattatagttaccctctcactttcggcggagggaccaaggtggagatcaaac

SEQ ID NO: 3950 - DNA, 325 bp, Homo sapiens
tcctatgtgctgactcagtcaccctcggtgtcagtggccccaggacagacggccaggattacctgtgggggaaacaacattggaagtaaaagtgtgcactggtaccagcagaagccaggccaggcccctgtgctggtcgtctatgatgatagcgaccggccctcagggatccctgagcgattctctggctccaactctgggaacacggccaccctgaccatcagcagggtcgaagccggggatgaggccgactattactgtcagatgtgggatagtagtaatcatccttgggtgttcggcggagggaccaagctgaccgtcctag

SEQ ID NO: 3951 - DNA, 340 bp, Homo sapiens
gacatcgtgatgacccagtctccagactccctggctgtgtctctgggcgagagggccaccatcaactgcaagtccagccagagtgttttatacagctccaacaataagaactacttagcttggtaccagcagaaaccaggacagcctcctaagctgctcatttactgggcatctacccgggaatccggggtccctgaccgattcagtggcagcgggtctgggacagatttcactctcaccatcagcagcctgcaggctgaagatgtggcagtttattactgtcagcaatattatagtactcctcggacgttcggccaagggaccaaggtggaaatcaaac

SEQ ID NO: 3952 - DNA, 337 bp, Homo sapiens
gatgttgtgatgactcagtctccactctccctgcccgtcacccttggacagccggcctccatctcctgcaggtctagtcaaagcctcgtatacagtgatggaaacacctacttgaattggtttcagcagaggccaggccaatctccaaggcgcctaatttataaggtttctaaccgggactctggggtcccagacagattcagcggcagtgggtcaggcactgatttcacactgaaaatcagcagggtggaggctgaggatgttggggtttattactgcatgcaaggtacacactggcctccaaccttcggccaagggacacgactggagattaaac

SEQ ID NO: 3953 - DNA, 322 bp, Homo sapiens
gccatccggatgacccagtctccatcctcattctctgcatctacaggagacagagtcaccatcacttgtcgggcgagtcagggtattagcagttatttagcctggtatcagcaaaaaccagggaaagcccctaagctcctgatctatgctgcatccactttgcaaagtggggtcccatcaaggttcagcggcagtggatctgggacagatttcactctcaccatcagctgcctgcagtctgaagattttgcaacttattactgtcaacagtattatagttaccctcccactttcggcggagggaccaaggtggagatcaaac

SEQ ID NO: 3954 - DNA, 331 bp, Homo sapiens; identical to SEQ ID NO: 764

SEQ ID NO: 3955 - DNA, 328 bp, Homo sapiens
gaaattgtgttgacacagtctccagccaccctgtctttgtctccaggggaaagagccaccctctcctgcagggccagtcagagtgttagcagctacttagcctggtaccaacagaaacctggccaggctcccaggctcctcatctatgatgcatccaacagggccactggcatcccagccaggttcagtggcagtgggtctgggacagacttcactctcaccatcagcagcctagagcctgaagattttgcagtttattactgtcagcagcgtagcaactggccccgggggctcactttcggcggagggaccaaggtggagatcaaac

SEQ ID NO: 3956 - DNA, 322 bp, Homo sapiens; identical to SEQ ID NO: 1778

SEQ ID NO: 3957 - DNA, 331 bp, Homo sapiens
cagtctgccctgactcagcctgcctccgtgtctgggtctcctggacagtcgatcaccatctcctgcactggaaccggcagtgacattggtggttatgactatgtctcctggtaccaacaacacccaggcaaagcccccaaactcctgatttatgaggtcagtaatcggccctcaggggtttctaatcgcttctccggctccaagtctggcaacacggcctccctgaccatctctgggctccaggctgaggacgagactgattattattgcagctcatatacaagcaccagcactgtggtattcggcggagggaccaagctgaccgtcctag

SEQ ID NO: 3958 - DNA, 331 bp, Homo sapiens; identical to SEQ ID NO: 881

SEQ ID NO: 3959 - DNA, 322 bp, Homo sapiens; identical to SEQ ID NO: 837

SEQ ID NO: 3960 - DNA, 325 bp, Homo sapiens; identical to SEQ ID NO: 3577

SEQ ID NO: 3961 - DNA, 340 bp, Homo sapiens; identical to SEQ ID NO: 803

SEQ ID NO: 3962 - DNA, 322 bp, Homo sapiens
gaaatagtgatgacgcagtctccagccaccctgtctgtgtctccaggggaaagagccaccctctcctgcagggccagtcagagtgttagcagcaacttagcctggtaccagcagaaacctggccaggctcccaggctcctcatctatggtgcatccaccagggccactggtatcccagccaggttcagtggcagtgggtctgggacagagttcactctcaccatcagcagcctgcagtctgaagattttgcagtttattactgtcagcagtataataactggcctcccggcttcggccaagggacacgactggagattaaac

SEQ ID NO: 3963 - DNA, 319 bp, Homo sapiens; identical to SEQ ID NO: 3384

SEQ ID NO: 3964 - DNA, 322 bp, Homo sapiens; identical to SEQ ID NO: 837

SEQ ID NO: 3965 - DNA, 334 bp, Homo sapiens
cagtctgccctgactcagcctcgctcagtgtccgggtctcctggacagtcagtcaccatctcctgcactggaaccagcagtgatgttggtggttataactatgtctcctggtaccaacagcacccaggcaaagcccccaaactcatgatttatgatgtcagtaagcggccctcaggggtccctgatcgcttctctggctccaagtctggcaacacggcctccctgaccatctctgggctccaggctgaggatgaggctgattattactgctgctcatatgcaggcagctacaccgatgtggtattcggcggagggaccaagctgaccgtcctag

SEQ ID NO: 3966 - DNA, 325 bp, Homo sapiens
gaaattgtgttgacgcagtctccaggcaccctgtctctgtctccaggggaaagagccaccctctcctgcagggccagtcagagtgttagcagcagctacttagcctggtaccagcagaaacctggccaggctcccaggctcctcatctatggtgcatccagcagggccactggcatcccagacaggttcagtggcagtgggtctgggacagacttcactctcaccatcagcagactggagcctgaagattttgcagtgtattactgtcagcagtatggtagctcatcgaggacgttcggccaagggaccaaggtggaaatcaaac

SEQ ID NO: 3967 - DNA, 319 bp, Homo sapiens
gacatccagatgacccagtctccatcctccctgtctgcatctgtaggagacagagtcaccatcacttgccgggcgagtcagggcattagcaattatttagcctggtatcagcagaaaccagggaaagttcctaagctcctgatctatgctgcatccactttgcaatcaggggtcccatctcggttcagtggcagtggatctgggacagatttcactctcaccatcagcagcctgcagcctgaagatgttgcaacttattactgtcaaaagtataacagtgccccttctttcggcggagggaccaaggtggagatcaaac

SEQ ID NO: 3968 - DNA, 322 bp, Homo sapiens
gacatccagatgacccagtctccatcctcactgtctgcatctgtaggagacagagtcaccatcacttgtcgggcgagtcagggcattagcaattatttagcctggtttcagcagaaaccagggaaagcccctaagtccctgatctatgctgcatccagtttgcaaagtggggtcccatcaaagttcagcggcagtggatctgggacagatttcactctcaccatcagcagcctgcagcctgaagattttgcaacttattactgccaacagtataatagttacccgctcactttcggcggagggaccaaggtggagatcaaac

SEQ ID NO: 3969 - DNA, 319 bp, Homo sapiens
gacatccagatgacccagtctccatcctccctgtctgcatctataggagacagagtcaccatcacttgccgggcaagtcagagcattagtaagtatttaaattggtatcagcagaaaccagggaaagcccctaaactcctgatctatggtgcatccagtttgcaaagtggggtcccatcaaggttcagtggcagtggatctgggacacatttcactctcaccatcgacagtctgcaacccgaagattttgcaacttactactgtcaacagagttacagtacccctgagttcggccaagggaccaacgtggaaatcaaac

SEQ ID NO: 3970 - DNA, 322 bp, Homo sapiens
gacatccagatgacccagtctccatcctccctgtctgcatctgtaggagacagagtcaccatcacttgccgggcaagtcagagcattagcagctatttaaattggtatcagcagaaaccagggaaagcccctaagctcctgatctatgctgcatccagtttgcaaagtggggtcccatcaaggttcagtggcagtggatctgggacagatttcactctcaccatcagcagtctgcaacctgaagattttgcaacttactactgtcaacagagttacagtacccctctcactttcggcggagggaccaaggtggagatcaaac

SEQ ID NO: 3971 - DNA, 340 bp, Homo sapiens
gatattgtgatgactcagtctccactctccctgcccgtcacccctggagagccggcctccatctcctgcaggtctagtcagagcctcctgcatagtaatggatacaactatttggattggtacctgcagaagccagggcactctccacagctcctgatctatttggggtctattcgggcctccggggtccctgacaggttcagtggcagtggatcaggcacagattttacactgaaaatcagcagagtggaggctgaggatgttgggatttattactgcatgcaagctctgcaaactcccacgtggacgttcggccaagggaccaaggtggaaatcaaac

SEQ ID NO: 3972 - DNA, 320 bp, Homo sapiens
gaaattgtgttgacgcagtctccaggcaccctgtctttgtctccaggggaaagagccaccctctcctgcagggccagtcagagtgttagcagcagctacttagcctggtaccagcagaaacctggccaggctcccaggctcctcatctatggtgcatccagcagggccactggcatcccagacaggttcagtggcagtgggtctgggacagacttcactctcaccatcagcagactggagcctgaagattttgcagtgtattactgtcagcagtatggtagctcacccctacggcggagggaccaaggtggagatcaaac

SEQ ID NO: 3973 - DNA, 334 bp, Homo sapiens
cagtctgtgctgacgcagccgccctcagtgtctggggccccagggcagagggtcaccatctcctgcactgggagcagctccaacatcggggcaggttatgatgtacactggtaccagcagcttccaggaacagcccccaaactcctcatctatggtaacagcaatcggccctcaggggtccctgaccgattctctggctccaagtctggcacctcagcctccctggccatcactgggctccaggctgaggatgaggctgattattactgccagtcctatgacagcagcctgagtggtcccgtgttcggcggagggaccaagctgaccgtcctag

SEQ ID NO: 3974 - DNA, 319 bp, Homo sapiens
gaaattgtgttgacacagtctccagccaccctgtctttgtctccaggggaaagagccaccctctcctgcagggccagtcagagtgttagcagctacttagcctggtaccaacagaaacctggccaggctcccaggctcctcatctatgatgcatccaacagggccactggcatcccagccaggttcagtggcagtgggtctgggacagacttcactctcaccatcagcagcctagagcctgaagattttgcagtttattactgtcagcagcgtagcaactggcccactttcggcggagggaccaaggtggagatcaaac

SEQ ID NO: 3975 - DNA, 337 bp, Homo sapiens
gatattgtgatgactcagtctccactctccctgcccgtcacccctggagagccggcctccatctcctgcaggtctagtcagagcctcctgcatagtaatggatacaactatttggattggtacctgcagaagccagggcagtctccacagctcctgatctatttgggttctaatcgggcctccggggtccctgacaggttcagtggcagtggatcaggcacagattttacactgaaaatcagcagagtggaggctgaggatgttggggtttattactgcatgcaagctctacaaactccgtggacgttcggccaagggaccaaggtggaaatcaaac

SEQ ID NO: 3976 - DNA, 319 bp, Homo sapiens
tcctatgagctgactcagccaccctcagtgtccgtgtccccaggacagacagccagcatcacctgctctggagataaattgggggataaatatgcttgctggtatcagcagaagccaggccagtcccctgtgctggtcatctatcaagatagcaagcggccctcagggatccctgagcgattctctggctccaactctgggaacacagccactctgaccatcagcgggacccaggctatggatgaggctgactattactgtcaggcgtgggacagcagcaccatggtcttcggaactgggaccaaggtcaccgtcctag

SEQ ID NO: 3977 - DNA, 331 bp, Homo sapiens
cagtctgtgctgactcagccaccctcagcgtctgggacccccgggcagaggatcaccatctcttgttctggaagcagctccaacatcagatttaatgctgtaaattggtaccagcaattcccaggagcggcccccaaactcgtcatctacagtaatgatgagcggccctcaggggtctctgaccgattctctggctccaagtctggcacctcagcctccctggccatcagtgggctccagtctgaggatgaggctgattatttctgtgcagcatgggatgacagcctgaatggttatgtcctcggaactgggaccaaagtcaccgtcctag

SEQ ID NO: 3978 - DNA, 319 bp, Homo sapiens
tcctatgagctgactcagccaccctcagtgtccgtgtccccaggacagacagccagcatcacctgctctggagataaattgggggataaatatgcttgctggtatcagcagaagccaggccagtcccctgtgctggtcatctatcaagatagcaagcggccctcagggatccctgagcgattctctggctccaactctgggaacacagccactctgaccatcagcgggacccaggctatggatgaggctgactattactgtcaggcgtgggacagcagcacaggggtattcggcggagggaccaagctgaccgtcctag

SEQ ID NO: 3979 - DNA, 322 bp, Homo sapiens
gacatccagatgacccagtctccatcttctgtgtctgcatctgtaggagacagagtcaccatcacttgtcgggcgagtcagggtattagcagctggttagcctggtatcagcagaaaccagggaaagcccctaagctcctgatctatgctgcatccagtttgcaaagtggggtcccatcaaggttcagcggcagtggatctgggacagatttcactctcactatcagcagcctgcagcctgaggattctgcaacttactattgtcaacaggctaacagtttcccgtacacttttggccaggggaccaagctggagatcaaac

SEQ ID NO: 3980 - DNA, 325 bp, Homo sapiens; identical to SEQ ID NO: 1809

SEQ ID NO: 3981 - DNA, 325 bp, Homo sapiens; identical to SEQ ID NO: 3966

SEQ ID NO: 3982 - DNA, 325 bp, Homo sapiens; identical to SEQ ID NO: 963

SEQ ID NO: 3983 - DNA, 328 bp, Homo sapiens
cagtctgccctgactcagcctgcctccgtgtctgggtctcctggacagtcgatcaccatctcctgcactggaaccagcagtgatgttgggagttataaccttgtctcctggtaccaacaacacccaggcaaagcccccaaactcatgatttatgaggtcaataagcggccctcaggggtttctaatcgcttctctggctccaagtctggcaacacggcctccctgacaatctctgggctccaggctgaggacgaggctgattattactgctgctcatatgcaggtggtaggtgggtgttcggcggagggaccatgctgaccgtcctag

SEQ ID NO: 3984 - DNA, 322 bp, Homo sapiens
gacatccagatgacccagtctccatcctccctgtctgcatctgtaggagacagagtcaccatcacttgccgggcaagtcagagcattagcagctatttaaattggtatcagcagaaaccagggaaagcccctaagctcctgatctatgctgcatccagtttgcaaagtggggtcccatcaaggttcagtggcagtggatctgggacagatttcactctcaccatcagcagtctgcaacctgaagattttgcaacttactactgtcaacagagttacagtacccctcgtacgttcggccaagggaccaaggtggaaatcaaac

SEQ ID NO: 3985 - DNA, 325 bp, Homo sapiens
gaaattgtgttgacgcagtctccaggcaccctgtctttgtctccaggggaaagagccaccctctcctgcagggccagtcagagtgttagcagcagctacttagcctggtaccagcagaaacctggccaggctcccaggctcctcatctatggtgcatccagcagggccactggcatcccagacaggttcagtggcagtgggtctgggacagacttcactctcaccatcagcagactggagcctgaagattttgcagtgtattactgtcagcagtatggtagctcatcattcactttcggccctgggaccaaagtggatatcaaac

SEQ ID NO: 3986 - DNA, 328 bp, Homo sapiens
gaaattgtgttgacacagtctccagccaccctgtctttgtctccaggggaaagagccaccctctcctgcagggccagtcagagtgttagcagctacttagcctggtaccaacagaagcctggccaggctcccagactcctcatctatgatgcatccaacagggccactggcatcccagccaggttcagtggcagtgggtctgggacagacttcactctcaccatcagcagcctagagcctgaagattttgcagtttatttctgtcagcaccgtagcaattggcctccgaagtacacttttggccaggggaccaagctggagatcaaac

SEQ ID NO: 3987 - DNA, 340 bp, Homo sapiens
gacatcgtgatgacccagtctccagactccctggctgtgtctctgggcgagagggccaccatcaactgcaagtccagccagagtgttttatacagctccaacaataagaactacttagcttggtaccagcagaaaccaggacagcctcctaagttgctcatttactgggcatctgcccgggaatccggggtccctgaccgattcagtggcagcgggtctgggacagatttcactctcaccatcagcagcctgcaggctgaagatgtggcagtttattactgtcagcaatattatggtattcctcgaacgttcggccaagggaccaaggtggaaatcaaac

SEQ ID NO: 3988 - DNA, 337 bp, Homo sapiens
cagtctgtgctgacgcagccgccctcagtgtctgaggccccagggcagagggtcaccatctcctgcactgggagcagctccaacatcggggcaggttatgatgtacactggtaccagcagcttccaggaacagcccccaaactcctcatctatggtaacagcaatcggccctcaggggtccctgaccgattctctggctccaagtctggcacctcagcctccctggccatcactgggctccaggctgaggatgaggctgattattactgccagtcctatgacagcagcctgagtggttcaggggtgttcggcggagggaccaagctgaccgtcctag

SEQ ID NO: 3989 - DNA, 322 bp, Homo sapiens
gacatcgagatgacccagtctccatcctctgtgtctgcatctgtaggagacagagtcaccatcacttgtcgggcgagtcagggtattagtagatggttagcctggtatcagcagaaaccagggaaagcccctaacctcctgatctatgctgcatccagtttgcacagtggggtcccatcaaggttcagcggcagtggatctgggacagatttcactctcactatcaccaccctgcagcctgaagactttgcaacttactattgtcaacaggctagcagtttcccgtggacgttcggccaagggaccaaggtggagatcaaac

SEQ ID NO: 3990 - DNA, 322 bp, Homo sapiens; identical to SEQ ID NO: 837

SEQ ID NO: 3991 - DNA, 325 bp, Homo sapiens
tcctatgtgctgactcagccaccctcagtgtcagtggccccaggaaagacggccaggattacctgtgggggaaacaacattggaagtaaaagtgtgcactggtaccagcagaagccaggccaggcccctgtgctggtcatctattatgatagcgaccggccctcagggatccctgagcgattctctggctccaactctgggaacacggccaccctgaccatcagcagggtcgaagccggggatgaggccgactattactgtcaggtgtgggatagtagtagtgatcatcatgtcttcggaactgggaccaaggtcaccgtcctag

SEQ ID NO: 3992 - DNA, 319 bp, Homo sapiens
gaaattgtgctgactcagtctccagactttcagtctgtgactccaaaggagaaagtcaccatcacctgccgggccagtcagagcattggtagtagcttacactggtaccagcagaaaccagatcagtctccaaagctcctcatcaagtatgcttcccagtccatctcaggggtcccctcgaggttcagtggcagtggatctgggacagatttcaccctcaccatcaatagcctggaagctgaagatgctgcagcgtattactgtcatcagagtagtagtttccacaccttcggccaagggacacgactggagattaaac

SEQ ID NO: 3993 - DNA, 331 bp, Homo sapiens
cagtctgccctgactcagcctccctccgcgtccgggtctcctggacagtcagtcaccatctcctgcactggaaccagcagtgacgttggtggttataactatgtctcctggtaccaacagcacccaggcaaagcccccaaactcatgatttatgaggtcagtaagcggccctcaggggtccctgatcgcttctctggctccaagtctggcaacacggcctccctgaccgtctctgggctccaggctgaggatgaggctgattattactgcagctcatatgcaggcagcaacaattgggtgttcggcggagggaccaagctgaccgtcctag

SEQ ID NO: 3994 - DNA, 325 bp, Homo sapiens
gaaattgtgttgacgcagtctccaggcaccctgtctttgtctccaggggaaagagccaccctctcctgcagggccagtcagagtgttgccagcagtttcgtggcctggtaccagcaaaaacctggccaggctccccggctcctcatctatggtgcatccaacagggccactggcatcccagacaggttcagtggctttgggtctgggacagacttcactctcaccatcagcagactggagcctgaagattttgcagtgtattactgtcagcagtatggttcttcaccgatcaccttcggccaagggacacgactggagattaaac

SEQ ID NO: 3995 - DNA, 334 bp, Homo sapiens
cagtctgtgctgactcagccaccctcagcgtctgggacccccgggcagagggtcaccatctcttgttctggaagcagctccaacatcggaagtaatactgtaaactggtaccagcagctcccaggaacggcccccaaactcctcatctatagtaataatcagcggccctcaggggtccctgaccgattctctggctccaagtctggcacctcagcctccctggccatcagtgggctccagtctgaggatgaggctgattattactgtgcagcatgggatgacagcctgaatggtcatgtggtattcggcggagggaccaagctgaccgtcctag

SEQ ID NO: 3996 - DNA, 334 bp, Homo sapiens
cagtctgtgctgacgcagccgccctcagtgtctgaggccccagggcagagggtcaccatctcctgcactgggagcagctccaacatcggggcaggttatgatgtacactggtaccagcagcttccagggacagcccccaaactcctcatctatgctaacatcaatcggccctcaggggtccctgaccgattctctggctccaagtctggcacctcagcctccctggccatcactgggctccaggctgaggatgaggctgattattactgccagtcctatgacagcagcctgagtggttctgtcttcggaactgggaccaaggtcaccgtcctag

SEQ ID NO: 3997 - DNA, 340 bp, Homo sapiens
gacatcgtgatgacccagtctccagactccctggctgtgtctctgggcgagagggccaccatcaactgcaagtccagccagagtgttttatacagctccaacaataagaactacttagcttggtaccaacagaaaccaggacagcctcctaagctgctcatttactgggcatctacccgggaatccggggtccctgaccgattcagtggcagcgggtctgggacagatttcactctcaccatcagcagcctgcaggctgaagatgtggcagtttatttctgtcagcaatattatggaactccgtacacttttggccaggggaccaagctggagatcaaac

SEQ ID NO: 3998 - DNA, 340 bp, Homo sapiens
cagtctgtgttgacgcagccgccctcagtgtctgcggccccaggacagaaggtcaccatctcctgctctggaagcagctccaacattgggaataattatgtatcctggtaccagcagctcccaggaacagcccccaaactcctcatctatgaaaataataagcgaccctcagggattcctgaccgattctctggctccaagtctggcacgtcagccaccctgggcatcaccggactccagactggggacgaggccgattattactgcggaacatgggatagcagcctgagtgctggcgggggtgtggtattcggcggagggaccaagctgaccgtcctag

SEQ ID NO: 3999 - DNA, 325 bp, Homo sapiens; identical to SEQ ID NO: 965

SEQ ID NO: 4000 - DNA, 328 bp, Homo sapiens
tcctatgagctgacacagccaccctcggtgtcagtgtccccaggacagacggccaggatcacctgctctggagatgcattgccaaagcaatatgcttattggtaccagcagaagccaggccaggcccctgtgctggtgatatataaagacagtgagaggccctcagggatccctgagcgattctctggctccagctcagggacaacagtcacgttgaccatcagtggagtccaggcagaagacgaggctgactattactgtcaatcagcagacagcagtggtacttatcatgtggtattcggcggagggaccaagctgaccgtcctag

SEQ ID NO: 4001 - DNA, 322 bp, Homo sapiens; identical to SEQ ID NO: 837

SEQ ID NO: 4002 - DNA, 322 bp, Homo sapiens
gccatccggatgacccagtctccatcctcattctctgcatctacaggagacagagtcaccatcacttgtcgggcgagtcagggtattagcagttatttagcctggtatcagcaaaaaccagggaaagcccctaagctcctgatctatgctgcatccactttgcaaagtggggtcccatcaaggttcagcggcagtggatctgggacagatttcactctcaccatcagctgcctgcagtctgaagattttgcaacttattactgtcaacagtattatagttacccctggacgttcggccaagggaccaaggtggaaatcaaac

SEQ ID NO: 4003 - DNA, 328 bp, Homo sapiens
gaaattgtgttgacgcagtctccaggcaccctgtctttgtctccaggggaaagagccaccctctcctgcagggccagtcagagtgttagcagcagctacttagcctggtaccagcagaaacctggccaggctcccaggctcctcatctatggtgcatccagcagggccactggcatcccagacaggttcagtggcagtgggtctgggacagacttcactctcaccatcagcagactggagcctgaagattttgcagtgtattactgtcagcagtatggtagctcacctcagtacacttttggccaggggaccaagctggagatcaaac

SEQ ID NO: 4004 - DNA, 325 bp, Homo sapiens
gaaatagtgatgacgcagtctccagtcaccctgtctgtgtctccaggggaaagagtcaccctctcctgcagggccagtcaaagtgttagcaacaactttgcctggtaccaacagaaacctggccaggctcccaggctcctcatctatgatgcgtccaccagggcccctggtatcccagccaggttcagtggcagtgggtctgggacagagttcagtctcaccatcagcagcctgcagtctgaagattttgcaatttattactgtcagcagtataatagctggcctccgtacacttttggccaggggaccaagctggagagcaaac

SEQ ID NO: 4005 - DNA, 325 bp, Homo sapiens
gaaattgtgttgacacagtctccagccaccctgtctttgtctccaggggaaagagccaccctctcctgcagggccagtcagagtgttagcagctacttagcctggtaccaacagaaacctggccaggctcccaggctcctcatctatgatgcatccaacagggccactggcatcccagccaggttcagtggcagtgggtctgggacagacttcactctcaccatcagcagcctagagcctgaagattttgcagtttattactgtcagcagcgtagcaactggcctccggtcactttcggccctgggaccaaagtggatatcaaac

SEQ ID NO: 4006 - DNA, 322 bp, Homo sapiens
gacatccagatgacccagtctccatcctccctgtctgcatctgtaggagacagagtcaccatcacttgccgggcaagtcagagcattagcagctatttaaattggtatcagcagaaaccagggaaagcccctaagctcctgatctatgctgcatccagtttgcaaagtggggtcccatcaaggttcagtggcagtggatctgggacagatttcactctcaccatcagcagtctgcaacctgaagattttgcaacttactactgtcaacagagttacagtacctctgtcacttttggccaggggaccaagctggagatcaaac

SEQ ID NO: 4007 - DNA, 331 bp, Homo sapiens; identical to SEQ ID NO: 2331

SEQ ID NO: 4008 - DNA, 322 bp, Homo sapiens; identical to SEQ ID NO: 2453

SEQ ID NO: 4009 - DNA, 320 bp, Homo sapiens
gacatccagatgacccagtctccatcctccctgtctgcatctgtaggagacagagtcaccatcacttgccgggcaagtcagggcattagacataatttaggctggtatcagcagaaaccagggaaagcccctaagcgcctgatctacgcaacatccagtttgcacagtggggtcccatcaaggttcagcggcactggatctgggacagacttcactctcaccatcagcagcctgcagcctgaagattttgcaacttattactgtctacagcatcatagttaccctctcactttcggcggagggaccagggtggagatcaa

SEQ ID NO: 4010 - DNA, 328 bp, Homo sapiens
tcccatgagctgacacagccaccctcggtgtcagtgtccccaggacagacggccaggatcacctgctctggagatgcactgccaaaacaatacgcttcttggtaccagcagaagccaggccaggcccctgtgctggtaatgtgtaaagacagtgagaggccctcagggatccctgagcgattctccggctccagctcagggacaacagtcacgttgaccatcagtggggtccaggcagaagacgaggctgactattactgtcaatcagcagacagcagtggtacttctggtgtggtattcggcggagggaccaaactgaccgtcctag

SEQ ID NO: 4011 - DNA, 319 bp, Homo sapiens; identical to SEQ ID NO: 1688

SEQ ID NO: 4012 - DNA, 331 bp, Homo sapiens; identical to SEQ ID NO: 3332

SEQ ID NO: 4013 - DNA, 337 bp, Homo sapiens
cagtctgccctgactcagcctgcctccgtgtctgggtctcctggacagtcgatcaccatctcctgcactggaaccagcagtgacgttggtggttataactatgtctcctggtaccaacagcacccaggcaaagcccccaaactcatgatttatgaggtcagtaatcggccctcaggggtttctaatcgcttctctggctccaagtctggcaacacggcctccctgaccatctctgggctccaggctgaggacgaggctgattattactgcagctcatatacaagcagcagcactcgggatgtggtattcggcggagggaccaagctgaccgtcctag

SEQ ID NO: 4014 - DNA, 337 bp, Homo sapiens
gatattgtgatgactcagtctccactctccctgcccgtcacccctggagagccggcctccatctcctgcaggtctagtcagagcctcctgcatagtaatggatacaactatttggattggtacctgcagaagccagggcagtctccacagctcctgatctatttgggttctaatcgggcctccggggtccctgaccggttcagtggcagtggatcaggcacagattttacactgaaaatcagcagagtggaggctgaggatgttggggtttattattgcatgcaagctctacaaactcctctcactttcggcggagggaccaaggtggagatcaaac

SEQ ID NO: 4015 - DNA, 338 bp, Homo sapiens
gatattgtgatgactcagtctccactctccctgcccgtcacccctggagagccggcctccatctcctgcaggtctagtcagagcctcctgcatagtaatggatacaactatttggattggtacctgcagaagccagggcagtctccacagctcctgatctatttgggttctaatcgggcctccggggtccctgacaggttcagtggcagtggatcaggcacagattttacactgaaaatcagcagagtggaggctgaggatgttggggtttattactgcatgcaagctctacaaactcttgtggacgttcggccaagggaccaaggtggaaatcaaac

SEQ ID NO: 4016 - DNA, 325 bp, Homo sapiens
gaaatagtgatgacgcagtctccagccaccctgtctgtgtctccaggggaaagagccaccctctcctgcagggccagtcagagtgttagcagcaacttagcctggtaccagcagaaacctggccaggctcccaggctcctcatctatggtgcatccaccagggccactggtatcccagccaggttcagtggcagtgggtctgggacagagttcactctcaccatcagcagcctgcagtctgaagattttgcagtttattactgtcagcagtataataactggcctccggtaacgttcggccaagggaccaaggtggaaatcaaac

SEQ ID NO: 4017 - DNA, 322 bp, Homo sapiens
gccatccagatgacccagtctccatcctccctgtctgcgtctgtgggagacacagtcagcatcacttgccgggcaagtcagggcattacagatgaattaggctggtatcagcagaaaccagggaaagcccctaaactcctgatctataaagcaattactaaacaaagtgcagtcccatcaaggttcagcggcagtggatctggcacagatttcactctcaccatcagcagcctgcagcctgaagattttgcaacttattactgtctacaagtttacaattacccgctcacttttggccaggggaccaagctggcgctcaaac

SEQ ID NO: 4018 - DNA, 325 bp, Homo sapiens; identical to SEQ ID NO: 3564

SEQ ID NO: 4019 - DNA, 337 bp, Homo sapiens
cagtctgtgctgacgcagccgccctcagtgtctggggccccagggcagggggtcaccatctcctgcgctgggagcagctccaacatcggggcaggttatgatgtatattggtaccaacaacttccaggaacagcccccaaactcctcatctatggtaacaacaagcggccctcaggggtccctgaccgattctctgcctccaagtctggcacctcagcctccctggccatcactgggctccaggctgaggatgaggctgattattactgccagtcctatgacagcagcctgagtgtctcttgggttttcggcggagggaccaagctgaccgtcctag

SEQ ID NO: 4020 - DNA, 325 bp, Homo sapiens
gacatccagatgacccagtctccttccaccctgtctgcatctgtaggagacagagtcaccatcacttgccgggccagtcagagtattagtagctggttggcctggtatcagcagaaaccagggaaagcccctaagctcctgatctataaggcgtctagtttagaaagtggggtcccatcaaggttcagcggcagtggatctgggacagaattcactctcaccatcagcagcctgcagcctgatgattttgcaacttattactgccaacagtataatagttattctccgaggacgttcggccaagggaccaaggtggaaatcaaac

SEQ ID NO: 4021 - DNA, 328 bp, Homo sapiens
cagtctgtgctgactcagccaccctcagcgtctgggacccccgggcagagggtcaccatctcttgttctggaagcagctccaacatcggaagtaattatgtatactggtaccagcagctcccaggaacggcccccaaactcctcatctataggaataatcagcggccctcaggggtccctgaccgattctctggctccaagtctggcacctcagcctccctggccatcagtgggctccggtccgaggatgaggctgattattactgtgcagcatgggatgacagcctgagtggggtgttcggcggagggaccaagctgaccgtcctag

SEQ ID NO: 4022 - DNA, 319 bp, Homo sapiens; identical to SEQ ID NO: 1688

SEQ ID NO: 4023 - DNA, 328 bp, Homo sapiens
gaaattgtgttgacacagtctccagccaccctgtctctgtctccaggggaaagagccaccctctcctgcagggccagtcagagtgttagcagctacttagcctggtaccaacaaaaacctggccaggctcccaggctcctcatctatgatgcatccaacagggccgctggcatcccagccaggttcagtggcagtgggtctgggacagacttcactctcaccatcagcagcctagagcctgaagattttgcagtttattactgtcagcagcgtagcaactggcctccgaagtacacttttggccaggggaccaagctggagatcaaac

SEQ ID NO: 4024 - DNA, 337 bp, Homo sapiens
cagtctgccctgactcagcctcgctcagtgtccgggtctcctggacagtcagtcaccatctcctgcactggaaccagcagtgatgttggtggttataactatgtctcctggtaccaacagcacccaggcaaagcccccaaactcatgatttatgatgtcagtaagcggccctcaggggtccctgatcgcttctctggctccaagtctggcaacacggcctccctgaccatctctgggctccaggctgaggatgaggctgattattactgctgctcatatgcaggcagctacacttccttttatgtcttcggaactgggaccaaggtcaccgtcctag

SEQ ID NO: 4025 - DNA, 325 bp, Homo sapiens
gaaattgtgttgacgcagtctccaggcaccctgcctttgtctccaggggaaagagccaccctctcctgcagggccagtcagagtgtcagcaccaactacttagcctggtaccagcagaaacctggccaggctcccaggctcctcatctatgctgcatccagcagggccactgacatcccagacaggttcagtggcagtgggtctgggacagacttcactctcaccatcagcagactggagcctggagattttgcagtgtattactgtcagcagtatggtagttcaccgtacacttttggccaggggaccaagctggagatcaaac

SEQ ID NO: 4026 - DNA, 322 bp, Homo sapiens; identical to SEQ ID NO: 3970

SEQ ID NO: 4027 - DNA, 325 bp, Homo sapiens
gaaattgtgttgacgcagtctccagccaccctgtctttgtctccaggggaaagagccaccctctcctgcggggccagtcagagtgttagcagcagctacttagcctggtaccagcagaaacctggcctggcgcccaggctcctcatctatgatgcatccagcagggccactggcatcccagacaggttcagtggcagtgggtctgggacagacttcactctcaccatcagcagactggagcctgaagattttgcagtgtattactgtcagcagtatggtagctcaccgtacacttttggccaggggaccaagctggagatcaaac

SEQ ID NO: 4028 - DNA, 310 bp, Homo sapiens
gacatccagatgacccagtctccttccaccctgtctgcatctgtaggagacagagtcaccatcacttgccgggccagtcagagtattagtagctggttggcctggtatcagcagaaaccagggaaagcccctaagctcctgatctataaggcgtctagtttagaaagtggggtcccatcaaggttcagcggcagtggatctgggacagaattcactctcaccatcagcagcctgcagcctgatgattttgcaacttattactgccaacagtataggacgttcggccaagggaccaaggtggaaatcaaac

SEQ ID NO: 4029 - DNA, 337 bp, Homo sapiens
cagcctgtgctgactcaatcatcctctgcctctgcttccctgggatcctcggtcaagctcacctgcactctgagcagtgggcacagtagctacatcatcgcatggcatcagcagcagccagggaaggcccctcggttcttgatgaagtttgagggtagtggaagctacaacaaggggagcggagttcctgatcgcttctcaggctccagctctggggctgaccgctacctcaccatctccaacctccagtctgaggatgaggctgattattactgtgagacctgggacagtaacactcaaagagtgttcggcggagggaccaagctggccgtcctag

SEQ ID NO: 4030 - DNA, 334 bp, Homo sapiens
cagtctgccctgactcagcctcgctcagtgtccgggtctcctggacagtcagtcaccatctcctgcactggaaccagcagtgatgttggtggttataactatgtctcctggtaccaacagcacccaggcaaagcccccaaactcatgatttatgatgtcactaagcggccctcaggggtccctgatcgcttctctggctccaagtctggcaacacggcctccctgaccatctctgggctccaggctgaggatgaggctgattattactgctgctcatatgcaggcaactacattttcggggtattcggcggagggaccaagctgaccgtcctag

SEQ ID NO: 4031 - DNA, 328 bp, Homo sapiens
gaaattgtgttgacacagtctccagccaccctgtctttgtctccaggggaaagagccaccctctcctgcagggccagtcagagtgttagcagctacttagcctggtaccaacagaaacctggccaggctcccaggctcctcatctatgatgcatccaacagggccactggcatcccagccaggttcagtggcagtgggtctgggacagacttcactctcaccatcagcagcctagagcctgaagattttgcagtttattactgtcagcagcgtagcaactggcctcctgcgctcactttcggcggagggaccaaggtggagatcaaac

SEQ ID NO: 4032 - DNA, 322 bp, Homo sapiens; identical to SEQ ID NO: 837

SEQ ID NO: 4033 - DNA, 322 bp, Homo sapiens; identical to SEQ ID NO: 837

SEQ ID NO: 4034 - DNA, 325 bp, Homo sapiens
gaaattgtgttgacgcagtctccaggcaccctgtctttgtctccaggggaaagagccaccctctcctgcagggccagtcagagtgttagcagcagctacttagcctggtaccagcagaaacctggccaggctcccaggctcctcatctatggtgcatccagcagggccactggcatcccagacaggttcagtggcagtgggtctgggacagacttcactctcatcatcagcagactggagcctgaagattttgcagtgtattactgtcagcagtatggtagctcaccgctcactttcggcggagggaccaaggtggagatcaaac

SEQ ID NO: 4035 - DNA, 322 bp, Homo sapiens; identical to SEQ ID NO: 837

SEQ ID NO: 4036 - DNA, 325 bp, Homo sapiens
tcctatgagctgacacagccaccctcggtgtcagtgtccccaggacaaacggccacgatcacctgctctggagatgcattgccaaaaaaatatgcttattggtaccagcagaagtcaggccaggcccctgtgctggtcatctatgaggacagcaaacgaccctccgggatccctgagagattctctggctccagctcagggacaatggccaccttgactatcagtggggcccaggtggaggatgaagctgactactactgttactcaacagacagcagtggtaatcatagggtgttcggcggagggaccaagctgaccgtcctag

SEQ ID NO: 4037 - DNA, 331 bp, Homo sapiens
cagtctgtgttgacgcagccgccctcagtgtctgcggccccaggacagaaggtcaccatctcctgctctggaagcagctccaacattgggaataattatgtatcctggtaccagcagctcccaggaacagcccccaaactcctcatttatgacaataataagcgacccccagggattcctgaccgattctctggctccaagtctggcacgtcagccaccctgggcatcaccggactccagactggggacgaggccgattattactgcggaacatgggatagcagcctgagtgctgtggtattcggcggagggaccaagctgaccgtcctag

SEQ ID NO: 4038 - DNA, 319 bp, Homo sapiens; identical to SEQ ID NO: 1688

SEQ ID NO: 4039 - DNA, 343 bp, Homo sapiens
cagtctgccctgactcagcctgcctccgtgtctgggtctcctggacagtcgatcaccatctcctgcactggaaccagcagtgacgttggtggttataactatgtctcctggtaccaacaacacccaggcaaagcccccaaactcatgatttatgatgtcagtaatcggccctcaggggtttctaatcgcttctctggctccaagtctggcaacacggcctccctgaccatctctgggctccaggctgaggacgaggctgattattactgcagctcatatacaagcagcagcactctcggccctaattgggtgttcggcggagggaccaagctgaccgtcctag

SEQ ID NO: 4040 - DNA, 322 bp, Homo sapiens
gaaatagtgatgacgcagtctccagccaccctgtctgtgtctccagggggaagagccaccctctcctgcagggccagtcagagtgttagcaccaacttagcctggtaccaacagaagcctggccaggctcccaggctcctcatctatggtgcatccaccagggccactggtatcccagccaggttcagtggcagcgggtctgcgacagagttcactctcaccatcagcagcctgcagtctgaagattttgcagtttattactgtcagcagtataatgggtgggggggcacttttggccaggggaccaaactggagatcgaac

SEQ ID NO: 4041 - DNA, 328 bp, Homo sapiens
gaaattgtgttgacacagtctccagccaccctgtctttgtctccaggggaaagagccaccctctcctgcagggccagtcagagtgttagtagctacttagcctggtaccaacagaaacctggccaggctcccaggctcctcatctatgatgcatccaacagggccactggcatcccagccaggttcagtggcagtgggtctgggacagacttcactctcaccatcagcagcctagagcctgaagattttgcagtttattactgtcagcagcgtagcaactggcctccgatcctcactttcggcggagggaccaaggtggagatcaaac

SEQ ID NO: 4042 - DNA, 331 bp, Homo sapiens
cagtctgtgttgacgcagccgccctcagtgtctgcggccccaggacagaaggtcaccatctcctgctctggaagcagctccaacattgggaataattctgtatcctggtaccagcaactcccaggaacagcccccaaactcctcatttatgacaataataagcgaccctcagggattcctgaccgattctctggctccaagtctggcacgtcagccaccctgggcatcaccggactccagactggggacgaggccgattattactgcggaacatgggatagcagcctgagtgcttgggtgttcggcggagggactaaggtgaccgtcctag

SEQ ID NO: 4043 - DNA, 337 bp, Homo sapiens
gatgttgtgatgactcagtctccactctccctgcccgtcacccttggacagccggcctccatctcctgcaggtctagtcaaagcctcgtatacagtgatggaaacacctacttgagttggtttcagcagaggccaggccaatctccaaggcgcctaatttataaggtttctaaccgggactctggggtcccagacagattcagcggcagtgggtcaggcactgatttcacactgaaaatcagcagggtggaggctgaggatgttggggtttattactgcatgcaaggtacacactggcccgggactttcggcggagggaccaaggtggagatcaaac

SEQ ID NO: 4044 - DNA, 331 bp, Homo sapiens
gacatccagatgacccagtctccatcctccctgtctgcatctgtaggagacagagtcaccatcacttgccgggcaagtcagagcattagcagctatttaaattggtatcagcagaaaccagggaaagcccctaagctcctgatctatgctgcatccagtttgcaaagtggggtcccatcaaggttcagtggcagtggatctgggacagatttcactctcaccatcagcagtctgcaacctgaagattttgcaacttactactgtcaacagagttacagtacccctccggagatgtacacttttggccaggggaccaagctggagatcaaac

SEQ ID NO: 4045 - DNA, 322 bp, Homo sapiens; identical to SEQ ID NO: 1798

SEQ ID NO: 4046 - DNA, 337 bp, Homo sapiens
cagtctgccctgactcagcctgcctccgtgtctgggtctcctggacagtcgatcaccatctcctgcactggaaccagcagtgacgttggtggttataactatgtctcctggtaccaacaccacccaggcaaagcccccaaactcatgatttatgaggtcagtaatcggccctcgggggtttctaatcgcttctctggctccaagtctggcaacacggcctccctgaccatctctgggctccaggctgaggacgaggctgattattactgcagctcatatacaagcagcagcactctcgtctatgtctttggaactgggaccaaggtcaccgtcctag

SEQ ID NO: 4047 - DNA, 322 bp, Homo sapiens; identical to SEQ ID NO: 837

SEQ ID NO: 4048 - DNA, 322 bp, Homo sapiens; identical to SEQ ID NO: 837

SEQ ID NO: 4049 - DNA, 319 bp, Homo sapiens
gacatccagatgacccagtctccatcctccctgtctgcatctgtaggagacagagtcaccatcacttgccgggcaagtcagagcattagcagctatttaaattggtatcagcagaaaccagggaaagcccctaagctcctgatctatgctgcatccagtttgcaaagtggggtcccatcaaggttcagtggcagtggatctgggacagatttcactctcaccatcagcagtctgcaacctgaagattttgcaacttactactgtcaacagagttacagtaccctcactttcggcggagggaccaaggtggagatcaaac

SEQ ID NO: 4050 - DNA, 331 bp, Homo sapiens
cagtctgccctgactcagcctgcctccgtgtctgggtctcctggacagtcgatcaccatctcctgcactggaaccagcagtgacgttggtggttataactatgtctcctggtaccaacagcacccaggcaaagcccccaaactcatgatttatgaggtcagtaatcggccctcaggggtttctaatcgcttctctggctccaagtctggcaacacggcctccctgaccatctctgggctccaggctgaggacgaggctgattattactgcagctcatatacaagcagcagcacttatgtcttcggaactgggaccaaggtcaccgtcctag

SEQ ID NO: 4051 - DNA, 323 bp, Homo sapiens
tcctatgtgctgactcaaccaccctcagtgtcagtggcccctggaaagacggccaggcttacctgtgggggaaagaacattggaagtaaaacaattcactggtaccagcagaggccaggccaggcccctgtgatggtcatctattataatagagaccgaccctcagggatccctgagcgattctctggctccaactctgggaacacggccaccctgaccatcagcagggtcgaagccggggatgaggccgactattattgtcaggtgtgggatgattatagtgatcatgttgtgttcggcggagggaccaagctgaccgtcct

SEQ ID NO: 4052 - DNA, 334 bp, Homo sapiens
cagtctgccctgactcagcctgcctccgtgtctgggtctcctggacagtcgatcaccatctcctgcactggaaccagcagtgacgttggtggttataactatgtctcctggtaccaacaacacccaggcaaagcccccaaactcatgatttatgatgtcagtaatcggccctcaggggtttctaatcgcttctctggctccaagtctggcaacacggcctccctgaccatctctgggctccaggctgaggacgaggctgattattactgcagctcatatacaagcagcagcactcttgtggtattcggcggagggaccaagctgaccgtcctag

SEQ ID NO: 4053 - DNA, 322 bp, Homo sapiens
gacatccagttgacccagtctccacccttcctgtctgcatctgtaggagacagagtcaccatcacttgccgggccagtcaggacattaatacttacttagcctggtatcagcaaagaccagggaaagcccctaagctcctgatctatgctgcatccactttgcaaagtggggtcccatcaaggttcagcggcagtggatctgggacagaattcactctcacaatcagcagcctgcagcctgaagattttgcaacgtattactgtcaacagcttaatagggatgccggggcttttggccaggggaccgagctagagatcaaac

SEQ ID NO: 4054 - DNA, 325 bp, Homo sapiens
gaaattgtgttgacacagtctccagccaccctgtctttgtctccaggggaaagagccaccctctcctgcagggccagtcagagtgttagcagctacttagcctggtaccaacacagacctggccaggctcccaggctcctcatctatgatgcatccaacagggccactggcatcccagccagattcagtggcagtgggtctgggacagacttcactctcaccatcagcagcctagagcctgaagattttgcaatttattactgtcagcagcgtagcaactggcctcctctgtacacttttggccaggggaccaagctggagatca

SEQ ID NO: 4055 - DNA, 331 bp, Homo sapiens
cagtctgtgttgacgcagccgccctcagtgtctgcggccccaggacagaaggtcaccatctcctgctctggaagcagctccaacattgggaataattatgtatcctggtaccagcagctcccaggaacagcccccaaactcctcatctatgaaaataataagcgaccctcaggaattcctgaccgattctctggctccaagtctggcacgtcagccaccctgggcatcaccggactccagactggggacgaggccgattattactgcggaacatgggatagcagcctgactaattgggtgttcggcggagggaccaagctgaccgtcctag

SEQ ID NO: 4056 - DNA, 333 bp, Homo sapiens
cagtctgccctgactcagcctgcctccgtgtctgagtctcctggacagtcgatcaccatctcctgcactgggaccaacagcgacgttggtggttataactatgtctcctggtaccaacagcacccaggcaaagcccccaaagtcatgatttatgaggtcagtaatcggccctcaggggtttctaatcgcttctctggctccaagtctggcaacacggcctccctgaccatctctgggctccaggctgaggacgaggctgattattactgcagctcatattcaagcagcaccacccgttatgtcttcggaactgggaccaaggtcaccgtccta

SEQ ID NO: 4057 - DNA, 331 bp, Homo sapiens
caggctgtggtgactcaggagccctcactgactgtgtccccaggagggacagtcactctcacctgtggctccagcactggagctgtcaccagtggtcattatccctactggttccagcagaagcctggccaagcccccaggacactgatttttgatacaagcaacaaacactcctggacacccgcccggttctcaggctccctccttgggggcaaagctgccctgaccctttcgggtgcgcagcctgaggatgaggctgagtattactgcttgctctcctttagtggtgcgcatgctgtgttcggaggaggcacccagctgaccgtcctcg

SEQ ID NO: 4058 - DNA, 322 bp, Homo sapiens
gacatccagatgacccagtctccatcttccgtgtctgcatctgtaggagacagagtcaccatcacttgtcgggcgagtcagggtattagcagctggttagcctggtatcagcagaaaccagggaaagcccctaagctcctgatctatgctgcatccagtttgcaaagtggggtcccatcaaggttcagcggcagtggatctgggacagatttcactctcaccatcagcagcctgcagcctgaagattttgcaacttactattgtcaacaggctaacagtttccccatcactttcggccctgggaccaaagtggatatcaaac

SEQ ID NO: 4059 - DNA, 322 bp, Homo sapiens; identical to SEQ ID NO: 3870

SEQ ID NO: 4060 - DNA, 322 bp, Homo sapiens; identical to SEQ ID NO: 2360

SEQ ID NO: 4061 - DNA, 328 bp, Homo sapiens
cagtctgccctgactcagcctgcctccgtgtctgggtctcctggacagtcgatcaccatctcctgcactggaaccagcagtgatgttggaaattataaccttgtctcctggtaccaacaccacccaggcaaagcccccaaactcatgatttatgagggcagtaagcggccctcaggggtttctaatcgcttctctggctccaagtctggcaacacggcctccctgacaatctctgggctccaggctgaggacgaggctgattattactgctgctcatatgcaggtagtagcgtggtattcggcggagggaccaagctgaccgtcctag

SEQ ID NO: 4062 - DNA, 325 bp, Homo sapiens
gaaatagtgatgacgcagtctccagccaccctgtctgtgtctccaggggaaagagccaccctctcctgcagggccagtcagactattagtaacaacttagcctggtaccagcagaagcctggccaggctcccaggctcttcatctatggtgcatccaccagggccactgacatcccagccaggttcagtggcagtgggtctgggacagagttcactctcaccatcagcagcctgcagtctgaagattttgcagtttattactgtcagcagtataataactggcccctgtacacttttggccaggggaccaagctggagatcaaac

SEQ ID NO: 4063 - DNA, 329 bp, Homo sapiens
cagtctgccctgactcagcctgcctccgtgtctgggtctcctggacagtcgatcaccatctcctgcactggaaccagcagtgacgttggtggttataactatgtctcctggtaccaacaatacccaggcaaagcccccaaactcatgatttatgatgtcagtaatcggccctcaggggtttctaatcgcttctctggctccaagtctggcaacacggcctccctgaccatctctgggctccaggctgaggacgaggctgattattactgcacctcatatacaagcagcagcactgtgatattcggcggagggaccaagctgaccgtcct

SEQ ID NO: 4064 - DNA, 322 bp, Homo sapiens
gccatccaattgacccagtctccatcctccctgtctgcgtttgtaggcgacagagtcaccatcacttgccggacaagtctgcccattagcagtgctttagcctggtatcagcagaaacctgggaaacctcctaaactcctgatctatgatgcctccactttggaaagtggggtcccatcaaggttcagcggcagtggatctgggacagatttcactctcaccatcagcagcctgcagcctgaagattttgcaacttattactgtcaacagtttaataattacctcctgctcactttcggcggagggaccaaagtggagatca

SEQ ID NO: 4065 - DNA, 340 bp, Homo sapiens
gacatcgtgatgacccagtctccagactccctggctgtgtctctgggcgagagggccaccatcaactgcaagtccagccagagtgttttatacagctccaacaataagaactacttagcttggtaccagcagaaaccaggacagcctcctaagctgctcatttactgggcatctacccgggaatccggggtccctgaccgattcagtggcagcgggtctgggacagatttcactctcaccatcagcagcctgcaggctgaagatgtggcagtttattactgtcagcaatattatagtactctctacacttttggccaggggaccaagctggagatcaaac

SEQ ID NO: 4066 - DNA, 322 bp, Homo sapiens; identical to SEQ ID NO: 3870

SEQ ID NO: 4067 - DNA, 319 bp, Homo sapiens; identical to SEQ ID NO: 1688

SEQ ID NO: 4068 - DNA, 331 bp, Homo sapiens
cagtctgtgttgacgcagccgccctcagtgtctgcggccccaggacagaaggtcaccatctcctgctctggaagcagctccaacattgggaataattatgtatcctggtaccagcagctcccaggaacagcccccaaactcctcatctatgaaaataataagcgaccctcagggattcctgaccgattctctggctccaagtctggcacgtcagccaccctgggcatcaccggactccagactggggacgaggccgattattactgcggaacatgggatagcagcctgagtgctggggtgttcggcggagggaccaagctgaccgtcctag

SEQ ID NO: 4069 - DNA, 319 bp, Homo sapiens
gacatccagttgacccagtctccatccttcctgtctgcatctgtaggagacagagtcaccatcacttgccgggccagtcagggcattagcagttatttagcctggtatcagcaaaaaccagggaaagcccctaagctcctgatctatgctgcatccactttgcaaagtggggtcccatcaaggttcagcggcagtggatctgggacagaattcactctcacaatcagcagcctgcagcctgaagattttgcaacttattactgtcaacagcttaatagttaccccaccttcggccaagggacacgactggagattaaac

SEQ ID NO: 4070 - DNA, 331 bp, Homo sapiens
cagactgtggtgacccaggagccatcgttctcagtgtcccctggagggacagtcacactcacttgtggcttgagctctggctcagtctctactagtcactaccccagctggtaccagcagaccccaggccaggctccacgcacgctcatctacagcacaaacactcgctcttctggggtccctggtcgcttctctggctccatccttgggaacaaggctgccctcaccatcacgggggcccaggcagatgatgaatgtgattattactgtgtcctgtatatgggtactgacatttatgtcttcggaactgggacccaggtcactgtcctag

SEQ ID NO: 4071 - DNA, 322 bp, Homo sapiens; identical to SEQ ID NO: 837

SEQ ID NO: 4072 - DNA, 321 bp, Homo sapiens
gacatccagatgacccagtctccatcctccctgtctgcatctgttggagacagagtcaccatcacttgccgggcaagtcagagcattaggagctatttaaattggtatcagcagaaaccagggaaagcccctaagctcctgatctatgctgcatccagtttacaaagtggggtcccatcaaggttcagtggcagtggatctgggacagatttcactctcaccatcagcactctgcaacctgaagattttgcaacttattactgtcaacagagtttcagtccccctggaacgttcggccaagggaccaaggtggaaatcaaa

SEQ ID NO: 4073 - DNA, 325 bp, Homo sapiens
gacatccagatgacccagtctccatcctccctgtctgcatctgtaggagacagagtcaccatcacttgccgggcaagtcagagcattagcagctatttaaattggtatcagcagaaaccagggaaagcccctaagctcctgatctatgctgcatccagtttgcaaagtggggtcccatcaaggttcagtggcagtggatctgggacagatttcactctcaccatcagcagtctgcaacctgaagattttgcaacttactactgtcaacagagttacagtacccctcgagacacttttggccaggggaccaagctggagatcaaac

SEQ ID NO: 4074 - DNA, 322 bp, Homo sapiens
gacatccagatgacccagtctccatcctccctgtctgcatctgtaggagacagagtcaccatcacttgccaggcgagtcaggacattagcaactatttaaattggtatcagcagaaaccagggaaagcccctaagctcctgatctacgatgcatccaatttggaaacaggggtcccatcaaggttcagtggaagtggatctgggacagattttactttcaccatcagcagcctgcagcctgaagatattgcaacatattactgtcaacagtatgataatctccctcctacttttggccaggggaccaagctggagatcaaac

SEQ ID NO: 4075 - DNA, 334 bp, Homo sapiens
cagtctgccctgactcagcctgcctccgtgtctgggtctcctggacagtcgatcaccatctcctgcactggaaccaacagtgacgttggtggttataactttgtctcctggtaccaacaacacccaggcaaagcccccaaactcatgatttatgatgtcagtaatcggccctcaggggtttctaatcgcttctctggctccaagtctggcaacacggcctccctgaccatctctgggctccaggctgaggacgaggctgattattactgcagctcatatacaaccagcaccacccccttggtgttcggcggagggaccaagctgaccgtcctag

SEQ ID NO: 4076 - DNA, 319 bp, Homo sapiens
tcctatgagctgactcagccaccctcagtgtccgtgtccccaggacagacagccagcatcacctgctctggagataaattgggggataaatatgcttgctggtatcagcagaagccaggccagtcccctgtgctggtcatctatcaagatagcaagcggccctcagggatccctgagcgattctctggctccaactctgggaacacagccactctgaccatcagcgggacccaggctatggatgaggctgactattactgtcaggcgtgggacagcagctttgtggtattcggcggagggaccaagctgaccgtcctag

SEQ ID NO: 4077 - DNA, 334 bp, Homo sapiens
cagtctgccctgactcagcctgcctccgtgtctgggtctcctggacagtcgatcaccatctcctgcactggaaccagcagtgacgttggtggttataactatgtctcctggtaccaacaacacccaggcaaagcccccaaactcatgatttatgatgtcagtaatcggccctcaggggtttctaatcgcttctctggctccaagtctggcaacacggcctccctgaccatctctgggctccaggctgaggacgaggctgattattactgcagctcatatacaagcagcagcactctacttgtcttcggaactgggaccaaggtcaccgtcctag

SEQ ID NO: 4078 - DNA, 325 bp, Homo sapiens
gacatccagatgacccagtctccatcctccctgtctgcatctgtaggagacagagtcaccatcacttgccaggcgagtcaggacattagcaactatttaaattggtatcagcagataccagggaaagcccctaagctcctgatctacgatgcatccaatttggaaacaggggtcccatcaaggttcagtggaagtggatctgggacagattttactttcaccatcagcagcctgcagcctgaagatattgcaacatattactgtcaacagtatgataatctccctcaggtcactttcggcggagggaccaaggtggagatcaaac

SEQ ID NO: 4079 - DNA, 322 bp, Homo sapiens
gacatccagatgacccagtctccatcctccctgtctgcatctgtaggagacagagtcaccatcacttgccgggcgagtcaggacattagtaattatttagcctggtatcagcagaaaccagggaaagttcctaaggtcctgatctatgctgcatccgctttgcaatcaggggtctcatctcggttcagtggcagtggatctgggacagatttcactctcaccatcagcagcctgcagcctgaagatgttgcaacttatttctgtcaaaagtataacagtgccccctacacttttggccaggggaccaaactggagatcaaac

SEQ ID NO: 4080 - DNA, 319 bp, Homo sapiens; identical to SEQ ID NO: 1678

SEQ ID NO: 4081 - DNA, 322 bp, Homo sapiens
tcctatgagctgactcagccaccctcagtgtccgtgtccccaggacagacagccagcatcacctgctctggagataaattgggggataaatatgcttgctggtatcagcagaagccaggccagtcccctgtgctggtcatctatcaagatagcaagcggccctcagggatccctgagcgattctctggctccaactctgggaacacagccactctgaccatcagcgggacccaggctatggatgaggctgactattactgtcaggcgtgggacagcagcactgctgtggtattcggcggagggaccaagctgaccgtcctag

SEQ ID NO: 4082 - DNA, 337 bp, Homo sapiens
cagcttgtgctgactcaatcgccctctgcctctgcctccctgggagcctcggtcaagctcacctgcactctgagcagtgggcacagcagctacgccatcgcatggcatcagcagcagccagagaagggccctcggtacttgatgaagcttaacagtgatggcagccacagcaagggggacgggatccctgatcgcttctcaggctccagctctggggctgagcgctacctcaccatctccagcctccagtctgaggatgaggctgactattactgtcagacctggggcactggcatcctctgggtgttcggcggagggaccaagctgaccgtcctag

SEQ ID NO: 4083 - DNA, 331 bp, Homo sapiens; identical to SEQ ID NO: 2425

SEQ ID NO: 4084 - DNA, 319 bp, Homo sapiens
tcctatgagctgactcagccaccctcagtgtccgtgtccccaggacagacagccagcatcacctgctctggagataaattgggggataaatatgcttgctggtatctccagaagccaggccagtcccctgtgctggtcatctatcaagataacaagcggccctcagaaatccctgagcgattctctggctccaactctgggaacacagccactctgaccatcagcgggacccaggctatggatgaggctgactattactgtcaggcgtgggacagcagcactgtggtattcggcggagggaccaagctgaccgtcctag

SEQ ID NO: 4085 - DNA, 361 bp, Homo sapiens
caggtgcagctggtggagtctgggggaggcgtggtccggcctgggaggtccctgagactctcctgtgcagcctctggattcaccttcagtacctatggcatgcactgggtccgccaggctccaggcaaggggctggagtgggtggcaatcatatcatatgatggaaataataaatactatacagactccgtgaagggccgattcaccatctccagagacaattccaagaacatggtgtatctgcaaatgaacagtctgagagctgaggacacggctgtttattattgtgtgaaatctagcagtggctggtacttgcggctcggctactggggccggggaaccctggtcaccgtctcctcag

SEQ ID NO: 4086 - DNA, 361 bp, Homo sapiens
caggtgcagctggtggagtctgggggaggcgtggtccagcctgggaggtccctgagactctcctgtgcagcctctggattcaccttcagtacctatggcatgcactgggtccgccaggctccaggcaaggggctggagtgggtggcaattatatcatatgatggaagtaataaatactatgcagactccgtgaagggccgattcaccatctccagagacaattccaagaacacggtgtatctgcaaatgaacagcctgagaactgaggacacggctatgtattactgtgtgaaatctagcagtggctggtacttgcggctcggctactggggccagggaaccctggtcaccgtctcctcag

SEQ ID NO: 4087 - DNA, 361 bp, Homo sapiens
caggtgcagctggtggagtctgggggaggcgtggtccagcctgggaggtccctgagactctcctgtgcagcctctggattcaccttcagtacctatggcatgcactgggtccgccaggctccaggcaaggggctggagtgggtggcaattatatcatatgatggaagtaataaatactatgcagactccgtgaagggccgattcaccatctccagagacaattccaagaacacggtgtatctgcaaatgaacagcctgagagctgaggacacggctatgtattactgtgtgaaatctagcagtggctggtacttgcggctcggctactggggccagggaaccctggtcaccgtctcctcag

SEQ ID NO: 4088 - DNA, 361 bp, Homo sapiens
caggtgcagctggtggagtctgggggaggcgtggtccagcctgggaagtccctgagactctcctgtgcagcctctggattcaccttcagtacctatggcatgcactgggtccgccaggctccaggcaaggggctggagtgggtggcaattatatcatatgatggaagtaataaatattatgcagactccgtgaagggccgattcaccatctccagagacaattccaggaacacggtgtatctgcaaatgaacagcctgagaactgaggacacggctatgtattactgtgtgaaatctagtagtggctggtacttgcggctcggctactggggccagggaaccctggtcaccgtctcctcag

SEQ ID NO: 4089 - DNA, 361 bp, Homo sapiens; identical to SEQ ID NO: 4088

SEQ ID NO: 4090 - DNA, 361 bp, Homo sapiens; identical to SEQ ID NO: 4088

SEQ ID NO: 4091 - DNA, 361 bp, Homo sapiens; identical to SEQ ID NO: 4088

SEQ ID NO: 4092 - DNA, 361 bp, Homo sapiens; identical to SEQ ID NO: 4088

SEQ ID NO: 4093 - DNA, 361 bp, Homo sapiens
caggtgcagctggtggagtctgggggaggcgtggtccggcctgggaggtccctgagactctcctgtgcagcctctggattcaccttcagtacctatggcatgcactgggtccgccaggctccaggcgaggggctggagtgggtggcaatcatatcgtatgatggaagtaataaatactactcagactccgtgaagggccgattcaccatctccagagacaattccaagaacatggtgtttctgcaaatgaacagtctgagagctgacgacacggctgtgtattattgtgtgaaatctagcagtggctggtacttgcggctcggctcctggggccagggaaccctggtcaccgtctcctcag

SEQ ID NO: 4094 - DNA, 361 bp, Homo sapiens; identical to SEQ ID NO: 4093

SEQ ID NO: 4095 - DNA, 361 bp, Homo sapiens; identical to SEQ ID NO: 4093

SEQ ID NO: 4096 - DNA, 361 bp, Homo sapiens; identical to SEQ ID NO: 4093

SEQ ID NO: 4097 - DNA, 361 bp, Homo sapiens
gaggtgcagctggtggagtctggaggaggcttgatccaggctggggggtccctgagactctcctgtacagcctctgggttctccgtcagtggcaactatatgaactgggtccgccaggctccagggcaggggctggagtgggtctcagttatctataccgatgacactacatactaccctgactccgtgaagggccgattcaccatctccagagacaattccaagaacacgctgtatcttcaaatgaacagcctgagagccgaggacacggccgtttattactgtgcgagagaggggcggcgggggcagtggagctggttcgacccctggggccagggaaccctggtcaccgtctcctcag

SEQ ID NO: 4098 - DNA, 361 bp, Homo sapiens; identical to SEQ ID NO: 4097

SEQ ID NO: 4099 - DNA, 361 bp, Homo sapiens
gaggtgcagctggtggagtctggaggaggcttgatccaggctggggggtccctgagactctcctgttcagcctctgggttcaccgtcagtggcaactatatgaactgggtccgccaggctccagggcaggggctggagtgggtctcagttatctataccgatgatactacatactacgcagactccgtgaagggccgattcaccatctccagagacaattccaacaacacactgtatcttcaaatgaacagcctgagagtcgaggacacggccgtgtattactgtgcgagagaggggcggcgggggcagtggagctggttcgacccctggggccagggaaccctggtcaccgtctcctcag

SEQ ID NO: 4100 - DNA, 361 bp, Homo sapiens; identical to SEQ ID NO: 4097

SEQ ID NO: 4101 - DNA, 361 bp, Homo sapiens
gaggtgcagctggtggagtctggaggaggcttgatccaggctggggggtccctgagactctcctgtacagcctctggattctccgtcagtggcaactatatgaactgggtccgccaggctccagggcaggggctagagtgggtctcgattatctataccgatgacacaacatactaccctgactccttgaagggccgattcaccatctccagagacagttccaggaacactctttatcttcaaatgaacagcctgagagccgaagacacggccgtttattactgtgcgagagaggggcggcgggggcaatggagctggctcgacccctggggccagggaaccctggtcaccgtctcctcag

SEQ ID NO: 4102 - DNA, 361 bp, Homo sapiens
gaggtgcagctggtggagtctggaggaggcttgatccaggctggggggtccctgagactctcctgtacagcctctggattctccgtcagtggcaactatatgaactgggtccgccaggctccagggcaggggctagagtgggtctcggttatctataccgatgacacaacatactaccctgactccctgaagggccgattcaccatctccagagacagttccaggaacactctgtatcttcaaatgaacagcctgagagccgaagacacggccgtttattactgtgcgagagaggggcggcgggggcaatggagctggctcgacccctggggccagggaaccctggtcaccgtctcctcag

SEQ ID NO: 4103 - DNA, 361 bp, Homo sapiens
gaggtgcagctggtggagtctggaggaggcttgatccaggctggggggtccctgagactctcctgtacagcctctgggttctccgtcagtggcaactatatgaactgggtccgccaggctccagggcaggggctagagtgggtctcggttatctataccgatgacacaacatactaccctgactccgtgaagggccgattcaccatctccagagacaattccaagaacactctgtatcttcaaatgaacagcctgagagccgaagacacggccgtttattactgtgcgagagaggggcggcgggggcagtggagctggctcgacccctggggccagggaaccctggtcaccgtctcctcag

SEQ ID NO: 4104 - DNA, 361 bp, Homo sapiens; identical to SEQ ID NO: 4101

SEQ ID NO: 4105 - DNA, 361 bp, Homo sapiens
gaggtgcagctggtggagtctggaggaggcttgatccaggctggggggtccctgagactctcctgtacagcctctgggttctccgtcagtggcaactatatgaactgggtccgccaggctccagggcaggggctggagtgggtctcagttatctataccgatgatactacatactacgctgactccgtgaagggccgattcaccatctccagagacaattccaagaacacgctgtatcttcaaatgaacagcctgagagccgaggacacggccgtttattactgtgcgagagaggggcggcgggggcagtggaactggttcgacccctggggccagggaaccctggtcaccgtctcctcag

SEQ ID NO: 4106 - DNA, 361 bp, Homo sapiens
gaagtgcagctggtggagtctggaggaggcttgatccagcctggggggtccctgagactctcctgtacagcctctacgttcaccgtcagtagcaactacatgagctgggtccgccaggctccagggaaggggctggagtgggtctcagttatttataccggtggtagcacatactacgcagactccgtgaagggccgattcaccatctccagagacaattccaagaacacgctgtatcttcaagtgaacagcctgagagccgaggacacggccgtgtattactgcgctggttcgccggttcggggagttattacccactttgactactggggccagggaaccctggtcaccgtctcctcag

SEQ ID NO: 4107 - DNA, 361 bp, Homo sapiens
gaggtgcagctggtggagtctggaggaggcttgatccagcctggggggtccctgagactctcctgtgcagcctctgggttcaccgtcagtagcaactacatgagctgggtccgccaggctccagggaaggggctggagtgggtctcagttatttatagcggtggtagcacatactacgcagactttgtgaagggccgattcaccatctccagagacaattccaagaacacgctgtatcttcaaatgaacagcctgagagccgaggacacggccgtgtattactgcgctggttcgccggttcggggagttattacccactttgactactggggccagggaaccctggtcaccgtctcctcag

SEQ ID NO: 4108 - DNA, 361 bp, Homo sapiens; identical to SEQ ID NO: 4106

SEQ ID NO: 4109 - DNA, 361 bp, Homo sapiens
gaggtgcagctggtggagtctggaggaggcttgatccagcctggggggtccctgagactctcctgtgcagcctctgggttcaccgtcagtagtaattacttgagctgggtccgccaggctccagggaaggggctggagtgggtctcagttatttatagcggtggtagcacatactactcagactccgtgaagggccgattcaccatctccagagacaattccaagaacacgctgtatcttcaaatgaacagcctgagagccgaggacacggccgtgtattactgcgctggttcgccggttcggggagttattacccactttgactactggggccagggaaccctggtcaccgtctcctcag

SEQ ID NO: 4110 - DNA, 361 bp, Homo sapiens; identical to SEQ ID NO: 4106

SEQ ID NO: 4111 - DNA, 361 bp, Homo sapiens; identical to SEQ ID NO: 4107

SEQ ID NO: 4112 - DNA, 361 bp, Homo sapiens; identical to SEQ ID NO: 4106

SEQ ID NO: 4113 - DNA, 361 bp, Homo sapiens; identical to SEQ ID NO: 4107

SEQ ID NO: 4114 - DNA, 361 bp, Homo sapiens; identical to SEQ ID NO: 4109

SEQ ID NO: 4115 - DNA, 379 bp, Homo sapiens
caggttcagctgcaggagtcgggcccaggactggtgaagccttcggagaccctgtccctcacctgcactgtctctggtggctccgtcagtagtggtagttactactggaactggatccggcagcccccagggaagggactggagtggattggttatttcgattacagtgggagcaccaactacaacccctccctcaagagtcgagtcaccatatcagtagacacgtccaagaatcagttctccctgaagctgagctctgtgaccgctgcggacacggccgtttattactgtgcgagagccgatcggagatattgtattactaccacctgctatatttttgactactggggccagggaaccctggtcaccgtctcctcag

SEQ ID NO: 4116 - DNA, 379 bp, Homo sapiens
caggtgcagctgcaggagtcgggcccaggactggtgaagccttcggagaccctgtccctcacctgcactgtctctggtggctccgtcagcagtggtagtttctactggagctggatccggcagcccccagggaagggactggagtggattgggtatttgtatgacagtgggagtgccaactacaacccctccctcaagagtcgagtcaccatatcaaaagacacgtccaagaaccaattctccctgaacctgagctctgtgaccgctgcggacacggccgtgtattattgtgcgagagccgatcggagatattgtattattaccgactgttatatttttgactactggggccggggaacccttgtcaccgtctcctcag

SEQ ID NO: 4117 - DNA, 379 bp, Homo sapiens
caggtgcaactgcaggagtcgggcccaggactggtgaagccttcggagaccctgtccctcacctgcattgtctctggtggctccgtcagcagtagtagttactactggagctggatccggcagcccccggggaagggactggagtggattgggtatgtcgattatagtgggagcaccaactacaacccctccctcaagagtcgagtcaccatgtcagtagacacgtccaagaaccagttctccctgagactgagctctgtgaccgctgcggacacggccatgtattactgtgcgagagtcgatcggagatattgtattattaccagctgttatatttttgactactggggccagggaaccctggtcaccgtctcctcag

SEQ ID NO: 4118 - DNA, 394 bp, Homo sapiens
caggtgcagctgcaggagtcgggcccaggactggtgaagccttcggagaccctgtccctcacctgcactgtctctggtggctccgtcagcagtaatagttattactggaactggatccggcagcccccagggaagagactggagtggattgggtatatctattacagtgggagcaccaacagtgggagcaccaattacaacccctccctcgagagtcgagtcaccatatcagcagacacgtccaagaaccaattctccctgacgctgagctctgtgaccgctgcggacacggccgtctattactgtgcgagagccgatcggaggtattgtattaccaccagctgctatatttttgacttctggggccagggaatcctggtcaccgtctcctcag

SEQ ID NO: 4119 - DNA, 394 bp, Homo sapiens
caggtgcagctgcaggagtcgggcccaggactggtgaagccttcggagaccctgtccctcacctgcactgtctctggtggctccgtcagcagtaatagttattactggaactggatccggcagcccccagggaagagactggagtggattgggtatatgtattacagtgggagcaccaacagtgggagcaccaattacaacccctccctcaagagtcgagtcaccatatcagcagacacgtccaagaaccaattctccctgacgctgagctctgtgaccgctgcggacacggccgtctattactgtgcgagagccgatcggacgtattgtattaccaccagctgctatatttttgacttctggggccagggaatcctgggcaccgtctcctcag

SEQ ID NO: 4120 - DNA, 378 bp, Homo sapiens
caggtgcagctgcaggagtcgggcccaggactggtgaagccttcggagaccctgtccctcacctgctctgtctctggtggctccgtcagtagtggtagttactactggagctggatccggcagcccccagggaagggactggagtggattgggtatatcgattatagtgggagcaccaactacaacccctcactcaagagtcgagtcaccatgtcagtagacacgtccaagaaccagttctccctgagcctgagctctgtgaccgttgcggacacggccgtgtattactgtgcgagagccgatcggagatactgtattactaccagctgctatatttttgactgctggggccagggagcgctggtcaccgtctcctca

SEQ ID NO: 4121 - DNA, 360 bp, Homo sapiens
caggtgcagctggtggagtctgggggaggcgtggtccagcctgggaggtccctgagactctcctgtgcagcctctggattcaccttcagtagctatgctatgaactgggtccgccaggctccaggcaaggggctggagtgggtggcagttatatcatatgatggaggcaataaatactacgcagactccgtgaagggccgattcaccatctccagagacaattccaagaacacgctgtatctgcaaatgaacagcctgagagctgaggacacggctgtgtattactgtgcgagaggccgagatggctactactacggtatggacgtctggggccaagggaccacggtcaccgtctcctca

SEQ ID NO: 4122 - DNA, 360 bp, Homo sapiens; identical to SEQ ID NO: 4121

SEQ ID NO: 4123 - DNA, 360 bp, Homo sapiens; identical to SEQ ID NO: 4121

SEQ ID NO: 4124 - DNA, 360 bp, Homo sapiens
caggtgcagctggtggagtctgggggaggcgtggtccagcctgggaggtccctgagactctcctgtgcagcctctggattcaccttcagtagctatgctctgaactgggtccgccaggctccaggcaaggggctggactgggtggcagttatatcatatgatggcggcaataaatactacgcagactccgtgaagggccgattcaccatctccagagacaattccaagaacacgctgtatctgcaaatgaacagcctgagagctgaggacacggctgtgtattactgtgcgagaggccgagatggctactactacggtatggacgtctggggccaagggaccacggtcaccgtctcctca

SEQ ID NO: 4125 - DNA, 360 bp, Homo sapiens; identical to SEQ ID NO: 4121

SEQ ID NO: 4126 - DNA, 367 bp, Homo sapiens
caggtgcagctggtgcagtctggggctgaggtgaagaagcctggggcctcagtgaaggtctcctgcaaggcttctggatacaccttcaccggctactctatacactgggtgcgacaggcccctggacaagggcttgagtggatgggatggatcaacccttacactggtgacacaagttatgtacagaagtttcagggctgcgtcaccatgactcgggacacgtccatcagcacagcctacatggagctgagcaggctgacatctgacgacacggccgtgtattactgtgcgagagcccctccttttagtagctcgtctataggtgtggactactggggccagggaaccctggtcaccgtctcctcag

SEQ ID NO: 4127 - DNA, 367 bp, Homo sapiens
caggtgcagctggtgcagtctggggctgaagtgaagaagcctggggcctcagtgaaagtctcctgcaaggcttctggatacaccttcatcgactaccatgttcactgggtgcgacaggcccctggacaagggcttgagtggttggggtggatcaacccttatagtggtggcacaagctatgtacagaagtttcagggctgggtcgccatgaccagggacacgtccatcagcacagccttcatggaactgagcaggctgaaatctgacgacacggccgtgtattactgtgcgcgagcccctccctttagcacctcgtctataggtgtagactactggggccagggcaccctggtcaccgtctcctcag

SEQ ID NO: 4128 - DNA, 367 bp, Homo sapiens
caggtgcagctggtgcagtctggggctgaagtgaagaagcctggggcctcagtgaaagtctcctgcaaggcttctggatacaccttcatcgactaccatgttcactgggtgcgacaggcccctggacaagggcttgagtggttggggtggatcaacccttatagtggtggcacaagctatgcacagaagtttcagggctgggtcgccatgaccagggacacgtccatcagcacagccttcatggaactgagcaggctgaaatctgacgacacggccgtgtattactgtgcgcgagcccctccctttagcacctcgtctataggtgtggactactggggccagggcaccctggtcaccgtctcctcag

SEQ ID NO: 4129 - DNA, 381 bp, Homo sapiens
caggtgcagctggtgcagtctggggcggaggtgaagaagcctggggcctcagtgaaggtctcctgcaaggcctctggatatagtttcagcgactactatctgcagtgggtgcgacaggcccctggacaagggcttgagtggatgggatggatcaaccctaagagtggtggcacacattatgcacagaagtttcagggcagggtcaccgtgaccagggacacgtccatcagcacaacctacatggagctgagcagcctgaggtctgacgacacggccgtgtattactgtgcgaaagatcattgtgctacgaccaactgttttgagtacctctacttcggtatgggcgtctggggccaagggaccacggtcaccgtctcctca

SEQ ID NO: 4130 - DNA, 381 bp, Homo sapiens; identical to SEQ ID NO: 4129

SEQ ID NO: 4131 - DNA, 381 bp, Homo sapiens
caggtgcagctggtgcagtctggggctgaggtgaagaagcctggggcctcagtgaaggtctcctgcaaggcctctggatacaccttcaccgactactatctgcagtgggtgcgacaggcccctggacaagggcttgagtggatgggatggatcaaccctaagagtggtggcacaaattatgcacagaagtttcagggcagggtcaccgtgaccagggacacgtccatcagcacaacctacatggagctgagcagcctgaggtctgacgacacggccatctattactgtgcgaaagatcattgttctacgaccaactgttttgagtacctctacttcggtatgggcgtctggggccaagggaccacggtcaccgtctcctca

SEQ ID NO: 4132 - DNA, 361 bp, Homo sapiens
caggtgcagctgcaggagtcgggcccaaaacaggtgaagccttcggagaccctgtccctcacctgcactgtctctggtgcctccatgagcagttactactggttctggctccggcagcccgccgggaagggactggagtggattgggcgtatctacagtggtgggagcaccaactacaacccctccttcaagagtcgagtcaccatgtcagtagacacgtccaagaaccagttcttcctggagctgagttctgtgaccgccgcggacacggccgtgtattactgtgcgagagatctgacttattatggtagtaatggttatacaaactggggccagggaacgctggtcaccgtctcctcag

SEQ ID NO: 4133 - DNA, 361 bp, Homo sapiens; identical to SEQ ID NO: 4132

SEQ ID NO: 4134 - DNA, 361 bp, Homo sapiens
gaggtgcagctggtggagtctggaggaggcttgatccaccctggggggtccctgagactctcctgtgcagcctctgggttcaccgtcactagcaactacatgagctgggtccgccaggctccagggaaggggctggagtgggtctcagttatttatagcggtggtagcacatactacgcagactccgtgaagggccgattcaccatctccagagacaattccaagaacacgctgtatcttcaaatgaacagcctgagagccgaggacacggccgtgtattactgtgcgtcctcgccggttcggggagttattacacagtttgactactggggccagggaaccctggtcaccgtctcctcag

SEQ ID NO: 4135 - DNA, 361 bp, Homo sapiens; identical to SEQ ID NO: 4134

SEQ ID NO: 4136 - DNA, 361 bp, Homo sapiens
gaggtgcagctggtgcagtctggagcagaggtgaaaaagcccggggagtctctgaagatctcctgtaagggttctggatacacctttaccaactactggatcgcctgggtgcgccagatgcccgggaaaggcctggagtggatgggggccatctatcctggtgactctgataccagatacagcccgtccttccaaggccaggtcaccatctcagccgacaagtccatcagtaccgcctacctgcagtggagcagcctgaaggcctcggacaccgccatgtatttctgtgcgagacatgatggttctaaggtgactacaaatgactactggggccagggaaccctggtcaccgtctcctcag

SEQ ID NO: 4137 - DNA, 361 bp, Homo sapiens
gaggtgcagctggtgcagtctggagcagaggtgaaaaagcccggggagtctctgaagatctcctgtaagggttctggatacacctttaccaactactggatcgcctgggtgcgccagatgcccgggaaaggcctggagtggatgggggccatctatcctggtgactctgataccagatacagcccgtccttccaaggccaggtcaccatctcagccgacaagtccatcagcaccgcctacctgcagtggagcagcctgaaggcctcggacaccgccatgtatttctgtgcgagacatgatggttctaaggtgactacaaatgactactggggccagggaaccctggtcaccgtctcctcag

SEQ ID NO: 4138 - DNA, 361 bp, Homo sapiens
caggtgcagctggtggagtctgggggaggcgtggtccagcctgggaggtccctgagactctcctgtgcagcctctggattcaccttcagtatctatgctatgcactgggtccgccaggctccaggcaaggggctggagtgggtggcagttatatcatatgatggaagcaataaatactacgcagactccgtgaagggccgattcaccatctccagagacaattccaagaacacgctgtatctgcaaatgaacagcctgagagttgaggacacggctgtgtattattgtgcgagagatcgtagtgggagctactaccgccctgggtactggggccagggaaccctggtcaccgtctcctcag

SEQ ID NO: 4139 - DNA, 361 bp, Homo sapiens
caggtgcagctggtggagtctgggggaggcgtggtccagcctgggaggtccctgagactctcctgtgcagcctctggattcaccttcagtacctatgctatgcactgggtccgccaggctccaggcaaggggctggagtgggtggcagttatatcatatgatggattcaataaatactacgcagactccgtgaggggccgattcaccatctccagagacaattccaagaacacactgtatctgcaaatgaacagcctgagagctgaggacacggctgtgtattactgtgcgagagatcgtagtgggagctactaccgccctgggtactggggccagggaaccctggtcaccgtctcctcag

SEQ ID NO: 4140 - DNA, 361 bp, Homo sapiens
caggtgcagctggtggagtctgggggaggcgtggtccagcctgggaggtccctgagactctcctgtgcagcctctggattcaccttcagtagctatggcatgcactgggtccgccaggctccaggcaaggggctggagtgggtggcagttatatcatatgatgggaataataaatactatgcagactccgtgaagggccgattcaccatctccagagacaattccaagaacacgctgtatctgcaaatgaacagcctgagacctgaggacacggctgtgtattactgtgcccaaacgggtgggagctactttggcccctttgactactggggccagggaaccctggtcaccgtctcctcag

SEQ ID NO: 4141 - DNA, 361 bp, Homo sapiens; identical to SEQ ID NO: 4140

SEQ ID NO: 4142 - DNA, 370 bp, Homo sapiens
caggtgcagctggtggagtctgggggaggcgtggtccagcctgggaggtccctgagactctcctgtgcagcctctggattcaccttcagtagctatggcatgcactgggtccgccaggctccaggcaaggggctggagtgggtggcagttatatcatatgatggaagtaataaatactatgcagactccgtgaagggccgattcaccatctccagagacaattccaagaacacgctgtatctgcaaatgaacagcctgagagctgaggacacggctgtgtattactgtgcgaaagcctttggttggcactatggttcagggagttatcctgactactggggccagggaaccctggtcaccgtctcctcag

SEQ ID NO: 4143 - DNA, 370 bp, Homo sapiens; identical to SEQ ID NO: 4142

SEQ ID NO: 4144 - DNA, 369 bp, Homo sapiens
caggtgcagctggtgcagtctggggctgaggtgaaggagcctggggcctcagtgaaggtctcctgcaaggcttctggatacaccttcaccgcctactatttgcactgggtgcgacaggcccctggacaagggcttgagtggttgggatggatcaaccctaacagtggtggcacaaactatgcacagaagtttcagggcagggtcaccatgaccagggacacgtccatcagcgcagcctacatggagctgagcgggctgagatctggcgacacggccgtgtattactgtgcgagagatatagtctacaactatggttaccactgcgctatggacgtctggggccaagggaccacggtcaccgtctcctca

SEQ ID NO: 4145 - DNA, 369 bp, Homo sapiens; identical to SEQ ID NO: 4144

SEQ ID NO: 4146 - DNA, 352 bp, Homo sapiens
caggtgcttctggtacagtctggggctgaggtgaggaagcctggggcctcagtgaaggtctcctgcaaggcttctggatacaccttcaccatctactatatgcactgggtgcgacaggcccctggacaagggcttgagtggatgggttggatcaaccctaacagtggtggcacaaactatgcacagaagtttcagggcagggtcaccatgaccagggacacgtccatcagcacagcctacatggaactgagcagcctgagatctgacgacacggccgtgtattactgtgcgagagggaatgtggcttactttgacaactggggccagggaaccctggtcaccgtctcctcag

SEQ ID NO: 4147 - DNA, 352 bp, Homo sapiens; identical to SEQ ID NO: 4146

SEQ ID NO: 4148 - DNA, 367 bp, Homo sapiens
caggtgcagctggtgcagtctggggctgaggtgaagaagcctggggcctcagtgaaggtctcctgcaaggcttctggatacaccttcaccgactactatatgtactgggtacgacaggcccctggacaagggcttgagtggatgggatggatcaaccctaacagtggtgccacaaactttgcacagaattttcagggcagggtcaccatgaccaggcacacgtccatcagcacagcctacatggaactgagcaggctgagatatgacgacacggccgtgtattactgtgcgagagggaccaattttgactggtcaaaaacatactttgactactggggccagggaaccctggtcaccgtctcctcag

SEQ ID NO: 4149 - DNA, 367 bp, Homo sapiens; identical to SEQ ID NO: 4148

SEQ ID NO: 4150 - DNA, 388 bp, Homo sapiens
caggtacagctgcagcagtcaggtccaggactggtgaagccctcgcagaccctctcactcacctgtgccatctccggggacagtgtctctagtagcagttctgcttggaactggatcaggcagtccccatcgagaggccttgagtggctgggaaggacatactacaggtccaagtggtataatgattatgcagtctctgtgaaaagtcgagtaaccatcaaaccggacacatccaagaaccagttctccctgcagctgaactctgtgactcccgaggacacggctgtgtattattgtgcaagaaaccaattttggagtggttacccgaacccaaacccggactggttcgacccctggggccagggaaccctggtcaccgtctcctcag

SEQ ID NO: 4151 - DNA, 388 bp, Homo sapiens; identical to SEQ ID NO: 4150

SEQ ID NO: 4152 - DNA, 345 bp, Homo sapiens
gaggtgcacctggtggagtctgggggaggcttggtccagcctggggggtccctgagactctcctgtgcagcctctggattcagcctcagtatttattggatgagttgggtccgccaggctccagggaaggggctggagtgggtggccaacataaagcaggatgggagtgagaagtactatgtggactctgtgaagggccgattcaccatctccagagacaacgccaagaacttattgtatctgcaaatgaacagcctgagagccgaggacacggctctatattactgtgcgagagctcgggggctggacgtctggggccaagggaccacggtcaccgtctcttca

SEQ ID NO: 4153 - DNA, 345 bp, Homo sapiens; identical to SEQ ID NO: 4152

SEQ ID NO: 4154 - DNA, 367 bp, Homo sapiens
caggtgcagctggtggagtctgggggaggcttggtcaagcctggagggtccctgagactctcctgtgcagcctctggattcaccttcagtgactactacatgagctggatccgccaggctccagggaaggggctggagtgggtttcatacattagtagtagtggtagtaccatatactacgcagactctgtgaagggccgattcaccatctccagggacaacgccaagaactcactgtatctgcaaatgaacagcctgagagccgaggacacggccgtgtattactgtgcgagagatgggtggcagtggctgcttttcaactggttcgacccctggggccagggaaccctggtcaccgtctcctcag

SEQ ID NO: 4155 - DNA, 396 bp, Homo sapiens
caggtgcagctgcaggagtcgggcccaggactggtgaagccttcggagaccctgtccctcacctgcactgtctctggtggctccatcagtagttactactggagctggatccggcagcccccagggaagggactggagtggattgggtatatctattacagtgggagcaccaactacaacccctccctcaagagtcgagtcaccatatcagtagacacgtccaagaaccagttctccctgaagctgagctctgtgaccgctgcggacacggccgtgtattactgtgcgagagatatttccccctattactatggttcagggagctaccgaatggggaactactactactacggtatggacgtctggggccaagggaccacggtcaccgtctcctca

SEQ ID NO: 4156 - DNA, 400 bp, Homo sapiens
caggtgcagctgcaggagtcgggcccaggactggtgaagccttcggagaccctgtccctcacctgcgctgtctctggttactccatcagcagtggttactactggggctggatccggcagcccccagggaaggggctggagtggattgggagtatctatcatagtgggagcacctactacaacccgtccctcaagagtcgagtcaccatatcagtagacacgtccaagaaccagttctccctgaagctgagctctgtgaccgccgcagacacggccgtgtattactgtgcgaggattgacctccgtactggggcgtattactatgatagtagtggttattaccctacgcctgatgcttttgatatctggggccaagggacaatggtcaccgtctcttcag

SEQ ID NO: 4157 - DNA, 370 bp, Homo sapiens
caggtgcagctgcaggagtcgggcccaggactggtgaagccttcacagaccctgtccctcacctgcactgtctctggtggctccatcagcagtggtggttactactggagctggatccgccagcacccagggaagggcctggagtggattgggtacatctattacagtgggagcacctactacaacccgtccctcaagagtcgagttaccatatcagtagacacgtctaagaaccagttctccctgaagctgagctctgtgactgccgcggacacggccgtgtattactgtgcgagagaggcgggtatagcagcaggggggtactggttcgacccctggggccagggaaccctggtcaccgtctcctcag

SEQ ID NO: 4158 - DNA, 366 bp, Homo sapiens
caggtgcagctggtggagtctgggggaggcgtggtccagcctgggaggtccctgagactctcctgtgcagcctctggattcaccttcagtagctatggcatgcactgggtccgccaggctccaggcaaggggctggagtgggtggcagttatatcatatgatggaagtaataaatactatgcagactccgtgaagggccgattcaccatctccagagacaattccaagaacacgctgtatctgcaaatgaacagcctgagagctgaggacacggctgtgtattactgtgcgaaagatccctatagtgggagctactactacggtatggacgtctggggccaagggaccacggtcaccgtctcctca

SEQ ID NO: 4159 - DNA, 366 bp, Homo sapiens
gaggtgcagctggtggagtctgggggaggcttggtacagcctggagggtccctgagactctcctgtgcagcctctggattcaccttcagtagttatgaaatgaactgggtccgccaggctccagggaaggggctggagtgggtttcatacattagtagtagtggtagtaccatatactacgcagactctgtgaagggccgattcaccatctccagagacaacgccaagaactcactgtatctgcaaatgaacagcctgagagccgaggacacggctgtttattactgtgcgagaggcccttacagctactactactactacggtatggacgtctggggccaagggaccacggtcaccgtctcctca

SEQ ID NO: 4160 - DNA, 366 bp, Homo sapiens
gaggtgcagctggtggagtctgggggaggcctggtcaagcctggggggtccctgagactctcctgtgcagcctctggattcaccttcagttcctatagcatgaactgggtccgccaggctccagggaaggggctggagtgggtctcatccattagtagtagtagtagttacatatactacgcagactcagtgaagggccgattcaccatctccagagacaacgccaacaactcactgtatctgcaaatgaacagcctgagagccgaggacacggctgtgtattactgtgcgagggaacgtagggatgtatactacttctccggtatggacgtctggggccaagggaccacggtcaccgtctcctca

SEQ ID NO: 4161 - DNA, 367 bp, Homo sapiens
caggtccagctggtacagtctggggctgaggtgaagaagcctggggcctcagtgaaggtctcctgcaaggtttccggatacaccctccctgaattagccatccactgggtgcgacaggctcctggaaaagggcttgagtggatgggaggttttgatcctgaagatggtgaaacagtctacgcacagaagttccagggcagagtcaccatgaccgaggacacatctacagacacagcctacatggagctgagcagtctgagatctgcggacacggccgtgtattactgtgcagcaagttcccccatgagggggaccgggagctggttcgacccctggggccagggaaccctggtcaccgtctcctcag

SEQ ID NO: 4162 - DNA, 367 bp, Homo sapiens
caggtgcagctgcaggagtcgggcccaggactggtgaagccttcggggaccctgtccctcacctgcgctgtctctggtggctccatcagcagtagtaactggtggagttgggtccgccagcccccagggaaggggctggagtggattggggaaatctatcatagtgggagcaccaactacaacccgtccctcaagagtcgagtcaccatatcagtagacaagtccaagaaccagttctccctgaagctgagctctgtgaccgccgcggacacggccgtgtattactgtgcgagagagatgaggcagctggtaccgaacaactggttcgacccctggggccagggaaccctggtcaccgtctcctcag

SEQ ID NO: 4163 - DNA, 366 bp, Homo sapiens
caggtgcagttggtggagtcggggggagacgtggtccagcctgggaggtccctgagactctcctgtgtagcctctggattcaccttcagtagctttgctgtacactgggtccgccgggctccaggcaaggggctggactgggtggcagtgattccatatgatggaagcaatcagtactacgcagactccgtgaagggccgattcaccatctccagagacaattccaagaacacactgtatctacaaatgaacagcctgagagccgaggacacggctgtgtattactgtgcgagagagacagtggtgctaatgttgtcaaatccaatggacgtctggggccaagggaccacggtcaccgtctcctca

SEQ ID NO: 4164 - DNA, 364 bp, Homo sapiens
caggtgcagctgcaggagtcgggcccaggactggtgaagccttcggagaccctgtccctcacctgcactgtctctggtggctccatcagtagttactactggagctggatccggcagcccccagggaagggactggagtggattgggtatatctattacagtgggagcaccaactacaacccctccctcaagagtcgagtcaccatatcagtagacacgtccaagaaccagttctccctgaagctgagctctgtgaccgctgcggacacggccgtgtattactgtgcgagagatcctagcagtggctggggtcctaagtggttcgacccctggggccagggaaccctggtcaccgtctcctcag

SEQ ID NO: 4165 - DNA, 367 bp, Homo sapiens
gaggtgcagctggtggagtctgggggaggcctggtcaagcctggggggtccctgagactctcctgtgcagcctctggattcaccttcagtagctatagcatgaactgggtccgccaggctccagggaaggggctggagtgggtctcatccattagtagtagtagtagttacatatactacgcagactcagtgaagggccgattcaccatctccagagacaacgccaagaactcactgtatctgcaaatgaacagcctgagagccgaggacacggctgtgtattactgtgcgagagatcggggtagcagtggctggtacggctggttcgacccctggggccagggaaccctggtcaccgtctcctcag

SEQ ID NO: 4166 - DNA, 370 bp, Homo sapiens
caggtgcagctgcaggagtcgggcccaggactggtgaagccttcacagaccctgtccctcacctgcactgtctctggtggctccatcagcagtggtggttactactggagctggatccgccagcacccagggaagggcctggagtggattgggtacatctattacagtgggagcacctactacaacccgtccctcaagagtcgagttaccatatcagtagacacgtctaagaaccagttctccctgaagctgagctctgtgactgccgcggacacggccgtgtattactgtgcgagagagtgggcggcagcagctggtacgggtgcttttgatatctggggccaagggacaatggtcaccgtctcttcag

SEQ ID NO: 4167 - DNA, 364 bp, Homo sapiens
caggtgcagctacagcagtggggcgcaggactgttgaagccttcggagaccctgtccctcacctgcgctgtctatggtgggtccttcagtggttactactggagctggatccgccagcccccagggaaggggctggagtggattggggaaatcaatcatagtggaagcaccaactacaacccgtccctcaagagtcgagtcaccatatcagtagacacgtccaagaaccagttctccctgaagctgagctctgtgaccgccgcggacacggctgtgtattactgtgcgagaggccgaggcagcagctggacagggggttggttcgacccctggggccagggaaccctggtcaccgtctcctcag

SEQ ID NO: 4168 - DNA, 367 bp, Homo sapiens
caggtgcagctggtgcagtctggggctgaggtgaagaagcctggggcctcagtgaaggtctcctgcaaggcttctggatacaccttcaccggctactatatgcactgggtgcgacaggcccctggacaagggcttgagtggatgggatggatcaaccctaacagtggtggcacaaactatgcacagaagtttcagggctgggtcaccatgaccagggacacgtccatcagcacagcctacatggagctgagcaggctgagatctgacgacacggccgtgtattactgtgcgagagatcgatatagtggctacgattctggattttgggatatctggggccaagggacaatggtcaccgtctcttcag

SEQ ID NO: 4169 - DNA, 367 bp, Homo sapiens
gaggtgcagctggtggagtctgggggaggcttggtacagcctggcaggtccctgagactctcctgtgcagcctctggattcacctttgaggattatgccatgcactgggtccggcaagctccagggaggggcctggagtgggtctcaggtattagttggaacagtgctgtcataggctatgcggactctgttaagggccgattcaccatctccagagacaacgccaagaactccctatatctgcaaatgaacagtctgagacctgaggacacggccttctactactgtgcaaaagccccccaatatctgggggacgctgaatacttccaggagtggggccagggcaccctggtcagcgtctccgcag

SEQ ID NO: 4170 - DNA, 366 bp, Homo sapiens
caggttcagctggtgcagtctggagctgaggtgaagaagcctggggcctcagtgaaggtctcctgcaaggcttctggttacagctttagaagttatggtattatgtggctgcgacaggcccctggacaagggcttgagtggatgggaaggatcagcgcttacaatggtgtcacaaactatgcagagaagtttcagggcagaggcaccatgaccacagacacatccacgagcacaacttacatggagctgaggagcctgagatctgacgacacggccgtgtattattgtgcgagagttccggggtctggagtgcctaaccacggtatggacgtctggggccaagggaccacggtcaccgtctcctca

SEQ ID NO: 4171 - DNA, 366 bp, Homo sapiens
caggtgcagctggtggagtctgggggaggcgtggtccagcctgggaggtccctgagactctcctgtgcagcgtctggattcaccttcagtagctatggcatgcactgggtccgccaggctccaggcaaggggctggagtgggtggcagttatatggtatgatggaagtaataaatactatgcagactccgtgaagggccgattcaccatctccagagacaattccaagaacacgctgtatctgcaaatgaacagcctgagagccgaggacacggctgtgtattactgtgcgagagtaagggtatggtactatgatcctagtcctatggacgtctggggccaagggaccacggtcaccgtctcctca

SEQ ID NO: 4172 - DNA, 367 bp, Homo sapiens
gaggtgcagctggtggagtctgggggaggcttggtacagcctggagggtccctgagactctcctgtgcagcctctggattcaccttcagtagttatgaaatgaactgggtccgccaggctccagggaaggggctggagtgggtttcatacattagtagtagtggtagtaccatatactacgcagactctgtgaagggccgattcaccatctccagagacaacgccaagaactcactgtatctgcaaatgaacagcctgagagccgaggacacggctgtttattactgtgcgagattaagagggttcagtggctggtacgagaccggtgactactggggccagggaaccctggtcaccgtctcctcag

SEQ ID NO: 4173 - DNA, 367 bp, Homo sapiens
caggtccagcttgtgcagtctggggctgaggtgaagaagcctggggcctcagtgaaggtttcctgcaaggcttctggatacaccttcactagctatgctatgcattgggtgcgccaggcccccggacaaaggcttgagtggatgggatggatcaacgctggcaatggtaacacaaaatattcacagaagttccagggcagagtcaccattaccagggacacatccgcgagcacagcctacatggagctgagcagcctgagatctgaagacacggctgtgtattactgtgcgagaacgtccgccgagggagctactgtagggtcctttgactactggggccagggaaccctggtcaccgtctcctcag

SEQ ID NO: 4174 - DNA, 367 bp, Homo sapiens
gaagtgcagctggtggagtctgggggaggcttggtacagcctggcaggtccctgagactctcctgtgcagcctctggattcacctttgatgattatgccatgcactgggtccggcaagctccagggaagggcctggagtgggtctcaggtattagttggaatagtggtagcataggctatgcggactctgtgaagggccgattcaccatctccagagacaacgccaagaactccctgtatctgcaaatgaacagtctgagagctgaggacacggccttgtattactgtgcaaaaccaggatcgatagtagtttacgggatgtactttgactactggggccagggaaccctggtcaccgtctcctcag

SEQ ID NO: 4175 - DNA, 367 bp, Homo sapiens
gaggtgcagctgttggagtctgggggaggcttggtacagcctggggggtccctgagactctcctgtgcagcctctggattcacctttagcagctatgccatgagctgggtccgccaggctccagggagggggctggagtgggtctcagctattagtgatcgtgctggtagcacatactacgcagactccgtgaagggccggttcaccatctccagagacaattccaagaacacgctgtatctgcaaatgaacagcctgagagccgaggacacggccgtatattactgtgcgaaatgtggccttggatattgtactaatggggggattgactactggggccagggaaccctggtcaccgtctcctcag

SEQ ID NO: 4176 - DNA, 373 bp, Homo sapiens
gaggtgcagctgttggagtctgggggaggcttggtacagcctggggggtccctgagactctcctgtgcagcctctggattcacctttagcagctatgccatgagctgggtccgccaggctccagggaaggggctggagtgggtctcagctattagtggtagtggtggtagcacatactacgcagactccgtgaagggccggttcaccatctccagagacaattccaagaacacgctgtatctgcaaatgaacagcctgagagccgaggacacggccgtatattactgtgcgacctccggccggaaattagagtatagcagctcgttgggaattgactactggggccagggaaccctggtcaccgtctcctcag

SEQ ID NO: 4177 - DNA, 373 bp, Homo sapiens
gaggtgcagctggtggagtccgggggaggcttagttcagcctggggggtccctgagactctcctgtgcagcctctggattcaccttcagtacctcctggatgcactgggtccgccaagctccagggaaggggctggtgtgggtctcacgcattcgaaatgatgggagtagaacaagttacgcggactccgtgaagggccgattcaccatctccagagacaacgccaagaacacgctgtatctgcaaatgaacagtctgagagtcgaggacacggctgtgtattactgtgcaagctcaactacgtataattatgatactagtggcgaaaatcttgactactggggccagggaaccctggtcaccgtctcctcag

SEQ ID NO: 4178 - DNA, 373 bp, Homo sapiens
gaggtgcagctggtgcagtctggagcagaggtgaaaaagcccggggagtctctgaagatctcctgtaagggttctggatacaggtttaccagctactggatcggctgggtgcgccagatgcccgggaaaggcctggagtggatggggatcatctatcctggtgactctgataccagatacagcccgtccttccaaggccaggtcaccatctcagtcgacaagtccatcaacaccgcctacctgcagtggaccagcctgaaggcctcggacagcgccatgtattactgtgcgagacacgtcataacagtggctggaacggtgggttactactttgacgcctggggccagggaaccctggtcaccgtctcctcag

SEQ ID NO: 4179 - DNA, 370 bp, Homo sapiens
caggtgcagctacagcagtggggcgcaggactgttgaagccttcggagaccctgtccctcacctgcgctgtctatggtgggtccttcagtggttactactggagctggatccgccagcccccagggaaggggctggagtggattggggaaatcaatcatagtggaagcaccaactacaacccgtccctcaagagtcgagtcaccatatcagtagacacgtccaagaaccagttctccctgaagctgagctctgtgaccgccgcggacacggctgtgtattactgtgcgaggcgccattcccgaaattactatgatagtagtggctaccttgcctactggggccagggaaccctggtcaccgtctcctcag

SEQ ID NO: 4180 - DNA, 373 bp, Homo sapiens
gaagtgcagttggtggagtctgggggaggcttggtacatcctggcaggtccctgagactctcctgtatagcctctggattcagttttgattattatgccatgcactgggtccggcaagctccagggaggggcctggagtgggtctccggaattacttggaatagtggtggcatagcctatgcggactctgtgaagggccgattcaccatctccagagacaacgccaagaactccctgtatctgcaaatgaacaatctgagagctgaggacacggccttctattattgtacaaaagatattctcacattcaccgatagcctccgaccctcctttgactactggggccacggaaccctggtcaccgtctcctcag

SEQ ID NO: 4181 - DNA, 373 bp, Homo sapiens
caggtgcagctggtggagtctgggggaggcgtggtccagcctgggaggtccctgagactctcctgtgcagcgtctggattcaccttcagtaactatggcatgcactgggtccgccaggctccaggcaagggtctggagtgggtggcagttatatggtttgatggaagtaaaaaatactatgcagactccgtgaagggccgattcaccatctccagagacaattccaagaacacgatggatctgcaaatgaacagcctgagagccgaggacacggctgtgtattactgtgcgagagatctgggggtgtcgcataactggaacaactttgaaagtgactgctggggccagggaaccctggtcaccgtctcctcag

SEQ ID NO: 4182 - DNA, 373 bp, Homo sapiens
caggtgcagctggtgcagtctggggctgaggtgaagaagcctgggtcctcggtgaaggtctcctgcaaggcttctggaggcaccttcagcagctatgctatcagctgggtgcgacaggcccctggacaagggcttgagtggatgggagggatcatccctatctttggtacagcaaactacgcacagaagttccagggcagagtcacgattaccgcggacgaatccacgagcacagcctacatggagctgagcagcctgagatctgaggacacggccgtgtattactgtgcgagcagctcccagtattacgatttttggagtggttaccctttggactactggggccagggaaccctggtcaccgtctcctcag

SEQ ID NO: 4183 - DNA, 373 bp, Homo sapiens
caggtgcagctgcaggagtcgggcccaggactggtgaagccttcggggaccctgtccctcacctgcgctgtctctggtggctccatcagcagtagtaactggtggagttgggtccgccagcccccagggaaggggctggagtggattggggaaatctatcatagtgggagcaccaactacaacccgtccctcaagagtcgagtcaccatatcagtagacaagtccaagaaccagttctccctgaagctgagctctgtgaccgccgcggacacggccgtgtattactgtgcgagagtaagctatgatagtagtggttatcttaccgaaacttttgactactggggccagggaaccctggtcaccgtctcctcag

SEQ ID NO: 4184 - DNA, 373 bp, Homo sapiens
caggtgcagctgcaggagtcgggcccaggactggtgaagccttcggggaccctgtccctcacctgcgctgtctctggtggctccatcagcagtagtaactggtggagttgggtccgccagcccccagggaaggggctggagtggattggggaaatctatcatagtgggagcaccaactacaacccgtccctcaagagtcgagtcaccatatcagtagacaagtccaagaaccagttctccctgaagctgagctctgtgaccgccgcggacacggccgtgtattactgtgcgagagatgccacccggtatagcagcagctggaccctggatgatgactactggggccagggaaccctggtcaccgtctcctcag

SEQ ID NO: 4185 - DNA, 381 bp, Homo sapiens
caggtacagctgcagcagtcaggtccaggactggtgaagccctcgcagaccctctcactcacctgtgccatctccggggacagtgtctctagcaacagtgctgcttggaactggatcaggcagtccccatcgagaggccttgagtggctgggaaggacatactacaggtccaagtggtataatgattatgcagtatctgtgaaaagtcgaataaccatcaacccagacacatccaagaaccagttctccctgcagctgaactctgtgactcccgaggacacggctgtgtattactgtgcaagagggggtggctacgagtggggctactactactacggtatggacgtctggggccaagggaccacggtcaccgtctcctca

SEQ ID NO: 4186 - DNA, 373 bp, Homo sapiens
caggtgcagctggtggagtctgggggaggcttggtcaagcctggagggtccctgagactctcctgtgcagcctctggattcaccttcagtgactactacatgagctggctccgccaggctccaggggaggggccggagtgggttgcatacattaatagcaatagtaaagacaaatactacacagactctgtgcagggccgattcagcatctccagggacaacgccaggaattcactgtatctgcaaatgaacagcctgaaagccgaggacacggccgtatattactgtgcgactggctggtatgacacctcgttaactccaggtggctactttgactactggggccagggaaccctagtcaccgtctcctcag

SEQ ID NO: 4187 - DNA, 367 bp, Homo sapiens
caggtgcagctgcaggagtcgggcccaggactggtgaagccttcggggaccctgtccctcacctgcgctgtctctggtggctccatcagcagtagtaactggtggagttgggtccgccagcccccagggaaggggctggagtggattggggaaatctatcatagtgggagcaccaactacaacccgtccctcaagagtcgagtcaccatatcagtagacaagtccaagaaccagttctccctgaagctgagctctgtgaccgccgcggacacggccgtgtattactgtgcgagagcgatacgatttttggagtggtactactactttgactactggggccagggaaccctggtcaccgtctcctcag

SEQ ID NO: 4188 - DNA, 367 bp, Homo sapiens
caggtgcagctgcaggagtcgggcccaggactggtgaggccttcggggaccctgtccctcacctgcgctgtctctggtgactccatcagcagtagtaactggtggacttgggtccgccagcccccagggaaggggctggagtggattggggaaatctttcatagtgggagctccaactacaacccgtccctcaagagtcgagtcaccatatcagttgacaagtccaagaaccagttctccctgaacctgagctctgtgaccgccgcggacacggccgtgtattactgtgcgagaggcggcccgtacgatttttggagtggacagattgactactggggccagggaaccctggtcaccgtctcctcag

SEQ ID NO: 4189 - DNA, 367 bp, Homo sapiens
caggtgcagctgcaggagtcgggcccaggactggtgaagccttcggggaccctgtccctcacctgcgctgtctctggtggctccatcagcagtagtaactggtggagttgggtccgccagcccccagggaaggggctggagtggattggggaaatctatcatagtgggagcaccaactacaacccgtccctcaagagtcgagtcaccatatcagtagacaagtccaagaaccagttctccctgaagctgagctctgtgaccgccgcggacacggccgtgtattactgtgcgagaggaccctcgtccggtattctgttggggtactttgactactggggccagggaaccctggtcaccgtctcctcag

SEQ ID NO: 4190 - DNA, 373 bp, Homo sapiens
gaggtgcagctgttggagtctgggggaggcttggtacagcctggggggtccctgagactctcctgtgcagcctctggattcacctttagcagctatgccatgagctgggtccgccaggctccagggaaggggctggagtgggtctcagctattagtggtagtggtggtagcacatactacgcagactccgtgaagggccggttcaccatctccagagacaattccaagaacacgctgtatctgcaaatgaacagcctgagagtcgaggacacggccgtatattactgtgcgaaagatactcttttggagtggttattatttccccatgcttttgatatctggggccaagggacaatggtcaccgtctcttcag

SEQ ID NO: 4191 - DNA, 372 bp, Homo sapiens
caggtgcagctggtgcagtctggggctgaggtgaagaagcctgggtcctcggtgaaggtctcctgcaaggcttctggaggcaccttcagcagctatgctatcagctgggtgcgacaggcccctggacaagggcttgagtggatgggagggatcatccctatctttggtacagcaaactacgcacagaagttccagggcagagtcacgattaccgcggacgaatccacgagcacagcctacatggagctgagcagcctgagatctgaggacacggccgtgtattactgtgcgagggggaccctagggcagtggctgctgtactactacggtatggacgtctggggccaagggaccacggtcaccgtctcctca

SEQ ID NO: 4192 - DNA, 375 bp, Homo sapiens
caggtgcagctgcaggagtcgggcccaggactggtgaagccttcggagaccctgtccctcacctgcactgtctctggtggctccgtcagcagtggtagttactactggagctggatccggcagcccccagggaagggactggagtggattgggtatatctattacagtgggagcaccaactacaacccctccctcaagagtcgagtcatcatatcagtagacacgtccaagaaccagttctccctgaagctgagctctgtgaccgctgcggacacggccgtgtattactgtgcgagccatggcggtgaactggaactcccctactactacggtatggacgtctggggccaagggaccacggtcaccgtctcctca

SEQ ID NO: 4193 - DNA, 376 bp, Homo sapiens
caggtgcagctgcaggagtcgggcccaggactggtgaagccttcacagaccctgtccctcacctgcactgtctctggtggctccatcagcagtggtggttactactggagctggatccgccagcacccagggaagggcctggagtggattgggtacatctattacagtgggagcacctactacaacccgtccctcaagagtcgagttaccatatcagtagacacgtctaagaaccagttctccctgaagctgagctctgtgactgccgcggacacggccgtgtattactgtgcgagagtacgtcaatcaggtatagcagcagctggtagcagacatgactactggggccagggaaccctggtcaccgtctcctcag

SEQ ID NO: 4194 - DNA, 375 bp, Homo sapiens
caggtgcagctgcaggagtcgggcccaggactggtgaagccttcacagaccctgtccctcacctgcagtgtctctggtggctccatcagcagtggtggttactactggagctggatccgccagcacccagggaagggcctggagtggattgggttcatctattacggtgggagcacctactacaacccgtccctcaagagtcgagttaccatatcattagacacgtctgagaaccagttctccctgaagctgagctctgtgactgccgcggacacggccgtgtattactgtgcgagcgagtctctggcggctacggtgactcctgactacggtatggacgtctggggccaagggaccacggtcaccgtctcctca

SEQ ID NO: 4195 - DNA, 372 bp, Homo sapiens
gaagtgcagctggtggagtctgggggaggcttggtacagcctggcaggtccctgagactctcctgtggagcctctggattcacctttgatgattatgccatgcactgggtccggcaagctccagggaagggcctggagtgggtctcaagtattagttggaatagtggtatcataggctatgcggactctgtgaagggccgattcatcatctccagagacaacgccaagaactccctgtatctgcatatgagcagtctgagagctgaggacacggccttgtattactgtgcaaaagaagttcaggggggtgattactactactactacggtatggacgtctggggccaagggaccacggtcaccgtctcctca

SEQ ID NO: 4196 - DNA, 372 bp, Homo sapiens
gaagtgcagctggtggagtctgggggaggcttggtacagcctggcaggtccctgagactctcctgtgcagcctctggattcacctttgatgattatgccatgcactgggtccggcaacctccagggaagggcctggagtgggtctcaggtattagttggaatagtggtaacataggctatgcggactctgtgaagggccgattcaccatctccagagacaacgccaagaactccctgtatctgcaaatgaacagtctgagagttgaggacacggccttgtattactgtgcaaaagatacgggtagtgggaggtacttctactactacgctatggacgtctggggccaagggaccacggtcaccgtctcctca

SEQ ID NO: 4197 - DNA, 373 bp, Homo sapiens
gaggtgcagttggtggagtctgggggaggcttggtccagcctggggggtccctgagactctcctgttcagcctctggattcacgctcagtaactattggatgagttgggtccgccaggctccagggaaggggctggtgtgggtggccaacataaaccaagatggacgtagagtatactatgtggactccgtgaagggccgattcaccatctccagagacaacgccgagaactcactgtttctgcaagtgaacagcctgagagccgaggacacggctgtgtatttctgtaccagattagggacccacacgacacatagcaatggctggtatatggacgtctggggcatagggaccacggtcaccgtctcctcag

SEQ ID NO: 4198 - DNA, 373 bp, Homo sapiens
caggtgcagctggtgcagtctggggctgaggtgaagaagcctggggcctcagtgaaggtttcctgtaaggcatctggatacaccttcaccagctactatatgcactgggtgcgacaggcccctggacaagggcttgagtggatgggaataatcaaccctagtggtggtagcacaagctacgaacagaagttccagggcagagtcaccatgaccagggacacgtccacgagcacagtctacatggagctgagcagcctgagatctgaggacacggccgtgtattactgtgcgcgtagtgggagctacctccctctaggcccccgtcgggcttttgatatctggggccaagggacaatggtcaccgtctcttcag

SEQ ID NO: 4199 - DNA, 373 bp, Homo sapiens
gaggtgcagctggtggagtctgggggaggcttggtccagcctggggggtccctgagactctcctgtgcagcctctggattcacctttggaagctattggatgagctgggtccgccaggctccagggaaggggctggagtgggtggccagcactaagcaagatggacttaaaaaatattatgtggagtctgtgaagggccgattcaccatctccagagacaacgccaaggactcgctgtttctgcaaatgaacagcctgagagccgaggacacggctgtttattactgtgcgacattagatggttcagggagttatgcctctacaagtaggttcgacccctggggccagggaaccctggtcaccgtctcctcag

SEQ ID NO: 4200 - DNA, 372 bp, Homo sapiens
gaggtgcagctgttggagtctgggggaggcttggtacagcctggggggtccctgagactgtcctgtgcagcctctggattcacctttagtagctacgccatcacctgggtccgccaggctccagggaaggggctggagtgggtctctgttatcagtggtggtgctggtaccacatactacgcagactccgtgaagggccggttcaccatctccagagacaattccaagaacacgatgtatctgcaaatgaacagcctgagagccgaggacacggccgtatattactgtgcgaaaatgaggggtgacactggttactactactattacggtatggacgtctggggccaagggaccacggtcaccgtctcctca

SEQ ID NO: 4201 - DNA, 352 bp, Homo sapiens
gaggtgcagctggtggagtctggaggaggcttgatccagcctggggggtccctgagactctcctgtgcagcctctgggttcaccgtcagtagcaactacatgagctgggtccgccaggctccagggaaggggctggagtgggtctcagttatttatagcggtggtagcacatactacgcagactccgtgaagggccgattcaccatctccagagacaattccaagaacacgctgtatcttcaaatgaacagcctgagagccgaggacacggccgtgtattactgtgcgagagattacggtgacttcttctttgactactggggccagggaaccctggtcaccgtctcctcag

SEQ ID NO: 4202 - DNA, 355 bp, Homo sapiens
gaggtgcagctggtggagtctgggggaggcttggtacagcctggagggtccctgagactctcctgtgcagcctctggattcaccttcagtagttatgaaatgaactgggtccgccaggctccagggaaggggctggagtgggtttcatacattagtagtagtggtagtaccatatactacgcagactctgtgaagggccgattcaccatctccagagacaacgccaagaactcactgtatctgcaaatgaacagcctgagagccgaggacacggctgtttattactgtgcgagaggctttagcagtggctggtaccactactggggccagggaaccctggtcaccgtctcctcag

SEQ ID NO: 4203 - DNA, 373 bp, Homo sapiens
gaggtgcagctggtggagtctgggggaggtgtggtacggcctggggggtccctgagactctcctgtgcagcctctggattcacctttgatgattatggcatgagctgggtccgccaagctccagggaaggggctggagtgggtctctggtattaattggaatggtggtagcacaggttatgcagactctgtgaagggccgattcaccatctccagagacaacgccaagaactccctgtatctgcaaatgaacagtctgagagccgaggacacggccttgtatcactgtgcgagagggctcacgacctacggtggtaactccggatggtacttcgatctctggggccgtggcaccctggtcactgtctcctcag

SEQ ID NO: 4204 - DNA, 358 bp, Homo sapiens
caggtgcagctgcaggagtcgggcccaggactggtgaagccttcacagaccctgtccctcacctgcactgtctctggtggctccatcagcagtggtgattactactggagttggatccgccagcccccagggaagggcctggagtggattgggtacatctattacagtgggagcacctactacaacccgtccctcaagagtcgagttaccatatcagtagacacgtccaagaaccagttctccctgaagctgagctctgtgactgccgcagacacggccgtgtattactgtgccagatcggggccagtatatgcttttgatatctggggccaagggacaatggtcaccgtctcttcag

SEQ ID NO: 4205 - DNA, 355 bp, Homo sapiens
gaggtgcagctggtggagtctgggggaggcttggtacagcctggagggtccctgagactctcctgtgcagcctctggattcaccttcagtagttatgaaatgaactgggtccgccaggctccagggaaggggctggagtgggtttcatacattagtagtagtggtagtaccatatactacgcagactctgtgaagggccgattcaccatctccagagacaacgccaagaactcactgtatctgcaaatgaacagcctgagagccgaggacacggctgtttattactgtgcgaggggggttcagtaccagctgctaaacctctggggccagggaaccctggtcaccgtctcctcag

SEQ ID NO: 4206 - DNA, 355 bp, Homo sapiens
gaggtgcagctggtggagtctgggggaggcttggtccagcctggggggtccctgagactctcctgtgcagcctctggattcacctttagtagctattggatgagctgggtccgccaggctccagggaaggggctggagtgggtggccaacataaagcaagatggaagtgagaaatactatgtggactctgtgaagggccgattcaccatctccagagacaacgccaagaactcactgtatctgcaaatgaacagcctgagagccgaggacacggctgtgtattactgtgcgagagggggatacagctatggctcggactactggggccagggaaccctggtcaccgtctcctcag

SEQ ID NO: 4207 - DNA, 363 bp, Homo sapiens
caggtgcagctggtgcagtctggggctgaggtgaagaagcctgggtcctcggtgaaggtctcctgcaaggcttctggaggcaccttcagcagctatgctatcagctgggtgcgacaggcccctggacaagggcttgagtggatgggagggatcatccctatctttggtacagcaaactacgcacagaagttccagggcagagtcacgattaccgcggacgaatccacgagcacagcctacatggagctgagcagcctgagatctgaggacacggccgtgtattactgtgcgagagacggcggggggcactacggtggaggtatggacgtctggggccaagggaccacggtcaccgtctcctca

SEQ ID NO: 4208 - DNA, 363 bp, Homo sapiens
caggttcagctggtgcagtctggagctgaggtgaagaagcctggggcctcagtgaaggtctcctgcaaggcttctggttacacctttaccagctatggtatcagctgggtgcgacaggcccctggacaagggcttgagtggatgggatggatcagcgcttacaatggtaacacaaactatgcacagaagctccagggcagagtcaccatgaccacagacacatccacgagcacagcctacatggagctgaggagcctgagatctgacgacacggccgtgtattactgtgcgacgttgaagaattactactactactacggtatggacgtctggggccaagggaccacggtcaccgtctcctca

SEQ ID NO: 4209 - DNA, 363 bp, Homo sapiens
gaggtgcagctggtggagtccgggggaggcttagttcagcctggggggtccctgagactctcctgtgcagcctctggattcaccttcagtttctactggatgcactgggtccgccaggctccagggaaggggctggtgtgggtctcacgtattaatagtgatgggagtagtacaagttacgcggactccgtgaagggccgattcaccatctccagagacaacgccaagaacacgctgtatctgcagatgaacagtctgagagccgaggacacggctgtgtattactgtgcaagagagcatatagcagcagctggggttagtatggacgtctggggccaagggaccacggtcaccgtctcctca

SEQ ID NO: 4210 - DNA, 360 bp, Homo sapiens
gaggtgcagctggtggagtctggaggaggcttgatccagcctggggggtccctgagactctcctgtgcagcctctgggttcaccgtcagtagcaactacatgagctgggtccgccaggctccagggaaggggctggagtgggtctcaatgatttatagcggtggtagcacatactacgcagactccgtgaagggccgattcaccatctccagagacaattccaagaacacgctgtatcttcaaatgaacagcctgagagccgaggacacggccgtgtattattgtgcgagagacccgatgggtcgctactactacggtatggacgtctggggccaagggaccacggtcaccgtctcctca

SEQ ID NO: 4211 - DNA, 361 bp, Homo sapiens
cagctccatctacagcagtggggcgctggactgttgaagccttcggagaccctgtcccgcacttgcgctgtctatggtgggtccttcagtggttactactggagctggatccgccagtccccagggaaggggctggagtggattggggaaatcaatcatagtggaagcaccaactacaacccgtccctcgagagtcgagtcaccatatcagtagacacgtccaagaaccagttctccctgaggctgggctctgtgaccgccgcggacacggctgtgtatttctgtgcgagaggccaaaatcgctacggtgactacgttattgactactggggccagggaaccctggtcaccgtctcctcag

SEQ ID NO: 4212 - DNA, 355 bp, Homo sapiens
caggtgcacctggtggagtcgggggggcgcgtggtgcagtcagggaggtccctgagactctcctgtgtagcctctggattcacttttaggagctatggcatgctttgggtccgacaggctccaggcaaggggctggagtgggtggcggctatatctgatgatggagggaataaattctattcagactccgtgaggggccgattcaccatttccagagacaattccaggaacacgctatatttgcagatgaacagcctgagagttgttgaaacggctgtctattactgtgccatgacgcggagtggccaaaactttgactactggggccagggaaccctggtcaccgtctcctcag

SEQ ID NO: 4213 - DNA, 361 bp, Homo sapiens
gaggtgcagctggtggagtctggaggaggcttgatccagcctggggggtccctgagactctcctgtgcagcctccgggctcaccgtcagtagcaactacatgagctgggtccgccaggctccagggaaggggctggagtgggtctcagtcatttatagcggtggtagcacatactacgcagactccgtgaagggccggttcaccatctccagagacaattccaagaacacgctgtatcttcaaatgaacagcctgagagccgaggacacggccgtgtatcactgtgcgaggtcgttagcagtggctgcccccggtgtttttgatatctggggccaagggacaatggtcaccgtctcttcag

SEQ ID NO: 4214 - DNA, 364 bp, Homo sapiens
caggtgcagctggtggagtctgggggaggcgtggtccagcctgggaggtccctgagactctcctgtgcagcctctggattcaccttcggtagctatgctatgcactgggtccgccaggctccaggcaaggggctagagtgggtggcagtcatatcatttgatggaagcaatcaatactacgcagactccgtgaagggccgattcaccatctccagagacaattccaagcacacactgtatgtgcagatgaacagcctgagacctgaggacacggctgtgtactactgtgcgagaccgcatagtagtggttatcagtctgcttttgatatctggggccaagggacaatggtcaccgtctcttcag

SEQ ID NO: 4215 - DNA, 364 bp, Homo sapiens
caggtgcagctggtggagtctgggggaggcgtggtccagcctgggaggtccctgagactctcctgtgcagcctctggattcaccttcagtgcctatggcatgccctgggtccgccaggctccaggcaaggggctggagtgggtggcaattatatcatatgatggaagtaataaatactatgcagactccgtgaagggccgattcaccatctccagagacaattccaagaacacgctgtatctgcaaatgaacagcctgagagctgaggacacggctgtgtattactgtgcgaaagctggaagtgggagctactatgatgtttttgatatctggggccaagggacaatggtcaccgtctcttcag

SEQ ID NO: 4216 - DNA, 364 bp, Homo sapiens
caggtgcagctggtggagtctgggggaggcgtggtccagcctgggaggtccctgagactctcctgtgcagcctctggattcaccttcagtagctatgccatgcactgggtccgccagggtccaggcaaggggctggagtgggtggcagttatatcatatgatggaattaataaatactatgcagactccgtgaagggccgattcaccatctcccgagacaattccaagaacacgctgtatctgcaaatggatagcctgagagctgaggacacggctgtctattactgtgcgaaaacctatagtggaaattacttttctgctttcgatatctggggccaagggacaatggtcaccgtctcttcag

SEQ ID NO: 4217 - DNA, 370 bp, Homo sapiens
gaggtgcagctggtggagtctgggggaggcttggtccagcctggagggtccctgagaatctcctgtgcagcgtctggattcaccttcagtgaccattacatggactgggtccgccaggctccagggaaggggctggagtgggttggccgctccagaaacagagccgatggaagcaccgctgagtacgccgcatctgtgaaaggcagatttaccatctcgagagatgattcaaagaactcactatatctgcaaatggacagcctgaaaaccgaggacacggccgtgtatttttgtactagagggcgactgagtgcgaggtaccggggattcgattggtggggcccgggaaccctggtcatcgtctcctcag

SEQ ID NO: 4218 - DNA, 364 bp, Homo sapiens
gaggtgcagctggtgcagtctggagcagaggtgaaacagcccggggagtctctgaagatctcctgtaaggcttctggatacagctttagcaactactggatcgcctgggtgcgccagatgcccgggaaaggcctggactggatgggaatcgtctatcttactgactctaatattatatatagtccgaccttccaaggccaggtcaccatctcagtcgacaagtccaccagcaccgcccacttgcagtccagcagcctgaagacctcggacaccgccatgtactactgtgcgagccctgggagttacaacaccggcgatgcttttgatatctggggccaagggacgttggtcaccgtctcttcag

SEQ ID NO: 4219 - DNA, 364 bp, Homo sapiens
gaggtgcagctggtggagtctgggggaggcttggtccagccgggggggtccctaagactctcctgtgcagcctctggattcaccttcagcaacagttggatgagctgggtccgccaggctccagggaaggggctggagtgggtggccaacataaagcaagatggaagtgacgaatactatgtggactctgtgaagggccgattcaccatctccagagacaacgccaagaactcactgtatttgcaaatgaacagcctgagaggcgaggacacggctgtgtattactgtgcgagggacgcgataccagctaggccgaactactatgactactggggcctgggaaccctggtcaccgtctcctcag

SEQ ID NO: 4220 - DNA, 364 bp, Homo sapiens
gaggtgcagctggtggagtctgggggaggcttggtccagcctggggggtccctgagactctcctgtgcagcctctggattcacctttagtagctattggatgagctgggtccgccaggctccagggaaggggctggagtgggtggccaacataaagcaagatggaagtgagaaatactatgtggactctgtgaagggccgattcaccatctccagagacaacgccaagaactcactgtatctgcaaatgaacagcctgagagccgaggacacggctgtgtattactgtgccaaacgatattttgactggcgcgatacctactttgactactggggccagggaaccctggtcaccgtctcctcag

SEQ ID NO: 4221 - DNA, 364 bp, Homo sapiens
gaggtgcagctggtggagtctgggggaggcttggtccagcctggggggtccctgagactctcctgtgcagcctctggattcacctttagtacctattggatgagctgggtccgccaggctccagggaaggggctggagtgggtggccaacacaaaagaagatggaagtgagacatactatgtggactctgtgaggggccgattcaccatctccagagacaacgccaagaactcactgtatctgcaaatgaacagcctgagagccgacgacacggctgtgtattactgtgcgagagatcgagagcagtggctggtatcctcgtatgactactggggccagggaaccctggtcaccgtctcctcag

SEQ ID NO: 4222 - DNA, 364 bp, Homo sapiens
caggtgcagctggtgcagtctggggctgaggtgaagaagcctggggcctcagtgaaggtctcctgcaaggcttctggatacaccttcaccggctactatatgcactgggtgcgacaggcccctggacaagggcttgagtggatgggatggatcaaccctaacagtggtggcacaaactatgcacagaagtttcagggcagggtcaccatgaccagggacacgtccatcagcacagcctacatggagctgagcaggctgagatctgacgacacggccgtgtattactgtgcgagagaaatggcagtggctggactccccgcaaatgactactggggccagggaaccctggtcaccgtctcctcag

SEQ ID NO: 4223 - DNA, 364 bp, Homo sapiens
caggtgcagctggtgcagtctggggctgaggtgaagaagcctggggcctcagtgaaggtctcctgtaaggcttctggatacaccttcaccagtcatgatatcaactgggtgcgacaggcccctggacaagggcttgagtggatgggatggatgaaccctaacggtggtaacacaggctatgcacagaacttccaggacagagtcaccatgaccagggacacctccataagcacagtctacatggagctgagcagcctgagatctgacgacacggccgtctattactgtgcgagagtcgtttgtagtactatcacctgctaccttgactgctggggccagggaaccctggtcaccgtctcctcag

SEQ ID NO: 4224 - DNA, 364 bp, Homo sapiens
gaagtgcagctggtggagtctgggggaggcttggtacagcctggcaggtccctgagactctcctgtgcagcctctggattcacctttgatgattatgccatgcactgggtccggcaagctccagggaagggcctggagtgggtctcaggtattagttggaatagtggtagcataggctatgcggactctgtgaagggccgattcaccatctccagagacaacgccaagaactccctgtatctgcaaatgaacagtctgagagctgaggacacggccttgtattactgtgcaaaagataaaagatggctacaaggtagctggatcgactactggggccagggaaccctggtcaccgtctcctcag

SEQ ID NO: 4225 - DNA, 364 bp, Homo sapiens
caggtgcagctggtggagtctgggggaggcgtggtccagcctgggaggtccctgagactctcctgtgcagcctctggattcaccttcagtagctatggcatgcactgggtccgccaggctccaggcaaggggctggagtgggtggcagttatatcatatgatggaagtaataaatactatgcagactccttgaagggccgattcaccgtctccagagacaattccaagaacacgctttatctgcaaatgaacagcctgagagctgaggacacggctgtgtattactgtgcgaaaggagagcgggggagctactccgaatatttccagcattggggccagggcaccctggtcaccgtctcctcag

SEQ ID NO: 4226 - DNA, 364 bp, Homo sapiens
caggtgcagctggtggagtctgggggaggcgtggtccagcctgggaggtccctgagactctcctgtgcagcctctggattcaccttcagtagctatggcatgcactgggtccgccaggctccaggcaaggggctggagtgggtggcagttatatcatatgatggaagtaataaatactatgcagactccgtgaagggccgattcaccatctccagagacaattccaagaacacgctgtatctgcaaatgaacagcctgagagctgaggacacggctgtgtattactgtgcgaaaagtctgagtgggagctactacggcccgtttgactactggggccagggaaccctggtcaccgtctcctcag

SEQ ID NO: 4227 - DNA, 362 bp, Homo sapiens
caggtgcagctggtggagtctgggggaggcgtggtccagcctgggaggtccctgagactctcctgttcagcctctggattcaccttcagtagttttcctatgcactgggtccgccaggctccaggcaaggggctggaatgcgtggcagttatatcacatgatggaaacaataaatattacacagagtccgtgaagggccgattcaccatctccagagacaattccaagagcaccctgtatctacaaatgaacagcgtgagagctgacgacacggctatgtattactgtgcgagaattccgtccaccagtggctggtccaccgggtcatactggggccagggaaccctggtcaccgtctcctc

SEQ ID NO: 4228 - DNA, 364 bp, Homo sapiens
caggtgcagctggtggagtctgggggaaacgtggtccagcctgggaggtccctgagactctcctgtgcagcctctggattcaccttcagtacctatgctattcactgggtccgccaggctccaggcaaggggctgcagtgggtggcagttatatcatatgatggatataataaatactacgcagactccgtgaagggccgattcaccatctccagagacaattccaaaaacacgctgtatctgcaaatgaacagcctgagagctgaggacacggctgtgtattactgtgcgaggccccaaagtgggaactacttgggggattttgactactggggccagggaaccctggtcaccgtctcctcag

SEQ ID NO: 4229 - DNA, 364 bp, Homo sapiens
caggtgcagctggtggagtctgggggaggcgtggtccagcctgggaggtccctgagactctcctgtgcagcctctggattcaccttcagtagctatggcatgcactgggtccgccaggctccaggcaaggggctggagtgggtggcagttatatcatatgatggaagtaataaatactatgcagactccgtgaagggccgattcaccatctccagagacaattccaagaacacgctgtatctgcaaatgaacagcctgagagctgaggacacggctgtgtattactgtgcgaaagggtatagtgggagctactacgcctactttgactactggggccagggaaccctggtcaccgtctcctcag

SEQ ID NO: 4230 - DNA, 364 bp, Homo sapiens
caggtgcagctggtggagtctgggggaggcgtggtccagcctgggaggtccctgagactctcctgtgcagcctctggattcatcttcagtagctatgccatgcactgggtccgccaggctccaggcaaggggctggagtgggtggcagttatatcatatgatggaagtaatcaatattacgcagactccgtgaagggccgattcaccatctccagagacaattccaagaacacgctatatctgcaaatgaacagcctgagagctgaggacacggctgtgtattactgtgggaaagccggggaagggaattattataacccaattgactactggggccagggaaccctggtcaccgtctcctcag

SEQ ID NO: 4231 - DNA, 364 bp, Homo sapiens
gaggtgcagctggtggagtctgggggaggcctggtcaagcctggggggtccctgagactctcctgtgcagcctctggattcaccttcagtagctatagcatgaactgggtccgccaggctccagggaaggggctggagtgggtctcatccattagtagtagtagtagttacatatactacgcagactcagtgaagggccgattcaccatctccagagacaacgccaagaactcactgtatctgcaaatgaacagcctgagagccgaggacacggctgtgtattactgtgcgagagggaggtacggtgactatgaaaactggttcgacccctggggccagggaaccctggtcaccgtctcctcag

SEQ ID NO: 4232 - DNA, 364 bp, Homo sapiens
gaggtgcagctggtggagtctgggggaggcctggtcaagcctggggggtccctgagactctcctgtgcagcctctggattcaccttcagtagctatagcatgaactgggtccgccaggctccagggaaggggctggagtgggtctcatccattagtagtagtagtagttacatatactacgcagactcagtgaagggccgattcaccatctccagagacaacgccaagaactcactgtatctgcaaatgaacagcctgagagccgaggacacggctgtgtattactgtgcgagagctggattcctggtgtatgctgccccctttgactactggggccagggaaccctggtcaccgtctcctcag

SEQ ID NO: 4233 - DNA, 364 bp, Homo sapiens
gaggtgcagctggtgcagtctggaccagaggtgaaaaagtccggggagtctttgaagatctcctgtagggcttctggatactactttcccagttactggatcggctgggtgcgccagatgcccgggagaggcctggagtggatggggatcatctatcctggtgactctgagaccacatacagcccgtccttcgaaggccaggtcaccatctcagccgacaggtccatcaataccgcctacctgcagtggagcagcctgaaggcctcggacaccggcatatattactgtgcgagaccccattattatggttcggggagccccgccggctactggggccagggaaccctggtcaccgtctcctcag

SEQ ID NO: 4234 - DNA, 359 bp, Homo sapiens
gaggtgcagctggtgcagtctggagcagaggtgaaaaagcccggggagtctctgaagatctcctgtaagggttctggatactactttcccagctactggatcggctgggtgcgccagatgcccgggaaaggcctggagtggatggggatcatctatcctggtgactctgataccacttacagcccgtccttccgaggccaggtcaccatctcagccgacaagtccatcagcaccgcctacctgcagtggaacagcctgaaggcctcggacaccgccatatattactgcgcgagacccttttactatggttcggggagtcccctgggctactggggccagggaaccctggtcaccgtctc

SEQ ID NO: 4235 - DNA, 361 bp, Homo sapiens
cagggtcagctggtgcagtctggaggtgaggtgaagaagcctggggcctcagtgaaggtctcctgcaaggcttctggttacacctttaccagttatggtatcacctgggtgcgacaggcccctggacaagggcttgagtggatgggatggatcagcgtttacaatggtaacacaaaccatgcacagaagttccagggcagagtcaccatgaccacagacacatccacgagcacaacctacatggagttgaggagcctgagatatgacgacacggccgtatattactgtgcgacaagtagcggaacgggggatacagctatgggatactggggccagggaaccctggtcaccgtctcctcag

SEQ ID NO: 4236 - DNA, 358 bp, Homo sapiens
caggtgcagctacagcagtggggcgcaggactgttgaagccttcggagaccctgtccctcacctgcgctgtctatggtgggtccttcagtggttactactggagctggatccgccagcccccagggaaggggctggagtggattggggaaatcaatcatagtggaagcaccaactacaacccgtccctcaagagtcgagtcaccatatcagtagacacgtccaagaaccacttctccctgaagctgagctctgtgaccgccgcggacacggctgtgtattactgtgcgagagggcgttggggatttagtggcttaccaggatactggggccagggaaccctggtcaccgtctcctcag

SEQ ID NO: 4237 - DNA, 361 bp, Homo sapiens
caggtgcagctggtgcagtctggggctgaggtgaagaggcctggggcctcagtgaaggtctcctgcaaggcttctggatatagcttcaccggctactatatgcactgggtgcgacaggcccctggacaagggcttgagtggatgggatggatcaaccctaacagcggtgtcacaaactttgcacagcagtttcagggcagggtcaccatgaccagtgacacgtccatcagcacggcctacatggagctgagcaggctgagatctgacgacacggccgtttattactgtgcgaattttttagcaataaccctcgaacacgttgactactggggccagggaaccctggtcaccgtctcctcag

SEQ ID NO: 4238 - DNA, 361 bp, Homo sapiens
caggtgcagctggtgcagtctggggctgaggtgaagaagcctggggcctcagtgaaggtctcctgcaaggcttctggatacaccttcaccggctactatttgcactgggtgcgacaggcccctggacaagggcttgagtggatgggatggatcaaccctaacagtggtggcacaaggtatgcagagaagtttcagggcagggtcaccatgaccagggagatgtccatcagcacagcctacatggacctgagtaagctgacatctgacgacacggccgtgtattattgtgtaagagtggcggatagtagcagctggtactttgactactggggccagggaaccctggtcaccgtctcctcag

SEQ ID NO: 4239 - DNA, 358 bp, Homo sapiens
caggtgcagctgcaggagtcgggcccaggactggtgaagccttcggagaccctgtccctcacctgcactgtctctggtggctccatcagtagttactactggagctggatccggcagcccccagggaagggactggagtggattgggtatatctattacagtgggagcaccaactacaacccctccctcaagagtcgagtcaccatatcagtagacacgtccaagaaccagttctccctgaagctgagctctgtgaccgctgcggacacggccgtgtattactgtgcgagaggtagcagtggctggttcccccactttgactactggggccagggaaccctggtcaccgtctcctcag

SEQ ID NO: 4240 - DNA, 361 bp, Homo sapiens
caggtgcagctggtggagtctgggggaggcgtggtccagcctgggaggtccctgagactctcctgtgcagcctctggattcatattcagtagctatgctatccactgggtccgccaggctccaggcaaggggctggagtgggtggcagttatatcatatgatggagacaataaatactacgcagactccgtgaagggccgattcaccatctccagggacaattccaagaacacgctgtatctgcaaatgaacagcctgagagctgaggacacggctgtgtattactgtgcgagaggtagtgggaactacttaacatacttccagcactggggccagggcaccctggtcaccgtctcctcag

SEQ ID NO: 4241 - DNA, 361 bp, Homo sapiens
gaggtgcagctgttggagtctgggggaggcttggtacagcctggggggtccctgagactctcctgtgcagcctctggattcaccttcagctactatgccatgagctgggtccgccaggctccagggaaggggctggagtgggtctcaagtattagtggaagtggtggtaacacataccacgcagactccgtgaagggccggttcaccatctccagagacaattccaagaacacgctgtatctgcaaataaacagcctgagagccgaggacacggccgtatattactgtgcgaaagatctttctctgttctatagcagccctttctactggggccagggaaccctggtcaccgtctcctcag

SEQ ID NO: 4242 - DNA, 361 bp, Homo sapiens
gaggtgcagctggtggagtctgggggaggcttggtccagcctggggggtccctgagactctcctgtgcagcctctggattcacctttagtagctattggatgagctgggtccgccaggctccagggaaggggctggagtgggtggccaacataaagcaagatggaagtgagaaatactatgtggactctgtgaagggccgattcaccatctccagagacaacgccaagaactcactgtatctgcaaatgaacagcctgagagccgaggacacggctgtgtattactgtgcgagagatgtatatagcaactctaatagttttgactactggggccagggaaccctggtcaccgtctcctcag

SEQ ID NO: 4243 - DNA, 361 bp, Homo sapiens
gaggtgcagctggtggagtctgggggaggcttggtccagcctggggggtccctgagactctcctgtgcagcctctggattcacctttagtagctattggatgagctgggtccgccaggctccagggaaggggctggagtgggtggccaacataaagcaagatggaagtgagaaatactatgtggactctgtgaagggccgattcaccatctccagagacaacgccaagaactcactgtatctgcaaatgaacagcctgagagccgaggacacggctgtgtattactgtgcgaggagctttagcagcagctggtactactttgactactggggccagggaaccctggtcaccgtctcctcag

SEQ ID NO: 4244 - DNA, 364 bp, Homo sapiens
cagctgcagctgcaggagtcgggcccaggactggtgaagccttcggagaccctgtccctcacctgcactgtctctggtggctccatcagcagtagtagttactactggggctggatccgccagcccccagggaaggggctggagtggattgggagtatctattatagtgggagcacctactacaacccgtccctcaagagtcgagtcaccatatccgtagacacgtccaagaaccagttctccctgaagctgagctctgtgaccgccgcagacacggctgtgtattactgtgcgagacatccgctacgattacgctactactttgactactggggccagggaaccctggtcaccgtctcctcag

SEQ ID NO: 4245 - DNA, 361 bp, Homo sapiens
caggtgcagctggtggagtctgggggaggcttggtcaagcctggagggtccctgagactctcctgtgcagcctctggattcaccttcagtgactactacatgagctggatccgccaggctccagggaaggggctggagtgggtttcatacattagtagtagtggtagtaccatatactacgcagactctgtgaagggccgattcaccatctccagggacaacgccaagaactcactgtatctgcaaatgaacagcctgagagccgaggacacggccgtgtattactgtgcgagagctacggatttttggagtggccctattgactactggggccagggaaccctggtcaccgtctcctcag

SEQ ID NO: 4246 - DNA, 361 bp, Homo sapiens
caggtgcagctggtggagtctgggggagacgtggtccagcctgggaggtccctgagactctcctgtgcagcctctggattcaccttcagtagctatgctatacactgggtccgccaggctccaggcaaggggctggagtgggtgggacttatctcatatgatggaggcaataaatactacgcagactccgtgaagggccgattcaccatctccagagacaattccaagaacacgctgtatctgcaaatgagcagcctgagagctgaggacacggctgtttattactgtgcgagagggttcggggggacctactacgcgtttgactactggggccagggaaccctggtcaccgtctcctcag

SEQ ID NO: 4247 - DNA, 361 bp, Homo sapiens
caggtgcagctggtgcagtctggggctgaggtgaagaagcctgggtcctcggtgaaggtctcctgcaaggcttctggaggcaccttcagcagctatgctatcagctgggtgcgacaggcccctggacaagggcttgagtggatgggagggatcatccctatctttggtacagcaaactacgcacagaagttccagggcagagtcacgattaccgcggacgaatccacgagcacagcctacatggagctgagcagcctgagatctgaggacacggccgtgtattactgtgcgggcgggtatagcagtggctggtggggagtgtcgaggtggggccagggaaccctggtcaccgtctcctcag

SEQ ID NO: 4248 - DNA, 361 bp, Homo sapiens
cagatcaccttgaaggagtctggtcctacgctggtgaaacccacacagaccctcacgctgacctgcaccttctctggattctcactcagcactactgaaatgggtgtgggctggatccgtcagcccccaggaaaggccctggagtggcttgcactcatttattgggatgatgataagcgctacagcccatctctgacgagcaggctcaccatcaccaaggacacctccaaaaaccaggtggtccttacaatgaccaacatggaccctgtggacacagccacatattactgtgcacactatagcagcagcttgtactactttgactactggggccagggaaccctggtcaccgtctcctcag

SEQ ID NO: 4249 - DNA, 358 bp, Homo sapiens
caggtgcagctggtgcagtctggggctgaggtgaagaagcctggggcctcagtgagggtctcctgcaaggcttctggatacaccttcaccggctactatatgcactgggtgcgacaggcccctggacaagggcttgagtggatgggatggatcaaccctaacagtggtggcacaaactatgcacagaagtttcagggcagggtcaccatgaccagcgacacgtccatcactacagcctacatggaactgagcagcctgagatctgacgacacggccgtgtatttctgtgcgagtcattactttgatattaatggttaccacgactggggccagggaaccctggtcaccgtctcctcag

SEQ ID NO: 4250 - DNA, 358 bp, Homo sapiens
caggtgcagctggtgcagtctggggctgaggtgaagaagcctggggcctcagtgaaggtctcctgcaaggcttctggatacaccttcaccggctactatatgcactgggtgcgacaggcccctggacaagggcttgagtggatgggatggatcaaccctaacagtggtggcacaaactatgcacagaagtttcagggcagggtcaccatgaccagggacacgtccatcagcacagcctacatggagctgagcaggctgagatctgacgacacggccgtgtattactgtgcgagagagggacactcagtgggagctccctttggctggggccagggaaccctggtcaccgtctcctcag

SEQ ID NO: 4251 - DNA, 358 bp, Homo sapiens
gaggtgcagctggtgcagtctggagcagaggtgaaaaagcccggggagtctctgaagatctcctgtaagggttctggatacagctttaccagctactggatcggctgggtgcgccagatgcccgggaaaggcctggagtggatggggatcatctatcctggtgactctgataccagatacagcccgtccttccaaggccaggtcaccatctcagccgacaagtccatcagcaccgcctacctgcagtggagcagcctgaaggcctcggacaccgccatgtattactgtgcgagaccgggtatagcagcagctggtaccgactactggggccagggaaccctggtcaccgtctcctcag

SEQ ID NO: 4252 - DNA, 360 bp, Homo sapiens
gaagtgcagctggtggagtctgggggaggcttggtacagcctggcaggtccctgagactctcctgtgcagcctctggattcacctttgatgattatgccatgcactgggtccggcaagctccagggaagggcctggagtgggtctcaggtattagttggaatagtggtagcataggctatgcggactctgtgaagggccgattcaccatctccagagacaacgccaagaactccctgtatctgcaaatgaacagtctgagagctgaggacacggccttgtattactgtgcaaaagataactacggtgactactacggtatggacgtctggggccaagggaccacggtcaccgtctcctca

SEQ ID NO: 4253 - DNA, 358 bp, Homo sapiens
caggtacagttggtgcagtctggggctgaggtgaagaagcctggggcctcagtgaggatttcctgcaaggcatctggatacaccttcaccagttattatatacactgggtgcgacaggcccctggacagggacttgagtggatgggaataatcaaccccaatactggtagcacaacctacgcacaggggttccagggcagagtcagtatgaccggggacacgtccaggaccacagtctacctggacctgagcagcctgagatatgaagacacggccgttctttactgtgccagacaagcctatggtgcctatccttttgacatctggggccagggaaccctggtcaccgtctcctcag

SEQ ID NO: 4254 - DNA, 358 bp, Homo sapiens
caggtgcagctgcaggagtcgggcccaggactggtgaagccttcggggaccctgtccctcacctgcgctgtctctggtggctccatcagcattgttaactggtggaattggctccgccagcccccagggaaggggctggagtggattggggagatcgatcacagtgggaccactaattacaacccgtccctcgacagtcgagtcaccatttcaatagacacgtccaagaaccagttctccctgaaattgacctctgtgaccgccgcggacacggccgtgtattactgtgcgagaggccggaataaactctggtacttcgatctctggggccgtggcaccctcgtctctgtctcctcag

SEQ ID NO: 4255 - DNA, 357 bp, Homo sapiens
gaggtgcaactggtggagtctgggggagggttggtacagcctgggggatccctgagactctcctgtgcagcctctggattcaccttcagcagatatagtctgaactgggtccgccaggctccagggaaggggctggagtgggtttcatatatcagtagtgttagtcatctcatgtattatgtagactctgtgaagggccgattcaccgtctccagagacaatgccaagaactccctgtatctgcaaatgaacagcctgagagacgacgacacggctgtttattactgtgcgagagattttggggtgtcttacgctatggacgtctggggccaagggaccacggtcaccgtctcctca

SEQ ID NO: 4256 - DNA, 361 bp, Homo sapiens
cagctgcagctgcaggagtcgggcccaggactggtgaagccttcggagaccctgtccctcacctgcactgtctctggtggctccatcagcagtagtagttactactggggctggatccgccagcccccagggaaggggctggagtggattgggagtatctattatagtgggagcacctactacaacccgtccctcaagagtcgagtcaccatatccgtagacacgtccaagaaccagttctccctgaagctgagctctgtgaccgccgcagacacggctgtgtattactgtgcgagaaatgactacggtgacattatctttgactactggggccagggaaccctggtcaccgtctcctcag

SEQ ID NO: 4257 - DNA, 361 bp, Homo sapiens
caggtgcagctgcaggagtcgggcccaggactggtgaagccttcggagaccctgtccctcacctgcactgtctctggtgactccaccagcagtagtaattactactggggctggatccgccagcccccaggggtggggctggagtggattgggaatatctattatagtgggagcacctactacaacccgtccctcaagagtcgagtcaccatatccgttgacccgtccaagaaccagttctccctgaagctgggctctgtgaccgccgcagacacggctgtatattactgtgcgagggttgtagtgggagccgcacaagttgactactggggccagggaaccctggtcaccgtctccccag

SEQ ID NO: 4258 - DNA, 336 bp, Homo sapiens
gggaggtccctgagactctcctgtgcagcctctggattcaccttcaggagatatggcatgcactgggtccgccaggctccaggcaagggactggagtgggtggcagttatatcatataatggaggtaataaattctatgcagactccgtgaagggccgattcaccatctccagagacaattccaagaacacggtgtctctgctaatggacagcctgagacctgaggacacggctctatattactgtgtgggatattgtactagtaggtggtgctctctcccttactacttcggtatggacgtctggggccaagggaccacggtcaccgtctcctca

SEQ ID NO: 4259 - DNA, 378 bp, Homo sapiens
gaggtgcagctggtgcagtctggagcagaagtgaaaaagcccggggagtctctgaagatctcctgtcagggttctggatacatctttaccaactactggatcggctgggtgcgccagatgcccgggaaaggcctggagtggatggggaacatctatcctggtgactctgataccagatacagcccgtccttccaaggccaggtcaccatctcagccgacaagtccatcagtaccgcctacctgcagtggagcagcctgaaggcctcggacaccgccatgtattactgtgcgagactttcctggggctacggtggtagtcgatactactactacggtatggacgtctggggccaagggaccacggtcaccgtctcctca

SEQ ID NO: 4260 - DNA, 378 bp, Homo sapiens
gaggtgcagctggtggagtctgggggaggcttggtccagcctggggggtccctgagactctcctgtgcagcctctggattcacctttagcagctattggatgagctgggtccgccaggctccagggaaggggctggagtgggtggccaacataaggcaagatggaagggagaaatactatgtggactctgtgaagggccgattcaccatctccagagacaacgccaagaattcactgtatctgcaaatgaacagcctgagacccgaggacacggctgtgtattactgtgcgagaatagtggttatggtaggcggcgactactactactactacggtatggacgtctggggccaagggaccacggtcaccgtctcctca

SEQ ID NO: 4261 - DNA, 354 bp, Homo sapiens
gaggtgcagctggtggagtctggaggaggtttgatccagcctggggggtccctgagactctcctgtgcagcctctgggatcatcgtcagtagaaactacatgaactgggtccgccaggctccagggaaggggctggagtgggtctcagttatttatagcggtggtagtacatattatgtagactccgtgaagggccgattcaccatctccagagacgattccaagaacacgctgtatcttcaaatgaacagcctgagagccgaggacacggccgtgtattactgtgcgagagatctcgaaatagtagggggtatggacgtctggggccaagggaccacggtcaccgtctcctca

SEQ ID NO: 4262 - DNA, 378 bp, Homo sapiens
caggtgcagctggtgcagtctggggctgaggtgaagaagcctggggcctcagtgaaggtctcctgcaaggcttctggatacaccttcaccggctactatatgcactgggtgcgacaggcccctggacaagggcttgagtggatgggatggatcaaccctaacagtggtggcacaaactatgcacagaagtttcagggcagggtcaccatgaccagggacacgtccatcagcacagcctacatggagctgagcaggctgagatctgacgacacggccgtgtattactgtgcgatagggaccggtagtggctacgattatgggtactactactacggtatggacgtctggggccaagggaccacggtcaccgtctcctca

SEQ ID NO: 4263 - DNA, 375 bp, Homo sapiens
caggtgcagctgcaggagtcgggcccaggactggtgaagccttcggagaccctgtccctcacctgcactgtctctggtggctccatcagtagttactactggagctggatccggcagcccgccgggaagggactggagtggattgggcgtatctataccagtgggagcaccaactacaacccctccctcaagagtcgagtcaccatgtcagtagacacgtccaagaaccagttctccctgaagctgagctctgtgaccgccgcggacacggccgtgtattactgtgcgagagacttagtagtaccagctgctcgttactactactactacggtatggacgtctggggccaagggaccacggtcaccgtctcctca

SEQ ID NO: 4264 - DNA, 379 bp, Homo sapiens
caggtgcagctggtggagtctgggggaggcttggtcaagcctggagggtccctgagactctcctgtgcagcctctggattcaccttcagtgactactacatgagctggatccgccaggctccagggaaggggctggagtgggtttcatacattagtagtagtggtagtaccatatactacgcagactctgtgaagggccgattcaccatctccagggacaacgccaagaactcactgtatctgcaaatgaacagcctgagagccgaggacacggccgtgtattactgtgcgagaacccagcaggattactatgatagtagtggtccgggggggtactttgactactggggccagggaaccctggtcaccgtctcctcag

SEQ ID NO: 4265 - DNA, 292 bp, Homo sapiens
agtagctatggcatgcactgggtccgccaggctccaggcaaggggctggagtgggtggcagttatatcatatgatggaagtaataaatactatgcagactccgtgaagggccgattcaccatctccagagacaattccaagaacacgctgtatctgcaaatgaacagcctgagagctgaggacacggctgtgtattactgtgcgaaaggcttcggggtgtatagcagtggctggtactggcgagactactttgactactggggccagggaaccctggtcaccgtctcctcag

SEQ ID NO: 4266 - DNA, 387 bp, Homo sapiens
caggtacagctgcagcagtcaggtccaggactggtgaagccctcgcagaccctctcactcacctgtgccatctccggggacagtgtctctagcaacagtgctgcttggaactggatcaggcagtccccatcgagaggccttgagtggctgggaaggacatactacaggtccaagtggtataatgattatgcagtatctgtgaaaagtcgaataaccatcaacccagacacatccaagaaccagttctccctgcagctgaactctgtgactcccgaggacacggctgtgtattactgtgcaagatccttgtctgactacggtggtaactcctactactactacggtatggacgtctggggccaagggaccacggtcaccgtctcctca

SEQ ID NO: 4267 - DNA, 379 bp, Homo sapiens
gaggtgcagctgttggagtctgggggaggcttggtacagcctggggggtccctgagactctcctgtgcagcctctggattcacctttagcagctatgccatgagctgggtccgccaggctccagggaaggggctggagtgggtctcagctattagtggtagtggtggtagcacatacttcgcagactccgtgaggggccggttcaccatctccagagacaattccaagaacacgctgtatctgcaaatgaacagcctgagagccgaggacacggccgtatattactgtgcgaaagatgacgaatcgggatattgtactggtaccaactgccgatactttgactactggggccagggaaccctggtcaccgtctcctcag

SEQ ID NO: 4268 - DNA, 379 bp, Homo sapiens
caggtgcagctggtgcagtctggggctgaggtgaagaagcctggggcctcagtgaaggtctcctgcaaggcttctggatacaccttcaccggctactatattcactgggtgcgacaggcccctggacaagggcttgagtggatgggatggatcaaccctaacagtggtggcacaaactatgcacagaagtttcagggcagggtcaccatgaccagggacacgtccatcaccacagcctacatggagctgagcaggctgagatctgacgacacggccgtgtattactgtgcgagagtaaagtgtcccgaactaggatattgtagtggtagcccccagtttgactactggggccagggaaccctggtcaccgtctcctcag

SEQ ID NO: 4269 - DNA, 379 bp, Homo sapiens
gaggtgcagctggtgcagtctggagcagaggtgaaaaagcccggggagtctctgaagatctcctgtaagggttctggatacagctttaccagctactggatcggctgggtgcgccagatgcccgggaaaggcctggagtggatggggatcatctatcctggtgactctgataccagatacagcccgtccttccaaggccaggtcaccatctcagccgacaagtccatcagcaccgcctacctgcagtggagcagcctgaaggcctcggacaccgccatgtattactgtgcgagacagtattgtagtactaccacctgctatttttggcaagcgacatttgactactggggccagggaaccctggtcaccgtctcctcag

SEQ ID NO: 4270 - DNA, 388 bp, Homo sapiens
caggttcggctgcagcaatcaggcccaggactggtgaagccctcgcagaccctctcactcgcctgtgtcatctccggggacagtgtctctagtgacaaagctgcttggaactggatcaggcagtccccatcgagaggccttgagtggctgggaaggacatattacaggtctaagtggcatactgattatgcagtatctatgaaaggtcgaataaacatcaactcggacacatccaagaaccggttctccctgcaggtgaagtctgtgacctccgaggacgcggctgtgtattattgtgcaagaggcataggtccaggtagtggctggtatggaactgcgggtgtttttgatatttggggccgcgggactacggtcatcgtctcttcag

SEQ ID NO: 4271 - DNA, 379 bp, Homo sapiens
gaggtgcagctgttggagtctgggggaggcttggtacagcctggggggtccctgggactctcctgtgcagcctctggattcacctttagtaactatcccatgacctgggtccgccaggctccagggaaggggctggagtgggtctcaactattagtattagtggtggtaagacatactacgcagactccgtgcagggccggttcaccatctccagagacgattccaagaatacgttgtatctgcaaatgaatagcctgagagccgaggacacggccgtatattactgtgcgaaagatcgtgacgtatatgtcagtgactggacggcctacaactggttcgacccctggggccagggaaccctggtcaccgtctcctcag

SEQ ID NO: 4272 - DNA, 379 bp, Homo sapiens
gaggtgcagctggtggagtctgggggaggcctggtcaagcctggggggtccctgagactctcctgtgcagcctctggattcaccttcagtagctatagcatgaactgggtccgccaggctccagggaaggggctggagtgggtctcatccattagtagtagtagtagttacatatactacgcagactcagtgaagggccgattcaccatctccagagacaacgccaagaactcactgtatctgcaaatgaacagcctgagagccgaggacacggctgtgtattactgtgcgagagatcagggtcgaagggaatttacgatttttggagtggtcgaaacaatcctctggggccaagggacaatggtcaccgtctcttcag

SEQ ID NO: 4273 - DNA, 381 bp, Homo sapiens
caggtccagcttgtgcagtctggggctgaggtgaagaagcctggggcctcagtgaaggtttcctgcaaggcttctggatacaccttcactagctatgctatgcattgggtgcgccaggcccccggacaaaggcttgagtggatgggatggatcaacgctggcaatggtaacacaaaatattcacagaagttccagggcagagtcaccattaccagggacacatccgcgagcacagcctacatggagctgagcagcctgagatctgaagacacggctgtgtattactgtgcgagagatgtagaagagggtttttggagtggttattactactactacggtatggacgtctggggccaagggaccacggtcaccgtctcctca

SEQ ID NO: 4274 - DNA, 379 bp, Homo sapiens
caggtgcagctggtgcagtctggggctgaggtgaagaagcctgggtcctcggtgaaggtctcctgcaaggcttctggaggcaccttcagcagctatgctatcagctgggtgcgacaggcccctggacaagggcttgagtggatgggagggatcatccctatctttggtacagcaaactacgcacagaagttccagggcagagtcacgattaccgcggacgaatccacgagcacagcctacatggagctgagcagcctgagatctgaggacacggccgtgtattactgtgcgagagggagttctagggattacatttgggggagttatcgttcctggttcgacccctggggccagggaaccctggtcaccgtctcctcag

SEQ ID NO: 4275 - DNA, 387 bp, Homo sapiens
gaggtgcagctggtggagtctgggggaggcttggtacagccagggcggtccctgagactctcctgtacagcttctggattcacctttggtgattatgctatgagctgggtccgccaggctccagggaaggggctggagtgggtaggtttcattagaagcaaagcttatggtgggacaacagaatacgccgcgtctgtgaaaggcagattcaccatctcaagagatgattccaaaagcatcgcctatctgcaaatgaacagcctgaaaaccgaggacacagccgtgtattactgtactagaatagcagcagctggtacgatcttcccttactactactactacggtatggacgtctggggccaagggaccacggtcaccgtctcctca

SEQ ID NO: 4276 - DNA, 381 bp, Homo sapiens
caggtgcagctggtggagtctgggggaggcttggtcaagcctggagggtccctgagactctcctgtgcagcctctggattcaccttcagtgactactacatgagctggatccgccaggctccagggaaggggctggagtgggtttcatacattagtagtagtggtagtaccatatactacgcagactctgtgaagggccgattcaccatctccagggacaacgccaagaactcactgtatctgcaaatgaacagcctgagagccgaggacacggccgtgtattactgtgcgagagatggcgagtatagcagcagctggtcccgggactactactacggtatggacgtctggggccaagggaccacggtcaccgtctcctca

SEQ ID NO: 4277 - DNA, 381 bp, Homo sapiens
gaagtgcagctggtggagtctgggggaggcttggtacagcctggcaggtccctgagactctcctgtgcagcctctggattcacctttgatgattatgccatgcactgggtccggcaagctccagggaagggcctggagtgggtctcaggtattagttggaatagtggtagtataggctatgcggactctgtgaagggccgattcaccatctccagagacaacgccaagaactccctgtatctgcaaatgaacagtctgagagctgaggacacggccttgtattactgtgcaaaatcctggaacaactggaactacgattcttactactactacgacggtatggacgtctggggccaagggaccacggtcaccgtctcctca

SEQ ID NO: 4278 - DNA, 382 bp, Homo sapiens
caggtgcagctggtggagtctgggggaggcgtggtccagcctgggaggtccctgagactcgcctgtgcagcgtctggattcaccttcagtaactatgacatgcactgggtccgccaggctccaggcaaggggctggagtgggtggccgttataagggatgatggaaataacaaatactatgcagactccgtgaagggccggttcaccatctccagagacaattccaagaacacgctgtatctgcaaatgaatagcctgagagccgaggacacggctgtttattactgtgcgagagtgtcacgatttttggagtggttaaagaattcacatgaatactactttgactactggggccagggaaccctggtcaccgtctcctcag

SEQ ID NO: 4279 - DNA, 382 bp, Homo sapiens
gaagtgcagctggtggagtctgggggaggcttggtacagcctggcaggtccctgagactctcctgtgcagcctctggattcacctttgatgattatgccatacactgggtccggcaagctccagggaagggcctagaatgggtctcaggtattagttggaatagtggtagcataggctatgcggactctgtgaagggccgattcaccatctccagagacaacgccaagaactccctgtatctgcaaatgaacagtctgagagtagaggacacggccttgtattactgtgcaaaagactatgggggggaatatagccgttcgaggggtaaccccggggggtttgactactggggccagggaaccctggtcaccgtctcctcag

SEQ ID NO: 4280 - DNA, 382 bp, Homo sapiens
gaggtgcagctggtgcagtctggagcagaggtgaaaaagcccggggagtctctgaagatctcctgtaagggttctggatacagttttaccaactactggatcggctgggtgcgccagatgcccgggaaaggcctggagtggctggggatcatctatcctggtgactctgataccagatacagcccgtccttccaaggccaggtcaccatctcagccgacaagtccatcagcaccgcctacctgcagtggagcagcctgaaggcctcggacaccgccatgtattactgtgcgagacgcaggacgcatacgattacgtttgggggagttaccgcccactattacgactactggggccagggaaccctggtcaccgtctcctcag

SEQ ID NO: 4281 - DNA, 385 bp, Homo sapiens
caggtcaccttgagggagtctggtcctgcgctggtgaaacccacacagaccctcacactgacctgcaccttctctgggttctcactcagcactagtggaatgtgtgtgagttggatccgtcagcccccagggaaggccctggagtggcttgcactcattgattgggatgatgataaatactacagcacatctctgaagaccaggctcaccatctccaaggacacctccaaaaaccaggtggtccttacaatgaccaacatggaccctgtggacacagccacgtattactgtgtacgctttacctattactatgatagtagtggctatttcggggaaaggtgctttgactgctggggccagggaaccctggtcaccgtctcctcag

SEQ ID NO: 4282 - DNA, 382 bp, Homo sapiens
caggtgcagctgcaggagtcgggcccaggactggtgaagccttcggagaccctgtccctcacctgcgctgtctctggttactccatcagcagtggttactactggggctggatccggcagcccccagggaaggggctggagtggattgggaatatctatcatagtgggagcacctactacaacccgtccctcaagagtcgagtcaccatatcagtagacacgtccaagaaccagttctccctgaagctgagctctgtgaccgccgcagacacggccgtgtattactgtgcgagagttacgtattactatgatagtagtggttattcaacaccattatacttccagcactggggccagggcaccctggtcaccgtctcctcag

SEQ ID NO: 4283 - DNA, 382 bp, Homo sapiens
caggtgcagctggtgcagtctggggctgaggtgaagaagcctggggcctcagtgaaggtttcctgcaaggcatctggatacaccttcaccagctactatatgcactgggtgcgacaggcccctggacaagggcttgagtggatgggaataatcaaccctagtggtggtagcacaagctacgcacagaagttccagggcagagtcaccatgaccagggacacgtccacgagcacagtctacatggagctgagcagcctgagatctgaggacacggccgtgtattactgtgcgagagaacctatacgatttttggagtggtaccacgccctctacaactggttcgacccctggggccagggaaccctggtcaccgtctcctcag

SEQ ID NO: 4284 - DNA, 385 bp, Homo sapiens
gaagtgcagctggtggagtctgggggaggcttggtacagcctggcaggtccctgagactctcctgtgcagcctctggattcacctttgatgattatgccatgcactgggtccggcaagctccagggaagggcctggagtgggtctcaggtattagttggaatagtggtagcataggctatgcggactctgtgaagggccgattcaccatctccagagacaacgccaagaactccctgtatctgcaaatgaacagtctgagagctgaggacacggccttgtattactgtgcaaaagatattgggtttattgtggtggtgactgccgctatgggggcgggtgcttttgatatctggggccaagggacaatggtcaccgtctcttcag

SEQ ID NO: 4285 - DNA, 382 bp, Homo sapiens
caggtgcagctacagcagtggggcgcaggactgttgaagccttcggagaccctgtccctcacctgcgctgtctatggtgggtccttcagtggttactactggagctggatccgccagcccccagggaaggggctggagtggattggggaaatcaatcatagtggaagcaccaactacaacccgtccctcaagagtcgagtcaccatatcagtagacacgtccaagaaccagttctccctgaagctgagctctgtgaccgccgcggacacggctgtgtattactgtgcgagaggccagggggtttggtatagtgggagctaccaatccccccgtgaatacttccagcactggggccagggcaccctggtcaccgtctcctcag

SEQ ID NO: 4286 - DNA, 384 bp, Homo sapiens
caggtgcagctggtggagtctgggggaggcttggtcaagcctggagggtccctgagactctcctgtgcagcctctggattcaccttcagtgactactacatgagctggatccgccaggctccagggaaggggctggagtgggtttcatacattagtagtagtggtagtaccatatactacgcagactctgtgaagggccgattcaccatctccagggacaacgccaagaactcactgtatctgcaaatgaacagcctgagagccgaggacacggccgtgtattactgtgcgaggcggcgaggatattgtagtggtggtagctgctactctttggactacggtatggacgtctggggccaagggaccacggtcaccgtctcctca

SEQ ID NO: 4287 - DNA, 400 bp, Homo sapiens
caggtgcagctgcaggagtcgggcccaggactggtgaagccttcacagaccctgtccctcacctgcactgtctctggtggctccatcagcagtggtgattactactggagttggatccgccagcccccagggaagggcctggagtggattgggtacatctattacagtgggagcacctactacaacccgtccctcaagagtcgagttaccatatcagtagacacgtccaagaaccagttctccctgaagctgagctctgtgactgccgcagacacggccgtgtattactgtgccagaggtcagcgaagaagttgtagtggtggtagctgctactccgttttagcccccggtgactggttcgacccctggggccagggaaccctggtcaccgtctcctcag

SEQ ID NO: 4288 - DNA, 396 bp, Homo sapiens
caggtgcagctggtggagtctgggggaggcgtggtccagcctgggaggtccctgagactctcctgtgcagcctctggattcaccttcaggacctatggcttgcactgggtccgccaggctccaggcaaggggctggagtgggtggcagttatatcatatgatggaagtaaaaaatattatgcagactccgtgaagggccgattcaccatctccagagacaattccaagaactcgctgtatctgcaaatgaacagcctgagagctgaggacacggctgtgtattactgtgcgaaagagggcggaggatattgtagtggtggtagttgctaccctaaccccagttacttctacggtttggacgtctggggccaagggaccacggtcaccgtctcctca

SEQ ID NO: 4289 - DNA, 390 bp, Homo sapiens
caggtgcagctggtgcagtctggggctgaggtgaagaagcctggggcctcagtgaaggtctcctgcaaggcttctggatacaccttcaccggctactatatgcactgggtgcgacaggcccctggacaagggcttgagtggatgggatggatcaaccctaacagtggtggcacaaactatgcacagaagtttcagggcagggtcaccatgaccagggacacgtccatcagcacagcctacatggagctgagcaggctgagatctgacgacacggccgtgtattactgtgcgagagatttgtacaactggaacgacagtccccgtcggttctactactactactacggtatggacgtctggggccaagggaccacggtcaccgtctcctca

SEQ ID NO: 4290 - DNA, 394 bp, Homo sapiens
caggtgcagctgcaggagtcgggcccaggactggtgaagccttcacagaccctgtccctcacctgcactgtctctggtggctccatcagcagtggtggttactactggagctggatccgccagcacccagggaagggcctggagtggattgggtacatctattacagtgggagcacctactacaacccgtccctcaagagtcgagttaccatatcagtagacacgtctaagaaccagttctccctgaagctgagctctgtgactgccgcggacacggccgtgtattactgtgcgagagccccggcgggggcatattgtggtggtgattgctattcatctctggacgggtggttcgacccctggggccagggaaccctggtcaccgtctcctcag

SEQ ID NO: 4291 - DNA, 370 bp, Homo sapiens
caggtgcagctggtgcagtctggggctgaggtgaagaagcctgggtcctcggtgaaggtctcctgcaaggcttctggaggcaccttcagcagctatgctatcagctgggtgcgacaggcccctggacaagggcttgagtggatgggagggatcatccctatctttggtacagcaaactacgcacagaagttccagggcagagtcacgattaccgcggacgaatccacgagcacagcctacatggagctgagcagcctgagatctgaggacacggccgtgtattactgtgcgagatcgaaggggtcgtctacggtgactacgttaacctttgactactggggccagggaaccctggtcaccgtctcctcag

SEQ ID NO: 4292 - DNA, 370 bp, Homo sapiens
caggtgcagctggtggagtctgggggaggcttggtcaagcctggagggtccctgagactctcctgtgcagcctctggattcaccttcagtgactactacatgagctggatccgccaggctccagggaaggggctggagtgggtttcatacattagtagtagtggtagtaccatatactacgcagactctgtgaagggccgattcaccatctccagggacaacgccaagaactcactgtatctgcaaatgaacagcctgagagccgaggacacggccgtgtattactgtgcgagaggacccccaccgtatagcagcagctggtactactttgactactggggccagggaaccctggtcaccgtctcctcag

SEQ ID NO: 4293 - DNA, 367 bp, Homo sapiens
gaggtgcagttggtggagtctggaggaggcttgatccagcctggggggtccctgagactctcctgtgcagcctctggtttcaccgtcagtagcaactacatgagctgggtccgccaggctccaggaaaggggctggagtgggtctcagttatctataccggtggtggcgcatactacgcagactccgtgaagggccgattcaccatctccagagacaattccaagaacgcgctgtatcttcgaatggacagcctgagagtcgacgacacggccgtctattattgtgcgagaggaaagggacagactacagtgactaacaggttctttgactactggggccagggaaccctggtcaccgtctcctcag

SEQ ID NO: 4294 - DNA, 388 bp, Homo sapiens
gaggtgcagctggtggagtctggaggaggcttgatccagcctggggggtccctgagactctcctgtgcagcctctgggttcatcgtcagtagcaactacatgaactgggtccgccaggctccagggaaggggctggagtgggtctcagttatttatagcggtggtagcacatactacgcagactccgtgaagggccgattcaccatctccagagacaattccaagaacacactgtatcttcaaatgaacggcctgagagccgaggacacggccgtgtattattgtgcgagaggggtagtgggagctcccatcctggctccgagcaagacccaggcacctaagatgcatgactactggggccagggaaccctggtcaccgtctcctcag

SEQ ID NO: 4295 - DNA, 370 bp, Homo sapiens
caggtgcagctggtggagtctgggggaggcgtggtccagcctgggaggtccctgagactctcctgtgcagcctctggattcaccttcagtagctatggcatgcactgggtccgccaggctccaggcaaggggctggagtgggtggcagttatatcatatgatggaagtaataaatactatgcagactccgtgaagggccgattcaccatctccagagacaattccaagaacacgctgtatctgcaaatgaacagcctgagagctgaggacacggctgtgtattactgtgcgaaatcggggagttggtatagcagcagctggacccactttgactactggggccagggaaccctggtcaccgtctcctcag

SEQ ID NO: 4296 - DNA, 370 bp, Homo sapiens
caggtgcagctggtggagtctgggggaggcgtggtccagcctgggaggtccctgagactctcctgtgcagcctctggattcaccttcagtacctatggcatgcactgggtccgccaggctccaggcaaggggctggagtgggtggcagttatatcgtatgatggaagtaataaatactatgcagactccgtgaggggccgattcaccatctccagagacaattccaagaacacgctctatttgcaaataaacagcctgagagctgaggacacggctgtgtattactgtgcgaaagacctaactattgttgtagtaccagtagtcctaattgactactggggccagggaaccctggtcaccgtctcctcag

SEQ ID NO: 4297 - DNA, 370 bp, Homo sapiens
caggtgcagctggtggagtctgggggaggcgtggtccagcctgggaggtccctgagactctcctgtgcagcctctggattcaccttcaatacctatggcatgcactgggtccgccaggctccaggcaaggggctggagtgggtggcagttatttcatatgatggaaataataaatactatctagactccgtgaggggccgattcaccatctccagagacaattccaagaacacgctgtatctgcaaatgaacagcctgagagctgaggacacggctgtgtattactgtgcgaaagatcgcaccattgtagtagtgccagttgttacacttgactcctggggccagggaaccctggtcaccgtctcctcag

SEQ ID NO: 4298 - DNA, 370 bp, Homo sapiens
caggtgcagctggtggagtctgggggaggcgtggtccagcctgggaggtccctgagactctcctgtgcagcctctggattcaccttcagtgtctatggcatgcactgggtccgccaggctccaggcaaggggctggagtgggtggcagtaatatcatatgatggaagtagtaaatactatgcagactccgtgaagggccgattcaccatctccagagacaattccaggaacacgctgtatctgcaaatgagcagcctgagagctgaggacacggctgtatattactgtgcgaaagatatcgatagtgtcccggtggtagctgctacttttgactactggggccagggaaccctggtcaccgtctcctcag

SEQ ID NO: 4299 - DNA, 370 bp, Homo sapiens
caggtgcagctggtggagtctgggggaggcgtggtccagcctgggaggtccctgagactctcctgtgcagcctctggattcagcttcagtatctatggcatgcactgggtccgccaggctccaggcaaggggctggagtgggtggcagttatgtcatatgatggaaataataaatactatgcagactccgtgaagggccgattcaccatctccagggacaattccaagaacacgctgtatctgcaaatgaacagtctgagagctgaggacacggctgtgtattactgtgcgaaagataagactattgcagtagtaccagttgctatagccgactactggggccagggaaccctggtcaccgtctcctcag

SEQ ID NO: 4300 - DNA, 370 bp, Homo sapiens
gaggtgcagctgttggagtctgggggaggcttggtacagcggggggggtccctcagactctcctgtgcagcctctggattcacctttagcagctatgccatgagctgggtccgccaggctccagggaaggggctggagtgggtctcagctgtcagtggtagtggttctgttacatactacgcagactccgtgaagggccggttcaccatctccagagacaattccaagaacacgctgtatttgcaaatgagtatcttgagagtcgaggacacggctgtatattactgtgcgctccaaactggcggtgcgctccaaagtggcggcggcgttaactactggggccagggaaccctggtcaccgtctcctcag

SEQ ID NO: 4301 - DNA, 370 bp, Homo sapiens
gaggtgcagctgttggagtctgggggaggcttggtacagcctggggggtccctgagactctcctgtgcagcctctggattcacctttaacagctatgccatgagctgggtccgccaggctccagggaaggggctggagtgggtctcaactattagtggtagtggtggtagcacatactacgcagactccgtgaagggccggttcaccatctccagagacaattccaagaacacgctgtatctgcaaatgaacagcctgagagccgaggacacggccgtatattactgtgcgaaagatgcggtgactacgtacccacgggggtcttcaaatgactactggggccagggaaccctggtcaccgtctcctcag

SEQ ID NO: 4302 - DNA, 370 bp, Homo sapiens
gaggtgcagctgttggagtctgggggaggcttggtacagcctggggggtccctgagactctcctgtgcagcctctggattcacctttagcagctatgccatgagctgggtccgccaggctccagggaaggggctggagtgggtctcagctattagtggtagtggtggtagcacatactacgcagactccgtgaagggccggttcaccatctccagagacaattccaagaacacgctgtatctgcaaatgaacagcctgagagccgaggacacggccgtatattactgtgcgaaagatagggccagtagtggttattactacgcgatctttgactactggggccagggaaccctggtcaccgtctcctcag

SEQ ID NO: 4303 - DNA, 369 bp, Homo sapiens
caggtgcagctggtggagtctgggggaggcgtggtccagcctgggaggtccctgagactctcctgtgcagcctctggattcaccttcagtacttatggcatgcactgggtccgccaggctccaggcaaggggctggagtgggtggcagttatatcatatgatggaagtaataaatactatgcagactccgtgaagggccgattcaccatctccagagacaattccaagaacacgctgtatctgcaactgaacagcctgagagttgaggacacggctgtgtattactgtgcgaaagacactactattatgatagtgatggttccccttctggacgtctggggccaagggaccacggtcaccgtctcctca

SEQ ID NO: 4304 - DNA, 373 bp, Homo sapiens
cagctgcagctgcaggcgtcgggcccaggactggtgaagccttcggagaccctgtccctcacctgcactgtctctggtggctccatcagcagtagtagttactactggggctggatccgccagcccccagggaaggggctggagtggattgggagtatctattatagtgggagcacctactacaacccgtccctcaagagtcgagtcaccatatccgtagacacgtccaagaaccagttctccctgaggctgagctctgtgaccgccgcagacacggctctgtattactgtgcgacaaaaatcgtagagatggctacaaccggctactactttgactactggggccagggaaccctggtcaccgtctcctcag

SEQ ID NO: 4305 - DNA, 369 bp, Homo sapiens
gaggtgcagctgttggagtctgggggaggcttggtacagcctggggggtccctgagactctcctgtgcagcctctggattcacctttagcagctatgccatgagctgggtccgccaggctccagggaaggggctggagtgggtctcagctattagtggtagtggtggtagcacatactacgcagactccgtgaagggccggttcaccatctccagagacaattccaagaacacgctgtatctgcaaatgaacagcctgagagccgaggacacggccgtatattactgtgcgaaagaactctctacggtgactgtttactactacggtatggacgtctggggccaagggaccacggtcaccgtctcctca

SEQ ID NO: 4306 - DNA, 369 bp, Homo sapiens
gaagtgcagctggtggagtctgggggagtcgtggtacagcctggggggtccctgagactctcctgtgcagcctctggattcacctttgatgattataccatgcactgggtccgtcaagctccggggaagggtctggagtgggtctctcttattagttgggatggtggtagcacatactatgcagactctgtgaagggccgattcaccatctccagagacaacagcaaaaactccctgtatctgcaaatgaacagtctgagaactgaggacaccgccttgtattactgtgcaaaaggaggcgggctatattcctactactactacggtatggacgtctggggccaagggaccacggtcaccgtctcctca

SEQ ID NO: 4307 - DNA, 370 bp, Homo sapiens
caggcgcagctggtgcagtctgggactgaggtgaagaagcctggggcctcagtgaaggtttcctgcaaggcatctggatacagtttcaccagctactttatgcactgggtgcgacaggcccctggacaggggcttgagtggatgggaataatcaatcctagtggtggtagcacaacctacgcacagaggttccagggcagagtcaccatgaccagggacacgtccacgagcacagtctacatggagctgagcagcctgagatctgaggacacggccgtgtattactgtgcgagagatctagctgtagtggtggtagctgctactcacctcgacccctggggccagggaaccctggtcaccgtctcctcag

SEQ ID NO: 4308 - DNA, 370 bp, Homo sapiens
caggtgcagctggtggagtctgggggaggcgtggtccagcctgggaggtccctgagactctcctgtgaagcctctggattcaccttcagtacctatggcatgcactgggtccgccaggctccaggcaaggggctggattgggtggcagttataatatatgatggaagtattaaatactatgtagactccgtgaagggccggttcaccatctccagagacaactccaagaatacgctatatctgcaaatgaacagcctgagagttgaggacacggctgtgtattactgtgcgaaagatcgagccgtctacagctatggccgctttgacgccggctcctggggccagggaaccctggtcaccgtctcctcag

SEQ ID NO: 4309 - DNA, 370 bp, Homo sapiens
caggtccaggtggtacagtctggggctgaggtgaagaagcctggggcctcagtgaaggtctcctgcaaggtttccggatacaccctcgttgaattatccctgcactgggtgcgacaggctcctggaaaagggcttgagtggatgggaggttttgatcctgaagatggtgaaacaatctacgcacagaagttccagggcagagtcaccatgaccgaggacacatctacagacacagcctacatggagctgagcagcctgagatctgaggacacggccgtatattactgtgcaacaggcccgcctatagtaactctggggggggtctggttcgacccctggggccagggaaccctggtcaccgtctcctcag

SEQ ID NO: 4310 - DNA, 370 bp, Homo sapiens
caggttcagctggtgcagtctggagctgaggtgaagaagcctggggcctcagtgaaggtctcctgcaaggcttctggttacacctttaccagctatggtatcagctgggtgcgacaggcccctggacaagggcttgagtggatgggatggatcagcgcttacaatggtaacacaaactatgcacagaagctccagggcagagtcaccatgaccacagacacatccacgagcacagcctacatggagctgaggagcctgagatctgacgacacggccgtgtattactgtgcgagatggtccccctcgaaaataagtccccaatgggcttttgatatctggggccaagggacaatggtcaccgtctcttcag

SEQ ID NO: 4311 - DNA, 370 bp, Homo sapiens
caaatgcagctggtgcagtctgggcctgaggtgaagaagcctgggacctcagtgaaggtctcctgcaaggcttctggattcacctttactagctctgctgtgcagtgggtgcgacaggctcgtggacaacgccttgagtggataggatggatcgtcgttggcagtggtaacacaaactacgcacagaagttccaggaaagagccaccattaccagggacatgtccacaagcacagcctacatggagctgagcagcctgagatccgaggacacggccgtgtattactgtgcggcacccgcttgtagtggtggtagctgctttgatggttttgatatctggggccaagggacaatggtcaccgtctcttcag

SEQ ID NO: 4312 - DNA, 352 bp, Homo sapiens
gaggtgcagctggtgcagtctggagcagaggtgaaaaagcccggggagtctctgaagatctcctgtaagggttctggatacagctttaccagctactggatcggctgggtgcgccagatgcccgggaaaggcctggagtggatggggatcatctatcctggtgactctgataccagatacagcccgtccttccaaggccaggtcaccatctcagccgacaagtccatcagcaccgcctacctgcagtggagcagcctgaaggcctcggacaccgccatgtattactgtgcgagaagccggcagctcgtttttgactactggggccagggaaccctggtcaccgtctcctcag

SEQ ID NO: 4313 - DNA, 376 bp, Homo sapiens
caggtgcagctggtgcagtctggggctgaggtgaagaagcctgggtcctcggtgaaggtctcctgcaaggcttctggaggcaccttcagcagctatgctatcagctgggtgcgacaggcccctggacaagggcttgagtggatgggagggatcatccctatctttggtacagcaaactacgcacagaagttccagggcagagtcacgattaccgcggacgaatccacgagcacagcctacatggagctgagcagcctgagatctgaggacacggccgtgtattactgtgcgatagccggtggcattaattactatgatagtagtggttacatttttgactactggggccagggaaccctggtcaccgtctcctcag

SEQ ID NO: 4314 - DNA, 374 bp, Homo sapiens
gaggtgcagctggtggagtctgggggaggcctggtcaagccgggggggtcccttagactctcctgtgcagcctctggattcaccttcagtgcctataacattaactgggtccgccaggctccagggaaggggctggagtgggtctctgccattagcagtagtagtacttatatattctacgcagactcagtgaagggccgattcaccatctccaaagacaacgccaagaactcagtatatctgcaaatgaacagcctgagaggcgaggacacggctgtctactactgtgtgagagtgggttcagctatgggaaatcagtatggttcggggagttatgactactggggccagggaaccctggtcaccgtctcctc

SEQ ID NO: 4315 - DNA, 376 bp, Homo sapiens
caggtgcagctggtggagtctgggggaggcgtggtccagcctgggaggtccctgagactctcctgtgcagcctctggattcaccttcagtatctatggcatgcactgggtccgccaggctccaggcaaggggctggagtgggtggcacttatatcatatgatggaagtaataaatactatgcagactccgtgaagggccgattcaccatctccagagacaattccaagaacacactgtatctgcaaatgaacagcctgagacctgaggacacggctgtgtattactgtgcgaaaggggaatggtacagttatggttaccctggcgacgggggttttgactactggggccagggaaccctggtcaccgtctcctcag

SEQ ID NO: 4316 - DNA, 369 bp, Homo sapiens
caggtgcagctggtggagtctgggggaggcgtggtccagcctgggaggtccctgagactctcttgtgcagcctctggattccccttcagtagttatggcatgcactgggtccgccaggctccaggcaaggggctggagtgggtggcagttatatcatatgatggaagaaataaatattatgcagactccgtgaagggccgactcaccatctccagagacaattccaagaacacgctgtatctgcaaatgaacagcctgagagctgaggacacggctatgtattactgtgcgaaagatcagggttctattgtagtagtaccagctgttacccactttgacaactggggccagggaaccctggtcaccgtc

SEQ ID NO: 4317 - DNA, 376 bp, Homo sapiens
gaggtgcagctggtggagtctgggggaggcttggtccagcctggggggtccctgagactctcctgtgcagcctctggattcacctttagtagctattggatgagctgggtccgccaggctccagggaaggggctggagtgggtggccaacataaagcaagatggaagtgagaaatactatgtggactctgtgaagggccgattcaccatctccagagacaacgccaagaactcactgtatctgcaaatgaacagcctgagagccgaggacacggctgtgtattactgtgcgagagggtggagaaaaaaaaattactatgatagtagtggttatcttgactactggggccagggaaccctggtcaccgtctcctcag

SEQ ID NO: 4318 - DNA, 375 bp, Homo sapiens
gaggtgcagctgttggagtctgggggaggcttggtacagccaggggggtccctgagactctcctgtgcagcctctggatacagttttagcggctatgccatgagctgggtccgccaggctccagggaaggggctggagtgggtctcagcaatcagtggaagtggtggtagtacatactacgcagactccgtgaagggccggttcaccatctccagagacaattccaagaacacgctgtatctgcaaatgaacagcctgagagccgaggacacggccgtatattactgtgcgaaagatcttactttttccgggcccgagaattactactacggtatggacgtctggggccaagggaccacggtcaccgtctcctca

SEQ ID NO: 4319 - DNA, 379 bp, Homo sapiens
caggtgcaaatgcaagagtcgggcccaggactggtgaagccttcggagaccctgtccctcacctgcactgtctctggtggctccgtcagcagtggtggctactactggagctggatccggcagcccccagggaaggggctggaatggattggaaatatctataaaggtgggagcaccaactacaacccctccctcaagagtcgagtcaccatatcagtagacacgtccaagaaccagttctccctgaagctgagctctgtgaccgctgcggacacggccgtgttttactgtgcgagagccgatcggagttattgtagtgttaccagttgctatatttttgagtcctggggccagggaaccctggtcaccgtctcctcag

SEQ ID NO: 4320 - DNA, 376 bp, Homo sapiens
caggtgcagctggtggagtctgggggaggcgtggtccagcctgggaggtccctgagactctcctgtgcagcctctggattcaccttcagtagctatggcatgcactgggtccgccaggctccaggcaaggggctggagtgggtggcagttatatcatatgatggaagtaataaatactatgcagactccgtgaagggccgattcaccatctccagagacaattccaagaacacgctatatctgcaaatgaacagcctgagagctgaggacacggctgtgtattactgtgcgaagggtttacgatttttggagtggttattatcccctgatgcttttgatatctggggccaagggacaatggtcaccgtctcttcag

SEQ ID NO: 4321 - DNA, 376 bp, Homo sapiens
gaagtgcagctggtggagtctgggggaggcttggtacagcctggcaggtccctgagactctcctgtgcagcctctggattcacctttgatgattatgccatgcactgggtccggcaagctccagggaagggcctggagtgggtctcaggtattagttggaatagtggtagcataggctatgcggactctgtgaagggccgattcaccatctccagagacaacgccaagaactccctgtatctgcaaatgaacagtctgagagctgaggacacggccttgtattactgtgcaaaatcggatcgattactatggttcggggacccagcgggtgcttttgatatctggggccaagggacaatggtcaccgtctcttcag

SEQ ID NO: 4322 - DNA, 373 bp, Homo sapiens
caggtgcagctgcaggagtcgggcccaggactggtgaagccttcggagaccctgtccctcacctgcactgtctctggtggctccatcagtagttactactggagctggatccggcagcccgccgggaagggactggagtggattgggcgtatctataccagtgggagcaccaactacaacccctccctcaagagtcgagtcaccatgtcagtagacacgtccaagaaccagttctccctgaagctgagctctgtgaccgccgcggacacggccgtgtattactgtgcgagagataatgagcagtggctggtactaaggggccccaactggttcgacccctggggccagggaaccctggtcaccgtctcctcag

SEQ ID NO: 4323 - DNA, 384 bp, Homo sapiens
caggtgcagctacagcagtggggcgcaggactgttgaagccttcggagaccctgtccctcacctgcgctgtctatggtgggtccttcagtggttactactggagctggatccgccagcccccagggaaggggctggagtggattggggaaatcaatcatagtggaagcaccaactacaacccgtccctcaagagtcgagtcaccatatcagtagacacgtccaagaaccagttctccctgaagctgagctctgtgaccgccgcggacacggctgtgtattactgtgcgtcaaggaaggggacttacgatttttggagtggcctttactactactactacggtatggacgtctggggccaagggaccacggtcaccgtctcctca

SEQ ID NO: 4324 - DNA, 387 bp, Homo sapiens
gaagtgcagctggtggagtctgggggaggcttggtacagcctggcaggtccctgagactctcctgtgcagcctctggattcacctttgatgattatgccatgcactgggtccggcaagctccagggaagggcctggagtgggtctcaggtattagttggaatagtggtagcataggctatgcggactctgtgaagggccgattcaccatctccagagacaacgccaagaactccctgtatctgcaaatgaacagtctgagagctgaggacacggccttgtattactgtgcaaaagatttactaggatattgtagtagtaccagctgctatacggaaaagtacggtatggacgtctggggccaagggaccacggtcaccgtctcctca

SEQ ID NO: 4325 - DNA, 384 bp, Homo sapiens
gaggtgcagctggtggagtctggaggaggcttgatccagcctggggggtccctgagactctcctgtgcagcctctgggttcaccttcagtaacaactacatgagctgggtccgccaggctccagggaaggggctggagtgggtctcaattatttataacggtggtggcacacactacgcacactccgtgaagggccgattcaccatctccagagacaactccaagaacatgctgtatcttcaaatgaacagcctgagagccgaggacacggccgtttattactgtgcgagagatctagattactatgatagtagtggttattacaaaaacgactactacggtatggacgtctggggccaagggaccacggtcaccgtctcctca

SEQ ID NO: 4326 - DNA, 388 bp, Homo sapiens
caggttcagctggtgcagtctggagctgaggtgaagaagcctggggcctcagtgaaggtctcctgcaaggcttctggttacacctttaccagctatggtatcagctgggtgcgacaggcccctggacaagggcttgagtggatgggatggatcagcgcttacaatggtaacacaaactatgcacagaagctccagggcagagtcaccatgaccacagacacatccacgagcacagcctacatggagctgaggagcctgagatctgacgacacggccgtgtattactgtgcgagaggggcttatgattacgtttgggggagttatcgttatatccccaactactactttgactactggggccagggaaccctggtcaccgtctcctcag

SEQ ID NO: 4327 - DNA, 387 bp, Homo sapiens
caaatgcagctggtgcagtctgggcctgaggtgaagaagcctgggacctcagtgaaggtctcctgcaaggcttctggattcacctttactagctctgctgtgcagtgggtgcgacaggctcgtggacaacgccttgagtggataggatggatcgtcgttggcagtggtaacacaaactacgcacagaagttccaggaaagagtcaccattaccagggacatgtccacaagcacagcctacatggagctgagcagcctgagatccgaggacacggccgtgtattactgtgcggcagagagtcgagaaaattactatgatagtagtggttcttactactactacggtatggacgtctggggccaagggaccacggtcaccgtctcctca

SEQ ID NO: 4328 - DNA, 394 bp, Homo sapiens
gaggtgcagctggtggagtctgggggaggcttggtaaagcctggggggtcccttagactctcctgtgcagcctctggattcactttcaataacgcctgcatgagctgggtccgccaggctccagggaaggggctggagtgggttggccgtattaaaagcaaaactgatggtgggacaacagactacgctgcacccgtgaaaggcagattcatcatctcaagagatgattcaaaaaccacgctgtatctgcaaatgaacagcctgaaaaccgaggacacagccgtatatttctgtaccgccccctcgaagcttacatcttattatgatagtagtgcttattaccttgatggttttgatatctggggccaagggacaatggtcaccgtctcttcag

SEQ ID NO: 4329 - DNA, 388 bp, Homo sapiens
caggtgcagctggtggagtctgggggaggcgtggtccagcctgggaggtccctgagactctcctgtgcagcctctggattcaccttcagtagctatggcatgcactgggtccgccaggctccaggcaaggggctggagtgggtggcagttatatcatatgatgtaattaataaatactatgcagactccgtgaagggccgattcaccatctccagagacaattccaagaacacgctgtatctgcaaatgaacagcctgagagctgaggacacggctgtgtattactgtgcgaaagatcggcttgcgtattgtagtggtggtagctgctatggaggatccctgtactttgactactggggccagggaaccctggtcaccgtctcctcag

SEQ ID NO: 4330 - DNA, 341 bp, Homo sapiens
gaggtgcagctggtggagtctggaggaggcttgatccagcctggggggtccctgagactctcctgtgcagcctctgggttaatcgtcagtagcaactacatgagctgggtccgccaggctccagggaaggggctggagtgggtctcaattatttatagcggtggtagcacatactacgcagactccgtgaagggccgattcaccatctccagagacaattccaagaacacgctgtatcttcaaatgaacagcctgagagccgaggacacggccgtgtattactgtgcgagagagatacgggatcgagtctggggccagggcaccctggtcaccgtctcctc

SEQ ID NO: 4331 - DNA, 402 bp, Homo sapiens
caggtgcagctgcagcagtggggcgcaggactgttgaagtcttcggagaccctgtccctcacctgcgctgtgtatggtgggtccttcagtgattattactggaactggatccgccagcccccagggaagggtctgtagtggattggggaaatcaaccgaagtcgaagcaccaactacaacccgtccctcaagagtcgagtcaccgtgtcagtagacacgtccaagaaccagttctccctgaagttgagttctgtgaccgccgcggacacggctgtgtattcctgtgcgagaggccagggagggtgttatcggaatgtagtggtggtaggtactactcgacctttactagtactgctacggtatggacgtctggggccaagggaccacggtcaccgtctcctc

SEQ ID NO: 4332 - DNA, 390 bp, Homo sapiens
caggtgcagctacagcagtggggcgcaggactgttgaagccttcggagaccctgtccctcacctgcgctgtctatggtgggtccttcagtggttactactggagctggatccgccagcccccagggaaggggctggagtggattggggaaatcaatcatagtggaagcaccaactacaacccgtccctcaagagtcgagtcaccatatcagtagacacgtccaagaaccagttctccctgaagctgagctctgtgaccgccgcggacacggctgtgtattactgtgcgagaggctattgcagcggaagttactatggttcagggagttattgttactactactacggtatggacgtctggggccaagggaccacggtcaccgtctcctca

SEQ ID NO: 4333 - DNA, 371 bp, Homo sapiens
caggtgcagctggtgcagtctggggctgaggtgaagaagcctggggcctcagtgacggtctcctgctaggcttctgcatacaccttcaccagttatgatatcaactgggtgcgacaggccactggacaagggcttgagtggatgggatggatgaaccctaacagtggtaacacaggctatgcacagaagttccagggcagagtcaccatgaccaggaacacctccataagcacagcctacatggagctgagcagcctgagatctgaggacacggccgtgtattaatgtgcgaagtggcgactagcatattgtggtggtgattgctcaaattgactactggggccagggaaccctggtcaccgtctcctcag

SEQ ID NO: 4334 - DNA, 349 bp, Homo sapiens
gaggtgcagctggtggagtctgggggaggtgtggtacggcctggggggtccctgagactctcctgtgcagcctctggattcacctttgatgattatggcatgagctgggtccgccaagctccagggaaggggctggagtgggtctctggtattaattggaatggtggtagcacaggttatgcagactctgtgaagggccgattcaccatctccagagacaacgccaagaactccctgtatctgcaaatgaacagtctgagagccgaggacacggccttgtatcactgtgcgagaggggcgggagctatcgactactggggccagggaaccctggtcaccgtctcctcag

SEQ ID NO: 4335 - DNA, 397 bp, Homo sapiens
caggtgcacctgcaggagtcgggcccaggactggtgaagccttcagagaccctgtccctcacctgcactgtctctggtggctccatcagcagtggtgagcactactggagttggatccgccagcacccagggaagggccttgagtacattggccacatctttcacattgggaccacctactacagcccgtctctcaagagtcgagttaccatatcagtggacatgtctcagaaccagttctccctgaagctgagctctctgactgccgcggacacggccgtttattactgtgcgagagaatcggggcagagtctccgaagacgatattgtagtagtcccaactgctatatgggatttgactactggggccagggaaccctggtcatcgtctcctcag

SEQ ID NO: 4336 - DNA, 349 bp, Homo sapiens
caggtgcagctggtgcagtctggggctgaggtgaagaagcctggggcctcagtgaaggtctcctgcaaggcttctggatacaccttcaccagttatgatatcaactgggtgcgacaggccactggacaagggcttgagtggatgggatggatgaaccctaacagtggtaacacaggctatgcacagaagttccagggcagagtcaccatgaccaggaacacctccataagcacagcctacatggagctgagcagcctgagatctgaggacacggccgtgtattactgtgcgaggttcctaagggcggatgactactggggccagggaaccctggtcaccgtctcctcag

SEQ ID NO: 4337 - DNA, 349 bp, Homo sapiens
gaggtgcagctggtggagtccgggggaggcttagttcagcctggggggtccctgagactctcctgtgcaacctctggattcagcttcagtacgtactggatgcactgggtccgccaagctccagggaaggggctggtgtgggtgtcacgcatcaatggtgatgggactagcacaatctatgcggactccgtgaagggccgattcaccatctccagagacaacgccaagagtacgttgtatctgcaaatgaacagtctgagagccgaggacacggctatctattactgtgtaatcttagactacgtacttaattcctggggccagggaaccctggtctccgtctcctcag

SEQ ID NO: 4338 - DNA, 399 bp, Homo sapiens
caggtgcagctggtggagtctgggggaggcgtggtccagcctgggaggtccctgagactctcctgtgcagcctctggattcaccttcagtagctatggcatgcactgggtccgccaggctccaggcaaggggctggagtgggtggcagttatatcatatgatggaagtaataaatactatgcagactccgtgaagggccgattcaccatctccagagacaattccaagaacacgctgtatctgcaaatgaacagcctgagagctgaggacacggctgtgtattactgtgcgaaagatcgccagtattactatggttcagggagttattattctactcggaactactactactacggtatggacgtctggggccaagggaccacggtcaccgtctcctca

SEQ ID NO: 4339 - DNA, 363 bp, Homo sapiens
caggtgcagctgcaggagtcgggcccaggactggtgaagccttcggagaccctgtccctcacctgcactgtctctggtggctccatcagtagttactactggagctggatccggcagcccccagggaagggactggagtggattgggtatatctattacagtgggagcaccaactacaacccctccctcaagagtcgagtcaccatatcagtagacacgtccaagaaccagttctccctgaagctgagctctgtgaccgctgcggacacggccgtgtattactgtgcgagacacggcagcagctggtacacctactacggtatggacgtctggggccaagggaccacggtcaccgtctcctca

SEQ ID NO: 4340 - DNA, 372 bp, Homo sapiens
gaggtgcagctggtggagtctgggggaggcttggtaaagcctggggggtcccttagactctcctgtgcagcctctggattcactttcagtaacgcctggatgagctgggtccgccaggctccagggaaggggctggagtgggttggccgtattaaaagcaaaactgatggtgggacaacagactacgctgcacccgtgaaaggcagattcaccatctcaagagatgattcaaaaaacacgctgtatctgcaaatgaacagcctgaaaaccgaggacacagccgtgtattactgtaccacgtgctgccgcgatattgtagtagtaccggaggaggacgtctggggccaagggaccacggtcaccgtctcctca

SEQ ID NO: 4341 - DNA, 366 bp, Homo sapiens
gaggtgcagctgttggagtctgggggaggcttggtacagcctggggggtccctgagactctcctgtgcagcctctggattcacctttagcagctatgccatgagctgggtccgccaggctccagggaaggggctggagtgggtctcagctattagtggtagtggtggtagcacatactacgcagactccgtgaagggccggttcaccatctccagagacaattccaagaacacgctgtatctgcaaatgaacagcctgagagccgaggacacggccgtatattactgtgcgaaagcagattacgatatcatctcacgctacggtatggacgtctggggccaagggaccacggtcaccgtctcctca

SEQ ID NO: 4342 - DNA, 367 bp, Homo sapiens
caggtgcagctgcaggagtcgggcccaggactggtgaagccttcggagaccctgtccctcacctgcgctgtctctagttactccattagcagtggttacttctggggctggatccggcagcccccaggaaaggggctggagtggattgggagtatctctcatactgggaacacctactacaacccgtccctcaagagtcgactcaccatatcaatagacacgtccaagaaccggttctccctgaacctaagctctgtgaccgccgcagacacggccgtgtattactgtgcgagacctgtggtggcgactgctatcgcacatgcttttgaaatctggggccaagggaccatggtcaccgtctcttcag

SEQ ID NO: 4343 - DNA, 367 bp, Homo sapiens
caggtgcagctgcaggagtcgggcccaggactggtgaagccttcggagaccctgtccctcacctgcgctgtctctggttactccatcagcagtggttactactggggctggatccggcagcccccagggaaggggctggagtggattgggagtatctatcatagtgggagcacctactacaacccgtccctcaagagtcgagtcaccatatcagtagacacgtccaagaaccagttctccctgaagctgagctctgtgaccgccgcagacacggccgtgtattactgtgcgagagaagatgattatacgatttttggagtggttaaagactactggggccagggaaccctggtcaccgtctcctcag

SEQ ID NO: 4344 - DNA, 367 bp, Homo sapiens
caggtgcagctggtggagtctgggggaggcgtagtccagcctgggaggtccctgagactctcctgtgcagcctctggattcaccttcagtacctatgctatgcactgggtccgccaggctccaggcaaggggctggagtgggtggcagttatatcatctgatggaagcaatatatatcacgcagactccgtgaagggccgattcagcatctccagagacaattccaggaacaccctatatctagaaatgaacagcctgagagctgaggacacggctctatattactgtgcgagaccccccgagagatggctacaattatcctcccttgaccagtggggccagggaaccctggtcaccgtctcctcag

SEQ ID NO: 4345 - DNA, 370 bp, Homo sapiens
cagatcaccttgaaggagtctggtcctacgctggtgaaacccacacagaccctcacgctgacctgcaccttctctgggttctcactcagcactagtggagtgggtgtgggctggatccgtcagcccccaggaaaggccctggagtggcttgcactcatttattgggatgatgataagcgctacagcccatctctgaagagcaggctcaccatcaccaaggacacctccaaaaaccaggtggtccttacaatgaccaacatggaccctgtggacacagccacatattactgtgcacacagtgtagggttcagggagttattacattcgattgactactggggccagggaaccctggtcaccgtctcctcag

SEQ ID NO: 4346 - DNA, 366 bp, Homo sapiens
gaagtgcagctggtggagtctgggggaggcttggtacagcctggcaggtccctgagactctcctgtgcagcctctggattcacctttgaagattatgccatgcactgggtccggcaaactccagggaagggcctggagtgggtctcaggtattagttggaatggtggtatcataggctatgcggactctgtgaagggccgattcaccatctccagagacaacgccaagaactccctgtatctgcaaatgatccgtctgagagctgaggacacggccttgtattactgtgcaaaagatatactctacggtgactacgtgggcgggtttgcctactggggccagggaaccctggtcaccgtctcctca

SEQ ID NO: 4347 - DNA, 365 bp, Homo sapiens
ggtgcagttgttggagtctgggggaggcttggtgcggcctggggggtccctgagactctcttgtgcagcctctggattcacctttagcggctatgccatgaactgggtccgccaggctccagggaagggtctggagtgggtctcatctattagtggcagtggttctaacacatactacgcagactccgtggcgggccggttcaccatctccagagacaattccggtaatactctgtatctacaaatgaacagcctgagagccgaggacacggccttatatttctgtgcgaaagaccggatgagcagccaacggcggggacactttgactcctggggccagggaaccctgctcatcgtctcctcag

SEQ ID NO: 4348 - DNA, 367 bp, Homo sapiens
gaggtgcagttgttggagtctgggggaggcttggtacagcctggggggtccctgagactctcctgtgcagcctctggattcacctttagcagctatgccatgagctgggtccgccaggctccagggaaggggctggagtgggtctcagctattagtggtagtggtggtagcacatactacgcagactccgtgaagggccggttcaccatctccagagacaattccaagaacacgctgtatctgcaaatgaacagcctgagagccgaggacacggccgtatattactgtggactctctacggggcggggtccaattggcagtggccttaactactggggccagggaaccctggtcaccgtctcctcag

SEQ ID NO: 4349 - DNA, 365 bp, Homo sapiens
caggtgcagctggtgcagtctggggctgaggtgaagaagcctggggcctcagttaaggtctcctgcaagggctcaggatacagcttcaccggctactctatacactgggtgcgacaggcccctggacaagggcttgagtggatgggatggatcaacccttacactggtggcacaagctatgcacagaagtttcagggctgggtcaccatgaccagggacacgtccatcagcacagcctacatggagctgagcaggctgaagtctgacgacacggccgtgtattactgtgcgagagcccctccctttagtacctcgaccgtgggtgtggactactggggccagggaaccctagtcaccgtctcctc

SEQ ID NO: 4350 - DNA, 367 bp, Homo sapiens
caggtgcagctgcaggagtcgggcccaggactggtgaagccttcggggaccctgtccctcacctgcgctgtctctggtggctccatcagcagtagtaactggtggagttgggtccgccagcccccagggaaggggctggagtggattggggaaatctatcatagtgggagcaccaactacaacccgtccctcaagagtcgagtcaccatatcagtagacaagtccaagaaccagttctccctgaagctgagctctgtgaccgccgcggacacggccgtgtattactgtgcgagccgccggtcgggtatagcagcagctggtttttttgactactggggccagggaaccctggtcaccgtctcctcag

SEQ ID NO: 4351 - DNA, 367 bp, Homo sapiens
caggtgcagctgcaggagtcgggcccaggactggtgaagccttcggggaccctgtccctcacctgcgctgtctctggtggctccatcagcagtagtaactggtggagttgggtccgccagcccccagggaaggggctggagtggattggggaaatctatcatagtgggagcaccaactacaacccgtccctcaagagtcgagtcaccatatcagtagacaagtccaagaaccagttctccctgaagctgagctctgtgaccgccgcggacacggccgtgtattactgtgcgagaggatattgtagtggtggtagctgctacccctttgactactggggccagggaaccctggtcaccgtctcctcag

SEQ ID NO: 4352 - DNA, 372 bp, Homo sapiens
caggtgcagctggtggagtctgggggaggcttggtcaagcctggagggtccctgagactctcctgtgcagcctctggattcaccttcagtgactactacatgagctggatccgccaggctccagggaaggggctggagtgggtttcatacattagtagtagtggtagtaccatatactacgcagactctgtgaagggccgattcaccatctccagggacaacgccaagaactcactgtatctgcaaatgaacagcctgagagccgaggacacggccgtgtattactgtgcgaggccccaccgcggggtaactacgtactactactacggtatggacgtctggggccaagggaccacggtcaccgtctcctca

SEQ ID NO: 4353 - DNA, 373 bp, Homo sapiens
caggtgcagctggtgcagtctggggctgagttgaggaagcctggggcctcagtgaaggtctcctgcaaggcttctggatacaccttcaccggccactatatgcactgggtgcgacaggcccctggacaagggcttcagtggatgggatggatcaaccctaacagtggtggcacacactatgcacagaagtttcagggcagggtcaccatgacccgggacacgtccatcaacacagtctacctggagttgagcaggctgacatctgacgacacggccgtctattactgtgcgagagattccgaggctgacatagtggctacggacgataagtttgactactggggccagggaaccctggtcaccgtctcctcag

SEQ ID NO: 4354 - DNA, 376 bp, Homo sapiens
caggtgcagctgcaggagtcgggcccaggactggtgaagccttcacagaccctgtccctcacctgcactgtctctggtggctccatcagcagtggtggttactactggagctggatccgccagcacccagggaagggcctggagtggattgggtacatctattacagtgggagcacctactacaacccgtccctcaagagtcgagttaccatatcagtagacacgtctaagaaccagttctccctgaagctgagctctgtgactgccgcggacacggccgtgtattactgtgcgagagatcgcccgtccggtatagcagcagctggtggggagtttgactactggggccagggaaccctggtcaccgtctcctcag

SEQ ID NO: 4355 - DNA, 376 bp, Homo sapiens
cagctgcagctgcaggagtcgggcccaggactggtgaagccttcggagaccctgtccctcacctgcactgtctctggtggctccatcagcagtagtagttactactggggctggatccgccagcccccagggaaggggctggagtggattgggagtatctattatagtgggagcacctactacaacccgtccctcaagagtcgagtcaccatatccgtagacacgtccaagaaccagttctccctgaagctgagctctgtgaccgccgcagacacggctgtgtattactgtgcgagaaaattcgcccgaaattactatgatagtagtggttacattgactactggggccagggaaccctggtcaccgtctcctcag

SEQ ID NO: 4356 - DNA, 376 bp, Homo sapiens
caggtgcagctgcaggagtcgggcccaggactggtgaagccttcacagaccctgtccctcacctgcactgtctctggtggctccatcagcagtggtgattactactggagttggatccgccagcccccagggaagggcctggagtggattgggtacatctattacagtgggagcacctactacaacccgtccctcaagagtcgagttaccatatcagtagacacgtccaagaaccagttctccctgaagctgagctctgtgactgccgcagacacggccgtgtattactgtgcctccacccacggggttatgactacggtgacctccggtgcttttgatatctggggccaagggacaatggtcaccgtctcttcag

SEQ ID NO: 4357 - DNA, 370 bp, Homo sapiens
caggtgcagctgcaggagtcgggcccaggactggtgaagccttcggagaccctgtccctcacctgcactgtctctggtggctccatcagtagttactactggagctggatccggcagcccccagggaagggactggagtggattgggtatatctattacagtgggagcaccaactacaacccctccctcaagagtcgagtcaccatatcagtagacacgtccaagaaccagttctccctgaagctgagctctgtgaccgctgcggacacggccgtgtattactgtgcgagaggccccccttacgggactatgggggggcagggtgcttttgatatctggggccaagggacaatggtcaccgtctcttcag

SEQ ID NO: 4358 - DNA, 372 bp, Homo sapiens
gaggtgcagctggtggagtccgggggaggcttagttcagcctggggggtccctgagactctcctgtgcagcctctggattcaccttcagtagctactggatgcactgggtccgccaagctccagggaaggggctggtgtgggtctcacgtattaatagtgatgggagtagcacaagctacgcggactccgtgaagggccgattcaccatctccagagacaacgccaagaacacgctgtatctgcaaatgaacagtctgagagccgaggacacggctgtgtattactgtgcaagcaagggtttttggagtggttattataactactacggtatggacgtctggggccaagggaccacggtcaccgtctcctca

SEQ ID NO: 4359 - DNA, 373 bp, Homo sapiens
gaggtgcagctggtgcagtctggagcagaggtgaaaaagcccggggagtctctgaagatctcctgtaagggttctggatacagctttaccagctactggatcggctgggtgcgccagatgcccgggaaaggcctggagtggatggggatcatctatcctggtgactctgataccagatacagcccgtccttccaaggccaggtcaccatctcagccgacaagtccatcagcaccgcctacctgcagtggagcagcctgaaggcctcggacaccgccatgtattactgtgcgagaccagcctggagtagcagtggctggtacggaggatacttccagcactggggccagggcaccctggtcaccgtctcctcag

SEQ ID NO: 4360 - DNA, 373 bp, Homo sapiens
caggtgcagctggtgcagtctggggctgaggtgaagaagcctggggcctcagtgaaggtttcctgcaaggcatctggatacaccttcaccagctactatatgcactgggtgcgacaggcccctggacaagggcttgagtggatgggaataatcaaccctagtggtggtagcacaagctacgcacagaagttccagggcagagtcaccatgaccagggacacgtccacgagcacagtctacatggagctgagcagcctgagatctgaggacacggccgtgtattactgtgcgagagatcaggctacggtgactacgaaagtccctgaatacttccagcactggggccagggcaccctggtcaccgtctcctcag

SEQ ID NO: 4361 - DNA, 372 bp, Homo sapiens
caggtgcagctggtgcagtctggggctgaggtgaagaagcctggggcctcagtgaaggtctcctgcaaggcttctggatacaccttcaccggctactatatgcactgggtgcgacaggcccctggacaagggcttgagtggatgggatggatcaaccctaacagtggtggcacaaactatgcacagaagtttcagggcagggtcaccatgaccagggacacgtccatcagcacagcctacatggagctgagcaggctgagatctgacgacacggccgtgtattactgtgcgagaggggggttcggggtctcatcctactactactacggtatggacgtctggggccaagggaccacggtcaccgtctcctca

SEQ ID NO: 4362 - DNA, 382 bp, Homo sapiens
caggtacagctgcagcagtcaggtccaggactggtgaagccctcgcagaccctctcactcacctgtgccatctccggggacagtgtctctagcaacagtgctgcttggaactggatcaggcagtccccatcgagaggccttgagtggctgggaaggacatactacaggtccaagtggtataatgattatgcagtatctgtgaaaagtcgaataaccatcaacccagacacatccaagaaccagttctccctgcagctgaactctgtgactcccgaggacacggctgtgtattactgtgcaagagcctaccgacctagtgggagctactacgttctggcttttgatatctggggccaagggacaatggtcaccgtctcttcag

SEQ ID NO: 4363 - DNA, 382 bp, Homo sapiens
caggtacagctgcagcagtcaggtccaggactggtgaagccctcgcagaccctctcactcacctgtgccatctccggggacagtgtctctagcaacagtgctgcttggaactggatcaggcagtccccatcgagaggccttgagtggctgggaaggacatactacaggtccaagtggtataatgattatgcagtatctgtgaaaagtcgaataaccatcaacccagacacatccaagaaccagttctccctgcagctgaactctgtgactcccgaggacacggctgtgtattactgtgcaagagtccctattgtagtggtggtagctgcaacgggtgcttttgatatctggggccaagggacaatggtcaccgtctcttcag

SEQ ID NO: 4364 - DNA, 358 bp, Homo sapiens
caggtgcagctgcaggagtcgggcccaggactggtgaagccttcacagaccctgtccctcacctgcactgtctctggtggctccatcagcagtggtggttactactggagctggatccgccagcacccagggaagggcctggagtggattgggtacatctattacagtgggagcacctactacaacccgtccctcaagagtcgagttaccatatcagtagacacgtctaagaaccagttctccctgaagctgagctctgtgactgccgcggacacggccgtgtattactgtgcgagagccagaccgatagagcactttgactactggggccagggaaccctggtcaccgtctcctcag

SEQ ID NO: 4365 - DNA, 373 bp, Homo sapiens
gaggtgcagctggtggagtctgggggaggcatggtccagcctggggggtcccggagactctcctgtgcagcctctggattcacctttagcgcctactggatgagctgggtccgccagtctccagggaaggggctggagtgggtggccaacgtgaagcaagatggaagtgacacatactatatggactccgtgaagggccgattcaccatctccagagacaacgccaagaactcactgtatctgcaaatgaacagcctgggagccgaggacacggctgtgtattactgtgcgagaggtactactctgtggcggctggccaccgaaaatgcttttgatatctggggccaagggacaatggtcaccgtctcttcag

SEQ ID NO: 4366 - DNA, 373 bp, Homo sapiens
gaggtgcagctggtgcagtctggagcagaggtgaaaaagcccggggagtctctgaagatctcctgtaagggttctggatacagctttaccagctactggatcggctgggtgcgccagatgcccgggaaaggcctggagtggatggggatcatctatcctggtgactctgataccagatacagcccgtccttccaaggccaggtcaccatctcagccgacaagtccatcagcaccgcctacctgcagtggagcagcctgaaggcctcggacaccgccatgtattactgtgcgattcacctatcaccgacttatagcagctcgtccgggtggttcgacccctggggccagggaaccctggtcaccgtctcctcag

SEQ ID NO: 4367 - DNA, 355 bp, Homo sapiens
gaggtgcagctgttggagtctgggggaggcttggtacagcctggggggtccctgagactctcctgtgcagcctctggattcacctttagcagctatgccatgagctgggtccgccaggctccagggaaggggctggagtgggtctcagctattagtggtagtggtggtagcacatactacgcagactccgtgaagggccggttcaccatctccagagacaattccaagaacacgctgtatctgcaaatgaacagcctgagagccgaggacacggccgtatattactgtgcgaaaggtccaggcatctcacgatttgactactggggccagggaaccctggtcaccgtctcctcag

SEQ ID NO: 4368 - DNA, 355 bp, Homo sapiens
gaggtgcagctggtggagtctgggggaggcttggtccagcctggggggtccctgagactctcctgtgtaggctctggattcacctttaataactatcaaatgagttgggtccgccaggctccagggaaggggctggagtgggtggccaacataaagcaagatgcaagtgagaaattctatgtggactctgtgaagggccgattcaccatctccagagacaacgccaggaactcactgtatctgcaaatgaacagcctgagagccgaggacacggctgtttattactgtgcgagagagggggtggatacaagtatgattaagtggggcctgggaaccctggtcaccgtctcctcag

SEQ ID NO: 4369 - DNA, 355 bp, Homo sapiens
caggttcagctggtgcagtctggagctgaggtgaagaagcctggggcctcagtgaaggtctcctgcaaggcttctggttacacctttaccagttatgctatcagttgggtgcgacaggcccctggacaagggcttgagtggatgggatgggtcagcgcttacaatggtaacacaaattatgcacagaagctccagggcagagtcaccatgaccacagacacatccacgaacacagcctacatggagctgaggagcctgagatctgacgacacggccatttattactgtgcgataccgtatagtagtgtcacgtttgactgctggggccagggaaccctggtcaccgtctcctcag

SEQ ID NO: 4370 - DNA, 355 bp, Homo sapiens
gaggtgcagctggtggagtctgggggaggcctggtcaagcctggggggtccctgagagtctcctgtgtagcctctggattcacgttcagtacctataggatgaactgggtccgccaggctccagggaagggactggagtgggtctcatccattagtggtagtagtgattacatatactacgcagactcagtgaagggccgattcaccatctccagagacaacgccaagaactcactatttctgcaattgaacagcctgagagccgaggacacggctgtttattattgtgcgagagatatggctgggtggtacttcgatctctggggccgtggcaccctggtcactgtctcctcag

SEQ ID NO: 4371 - DNA, 363 bp, Homo sapiens
gaagtgcagctggtggagtctgggggaggcttggtacagcctggcaggtccctgagactctcctgtgcagcctctggattcacctttgatgattatgccatgcactgggtccggcaagctccagggaagggcctggagtgggtctcaggtattagttggaatagtggtagcataggctatgcggactctgtgaagggccgattcaccatctccagagacaacgccaagaactccctgtatctgcaaatgaacagtctgagagctgaggacacggccttgtattactgtgcaaaagggttgaggctggtacggccggggggtatggacgtctggggccaagggaccacggtcaccgtctcctca

SEQ ID NO: 4372 - DNA, 360 bp, Homo sapiens
gaggtgcagctggtggagtctggaggaggcttggtgcagcctggggggtccctgagactctcctgtgtcgcctctggattcaccgtcactaacaacttcatgaactggatccgccaggctccagggatggggctggagtgggtcgcagttgtttaccccggaggtggctccgactattcagactccgtgaagggccgattcatcatctccagagacaactccaagaacacggtgtatcttcaaatgaacagcctgagaagcgaagacacggccatatattactgtgcgagagattcgcagccacactattactacggtgtggacgtctggggccaaggggccacggtcaccgtctcctca

SEQ ID NO: 4373 - DNA, 355 bp, Homo sapiens
caggtgcagctggtggagtctgggggaggcgtggtccagcctgggaggtccctgagactctcctgtgcagcctctggattcaccttcagtagctatggcatgcactgggtccgccaggctccaggcaaggggctggagtgggtggcagttatatcatatgatggaagtaataaatactatgcagactccgtgaagggccgattcaccatctccagagacaattccaagaacacgctgtatctgcaaatgaacagcctgagagctgaggacacggctgtgtattactgtgcgaaagatcagggtgggagctactttgactactggggccagggaaccctggtcaccgtctcctcag

SEQ ID NO: 4374 - DNA, 355 bp, Homo sapiens
caggtgcagctgcaggagtcgggcccaggactggtgaagccttcggggaccctgtccctcacctgcgctgtctctggtggctccatcagcagtagtaactggtggagttgggtccgccagcccccagggaaggggctggagtggattggggaaatctatcatagtgggagcaccaactacaacccgtccctcaagagtcgagtcaccatatcagtagacaagtccaagaaccagttctccctgaagctgagctctgtgaccgccgcggacacggccgtgtattactgtgcgagagagggtgactacaaactttttgactactggggccagggaaccctggtcaccgtctcctcag

SEQ ID NO: 4375 - DNA, 364 bp, Homo sapiens
gaggtgcagctggtgcagtctggagcagaggtgaaaaagcccggggagtctctgaagatctcctgtaagggttctggatacagctttaccagctactggatcggctgggtgcgccagatgcccgggaaaggcctggagtggatggggatcatctatcctggtgactctgataccagatacagcccgtccttccaaggccaggtcaccatctcagccgacaagtccatcagcaccgcctacctgcagtggagcagcctgaaggcctcggacaccgccatgtattactgtgcgagacgcgacggtggtaactccgtatatgcttttgatatctggggccaagggacaatggtcaccgtctcttcag

SEQ ID NO: 4376 - DNA, 364 bp, Homo sapiens
gaggtgcagttggtggagtctgggggaggcttggtccagcctggggggtccctgagactctcctgtacaacctctggattcaccttcagcaactattggatgaactgggtccgccaggctccagggaaggggctggagtgggtggccgacatgaagcaagatgggagtgagaagtattatgtggactctgtgaagggccgattcaccatctccagagacaacccaaagaattcactatatctgcaaatgaacagcctgagagtcgaggacacggctgtatatttctgtgtgagaggcagcagtggccggaacgtcggtgtttccgatatctggggccaagggacaacggtcatcgtctcttcag

SEQ ID NO: 4377 - DNA, 364 bp, Homo sapiens
caggtgcagctggtgcagtctggggctgaggtgaagaagcctggggcctcagtgaaggtctcctgcaaggcatctggatacagcttcagcaactactatatacactgggtccgacaggcccctggacaagggcttgagtggatgggaataattaactctagtggtggtagcacaagctacgcacagaggctccagggcagagtcaccatgaccagggacacgtccacgagcacagtctacatggagctgagcagcctgagatctgaggacacggccgtgtactactgtgcgagagaaggtacgggagctaggaccagttgctttgactactggggccagggaaccctggtcaccgtctcctcag

SEQ ID NO: 4378 - DNA, 364 bp, Homo sapiens
gaggtgcagctggtggagtctgggggaggtgtggtacggcctggggggtccctgagactctcctgtgcagcctctggattcacctttgatgattatggcatgagctgggtccgccaagctccagggaaggggctggagtgggtctctggtattaattggaatggtggtagcacaggttatgcagactctgtgaagggccgattcaccatctccagagacaacgccaagaactccctgtatctgcaaatgaacagtctgagagccgaggacacggccttgtatcactgtgcgagacactcttacggtgcccccgggggctggttcgacccctggggccagggaaccctggtcaccgtctcctcag

SEQ ID NO: 4379 - DNA, 367 bp, Homo sapiens
cagatcaccttgaaggagtctggtcctacgctggtgaaacccacacagaccctcacgctgacctgcaccttctctgggttctcactcagcactagtggagtgggtgtgggctggatccgtcagcccccaggaaaggccctggagtggcttgcactcatttattgggatgatgataagcgctacagcccatctctgaagagcaggctcaccatcaccaaggacacctccaaaaaccaggtggtccttacaatgaccaacatggaccctgtggacacagccacatattactgtgcacacacatcgctttgggtgactgctattccggttgactactggggccagggaaccctggtcaccgtctcctcag

SEQ ID NO: 4380 - DNA, 367 bp, Homo sapiens
caggtgcagctgcaggagtcgggcccaggactggtgaagccttcacagaccctgtccctcacctgcactgtctctggtgcctccatcagcagtgataattactactggacttggatccgccagcacccgggaaagggcctggagtggattgggtacatctactacagagggagcacctactacaatccgtccctcaagagtcgagtttccatatcagtagacacgtctcagaaccagttctccctgaagctgagctctgtgactgccgcggacacggccgtatattactgtgcgaccctggggacgagtatactagatcgtcgcgccgacttctggggccagggaaccctggtctacgtctcctcag

SEQ ID NO: 4381 - DNA, 361 bp, Homo sapiens
caggtgcagctgcaggagtcgggcccaggactggtgaagccttcggagaccctgtccctcacctgcactgtctctggtggcttcatcaatacttactactggagctggatccggcagcccccagggaagggactggaatggattgggtatatctattacagtgggaccaccaactacaactcctccctcaagagtcgagtcaccatttcactatacacgtccaggaaccagttctccctgaagctgaggtctgtgaccgctgcggacacggccgtctattactgtgcgagagtgcggggaatggctggcaccaaagtccttgactactggggccagggaaccctggtcaccgtctcctcag

SEQ ID NO: 4382 - DNA, 367 bp, Homo sapiens
cagctgcagctgcaggagtcgggcccaggactggtgaagccttcggagaccctgtccctcacctgcactgtctctggtggctccatcagcagtagtagttactactggggctggatccgccagcccccagggaaggggctggagtggattgggagtatctattatagtgggagcacctactacaacccgtccctcaagagtcgagtcaccatatccgtagacacgtccaagaaccagttctccctgaagctgagctctgtgaccgccgcagacacggctgtgtattactgtgcgagacatggagtggggcagcagctggcaaactttgactactggggccagggaaccctggtcaccgtctcctcag

SEQ ID NO: 4383 - DNA, 364 bp, Homo sapiens
caggtgcagctggtgcagtctggggctgaggtgaagaagcctgggtcctcggtgaaggtctcctgcaaggcttctggaggcaccttcagcagctatgctatcagctgggtgcgacaggcccctggacaagggcttgagtggatgggagggatcatccctatctttggtacagcaaactacgcacagaagttccagggcagagtcacgattaccgcggacgaatccacgagcacagcctacatggagctgagcagcctgagatctgaggacacggccgtgtattactgtgcgagagatcaggaggacccggaggggcttaaatttgactactggggccagggaaccctggtcaccgtctcctcag

SEQ ID NO: 4384 - DNA, 367 bp, Homo sapiens
cagctgcaactacaggagcccgcctcagcactggtcaagccttcacagaccctgtccctcacctgcgctgtctcgggtgactccttttacagttatgcttattcctggggctggtttcggcagccaccagggaagggcctggagtggattgggtacatctatcgtagtgggagcacgtcctacaacccgtccctcaagagtcgactcaccatttcaatagacgagtccaagaagcagttctccctgaacctgcactctgttagcgccgcggacacggccaaatattactgtgccagaaacaggggctcgtccttccgggggatctctgactcctggggccagggaatcctggtcaccgtctcttcag

SEQ ID NO: 4385 - DNA, 364 bp, Homo sapiens
caggtccagcttgtgcagtctggggctgaggtgaagaagcctggggcctcagtgaaggtttcctgcaaggcttctggatacaccttcactagctatgctatgcattgggtgcgccaggcccccggacaaaggcttgagtggatgggatggatcaacgctggcaatggtaacacaaaatattcacagaagttccagggcagagtcaccattaccagggacacatccgcgagcacagcctacatggagctgagcagcctgagatctgaagacacggctgtgtattactgtgcgagagctatgcagcagtggctgggctactactttgactactggggccagggaaccctggtcaccgtctcctcag

SEQ ID NO: 4386 - DNA, 362 bp, Homo sapiens
gaggtgcagctggtgcagtctggagcagaggtgaaaaagcccggggagtctctgaagatctcctgtaaggtttctggatacaggtttaccagttactggatcggctgggtgcgccagatgcccgggaaaggcctagagtggatgggaatgatctatcttagtgactctgatagcagagtcggcccgtccttccgaggccaggtcaccatctcagccgacaagtccatcagcaccgcctacctacagtggagcagcctgaagacctcggacagcgccgtctattactgcgcgaaaaagaaggacgaccgggcggaggccgtctttgactactggggccagggaaccctggtcaccgtctcctc

SEQ ID NO: 4387 - DNA, 361 bp, Homo sapiens
gaggtgcagctggtggagtctggaggaggcttgatccagcctggggggtccctgagactctcctgtgcagcctctgggttcaccgtcagtagcaactacatgagctgggtccgccaggctccagggaaggggctggagtgggtctcagttatttatagcggtggtagcacatactacgcagactccgtgaagggccgattcaccatctccagagacaattccaagaacacgctgtatcttcaaatgaacagcctgagagccgaggacacggccgtgtattactgtgcgaaaagggacagctatggttatgactggtacttcgatctctggggccgtggcaccctggtcactgtctcctcag

SEQ ID NO: 4388 - DNA, 367 bp, Homo sapiens
caggtgcagctgcaggagtcgggcccaggactggtgaagccttcacagaccctgtccctcacctgcactgtctctggtggctccatcagcagtggtgattactactggagttggatccgccagcccccagggaagggcctggagtggattgggtacatctattacagtgggagcacctactacaacccgtccctcaagagtcgagttaccatatcagtagacacgtccaagaaccagttctccctgaagctgagctctgtgactgccgcagacacggccgtgtattactgtgccagcgatcactacggtgactaccacaactggttcgacccctggggccagggaaccctggtcaccgtctcctcag

SEQ ID NO: 4389 - DNA, 364 bp, Homo sapiens
caggtgcaactgcaggagtcgggcccaggactggtgaagccttcggagaccctgtccctcacctgcgctgtctctggtggctccgtcagcagtggtagttgcttctggagctggatccggcagcccccagggaagggcctggagtggattgggtatatctattacagtgggaacaccaactacaacccctccctcaagagtcgagtcaccatatcagtagacacgtccaagaaccagttctccctgaggctgagctctgtgaccgctgcggacacggccgtgtattactgtgcgagcctgcatcttagtccccacaactggttcgacccctggggccagggaaccctggtcaccgtctcctcag

SEQ ID NO: 4390 - DNA, 361 bp, Homo sapiens
gaggtgcagctggtggagtccgggggaggcttagttcagcctggggggtccctgagactctcctgtgcagcctctggattcgccttcagcagctattggatgcactgggtccgccaagctcctgggaaggggctggtgtgggtctcacgtattaatagtgatgggagtatcacaaactacgcggactccgtgaagggccgattcaccatctccagagacaacgccaagaacacgctgtatgtgcaattgaacagtctgagagtcgaggacacggctgtgtattactgtgcaagagatccgacttcggggtacaactggttcgacccctggggccagggaaccctggtcaccgtctcctcag

SEQ ID NO: 4391 - DNA, 361 bp, Homo sapiens
gaggtgcagctggtgcagtctggagcagaggtgaaaaagcccggggagtctctgaagatctcctgtaagggttctggatacagcttttccacctactggatcgcctgggtgcgccagatgcccgacaaaggcctggagtggatggggatcatctatcctggtgactctgataccagatacagcccgtccttccaaggccaggtcaccatctcagccgacaagtccatcaacaccgcctacctgcagtggagcagcctgaaggcctcggacaccgccatgtattactgtgcgagacccgactcgtgggtcgagacgaactttgactactggggccagggaaccctggtcaccgtctcctcag

SEQ ID NO: 4392 - DNA, 364 bp, Homo sapiens
caggtgcagctgcaggagtcgggcccaggactggtgaagccttcacagaccctgtccctcacctgcactgtctctggtggctccatcagcagtggtggttactactggagctggatccgccagcacccagggaagggcctggagtggattgggtacatctattacagtgggagcacctactacaacccgtccctcaagagtcgagttaccatatcagtagacacgtctaagaaccagttctccctgaagctgagctctgtgactgccgcggacacggccgtgtattactgtgcgagagactattgtagtggtggtagctgctttgactactggggccagggaaccctggtcaccgtctcctcag

SEQ ID NO: 4393 - DNA, 358 bp, Homo sapiens
gaggtacaactgatggagtctggaggaggcttgatccagcctggggggtccctgagactctcctgtgcagcctctgggttcatcgtcagtagcaactacatgagctgggtccgccaggctccagggaaggggctggagtgggtctcagttatttatagcggtggtggcacagactacgcagactccgtgaagggccgattcaccatctccagagacaattccaagaacacactgtttcttcaaatgaacagcctgagagccgaggacacggccgtgtattactgtgcgagaggagccgctatggttaaagagttgtttgactactggggccagggaacccaggtcaccgtctcctcag

SEQ ID NO: 4394 - DNA, 361 bp, Homo sapiens
caggtgcagctggtggagtctgggggaggcgtggtccagcctgggaggtccctgagactctcctgtgcagcgtctggattcaccttcagtagctatggcatgcactgggtccgccaggctccaggcaaggggctggagtgggtggcagttatatggtatgatggaagtaataaatactatgcagactccgtgaagggccgattcaccatctccagagacaattccaagaacacgctgtatctgcaaatgaacagcctgagagccgaggacacggctgtgtattactgtgcgagagagctaccctatagcagcagggggtttgactactggggccagggaaccctggtcaccgtctcctcag

SEQ ID NO: 4395 - DNA, 364 bp, Homo sapiens
cagatcaccttgaaggagtctggtcctacgctggtgaaacccacacagaccctcacgctgacctgcaccttctctgggttctcactcagcactagtggagtgggtgtgggctggatccgtcagcccccaggaaaggccctggagtggcttgcactcatttattgggatgatgataagcgctacagcccatctctgaagagcaggctcaccatcaccaaggacacctccaaaaaccaggtggtccttacaatgaccaacatggaccctgtggacacagccacatattactgtgcacaccggctacggtggtacccaactagctttgactactggggccagggaaccctggtcaccgtctcctcag

SEQ ID NO: 4396 - DNA, 360 bp, Homo sapiens
caggtgcagctggtgcagtctggggctgaggtgaagaagcctggggcctcagtgaaggtttcctgcaaggcatctggatacaccttcaccagctactatatgcactgggtgcgacaggcccctggacaagggcttgagtggatgggaataatcaaccctagtggtggtagcacaagctacgcacagaagttccagggcagagtcaccatgaccagggacacgtccacgagcacagtctacatggagctgagcagcctgagatctgaggacacggccgtgtattactgtgcgagcttagtgggagctacctactacggtatggacgtctggggccaagggaccacggtcaccgtctcctca

SEQ ID NO: 4397 - DNA, 358 bp, Homo sapiens
caggtgcagctggtggagtctgggggaggcgtggtccagcctgggaggtccctgagactctcctgtgcagcctctggattcaccttcagtagctatggcatgcactgggtccgccaggctccaggcaaggggctggagtgggtggcggttatatccaatgatgaaagtaatatctactatgcagactccgtgaagggccgattcaccatctccagggacaattccaagaacacgctgtttctgcaaatgaacagcctgagacctgaggacacggctgtgtattactgtgcgaaagatcgacaatacgggcagggttctgaatactggggccagggagccctggtcaccgtctcctcag

SEQ ID NO: 4398 - DNA, 355 bp, Homo sapiens
caggtgcagctgcaggagtcgggcccaggactggtgaagccttcggagaccctgtccctcacctgcactgtctctggtggctccatcagtggttactactggagctggatccggcagcccgccgggaagggactgcagtggattgggcgtatttatgtcggtgagaacaccctctacagcccttccttcaagagtcgagtcaccttgtcagtagacacgtccaagaaccagctctccctgaccctgaactctgtgaccgccgcggacacggccgtctattattgtgcgagattaagtgatgggaggggtgtaattgactactggggccagggaatcctggtcaccgtctcctcag

SEQ ID NO: 4399 - DNA, 358 bp, Homo sapiens
caggtgcagctgcaggagtcgggcccaggactggtgaagccttcggggaccctgtccctcacctgcgctgtctctggtggctccatcagcagtagtaactggtggagttgggtccgccagcccccagggaaggggctggagtggattggggaaatctatcatagtgggagcaccaactacaacccgtccctcaagagtcgagtcaccatatcagtagacaagtccaagaaccagttctccctgaagctgagctctgtgaccgccgcggacacggccgtgtattactgtgcggctatacgatttttggacaaggtggttgactactggggccagggaaccctggtcaccgtctcctcag

SEQ ID NO: 4400 - DNA, 355 bp, Homo sapiens
caggtgcagctgcaggagtcgggcccaggactggtgaagccttcggagaccctgtccctcacctgcactgtctctggtggctccatcagtagttactactggagctggatccggcagcccccagggaagggactggagtggattgggtatatctattacagtgggagcaccaactacaacccctccctcaagagtcgagtcaccatatcagtagacacgtccaagaaccagttctccctgaagctgagctctgtgaccgctgcggacacggccgtgtattactgtgcgagatccggagggtggttcggggagcttgactactggggccagggaaccctggtcaccgtctcctcag

SEQ ID NO: 4401 - DNA, 358 bp, Homo sapiens
gaggtgcagctggtggagtctgggggaggcttggtccagccgggggggtccctgagactctcctgtgcagcctctggattcacctttagtagctattggatgagctgggtccgccaggctccagggaaggggctggagtgggtggccaacataaacgaagatggaaataagaaatactatgtggactctgtgaagggccgattcaccatctccagagacaacgccaagaactcactgtatctgcaaatgaacaccctgagagccgaggacacggctctttattactgtgcgcttagaactgggagcggagcgggttataactactggggccagggaaccctggtcaccgtctcctcag

SEQ ID NO: 4402 - DNA, 361 bp, Homo sapiens
gaggtgcaactggtggagtctgggggaggcttggtccagcctggtggggggtccctgagactctcctgtgcagcctctggattcacgtttagtacctattggatgagctgggtccgccaggctccagggaaggggctggagtgggtggccaacataaaggaagatggaagtgagaaatactatgtggactctgtgaagggccgagtcaccatctccagagacaacgccaagaattcactgtatctgcaaatgaacagcctgagagtcgaggacacggctgtgtactactgtgcgagagtgagatggctacaaggaggaattgactactggggccagggaaccctggtcaccgtctcctcag

SEQ ID NO: 4403 - DNA, 384 bp, Homo sapiens
gaggtgcagctggtggagtccgggggaggcttggtccagcctggggggtccctgaaactctcctgtgcagcctctgggttcaccttcagtggctctgctatgcactgggtccgccaggcttccgggaaagggctggagtgggttggccgtattagaagcaaagctaacagttacgcgacagcatatgctgcgtcggtgaaaggcaggttcaccatctccagagatgattcaaagaacacggcgtatctgcaaatgaacagcctgaaaaccgaggacacggccgtgtattactgtactagacattcggcctatggttcaggggggttctactactactacggtatggacgtctggggccaagggaccacggtcaccgtctcctca

SEQ ID NO: 4404 - DNA, 378 bp, Homo sapiens
caggtgcagctggtgcagtctggggctgaggtgaagaagcctgggtcctcggtgaaggtctcctgcaaggcttctggaggcaccttcagcagctatgctatcagctgggtgcgacaggcccctggacaagggcttgagtggatgggagggatcatccctatctttggtacagcaaactacgcacagaagttccagggcagagtcacgattaccgcggacgaatccacgagcacagcctacatggagctgagcagcctgagatctgaggacacggccgtgtattactgtgcgagagcccatattgtagtagtaccagctgcttactactactacggtatggacgtctggggccaagggaccacggtcaccgtctcctca

SEQ ID NO: 4405 - DNA, 378 bp, Homo sapiens
caggtccagcttgtgcagtctggggctgaggtgaagaagcctggggcctcagtgaaggtttcctgcaaggcttctggatacaccttcactagctatgctatgcattgggtgcgccaggcccccggacaaaggcttgagtggatgggatggatcaacgctggcaatggtaacacaaaatattcacagaagttccagggcagagtcaccattaccagggacacatccgcgagcacagcctacatggagctgagcagcctgagatctgaagacacggctgtgtattactgtgcgagggcgggggaaagctatggttacgttggctactactactacggtatggacgtctggggccaagggaccacggtcaccgtctcctca

SEQ ID NO: 4406 - DNA, 379 bp, Homo sapiens
gaagtgcagctggtggagtctgggggaggcttggtacagcctggcaggtccctgagactctcctgtgcagcctctggattcacctttgatgattatgccatgcactgggtccggcaagctccagggaagggcctggagtgggtctcaggtattagttggaatagtggtagcataggctatgcggactctgtgaagggccgattcaccatctccagagacaacgccaagaactccctgtatctgcaaatgaacagtctgagagctgaggacacggccttgtattactgtgcaaaagccacaccgagcctttggagtggttattatacccagtactactttgactactggggccagggaaccctggtcaccgtctcctcag

SEQ ID NO: 4407 - DNA, 379 bp, Homo sapiens
caggtgcagctggtggagtctgggggaggcgtggtccagcctgggaggtccctgagactctcctgtgcagcctctggattcaccttcagtagctatggcatgcactgggtccgccaggctccaggcaaggggctggagtgggtggcagttatatcatatgatggaagtaataaatactatgcagactccgtgaagggccgattcaccatctccagagacaattccaagaacacgctgtatctgcaaatgaacagcctgagagctgaggacacggctgtgtattactgtgctaaagacgtattacgatattttgactggttattatcccccaactggttcgacccctggggccagggaaccctggtcaccgtctcctcag

SEQ ID NO: 4408 - DNA, 379 bp, Homo sapiens
caggtgcagctggtggagtctgggggaggcgtggtccagcctgggaggtccctgagactctcctgtgcagcgtctggattcaccttcagtagctatggcatgcactgggtccgccaggctccaggcaaggggctggagtgggtggcagttatatggtatgatggaagtaataaatactatgcagactccgtgaagggccgattcaccatctccagagacaattccaagaacacgctgtatctgcaaatgaacagcctgagagccgaggacacggctgtgtattactgtgcgagagatcaaaccaaatatagtggctacgactacgggtacaactggttcgacccctggggccagggaaccctggtcaccgtctcctcag

SEQ ID NO: 4409 - DNA, 382 bp, Homo sapiens
cagctgcagctgcaggagtccggctcaggactggtgaagccttcacagaccctgtccctcacctgcgctgtctctggtggctccatcagcagtggtggttactcctggagctggatccggcagccaccagggaagggcctggagtggattgggtacatctatcatagtgggagcacctactacaacccgtccctcaagagtcgagtcaccatatcagtagacaggtccaagaaccagttctccctgaagctgagctctgtgaccgccgcggacacggccgtgtattactgtgccagagaggccccgaattattgtagtggtggtagctgctcgtactactttgactactggggccagggaaccctggtcaccgtctcctcag

SEQ ID NO: 4410 - DNA, 379 bp, Homo sapiens
caggtgcagctggtgcagtctggggctgaggtgaagaagcctgggtcctcggtgaaggtctcctgcaaggcttctggaggcaccttcagcagctatgctatcagctgggtgcgacaggcccctggacaagggcttgagtggatgggagggatcatccctatctttggtacagcaaactacgcacagaagttccagggcagagtcacgattaccgcggacgaatccacgagcacagcctacatggagctgagcagcctgagatctgaggacacggccgtgtattactgtgcgagcacttaccggacgtatagcagcagctggtattttcggaactggttcgacccctggggccagggaaccctggtcaccgtctcctcag

SEQ ID NO: 4411 - DNA, 381 bp, Homo sapiens
caggtgcagctggtggagtctgggggaggcgtggtccagcctgggaggtccctgagactctcctgtgcagcgtctggattcaccttcagtagctatggcatgcactgggtccgccaggctccaggcaaggggctggagtgggtggcagttatatggtatgatggaagtaataaatactatgcagactccgtgaagggccgattcaccatctccagagacaattccaagaacacgctgtatctgcaaatgaacagcctgagagccgaggacacggctgtgtattactgtgcgagaggatattgtagtggtggtagctgctcaagctactactactacggtatggacgtctggggccaagggaccacggtcaccgtctcctca

SEQ ID NO: 4412 - DNA, 378 bp, Homo sapiens
caggtgcagctacagcagtggggcgcaggactgttgaagccttcggagaccctgtccctcacctgcgctgtctatggtgggtccttcagtggttactactggagctggatccgccagcccccagggaaggggctggagtggattggggaaatcaatcatagtggaagcaccaactacaacccgtccctcaagagtcgagtcaccatatcagtagacacgtccaagaaccagttctccctgaagctgagctctgtgaccgccgcggacacggctgtgtattactgtgcgagagagaaaaatattgcgagtggctacgattacttctactactacggtatggacgtctggggccaagggaccacggtcaccgtctcctca

SEQ ID NO: 4413 - DNA, 381 bp, Homo sapiens
gaggtgcagctggtgcagtctggagcagaggtgaaaaagcccggggagtctctgaagatctcctgtaagggttctggatacagctttaccagctactggatcggctgggtgcgccagatgcccgggaaaggcctggagtggatggggatcatctatcctggtgactctgataccagatacagcccgtccttccaaggccaggtcaccatctcagccgacaagtccatcagcaccgcctacctgcagtggagcagcctgaaggcctcggacaccgccatgtattactgtgcgagaatgaaggcagctcggggttttgggttttactactactactacggtatggacgtctggggccaagggaccacggtcaccgtctcctca

SEQ ID NO: 4414 - DNA, 381 bp, Homo sapiens
caggtgcagctggtgcagtctggggctgaggtgaagaaggctggggcctcagtgaaggtctcctgcaaggcttctggatacaccttcaccagttatgatatcaactgggtgcgacaggccagtggacaagggcttgagtggatgggatggatgaaccctataagtggaaacacaggctatgcacagaagttccagggcagagtcaccatgaccaggaatacctccataaccacagcctacatggagctgagcagcctgagatctgaggacacggccgtttatttctgtgcgagggggggtcgatattgtagtagtaccacctgctatagtggtgtgggtatggacgtctggggccaagggaccacggtcaccgtcccctca

SEQ ID NO: 4415 - DNA, 381 bp, Homo sapiens
gaagtgcagctggtggagtctgggggaggcttggtacagcctggcaggtccctgagactctcctgtgcagcctctggattcacctttgatgattatgccatgcactgggtccggcaagctccagggaagggcctggagtgggtctcaggtattagttggaatagtggtagcataggctatgcggactctgtgaagggccgattcaccatctccagagacaacgccaagaactccctgtatctgcaaatgaacagtctgagagctgaggacacggccttgtattactgtgcaaaagatgtggttcggggagttcccgaaggggtttactactactacggtatggacgtctggggccaagggaccacggtcaccgtctcctca

SEQ ID NO: 4416 - DNA, 382 bp, Homo sapiens
caggtgcagctggtgcaatctggggctgaagtgaagaagcctggggcctcagtgaaggtttcctgcaaggcatccggatacaccttcaccagctactatatgcactgcgtgcgacaggcccctggacaagggcttgagtggatgggaataatcaaccctaatgggggtggcacaaggtacgcacagaagttccaggacagagtcaccatgaccagagacacgtccacgagcacagtgtacatggagctgagcagcctgagatctgaggacacggccgtgtatttctgtgcgagaggtcataaaactaattactttgagagtggtggttacccaccgccgttggactactggggccagggaaccctggtcaccgtctcctcag

SEQ ID NO: 4417 - DNA, 391 bp, Homo sapiens
caggtacagctgcagcagtcaggtccaggactggtgaagccctcgcagaccctctcactcacctgtgccatctccggggacagtgtctctagcaacagtgctgcttggaactggatcaggcagtccccatcgagaggccttgagtggctgggaaggacatactacaggtccaagtggtataatgattatgcagtatctgtgaaaagtcgaataaccatcaacccagacacatccaagaaccagttctccctgcagctgaactctgtgactcccgaggacacggctgtgtattactgtgcaagagtccaaggggataatcagtgggagctacccccccggcatcacccctttgactactggggccagggaaccctggtcaccgtctcctcag

SEQ ID NO: 4418 - DNA, 382 bp, Homo sapiens
gaggtgcagctggtgcagtctggagcagaggtgagaaagcccggggagtctctgaagatctcctgtggggcttctggctacacctttagtgactactggatcggctgggtgcgccagatgcccgggaaagacctggagtggatggggatcatatatcctggtagctctgatatcagatacagcccgtccttccaaggccaggtcaccatctcagccgacacgtccaccactaccgcctatttggagtggagcagcctgaaggcctcggacaccgccatgtattattgtgcgagaagtccccgagcatactatgataaatatggttattattgcagatggttcgacctctggggccagggaaccctggtcaccgtctcctcag

SEQ ID NO: 4419 - DNA, 385 bp, Homo sapiens
caggtcaccttgaaggagtctggtcctgtgctggtgaaacccacagagaccctcacgctgacctgcaccgtctctgggttctcactcagcaattctagaatgggtgtgagctggatccgtcagcccccagggaaggccctggagtggcttgcacacattttttcgaatgacgaaaaatcctacagcacatctctgaagagcaggctctccatctccaaggacacctccaaaagccaggtggtccttaccatgaccaacatggaccctgtggacacagccacatattactgtgcacgggccctcgattactatgatagaagtggtcattacctaattgatgcttttgatatctggggccaagggacaatggtcaccgtctcttcag

SEQ ID NO: 4420 - DNA, 379 bp, Homo sapiens
caggtgcagttacaacagtggggcgcaggagtgctgaagccttcggagaccctgtccctcatgtgcgccgtctatgtcgggtcattcaatgatcattactggagttgggtccgccagtccccagggaaggggctggagtggattgggaaaatcaatcatagtggaagcaccaattacaacccgtccctcaagagtcgagtcatcatgtcagtggacacgtccaacaatcagttctccctgaagctgagttctgtgaccgccgcggacacggctgtatattactgtgcgagaggagcccggaacactgcggtggtggttggtgttgagggagacggttttgatatttggggccaagggacaagggtcaccgtctcttcag

SEQ ID NO: 4421 - DNA, 384 bp, Homo sapiens
caggtgcagctggtgcagtctggggctgaggtgaagaagcctggggcctcagtgaaggtctcctgcaagacttctggatacatcttcaccggctactatatgcactgggtgcgacaggcccctggacaagggcttgagtggatgggatggatcaaccctaacagtggtggcacaaactatgcacagaactttcggggcagggtcaccatgaccacagacacgtccatcagcacagcctacatggagctgagcaggctgagatctgacgacacggccgtgtactactgtgcgagagtgttggtggttgcccctgaaggaggagattactactactactacggtatggacgtctggggccaagggaccacggttaccgtctcctca

SEQ ID NO: 4422 - DNA, 384 bp, Homo sapiens
caggtgcagctgcaggagtcgggcccaggactggtgaagccttcggggaccctgtccctcacctgcgctgtctctggtggctccatcagcagtagtaactggtggagttgggtccgccagcccccagggaaggggctggagtggattggggaaatctatcatagtgggagcaccaactacaacccgtccctcaagagtcgagtcaccatatcagtagacaagtccaagaaccagttctccctgaagctgagctctgtgaccgccgcggacacggccgtgtattactgtgcgagagatgcgattggggattcagggagttatcgtaagtcctactactacggtatggacgtctggggccaagggaccacggtcaccgtctcctca

SEQ ID NO: 4423 - DNA, 381 bp, Homo sapiens
gaggtgcagctggtggagtctggaggaggcttgatccagcctggggggtccctgagactctcctgtgcagcctctgggttcaccgtcagtagcaactacatgagctgggtccgccaggctccagggaaggggctggagtgggtctcagttatttatagcggtggtagcacatactacgcagactccgtgaagggccgattcaccatctccagagacaattccaagaacacgctgtatcttcaaatgaacagcctgagagccgaggacacggccgtgtattactgtgcgagattaggatacgatttttggagtggttatgtaccctactactactacggtatggacgtctggggccaagggaccacggtcaccgtctcctca

SEQ ID NO: 4424 - DNA, 385 bp, Homo sapiens
caggtgcagctggtgcagtctggggctgaggtgaagaagcctggggcctcagtgaaggtctcctgcaaggcttctggatacaccttcaccggctactatatgcactgggtgcgacaggcccctggacaagggcttgagtggatgggatggatcaaccctaacagtggtggcacaaactatgcacagaagtttcagggcagggtcaccatgaccagggacacgtccatcagcacagcctacatggagctgagcaggctgagatctgacgacacggccgtgtattactgtgcgagagaccggtatagtgggagctacttcgaggggcgtgtattcgggggcgatagtccctactggggccagggaaccctggtcaccgtctcctcag

SEQ ID NO: 4425 - DNA, 393 bp, Homo sapiens
gaggtgcagctggtggagtctggaggaggcttgatccagcctggggggtccctgagactctcctgtgcagcctctgggttcaccgtcagtagcaactacatgagctgggtccgccaggctccagggaaggggctggagtgggtctcagttatttatagcggtggtagcacatactacgcagactccgtgaagggccgattcaccatctccagagacaattccaagaacacgctgtatcttcaaatgaacagcctgagagccgaggacacggccgtgtattactgtgcgagagatcaaagactacagctatggagggagacgaaccccgaacattactactactactacggtatggacgtctggggccaagggaccacggtcaccgtctcctca

SEQ ID NO: 4426 - DNA, 390 bp, Homo sapiens
caggtgcagctggtgcagtctggggctgaggtgaagaagcctgggtcctcggtgaaggtctcctgcaaggcttctggaggcaccttcagcagctatgctatcagctgggtgcgacaggcccctggacaagggcttgagtggatgggagggatcatccctatctttggtacagcaaactacgcacagaagttccagggcagagtcacgattaccgcggacgaatccacgagcacagcctacatggagctgagcagcctgagatctgaggacacggccgtgtattactgtgcggaaagccccttgtgtagtggtggtagctgctactcttcagtgggttactactacggtatggacgtctggggccaagggaccacggtcaccgtctcctca

SEQ ID NO: 4427 - DNA, 387 bp, Homo sapiens
caggtgcagctacagcagtggggcgcaggactgttgaagccttcggagaccctgtccctcacctgcgctgtctatggtgggtccttcagtggttactactggagctggatccgccagcccccagggaaggggctggagtggattggggaaatcaatcatagtggaagcaccaactacaacccgtccctcaagagtcgagtcaccatatcagtagacacgtccaagaaccagttctccctgaagctgagctctgtgaccgccgcggacacggctgtgtattactgtgcgagaggccacatttatggttcagggagatccctctggggatactactactactacggtatggacgtctggggccaagggaccacggtcaccgtctcctca

SEQ ID NO: 4428 - DNA, 370 bp, Homo sapiens
caggtgcagctggtggagtctgggggaggcgtggtccagcctgggaggtccctgagactctcctgtgcagcctctggattcaccttcagtagctatgctatgcactgggtccgccaggctccaggcaaggggctggagtgggtggcagttatatcatatgatggaagcaataaatactacgcagactccgtgaagggccgattcaccatctccagagacaattccaagaacacgctgtatctgcaaatgaacagcctgagagctgaggacacggctgtgtattactgtgcgagaattagggttggtgggttcagggagttattataccatggctactggggccagggaaccctggtcaccgtctcctcag

SEQ ID NO: 4429 - DNA, 370 bp, Homo sapiens
caggtgcagctggtggagtctgggggaggcgtggtccagcctgggaagtccctgagactctcctgtgcagcgtccggattcaccttcagtagccatgccatgcactgggtccgcctggctccaggcaaggggctggagtgggtggctgttatctggtatgatggcggtcaaaaatattacacagactccgtgaagggccgattcaccatctccagagacaattccaagaacaccctatatctacaaatgaatagtctgagagccgaggacacggctgtctattattgcgcgagagatcaggattggctgggactggcgatttctccccttgactactggggccagggaaccctggtcaccgtctcctcag

SEQ ID NO: 4430 - DNA, 370 bp, Homo sapiens
caggtgcagctggtgcagtctggggctgaggtgaagaggcctggggcctcagtgaaggtttcctgcaaggcatctggatacaccttcaccagctactatatgcactgggtgcgacaggcccctggacaagggcttgagtggatgggaataatcaaccctagtggtggtagcacaagctacgcacagaagttccagggcagagtcaccatgaccagggacacgtccacgagcacagtctacatggagctgagcagcctgagatctgaggacacggccgtgtattactgtgcgagatcccccccgtattactatgatagtagtggttatttcgactactggggccagggaaccctggtcaccgtctcctcag

SEQ ID NO: 4431 - DNA, 367 bp, Homo sapiens
gaggtgcagctggtggagtctggaggaggcttgatccagcctggggggtccctgagactctcctgtgcagcctctgggttcaccgtcagtagcaactacatgagctgggtccgccaggctccagggaaggggctggagtgggtctcagttatttatagcggtggtagcacatactacgcagactccgtgaagggccgattcaccatctccagagacaattccaagaacacgctgtatcttcaaatgaacagcctgagagccgaggacacggccgtgtattactgtgcgagggggaattgtagtggtggtagctgctactccggctttgactactggggccagggaaccctggtcaccgtctcctcag

SEQ ID NO: 4432 - DNA, 373 bp, Homo sapiens
caggtgcagctgcaggagtcgggcccaggactggtgaagccttcacagaccctgtccctcacctgcactgtctctggtggctccatcagcagtggtgattactactggagttggatccgccagcccccagggaagggcctggagtggattgggtacatctattacagtgggagcacctactacaacccgtccctcaagagtcgagttaccatatcagtagacacgtccaagaaccagttctccctgaagctgagctctgtgactgccgcagacacggccgtgtattactgtgccagaggtacaacggattactatggttcagggagttcatttgactactggggccagggaaccctggtcaccgtctcctcag

SEQ ID NO: 4433 - DNA, 388 bp, Homo sapiens
gaggtgcagctggtggagtctggaggaggcttgatccagcctggggggtccctgagactctcctgtgcagcctctgggttcaccgtcagtagcaactacatgagctgggtccgccaggctccagggaaggggctggagtgggtctcagttatttatagcggtggtagcacatactacgcagactccgtgaagggccgattcaccatctccagagacaattccaagaacacgctgtatcttcaaatgaacagcctgagagccgaggacacggccgtgtattactgtgcgagagtcttggattactatgatagtagtggttattacccccgtccccgaagctactactttgactactggggccagggaaccctggtcaccgtctcctcag

SEQ ID NO: 4434 - DNA, 373 bp, Homo sapiens
caggtgcagctgcaggagtcgggcccaggactggtgaagccttcggagaccctgtccctcacctgcactgtctctggtggctccgtcagcagtggtagttactactggagctggatccggcagcccccagggaagggactggagtggattgggtatatctattacagtgggagcaccaactacaacccctccctcaagagtcgagtcaccatatcagtagacacgtccaagaaccagttctccctgaagctgagctctgtgaccgctgcggacacggccgtgtattactgtgcgagaacgcagtattactatgatagtagtggttattactacgtcgactggggccagggaaccctggtcaccgtctcctcag

SEQ ID NO: 4435 - DNA, 370 bp, Homo sapiens
gaggtgcaactggtggagtctgggggaggcttggtacagcctggggggtccctgagactctcctgtgcagcctctggattcaccttcagtagctataacatgaactgggtccgccaggctccagggaaggggctggagtgggtttcatacattagtactagtagtagtaacatatactacgcagactctgtgaagggccgattcaccatctccagagacaatgccaagaactcactgtatctgcagatgaacagcctgagagacgaggactcggctgtctattactgtgcgagagggacttacggtgactacgctattacgaccctggaggagtactggggccagggagccctggtcaccgtctcctcag

SEQ ID NO: 4436 - DNA, 370 bp, Homo sapiens
gaggtgcagctggtggagtctgggggaggcttggtacagcctggagggtccctgagactctcctgtgcagcctctggattcaccttcagtagttatgaaatgaactgggtccgccaggctccagggaaggggctggagtgggtttcatacattagtagtagtggtagtaccatatactacgcagactctgtgaagggccgattcaccatctccagagacaacgccaagaactcactgtatctgcaaatgaacagcctgagagccgaggacacggctgtttattactgtgcgagatcaggatattgtagtagtaccagctgctatggcgatgactactggggccagggaaccctggtcaccgtctcctcag

SEQ ID NO: 4437 - DNA, 370 bp, Homo sapiens
gaggtgcagctggtggagtctgggggaggcttggtacagcctggagggtccctgagactctcctgtgcagcctctggattcaccttcagtagttatgaaatgaactgggtccgccaggctccagggaaggggctggagtgggtttcatacattagtagtagtggtagtaccatatactacgcagactctgtgaagggccgattcaccatctccagagacaacgccaagaactcactgtatctgcaaatgaacagcctgagagccgaggacacggctgtttattactgtgcgagagatcccctaatttttagtacggtgacttactactttgactactggggccagggaaccctggtcaccgtctcctcag

SEQ ID NO: 4438 - DNA, 373 bp, Homo sapiens
cagctgcagctgcaggagtccggctcaggactggtgaagccttcacagaccctgtccctcacctgcgctgtctctggtggctccatcagcagtggtggttactcctggagctggatccggcagccaccagggaagggcctggagtggattgggtacatctatcatagtgggagcacctactacaacccgtccctcaagagtcgagtcaccatatcagtagacaggtccaagaaccagttctccctgaagctgagctctgtgaccgccgcggacacggccgtgtattactgtgccagagtgataaggggggcatattgtggtggtgattgtcttgactactggggccagggaaccctggtcaccgtctcctcag

SEQ ID NO: 4439 - DNA, 369 bp, Homo sapiens
ggtgcagctgcaggagtcgggcccaggactggtgaagccttcacagaccctgtccctcacctgcactgtctctggtgacttcgtcaacagtggtgcttactactggagctggatccgccagcacccaggggagggcctggagtgcattggttacatttattacagtgggaccacctactacaacccgtccctcaagagtcgaattgacatgtcagtagacacgtctaaaaaccagttctccctgaagctgagctctgtgactgccgcggacacggccatatattactgtgcgagaaacctggggggttatcaccctttcaattactactttgactactggggccagggagttttggtcaccgtctcctc

SEQ ID NO: 4440 - DNA, 373 bp, Homo sapiens
caggtgcagctgcaggagtcgggcccaggactggtgaagccttcacagaccctgtccctcacctgcactgtctctggtggctccatcagcagtggtggttactactggagctggatccgccagcacccagggaagggcctggagtggattgggtacatctattacagtgggagcacctactacaacccgtccctcaagagtcgagttaccatatcagtagacacgtctaagaaccagttctccctgaagctgagctctgtgactgccgcggacacggccgtgtattactgtgcgagagaatccctccaaggtatagcagcagctggaccacttgactactggggccagggaaccctggtcaccgtctcctcag

SEQ ID NO: 4441 - DNA, 370 bp, Homo sapiens
caggtgcagctggtgcagtctggggctgaggtgaagaagcctggggcctcagtgaaggtctcctgcaaggcttctggatacaccttcaccggctactatatgcactgggtgcgacaggcccctggacaagggcttgagtggatgggatggatcaaccctaacagtggtggcacaaactatgcacagaagtttcagggcagggtcaccatgaccagggacacgtccatcagcacagcctacatggagctgagcaggctgagatctgacgacacggccgtgtattactgtgcgagagtttggaagacggcagctcgccctcaaggggggtttgactactggggccagggaaccctggtcaccgtctcctcag

SEQ ID NO: 4442 - DNA, 370 bp, Homo sapiens
gaggtgcagctgttggagtctgggggaggcttggtacagcctggggggtccctgagactctcctgtgcagcctctggattcacctttagcagctatgccatgagctgggtccgccaggctccagggaaggggctggagtgggtctcagctattagtggtagtggtggtagcacatactacgcagactccgtgaagggccggttcaccatctccagagacaattccaagaacacgctgtatctgcaaatgaacagcctgagagccgaggacacggccgtatattactgtgcgaaagaccgtaattactatgatagtagtggttattaccccgcgtactggggccagggaaccctggtcaccgtctcctcag

SEQ ID NO: 4443 - DNA, 373 bp, Homo sapiens
cagctgcagctgcaggagtcgggcccaggactggtgaagccttcggagaccctgtccctcacctgcactgtctctggtggctccatcagcagtagtagttactactggggctggatccgccagcccccagggaaggggctggagtggattgggagtatctattatagtgggagcacctactacaacccgtccctcaagagtcgagtcaccatatccgtagacacgtccaagaaccagttctccctgaagctgagctctgtgaccgccgcagacacggctgtgtattactgtgcgagacggaaattttggagtggttattccctgtactactttgactactggggccagggaaccctggtcaccgtctcctcag

SEQ ID NO: 4444 - DNA, 366 bp, Homo sapiens
caggtgcagctacagcagtggggcgcaggactgttgaagccttcggagaccctgtccctcacctgcgctgtctatggtgggtccttcagtggttactactggagctggatccgccagcccccagggaaggggctggagtggattggggaaatcaatcatagtggaagcaccaactacaacccgtccctcaagagtcgagtcaccatatcagtagacacgtccaagaaccagttctccctgaagctgagctctgtgaccgccgcggacacggctgtgtattactgtgcgagaggcctagactacggtgactactactactacggtatggacgtctggggccaagggaccacggtcaccgtctcctca

SEQ ID NO: 4445 - DNA, 369 bp, Homo sapiens
caggtgcagctggtgcagtctggggctgaggtgaagaagcctggggcctcagtgaaggtctcctgcaaggcttctggatacaccttcaccagttatgatatcaactgggtgcgacaggccactggacaagggcttgagtggatgggatggatgaaccctaacagtggtaacacaggctatgcacagaagttccagggcagagtcaccatgaccaggaacacctccataagcacagcctacatggagctgagcagcctgagatctgaggacacggccgtgtattactgtgcgaccccctacagctatggtccctactactactacggtatggacgtctggggccaagggaccacggtcaccgtctcctca

SEQ ID NO: 4446 - DNA, 369 bp, Homo sapiens
caggtacagctggtgcagtctggggctgaggtgaaggagcctggggcctcagtgaaggtctcctgcaaggcctatggataccccttcacaacttatgatatcaactgggtgcgacaggcccctggacaggggcttgagtggatgggatggatgaaccctaacagtggtaacgctggctatgcagagaagttccatggcagagtcaccatgaccggaaacacccccataggcacagcctacatggagctgagtggcctgagatttgaggacacggccgtctattactgtgcgagagcgacccgttcccatagaggagtgaactacggtatggacgtctggggccaagggaccacggtcaccgtctcctca

SEQ ID NO: 4447 - DNA, 370 bp, Homo sapiens
caggtgcagctgcaggagtcgggcccaggactggtgaagccttcggagaccctgtccctcacctgcgctgtctctggttactccatcagcagtggttactactggggctggatccggcagcccccagggaaggggctggagtggattgggagtatctatcatagtgggagcacctactacaacccgtccctcaagagtcgagtcaccatatcagtagacacgtccaagaaccagttctccctgaagctgagctctgtgaccgccgcagacacggccgtgtattactgtgcgagagatgtggtagtaccagctgctcccccagggtggttcgacccctggggccagggaaccctggtcaccgtctcctcag

SEQ ID NO: 4448 - DNA, 367 bp, Homo sapiens
caggtgcagctacagcagtggggcgcaggactgttgaagccttcggagaccctgtccctcacctgcgctgtctatggtgggtccttcagtggttactactggagctggatccgccagcccccagggaaggggctggagtggattggggaaatcaatcatagtggaagcaccaactacaacccgtccctcaagagtcgagtcaccatatcagtagacacgtccaagaaccagttctccctgaagctgagctctgtgaccgccgcggacacggctgtgtattactgtgcgagaggtgggggtatagcagcagctggtactttctggttcgacccctggggccagggaaccctggtcaccgtctcctcag

SEQ ID NO: 4449 - DNA, 367 bp, Homo sapiens
gaggtgcagctggtggagtctgggggaggcttggtacagcctggggggtccctgagactctcctgtgcagcctctggattcaccttcagtaactacgacatgcactgggtccgccaagctacaggaaaaggtctggagtgggtctcagctattggtacttctggtgatacatattatccaggctccgtgaagggccgattcaccatctccagagaaaatgccaagaactccttgtatcttcaaatgaacagactgagagccggggacacggctgtgtattattgtacaagaggatactttgatagtagtggttatcagaactggttcgactcctggggccagggaaccctggtcaccgtctcctcag

SEQ ID NO: 4450 - DNA, 370 bp, Homo sapiens
caggtgcagctggtggagtctgggggaggcttggtcaagcctggagggtccctgagactctcctgtgcagcctctggattcaccttcagtgactactacatgagctggatccgccaggctccagggaaggggctggagtgggtttcatacattagtagtagtggtagtaccatatactacgcagactctgtgaagggccgattcaccatctccagggacaacgccaagaactcactgtatctgcaaatgaacagcctgagagccgaggacacggccgtgtattactgtgcgagagatctaccccgtggttattatcatttgaactggttcgacccctggggccagggaaccctggtcaccgtctcctcag

SEQ ID NO: 4451 - DNA, 352 bp, Homo sapiens
gaggtgcagctggtgcagtctggagcagaggtgaaaaagcccggggagtctctgaagatctcctgtaagggttctggatacagctttaccagctactggatcggctgggtgcgccagatgcccgggaaaggcctggagtggatggggatcatctatcctggtgactctgataccagatacagcccgtccttccaaggccaggtcaccatctcagccgacaagtccatcagcaccgcctacctgcagtggagcagcctgaaggcctcggacaccgccatgtattactgtgcgagacaacgggacggaggctttgactactggggccagggaaccctggtcaccgtctcctcag

SEQ ID NO: 4452 - DNA, 349 bp, Homo sapiens
caggtgcagctacagcagtggggcgcaggactgttgaagccttcggagaccctgtccctcacctgcgctatatatggtgggtccatcagtggttactactggagctggatccgccagcccccagagaaggggctggagtggattggggaaatcaatcatagtggaagcaccaactacaacccgtccctcaagagtcgagtcaccatatcagtagacacgtccaagaaccagttctccctgaagctgagctctgtgaccgccgcggacacggctgtgtattactgtgcgagaggaggatggtggtaccctgaagactggggccagggaaccctggtcaccgtctcctcag

SEQ ID NO: 4453 - DNA, 352 bp, Homo sapiens
gaggtgcagctggtggagtctgggggaggcttggtacagcctggagggtccctgagactctcctgtgcagcctctggattcaccttcagtagttatgaaatgaactgggtccgccaggctccagggaaggggctggagtgggtttcatacattagtagtagtggtagtaccatatactacgcagactctgtgaagggccgattcaccatctccagagacaacgccaagaactcactgtatctgcaaatgaacagcctgagagccgaggacacggctgtttattactgtgcgagggagggttggttgctcgctgactactggggccagggaaccctggtcaccgtctcctcag

SEQ ID NO: 4454 - DNA, 376 bp, Homo sapiens
gaggtgcagctgttggagtctgggggaggcttggtacagcctggggggtccctgagactctcctgtgcagcctctggattcacctttagcagctatgccatgagctgggtccgccaggctccagggaaggggctggagtgggtctcagctattagtggtagtggtggtagcacatactacgcagactccgtgaagggccggttcaccatctccagagacaattccaagaacacgctgtatctgcaaatgaacagcctgagagccgaggacacggccgtatattactgtgcgaaactcaacgaacaccagtattatgattacatttgggggagtcctgactactggggccagggaaccctggtcaccgtctcctcag

SEQ ID NO: 4455 - DNA, 376 bp, Homo sapiens
caggttcagctggtgcagtctggggctgaggtgaagaagcctggggcctcagtgaaggtttcctgcaaggcttctggatacaccttcactagctatgctatgcattgggtgcgccaggcccccggacaaaggcttgagtggatgggatggagcaacgctggcaatggtaacacaaaatattcacaggagttccagggcagagtcaccattaccagggacacatccgcgagcacagcctacatggagctgagcagcctgagatctgaggacatggctgtgtattactgtgcgagaggtggtattgagctacttccccatttattcataattttctttgactactggggccagggaaccctggtcaccgtctcctcag

SEQ ID NO: 4456 - DNA, 376 bp, Homo sapiens
caggtgcagctggtggagtctgggggaggcgtggtccagcctgggaggtccctgagactctcctgtgcagcctctggattcaccttcagtagctatgctatgcactgggtccgccaggctccaggcaaggggctggagtgggtggcagttatatcatatgatggaagcaataaatactacgcagactccgtgaagggccgattcaccatctccagagacaattccaagaacacgctgtatctgcaaatgaacagcctgagagctgaggacacggctgtgtattactgtgcgagaggggagtccgcattacgatttttggagtggttattgaactttgactactggggccagggaaccctggtcaccgtctcctcag

SEQ ID NO: 4457 - DNA, 376 bp, Homo sapiens
caggtgcagctggtggagtctgggggaggcgtggtccagcctgggaggtccctgagactctcctgtgcagcctctggattcaccttcagtggctatgctatgcactgggtccgccaggctccaggcaaggggctggagtgggtggcacttatatcatatgatgaaagcaatacatactacgcagactccgtgaagggccgattcaccatctccagagacaattccaagaacacgctgtatttgcaaatgagcagcctgagagccgaggacacggctgtgtatttctgtgcgagagctgaagttacatttgggggagttatcgtgctagcccccttggactactggggccacggaaccctcgtcaccgtctcctcag

SEQ ID NO: 4458 - DNA, 376 bp, Homo sapiens
caggtgcagctggtggagtctgggggaggcgtggtccagcctgggaggtccctgagactctcctgtgcagcgtctggattcaccttcagtagctatggcatgcactgggtccgccaggctccaggcaaggggctggagtgggtggcagttatatggtatgatggaagtaataaatactatgcagactccgtgaagggccgattcaccatctccagagacaattccaagaacacgctgtatctgcaaatgaacagcctgagagccgaggacacggctgtgtattactgtgcgagagggccgatacgatttttggagtgggtcccaaccataaactttgactactggggccagggaaccctggtcaccgtctcctcag

SEQ ID NO: 4459 - DNA, 378 bp, Homo sapiens
caggtgcagctgcaggagtcgggcccaggactggtgaagccttcacagaccctgtccctcacctgcactgtctctggtggctccatcagcagtggtggttactactggagctggatccgccagcacccagggaagggcctggagtggattgggtacatctattacagtgggagcacctactacaacccgtccctcaagagtcgagttaccatatcagtagacacgtctaagaaccagttctccctgaagctgagctctgtgactgccgcggacacggccgtgtattactgtgcgagagtggctttgtctagcagctcgtcgggatactactacggtatggacgtctggggccaagggaccacggtcaccgtctcctca

SEQ ID NO: 4460 - DNA, 379 bp, Homo sapiens
cagatcaccttgagggagtctggccctacactggtgaaacccactcagaccctcacactgacctgcaccttctctggattctcactcagttctagtggcgagggtgtgggctggatccgtcagtccccaggaaaggccctggaatggcttggaatcatttactgggatgatgataagaaatacagcccatctgtggagaacagggtcaacatcaccaaggacgcatccaaaaaccaggtggtccttacaatgaccgacatggaccctgtggacacaggcacatatttctgtgcacacagagtgtacgaaatttggagtggtaattacctagccccctttgacaactggggccagggaaccctggtcagcgtctcctcag

SEQ ID NO: 4461 - DNA, 378 bp, Homo sapiens
cagctgcagctgcaggagtcgggcccaggactggtgaagccttcggagaccctgtccctcacctgcactgtctctggtggctccatcagcagtagtagttactactggggctggatccgccagcccccagggaaggggctggagtggattgggagtatctattatagtgggagcacctactacaacccgtccctcaagagtcgagtcaccatatccgtagacacgtccaagaaccagttctccctgaagctgagctctgtgaccgccgcagacacggctgtgtattactgtgcgagacgaagtgggcgatcagaatattactactactactacggtatggacgtctggggccaagggaccacggtcaccgtctcctca

SEQ ID NO: 4462 - DNA, 379 bp, Homo sapiens
caggtgcagctgcaggagtcgggcccaggactggtgaagccttcggagaccctgtccctcacctgcactgtctctgctggctccgtcagcagtggtagttactactggagctggatccggcagcccccagggaagggactggagtggattgggtatatctattacagtgggagcaccaactacaacccctccctcaagagtcgagtcaccatttcagtagacacgtccaagaagcagttctccctgaagctgagctctgtgaccgctgcggacacggccgtttattactgtgcgagagccgatcggacatattgtagtgttaccgactgctatatttttgacttctggggccagggaaccctggtcaccgtctcctcag

SEQ ID NO: 4463 - DNA, 379 bp, Homo sapiens
caggtgcagctgcaggagtcgggcccaggactggtgaagccttcggagaccctgtccctcacctgcagtgtctctggtgcctccgtcagcagtaatagttactactggagctggatccggcagcccccagggaagacactggaatggatcggatatttctactacagtgggagcaccaactacaacccctccctcaagagtcgagtcaccatatcagcggacacgtccaggaaccagctctccctgacggtgaactcagtgaccgctgcggacacggccgtgtattactgtgcgagagccgatcgaaaatattgtgttaccactacctgttatatttttgactcctggggccagggaatcctggtcaccgtcgcctcag

SEQ ID NO: 4464 - DNA, 375 bp, Homo sapiens
gaggtgcagctggtggagtctgggggaggcttggtacagcctggagggtccctgagactctcctgtgcagcctctggattcaccttcagtagttatgaaatgaactgggtccgccaggctccagggaaggggctggagtgggtttcatacattagtagtagtggtagtaccatatactacgcagactctgtgaagggccgattcaccatctccagagacaacgccaagaactcactgtatctgcaaatgaacagcctgagagccgaggacacggctgtttattactgtgcgaggaaaggggccgggtaccagctgctaacctactactacggtatggacgtctggggccaagggaccacggtcaccgtctcctca

SEQ ID NO: 4465 - DNA, 375 bp, Homo sapiens
caggtgcagctggtggagtctgggggaggcgtggtccagcctgggaggtccctgagactctcctgtgcagcctctggattcaccttcagtagctatggcatgcactgggtccgccaggctccaggcaaggggctggagtgggtggcagttatatcatatgatggaagtaataaatactatgcagactccgtgaagggccgattcaccatctccagagacaattccaagaacacgctgtatctgcaaatgaacagcctgagagctgaggacacggctgtgtattactgtgcgaaagatcagtatagtgggagctctctgggctactactacggtatggacgtctggggccaagggaccacggtcaccgtctcctca

SEQ ID NO: 4466 - DNA, 373 bp, Homo sapiens
caggtgcagctacagcagtggggcgcaggactgttgaagccttcggagaccctgtccctcacctgcgctgtctatggtgggtccttcagtaattactactggacctggatccgtcagcccccagggaaggggctggagtggattggggaaatcaatcatagtggaagcaccaactacaacccgtccctcaagagtcgagtcaccatatcagtagacacgtccaagaagaagttctccctgaagctgagctctgtgaccgccgcggacacggctgtgtattactgtgcgagattggattactacgatagtagtacttatctccccgatgcttttgatgtctggggccaagggacaatggtcaccgtctcttcag

SEQ ID NO: 4467 - DNA, 373 bp, Homo sapiens
caggtgcagctacagcagtggggcgcaggactgttgaagccttcggagaccctgtccctcacctgcgctgtctatggtgggtccttcagtggttactactggagctggatccgccagcccccagggaaggggctggagtggattggggaaatcaatcatagtggaagcaccaactacaacccgtccctcaagagtcgagtcaccatatcagtagacacgtccaagaaccagttctccctgaagctgagctctgtgaccgccgcggacacggctgtgtattactgtgcgagagcagggcttgtactggtggtgtatgccccacgaggctggttcgacccctggggccagggaaccctggtcaccgtctcctcag

SEQ ID NO: 4468 - DNA, 373 bp, Homo sapiens
caggtggaactacaggagtcgggcccaggactggtgaaaccttcggagaccctgtccctcgcctgcactctctctggtggctccatcagtggttactactggagttggatccgtcattccccagggaggggacttgagtggattggatatatctattccactgggaccaccagctacaacccctccctcaacagtcgggtcaacatgtcagtagacacgtccaagaaccagttctcccttaacctgacctctgtgacacctgcggacacggccgtgtattattgtgcgagatatcgggaattccttaacgacaatgccatctactggtacttcgatctctggggccgtggcaccctagtcacggtctcttcag

SEQ ID NO: 4469 - DNA, 388 bp, Homo sapiens
caggttcagctggtgcagtctggagctgaggtgaagaagcctggggcctcagtgaaggtctcctgcaaggcttctggttacacctttaccagctatggtatcagctgggtgcgacaggcccctggacaagggcttgagtggatgggatggatcagcgcttacaatggtaacacaaactatgcacagaagctccagggcagagtcaccatgaccacagacacatccacgagcacagcctacatggagctgaggagcctgagatctgacgacacggccgtgtattactgtgcgagagaggaggccttgggggtgtatgattacatttgggggagttatcgttatgtctttgactactggggccagggaaccctggtcaccgtctcctcag

SEQ ID NO: 4470 - DNA, 387 bp, Homo sapiens
caggtgcagctggtggagtctgggggaggcgtggtccagcctgggaggtccctgagactctcctgtgcagcctctggattcaccttcagtagctatgctatgcactgggtccgccaggctccaggcaaggggctggagtgggtggcagttatatcatatgatggaagcaataaatactacgcagactccgtgaagggccgattcaccatctccagagacaattccaagaacacgctgtatctgcaaatgaacagcctgagagctgaggacacggctgtgtattactgtgcgagatccctaggatattgtagtagtaccagctgttactggtactactactacggtatggacgtctggggccaagggaccacggtcaccgtctcctca

SEQ ID NO: 4471 - DNA, 387 bp, Homo sapiens
caggtgcagctggtggagtttgggggaggcgtggtccagcctgggaggtccctgagactctcctgtgcagcctctggatccaccttcagtaggtatgctatgcactgggtccgccaggctccaggcaaggggctggagtgggtggcagttatatcatatgatggaagcaataaatactacgtagactccgtgaagggccgattcaccatctccagagacaattccaagaacacgctgtatctgcaaatgaacagcctgagagctgaggacacggctgtgtattactgtgcgagagatgaacagacaattataccagcagctgggaggtactactactactacggtatggacgtctggggccaagggaccacggtcatcgtctcctca

SEQ ID NO: 4472 - DNA, 387 bp, Homo sapiens
caggttcagctgttgcagcctggggctgaggtgaagaagcctgcgtcctcagtgaaggtctcctgccaggcttccagatacacctccaccaaatactttacacagtgggtgcgacagggccctggacaagggcatagtggttgggatgcatcaacccttacaatgataacacacactacgcacagaagttccggggcagagtcaccattaccagtgacaggtccgtgagcacagcctacatggagctgagcagcctgagatctgaagacatggtcgtgtatcccctacgattaagtattatgattacgtttgggggaattatcgttataccatccgctgaatacttccagcactggggccagggcaccctggtcaccgtctcctcag

SEQ ID NO: 4473 - DNA, 345 bp, Homo sapiens
gaagtgcaactgttggagtctgggggaaacttgatacaacctggggggtccctgagactctcctgtgcagcctctggattcacctttagtagctatgccatgacctgggtccgccaggctccaggggaggggctggagtgggtctcaagtatcagtgctcctggtaatagtacatactacgtggactccgtgaagggccggttcaccatctccagagacagttccaggaacacggtgtttttacagatgaacagcctgagagccgaggacacggccgtatactactgtgcgagaggcagacctttggacgtctggggccaagggaccacggttatcgtctcctca

SEQ ID NO: 4474 - DNA, 390 bp, Homo sapiens
gaggtgcagctggtggagtctgggggaggcctggtcaagtctggggggtccctgagagtctcctgtgcagcctctggattccccttcagtagctatagcatgaactgggtccgccaggctccagggaaggggctggagtgggtctcatccattactagtactagttacatatactacgcagactcagtgaagggccgattcaccatctccagagacaacgccaagaactcactgtatctgcaaatgaaccgcctgagagccgaggacacggctgtgtattactgtgcgagagggattcccgccggggccgatatagcagctcgattatgggacgactactactacggtatggacgtctggggccaagggaccacggtcaccgtctcctca

SEQ ID NO: 4475 - DNA, 396 bp, Homo sapiens
caggtgcagctgcaggagtcgggcccaggactggtgaagccttcacagaccctgtccctcacctgcactgtctctggtggctccatcagcagtggtggttactactggagctggatccgccagcacccagggaagggcctggagtggattgggtacatctattacagtgggagcacctactacaacccgtccctcaagagtcgagttaccatatcagtagacacgtctaagaaccagttctccctgaagctgagctctgtgactgccgcggacacggccgtgtattactgtgcgagagataggtcgtattactatggttcggggagttattacgggcgctactactactacggtatggacgtctggggccaagggaccacggtcaccgtctcctca

SEQ ID NO: 4476 - DNA, 349 bp, Homo sapiens
gaggtgcagctggtggagtctgggggaggcttggtccagcctggggggtccctgagactctcctgtgcagcctctggattcatctttagtacctattggatgagctgggtccgccaggctccagggaaggggctggagtgggtggccaccataaagcaagatggtagtgagaaatactatgtggactctgtgaagggccgattcaccatctccagagacaacgccaagaactcactgtatctgcaaatgaacagcctgagagccgaggacacggctgtgtattactgtgcgagagaagtcgggatacttgactactggggccagggaaccctggtcaccgtctcctcag

SEQ ID NO: 4477 - DNA, 349 bp, Homo sapiens
caggtgcagctggtgcagtctggggctgaggtgaagaagcctggggcctcagtgaaggtctcctgcaaggcttctggatacaccttcaccggctactatatgcactgggtgcgacaggcccctggacaagggcttgagtggatgggatggatcaaccctaacagtggtggcacaaactatgcacagaagtttcagggcagggtcaccatgaccagggacacgtccatcagcacagcctacatggagctgagcaggctgagatctgacgacacggccgtgtattactgtgcgagagactacgtcggggttgggtactggggccagggaaccctggtcaccgtctcctcag

SEQ ID NO: 4478 - DNA, 365 bp, Homo sapiens
gaagtgcagctggtggagtctgggggagacttggtacagcctggcaggtccctgagactctcctgtgcagcctctggattcacctttgatgattatgccatgcactgggtccggcaaggtccagggaagggcctggagtgggtctcaggtattagttggaatagtggtgccatagactttgcggactctgtgaagggccgattcaccctctccagagacaacgccaagaactccctgtatctgcaaatgaacagtctgagagctggggacacggccttgtattactttgcaaaagacgttattgtagtagtaccagccgtattgagagccctggggccagggaaccctggtcaccgtctcctcag

SEQ ID NO: 4479 - DNA, 270 bp, Homo sapiens
cggcagcccccagggaagggactggagtggattcagtatatctattacagtgggagcaccaactgcaagtcctccctcaagagtcgagtcaccatttcagtagacaggttcacacggtccatcagaaacccatgccacagccctccccgcaggggaccgccgacttccatgtaacgattttgatcgagggcacagcgccatggatttggtggcccgaaacggtctcctttgactactggggccagcgaaccctggtcaccgtctcctcag

SEQ ID NO: 4480 - DNA, 345 bp, Homo sapiens
gaggtgcagctggtggagtctggaggaggcttgatccagcctggggggtccctgagactctcctgtgcagcctctgggttaatcgtcagcagcaactacatgaactgggtccgccaggctccagggaaggggctggagtgggtctcggttatttatagcggtggtagcacattctacgcagactccgtgaagggccgattcaccatatccagagacaattccaagaacaccctgtatcttcaaatgaacagcctgagagtcgaggacacggccgtgtattactgtgcgagagagagttacggtatggacgtctggggccaagggaccacggtcaccgtctcctca

SEQ ID NO: 4481 - DNA, 346 bp, Homo sapiens
gaggtgcagctggtggagtctgggggaggtctggtccagcctggggggtccctgagactctcttgtgctgcctctggattcaccttcagtgattattacatgaactggatccgccaggctccagggaaggggctggagtgggtctcattcattagtcagactagtgataacatacactacgcagactcagtgaggggccgattcaccatctccagagacaacgccaggaactcactgtatctgcatttgaacagcctgagagccgaggacacggctgtgtattactgtgcgagatggaatggtgccatgattccgggccagggaaccctcgtcaccgtctcctcag

SEQ ID NO: 4482 - DNA, 334 bp, Homo sapiens
gatattgtgatgactcagtctccactctccctgcccgtcacccctggagagccggcctccatctcctgcaggtctagtcagagcctcctgcagagtaatggatacaactatttggattggtacctgcagaagccagggcagtctccacagctcctgatctatttgggttctaatcgggcctccggggtccctgacaggttcagtggcagtggatcaggcacagattttacactgaagatcagcagagtggaggctgacgatgttggggtttattactgcatgcaagctctacaaactcccactttcggcggagggaccaaggtggagatcaaac

SEQ ID NO: 4483 - DNA, 334 bp, Homo sapiens
gacattgtgatgactcagtctccactctccctgcccgtcacccctggagagccggcctccatttcctgcaggtctagtcagagcctcctgcaaagtaatggatacaactatttggattggtacctgcagaagccagggcagtctccacagctcctgatctatttgggttctaatcgggcctccggggtccctgacaggttcagtggcagtggatcaggcacagattttactctgaaaatcagcagagtggaggctgaggatgttggggtttattactgcatgcaagctctacaaactcccactttcggcggagggaccaaggtggagatcaaac

SEQ ID NO: 4484 - DNA, 334 bp, Homo sapiens; identical to SEQ ID NO: 4483

SEQ ID NO: 4485 - DNA, 334 bp, Homo sapiens; identical to SEQ ID NO: 4483

SEQ ID NO: 4486 - DNA, 334 bp, Homo sapiens; identical to SEQ ID NO: 4483

SEQ ID NO: 4487 - DNA, 334 bp, Homo sapiens; identical to SEQ ID NO: 4483

SEQ ID NO: 4488 - DNA, 334 bp, Homo sapiens; identical to SEQ ID NO: 4483

SEQ ID NO: 4489 - DNA, 334 bp, Homo sapiens; identical to SEQ ID NO: 4483

SEQ ID NO: 4490 - DNA, 334 bp, Homo sapiens
gatattgtgatgactcagtctccactctccctgcccgtcacccctggagagccggcctccatctcctgcaggtctagtcagagcctcctgcagagtaatggatacaactatttggattggtacctgcagaagccagggcagtctccacaactcctgatctatttgggttctaatcgggcctccggggtccctgacaggttcagtggcagtggatcaggcacagattttacactgaaaatcagcagagtggaggctgacgatgttggggtttattactgcatgcaagctctacaaactcccactttcggcggagggaccaaggtggagatcaaac

SEQ ID NO: 4491 - DNA, 334 bp, Homo sapiens; identical to SEQ ID NO: 4490

SEQ ID NO: 4492 - DNA, 334 bp, Homo sapiens; identical to SEQ ID NO: 4490

SEQ ID NO: 4493 - DNA, 334 bp, Homo sapiens; identical to SEQ ID NO: 4490

SEQ ID NO: 4494 - DNA, 328 bp, Homo sapiens
gaaattgtgttgacgcagtctccaggcaccctgtctttgtctccaggggaaagagccaccctctcctgcagggccagtcagagtgttagcagcacctacttagcctggtaccagcagaaacctggccaggctcccagtctcctcatctatggtgcatcccacagggccactggcatcccagacaggttcagtggcagtgggtctgggacagacttcactctcaccatcagcagactggaacctgaggattttgcagtgtattactgtcagcagtttggtagctcaccactgtacacttttggccaggggaccaagctggagatcaaac

SEQ ID NO: 4495 - DNA, 328 bp, Homo sapiens
gaaattgtgttgacgcagtctccaggcaccctgtctttgtctccaggggaaagagccaccctctcctgcagggccagtcagagtgttagcagcacctccttagcctggtaccagcagaaacctggccaggctcccagtctcctcatctatggtgcatcccacagggccactggcatcccagacaggttcagtggcagtgggtctgggacagacttcactctcaccatcagcagactggaacctgaggattttgcagtgtattactgtcagcagtttggtagctcaccactgtacacttttggccaggggaccaagctggagatcaaac

SEQ ID NO: 4496 - DNA, 328 bp, Homo sapiens
gaaattgtgttgacgcagtctccgggcaccctgtctttgtctccaggggaaagagccaccctctcctgcagggccagtcagagtgttagcaccacccacttagcctggtaccagcagaaacctggccaggctcccaggctcctcatctatggtgcatcccacagggccactgacatcccagacaggtttagtggcagtgggtctgggacagacttcactctcaccatcaacagactggagcctgaggattttgcagtgtactactgtcagcagcttggtagctcaccgctgtacacttttggccaggggaccaagctggagatcaaac

SEQ ID NO: 4497 - DNA, 328 bp, Homo sapiens; identical to SEQ ID NO: 4495

SEQ ID NO: 4498 - DNA, 328 bp, Homo sapiens
gaaattgtgttgacgcagtctccaggcaccctgtctttgtctccaggggaaagagccacgctctcctgcagggccagtcagagtgttagtagcacctccttagcctggtaccagcagaaacctggccaggctcccagtctcctcatctatggtgcatcccacagggccactggcatcccagacaggttcagtggcagtgggtctgggacagacttcactctcaccatcagcagactggaacctgaggattttgcagtgtattactgtcagcagtttggtagctcaccactgtacacttttggccaggggaccaagctggagatcaaac

SEQ ID NO: 4499 - DNA, 328 bp, Homo sapiens
gaaattgtgttgacgcagtctccaggcaccctgtctttgtctccaggggaaagagccacgctctcctgcagggccagtcagagtgttagcagcacctccttagcctggtaccagcagaaacctggccaggctcccagtctcctcatctatggtgcatcccacagggccactggcatcccagacaggttcagtggcagtgggtctgggacagacttcactctcaccatcagcagactggaacctgaggattttgcagtgtattactgtcagcagtttggtagctcaccactgtacacttttggccaggggaccaagctggagatcaaac

SEQ ID NO: 4500 - DNA, 328 bp, Homo sapiens
gaaattgtgttgacgcagtctccaggcaccctgtctttgtctccaggggaaagagccaccctctcctgcagggccagtcagagtgttagcagcactttcttagcctggtaccagcagaaacctggccaggctcccagtctcctcatctatggtgcatcccacagggccactggcatcccagacaggttcagtggcagtgggtctgggacagacttcactctcaccatcagcagactggaacctgaggattttgcagtgtattactgtcagcagtttggtagctcaccactgtacacttttggccaggggaccaagctggagatcaaac

SEQ ID NO: 4501 - DNA, 328 bp, Homo sapiens; identical to SEQ ID NO: 4498

SEQ ID NO: 4502 - DNA, 328 bp, Homo sapiens
gaaattgtgttgacgcagtctccaggcaccctgtctttgtctccaggggaaagagccaccctctcctgcagggccagtcagagtattagcagcacctacttagcctggtaccagcagaaacctggccaggctcccagtctcctcatctatggtgcatcccacagggccactggcatcccagacaggttcagtggcagtgggtctgggacagacttcactctcaccatcagcagactggaacctgaggattttgcagtgtattactgtcagcagtttggtagctcaccactgtacacttttggccaggggaccaagctggagatcaaac

SEQ ID NO: 4503 - DNA, 331 bp, Homo sapiens
cagtctgccctgactcagcctgcctccgtgtctgggtctcctggacagtcgatcaccatctcctgcactggaaccagcagtgacgttggtggttataactatgtctcctggtaccaacaacacccaggcaaagcccccaaactcatgatttatgatgtcagtaatcggccctcaggggtttctaatcgcttctctggctccaagtctggcaacacggcctccctgaccatctctgggctccaggctgaggacgaggctgattattactgcagttcatatacaagcagcagcactcaggtattcggcggagggaccaagctgaccgtcctag

SEQ ID NO: 4504 - DNA, 331 bp, Homo sapiens
cagtctgccctgactcagcctgcctccgtgtctgggtctcctggacagtcgatcaccatctcctgcactggaaccagcagtgacgttggtggttataactatgtctcctggtatcaacaacacccaggcaaagcccccaaactcatgatttatgatgtcagtaatcggccctcaggggtttctaatcgcttctctggctccaagtctggcaacacggcctccctgaccatctctgggctccaggctgaggacgaggctgattattactgcagctcatatacaagcagcagcactcaggtattcggcggagggaccaagctgaccgtcctag

SEQ ID NO: 4505 - DNA, 331 bp, Homo sapiens; identical to SEQ ID NO: 4503

SEQ ID NO: 4506 - DNA, 331 bp, Homo sapiens
cagtctgccctgactcagcctgcctccgtgtctgggtctcctggacagtcgatcaccatctcctgcactggaaccagcagtgacgttggtgtttataactatgtctcctggtaccgacaacacccaggcaaagccccccaactcatgatttatgatgtcagtaatcggccctcaggggtttctaatcgcttctctggctccaagtctggcaacacggcctccctgaccatctctgggctccaggctgaggacgaggctgattattactgcagctcatatacaagcagcagcactcaggtattcggcggagggaccaagctgaccgtcctag

SEQ ID NO: 4507 - DNA, 331 bp, Homo sapiens; identical to SEQ ID NO: 4503

SEQ ID NO: 4508 - DNA, 331 bp, Homo sapiens; identical to SEQ ID NO: 4504

SEQ ID NO: 4509 - DNA, 331 bp, Homo sapiens; identical to SEQ ID NO: 4503

SEQ ID NO: 4510 - DNA, 331 bp, Homo sapiens; identical to SEQ ID NO: 4504

SEQ ID NO: 4511 - DNA, 331 bp, Homo sapiens; identical to SEQ ID NO: 4506

SEQ ID NO: 4512 - DNA, 340 bp, Homo sapiens
gacatcgtgatgacccagtctccagactccctggctgtgtctctgggcgagagggccaccatcaactgcaagtccagccagggtgttttatacagctccaacaataagaactacttagcttggtaccagcagaaaccaggacagcctcctaagttgctcatttactgggcatctacccgggaatccggggtccctgaccgattcagtggcagcgggtctgggacagatttcactctcaccatcagcagcctgcaggctgaagatgtggcagtttattactgtcagcaatattatggtactccgatcaccttcggccaagggacacgactggagattaaac

SEQ ID NO: 4513 - DNA, 340 bp, Homo sapiens
gacatcgtgatgacccagtctccagactccctggctgtgtctctgggcgagagggccaccatcaactgcaagtccagccagagtgttttatacagctccaacagtaagaactacttagcttggtaccagcagaaaccaggacagcctcctaagctgctcatttactgggcatctacccgggaatccggggtccctgaccgattcagtggcagcgggtctgggacagatttcactctcaccatcagcggcctgcaggctgaagatgtggcactttattactgtcagcaatattatggtactccgatcaccttcggccaagggacacgactggagattaaac

SEQ ID NO: 4514 - DNA, 340 bp, Homo sapiens
gacatcgtgatgacccagtctccagactccctggctgtgtctctgggcgagagggccaccatcaactgcaagtccagcctgagtgttttatacagctccaacaataagaactacttagcttggtaccagcagaaaccaggacagcctcctaagctgctcatttactgggcatctacccgggaatccggggtccctgaccgattcagtggcagcgggtctgggacagatttcactctcaccatcagcggcctgcaggctgaagatgtggcagtttattactgtcagcaatattatagtactccgatcaccttcggccaagggacacgactggagattaaac

SEQ ID NO: 4515 - DNA, 337 bp, Homo sapiens
gacatcgtgatgacccagtctccaggctccctggctgtgtctctgggcgagagggccaccatcaactgcaagtccagccagactgttttattcagctccaacaataagaactacttagcttggtaccagcacaaaccaggacagcctcctaagctgctcatttactgggcatctacccgggaatccggggtccctgaccgattcagtggcagcgggtctgggacagatttcactctcaccatcagcggcctgcaggctgaagatgtggcagtttattactgtcaacaatattttggtactccgatcaccttcggccaagggacacgactggagatta

SEQ ID NO: 4516 - DNA, 337 bp, Homo sapiens
gacatcgtgatgacccagtctccaggctccctggctgtgtctctgggcgagagggccaccatcaactgtaagtccagccagactgttttattcagctccaacaataagaactacttagcttggtaccagcacaaaccaggacagcctcctaagctgctcatttactgggcatctacccgggaatccggggtccctgaccgattcagtggcagcgggtctgggacagatttcactctcaccatcagcggcctgcaggctgaagatgtggcagtttattactgtcaacaatattttggtactccgatcaccttcggccaagggacacgactggagatta

SEQ ID NO: 4517 - DNA, 340 bp, Homo sapiens
gacttcgtgatgacccagtctccagactccctggctgtgtctctgggcgagagggccaccatcaactgcaagtccagccagactattttatacagctccaacaataagaactacttagcttggtaccagcagaagccaggacagcctcctaaactgctcatttactgggcatctacccgggaatccggggtccctgaccgattcagtggcagcgggtctgggacagatttcactctcaccatcagcggcctgcagcctgaagatgtggcagtttattactgtcagcagtattatagtattccgatcaccttcggccaagggacacgactggagattaaac

SEQ ID NO: 4518 - DNA, 319 bp, Homo sapiens
gacatccagttgacccagtctccatccttcctgtctgcatctgtaggagacagagtcaccatcacttgccgggccagtcagggcattaacagttatttagcctggtatcagcaaaaaccagggaaagcccctaagctcctgatctatgctgcatccactttgcaaagtggggtcccatcaaggttcagcggcagtggatctgggacagaattcactctcacaatcagcagcctgcagcctgaagattttgcaacttattactgtcaacagcttaatagtttattcactttcggccctgggaccaaagtggatatcaaac

SEQ ID NO: 4519 - DNA, 319 bp, Homo sapiens; identical to SEQ ID NO: 4518

SEQ ID NO: 4520 - DNA, 319 bp, Homo sapiens; identical to SEQ ID NO: 4518

SEQ ID NO: 4521 - DNA, 318 bp, Homo sapiens
acatccagttgacccagtctccatccttcctgtctgcatctgtaggagacagagtcaccatcacttgccgggccagtcagggcattaacagttatttagcctggtatcagcaaaaaccagggaaagcccctaagctcctgatctatgctgcatccactttgcaaagtggggtcccatcaaggttcagcggcagtggatctgggacagaattcactctcacaatcagcagcctgcagcctgaagattttgcaacttattactgtcaacagcttaatagtttattcactttcggccctgggaccaaagtggatatcaaac

SEQ ID NO: 4522 - DNA, 319 bp, Homo sapiens; identical to SEQ ID NO: 4518

SEQ ID NO: 4523 - DNA, 322 bp, Homo sapiens
gacatccagatgacccagtctccatcctcactgtctgcatctgtaggagacagagtcaccatcacttgtcgggcgagtcaggccattagcaattatttagcctggtttcagcagaaaccagggaaagcccctaagtccctgatctatgctgcatccagtttgcaaagtggggtcccatcaaagttcagcggcagtggatctgggacagacttcactctcaccatcagcagcctgcagcctgaagattttgcaacttattactgccaacagtataatagttaccctctcactttcggcggagggaccaaggtggagatcaaac

SEQ ID NO: 4524 - DNA, 322 bp, Homo sapiens
gacatccagatgacccagtctccatcctcaatgtctgcatctgtaggagacagagtcaccatcagttgtcgggcgagttacgacattagcaattatttagcctggtttcagcagaagccagggaaagcccctaagtccctgatctatgctgcatccagtttgcaaagtggggtcccatcaaagttcagcggcagtggatctgggacagatttcactctcaccatcagcagcctgcagcctgaagattttgcaacttattactgccaacagtataatagttaccctctcactttcggcggagggaccaaggtggagatcaaac

SEQ ID NO: 4525 - DNA, 322 bp, Homo sapiens
gacatccagatgacccagtctccatcctcaatgtctgcatctgtaggagacagagtcaccatcacttgtcgggcgagtcacgacattagcaattatttagcctggtttcagcagaagccagggaaagcccctaagtccctgatctatgctgcatccagtttgcaaagtggggtcccatcaaagttcagcggcagtggatctgggacagatttcactctcaccatcagcagcctgcagcctgaagattttgcaacttattactgccaacagtataatagttaccctctcactttcggcggagggaccaaggtggagatcaaac

SEQ ID NO: 4526 - DNA, 334 bp, Homo sapiens
gatattgtggtgactcagtctccactctccctgcccgtcgcccctggagagccggcctccatctcctgcaggtctagtcagagcctcctgcatagtaatggatacaactatttggattggtacctgcaaaagccagggcagtctccacagctcctgatctatttgggttctaatcgggcctccggggtccctgacaggttcagtggcagtggatcaggcacagattttacactgaaaatcagcagagtggaggctgaggatgttgggatttattactgcatgcaatctctacaaacccggacgttcggccaagggaccaaggtggaaatcaaac

SEQ ID NO: 4527 - DNA, 334 bp, Homo sapiens; identical to SEQ ID NO: 4526

SEQ ID NO: 4528 - DNA, 334 bp, Homo sapiens
gatattgtggtgactcagtctccactctccctgcccgtcgcccctggagagccggcctccatctcctgcaggtctagtcagagcctcctgcatagtaatggatacaactatttggattggtacctgcagaagccagggcagtctccacagctcctgatctatttgggttctaatcgggcctccggggtccctgacaggttcagtggcagtggatcaggcacagattttacactgaaaatcagcagagtggaggctgaggatgttggggtttattactgcatgcaagctctacaaacccggacgttcggccaagggaccaaggtggaaatcaaac

SEQ ID NO: 4529 - DNA, 322 bp, Homo sapiens
gacatccagatgacccagtctccttccaccctgtctgcatctgtaggagacagagtcaccatcacttgccgggccagtcagagtattagtaggtggttggcctggtatcagcagacaccagggaaagcccctaaactcctgatctataaggcgtctagtttagaaagtggggtcccatcaaggttcagcggcagtggatctgggacagaattcactctcaccatcagcagcctgcagcctgatgattttgcgacttattactgccaacaatataatacttatttttggacgttcggccaagggaccaaggtggaagtcaaac

SEQ ID NO: 4530 - DNA, 322 bp, Homo sapiens; identical to SEQ ID NO: 4529

SEQ ID NO: 4531 - DNA, 329 bp, Homo sapiens
cagtctgccctgactcagcctgcctccgtgtctgggtctcctggacagtcgatcaccatctcctgcactggaaccagcagtgacgttggtggttataactatgtctcctggtaccaacaacacccaggcaaagcccccaaactcatgatttatgatgtcagtaatcggccctcaggggtttctaatcgcttctctggctccaagtctggcaacacggcctccctgaccatctctgggctccaggctgaggacgaggctgattattactgcagctcatatacaagcaggagcccgtgggtgttcggcggagggaccaagttgaccgtcct

SEQ ID NO: 4532 - DNA, 329 bp, Homo sapiens; identical to SEQ ID NO: 4531

SEQ ID NO: 4533 - DNA, 319 bp, Homo sapiens
gaaattgtgttgacacagtctccagccaccctgtctttgtctccaggggaaagagccaccctctcctgcagggccagtcagagtgttcccacctacttggcctggtaccaacagaagcctggccaggctcccaggctcctcatctatgatgcatccaacagggccactggcgtcccagccaggttcagtggcagtgggtctgggacagacttcactctcaccatcagcagcctagagcctgaagattttgcagtttattactgtcagcagcgtagggactggccgggaacttttggccaggggaccaagctggagatca

SEQ ID NO: 4534 - DNA, 322 bp, Homo sapiens
gaaattgtgttgacacagtctccagccaccctgtctttgtctccaggggaaagagccaccctctcctgcagggccagtcagagtgttcccacctacttagcctggtaccaacagaagcctggccaggctcccaggctcctcatctatgatgcatccaacagggccactggcgtcccagccaggttcagtggcagtgggtctgggacagacttcactctcaccatcagcagcctagagcctgaagattttgcagtttattactgtcagcagcgtagggactggccgggaacttttggccaggggaccaagctggagatcaaac

SEQ ID NO: 4535 - DNA, 325 bp, Homo sapiens
gacatccagatgacccagtctccatcctccctgtctgcatctgtaggagacagagtcaccatcacttgccaggcgagtcaggacattagcaactatttaaattggtatcagcagaaaccagggaaagcccctaagctcctgatctacgatgcatccaatttggaaacaggggtcccatcaaggttcagtggaagtggatctgggacagattttactttcaccatcagcagcctgcagcctgaagatattgcaacatattactgtcaacagtatggtaatctccctccactcaccttcggccaagggacacgactggagattaaac

SEQ ID NO: 4536 - DNA, 325 bp, Homo sapiens
gacatccagatgacccagtctccatcctccctgtctgcatctgtaggagacagagtcaccatcacttgccaggcgagtcaggacattagcaactttttaaattggtatcagcagaaaccagggaaagcccctaagctcctgatctacgatgcatccaatttggaaacaggggtcccatcaaggttcagtggaagtggatctgggacagattttactttcaccatcagcagcctgcagcctgaagatattgcaacatattactgtcaacagtatggtaatctccctccactcaccttcggccaagggacacgactggagattaaac

SEQ ID NO: 4537 - DNA, 334 bp, Homo sapiens
cagtctgccctgactcagcctgcctccgtgtctgggtctcctggacagtcgatcaccatctcctgcactggaaccagcagtgacgttggtggttataactatgtctcctggtatcaacaacacccaggcaaagcccccaaactcatgatttatgaggtcagtaatcggccctcaggggtttctagtcgcttctctggctccaagtctggcaacacggcctccctgaccatctctgggctccaggctgaggacgaggctgattattactgctactcatatacaaccagcagcactccttatgtcttcggaactgggaccaaggtcaccgtcctag

SEQ ID NO: 4538 - DNA, 322 bp, Homo sapiens
tcctatgagctgactcagccaccctcagtgtccgtgtccccaggacagacagccagcatcacctgctctggagataaattgggagataaatatacttactggtatcagcagaagccaggccagtcccctgtgctggtcatctatcaagatagcaagcggccctcagggatccctgagcgattctctggctccaactctgggaacacagccactctgaccatcagcgggacccaggctatggatgaggctgactattactgtcaggcgtgggacagcagcaccttatgtggtattcggcggagggaccaagtgaccgtcctag

SEQ ID NO: 4539 - DNA, 322 bp, Homo sapiens
gaaattgtgttgacgcagtctccaggcaccctgtctttgtctccaggggaaagagccaccctctcctgcagggccagtcagagtgttagcagcagctacttagcctggtaccagcagaaacctggccaggctcccaggctcctcatctatggtgcatccagcagggccactggcatcccagacaggttcagtggcagtgggtctgggacagacttcactctcaccatcagcagactggagcctgaagattttgcagtgtattactgtcagcagtatggtagctcacccactttcggcggagggaccaaggtggagatcaaac

SEQ ID NO: 4540 - DNA, 322 bp, Homo sapiens; identical to SEQ ID NO: 4539

SEQ ID NO: 4541 - DNA, 331 bp, Homo sapiens
cagtctgccctgactcagcctgcctccgtgtctgggtctcctggacagtcgatcaccatctcctgcactggaaccagcagtgacgttggtggttataactatgtctcctggttccaacaacacccaggcaaagcccccaaactcatgatttatgatgtcagtaatcggccctcaggggtttctaatcgcttctctggctccaagtctggcaacacggcctccctgaccatctctgggctccagggtgaggacgaggctgattattactgcagctcatatacaagcagtagaactctggtgttcggcggagggaccaagctgaccgtcctag

SEQ ID NO: 4542 - DNA, 331 bp, Homo sapiens; identical to SEQ ID NO: 4541

SEQ ID NO: 4543 - DNA, 325 bp, Homo sapiens
gaaattgtgttgacgcagtctccaggcaccctgtctttgtctccaggggaaagagccaccctctcctgcagggccagtcagagtgttagcagcagctacttagcctggtaccagcagaaacctggccaggctcccaggctcctcatctctggtgcatccagcagggccgctggcatcccagacaggttcagtggcagtgggtctgggacagacttcactctcaccatcagcagattggcgcctgaagattttgcagtgtattactgtcagcagtatggtagctcacctctcactttcggcggagggaccaaggtggagatcaaac

SEQ ID NO: 4544 - DNA, 325 bp, Homo sapiens; identical to SEQ ID NO: 4543

SEQ ID NO: 4545 - DNA, 320 bp, Homo sapiens
gacatccagatgacccagtctccatcctccctgtctgcatctgtaggagacagagtcaccatcacttgccaggcgagtcaggacattagcaacgatttaaattggtatcagcagaaaccagggaaagcccctaacctcctgatctacgatgcatccaatttggaaacaggggtcccatcaaggttcagtggaagtggatctgggacagattttactttcaccatcagcagcctgcagcctgaagatattgcaacatattactgtcaacagtatgataatctccctcactttcggcggagggaccaaggtggagatcaaac

SEQ ID NO: 4546 - DNA, 320 bp, Homo sapiens; identical to SEQ ID NO: 4545

SEQ ID NO: 4547 - DNA, 331 bp, Homo sapiens
cagtctgtgctgacgcagccgccctcagtgtctggggccccagggcagagggtcaccatctcctgcactgggagcagctccaacatcggggcaggttatgatgtacaatggtaccagcagcttccaggaacagcccccaaactcctcatctataataacagcaatcggccctcaggggtccctgaccgattctctggctccaagtctggcacctcagcctccctggccatcactgggctccaggctgaggatgaggctgattattactgccagtcctttgacagcagcctgagtgaagtgttcggcggagggaccaagctgaccgtcctag

SEQ ID NO: 4548 - DNA, 331 bp, Homo sapiens; identical to SEQ ID NO: 4547

SEQ ID NO: 4549 - DNA, 340 bp, Homo sapiens
gatgttgtgatgactcagtctccactctccctgcccgtcacccttggacagccggcctccatctcctgcaggtctagtcaaagcctcgtgtacagtaatggaaacacctacttgagttggtttcagctgaggccaggccaatctccaaggcgcctaatttatgaggtttcttaccgggactctggggtcccagacagattcagcggcagtgggtcaggcactgatttcacactgagtatcagcagggtggaggctgaggatgttggggtttattactgcatgcaggctacacactggcctccgtggacgttcggccaagggaccagggtggaaatcaaac

SEQ ID NO: 4550 - DNA, 340 bp, Homo sapiens; identical to SEQ ID NO: 4549

SEQ ID NO: 4551 - DNA, 325 bp, Homo sapiens; identical to SEQ ID NO: 3438

SEQ ID NO: 4552 - DNA, 328 bp, Homo sapiens; identical to SEQ ID NO: 4021

SEQ ID NO: 4553 - DNA, 336 bp, Homo sapiens
cagactgtggtgacccaggagccatcgttctcagtgtcccctggagggacagtcacactcacttgtggcttgagctctggctcagtctctactagttactaccccagctggtaccagcagaccccaggccaggctccacgcacgctcatctacagcacaaacactcgctcttctggggtccctgatcgcttctctggctccatccttgggaacaaagctgccctcaccatcacgggggcccaggcagatgatgaatctgattattactgtgtgctgtatatgggtagtggcatttcgattgggtgttcggcggagggaccaagctgaccgtcctag

SEQ ID NO: 4554 - DNA, 322 bp, Homo sapiens
gccatccggatgacccagtctccatcctcattctctgcatctacaggagacagagtcaccatcacttgtcgggcgagtcagggtattagcagttatttagcctggtatcagcaaaaaccagggaaagcccctaagctcctgatctatgctgcatccactttgcaaagtggggtcccatcaaggttcagcggcagtggatctgggacagatttcactctcaccatcagctgcctgcagtctgaagattttgcaacttattactgtcaacagtattatagttacccccggacgttcggccaagggaccaaggtggaaatcaaac

SEQ ID NO: 4555 - DNA, 310 bp, Homo sapiens
gaaatagtgatgacgcagtctccagccaccctgtctgtgtctccaggggaaagagccaccctctcctgcagggccagtcagagtgttagcagcaacttagcctggtaccagcagaaacctggccaggctcccaggctcctcatctatggtgcatccaccagggccactggtatcccagccaggttcagtggcagtgggtctgggacagagttcactctcaccatcagcagcctgcagtctgaagattttgcagtttattactgtcagcacccagggacttttggccaggggaccaagctggagatcaaac

SEQ ID NO: 4556 - DNA, 325 bp, Homo sapiens; identical to SEQ ID NO: 965

SEQ ID NO: 4557 - DNA, 331 bp, Homo sapiens; identical to SEQ ID NO: 3914

SEQ ID NO: 4558 - DNA, 334 bp, Homo sapiens
cagtctgccctgactcagcctgcctccgtgtctgggtctcctggacagtcgatcaccatctcctgcactggaaccagcagtgacgttggtggttataactatgtctcctggtatcaacaacacccaggcaaagtccccaaactcatgatttatgatgtcagtaatcggccctcaggggtttctaatcgcttctctggctccaagtctggcaacacggcctccctgaccatctctgggctccaggctgaggacgaggctgattattactgcagctcatatacaagcagcagcactcttgtggtattcggcggagggaccaagctgaccgtcctag

SEQ ID NO: 4559 - DNA, 344 bp, Homo sapiens
gacatcgtgatgacccagtctccagactccctggctgtgtctctgggcgagagggccaccatcaactgcaagtccagccagagtgttttatacagctccaacaataagaactacttagcttggtaccagcagaaaccaggacagcctcctaagctgctcatttactgggcatctacccgggaatccggggtccctgaccgattcagtggcagcgggtctgggacagatttcactctcaccatcagcagcctgcaggctgaagatgtggcagtttattactgtcagcaatattatagtactcctcaagtacacttttggccaggggaccaagctggagatcaaac

SEQ ID NO: 4560 - DNA, 321 bp, Homo sapiens
gaaattgtgttgacgcagtctccagccaccctgtctttgtctccaggggaaagagccaccctctcctgcagggccagtcagagtattagcaactacttgggctggtatcaacagaaagctggccaggcccccaggctcctcgtctatgatacatccaacagggccgctggcatcccagccaggttcagtggcagtgggactgggacacacttcactctcaccatcagcagcctagagcctgaagattttgcagtttattactgtcagcagcgtagcgagtggcctctcaccttcggcggagggaccaaggtggagatcaaa

SEQ ID NO: 4561 - DNA, 322 bp, Homo sapiens
gacatccagatgacccagtctccatcctccctgtctgcatctgtaggagacagagtcaccatcacttgccgggcaagtcagagcattagcagctatttaaattggtatcagcagaaaccagggaaagcccctaagctcctgatctatgctgcatccagtttgcaaagtggggtcccatcaaggttcagtggcagtggatctgggacagatttcactctcaccatcagcagtctgcaacctgaagattttgcaacttactactgtcaacagagttacagtaccttattcactttcggccctgggaccaaagtggatatcaaac

SEQ ID NO: 4562 - DNA, 331 bp, Homo sapiens; identical to SEQ ID NO: 869

SEQ ID NO: 4563 - DNA, 322 bp, Homo sapiens; identical to SEQ ID NO: 837

SEQ ID NO: 4564 - DNA, 341 bp, Homo sapiens
ctgcctgtgctgactcagcccccgtctgcatctgccttgctgggagcctcgatcaagctcacctgcaccctaagcagtgagcacagcacctacaccatcgaatggtatcaacagagaccagggaggtccccccagtatataatgaaggttaagagtgatggcagccacagcaagggggacgggatccccgatcgcttcatgggctccagttctggggctgaccgctacctcaccttctccaacctccagtctgacgatgaggctgagtatcactgtggagagagccacacgattgatggcctcaggggtgttcggcggagggaccaagctgaccgtcctag

SEQ ID NO: 4565 - DNA, 328 bp, Homo sapiens
gaaattgtgttgacacagtctccagccaccctgtctttgtctccaggggaaagagccaccctctcctgcagggccagtcagagtgttagcagctacttagcctggtaccaacagaaacctggccaggctcccaggctcctcatctatgatgcatccaacagggccactggcatcccagccaggttcagtggcagtgggtctgggacagacttcactctcaccatcagcagcctagagcctgaagattttgcagtttattactgtcagcagcgtagcaactggcctccttcgctcactttcggcggagggaccaaggtggagatcaaac

SEQ ID NO: 4566 - DNA, 322 bp, Homo sapiens
gacatccagatgacccagtctccttccaccctgtctgcatctgtaggagacagagtcaccatcacttgccgggccagtcagactgttagtaggtggttggcctggtatcagcagaagccagggaaagcccctaagctcctgatctataaggcatctagtttagaaagtggggtcccatcaaagttcagcggcagtggatctgggacagaattcactctcaccatcagcagcctgcagcctgatgattttgcaacttattactgtcaacagtattatagttatccctacacttttggccaggggaccaagctggagatcaaac

SEQ ID NO: 4567 - DNA, 322 bp, Homo sapiens
gacatccagatgacccagtctccatcttctgtgtctgcatctgtaggagacagagtcaccatcacttgtcgggcgagtcagggtattagcggctggttagcctggtatcagcagaaaccagggaaagcccctaagctcctgatctatgctgcatccagtttgcaaagtggggtcccatcaaggttcagcggcagtggatctgggacagatttcactctcactatcagcggcctgcagcctgaagattttgcaacttactattgtcaacaggctgacagtttccctttcactttcggccctgggaccaaagtggatttcaaac

SEQ ID NO: 4568 - DNA, 340 bp, Homo sapiens
gacatcgtgatgacccagtctccagactccctggctgtgtctctgggcgagagggccaccatcaactgcaagtccagccagagtgttttatacagctccaacaataagaactacttagcttggtaccagcagaaaccaggacagcctcctaagctgctcatttactgggcatctacccgggaatccggggtccctgaccgattcagtggcagcgggtctgggacagatttcactctcaccatcagcagcctgcaggctgaagatgtggcagtttattactgtcagcaatattatagtactctttggacgttcggccaagggaccaaggtggaaatcaaac

SEQ ID NO: 4569 - DNA, 331 bp, Homo sapiens; identical to SEQ ID NO: 4050

SEQ ID NO: 4570 - DNA, 331 bp, Homo sapiens
cagtctgccctgactcagcctgcctccgtgtctgggtctcctggacagtcgatcaccatctcctgcactggaaccagcagtgacgttggtggttataactatgtctcctggtaccaacaacacccaggcaaagcccccaaactcatgatttatgatgtcagtaatcggccctcaggggtttctaatcgcttctctggctccaagtctggcaacacggcctccctgaccatctctgggctccaggctgaggacgaggctgattattactgcagctcatatacaagcagcagcactcgagtcttcggaactgggaccaaggtcaccgtcctag

SEQ ID NO: 4571 - DNA, 325 bp, Homo sapiens
gccatccggataacccagtctccatcctcactctctgcatctacaggagacagagtcaccatcacttgtcgggcgagtcagggtattagcagttatttagcctggtatcagcaaaaaccagggaaagcccctaagctcctgatctatgctgcatccactttgcaaagtggggtcccatcaaggttcagcggcagtggatctgggacagatttcactctcaccatcagctgcctgcagtctgaagattttgcaacttattactgtcaacagtattatagttaccctgtcctcactttcggcggagggaccaaggtggagatcaaac

SEQ ID NO: 4572 - DNA, 319 bp, Homo sapiens
tcctatgagctgactcagccaccctcagtgtccgtgtccccaggacagacagccagcatcacctgctctggagataaattgggggataaatatacttgctggtatcagcagaagccaggccagtcccctgtgctggtcatctatcaagataacaagcggccctcagggatccctgagcgattctctggctccaactctgggaacacagccactctgaccatcagcgggacccaggctatggatgaggctgactattactgtcaggcgtgggacagcagcactgctgtcttcggaactgggaccaaggtcaccgtcctag

SEQ ID NO: 4573 - DNA, 322 bp, Homo sapiens
gacatccagatgacccagtctccatcctcactgtctgcatctgtaggagacagagtcaccatcacttgtcgggcgagtcagggcattagcaattatttagcctggtttcagcagaaaccagggaaagcccctaagtccctgatctatgctgcatccagtttgcaaagtggggtcccatcaaagttcagcggcagtggatctgggacagatttcactctcaccatcagcagcctgcagcctgaagattttgcaacttattactgccaacagtataatagttaccctctcactttcggcggagggaccaaggtggagatcaaac

SEQ ID NO: 4574 - DNA, 322 bp, Homo sapiens
gacatccagctgacccagtctccatcctccctgtctgcatctgtaggagacagagtcaccatcacttgccgggcaagtcagagcgttaccaactctttaaattggtatcaacagaaaccagggaaagcccctaacctcctgatctatgctgcatccagtttgcaaagtggggtcccatcacggttcagtggcagtggatctgggacagatttcactctcaccatcagcagtctgcaacctgaagattttgctacttactactgtcaacagagttacagtaccctgctcactttcggcggagggaccaaggtggagatcaaac

SEQ ID NO: 4575 - DNA, 340 bp, Homo sapiens
gacatcgtgatgacccagtctccagactccctggctgtgtctctgggcgagagggccaccatcaactgcaagtccagccagagtgttttatacagctccaacaataagaactacttagcttggtaccagcagaaaccaggacagcctcctaagctgctcatttactgggcatctacccgggaatccggggtccctgaccgattcagtggcagcgggtctgggacagatttcactctcaccatcagcagcctgcaggctgaagatgtggcggtttattactgtcagcaatattatactactcccgtgacgttcggccaagggaccaaggtggaaatcaaac

SEQ ID NO: 4576 - DNA, 322 bp, Homo sapiens
gccatccggatgacccagtctccatcctcattctctgcatctacaggagacagagtcaccatcacttgtcgggcgagtcagggtattagcagttatttagcctggtatcagcaaaaaccagggaaagcccctaagctcctgatctatgctgcatccactttgcaaagtggggtcccatcaaggttcagcggcagtggatctgggacagatttcactctcaccatcagctgcctgcagtctgaagattttgcaacttattactgtcaacagtattatagttaccctcagacttttggccaggggaccaagctggagatcaaac

SEQ ID NO: 4577 - DNA, 332 bp, Homo sapiens
cagtctgtgctggctcagccaccctcagcgtctgggacccccgggcagagtgtcaccatttcttgttctggaacctactccaacctcggaactaatactgtgaactggtaccagcagctcccgggaacggcccccaagctcctcatctatatcaataatcagcggccctcaggggtccctgaccgattctctggctccaagtctggcacctcagcctccctggccatccgtgggctccagtctgaggatgaggctgattattactgtgcatcatgggatgacagcctccatggctatgtggtattcggcggagggaccaagctgaccgtcct

SEQ ID NO: 4578 - DNA, 325 bp, Homo sapiens
tcctatgagctgacacagccaccctcggtgtcagtgtccccaggacaaacggccaggatcacctgctctggagatgcattgccaaaaaaatatgcttattggtaccagcagaagtcaggccaggcccctgtgttggtcacctatgaggacaacaaacgaccctccgggatccctgagagattctctggctccagctcagggacaatggccaccttgactatcagtggggcccaggtggaggatgaagctgactactactgttactcaacagacagcagtggtaatcattgggtgttcggcggagggaccaaggtgaccgtcctag

SEQ ID NO: 4579 - DNA, 340 bp, Homo sapiens
gacatcgtgatgacccagtctccagactccctggctgtgtctctgggcgagagggccaccatcaactgcaagtccagccagagtgttttatacagctccaacaataagaactacttagcttggtaccagcagaaaccaggacagcctcctaagctgctcatttactgggcatctacccgggaatccggggtccctgaccgattcagtggcagcgggtctgggacagatttcactctcaccatcagcagcctgcaggctgaagatgtggcagtttattactgtcagcaatattatagtactccctggacgttcggccaagggaccaaggtggaaatcaaac

SEQ ID NO: 4580 - DNA, 322 bp, Homo sapiens; identical to SEQ ID NO: 2296

SEQ ID NO: 4581 - DNA, 322 bp, Homo sapiens
gaaattgtgttgacacagtctccagccaccctgtctttgtctccaggggaaagagccaccctctcctgcagggccagtcagagtgttagcagctacttagcctggtaccaacagaaacctggccaggctcccaggctcctcatctatgatgcatccaacagggccactggcatcccagccaggttcagtggcagtgggtctgggacagacttcactctcaccatcagcagcctagagcctgaagattttgcagtttattactgtcagcagcgtagcaactggcctcttactttcggccctgggaccaaagtggatatcaaac

SEQ ID NO: 4582 - DNA, 328 bp, Homo sapiens
gaaattgtgttgacacagtctccagccaccctgtctttgtctccaggggaaagagccaccctctcctgcagggccagtcagagtgttagcagctacttagcctggtaccaacagaaacctggccaggctcccaggctcctcatctatgatgcatccaacagggccactggcatcccagccaggttcagtggcagtgggtctgggacagacttcactctcaccatcagcagcctagagcctgaagattttgcagtttattactgtcagcagcgtagcaactggcctccgacgtacacttttggccaggggaccaagctggagatcaaac

SEQ ID NO: 4583 - DNA, 337 bp, Homo sapiens
gatgttgtgatgactcagtctccactctccctgcccgtcacccttggacagccggcctccatctcctgcacgtctagtcaaagcctcgtatacagtgacggaaacacctacttgaattggtttcagcagaggccaggccaatctccaaggcgcctaatttataaggtttctaaccgggactctggggtcccagacagattcagtggcagtgggtcagacactgatttcacactgaaaatcagcagggtggaggctgaggatgttgggatttattactgcatgcaaggtacacactggccgggaacgttcggccaagggaccaaggtggaaatcaaac

SEQ ID NO: 4584 - DNA, 322 bp, Homo sapiens; identical to SEQ ID NO: 2296

SEQ ID NO: 4585 - DNA, 322 bp, Homo sapiens
gacatccagatgacccagtctccatcctccctgtctgcatctgtaggagacagagtcaccatcacttgccgggcgagtcagggcattagcaattttttagcctggtatcagcagaaaccagggaaagttcctaagctcctgatctatgctgcatccactttgcaatcaggggtcccatctcggttcagtggcagtggatctgggacagatttcactctcaccatcagcagcctgcagcctgaagatgttgcaacttattactgtcaaaactataacagtgcccctcggacgttcggccaagggaccaaggtggaaatcaaac

SEQ ID NO: 4586 - DNA, 322 bp, Homo sapiens; identical to SEQ ID NO: 2296

SEQ ID NO: 4587 - DNA, 325 bp, Homo sapiens
gaaattgtgttgacgcagtctccaggcaccctgtctttgtctccaggggaaagagccaccctctcctgcagggccagtcagagtgttagcagcagctacttagcctggtaccagcagaaacctggccaggctcccaggctcctcatctatggtgcatccagcagggccactggcatcccagacaggttcagtggcagtgggtctgggacagacttcactctcaccatcagcagactggagcctgaagattttgcagtgtattactgtcagcagtatggtagctcacctcggacgttcggccaggggaccaaggtggaaatcaaac

SEQ ID NO: 4588 - DNA, 325 bp, Homo sapiens
gaaattgtgttgacgcagtctccaggcaccctgtctttgtctccaggggaaagagccaccctctcctgcagggccagtcagagtgttagcagcagctacttagcctggtaccagcagaaacctggccaggctcccaggctcctcatctatggtgcatccagcagggccactggcatcccagacaggttcagtggcagtgggtctgggacagacttcactctcaccatcagcagactggagcctgaagattttgcagtgtattactgtcagcagtatggtagctcacctggaacgttcggccaagggaccaaggtggaaatcaaac

SEQ ID NO: 4589 - DNA, 325 bp, Homo sapiens
tcctatgagctgacacagccaccctcggtgtcagtgtccccaggacagacggccaggatcacctgctctggagatgcattgccaaagcaatatgcttattggtaccagcagaagccaggccaggcccctgtgttggtgatatataaagacagtgagaggccctcagggatccctgagcgattctctggctccagctcagggacaacagtcacgttgaccatcagtggagtccaggcagaagacgaggctgactattactgtcaatcagcagacagcagtggtacttatgctgtgttcggaggaggcacccagctgaccgtcctcg

SEQ ID NO: 4590 - DNA, 325 bp, Homo sapiens
gacatccagatgacccagtctccatcctccctgtctgcatctgtaggagacagagtcaccatcacttgccgggcaagtcagagcattagcagctatttaaattggtatcagcagaaaccagggaaagcccctaagctcctgatctatgctgcatccagtttgcaaagtggggtcccatcaaggttcagtggcagtggatctgggacagatttcactctcaccatcagcagtctgcaacctgaagattttgcaacttactactgtcaacagagttacagtaccctcaggaacacttttggccaggggaccaagctggagatcaaac

SEQ ID NO: 4591 - DNA, 331 bp, Homo sapiens
cagtctgccctgactcagcctgcctccgtgtctgggtctcctggacagtcgatcaccatctcctgcactggaaccagcagtgacgttggtcgttataactatgtctcctggtaccaacaacacccaggcaaagcccccaaactcatgatttatgatgtcagtagtcggccctcaggggtttctaatcgcttcactggctccaagtctggcaacacggcctccctgaccatctctgggctccaggctgaggacgaggctgattattactgcagctcatatacaagcaccagcactctggtgttcggcggagggaccaagctgaccgtcctag

SEQ ID NO: 4592 - DNA, 334 bp, Homo sapiens
cagtctgtgttgacgcagccgccctcagtgtctgcggccccaggacagaaggtcaccatctcctgctctggaagcagctccaacattgggaataattatgtatcctggtaccagcagctcccaggaacagcccccaaactcctcatttatgacaataataagcgaccctcagggattcctgaccgattctctggctccaagtctggcacgtcagccaccctgggcatcaccggactccagactggggacgaggccgattattactgcggaacatgggatggcagcctgagtgtcttttatgtcttcggaactgggaccaaggtcaccgtcctag

SEQ ID NO: 4593 - DNA, 331 bp, Homo sapiens
cagtctgtcctgactcagcctccctccgtgtccgggtctcctggacagtcagtcaccatctcctgcactggaaccagcagtgacgttggtagttataaccgtgtctcctggtaccagcagcccccaggcacagcccccaaactcatgatttatgaggtcagtaatcggccctcaggggtccctgatcgcttctctgggtccaagtctggcaacacggcctccctgaccatctctgggctccaggctgaggacgaggctgattattactgcagctcatatacaagcagcagcccttatgtcttcggaactgggaccaaggtcaccgtcctag

SEQ ID NO: 4594 - DNA, 337 bp, Homo sapiens
cagtctgccctgactcagcctgcctccgtgtctgggtctcctggacagtcgatcaccatctcctgctctggaaccagcagtgatattgggagttatgaccttgtctcctggtaccaacagcacccaggcaaagcccccaaactcataatttatgaggtcagtgagcggccctcaggggtttctaatcgcttctctggctccaagtctggcaacacggcctccctgacactctctgggctccaggctgaggacgaggctgattattactgctgctcatatgcaggttctaacactttccaagtgctattcggcggagggacccaggtgaccgtcctag

SEQ ID NO: 4595 - DNA, 340 bp, Homo sapiens
gatattgtgatgacccagactccactctccctgcccgtcacccctggagagccggcctccatctcctgcaggtctagtcagagcctcttggatagtgatgatggaaacacctatttggactggtacctgcagaagccagggcagtctccacagctcctgatctatacgctttcctatcgggcctctggagtcccagacaggttcagtggcagtgggtcaggcactgatttcacactgaaaatcagcagggtggaggctgaggatgttggagtttattactgcatgcaacgtatagagtttccgctcactttcggcggagggaccaaggtggagatcaaac

SEQ ID NO: 4596 - DNA, 331 bp, Homo sapiens
cagtctgccctgactcagcctcgctcagtgtccgggtctcctggacagtcagtcaccatctcctgcactggaaccagtaatgatgttggtggttataactatgtctcctggtaccaacagcacccaggcaaagcccccaaactcatgatttatgatgtcagtaagcggccctcaggggtccctgatcgcttctctggctccaagtctggcaacacggcctccctcaccatctctgggctccaggctgaggatgaggctgattattactgctgctcatatgcaggcagcttcacttatgtcttcggaactgggaccaaggtcaccgtcctag

SEQ ID NO: 4597 - DNA, 331 bp, Homo sapiens
cagactgtggtgacccaggagccatcgttctcagtgtcccctggagggacagtcacactcacttgtggcttgagctctggctcagtctctagtagttactaccccatctggtaccagcagaccccaggccaggctccacgcacgctcatctacagcacaaatgctcgctcttctggggtccctgatcgcttctctggctccatccttgggaacaaagctgccctcaccatcacgggggcccaggcagatgatgaatctgattattactgtgcgctgtatatgggtagtggcatttgggtgttcggcggagggaccaagctgaccgtcctag

SEQ ID NO: 4598 - DNA, 325 bp, Homo sapiens
gaaattgtgttgacgcagtctccaggcaccctgtctttgtctccaggggaaagagccaccctctcctgcagggccagtcagagtgttagcagcagctacttagcctggtaccagcagaaacctggccaggctcccaggctcctcatctatggtgcatccagcagggccactggcatcccagacaggttcagtggcagtgggtctgggacagacttcactctcaccatcagcagactggagcctgaagattttgcagtgtattactgtcagcagtatggtagctcacctcggacttttggccaggggaccaagctggagatcaaac

SEQ ID NO: 4599 - DNA, 334 bp, Homo sapiens
cagtctgtgctgacgcagccgccctcagtgtctggggccccagggcagagggtcaccatctcctgcactgggagcagctccaacatcggggcaggttatgatgtacactggtaccagcagcttccaggaacagcccccaaactcctcatctatggtaacagcaatcggccctcaggggtccctgaccgattctctggctccaagtctggcacctcagcctccctggccatcactgggctccaggctgaggatgaggctgattattactgccagtcctatgacagcagcctgagtggttctgtcttcggaactgggaccaaggtcaccgtcctag

SEQ ID NO: 4600 - DNA, 322 bp, Homo sapiens
tcctatgtgctgactcagccaccctcggtgtcagtggccccaggacagacggccaggattacctgtgggggaaacaacattggaagtaaaagtgtgcactggtaccagcagaagccaggccaggcccctgtgctggtcgtctatgatgatagcgaccggccctcagggatccctgagcgattctctggctccaactctgggaacacggccaccctgaccatcagcagggtcgaagccggggatgaggccgactattactgtcaggtgtgggatagtagtagtgatcagttattcggcggagggaccaagctgaccgtcctag

SEQ ID NO: 4601 - DNA, 322 bp, Homo sapiens; identical to SEQ ID NO: 837

SEQ ID NO: 4602 - DNA, 331 bp, Homo sapiens; identical to SEQ ID NO: 764

SEQ ID NO: 4603 - DNA, 322 bp, Homo sapiens
gacatccagatgacccagtctccttccaccctgtctgcatctgtaggagacagagtcaccatcacttgccgggccagtcagagtattagtagctggttggcctggtatcagcagaaaccagggaaagcccctaagctcctgatctataaggcatctagtttagaaagtggggtcccatcaaggttcagcggcagtggatctgggacagaattcactctcaccatcagcagcctgcagcctgatgattttgcaacttattactgccaacagtataatagttattcaatcacgttcggccaagggaccaaggtggaaatcaaac

SEQ ID NO: 4604 - DNA, 322 bp, Homo sapiens
gacatccagatgacccagtctccttccaccctgtctgcatctgtaggagacagagtcaccatcacttgccgggccagtcagagtattagtagctggttggcctggtatcagcagaaaccagggaaagcccctaagctcctgatctataaggcatctagtttagaaagtggggtcccatcaaggttcagcggcagtggatctgggacagaattcactctcaccatcagcagcctgcagcctgatgattttgcaacttattactgccaacagtataatagttattgggggacgttcggccaagggaccaaggtggaaatcaaac

SEQ ID NO: 4605 - DNA, 322 bp, Homo sapiens
gacatccagatgacccagtctccatcctccctgtctgcatctgtaggagacagagtcaccatcacttgccgggcgagtcagggcattagcaattatttagcctggtatcagcagaaaccagggaaagttcctaagctcctgatctatgctgcatccactttgcaatcaggggtcccatctcggttcagtggcagtggatctgggacagatttcactctcaccatcagcagcctgcagcctgaagatgttgcaacttattactgtcaaaagtataacagtgcccctcggactttcggccctgggaccaaagtggatatcaaac

SEQ ID NO: 4606 - DNA, 319 bp, Homo sapiens
tcctatgagccgactcagccaccctcagtgtccgtgtccccaggacagacagccagcatcacctgctctggagataaattgggggataaatatgcttcctggtatcagcagaagccaggccagtcccctgtgctggtcatctatcaagataccaagcggccctcagggatccctgagcgattctctggctccaactctgggaacacagccactctgaccatcaccgggacccaggctatggatgaggctgactattactgtcaggcgtgggacagcagccgtcaggtattcggcggagggaccaagctgaccgtcctag

SEQ ID NO: 4607 - DNA, 322 bp, Homo sapiens
gacatccagatgacccagtctccatcctccctgtctgcatctgtaggagacagagtcaccatcacttgccaggcgagtcaggacattaggaattatttaaattggtatcagcagaaaccagggaaagcccctaagctcctgatctacgacgcatccaatttggaaacaggggtctcatcaaggttcagtggaagtggatctgggacagattttactttcaccatcagcagcctgcagcctgaagatattgcaacatattactgtctacagtatgataatctccctaagacttttggccaggggaccaagctggagatcaaac

SEQ ID NO: 4608 - DNA, 325 bp, Homo sapiens
gacatccagatgacccagtctccatcctccctgtctgcatctgtaggagacagagtcaacatcacttgccgggcaagtcagagcattagcaggtctttaaattggtatcagcagaaaccagggaaagcccctaagctcctgatctatgctgcatccagtttgcaaagtggggtcccatcaaggttcagtggcagtggatctgggacagatttcactctcaccatcagtagtctgcaacctgaagatttggcaacttactactgtcaacagagttacagtacccctccgtacacttttggccaggggaccacgctggagatcaaac

SEQ ID NO: 4609 - DNA, 334 bp, Homo sapiens
cactctgccctgagtcagcctgcctccgtgtctgggtctcctggacagtcgattaccatctcctgcactggaaccagcagtgacattggtgattataactatgtcgcctggtaccaacaacacccaggcaaagcccccaaagtcatgatttatgatgtcaaaattcggccctcaggggtttctaatcgcttttttggctcgaagtctggcaacacggcctccctgaccatctctggactcctggctgaggacgaggctgactattactgcagctcatacagcagaagtacgtccctttatgtctttgggactgggaccaaggtcaccgtcctag

SEQ ID NO: 4610 - DNA, 331 bp, Homo sapiens
gaaatagtgatgacgcagtctccagccaccctgtctgtgtctccaggggaaagagccaccctctcctgcagggccagtcagagtgttagcagcaacttagcctggtaccagcagaaacctggccaggctcccaggctcctcatctatggtgcatccaccagggccactggtatcccagccaggttcagtggcagtgggtctgggacagagttcactctcaccatcagcagcctgcagtctgaagattttgcagtttattcctgtcagcagtataataactggcctccgagggggtacacttttggccaggggaccaagctggagatcaaac

SEQ ID NO: 4611 - DNA, 323 bp, Homo sapiens
gaaattgtgttgacgcagtctccaggcaccctgtctttgtctccaggagaaagagccaccctctcctgcagggccagtcacagtgttagcagcggctacttagcctggtaccagcagaaacctggccaaactcccagactcctcatctatggtgcatccagcagggccactggcatcgcagacaaattcagtggcagtgggtctgggacagacttcactctcaccatcagcagactggagcctgaagattttgcggtgtattactgtcagcagtatggtacctccccctccactttcggcggagggaccaaggtggagatcaa

SEQ ID NO: 4612 - DNA, 322 bp, Homo sapiens
gaaattgtgctgactcagtctccagactttcagtctgtgactccaaaggagaaagtcaccatcacctgccgggccagtcagagcattggtagtagcttacactggttccagcagaaaccagatcagtctccaaagctcctcatcaagtatgcttcccagtccttctcaggggtcccctcgaggttcagtggcagtggatctgggacagatttcaccctcaccatcaatagcctggaagctgaagatgctgcaacgtattactgtcatcagagtagtagtttacctcacacttttggccaggggaccaagctggagatcaaac

SEQ ID NO: 4613 - DNA, 322 bp, Homo sapiens
gaaatagtggtaacgcagtctccagccaccctgtctgtgtctccaggggaaagagccaccctctcctgcagggccagtcagagtgttagcagcaacttagcctggtatcagcagaaacctggccaggctcccaggctcctcatctatggtgcatccaccagggccactggtatcccagccaggttcagtggcagtgggtctgggacagagttcactctcaccatcagcagcctgcagtctgaagattttgcagtttattactgtcagcagtataataacgggccattcactttcggccctgggaccaaagtggatatcaaac

SEQ ID NO: 4614 - DNA, 337 bp, Homo sapiens
gatattgtgatgactcagtctccactctccctgcccgtcacccctggagagccggcctccatctcctgcaggtctagtcagagcctcctgcatagtaatggatacaactatttggattggtacttgcagaagccagggcagtctccacaactcctgatctatttgggttctcagcgggcctccggggtccctgacaggctcagtgtcagtggatcaggcacagattttacactgaaaatcagcagagtggaggctgaggatgttggggtttattactgcatgcaaggtctacaaattcccttcactttcggccctgggaccaaagtggatatcaaac

SEQ ID NO: 4615 - DNA, 331 bp, Homo sapiens
cagtctgccctgactcagcctcgctcagtgtccgggtctcctggacagtcagtcaccatctcctgcactggaaccagcagtgatgttggtagttataactatgtctcctggtaccaacaacacccaggcaaagcccccaaactcatgatttatgatgtcaataagtggccctcaggggtccctgatcgcttctctggctccaagtctggcaacacggcctccctgaccatctctgggctccagactgaggatgaggctgattattactgctgctcatatgcaggcacattcacttatgtcttcggaactgggaccaaggtcaccgtcctag

SEQ ID NO: 4616 - DNA, 322 bp, Homo sapiens
gaaaaagtgatgacgcagtctccagccaccctgtctgtgtctccaggggagagagccaccctctcctgcagggccagtcagagtgttagcagcaacttagcctggtaccagctgaaacctggccaggctcccaggctcctcatctatggtgcatccaccagggccactggtatcccagccaggttcagtggcagtgggtctgggacagagttcactctcaccatcagcagcctgcagtctgaagattttgcagtttattactgtcagcagtataatgactggccgctcactttcggcggagggaccaaggtggagatcaaac

SEQ ID NO: 4617 - DNA, 337 bp, Homo sapiens
cagcctgtgctgactcaatcatcctctgcctctgcttccctgggatcctcggtcaagctcacctgcactctgagcagtgggcacagtagctacatcatcgcatggcatcagcagcagccagggaaggcccctcggtacttgatgaagcttgaaggtagtggaagctacaacaaggggagcggagttcctgatcgcttctcaggctccagctctggggctgaccgctacctcaccatctccaacctccagtttgaggatgaggctgattattactgtgagacctgggacagtaacgcccatgtggtattcggcggagggaccaagctgaccgtcctag

SEQ ID NO: 4618 - DNA, 322 bp, Homo sapiens
gacatccagttgacccagtctccatccttcctgtctgcatctgtaggagacagagtcaccatcacttgccgggccagtcagggcattagcagttatttagcctggtatcagcaaaaaccagggaaagcccctaaggtcctgatctatgctgcatccactttgcaaagtggggtcccatcaaggttcagcggcagtggatctgggacagaattcactctcacaatcagcagcctgcagcctgaagattttgcaacttattactgtcaacagtttaatagttaccctctcaccttcggccaagggacacgactggagattaaac

SEQ ID NO: 4619 - DNA, 322 bp, Homo sapiens
gaaattgtgttgacgcagtctccaggcaccctgtctttgtctccaggggaaagagccaccctctcctgcagggccagtcagagtgttagcagcagctacttagcctggtaccagcagaaacctggccaggctcccaggctcctcatctatggtgcatccagcagggccactggcatcccagacaggttcagtggcagtgggtctgggacagacttcactctcaccatcagcagactggagcctgaagattttgcagtgtattactgtcagcagtatggtagctcaccttttttcggccctgggaccaaagtggatatcaaac

SEQ ID NO: 4620 - DNA, 331 bp, Homo sapiens
tcttctgagctgactcaggaccctgctgtgtctgtggccttgggacagacagtcaggatcacatgccaaggagacagcctcagaagttattatgcaagctggtaccagcagaagccaggacaggcccctgtagttgtcatctatggtaaaaacaaccggccctcagggatcccagaccgattctctggctccagctcagggaacacagcttccttgaccatcactggggctcaggcggaagatgaggctgactattactgtaactcccgggacagtagtggtaagcatctgaatgtggtattcggcggagggaccaagctgaccgtcctag

SEQ ID NO: 4621 - DNA, 331 bp, Homo sapiens
cagtctgtgctgactcagccaccctcggtgtctgaagcccccaggcagagggtcaccatctcctgttctggaagcagctccaacatcggaaataatgctgtaaactggtaccagcagctcccaggaaaggctcccaaactcctcatctattatgatgatctgctgccctcaggggtctctgaccgattctctggctccaagtctggcacctcagcctccctggccatcagtgggctccagtctgaggatgaggctgattattactgtgcagcatgggatgacagcctgaatggttgggtgttcggcggagggaccaagctgaccgtcctag

SEQ ID NO: 4622 - DNA, 340 bp, Homo sapiens
gacatcgtgatgacccagtctccagactccctggctgtgtctctgggcgagagggccaccatcaactgcaagtccagccagagtgttttatacagctccaacaataagaactacttagcttggtaccagcagaaaccaggacagcctcctaagctgctcatttactgggcatctacccgggaatccggggtccctgaccgattcagtggcagcgggtctgggacagatttcactctcaccatcagcagcctgcaggctgaagatgtggcagtttattgctgtcagcaatattatagtactcctctcactttcggcggagggaccaaggtggagatcaaac

SEQ ID NO: 4623 - DNA, 328 bp, Homo sapiens
gaaattgtgttgacgcagtctccaggcaccctgtctttgtctccaggggaaagagccaccctctcctgcagggccagtcagagtgttagcagcagctacttagcctggtaccagcagaaacctggccaggctcccaggctcctcatctatggtgcatccagcagggccactggcatcccagacaggttcagtggcagtgggtctgggacagacttcactctcaccatcagcagactggagcctgaagattttgcagtgtattactgtcagcagtatggtagctcacctggagggacgttcggccaagggaccaaggtggaaatcaaac

SEQ ID NO: 4624 - DNA, 322 bp, Homo sapiens
gacatccagatgacccagtctccatcttcactgtctgcatctgtaggagacagagtcaccatcacttgtcgggcgagtcagggcattagtaattatttagcctggtttcagcagaaaccagggaaagcccctaagtccctgatctatgctgcatccagtttggaaagtggggtcccatcaaagttcagcggcagtggatctgggacagatttcactctcaccatcagcagcctgcagcctgaagattttgcagtttattactgccaacagtattacacttacccgtggacgttcggccaagggaccaaggtggaaatcaaac

SEQ ID NO: 4625 - DNA, 322 bp, Homo sapiens
gaagtagtgatgacgcagtctccagccaccctgtctgtgtctccaggggaaagagccaccctctcctgcagggccagtcagagtgttagcagcaacttagcctggtaccagcagaaacctggccaggctcccaggctcctcatctatggtgcatccaccagggccactggtatcccagccaggttcagtggcagtgggtctgggacagagttcactctcaccatcagcagcctgcagtctgaagattttgcagtttattactgtcagcagtataataactggcctccagtcactttcggccctgggaccaaagtggatatca

SEQ ID NO: 4626 - DNA, 325 bp, Homo sapiens
gaaattgtgttgacgcagtctccaggcaccctgtctttgtctccaggggaaagagccaccctctcctgcagggccagtcagagtgttagcagcagctacttagcctggtaccagcagaaacctggccaggctcccaggctcctcatctatggtgcatccagcagggccactggcatcccagacaggttcagtggcagtgggtctgggacagacttcactctcaccatcagcagactggagcctgaagattttgcagtgtattactgtcagcagtatggtagctcacttctcactttcggcggagggaccaaggtggagatcaaac

SEQ ID NO: 4627 - DNA, 340 bp, Homo sapiens
gacatcgtgatgacccagtctccagactccctggctgtgtctctgggcgagagggccaccatcaactgcaagtccagccagagtgttttatacagctccaacaataagaactacttagcttggtaccagcagaaaccaggacagcctcctaagctgctcatttactgggcgtctacccgggaatccggggtccctgaccgattcagtggcagcgggtctgggacagatttcactctcaccatcaccagcctgcaggctgaagatgtggcagtttattactgtcagcaatattatagtaccctgtacacttttggccaggggaccaagctggagatcaaac

SEQ ID NO: 4628 - DNA, 322 bp, Homo sapiens; identical to SEQ ID NO: 1037

SEQ ID NO: 4629 - DNA, 331 bp, Homo sapiens; identical to SEQ ID NO: 1021

SEQ ID NO: 4630 - DNA, 322 bp, Homo sapiens
gaaattgtgttgacgcagtctccaggcaccctgtctttgtctccaggggaaagagccaccctctcctgtagggccagtcagagtattagtggtaattacttagcctggtaccagcagaaacctggccaggctcccaggctcctcatctatggtgcatccagcagggccactggcatcccagacaggttcagtggcagtgggtctgggacagacttcactctcaccatcagcagactggagcctgaagattttgcagtgtattactgtcaccagtatgttacctcacctcggacgttcggccaagggaccaaggtggaaatca

SEQ ID NO: 4631 - DNA, 328 bp, Homo sapiens
gaaattgtgttgacgcagtctccaggcaccctgtctttgtctccaggggaaagagccaccctttcctgcagggccagtcagagtgttagcagcacctacttagcctggtaccagcagaagcctggccaggctcccaggctcctcatctatggtgcatccagcagggccattggcatcccagacaggttcagtggcagtgggtctgggacagacttcactctcaccatcagcagactggagcctgaagattttgcagtgtattactgtcaccagtatggtccctcactcacgtggacgttcggccaagggaccaaggtggaaatcaaac

SEQ ID NO: 4632 - DNA, 319 bp, Homo sapiens
tcctatgagctgactcagccaccctcagtgtccgtgtccccaggacagacagccagcatcacctgctctggagataaactggggaataaatattcttgttggtatcagcagaagccaggccagcccccggtgctggtcatctatcaagataacaagcggccctcagggatccctgagcgattctctggctccaactctgggaacacagccactctgaccatcagcgggacccaggctatggatgaggctgactattactgtcaggcgtggcacagcagcgccgtggtcttcggcggagggaccaagctgaccgtcctag

SEQ ID NO: 4633 - DNA, 325 bp, Homo sapiens
gaaattgtgttgacgcagtctccaggcaccctgtctttgtctccaggggaaagagccaccctctcctgcagggccagtcagagtgttagcagcagctacttagcctggtaccagcagaaacctggccaggctcccaggctcctcatctatggtgcatccagcagggccactggcatcccagacaggttcagtggcagtgggtctgggacagacttcactctcaccatcagcagactggagcctgaagattttgcagtgtattactgtcagcagtatggtagctcaccccggacgttcggccaagggaccaaggtggaaatcaaac

SEQ ID NO: 4634 - DNA, 322 bp, Homo sapiens
tcctatgacctgacacagccaccctcggtgtcagtgtccccaggacagacggccaggatcacctgctctgcagatgcattggcaaagcaatatgcttattggtaccagcagaagccaggccaggcccctgtgttggtaatttataaagacactgagaggccctcagggatccctgagcgattctctggctccagctcagggacaacagtcacgttgaccatcagtggagtccaggcagaagacgaggctgactattactgtcaatcagcagacagcagtggaacttatgtcttcggaactgggaccaaggtcaccgtcctag

SEQ ID NO: 4635 - DNA, 331 bp, Homo sapiens
cagcttgtgctgactcaatcgccctctgcctctgcctccctgggagcctcggtcaagctcacctgcactctgagcagtggacacagcagctacgccatcgcatggcatcagcagctgccagagaagggccctcggtacttaatgaaacttaacaatgatggcagccacagcaagggggacgagatccctgatcgcttctcaggctccagctctggggctgagcgctacctcaccatctccagcctccagtctgaagatgaggctgactattactgtcagacctggggcaccgatgtggtattcggcggagggaccaagctgaccgtcctag

SEQ ID NO: 4636 - DNA, 322 bp, Homo sapiens
gacatccagatgacccagtctccatcctcactgtctgcatctgtaggagacagagtcaccatcacttgtcgggcgagtcagggcattagcaattatttagcctggtttcagcagaaaccagggaaagcccctaagtccctgatctatgctgcatccagtttgcaaagtggggtcccatcaaagttcagcggcagtggatctgggacagatttcactctcaccatcagcagcctgcagcctgaagattttgcaacttattactgccaacagtataatagttaccctcccaccttcggccaagggacacgactggagattaaac

SEQ ID NO: 4637 - DNA, 325 bp, Homo sapiens
gaaatagtgatgacgcagtctccagccaccctgtctgtgtctccaggggaaagagccaccctctcctgcagggccagtcagagtgttagcagcaacttagcctggtaccagcagaaacctggccaggctcccaggctcctcatctatggtgcatccaccagggccactggtatcccaaccaggttcagtggcagtgggtctgggacagagttcactctcaccatcagcagcctgcagtctgaagattttgcagtttattactgtcagcagtataataactggcctccagggacttttggccaggggaccaagctggagatcaaac

SEQ ID NO: 4638 - DNA, 325 bp, Homo sapiens
gacatccagatgacccagtctccatcctccctgtctgcatctgtaggagacagagtcaccatcacttgccgggcgagtcagggcattagcaattatttagcctggtatcagcagaaaccagggaaagttcctaagctcctgatctatgctgcatccactttgcaatcaggggtcccatctcggttcagtggcagtggatctgggacagaattcactctcaccatcagcagcctgcagcctgaagatgttgcaacttattactgtcaaaagtatcacagtgaccctctctggacgttcggccaagggaccaaggtggaaatcaaac

SEQ ID NO: 4639 - DNA, 325 bp, Homo sapiens
tcttctgagctgactcaggaccctgctgtgtctgtggccttgggacagacagtcaggatcacatgccaaggagacagcctcagaagctattatgcaagctggtaccagcagaagccaggacaggcccctgtacttgtcatctatggtaaaaacaaccggccctcagggatcccagaccgattctctggctccagctcaggaaacacagcttccttgaccatcactggggctcaggcggaagatgaggctgactattactgtaactcccgggacagcagtggtaaccatgtggtattcggcggagggaccaagctgaccgtcctag

SEQ ID NO: 4640 - DNA, 322 bp, Homo sapiens
tcctatgagctgactcagccaccctcagtgtccgtgtccccaggacagacagccagcatcacctgctctggagataaattgggggataaatatgcttgctggtatcagcagaagccaggccagtcccctgtgctggtcatctatcaagatagcaagcggccctcagggatccctgagcgattctctggctccaactctgggaacacagccactctgaccatcagcgggacccaggctatggatgaggctgactattactgtcaggcgtgggacagcagcactgcttatgtcttcggaactgggaccaaggtcaccgtcctag

SEQ ID NO: 4641 - DNA, 337 bp, Homo sapiens; identical to SEQ ID NO: 2302

SEQ ID NO: 4642 - DNA, 325 bp, Homo sapiens
gaaattgtgttgacgcagtctccaggcaccctgtctttgtctccaggggaaagagccaccctctcctgcagggccagtcagagtgttagcagcagctacttagcctggtaccagcagaaacctggccaggctcccaggctcctcatctatggtgcatccagcagggccactggcatcccagacaggttcagtggcagtgggtctgggacagacttcactctcaccatcagcagactggagcctgaagattttgcagtgtattactgtcagcagtatggtagctcactccggacgttcggccaagggaccaaggtggaaatcaaac

SEQ ID NO: 4643 - DNA, 340 bp, Homo sapiens
gatattgtgatgacccagactccactctctctgtccgtcacccctggacagccggcctccatctcctgcaagtctagtcagagcctcctgcatagtgatggaaagacctatttgtattggtacctgcagaagccaggccagcctccacagctcctaatctatgaagttaccaaccggttctctggagtgccagataggttcagtggcagcgggtcagggacagatttcacactgaaaatcagccgggtggaggctgaggatgttggaatttattactgcatgcaaagtatacagcttcctcccttcactttcggccctgggaccaaagtggatatcaaac

SEQ ID NO: 4644 - DNA, 321 bp, Homo sapiens
gacatcgtgatgacccagtctccagactccctggctgtgtctctgggcgagagggccaccatcaactgcaagtccagccagagtgttttatacagctccaacaataagaactacttagcttggtaccagcagaaaccaggacagcctcctaagctgctcatttactgggcatctacccgggaatccggggtccctgaccgattcagtggcagcgggtctgggacagatttcactctcaccatcagcagcctgcaggctgaagatgtggcagtttattactgtcagcaatattatagtactccttcaaggtggagatcaaac

SEQ ID NO: 4645 - DNA, 319 bp, Homo sapiens
gacatccagatgacccagtctccttccaccctgtctgcatctgtaggagacagagtcaccatcacttgccgggccagtcagagtattcgtagctggttggcctggtatcagcacaaaccagggaaagcccctaagctcctgatctataaggcgtctagtttagaaagtggggtcccatcaaggttcagcggcagtggatctgggacagaattcactctcaccatcagcagcctgcagcctgatgattttgccacttattactgtcaacagtatgatagttatttcacttttggccaggggaccaagctggagatcaaac

SEQ ID NO: 4646 - DNA, 316 bp, Homo sapiens
gaaattgtgctgacgcagtctccaggcaccctgtctttgtttccaggggaaagagccaccctctcctgcagggccagtcagagttttagcagcagctacttagcctggtaccagcagaaacctggccaggctcccaggctcctcatctatggtgcatccagcagggccactggcatcccagacaggttcagtggcagtgggtctgggacagacttcactctcagcatcagcagactggagcctgaagattttgcagtgtattactgtcagcagtatggtaggacgttcggccaagggaccaaggtggaaatcaaac

SEQ ID NO: 4647 - DNA, 322 bp, Homo sapiens; identical to SEQ ID NO: 927

SEQ ID NO: 4648 - DNA, 325 bp, Homo sapiens
gacatccagatgacccagtctccatcctccctgtctgcatctgtaggagacagagtcaccatcacttgccaggcgagtcaggacattagcaactatttaaattggtatcagcagaaaccagggaaagcccctaagctcctgatctacgatgcatccaatttggaaacaggggtcccatcaaggttcagtggaagtggatctgggacagattttactttcaccatcagcagcctgcagcctgaagatattgcaacatattactgtcaacagtatgataatctccccacgctcactttcggcggagggaccaaggtggagatcaaac

SEQ ID NO: 4649 - DNA, 331 bp, Homo sapiens
cagtctgccctgactcagcctgcctccgtgtctgggtctcctggacagtcgatcaccatctcctgcactggaaccagcagtgatgttgggagttataaccttgtctcctggtaccaacagcacccaggcaaagcccccaaactcatgatttatgagggcagtaagcggccctcaggggtttctaatcgcttctctggctccaagtctggcaacacggcctccctgacaatctctgggctccaggctgaggacgaggctgattattactgctgctcatatgcaggtagtagcactttggtattcggcggagggaccaagctgaccgtcctag

SEQ ID NO: 4650 - DNA, 328 bp, Homo sapiens
gaaattgtgttgacgcagtctccagacaccctgtctttgtctccaggggaaagagccaccctctcctgcagggccagtcagagtgttaggaccacctacttagcctggtaccagcagaaacctggccaggctcccaggctcctcatctatggtgcatccagcagggccactggcatcccagacaggttcagtggcagtgggtctgggacagacttcactctcaccatcagcagactggagcctgaagattttgcagtgtattactgtcagcaatctgatggctcaccttcaggcactttcggcggagggaccaaggtggagatcaaac

SEQ ID NO: 4651 - DNA, 319 bp, Homo sapiens
tcctatgagctgactcagccaccctcagtgtccgtgtccccaggacagacagccagcatcacctgctctggagatacattgggggataaatatgcttgctggtatcaacagaagccaggccagtcccctgtgctgatcatctatcaagatgacaggcggccctcagggatccctgagcgattctctgcctccaactctgggaacacagccactctgaccatcagcgggacccagcctatggatgaggctgactattactgtcaggcgtgggacagcagcactgtagtcttcggaactgggaccaaggtcaccgtcctag

SEQ ID NO: 4652 - DNA, 329 bp, Homo sapiens
cagtctgccctgactcagcctcgctcagtgtccgggtctcctggacagtcagtcaccctctcctgcactggaaccagcagtgatgttggtacttacaactttgtctcctggtaccaacaacaaccaggcaaagcccccaaactcatgatttatgatgtcagtaagcggccctcaggtgtccctgatcggttctctggctccaagtccgccaacacggcctccctgaccatttctgggctccaggctgaggatgaggctgattattactgcttctcatatgtaggcccctacaagttggcattcggcggagggaccaaggtgaccgtcct

SEQ ID NO: 4653 - DNA, 334 bp, Homo sapiens
cagtctgccctgactcagcctgcctccgtgtctgggtctcctggacagtcgatcaccatctcctgcactggaaccagcagtgacgttggtggttataactatgtctcctggtaccaacaacacccaggcaaagcccccaaactcatgatttatgatgtcagtaatcggccctcaggggtttctaatcgcttctctggctccaagtctggcaacacggcctccctgaccatctctgggctccaggctgaggacgaggctgattattactgcagctcatatacaagcagcagcatcctttatgtcttcggaactgggaccaaggtcaccgtcctag

SEQ ID NO: 4654 - DNA, 331 bp, Homo sapiens
cagtctgtgctgactcagccaccctcagcgtctgggacccccgggcagagggtcaccttctcttgttctggaagcagctccaacatcggaagtaattttgtatcctggtaccagcagctcccaggaacggcccccaaactcctcatctataggaattatcagcggccctcaggggtccctgaccgattctctgcctccaagtctggcacctcagcctccctggccatcagtgggctccggtccgaggatgagtctgattattactgtgctacatgggatgacagcctgagtggtgtggtattcggcggagggaccaagctgaccgtcctag

SEQ ID NO: 4655 - DNA, 334 bp, Homo sapiens
cagtctgccctgactcagcctgcctccgtgtctgggtctcctggacagtcgatcaccatcccctgcactggaaccagcagtgacgttggtgcttataactatgtctcgtggttccaacaacacccaggcgaagcccccaaactcatgatatttgatgtcagttatcggccctcaggggtttctaatcgcttctctggctccaagtctggcaacacggcctccctgaccatctctgggctccacgctgaagacgaggctgattattactgtagctcatatacaagcaatacagggatttatgtcttcggaactgggaccaaggtcaccgtcctag

SEQ ID NO: 4656 - DNA, 316 bp, Homo sapiens
tcctatgagctgactcagccaccctcagtgtccgtttccccaggacagacagccagcatcacctgctctggagataaattgggggataaatatgcttgctggtatcagcagaagccaggccagtcccctgttctggtcctctatcaaggtaccaggcggccctcagggatccctgagcgattctctggctcccactctgggaacacagccactctgaccatcagcgggacccaggctatggatgaggctgactattactgtcaggcgtgggacacggggggagtcttcggaactgggaccaaggtcaccgtcctag

SEQ ID NO: 4657 - DNA, 331 bp, Homo sapiens
gaaattgtgttgacgcagtctccaggcaccctgtctttgtctccaggggaaagagccaccctctcctgcagggccagtcagagtgttagcagcaactacttagcctggtaccagcagaaacctggccaggctcccaggctcctcatccatggtgcatccagcagggccactggcatcccagacaggttcagtggcagtgggtctgggacagacttcactctcaccatcagcagactggagcctgaagattttgcactgtattactgtcagcggtatgatagctcacctccgagattcactttcggccctgggaccaaagtggatatcaaac

SEQ ID NO: 4658 - DNA, 322 bp, Homo sapiens
gacatccagttgacccagtctccatccttcctgtctgcatctgtaggggacagagtcaccatcacttgccgggccagccagggcattagtagttatttagcctggtatcagcaaaaaccagggaaagcccctaagctcctgatctatgctgcatccactttgcaaagtggggtcccatcaaggttcagcggcagtggatctgggacagaattcactctcacaatcagcagcctgcagcctgaagattttgcaacttattactgtcaacaccttaatacttaccctccgacgttcggccaagggaccaaggtggaaatcaaac

SEQ ID NO: 4659 - DNA, 328 bp, Homo sapiens
cagtctgccctgactcagcctgcctccgtgtctgggtctcctggacagtcgatcaccatctcctgcactggaaccagcagtgacgttggtggttataactatgtctcctggtaccaacaacacccaggcaaagcccccaaactcatgatttatgatgtcagtaatcggccctcaggggtttctaatcgcttctctggctccaagtctggcaacacggcctccctgaccatctctgggctccaggctgaggacgaggctgattattactgcagctcatatacaagcagcagctatgtcttcggaactgggaccaaggtcaccgtcctag

SEQ ID NO: 4660 - DNA, 337 bp, Homo sapiens
cagtctgccctgactcagcctgcctccgtgtctgggtctcctggacagtcgatcaccatctcctgcactggaaccagcagtgatgttgggagttataaccttgtctcctggtaccaacagcacccaggcaaagcccccaaactcatgatttatgagggcagtaagcggccctcaggggtttctaatcgcttctctggctccaagtctggcaacacggcctccctgacaatctctgggctccaggctgaggacgaggctgattattactgctgctcatatgcaggtagtagcacttcgctttatgtcttcggaactgggaccaaggtcaccgtcctag

SEQ ID NO: 4661 - DNA, 322 bp, Homo sapiens; identical to SEQ ID NO: 3554

SEQ ID NO: 4662 - DNA, 325 bp, Homo sapiens
gacatccagatgacccagtctccttccaccctgtctgcatctgtaggagacagagtcaccatcacttgccgggccagtcagagtattagtagctggttggcctggtatcagcagaaaccagggaaagcccctaagctcctgatctataaggcatctagtttagaaagtggggtcccatcaaggttcagcggcagtggatctgggacagaattcactctcaccatcagcagcctgcagcctgatgattttgcaacttattactgccaacagtataatagttattctttgtacacttttggccaggggaccaagctggagatcaaac

SEQ ID NO: 4663 - DNA, 331 bp, Homo sapiens
cagtctgtgctgacgcagccgccctcagtgtctggggccccagggcagagggtcaccatctcctgcactgggagcagctccaacatcggggcaggttatgatgtacactggtaccagcagcttccaggaacagcccccaaactcctcatctatggtaacagcaatcggccctcaggggtccctgaccgattctctggctccaagtctggcacctcagcctccctggccatcactgggctccaggctgaggatgaggctgattattactgccagtcctatgacagcagcctgatttgggtgttcggcggagggaccaagctgaccgtcctag

SEQ ID NO: 4664 - DNA, 328 bp, Homo sapiens
gaaattgtgttgacacagtctccagccaccctgtctttgtctccaggggaaagagccaccctctcctgcagggccagtcagagtgttagcagctacttagcctggtaccaacagaaacctggccaggctcccaggctcctcatctatgatgcatccaacagggccactggcatcccagccaggttcagtggcagtgggtctgggacagacttcactctcaccatcagcagcctagagcctgaagattttgcagtttattactgtcagcagcgtagcaactggcctcccctattcactttcggccctgggaccaaagtggatatcaaac

SEQ ID NO: 4665 - DNA, 334 bp, Homo sapiens
cagactgtggtgacccaggagccatcgttctcagtgtcccctggagggacagtcacactcacttgtggcttgagctctggctcagtctctactagttactaccccagctggtaccagcagaccccaggccaggctccacgcacgctcatctacagcacaaacactcgctcttctggggtccctgatcgcttctctggctccatccttgggaacaaagctgccctcaccatcacgggggcccaggcagatgatgaatctgattattactgtgtgctgtatatgggtagtggcattaatgtggtattcggcggagggaccaagctgaccgtcctag

SEQ ID NO: 4666 - DNA, 334 bp, Homo sapiens
caggctgtggtgactcaggagccctcactgactgtgtccccaggagggacagtcactctcacctgtggctccagcactggagctgtcaccagtggtcatcatccctactggttccagcagaagcctggccaagcccccaggacactgatttatgatacaagcaacaaacactcctggacccctgcccggttctcaggctccctccttgggggcaaagctgccctgaccctttcgggtgcgcagcctgaggatgaggctgagtattactgcttgctctcctatagtggtgctcggccttgggtgttcggcggagggaccaagctgaccgtcctag

SEQ ID NO: 4667 - DNA, 337 bp, Homo sapiens
gacatcgtgatgacccagtctccagtctccctggctgtgtctctgggcgagagggccaccatcaactgcaagtccagccagagtgttttatacagcgccaacaataagaactacttagcttggtatcagcagaaaccagggcagcctcctaaattgctcgtttactgggcatctacccgggaatccggggtccctgaccgattcagtggcagcgggtctgggacagatttcactctcaccatcagcagcctgcaggctgaagatgtggcagtttattactgtcaacaatattatagtatcccgctcactttcggcggagggaccaaggtggaggtca

SEQ ID NO: 4668 - DNA, 322 bp, Homo sapiens
gacatccagatgacccagtctccatcttccgtgtctgcatctgtcggagacagagtcaccatcacttgtcgggcgagtcagggtattggcacctggttagcctggtatcagcagagcccagggaaagcccctaagctcctgatctatactgcatccactttgcaaagtggggtcccatcaaggttcagcggcagtggatctgggacagatttcactctcaccatcagcagcctgcagcctgaagattttgcaacttactattgtcaacaggctaacagtttcccccggacgtttggccaagggaccaaggtggaaatcaaac

SEQ ID NO: 4669 - DNA, 316 bp, Homo sapiens
gaaattgtgttgacgcagtctccaggcaccctgtctttgtctccaggggaaagagccaccctctcctgcagggccagtcagagtgttagcagcagctacttagcctggtaccagcagaaacctggccaggctcccaggctcctcatctatggtgcatccagcagggccactggcatcccagacaggttcagtggcagtgggtctgggacagacttcactctcaccatcagcagactggagcctgaagattttgcagtgtattactgtcagcagtatggtcggacgttcggccaagggaccaaggtggaaatcaaac

SEQ ID NO: 4670 - DNA, 328 bp, Homo sapiens
cagactgtggtgactcaggagccctcactgactgtgtccccaggagggacagtcactctcacctgtgcttccagcactggagcagtcaccagtggttactatccaaactggttccagcagaaacctggacaagcacccagggcactgatttatagtacaagcaacaaacactcctggacccctgcccggttctcaggctccctccttgggggcaaagctgccctgacactgtcaggtgtgcagcctgaggacgaggctgagtattactgcctgctctactatggtggtgcatgggtgttcggcggagggaccaagctgaccgtcctag

SEQ ID NO: 4671 - DNA, 325 bp, Homo sapiens
gaaattgtgttgacgcagtctccaggcaccctgtctttgtctccaggggaaagagccaccctctcctgcagggccagtcagagtgttagcagcagctacttagcctggtaccagcagaaacctggccaggctcccaggctcctcatctatggtgcatccagcagggccactggcatcccagacaggttcagtggcagtgggtctgggacagacttcactctcaccatcagcagactggagcctgaagattttgcagtgtattactgtcagcagtatggtagctcacctctgacttttggccaggggaccaagctggagatcaaac

SEQ ID NO: 4672 - DNA, 340 bp, Homo sapiens; identical to SEQ ID NO: 4579

SEQ ID NO: 4673 - DNA, 325 bp, Homo sapiens
gccatccggataacccagtctccatcctcactctctgcatctacaggagacagagtcaccatcacttgtcgggcgagtcagggtattagcagttatttagcctggtatcagcaaaaaccagggaaagcccctaagctcctgatctatgctgcatccactttgcaaagtggggtcccatcaaggttcagcggcagtggatctgggacagatttcactctcaccatcagctgcctgcagtctgaagattttgcaacttattactgtcaacagtattatagttaccctttgtacacttttggccaggggaccaagctggagatcaaac

SEQ ID NO: 4674 - DNA, 331 bp, Homo sapiens
cagtctgccctgactcagcctgcctccgtgtctgggtctcctggacagtcgatcaccatctcctgcactggaaccagcagtgacgttggtggttataactatgtctcctggtaccaacaacacccaggcaaagcccccaaactcatgatttatgatgtcagtaatcggccctcaggggtttctaatcgcttctctggctccaggtctggcaacacggcctccctgaccatctctgggctccaggctgaggacgaggctgattattactgcagctcatatacaagcagcagcactcaagtcttcggaactgggaccaaggtcaccgtcctag

SEQ ID NO: 4675 - DNA, 319 bp, Homo sapiens
tcctatgagctgactcagccaccctcagtgtccgtgtccccaggacagacagccagcatcacctgctctggagataaattgggggacaaatatgtttgctggtatcagcagaggccaggccagtcccctgtgctggtcatctatcaagataccaagcggccctcagggatccctgagcgattctctggctccaactctgggaacacagccactctgaccatcagcgggacccaggctatggatgaggctgactattactgtcaggcgtgggacagcaccagtgcggtattcggcggagggaccaagctgaccgtcctag

SEQ ID NO: 4676 - DNA, 319 bp, Homo sapiens
tcctatgagctgactcagccaccctcagtgtccgtgtccccaggacagacagtcagcatcacctgctctggagataaattggggcgtaaatatgcttgctggtatcagacgaagccaggccagtcccctgtactggtcatctatcaagatagcaagcggccctcagggatccctgagcgattctctggctccaactctgggaacacagccactctgaccatcagcgggacccaggctgtggatgaggctgactattactgtcaggcgtgggacagcagcactgtggtattcggcggagggaccaagctgaccgtcgtag

SEQ ID NO: 4677 - DNA, 331 bp, Homo sapiens
gaaattgcgttgacgcagtctccaggcaccctgtctttgtctccaggggaaagagccaccctctcctgcagggccagtcagagtgttagcagcacctacttagcctggtaccagcagaaacctggccaggctcccaggctcctcatctatggtgcatccaccagggccactggcatcccagacaggttcagtggcagtgggtctgggacagacttcactctcaccatcagcagactggagactgaagattttgcagtgtattactgtcagcagtatggtagttcaccacctatgtacacttttggccaggggaccaagctggagatcaaac

SEQ ID NO: 4678 - DNA, 334 bp, Homo sapiens
cagtctgtgctgacgcagccgccctcagtgtctggggccccagggcagagggtcaccatctcctgcactgggagcagctccatcatcggggcaggttatgatgtacactggtaccagcagcttccaggaacagcccccaaactcctcatctatggtaacagtaatcggccctcaggggtccctgaccgattctctggctccaagtctggcacctcagcctccctggccatcactgggctccaggctgaggatgaggctgattattactgccagtcgtatgacaacagcctgagtggttatgtcttcggaactgggaccaaggtcaccgtcctag

SEQ ID NO: 4679 - DNA, 322 bp, Homo sapiens
gaaattgtgttgacacagtctccagccaccctgtctttgtctccaggggaaagagccaccctctcctgcagggccagtcagagtgttagcagctacttagcctggtaccaacagaaacctggccaggctcccaggctcctcatctatgatgcatccaacagggccactggcatcccagccaggttcagtggcagtgggtctgggacagacttcactctcaccatcagcagcctagagcctgaagattttgcagtttattactgtcagcagcgtagcaactggccgctcactttcggcggagggaccaaggtggagatcaaac

SEQ ID NO: 4680 - DNA, 336 bp, Homo sapiens
gatattgtgatgactcagtctccactctccctgcccgtcacccctggagagccggcctccatctcctgcaggtctagtcagagcctcctgcatagtaatggatacaactatttggattggtacctgcagaagccagggcagtctccacagctcctgatctatttgggttctaatcgggcctccggggtccctgacaggttcagtggcagtggatcaggcacagattttacactgaaaatcagcagagtggaggctgaggatgttggggtttattactgcatgcaagctctacaaacccttggcccttcggccaagggacacgactggagattaaac

SEQ ID NO: 4681 - DNA, 319 bp, Homo sapiens
tcctatgtgctgactcagccaccctcggtgtcagtggccccaggacagacggccaggattacctgtgggggaaacaacattggaagtaaaagtgtgcactggtaccagcagaagccaggccaggcccctgtgctggtcgtctatgatgatagcgaccggccctcagggatccctgagcgattctctggctccaactctgggaacacggccaccctgaccatcagcagggtcgaagccggggatgaggccgactattactgtcaggtgtgggatagtagtagtggggtcttcggaactgggaccaaggtcaccgtcctag

SEQ ID NO: 4682 - DNA, 322 bp, Homo sapiens; identical to SEQ ID NO: 3870

SEQ ID NO: 4683 - DNA, 319 bp, Homo sapiens
tcctatgagctgactcagccaccctcagtgtccgtgtccccaggacagacagccagcatcacctgctctggagataaattgggggataaatatgcttgctggtatcagcagaagccaggccagtcccctgtgctggtcatctatcaagatagcaagcggccctcagggatccctgagcgattctctggctccaactctgggaacacagccactctgaccatcagcgggacccaggctatggatgaggctgactattactgtcaggcgtgggacagcagcggtgtggtattcggcggagggaccaagctgaccgtcctag

SEQ ID NO: 4684 - DNA, 322 bp, Homo sapiens; identical to SEQ ID NO: 3870

SEQ ID NO: 4685 - DNA, 322 bp, Homo sapiens
tcctatgagctgactcagccaccctcagtgtccgtgtccccaggacagacagccggcatcacctgctctggagataaattgggggataaatatgcttgctggtatcagcagaagccaggccagtcccctgtgttggtcatctatcaagataataagcggccctcagggatccctgagcgattctctggctccaactctgggaacacagccactctgaccatcagcgggacccaggctatggatgaggctgactattactgtcaggcgtgggacagtaacactccttatgtcttcggaactgggaccaaggtcaccgtcctag

SEQ ID NO: 4686 - DNA, 319 bp, Homo sapiens
gaaattgtgttgacgcagtctccaggcaccctgtctttgtctccaggggaaagagccaccctctcctgcagggccagtcagagtgttagcagcagctacttagcctggtaccagcagaaacctggccaggctcccaggctcctcatctatggtgcatccagcagggccactggcatcccagacaggttcagtggcagtgggtctgggacagacttcactctcaccatcagcagactggagcctgaagattttgcagtgtattactgtcagcagtatggtagctcacctttcggcggagggaccaaggtggagatcaaac

SEQ ID NO: 4687 - DNA, 322 bp, Homo sapiens; identical to SEQ ID NO: 2296

SEQ ID NO: 4688 - DNA, 310 bp, Homo sapiens
gacatccagatgacccagtctccttccaccctgtctgcatctgtaggagacagagtcaccatcacttgccgggccagtcagagtattagtagctggttggcctggtatcagcagaaaccagggaaagcccctaagctcctgatctataaggcatctagtttagaaagtggggtcccatcaaggttcagcggcagtggatctgggacagaattcactctcaccatcagcagcctgcagcctgatgattttgcaacttattactgccaacagtatagaacgttcggccaagggaccaaggtggaaatcaaac

SEQ ID NO: 4689 - DNA, 334 bp, Homo sapiens
cagtctgccctgactcagcctgcctccgtgtctgggtctcctggacagtcgatcaccatctcctgcactggaaccagcagtgacgttggtggttataactatgtctcctggtaccaacagcacccaggcaaagcccccaaactcatgatttatgaggtcagtaatcggccctcaggggtttctaatcgcttctctggctccaagtctggcaacacggcctccctgaccatctctgggctccaggctgaggacgaggctgattattactgcagctcatatacaagcagcagcaccctttatgtcttcggaactgggaccaaggtcaccgtcctag

SEQ ID NO: 4690 - DNA, 328 bp, Homo sapiens
gaaatagtgatgacgcagtctccagccaccctgtctgtgtctccaggggaaagtgccaccctctcctgcagggccagtcagagtgtcagcagcaacttagcctggtaccagcagacacctggccaggctcccaggctcctcatctatggtgcatccaccagggccactggtatcccagccaggttcagtggcagtgggtctgggacagagttcactctcaccatcagcagtctgcagtctgaagattttgcagtttattactgtcagcactataataactggcctccgccgtacacttttggccaggggaccaagctggagatcaaac

SEQ ID NO: 4691 - DNA, 322 bp, Homo sapiens
gacatccagatgacccagtctccatcctccctgtctgcatctgtaggagacagagtcaccatcacctgccaggcgagtcaggacattagcaactatttaaattggtatcagcagaaaccagggaaagcccctaagctcctgatctacgatgcatccaatttggaaacaggggtcccatcaaggttcagtggaagcggatctaggacagattttactttcaccatcatcagcctgcagcctgaagacattgcaacatattactgtcaacagtatcatcatcccccgctcacgttcggcggagggaccaaggtggagatcaaac

SEQ ID NO: 4692 - DNA, 334 bp, Homo sapiens
aattttatgctgactcagccccactctgtgtcggagtctccggggaagacggtaaccatctcctgcacccgcagcagtggcagcattgccagcaactatgtgcagtggtaccagcagcgcccgggcagttcccccaccactgtgatctatgaggataaccaaagaccctctggggtccctgatcggttctctggctccatcgacagctcctccaactctgcctccctcaccatctctggactgaagactgaggacgaggctgactactactgtcagtcttatgatagcagcaatcatgtggtattcggcggagggaccaagctgaccgtcctag

SEQ ID NO: 4693 - DNA, 334 bp, Homo sapiens
aattttatgctgactcagccccactctgtgtcggagtctccggggaagacggtaaccatctcctgcacccgcagcagtggcagcattgccagcaactatgtgcagtggtaccagcagcgcccgggcagttcccccaccactgttatctatgagaataaccaaagaccctctggggtccctgatcggttctctggctccatcgacagctcctccaactctgcctccctcaccatctctggactgaagactgaggacgaggctgactactattgtcagtcttatgatagcagcactcatgtggtattcggcggagggaccaagctgaccgtcctag

SEQ ID NO: 4694 - DNA, 334 bp, Homo sapiens
cagtctgccctgactcagcctcgctcagtgtccgggtctcctggacagtcaatcaccatctcctgcactggagccagcagtgatgttggtggttataactatgtctcctggtaccaacagcacccaggcaaagcccccaaactcatgatttatgatgtcagtaagcggccctcaggggtccctgatcgcttctctggctccaagtctggcaacacggcctccctgaccatctctgggctccaggctgaggatgaggctgattattactgctgctcatatgcaggcagctacactttcgtggtattcggcggagggaccaagctgaccgtcctag

SEQ ID NO: 4695 - DNA, 331 bp, Homo sapiens
cagtctgtgttgacgcagccgccctcagtgtctgcggccccaggacagaaggtcaccatctcctgctctggaggcaactccaacattgggaataactatgtctcctggtaccagcagctcccaggaacagcccccaaactcctcatgtctgaaaataataagcgaccctcagggattcctgaccgattctctggctccaagtctggcacgtcagccaccctgggcatcaccggactccagactggggacgaggccgattattactgcggaacatgggataccagcctgagtgcgtatgtcttcggaactggggccaaggtcaccgtcctag

SEQ ID NO: 4696 - DNA, 334 bp, Homo sapiens
cagtctgccctgactcagcctgcctccgtgtctgggtctcctggacagtcgatcaccatctcctgcactggaaccagcagtgacgttggtggttataactatgtctcctggtaccaacagcacccaggcaaagcccccaaactcatgatttatgaggtcactaatcggccctcaggggtttctaatcgcttctctggctccaagtctggcaacacggcctccctgaccatctctgggctccaggctgaggacgaggctgattattactgcagctcatatacaagcagcagcactctaagtgtcttcggaactgggaccaaggtcaccgtcctag

SEQ ID NO: 4697 - DNA, 331 bp, Homo sapiens
caggctgtggtgactcaggagccctcactgactgtgtccccaggagggacagtcactctcacctgtggctccagcactggagctgtcaccagtggtcattatccctactggttccagcagaagcctggccaagcccccacgacactgatttatgatacaagcaacaaacactcctggacccctgcccggttctcaggctccctccttgggggcaaagctgccctgaccctttcgggtgcgcagcctgaggatgaggctgagtattactgtttggtctcctatagtggtgctcggagggtgttcggcggagggaccaagctgaccgtcctag

SEQ ID NO: 4698 - DNA, 334 bp, Homo sapiens; identical to SEQ ID NO: 4689

SEQ ID NO: 4699 - DNA, 322 bp, Homo sapiens
gacatccagatgacccagtctccatcctccctgtctgcatctgtaggagacagagtcaccatcacttgccgggcgagtcagggcattagcaattctttagcctggtatcagcagaaaccagggaaagcccctaagctcctgctctatgctgcatccagattggaaagtggggtcccatccaggttcagtggcagtggatctgggacggattacactctcaccatcagcagcctgcagcctgaagattttgcaacttattactgtcaacagtattatagtacccctccgacgttcggccaagggaccaaggtggaaatcaaac

SEQ ID NO: 4700 - DNA, 330 bp, Homo sapiens
cagtctgccctgactcagcctgcctccgtgtctgggtctcctggacagtcgatcaccatctcctgcactggaaccagcagtgacgttggtggttatgactatgtctcctggtaccaacagcacccaggcaaagcccccaaagtcatgatttatgaggtcagtaatcggccctcaggggtttctaatcgcttctctggctccaagtctggcaacacggcctccctgaccatctctggactccaggctgaggacgaggctgattattactgcagctcatatagaaggagtagtactctgatattcggcggagggaccaagctgaccgtccta

SEQ ID NO: 4701 - DNA, 331 bp, Homo sapiens; identical to SEQ ID NO: 863

SEQ ID NO: 4702 - DNA, 322 bp, Homo sapiens
gacatccagatgacccagtctccatcctccctgtctgcatctgtaggagacagagtcaccatcacttgccgggcgagtcagggcattagcaattctttagcctggtatcagcagaaaccagggaaagcccctaagctcctgctctatgctgcatccagattggaaagtggggtcccatccaggttcagtggcagtggatctgggacggattacactctcaccatcagcagcctgcagcctgaagattttgcaacttattactgtcaacagtattatagtaccccgtacacttttggccaggggaccaagctggagatcaaac

SEQ ID NO: 4703 - DNA, 331 bp, Homo sapiens
cagactgtggtgactcaggagccctcactgactgtgtccccaggagggacagtcactctcacctgtgcttccagcactggagcagtcaccagtggttactatccaaactggttccagcagaaacctggacaagcacccagggcactgatttatagtacaagcaacaaacactcctggacccctgcccggttctcaggctccctccttgggggcaaagctgccctgacactgtcaggtgtgcagcctgaggacgaggctgagtattactgcctgctctactatggtggtgcttcttgggtgttcggcggagggaccaagctgaccgtcctag

SEQ ID NO: 4704 - DNA, 328 bp, Homo sapiens
gaaattgtgttgacacagtctccagccaccctgtctttgtctccaggggaaagagccaccctctcctgcagggccagtcagagtgttagcagctacttagcctggtaccaacagaaacctggccaggctcccaggctcctcatctatgaagcatccaacagggccactggcatcccagccaggttcagtggcagtgggtctgggacagacttcactctcaccatcagcagcctagagcctgaagatactgcagtttattactgtcagcagcgtatcaactggcctccgaagatcaccttcggccaagggacacgactggagattaaac

SEQ ID NO: 4705 - DNA, 331 bp, Homo sapiens
cagtctgtgctgactcagccgccctcagcatctgggacccccgggcagagggtcgccatctcttgttctggaggcagctccaacatcggaattaatactgttaactggtaccagcagctcccaggaacggcccccacactcctcatctatactaatagtcagcggccctcaggggtccctgaccgattctctggctccaagtctggcacctcagcctccctggcgatcagtgggctccagtctgaggatgaggctgattattactgtgcaacatgggatgacagcctgaatggttatgtcttcggaactgggaccaaggtcaccgtcctag

SEQ ID NO: 4706 - DNA, 328 bp, Homo sapiens
gaaattgtgttgacgcagtctccaggcaccctgtctttgtctccaggagaaagagccaccctctcctgcagggccagtcagagtgttagcaacaactacctagcctggtaccagcagaaacctggccaggctcccaggctcctcatctatggtgcatccagtagggccactggcatcccagacaggttcagtggcagtgggtctgggacagacttcactctcaccatcagcagactggagcctgaagattttgcagtgtattactgtcagcagtatggtagttcacctcgattcactttcggccctgggaccaaagtggacatcaaac

SEQ ID NO: 4707 - DNA, 325 bp, Homo sapiens
gaaattgtgttgacgcagtctccaggcaccctgtctttgtctccaggggaaagagccaccctctcctgcagggccagtcagagtgttagcagcagctacttagcctggtaccagcagaaacctggccaggctcccaggctcctcatctatggtgcatccagcagggccactggcatcccagacaggttcagtggcagtgggtctgggacagacttcactctcaccatcagcagactggagcctgaagattttgcagtgtattactgtcagcagtatggtagctcaccagacacttttggccaggggaccaagctggagatcaaac

SEQ ID NO: 4708 - DNA, 325 bp, Homo sapiens
gaaattgtgttgacgcagtctccaggcaccctgtctttgactccaggggaaagagccaccctctcctgcagggccagtcagagtgttaggagcagctacttagcctggtaccagcagaaacctggccaggctcccaggctcctcatctatggtgcatccagcagggccactggcatcccagacaggttcagtggcagtgggtctgggacagacttcactctcaccatcagcagactggagcctgaagatcttgcagtgtatttctgtcagcagtatgataggtcaccgtggacgttcggccaagggaccaaggtggaaatcaaac

SEQ ID NO: 4709 - DNA, 325 bp, Homo sapiens
gaaattgtgttgacgcagtctccaggcaccctgtctttgtctccaggggaaagagccaccctctcctgcagggccagtcagagtgttagcagcagctacttagcctggtaccagcagaaacctggccaggctcccaggctcctcatctatggtgcatccagcagggccactggcatcccagacaggttcagtggcagtgggtctgggacagacttcactctcaccatcagcagactggagcctgaagattttgcagtgtattactgtcagcagtatggtagctcacctcagacgttcggccaagggaccaaggtggaaatcaaac

SEQ ID NO: 4710 - DNA, 328 bp, Homo sapiens
gacatccagatgacccagtctccatcctccctgtctgcatctgtaggagacagagtcaccatcacttgccaggcgagtcaggacattagcaactatttaaattggtatcagcagaaaccagggaaagcccctaagctcctgatctacgatgcatccaatttggaaacaggggtcccatcaaggttcagtggaagtggatctgggacagattttactttcaccatcagcagcctgcagcctgaagatattgcaacatattactgtcaacagtatgataatctccctccgagagtcactttcggccctgggaccaaagtggatatcaaac

SEQ ID NO: 4711 - DNA, 322 bp, Homo sapiens
gaagttgtgttgacacagtctccagccaccctgtctttgtctccaggggaaagagccaccctctcctgcagggccagtcagagtgttagcagcttcttagcctggtaccaacagagacctggccaggctcccaggctcctcatctatgatgcatccaacagggccactggcatcccagccaggttcagtggcagtgggtctgggacagacttcactctcaccatcagcagcctagagcctgaagattttgcagtttattactgtcagcagcgtagcgactggccgctcactttcggcggagggaccaaggtggagatcaaac

SEQ ID NO: 4712 - DNA, 331 bp, Homo sapiens
cagtctgccctgactcagcctgcctccgtgtctgggtctcctggacagtcgatcaccatctcctgcactggaaccagcactgacgttggtggttataactatgtctcctggtaccaacagcaccccggcaaagcccccaaactcatgatttatgaggtcagtaatcggccctcaggggtttctaatcgcttctctggctccaagtctggcaacacggcctccctgaccatctctgggctccaggctgaggacgaggctgattattactgcagctcatatacaagcagcagcactctcatattcggcggagggaccaagctgaccgtcctag

SEQ ID NO: 4713 - DNA, 322 bp, Homo sapiens
gacatccagatgacccagtctccatcctccctgtctgcatctgtaggagacagagtcaccatcacttgccgggcaagtcagggcattaaaaatgatttaggctggtttcagcagaaaccagggaaagcccctaagcgcctgatctatgctgcatccagtttgcaaagtggggtcccatcaaggttcagcggcagtggatctgggacagaattcactctcacaatcagcagcctgcagcctgaagattttgcaacttattactgtctacagcataatagttacccgctcactttcggcggagggaccaaggtggagatcaaac

SEQ ID NO: 4714 - DNA, 334 bp, Homo sapiens
cagtctgccctgactcagcctcgctcagtgtccgggtctcctggacagtcagtcaccatctcctgcactggaaccagcagtgatgttggtggttataactatgtctcctggtaccaacagcacccaggcaaagcccccaaactcatgatttatgatgtcagtaagcggccctcaggggtccctgatcgcttctctggctccaagtctggcaacacggcctccctgaccatctctgggctccaggctgaggatgaggctgattattactgctgctcatatgcaggcagctacacttatgtggtattcggcggagggaccaagctgaccgtcctag

SEQ ID NO: 4715 - DNA, 334 bp, Homo sapiens
cagtctgtgctgactcagccaccctcagcgtctgggacccccgggcagagggtcaccatctcttgttctggaagcagctccaacatcggaagtaatactgtaagctggtaccagcagctcccaggaacggcccccaaactcctcatctatagtaataatcagcggccctcaggggtccctgaccgattctctggctccaagtctggcacctcagcctccctggccatcagtgggctccagtctgaggatgaggctgattattactgtgcagcatgggatggcagcctgaatggtcatgtggtattcggcggggggaccaagctgaccgtcctag

SEQ ID NO: 4716 - DNA, 340 bp, Homo sapiens
gacatcgtgatgacccagtctccagactccctggctgtgtctctgggcgagagggccaccatcaactgcaagtccagccagagtgttttatacagctccaacaataagaactacttagcttggtaccagcagaaaccaagacagcctcctaagctgctcatttactgggcatctacccgggaatccggggtccctgaccgattcagtggcagcgggtctgggacagatttcactctcaccatcagcagcctgcaggctgaagatgtggcagtttattactgtcagcaatattatggtactcccctcactttcggcggagggaccaaggtggagatcaaac

SEQ ID NO: 4717 - DNA, 334 bp, Homo sapiens
cagtctgccctgactcagcctgcctccgtgtctgggtctcctggacagtcgatcaccatctcctgcactggaaccagcagtgacgttggtggttataactatgtctcctggtaccaacaacacccaggcaaagcccccaaactcatgatttatgatgtcagtaatcggccctcaggggtttctaatcgcttctctggctccaagtctggcaacacggcctccctgaccatctctgggctccaggctgaggacgaggctgattattactgcggctcatatacaagcagcaccactctcgtggtcttcggaactgggaccaaggtcaccgtcctag

SEQ ID NO: 4718 - DNA, 331 bp, Homo sapiens
cagtctgccctgactcagcctcgctcagtgtccgggtctcctggacagtcagtcaccatctcctgcactggaaccagcagtgatgttggtggttataactatgtctcctggtaccaacagcacccaggcaaagcccccaaactcatgatttatgatgtcagtaagcggccctcaggggtccctgatcgcttctctggctccaagtctggcaacacggcctccctgaccatctctgggctccaggctgaggatgaggctgattattactgctgctcatatgcaggcagctacacaaaggtgttcggcggagggaccaagctgaccgtcctag

SEQ ID NO: 4719 - DNA, 325 bp, Homo sapiens; identical to SEQ ID NO: 2568

SEQ ID NO: 4720 - DNA, 340 bp, Homo sapiens
gacatcgtgatgacccagtctccagactccctggctgtgtctctgggcgagagggccaccatcaactgcaagtccagccagagtgttttatacagctccaacaataagaactacttagcttggtaccagcagaaaccaggacagcctcctaagctgctcatttactgggcatctacccgggaatccggggtccctgaccgattcagtggcagcgggtctgggacagatttcactctcaccatcagcagcctgcaggctgaagatgtggcagtttattactgtcagcaatattatagtactcctttcactttcggccctgggaccaaagtggatatcaaac

SEQ ID NO: 4721 - DNA, 331 bp, Homo sapiens
cagtctgccctgactcagcctgcctccgtgtctgggtctcctggacagtcgatcaccatctcctgcactggaaccagcagtgacgttggtggttataactatgtctcctggtaccaacagcacccaggcaaagcccccaaactcatgatttatgaggtcagtaatcggccctcaggggtttctaatcgcttctctggctccaagtctggcaacacggcctccctgaccatctctgggctccaggctgaggacgaggctgattattactgcagctcatatacaagcagcagcactctagtcttcggaactgggaccaaggtcaccgtcctag

SEQ ID NO: 4722 - DNA, 337 bp, Homo sapiens
cagtctgccctgactcagcctgcctccgtgtctgggtctcctggacagtcgatcaccatctcctgcactggaaccagcagtgatgttgggacttataaccttgtctcctggtaccaacaacacccaggcaaagcccccaaactcatgatttatgaggtcactaagcggccctcaggggtttctaatcgcttctctggctccaagtctggcaacacggcctccctgacaatctctgggctccaggctgaggacgaggctgattattactgctgctcatttgcagggagtagcacttccgggtatgtcttcggaactgggaccaaggtcaccgtcctag

SEQ ID NO: 4723 - DNA, 325 bp, Homo sapiens; identical to SEQ ID NO: 1662

SEQ ID NO: 4724 - DNA, 322 bp, Homo sapiens; identical to SEQ ID NO: 1779

SEQ ID NO: 4725 - DNA, 328 bp, Homo sapiens
tcctatgagctgacacagccaccctcggtgtcagtgtccccaggacagacggccaggatcacctgctctggagatgcattgccaaagcaatatgcttattggtaccagcagaagccaggccaggcccctgtgctggtgatatataaagacactgagaggccctcagggatccctgagcgattctctggctccagctcagggacaacagtcacgttgactatcagtggagtccaggcagaagacgaggctgactattactgtcaatcagcagacagcagtggtacatccccttgtgtcttcggaactgggaccaaggtcaccgtcctag

SEQ ID NO: 4726 - DNA, 337 bp, Homo sapiens
gatattgtgatgactcagtctccactctccctgcccgtcacccctggagagccggcctccatctcctgcaggtctagtcagagcctcctgcatagtaatggatacaactatttggattggtacctgcagaagccagggcagtctccacagctcctgatctatttgggttctaatcgggcctccggggtccctgacaggttcagtggcagtggatcaggcacagattttacactgaaaatcagcagagtggaggctgaggatgttggggtttattactgcatgcaagctctacaaactcctccgaagttcggccaagggaccaaggtggaaatcaaac

SEQ ID NO: 4727 - DNA, 322 bp, Homo sapiens
gacatccagatgacccagtctccatcctccctgtctgcatctgtaggagacagagtcaccatcacttgccaggcgagtcaagacattaacaactttttaaattggtatcagcagaaaccagggaaagcccctaagctcctgatctacgatgcatccaatttggaaacaggggtcccatcaaggttcagtggaagtggatctgggacagattttactttcaccatcagcagcctgcagcctgaagatattgcaacatattactgtcaacagtctgatcatctcccctacacttttggccaggggaccaagctggagatcaaac

SEQ ID NO: 4728 - DNA, 333 bp, Homo sapiens
cagtctgtgctgacgcagccgccctcagtgtctggggccccagggcagagggtcaccatctcctgcactgggagcagctccaacatcggggcaggttatgatgtccactggtaccagcaccttccaggaacagcccccaaactcctcatctatggaaacaccaatcggccctcagggttccctgaccgattctctggctccaagtctggcacctcagcctccctggccatcactgggctccaggctgaggatgaggctgattattactgccagtcctatgaccgcagcctgagtggtgtggtgttcggcggcgggaccaagctgaccgtccta

SEQ ID NO: 4729 - DNA, 320 bp, Homo sapiens
gccatccggatgacccagtctccattctccctgtctgcatctgtaggagacagagtcaccatcacttgctgggccagtcagggcattagcagttatttagcctggtatcagcaaaaaccagcaaaagcccctaagctcttcatctattatgcatccagtttgcaaagtggggtcccatcaaggttcagcggcagtggatctgggacggattacactctcaccatcagcagcctgcagcctgaagattttgcaacttattactgtcaacagtattatagtacccctcactttcggcggagggaccaaggtggagatcaaac

SEQ ID NO: 4730 - DNA, 340 bp, Homo sapiens
gacatcgtgatgacccagtctccagactccctggctgtgtctctgggcgagagggccaccatcaactgcaagtccagccagagtgttttatacagctccaacaataagaactacttagcttggtaccagcagaaaccaggacagcctcctaagttgctcatttactgggcatctacccgggaatccggggtccctgaccgattcagtggcagcgggtctgggacagatttcactctcaccatcagcagcctgcaggctgaagatgtggcagtttattactgtcagcaatattatagtacttccccactgtttggccaggggaccaagctggagatcaaac

SEQ ID NO: 4731 - DNA, 328 bp, Homo sapiens
gaaattgtgttgacgcagtctccaggcaccctgtctttgtctccaggggaaagagccaccctctcctgcagggccagtcagagtgttagcagcagctacttagcctggtaccagcagaaacctggccaggctcccaggctcctcatctatggtgcatccagcagggccactggcatcccagacaggttcagtggcagtgggtctgggacagacttcactctcaccatcagcagactggagcctgaagattttgcagtgtattactgtcagcagtatggtagctcacctaaggtcactttcggccctgggaccaaagtggatatcaaac

SEQ ID NO: 4732 - DNA, 322 bp, Homo sapiens
gaaattgtgttgacacagtctccagccaccctgtctttgtctccaggggaaagagccaccctctcctgcagggccagtcagagtgttagcagctacttagcctggtaccaacagaaacctggccaggctcccaggctcctaatttatgatacatccaacagggccactgacatcccagtcaggttcagtggcagtgggtctgggacagacttcactctcaccatcaccagcctacagcctgaagactttgcagtttattactgtcagcagcgtagcaactggccgctcactttcggcggagggaccaaggtcgagaacaaac

SEQ ID NO: 4733 - DNA, 328 bp, Homo sapiens
gaaattgtgttgacacagtctccagccaccctgtctttgtctccaggggaaagagccaccctctcctgcagggccagtcagagtgttagcagctacttagcctggtaccaacagaaacctggccaggctcccaggctcctcatctatgatgcatccaacagggccactggcatcccagccaggttcagtggcagtgggtctgggacagacttcactctcaccatcagcagcctagagcctgaagattttgcagtttattactgtcagcagcgtagcaactggcctccgaagctcactttcggccctgggaccaaagtggatatcaaac

SEQ ID NO: 4734 - DNA, 325 bp, Homo sapiens
tcctatgagctgactcagccaccctcggtgtcagtgtccccaggacagacggccaggatcacctgctttgcagatgcattgacaaagcaatatacttactggtaccagcagaagccaggccaggcccctgtgatggtgatgtataaagacagtgagaggccctcagggatccctgagcggttctctggcttcagctcagggacaacagtcacgttgaccatcagtggagtccaggcggaagacgaggctgactattactgtcagtcagcagatagtagtactacttatgtgcttttcggcggagggaccaagctgaccgtcctag

SEQ ID NO: 4735 - DNA, 334 bp, Homo sapiens
cagtctgtgttgacgcagccgccctcagtgtctgcggccccaggacagaaggtcaccatctcctgctctggaagcagctccaacattgggaataattatgtatcctggtaccagcagctcccaggaacagcccccaaactcctcatctatgaaaataataagcgaccctcagggattcctgaccgattctctggctccaagtctggcacgtcagccaccctgggcatcaccggactccagactggggacgaggccgattattactgcggaacatgggatagcagcctgagtgctcgaggggtgttcggcggagggaccaagctgaccgtcctag

SEQ ID NO: 4736 - DNA, 334 bp, Homo sapiens
cagtctgccctgactcagcctgcctccgtgtctgggtctcctggacagtcgatcaccatctcctgcactggaaccagcagtgacgttggtggttataactatgtctcctggtaccaacaacacccaggcaaagcccccaaactcatgatttatgatgtcagtaatcggccctcaggggtttctaatcgcttctctggctccaagtctggcaacacggcctccctgaccatctctgggctccaggctgaggacgaggctgattattactgcagctcatatacaagcagcagcactcgggtggtattcggcggagggaccaagctgaccgtcctag

SEQ ID NO: 4737 - DNA, 322 bp, Homo sapiens
tcctatgagctgacacagccaccctcggtgtcagtgtccccaggacagacggccaggatcacctgctctggagatgcattgccaaagcaatatgcttattggtaccagcagaagccaggccaggcccctgtgctggtgatatataaagacagtgagaggccctcagggatccctgagcgattctctggctccagctcagggacaacagtcacgttgaccatcagtggagtccaggcagaagacgaggctgactattactgtcaatcagcagacagcagtggtacttatgtcttcggaactgggaccaaggtcaccgtcctag

SEQ ID NO: 4738 - DNA, 320 bp, Homo sapiens
catccagttgacccagtctccatcctccctgtctgcatctgtaggagacagagtcaccatcacttgccgggccagtcagggcattagcagttatttagcctggtatcagcaaaaaccagggaaagcccctaagctcctgatctatgctgcatccactttgcaaagtggggtcccatcaaggttcagcggcagtggatctgggacagatttcactctcaccatcagcagcctgcagcctgaagattttgcaacttattactgtcaacagcttaatagttaccctcgaacttttggccaggggaccaagctggagatcaaac

SEQ ID NO: 4739 - DNA, 331 bp, Homo sapiens
cagtctgccctgactcagcctccctccgcgtccgggtctcctggacagtcagtcaccatctcctgcactggaaccagcagtgacgttggtggttataactttgtctcctggtaccaacagtacccaggcaaagcccccaaactcatgatttttgaggtcactaagcggccctcaggggtccctgatcgcttctctggctccaagtctggcaacacggcctccctgaccgtctctgggctccaggctgaggatgaggctgattattactgcagctcatatgcaggcagcaacaaatgggtgttcggcggagggaccaaggtgaccgtcctag

SEQ ID NO: 4740 - DNA, 337 bp, Homo sapiens
cagtctgtgctgacgcagccgccctcagtgtctggggccccagggcagagggtcaccatctcctgcactgggagcagctccaacatcggggcaggttatgatgtacactggtaccagcagcttccaggaacagcccccaaactcctcatctatggtaacagcaatcggccctcaggggtccctgaccgattctctggctccaagtctggcacctcagcctccctggccatcactgggctccaggctgaggatgaggctgattattactgccagtcctatgacagcagcctgagtggttcgagagtcttcggaactgggaccaaggtcaccgtcctag

SEQ ID NO: 4741 - DNA, 328 bp, Homo sapiens
gaaatagtgatgacgcagtctccagccaccctgtctgtgtctccaggggaaagagccaccctctcctgcagggccagtcagattgttagcagcagcttagcctggtaccagcagaaacctggccaggctcccaggctcctcatgtatggtgcatccaccagggccactggtgtcccaggcaggttcagtggcagtgggtctgggacagagttcactctcaccatcagcagcctgcagtctgaagattttgcagtttattactgtcagcagtataataggtggcctccgacgtggacgttcggccaagggaccaaggtggaaatcaaac

SEQ ID NO: 4742 - DNA, 319 bp, Homo sapiens
gacatccagatgacccagtctccatcctccctgtctgcatctgtaggagacagagtcaccatcacttgccaggcgagtcaggacattagcaactatttaaattggtatcagcagaaaccagggaaagcccctaagctcctgatctacgatgcatccaatttggaaacaggggtcccatcaaggttcagtggaagtggatctgggacagattttactttcaccatcagcagcctgcagcctgaagatattgcaacatattactgtcaacagtatgataatctccctccggacggccctgggaccaaagtggatatcaaac

SEQ ID NO: 4743 - DNA, 331 bp, Homo sapiens
cagtctgccctgactcagcctgcctccgtgtctgggtctcctggacagtcgatcaccatctcctgcactggaaccagcagtgacgttggtggttataactatgtctcctggtaccaacaacacccaggcaaagcccccaaactcatgatttatgatgtcagtaatcggccctcaggggtttctaatcgcttctctggctccaagtctggcaacacggcctccctgaccatctctgggctccaggctgaggacgaggctgattattactgcagctcatataccaccagcagcactctcgtcttcggaactgggaccaaggtcaccgtcctag

SEQ ID NO: 4744 - DNA, 325 bp, Homo sapiens
gaaattgtgttgacgcagtctccagtcaccctgtctttgtctccaggggaaagagccaccctctcctgcggggccagtcagcatgttagcggcagctacttagcctggtaccagcagaaacctggcctggcgcccagactcctcatttatgatgcatccagcagggccactggcatcccagacaggttcagtggcagtgggtctgggacagacttcactctcaccatcagcagactggagcctgaagattttgcagtgtattactgtcagcagtatggtaactcaccggtcactttcggcggagggaccagggtggagatcaaac

SEQ ID NO: 4745 - DNA, 331 bp, Homo sapiens
caggctgtggtgactcaggagccctcactgactgtgtccccaggagggacagtcactctcacctgtggctccagcactggagctgtcaccagtggtcattatccctactggttccagcagaagcctggccaagcccccaggacactgatttatgatacaagcaacaaacactcctggacccctgcccggttctcaggctccctccttgggggcaaagctgccctgaccctttcgggtgcgcagcctgaggatgaggctgagtattactgcttgctctcctatagtggtgctcggccggtattcggcggagggaccaagctgaccgtcctag

SEQ ID NO: 4746 - DNA, 322 bp, Homo sapiens
gacatccagatgacccagtctccatcctcactgtctgcatctgtaggagacagagtcaccatcacttgtcgggcgagtcaggacattatgaattatttagcctggtttcagcagaaaccagggaaagcccctaagtccctgatctatgctgcatccaatttacaaagtggggtcccatcaaagttcagcggcagtggatctgggacagatttcactctcaccatcagcagcctacagcctgaagattttgcaacttattactgccaacagtataatagttacccactcactttcggcggagggaccaaggtggagatcaaac

SEQ ID NO: 4747 - DNA, 322 bp, Homo sapiens; identical to SEQ ID NO: 837

SEQ ID NO: 4748 - DNA, 322 bp, Homo sapiens; identical to SEQ ID NO: 3870

SEQ ID NO: 4749 - DNA, 334 bp, Homo sapiens
cagtctgccctgactcagcctgcctccgtgtctgggtctcctggacagtcgatcaccatctcctgcactggaaccagcagtgacgttggtggttataactatgtctcctggtaccaacaacacccaggcaaagcccccaaactcatgatttatgatgtcagtaatcggccctcaggggtttctaatcgcttctctggctccaagtctggcaacacggcctccctgaccatctctgggctccaggctgaggacgaggctgattattactgcagctcatatacaagcagcagcactctcaatgtcttcggaactgggaccaaggtcaccgtcctag

SEQ ID NO: 4750 - DNA, 337 bp, Homo sapiens
cagtctgtgctgacgcagccgccctcagtgtctggggccccagggcagagggtcaccatctcctgcactgggacctactccaacatcggggcaggttatgatgtacactggtaccggcaacttccaggaacagcccccaaactcctcatctatgctaacaacaatcggccctcaggggtccctgaccgattctctggctccaagtctggcacctcagcctccctggccatcactgggctccaggctgaggatgaggctgattattactgccagtcctatgacagcagtctgagtggttcttgggtgttcggcggagggaccaagctgaccgtcctag

SEQ ID NO: 4751 - DNA, 322 bp, Homo sapiens; identical to SEQ ID NO: 3870

SEQ ID NO: 4752 - DNA, 319 bp, Homo sapiens
tcctatgagctgactcagccaccctcagtgtccgtgtccccaggacagacagccagcatcacctgctctggagataaattgggggataaatatgcttgctggtatcagcagaagccaggccagtcccctgtgctggtcatctatcaagatagcaagcggccctcagggatccctgagcgattctctggctccaactctgggaacacagccactctgaccatcagcgggacccaggctatggatgaggctgactattactgtcaggcgtgggacagcagcactgccgtattcggcggagggaccaagctgaccgtcctag

SEQ ID NO: 4753 - DNA, 322 bp, Homo sapiens; identical to SEQ ID NO: 837

SEQ ID NO: 4754 - DNA, 322 bp, Homo sapiens; identical to SEQ ID NO: 3870

SEQ ID NO: 4755 - DNA, 328 bp, Homo sapiens
gaaattgtgttgacgcagtctccaggcaccctgtctttgtctccaggggaaagagccaccctctcctgcagggccagtcagagtgttagcagcagctacttagcctggtaccagcagaaacctggccaggctcccaggctcctcatctatggtgcatccagcagggccactggcatcccagacaggttcagtggcagtgggtctgggacagacttcactctcaccatcagcagactggagcctgaagattttgcagtgtattactgtcagcagtatggtagctcacctcccttgacgttcggccaagggaccaaggtggaaatcaaac

SEQ ID NO: 4756 - DNA, 325 bp, Homo sapiens; identical to SEQ ID NO: 1662

SEQ ID NO: 4757 - DNA, 322 bp, Homo sapiens
gacatccagatgacccagtctccatcctccctgtctgcatctgtaggagacagagtcaccatcacttgccgggcgagtcagggcattagcaattctttagcctggtatcagcagaaaccagggaaagcccctaagctcctgctctatgctgcatccagattggaaagtggggtcccatccaggttcagtggcagtggatctgggacggattacactctcaccatcagcagcctgcagcctgaagattttgcaacttattactgtcaacagtattatagtacccctcagacgttcggccaagggaccaaggtggaaatcaaac

SEQ ID NO: 4758 - DNA, 322 bp, Homo sapiens
tcctatgagctgactcagccaccctcagtgtccgtgtccccaggacagacagccagcatcacctgctctggagataaattgggggataaatatgcttgctggtatcagcagaagccaggccagtcccctgtgctggtcatctatcaagatagcaagcggccctcagggatccctgagcgattctctggctccaactctgggaacacagccactctgaccatcagcgggacccaggctatggatgaggctgactattactgtcaggcgtgggacagcagcacttatgtggtattcggcggagggaccaagctgaccgtcctag

SEQ ID NO: 4759 - DNA, 322 bp, Homo sapiens
gacatccagatgacccagtctccatcctccctgtctgcatctgtaggagacagagtcaccatcacttgccaggcgagtcaggacattagcaactatttaaattggtatcagcagaaaccagggaaagcccctaagctcctgatctacgatgcatccaatttggaaacaggggtcccatcaaggttcagtggaagtggatctgggacagattttactttcaccatcagcagcctgcagcctgaagatattgcaacatattactgtcaacagtatgataatctcccattcactttcggccctgggaccaaagtggatatcaaac

SEQ ID NO: 4760 - DNA, 322 bp, Homo sapiens; identical to SEQ ID NO: 3452

SEQ ID NO: 4761 - DNA, 325 bp, Homo sapiens
gaaattgtgttgacgcagtctccaggcaccctgtctttgtctccaggggaaagagccaccctctcctgcagggccagtcagagtgttagcagcagctacttagcctggtaccagcagaaacctggccaggctcccaggctcctcatctatggtgcatccagcagggccactggcatcccagacaggttcagtggcagtgggtctgggacagacttcactctcaccatcagcagactggagcctgaagattttgcagtgtattactgtcagcagtatggtagctcacctcaaacttttggccaggggaccaagctggagatcaaac

SEQ ID NO: 4762 - DNA, 324 bp, Homo sapiens
aaaatgtgttgacgcagtcgccaggcaccctgtctttgtctccaggggaaggagccaccctctcctgcagggccagtcagagtgttgccagcagctgcttagcctggtaccagcagaaacctggccaggctcccagactcctcatctatggtgcatccagcagggccactggcatcccagacaggttcagtggcagtgggtctgggacagacttcactctcaccatcaacagactggagcctgaagattttgctgtgtattactgtcagcagtatggcgactcactctggacgttcggccaagggaccgaggtggaaatcaaac

SEQ ID NO: 4763 - DNA, 322 bp, Homo sapiens; identical to SEQ ID NO: 927

SEQ ID NO: 4764 - DNA, 322 bp, Homo sapiens; identical to SEQ ID NO: 1779

SEQ ID NO: 4765 - DNA, 335 bp, Homo sapiens
atattgtgatgactcagtctccactctccctgcccgtcacccctggagagccggcctccatctcctgcaggtctagtcagagcctcgtacatagtaatggatacaactatttggattggtacctgcagaagccagggcagtctccacagctcctgatctatttgggttctgatcgggcctccggggtccctgacaggttcagtggaagtggatcaggcacagattttacactgaaaatcagcagagtggaggctgaggatgttggggtttattactgcatgcaagctctacaaactccgtacacttttggccaggggaccaacctggtgatcaaa

SEQ ID NO: 4766 - DNA, 325 bp, Homo sapiens
gaaattgtgttgacgcagtctccaggcaccctgtctttgtctccaggggaaagagccaccctctcctgcagggccagtcagagtgttagcggcaccttcttagcctggtaccagcagaaacctggccaggctcccaggctcctcatctctggtgcatccagcagggccactggcatcccagacaggttcagtggcagtgggtctgggacagacttcactctcaccatcagcagactggagcctgaagattttgcagtgtattactgtcagcagtatggtagctcacgtcctacttttggccaggggaccaagctggagatcaaac

SEQ ID NO: 4767 - DNA, 330 bp, Homo sapiens
cagtctgtgctgactcagccaccctcagcgtctggggcccccgggcagagggtcaccatctcttgttctggaagcagctccaccatcggaagtaattatgtatactggtaccagcagctcccaggaacggcccccaaactcctcatctataggaataatcagcggccctcaggggtccctgaccgattctctggctccaagtctggcacctcagcctccctggccatcagtgggctccggtccgaggatgaggctgattattactgtgcagcatgggatgacagcctgagtggttatgtcttcggaactgggaccaaggtcaccgtccta

SEQ ID NO: 4768 - DNA, 340 bp, Homo sapiens
gatgttgtgatgactcagtctccactctccctgcccgtcacccttggacagccggcctccatctcctgcaggtctagtcaaagcctcgtatacagtgatggaaacacctacttgaattggtttcagcagaggccaggccaatctccaaggcgcctaatttatgaggtttctaaccgggactctggggtcccagacagattcagcggcagtgggtcaggcactgatttcacactgaaaatcaccagggtggaggctgaggatgttggggtttattactgcatgcaaggtacacactggcccctgtacacttttggccaggggaccaagctggagatcaaac

SEQ ID NO: 4769 - DNA, 334 bp, Homo sapiens
cagtctggcccgactcagcctgcctccgtgtctgggtctcctggacagtcgatcaccatctcctgcactggaaccagcactgacgttggtggttatcactatgtctcctggcaccaacaacacccaggcgaggcccccaagctcattatttatgaagtcagtaatcggccctcaggggtttctcatcgcttctctggctctaagtctggcaacacggcctccctgaccatctctgggctccaggctgaggacgaggctgattattactgcagctcatatacaaagaccagaactctctatgtcttcgggactgggaccatggtcaccgtcctag

SEQ ID NO: 4770 - DNA, 322 bp, Homo sapiens
gacatccagatgacccagtctccatcttccgtgtctgcatctgtaggagacagagtcaccatcacttgtcgggcgagtcagggtattagcagctggttagcctggtatcagcagaaaccagggaaagcccctaagctcctgatctatgctgcatccagtttgcaaagtggggtcccatcaaggttcagcggcagtggatctgggacagatttcactctcaccatcagcagcctgcagcctgaagattttgcaacttactattgtcaacaggctaacagtttcccgtacacttttggccaggggaccaagctggagatcaaac

SEQ ID NO: 4771 - DNA, 322 bp, Homo sapiens; identical to SEQ ID NO: 1779

SEQ ID NO: 4772 - DNA, 331 bp, Homo sapiens; identical to SEQ ID NO: 1754

SEQ ID NO: 4773 - DNA, 322 bp, Homo sapiens
gacatccagatgacccagtctccttccaccctgtctgcatctgtaggagacagagtcaccatcacttgccgggccagtcagagtatctataggtggttggcctggtatcagcagaaaccagggaaagcccctaacctcctgatctcgcaggcatctagtttagaaggtggggtcccatcaaggttcagcggcagtggatctgggacagaattcactctcaccatcaccagcctgcagcctgatgattttgcaacttatcactgccaccaatattaccgttattctctcacttttggccaggggaccaagctggagatcaaac

SEQ ID NO: 4774 - DNA, 325 bp, Homo sapiens
gaaattgtgttgacgcagtctccaggcaccctgtctttgtctccaggggaaagagccaccctctcctgcagggccagtcagagtgttagcagcagctacttagcctggtaccagcagaaacttggccaggctcccaggctcctcatctatggtgcatccagcagggccactggcatcccagacaggttcagtggcagtgggtctgggacagacttcactctcaccatcagcagactggagcctgaagattttgcagtgtattactgtcagcagtctggtggctcacggtggacgttcggccaagggaccaaggtggaaatcaaac

SEQ ID NO: 4775 - DNA, 319 bp, Homo sapiens
gacatccagatgacccagtctccatcctccctgtctgcatctgtaggagacagagtcaccatcacttgccgggcaagtcagagcattagcagctatttaaattggtatcagcagaaaccagggaaagcccctaagctcctgatctatgctgcatccagtttgcaaagtggggtcccatcaaggttcagtggcagtggatctgggacagatttcactctcaccatcagcagtctgcaacctgaagattttgcaacttactactgtcaacagagttacagtacgtggacgttcggccaagggaccaaggtggaaatcaaac

SEQ ID NO: 4776 - DNA, 343 bp, Homo sapiens
gacatcgtgatgacccagtctccagactccctggctgtgtctctgggcgagagggccaccatcaactgcaagtccagccagagtgttttatacagctccaacaataagaactacttagcttggtaccagcagaaaccaggacagcctcctaagctgctcatttactgggcatctacccgggaatccggggtccctgaccgattcagtggcagcgggtctgggacagatttcactctcaccatcagcagcctgcaggctgaagatgtggcagtttattactgtcagcaatattatagtactcttctgtggacgttcggccaagggaccaaggtggaaatcaaac

SEQ ID NO: 4777 - DNA, 322 bp, Homo sapiens
gacatccagatgacccagtctccatcctccctgtccgcatctgtaggagacagagtcaccatcacttgccgggcgagtcagggcattagcaattatttagcctggtatcagcagaaaccagggaaagttcctaagctcctgatccatgctgcatccactttgcaatcaggggtcccatctcggttcagtggcagcggatctgggacagatttcactctcaccatcagcagcctgcagcctgaagatgttgcaacctattactgtcaaaagtataatagtgccgcgtggacgttcggccaagggaccaaggtggaaatcaaac

SEQ ID NO: 4778 - DNA, 346 bp, Homo sapiens
cagtctgtgctgactcagccaccttcctcctccgcatctcctggagaatccgccagactcacctgcaccttgcccagtgacatcaatgttggtacctccaacatatactgataccagcagaagccagggagccctcccaggtatctcctgttctagtactcagactcaaataagggccagggctctggagtccccagccgcttctctggatccaaagatgcttcagccaatacagggattttactcatctccgggctccagtctgaggatgaggctgactattactgtatgatttggccaagcaatgcagtggtattcggcggagggaccaagctgaccgtcctag

SEQ ID NO: 4779 - DNA, 334 bp, Homo sapiens
cagtctgtgctgactcagccaccctcagcgtctgggacccccgggcagagggtcaccatctcttgttctggaagcagctccaacatcggaagtaattatgtatactggtaccagcagctcccaggaacggcccccaaactcctcatctataggaataatcagcggccctcaggggtccctgaccgattctctggctccaagtctggcacctcagcctccctggccatcagtgggctccggtccgaggatgaggctgattattactgtgcagcatgggatgacagcctgagtggtccctgggtgttcggcggagggaccaagctgaccgtcctag

SEQ ID NO: 4780 - DNA, 343 bp, Homo sapiens
gacatcgtgatgacccagtctccagactccctggctgtgtctctgggcgagagggccaccatcaactgcaagtccagccagagtgttttatacagctccaacaataagaactacttagcttggtaccagcagaaaccaggacagcctcctaagctgctcatttactgggcatctacccgggaatccggggtccctgaccgattcagtggcagcgggtctgggacagatttcactctcaccatcagcagcctgcaggctgaagatgtggcagtttattactgtcagcaatattatagtactcccccgtacacttttggccaggggaccaagctggagatcaaac

SEQ ID NO: 4781 - DNA, 319 bp, Homo sapiens
gacatccagatgacccagtctccgtcctccctgtctgcatctgtaggagacagagtcaccatcacttgccaggcgagtcagggcattagtaaatatttaaattggtatcagcaaaaaccaggtgaagcccctaacctcctgatctacgatgcattgaatttggaaacaggggtcccatcgaggttccgtggaagtggatctgggacagattttactctcaccatcagcagcctgcagcctgaagatattgcaacatattactgtcaacagtatgataatctcccaatcaccttcggccaagggacacgactggagatta

SEQ ID NO: 4782 - DNA, 331 bp, Homo sapiens
cagtctgccctgactcagcctgcctccgtgtctgggtctcctggacagtcgatcaccatctcctgcactggaaccagcagtgacgttggtggttataactatgtctcctggtaccaacaacacccaggcaaagcccccaaactcatgatttatgatgtcagtaatcggccctcaggggtttctaatcgcttctctggctccaagtctggcaacacggcctccctgaccatctctgggctccaggctgaggacgaggctgattattactgcagctcatatacaagcagcagcactggggtcttcggaactgggaccaaggtcaccgtcctag

SEQ ID NO: 4783 - DNA, 331 bp, Homo sapiens
cagtctgtgctgactcagccaccctcagcgtctgggacccccgggcagagggtcaccatctcttgttctggaagcagctccaacatcggaggtaatactgtgacctggtaccggcagctcccaggaacggcccccaaactcctcatctctactaataatcagcggccctcaggggtccctgaccgattctctggctccaagtctggcacctcagcctccctggccatcagtgggctccagtctgaggatgaggctgattattactgtgctacatgggatgacagcctgaatacttatgtcttcggaactgggaccaaggtcaccgtcctag

SEQ ID NO: 4784 - DNA, 322 bp, Homo sapiens; identical to SEQ ID NO: 1798

SEQ ID NO: 4785 - DNA, 322 bp, Homo sapiens; identical to SEQ ID NO: 2300

SEQ ID NO: 4786 - DNA, 322 bp, Homo sapiens
gacatcaagatgacccagtctccatcttctgtgtctgcatctgtaggagacagagtcaccatcacttgtcgggcgagtcagggtattagcacctggttagcctggtatcagcagaaaccagggaaagcccctaagctcctgatctatgctgcatccagtttgcaaagtggggtcccatcaaggttcagcggcagtggatctgggacagatttcactctcactatcagcagcctgcagcctgaagattttgcaacttactattgtcaacaggctaacagtttccccttcactttcggccctgggaccaaagtggatatcaaac

SEQ ID NO: 4787 - DNA, 319 bp, Homo sapiens
tcctatgagctgactcagccaccctcagtgtccgtgtccccaggacagacagccagcatcccctgctctggagataaattgggcgtaaaatatgtttcctggtatcaacagaagccaggccagtcccctgtgctggtcatctatcaagattccaggcggccctcagggatccctgagcgattctctggctccagctctgggaacacagccactctgaccgtcagcgggacccaggctatcgatgaggctgactattactgtcaggcgtgggacagtactaccgtggttttcggcggagggaccaagctgaccgtcctag

SEQ ID NO: 4788 - DNA, 331 bp, Homo sapiens
cagtctgccctgactcagcctgcctccgtgtctgggtctcctggacagtcgatcaccatctcctgcactggaaccagcagtgacgttggtggttataagtatgtctcctggtaccaacaacacccaggcaaagcccccaaactcatgatttatgatgtcagtagtcggccctcaggggtttctaatcgcttctctggctccaagtctggcaacacggcctccctgaccatctctgggctccaggctgaggacgaggctgattattactgcagctcatatgcaagcaccaggactgtggtattcggcggagggaccaagctgaccgtcctag

SEQ ID NO: 4789 - DNA, 325 bp, Homo sapiens
gacatccagatgacccagtctccatcctccctgtctgcatctgtaggagacagagtcaccatcacttgccaggcgagtcaggacattagcaactatttaaattggtatcagcagaaaccagggaaagcccctaagctcctgatctacgatgcatccaatttggaaacaggggtcccatcaaggttcagtggaagtggatctgggacagattttactttcaccatcagcagcctgcagcctgaagatattgcaacatattactgtcaacagtatgataatctccggggacccactttcggccctgggaccaaagtggatatcaaac

SEQ ID NO: 4790 - DNA, 340 bp, Homo sapiens
gacatcgtgatgacccagtctccagactccctggctgtgtctctgggcgagagggccaccatcaactgcaagtccagccagagtgttttatacagctccaacaataagaactacttagcttggtaccagcaaaaaccaggacagcctcctaagctgctcatttactgggcatctacccgggaatccggggtccctgaccgattcagtggcagcgggtctgggacagatttcactctcaccatcaccagcctgcaggctgaagatgtggcagtttattactgtcagcaatattatagtacgcctctcactttcggccctgggaccaaagtggatatcaaac

SEQ ID NO: 4791 - DNA, 325 bp, Homo sapiens
gaaatagtgatgacgcagtctccagccaccctgtctgtgtctccaggggaaagagccaccctctcctgcagggccagtcagagtgttagcagcaacttagcctggtaccagcagaaacctggccaggctcccaggctcctcatctatggtgcatccaccagggccactggtatcccagccaggttcagtggcagtgggtctgggacagagttcactctcaccatcagcagcctgcagtctgaagattttgcagtttattactgtcagcagtataataactggcctccttggacgttcggccaagggaccaaggtggaaatcaaac

SEQ ID NO: 4792 - DNA, 322 bp, Homo sapiens
gacatccagatgacccagtctccatcctccctgtctgcatctgtaggagacagagtcaccatcacttgccgggcaagtcagagcattagcagctatttaaattggtatcagcagaaaccagggaaagcccctaagctcctgatctatgctgcatccagtttgcaaagtggggtcccatcaaggttcagtggcagtggatctgggacagatttcactctcaccatcagcagtctgcaacctgaagattttgcaacttactactgtcaacagagttacagtacccctgacacttttggccaggggaccaagctggagatcaaac

SEQ ID NO: 4793 - DNA, 322 bp, Homo sapiens
gacatccagatgacccagtctccatctgccatgtctgcatctgtaggagacagagtcaccatcacttgtcgggcgagtcagggcattagcaattatttagcctggtttcagcagaaaccagggaaagtccctaagcgcctgatctatgctgcatccagtttgcaaagtggggtcccatcaaggttcagcggcagtggatctgggacagaattcactctcacaatcagcagcctgcagcctgaagattttgcaacttattactgtctacagcataatagttaccctttcactttcggccctgggaccaaagtggatatcaaac

SEQ ID NO: 4794 - DNA, 322 bp, Homo sapiens
gaaattgtgttgacacagtctccagccaccctgtctttgtctccgggggaaagagccaccctctcctgcagggccagtcagagtcttagcacctacttagcctggtaccaacagaaacctggccaggctcccaggctcctcatctatgatgcattcaacagggcccctggcatcccagccaggttcagtggcagtgggtctgggacagactacaccctcaccatcagcaacctagagcctgaagattttgcagtttattactgtcagcagcggagcaactggctgggaactttcggccctgggaccacagtggatatcaaac

SEQ ID NO: 4795 - DNA, 340 bp, Homo sapiens
gacatcgtgatgacccagtctccagactccctggctgtgtcactgggcgagagggccaccatcaactgcaagtccagccagagtattttatacagctccaacaataacaattacttagcttggtaccagcagaaaccaggacagcctcccaagctgctcatttactgggcatctacccgggaatccggggtccctgaccgattcagtggcagcgggtctgggacagatttcactctcaccatcagcagcctgcaggctgaagatgtggcagtttattactgtcagcaatattataattctgcttggacgttcggccaagggaccaaggtggaaatcaaac

SEQ ID NO: 4796 - DNA, 328 bp, Homo sapiens
gaaatagtgatgacgcagtctccagccaccctgtctgtgtctccaggggaaagagccaccctctcctgcagggccagtcagagtgttagcagcaacttagcctggtaccagcagaaacctggccaggctcccaggctcctcatctatggtgcatccaccagggccactggtatcccagccaggttcagtggcagtgggtctgggacagagttcactctcaccatcagcagcctgcagtctgaagattttgcagtttattactgtcagcagtataataactggcctccgaggtacacttttggccaggggaccaagctggagatcaaac

SEQ ID NO: 4797 - DNA, 322 bp, Homo sapiens; identical to SEQ ID NO: 4573

SEQ ID NO: 4798 - DNA, 331 bp, Homo sapiens
caggctgtggtgactcaggagccctcactgactgtgtccccaggagggacagtcactctcacctgtggctccagcactggagctgtcaccagtggtcattattcctactggttccagcagaagcctggccaagcccccaggacactgatttatgatacaagcaacaaacactcctggacccctgcccggttctcaggctccctccttgggggcaaagctgccctgaccctttcgggtgcgcagcctgaggatgaggctgagtattactgcttgctctcctatagtggtgcttatgtggtattcggcggagggaccaagctgaccgtcctag

SEQ ID NO: 4799 - DNA, 331 bp, Homo sapiens
aattttatgctgactcagccccgctctgtgtcggagtctccggggaagacggtcaccatctcctgcacccgcaccagtggcagcattgccatcaactatgtgcagtggtaccagcagcgcccgggcagttcccccaccactgtgatctatgaggatagccaaagaccctctggggtccctgatcggttctctggctccatcgacagctcctccaactctgcctccctcaccatctctggactgaagactgaggacgaggctgactactactgtcagtcttatgatagcggcagttgggtgttcggcggagggaccaagctgaccgtcctag

SEQ ID NO: 4800 - DNA, 328 bp, Homo sapiens
tcctatgtgctgactcagccaccctcggtgtcagtggccccaggacagacggccaggattacctgtgggggaaacaacattggaagtaaaagtgtgcactggtaccagcagaagccaggccaggcccctgtgctggtcgtctatgatgatagcgaccggccctcagggatccctgagcgattctctggctccaactctgggaacacggccaccctgaccatcagcagggtcgaagccggggatgaggccgactattactgtcaggtgtgggatagtagtagtgatcatccaggggtgttcggcggagggaccaagctgaccgtcctag

SEQ ID NO: 4801 - DNA, 325 bp, Homo sapiens
gaaattgtgttgacacagtctccagccaccctgtctttgtctccaggggaaagagccaccctctcctgcagggccagtcagagtgttagcagctacttagcctggtaccaacagaaacctggccaggctcccaggctcctcatctatgatgcatccaacagggccactggcatcccagccaggttcagtggcagtgggtctgggacagacttcactctcaccatcagcagcctagagcctgaagattttgcagtttattactgtcagcagcgtagcaactggcctcgttacacttttggccaggggaccaagctggagatcaaac

SEQ ID NO: 4802 - DNA, 319 bp, Homo sapiens
gacatccagatgacccagtctccttccaccctgtctgcatctgtaggagacagagtcaccatcacttgccgggccagtcagagtattagtagctggttggcctggtatcagcagaaaccagggaaagcccctaagctcctgatctataaggcatctagtttagaaagtggggtcccatcaaggttcagcggcagtggatctgggacagaattcactctcaccatcagcagcctgcagcctgatgattttgcaacttattactgccaacagtataatagcctgtacacttttggccaggggaccaagctggagatcaaac

SEQ ID NO: 4803 - DNA, 321 bp, Homo sapiens
gacatccagttgacccagtctccatcctccctgtctgcatctgtaggagacagagtcaccatcacttgccgggtgagtcagggcattagcagttatttaaattggtatcggcagaaaccagggaaagttcctaagctcctgatctatagtgcatccaatttgcaatctggagtcccatctcggttcagtggcagtggatctgggacagatttcactctcactatcagcagcctgcagcctgaagatgttgcaacttattacggtcaacggacttacaatgcccctcaactttcggccctgggaccaaagtggatatcaaac

SEQ ID NO: 4804 - DNA, 322 bp, Homo sapiens
gaaattgtgttgacgcagtctccaggcaccctgtctttgtctccaggggaaagagccaccctctcctgcagggccagtcagagtgttagcagcagctacttagcctggtaccagcagaaacctggccaggctcccaggctcctcatctatggtgcatccagcagggccactggcatcccagacaggttcagtggcagtgggtctgggacagacttcactctcaccatcagcagactggagcctgaagattttgcagtgtattactgtcagcagtatggtagctcccgcaccttcggccaagggacacgactggagattaaac

SEQ ID NO: 4805 - DNA, 322 bp, Homo sapiens
gccatccggataacccagtctccatcctcactctctgcatctacaggagacagagtcaccatcacttgtcgggcgagtcagggtattagcagttatttagcctggtatcagcaaaaaccagggaaagcccctaagctcctgatctatgctgcatccactttgcaaagtggggtcccatcaaggttcagcggcagtggatctgggacagatttcactctcaccatcagctgcctgcagtctgaagattttgcaacttattactgtcaacagtattatagttaccctcacacttttggccaggggaccaagctggagatcaaac

SEQ ID NO: 4806 - DNA, 322 bp, Homo sapiens; identical to SEQ ID NO: 837

SEQ ID NO: 4807 - DNA, 322 bp, Homo sapiens
gaaatagtgatgacgcagtctccagccaccctgtctgtgtctccaggggaaagagccaccctctcctgcagggccagtcagagtgttagcagcaacttagcctggtaccagcagaaacctggccaggctcccaggctcctcatctatggtgcatccaccagggccactggtatcccagccaggttcagtggcagtgggtctgggacagagttcactctcaccatcagcagcctgcagtctgaagattttgcagtttattactgtcagcagtataataactggcctcggacgttcggccaagggaccaaggtggaaatcaaac

SEQ ID NO: 4808 - DNA, 328 bp, Homo sapiens
caggctgtggtgactcaggagccctcactgactgtgtccccaggagggacagtcactctcacctgtggctccagcactggagctgtcaccagtggtcattatccctactggttccagcagaagcctggccaagcccccaggacactgatttatgatacaagcaacaaacactcctggacccctgcccggttctcaggctccctccttgggggcaaagctgccctgaccctttcgggtgcgcagcctgaggatgaggctgagtattactgcttgctctcctatagtggtgcttatgtcttcggaactgggaccaaggtcaccgtcctag

SEQ ID NO: 4809 - DNA, 334 bp, Homo sapiens
cagtctgccctgactcagcctgcctccgtgtctgggtctcctggacagtcgatcaccatctcctgcactggaaccagcagtgacgttggtggttataactatgtctcctggtaccaacagcacccaggcaaagcccccaaactcatgatttatgaggtcagtaatcggccctcaggggtttctaatcgcttctctggctccaagtctggcaacacggcctccctgaccatctctgggctccaggctgaggacgaggctgattattactgcagctcatatacaagcagcagcactcgtgtggtattcggcggagggaccaagctgaccgtcctag

SEQ ID NO: 4810 - DNA, 331 bp, Homo sapiens
cagtctgccctgactcagcctgcctccgtgtctgggtctcctggacagtcgatcaccatctcctgcactggaaccagcagtgacgttggtggttataactatgtctcctggtaccaacagcacccaggcaaagcccccaaactcatgatttatgaggtcagtaatcggccctcaggggtttctaatcgcttctctggctccaagtctggcaacacggcctccctgaccatctctgggctccaggctgaggacgaggctgattattactgcagctcatatacaagcagcagcacctatgtcttcggaactgggaccaaggtcaccgtcctag

SEQ ID NO: 4811 - DNA, 334 bp, Homo sapiens
cagtctgtgctgacgcagccgccctcagtgtctggggccccagggcagagggtcaccatctcctgcactgggagcagctccaacatcggggcaggttatgatgtacattggtaccaccaacttccaggaacagcccccaaattcctcatctatggtaacagcaatcggccctcaggggtccctgaccgattctctggctccaagtctggcacctcagcctccctggccatcactagactccaggctgaggatgaggctgattattactgccagtcctatgacagcagcctgagtggttgggtgttcggcggagggaccaagctgaccgtcctag

SEQ ID NO: 4812 - DNA, 320 bp, Homo sapiens
catccagttgacccagtctccatcctccctgtctgcatctgtaggagacagagtcaccatcacttgccgggccagtcagggcattagcagttatttagcctggtatcagcaaaaaccagggaaagcccctaagctcctgatctatgctgcatccactttgcaaagtggggtcccatcaaggttcagcggcagtggatctgggacagatttcactctcaccatcagcagcctgcagcctgaagattttgcaacttattactgtcaacagcttaatagttaccctcagacgttcggccaagggaccaaggtggaaatcaaac

SEQ ID NO: 4813 - DNA, 330 bp, Homo sapiens
cagtctgtgttgacgcagccgccctcagtgtctgcggccccaggacagaaggtcaccatctcctgctctggaggcagctccaacattgggaataattatgtatcctggtaccaacagctcccaggaacagcccccaaactcctcatttatgacaattataagcgaccctcagggattcctgaccgattctctggctccaagtctggcacgtcagccaccctgggcatcaccggactccagactggggacgaggccgattattactgcggaacatgggatagcagcctgagtgtgtgggtgttcggcggagggaccaagctgaccgtccta

SEQ ID NO: 4814 - DNA, 325 bp, Homo sapiens; identical to SEQ ID NO: 4639

SEQ ID NO: 4815 - DNA, 347 bp, Homo sapiens
gatatcgtgctgacccagtctccagactccctggctgtgtctctgggcgagagggccaccatcaactgcaagtccagccagactgtttttttacaactccaacagtaagaactacttagcttggtaccagcagaaaccaggacagcctcctaagttgctcatttcctgggcatctacccgggaatccggggtccctgaccgattcagtggcagcgggtctgggacagatttcactctcaccatcaacggcctgcaggctgaagatgtggcagtttattactgtcagcaatattatactagtcccgcaggcatcaccttcggccaagggacacgactggagattaaac

SEQ ID NO: 4816 - DNA, 325 bp, Homo sapiens
gaaattgtgttgacgcagtctccaggcaccctgtctgtgtctccaggggaaagagtcaccctctcctgcagggccagtcagagtgttagcagcagctacttagcctggtaccagcagaaacctggccaggctcccaggctcctcatctatggtgtttccaacagggccactggcatcccagacagattcagtggcagtgggtctgggacagacttcactctcaccatcagcagactggagcctgaagattttgcagtgtattcctgtcagcagtatggtaactcacctcggacttttggccaggggaccaagctgcagatcaaac

SEQ ID NO: 4817 - DNA, 333 bp, Homo sapiens
caatctgtgctgatgcagtcgccctcagtgtctagggccccaggacagagggtcatcatctcctgcattgggagcaactccaacatcggggcaggtcatgatgtacactggtaccagcaacttccagaagtagcccccaagctcctcatttatgataccaacaatcggccctcaggggtccctgaccgattctctgggtccaagtctggcacctcagcctccctggccatcactgggctccaggctgaagatgaggcttattactactgccagtcttatgacctcagcctgagtgccgtgatcttcggcggagggaccaaactgaccgttcta

SEQ ID NO: 4818 - DNA, 331 bp, Homo sapiens
cagtctgccctgactcagcctgcctccgtgtctgggtctcctggacagtcgatcaccatctcctgcactggaaccagcagtgatgttgggagttataaccttgtctcctggtaccaacagcacccaggcaaagcccccaaactcatgatttatgaggtcaataagcggccctcaggggtttctagtcgcttctctggctccaagtctggcaacacggcctccctgacaatctctgggctccaggctgaggacgacgctgattattactgctgctcatatgcaggtggaagcacttatgtcttcggaactgggaccaaggtcaccgtcctag

SEQ ID NO: 4819 - DNA, 322 bp, Homo sapiens; identical to SEQ ID NO: 2300

SEQ ID NO: 4820 - DNA, 322 bp, Homo sapiens
gacatccagatgacccagtctccatcctccctgtctgcatctgtaggagacagagtcaccatcacttgccgggcgagtcagggcattagcaattatttagcctggtatcagcagaaaccagggaaagttcctaagctcctgatctatgctgcatccactttgcaatcaggggtcccatctcggttcagtggcagtggatctgggacagatttcactctcaccatcagcagcctgcagcctgaagatgttgcaacttattactgtcaaaagtataacagtgccctattcactttcggccctgggaccaaagtggatatcaaac

SEQ ID NO: 4821 - DNA, 316 bp, Homo sapiens
tcctatgagctgacacagccaccctcggtgtcagtgtccccaggacagacggccaggatcacctgctctggagatgcattgccaaagcaatatgcttattggtaccagcagaagccaggccaggcccctgtgctggtgatatataaagacagtgagaggccctcagggatccctgagcgattctctggctccagctcagggacaacagtcacgttgaccatcagtggagtccaggcagaagacgaggctgactattactgtcaatcagcagacagcagttgggtgttcggcggagggaccaagctgaccgtcctag

SEQ ID NO: 4822 - DNA, 325 bp, Homo sapiens; identical to SEQ ID NO: 872

SEQ ID NO: 4823 - DNA, 325 bp, Homo sapiens
tcctatgtgctgactcagccaccctcagtgtcagtggccccaggaaagacggccaggattacctgtgggggaaacaacattggaagtaaaagtgtgcactgggaccagcagaagccaggccaggcccctgtgctggtcatctattatgatagcgaccggccctcagggatccctgagcgattctctggctccaactctgggaacacggccaccctgaccatcagcagggtcgaagccggggatgaggccgactattactgtcaggtgtgggatagtagtagtgatcgtgtggtattcggcggagggaccaagctgaccgtcctag

SEQ ID NO: 4824 - DNA, 325 bp, Homo sapiens
gacatccagatgacccagtctccatcctccctgtctgcatctgtaggagacagagtcaccatcacttgccgggcgagtcagggcattagcaattctttagcctggtatcagcagaaaccagggaaagcccctaagctcctgctctatgctgcatccagattggaaagtggggtcccatccaggttcagtggcagtggatctgggacggattacactctcaccatcagcagcctgcagcctgaagattttgcaacttattactgtcaacagtattatagtacccctttgtacacttttggccaggggaccaagctggagatcaaac

SEQ ID NO: 4825 - DNA, 337 bp, Homo sapiens
gatattgtgatgactcagtctccactctccctgcccgtcacccctggagagccggcctccatctcctgcaggtctagtcagagcctcctgcatagtaatggatacaactatttggattggtacctgcagaagccagggcagtctccacagctcctgatctatttgggttctaatcgggcctccggggtccctgacaggttcagtggcagtggatcaggcacagattttacactgaaaatcagcagagtggaggctgaggatgttggggtttattactgcatgcaagctctacaaactctgctcactttcggcggagggaccaaggtggagatcaaac

SEQ ID NO: 4826 - DNA, 319 bp, Homo sapiens
gaattagtgatgacgcagtctccatcctccctgtctgtgtctccaggtgaaagagccaccctctcctgcagggccagtcagagtgttggcagcaactttgcctggtaccagcagaaacctggccaggctcccagactcctcatctatgctgcatctaccagggccactggtgtcccagccaggttcagtggcagtgggtctgggacagagttcactctcaccgtcagcagcctgcagtctgaagattttggaatttattattgtcagcagtataataactggcctaggacgttcggccaagggaccaaggtggcaatca

SEQ ID NO: 4827 - DNA, 331 bp, Homo sapiens
cagtctgccctgactcagcctgcctccgtgtctgggtctcctggacagtcgatcaccatctcctgcactggaaccagcagtgacgttggtggttataactatgtctcctggtaccaacagtacccaggcaaagcccccaaactcatgatttatgaggtcattaatcggccctcaggggtttctaatcgcttctctggctccaagtctggcaacacggcctccctgaccatctctgggctccaggctgaggacgaggctgattattactgcagctcatatacaagcagcaccacttatgtcttcggaactgggaccaaggtcaccgtcctag

SEQ ID NO: 4828 - DNA, 328 bp, Homo sapiens
gaaattgtgttgacacagtctccagccaccctgtctttgtctccaggggaaagagccaccctctcctgcagggccagtcagagtgttagcagctacttagcctggtaccaacagaaacctggccaggctcccaggctcctcatctatgatgcatccaacagggccactggcatcccagccaggttcagtggcagtgggtctgggacagacttcactctcaccatcagcagcctagagcctgaagattttgcagtttattactgtcagcagcgtagcaactggcctccctctctcactttcggcggagggaccaaggtggagatcaaac

SEQ ID NO: 4829 - DNA, 322 bp, Homo sapiens
gccatccggataacccagtctccatcctcactctctgcatctacaggagacagagtcaccatcacttgtcgggcgagtcagggtattagcagttatttagcctggtatcagcaaaaaccagggaaagcccctaagctcctgatctatgctgcatccactttgcaaagtggggtcccatcaaggttcagcggcagtggatctgggacagatttcactctcaccatcagctgcctgcagtctgaagattttgcaacttattactgtcaacagtattatagttacccgtacacttttggccaggggaccaagctggagatcaaac

SEQ ID NO: 4830 - DNA, 334 bp, Homo sapiens
cagtctgtgttgacgcagccgccctcagtgtctgcggccccaggacagaaggtcaccatctcctgctctggaagcagctccaacattgggaataattatgtatcctggtaccagcagctcccaggaacagcccccaaactcctcatttatgacaataataagcgaccctcagggattcctgaccgattctctggctccaagtctggcacgtcagccaccctgggcatcaccggactccagactggggacgaggccgattattactgcggaacatgggatagcagcctgagtgctggcctggtattcggcggagggaccaagctgaccgtcctag

SEQ ID NO: 4831 - DNA, 322 bp, Homo sapiens
gccatccggataacccagtctccatcctcactctctgcatctacaggagacagagtcaccatcacttgtcgggcgagtcagggtattagcagttatttagcctggtatcagcaaaaaccagggaaagcccctaagctcctgatctatgctgcatccactttgcaaagtggggtcccatcaaggttcagcggcagtggatctgggacagatttcactctcaccatcagctgcctgcagtctgaagattttgcaacttattactgtcaacagtattatagttaccctcaaacgttcggccaagggaccaaggtggaaatcaaac

SEQ ID NO: 4832 - DNA, 322 bp, Homo sapiens
gacatccagatgacccagtctccatcctccctgtctgcatctataggagacagagtcaccatcacttgccgggcaagtcagggcattagaaatgatttaggctggtatcagcagaaaccagggaaagcccctaagcgcctgatctatgctgcatccagtttgcaaagtggggtcccatcaaggttcagcggcagtggatctgggacagacttcactctcacaatcagcagcctgcagcctgaagattttgcaacttattactgtctacaatataatagtttcgcgtggacgttcggccaagggaccaaggtggaaatcaaac

SEQ ID NO: 4833 - DNA, 322 bp, Homo sapiens; identical to SEQ ID NO: 2300

SEQ ID NO: 4834 - DNA, 322 bp, Homo sapiens; identical to SEQ ID NO: 943

SEQ ID NO: 4835 - DNA, 325 bp, Homo sapiens
gacatccagatgacccagtctccatcctccctgtctgcatctgtaggagacagagtcaccatcacttgccgggcaagtcagagcattagcagctatttaaattggtatcagcagaaaccagggaaagcccctaagctcctgatctatgctgcatccagtttgcaaagtggggtcccatcaaggttcagtggcagtggatctgggacagatttcactctcaccatcagcagtctgcaacctgaagattttgcaacttactactgtcaacagagttacagtacccctccgctcactttcggcggagggaccaaggtggagatcaaac

SEQ ID NO: 4836 - DNA, 328 bp, Homo sapiens
gaaattgtattgacgcagtctccaggcaccctgtctttgtctccagggggaagagccaccctctcctgcagggccagtcagaggattaccaccaaccgcctagcctggtaccagcagaaacctggccaggctcccaggctcctcatctacggtgcattcagtagggccactggcatcccagacaggttcagtggcagtgggtctgggacagacttcactctcaccatcagcagactggagcctgacgattttgcagtatattattgtcagcaatatgatgactcgcctccgtggtcttttggccaggggaccaaggtggagatgaaac

SEQ ID NO: 4837 - DNA, 322 bp, Homo sapiens; identical to SEQ ID NO: 4554

SEQ ID NO: 4838 - DNA, 331 bp, Homo sapiens
cagtctgccctgactcagcctgcctccgtgtctgggtctcctggacagtcgatcaccatctcctgcactggaaccagcagtgacgttggtggttataactatgtctcctggtaccaacagcacccaggcaaagcccccaaactcatgatttatgaggtcagtaatcggccctcaggggtttctaatcgcttctctggctccaagtctggcaacacggcctccctgaccatctctgggctccaggctgaggacgaggctgattattactgcagctcatatacaagcagcagcactctggtcttcggaactgggaccaaggtcaccgtcctag

SEQ ID NO: 4839 - DNA, 322 bp, Homo sapiens
gccatccggataacccagtctccatcctcactctctgcatctacaggagacagagtcaccatcacttgtcgggcgagtcagggtattagcagttatttagcctggtatcagcaaaaaccagggaaagcccctaagctcctgatctatgctgcatccactttgcaaagtggggtcccatcaaggttcagcggcagtggatctgggacagatttcactctcaccatcagctgcctgcagtctgaagattttgcaacttattactgtcaacagtattatagttaccctctgacgttcggccaagggaccaaggtggaaatcaaac

SEQ ID NO: 4840 - DNA, 322 bp, Homo sapiens
gccatccggataacccagtctccatcctcactctctgcatctacaggagacagagtcaccatcacttgtcgggcgagtcagggtattagcagttatttagcctggtatcagcaaaaaccagggaaagcccctaagctcctgatctatgctgcatccactttgcaaagtggggtcccatcaaggttcagcggcagtggatctgggacagatttcactctcaccatcagctgcctgcagtctgaagattttgcaacttattactgtcaacagtattatagttaccccgtcacttttggccaggggaccaagctggagatcaaac

SEQ ID NO: 4841 - DNA, 325 bp, Homo sapiens
tcttctgagctgactcaggaccctgctgtgtctgtggccttgggacagacagtcaggatcacatgccaaggagacagcctcagaagctattatgcaagctggtaccagcagaagccaggacaggcccctgtacttgtcatctatggtaaaaacaaccggccctcagggatcccagaccgattctctggctccagctcaggaaacacagcttccttgaccatcactggggctcaggcggaagatgaggctgactattactgtaactcccgggacagcagtggtaaccatcgagtattcggcggagggaccaagctgaccgtcctag

SEQ ID NO: 4842 - DNA, 337 bp, Homo sapiens
cagtctgtgctgacgcagccgccctcagtgtctggggccccagggcagagggtcaccatctcctgcactgggagcagctccaacatcggggcaggttatgatgtacactggtaccagcagcttccaggaacagcccccaaactcctcatctatggtaacagcaatcggccctcaggggtccctgaccgattctctggctccaagtctggcacctcagcctccctggccatcactgggctccaggctgaggatgaggctgattattactgccagtcctatgacagcagcctgagtggttcgaatgtattcggcggagggaccaagctgaccgtcctag

SEQ ID NO: 4843 - DNA, 337 bp, Homo sapiens
gatattgtgatgactcagtctccactctccctgcccgtcacccctggagagccggcctccatctcctgcaggtctagtcagagcctcctgaatagtaatggatacaattatttggattggtacctgcagaagccagggcagtctccacagctcctgatctatttgggttctaatcgggcctccggggtccctgacaggttcagtggcagtggatcaggcacagattttacactgaaaatcagcagagtggaggctgaggatgttggcttttattactgcatgcaaactctacaaagtcccgtcactttcggccctgggaccaaagtggatatcaaac

SEQ ID NO: 4844 - DNA, 334 bp, Homo sapiens
cagtctgtgctgactcagccaccctcagcgtctgggacccccgggcagagggtcaccatctcttgttctggaagcagctccaacatcggaagtaattatgtatactggtaccagcagctcccaggaacggcccccaaactcctcatctataggaataatcagcggccctcaggggtccctgaccgattctctggctccaagtctggcacctcagcctccctggccatcagtgggctccggtccgaggatgaggctgattattactgtgcagcatgggatgacagcctgagtggttttgtggtattcggcggagggaccaagctgaccgtcctag

SEQ ID NO: 4845 - DNA, 322 bp, Homo sapiens
gccatccggatgacccagtctccatcctcattctctgcatctacaggagacagagtcaccatcacttgtcgggcgagtcagggtattagcagttatttagcctggtatcagcaaaaaccagggaaagcccctaagctcctgatctatgctgcatccactttgcaaagtggggtcccatcaaggttcagcggcagtggatctgggacagatttcactctcaccatcagctgcctgcagtctgaagattttgcaacttattactgtcaacagtattatagttaccctccggccttcggccaagggacacgactggagattaaac

SEQ ID NO: 4846 - DNA, 323 bp, Homo sapiens
gacatccagatgacccagtctccatcctccctgtctgcatctgtaggagacagagtcaccatcacttgccgggcaagtcagagcattagcaactatttaaattggtatcagcagaaaccagggaaagcccctaagctcctgatctatgctgcatccagtttacaaagtggggtcccatcaaggttcagtggcagtggatctgggacaaatttcattctcaccatcagcagtctgcaacctgaagattttgcaacttactactgtcaacagagttacagtaccccttcgtggacgttcggccaagggaccaaggtggaaatcaa

SEQ ID NO: 4847 - DNA, 322 bp, Homo sapiens; identical to SEQ ID NO: 837

SEQ ID NO: 4848 - DNA, 322 bp, Homo sapiens
gacatccagatgacccagtctccatcctccctgtctgcatctgtaggagacagagtcaccatcacttgccgggcaagtcagagctttagcagctatttaaattggtatcagcagaaaccagggaaagcccctaagctcctgatctatgctgcatccagtttgcaaagtggggtcccatcaaggttcagtggcagtggatctgggacagatttcactctcaccatcagcagtctgcaacctgaagattttgcaacttactactgtcaacagagttacagtactccgtacacttttggccaggggaccaagctggagatcaaac

SEQ ID NO: 4849 - DNA, 325 bp, Homo sapiens
gaaattgtgttgacgcagtctccaggcaccctgtctttgtctccaggggaaagagccaccctctcctgcagggccagtcagagtgttagcagcaactacttagcctggtaccagcagaagcctggccaggctcccaggctcctcttctatggtgcatccaccagggccactggcatcccagacaggttcagtggcagtgggtctgggacagacttcactctcaccatcagcagactggagcctgaagattttgcagtgtattactgtcagcagtatggtagctcacctaacacttttggccaggggaccaagctggagatcaaac

SEQ ID NO: 4850 - DNA, 319 bp, Homo sapiens
gaaattgtgttgacacagtctccagccaccctgtctttgtctccaggggaaagagccaccctctcctgcagggccagtcagagtgttagcagctacttagcctggtaccaacagaaacctggccaggctcccaggctcctcatctatgatgcatccaacagggccactggcatcccagccaggttcagtggcagtgggtctgggacagacttcactctcaccatcagcagcctagagcctgaagattttgcagtttattactgtcagcagcgtagcaactggcggacgttcggccaagggaccaaggtggaaatcaaac

SEQ ID NO: 4851 - DNA, 334 bp, Homo sapiens
aattttatgctgactcagccccactctgtgtcggagtctccggggaagacggtaaccatctcctgcacccgcagcagtggcagcattgccagcaactatgtgcagtggtaccagcagcgcccgggcagttcccccaccactgtgatctatgaggataaccaaagaccctctggggtccctgatcggttctctggctccatcgacagctcctccaactctgcctccctcaccatctctggactgaagactgaggacgaggctgactactactgtcagtcttatgatagcagcacccattgggtgttcggcggagggaccaagctgaccgtcctag

SEQ ID NO: 4852 - DNA, 319 bp, Homo sapiens
tcctatgagctgactcagccaccctcagtgtccgtgtccccaggacagacagccagcatcacctgctctggagataaattgggggataaatatgcttgctggtatcagcagaagccaggccagtcccctgtgctggtcatctatcaagatagcaagcggccctcagggatccctgagcgattctctggctccaactctgggaacacagccactctgaccatcagcgggacccaggctatggatgaggctgactattactgtcaggcgtgggacagcagccatgtggtattcggcggagggaccaagctgaccgtcctag

SEQ ID NO: 4853 - DNA, 322 bp, Homo sapiens
gacatccagttgacccagtctccatccttcctgtctgcatctgtaggagacagagtcaccatcacttgccgggccagtcagggcattagcagttatttagcctggtatcagcaaaaaccagggaaagcccctaagctcctgatctatgctgcatccactttgcaaagtggggtcccatcaaggttcagcggcagtggatctgggacagaattcactctcacaatcagcagcctgcagcctgaagattttgcaacttattactgtcaacagcttaatagttacccgtacacttttggccaggggaccaagctggagatcaaac

SEQ ID NO: 4854 - DNA, 322 bp, Homo sapiens
gaaatagtgatgacgcagtctccagccaccctgtctgtgtctccaggggaaagagccaccctctcctgcagggccagtcagagtgttagcagcaacttagcctggtaccagcagaaacctggccaggctcccaggctcctcatctatggtgcatccaccagggccattggtatcccagccaggttcagtggcagtgggtctgggacagagttcactctcaccatcagcagcctgcagtctgaagattttgcagtttattactgtcagcagtatattaactccccggagacttttggccaggggaccaagctggagatcaaac

SEQ ID NO: 4855 - DNA, 331 bp, Homo sapiens
cagtctgccctgactcagcctgcctccgtgtctgggtctcctggacagtcgatcaccatctcctgcactggaaccagcagtgacgttggtggttataactatgtctcctggtaccaacaacacccaggcaaagcccccaaactcatgatttatgatgtcagtaatcggccctcaggggtttctaatcgcttctctggctccaagtctggcaacacggcctccctgaccatctctgggctccaggctgaggacgaggctgattattactgcagctcatatacaagcagcagcacttatgtcttcggaactgggaccaaggtcaccgtcctag

SEQ ID NO: 4856 - DNA, 322 bp, Homo sapiens; identical to SEQ ID NO: 3452

SEQ ID NO: 4857 - DNA, 322 bp, Homo sapiens
gacgtccagatgacccagtctccttccaccctgtctgcctctataggagacacagtcaccatcacttgccgggccagtcagagtattggtagttggttggcctggtatcaacaaagaccaggcaaagcccctaaactcctaatctacaaggcctctattttagcgagtggggtctcatcgagattcagcggcagtggatctgggacagaattcgctctcaccatcagcagcctgcagcctgaagattttgtaacttattcatgtctccattataagagttatccgtggacgttcggccaagggaccaaggtggacatcaaac

SEQ ID NO: 4858 - DNA, 337 bp, Homo sapiens
cagtctgtgttgacgcagccgccctcagtgtctgcggccccaggacagaaggtcaccatctcctgctctggaagcagctccaacattgggaataattatgtatcctggtaccagcagctcccaggaacagcccccaaactcctcatttatgacaataataagcgaccctcagggattcctgaccgattctctggctccaagtctggcacgtcagccaccctgggcatcaccggactccagactggggacgaggccgattattactgcggaacatgggatagcagcctgagtgctgaagaatgggtgttcggcggagggaccaagctgaccgtcctag

SEQ ID NO: 4859 - DNA, 340 bp, Homo sapiens
gacatcgtgatgacccagtctccagactccctggctgtgtctctgggcgagagggccaccatcaactgcaagtccagccagagtgttttatacagctccaacaataagaactacttaacttggtaccagcagaaaccaggacagcctcctaagctgctcatttactgggcatctacccgggaatccggggtccctgaccgattcagtggcagcgggtctgggacagatttcactctcaccatcagcggcctgcaggctgaagatgtggcagtttattactgtcagcaatattatagtactccgatcaccttcggccaagggacacgactggagattaaac

SEQ ID NO: 4860 - DNA, 340 bp, Homo sapiens
gacatcgtgatgacccagtctccagactccctggctgtgtctctgggcgcgagggccaccatcaactgcaagtccagccagagtgttttattcagttccaacaataagaactacttagcttggtaccaacacaaaccacgacagcctcctaagctgctcatttactgggcatctacccgggaatccggggtccctgaccgattcagtggcagcgggtctgggacagatttcactctcaccatcagcggcctgcaggctgaagatgtggcagtttattactgtcaacaatattttggtactccgatcaccttcggccaagggacacgactggagattaaac

SEQ ID NO: 4861 - DNA, 325 bp, Homo sapiens
gccatccggatgacccagtctccatcctcattctctgcatctacaggagacagagtcaccatcacttgtcgggcgagtcagggtattagcagttatttagcctggtatcagcaaaaaccagggaaagcccctaagctcctgatctatgctgcatccactttgcaaagtggggtcccatcaaggttcagcggcagtggatctgggacagatttcactctcaccatcagctgcctgcagtctgaagattttgcaacttattactgtcaacagtattatagttaccctccgtacacttttggccaggggaccaagctggagatcaaac

SEQ ID NO: 4862 - DNA, 322 bp, Homo sapiens
gacatccagatgacccagtctccatcctccctgtctgcatctgtaggagacagagtcaccatcacttgccgggcaagtcagagcattagcagctatttaaattggtatcagcagaaaccagggaaagcccctaagctcctgatctatgctgcatccagtttgcaaagtggggtcccatcaaggttcagtggcagtggatctgggacagatttcactctcaccatcagcagtctgcaacctgaagattttgcaacttactactgtcaacagagttacagtacccctccgagtttcggcggagggaccaaggtggagatcaaac

SEQ ID NO: 4863 - DNA, 322 bp, Homo sapiens
tcctatgagctgactcagccaccctcagtgtccgtgtccccaggacagacagccagcatcacctgctctggagataaattgggggataaatatgcttgctggtatcagcagaagccaggccagtcccctgtactggtcatctatcaagatacgaagcggccctcagggatccctgagcgattctctggctccaactctgggaacacagccactctgaccatcagcgggacccaggctatggatgaggctgactattactgtcaggcgtgggacagcagcactcctagggtgttcggcggagggaccaagctgaccgtcctag

SEQ ID NO: 4864 - DNA, 322 bp, Homo sapiens; identical to SEQ ID NO: 2360

SEQ ID NO: 4865 - DNA, 330 bp, Homo sapiens
gtctgtggtgactcaaccaccctcagcgtctgggacccccgggcagcgggtcatcatctcttgttctggaggcgactccaacatcgggagtaatactgtaacctggttccagcacctcccaggaatggcccccaaactcctcatttataataatgatcagcggccctcaggggtccctgaccgattctctgcctccaagtctggcgcctcagcctccctggccatcagtggactccagtctgacgatgaggctgattattactgtgcaacatggcgtgacaacctgaatgaccatgtggtgttcggcggagggaccaagctgaccgtcct

SEQ ID NO: 4866 - DNA, 337 bp, Homo sapiens
gatattgtgatgacccagactccactctcctcacctgtcacccttggacagccggcctccatctcctgcaggtctagtcaaagcctcgtacacagtgatggaaacacctacttgagttggcttcagcagaggccaggccagcctccaagactcctaatttataagatttctaaccggttctctggggtcccagacagattcagtggcagtggggcagggacagatttcacactgaaaatcagcagggtggaagctgaggatgtcggggtttattactgcatgcaagctacacaatttcctcgaacttttggccaggggaccaagctggagatcaaac

SEQ ID NO: 4867 - DNA, 325 bp, Homo sapiens
gaaatagtgatgacgcagtctccagccaccctgtctgtgtctccaggggaaagagccaccctctcctgcagggccagtcagagtgttagcagcaacttagcctggtaccagcagaaacctggccaggctcccaggctcctcatctatggtgcatccaccagggccactggtatcccagccaggttcagtggcagtgggtctgggacagagttcactctcaccatcagcagcctgcagtctgaagattttgcagtttattactgtcagcagtataataactggcctccggtaaccttcggccaagggacacgactggagattaaac

SEQ ID NO: 4868 - DNA, 337 bp, Homo sapiens
gagattgtgatgactcagtctccactctccctgcccgtcacccctggagagccggcctccatctcctgcaggtctagtcagagcctcctgcatagcaatggatacaactatttggattggtacctgcagaagccagggcagtctccacagctcctgatctatttgaattctaatcgggcctccggggtccctgacaggttcagtggcagtggatcaggcacagattttacactgaaaatcagcagagtggaggctgaggatgttggggtttattactgcatgcaagctctacaaactcctcggacgttcggccaagggaccaaggtggaaatcaaac

SEQ ID NO: 4869 - DNA, 337 bp, Homo sapiens
cagtctgccctgactcagcctccctccgcgtccgggtctcctggacagtcagtcaccatctcctgcactggaaccagcagtgacgttggtggttataactatgtctcctggtaccaacagcacccaggcaaagcccccaaactcatgatttatgaggtcagtaagcggccctcaggggtccctgatcgcttctctggctccaagtctggcaacacggcctccctgaccgtctctgggctccaggctgaggatgaggctgattattactgcagttcatatgcaggcagcaacaatttccgttatgtcttcggaactgggaccaaggtcaccgtcctag

SEQ ID NO: 4870 - DNA, 337 bp, Homo sapiens
gacatcgtgctgacccagtctccagactccctggctgtgtctctgggcgagagggccaccatcaactgcaagtccagccagagtgttttatatagttccaacaatcagaactacttagcttggtaccagcagaaaccaggacagcctcctaaactgctcatttactgggcatctacccgggaatccggggtccctgaccgattcagtggcagcgggtctgggacagatttcactctcaccatcagcagcctgcaggctgaagatgtggcagtttatttctgtcagcaatattatagtacattcactttcggccctgggaccaaagtggatatcaaac

SEQ ID NO: 4871 - DNA, 322 bp, Homo sapiens
gacatccagatgacccagtctccatcctccctgtctgcatctgtaggagacagagtcaccatcacttgccgggcaagtcagggcattagaaatgatttaggctggtatcagcagaaaccagggaaagcccctaagcgcctgatctatgctgcatccagtttgcaaagtggggtcccatcaaggttcagcggcagtggatctgggacagaattcactctcacaatcagcagcctgcagcctgaagattttgcaacttattactgtctacagcatgagagttacccgatcactttcggccctgggaccaaagtggatatcaaac

SEQ ID NO: 4872 - DNA, 325 bp, Homo sapiens
gacatccagatgacccagtctccttccaccctgtctgcatctgtaggagacagagtcaccatcacttgccgggccagtcagagtattagtagctggttggcctggtatcagcagaaaccagggaaagcccctaagctcctgatctataaggcgtctagtttagaaagtggggtcccatcaaggttcagcggcagtggatctgggacagaattcactctcaccatcagcagcctgcagcctgatgattttgcaacttattactgccaacagtataatagttatccgacgtggacgttcggccaagggaccaaggtggaaatcaaac

SEQ ID NO: 4873 - DNA, 325 bp, Homo sapiens
gacatccagatgacccagtctccatcctccctgtctgcatctgtaggagacagagtcaccatcacttgccgggcgagtcagggcattagcaattctttagcctggtatcaacagaaaccagggaaagcccctaaactcctgctctatgctgcatccacattggaaagtggggtcccatccaggttcagtggcagtagatctgggacggattacactctcaccatcagcagcctgcagcctgaagattttgcaacttattactgtcaacagtattatagtaccctggggcggacgttcggccaagggaccaaggtggaaatcaaac

SEQ ID NO: 4874 - DNA, 323 bp, Homo sapiens
gacatccagatgacccagtctccttccaccctgtctgcatctgtaggagacagagtcaccatcacttgccgggccagtcagagtattagtagctggttggcctggtatcagcagaaaccagggaaagcccctaagctcctgatctataaggcatctagtttagaaagtggggtcccatcaaggttcagcggcagtggatctgggacagaattcactctcaccatcagcagcctgcagcctgatgattttgcaacttattactgccaacagtataatagttattccgtggacgttcggccaagggaccaaggtggaaatcaaac

SEQ ID NO: 4875 - DNA, 331 bp, Homo sapiens
cagtctgccctgactcagcctgcctccgtgtctgggtctcctggacagtcgatcaccatctcctgcactggaaccagcagtgacgttggtggttataactttgtctcctggtaccaacaacacccaggcaaagcccccaaactcatgatttatgaggtcagtaatcggccctcaggggtttctaatcgcttctctggctccaagtctggcaacacggcctccctgaccatctctgggctccaggctgaggacgaggctgattattactgcagctcatatacaagcaccaacactctggtgttcggcggagggaccaagctgaccgtcctag

SEQ ID NO: 4876 - DNA, 320 bp, Homo sapiens
gacatccagttgacccagtctccatcctccctgtctgcatctgtaggagacagagtcaccatcacttgccgggtgagtcagggcattagcaattatttaaattgatatcggcagaaaccggggaaagttcctaaattcatgatctatagtgcatccaatttgcaatctggagtcccatctcggttcagtggcagtggatctgggacagatctcactctcactatcagctgcctgcagcctgaagatgttgcaacttataagggtcaacggacttacaatgcccctcactttcggccctgggaccaaagtggatatcaaac

SEQ ID NO: 4877 - DNA, 325 bp, Homo sapiens
gaaattgtgttgacgcagtctccaggcaccctgtctttgtctccaggggaaagagccaccctctcctgcagggccagtcagggtattagcagcacttacttagcctggtaccagcagaaacctggccaggctcccaggctcctcatctatggtgcatccggcagggccactggcatcccagtcaggttcagtggcagtgggtctgggacagacttcactctcaccatcagcagactggagcctgaagattttgcagtgtattactgtcagcagtatggtagctcacctgggacttttggccaggggaccaagctggagatcaaac

SEQ ID NO: 4878 - DNA, 337 bp, Homo sapiens
gatattgtgatgacccagactccactctcctcacctgtcacccttggacagccggcctccatctcctgcaggtctagtcaaagcctcgtacacagtgatggaaacacctacttgacttggcttcagcagaggccaggccagcctccaagactcctaatttatcagagttcttaccggttctctggggtcccagacagattcagtggcagtggggcagggacagatttcacactgaaaatcagcagggtggaagctgaggatgtcggggtttattactgcatgcaggctacacaagttccatacacttttggccaggggaccaagctggagatcaaac

SEQ ID NO: 4879 - DNA, 375 bp, Homo sapiens
gaggtgcagctggtgcagtctggagcagaggtgaaaaagcccggggagtctctgaagatctcctgtaagggttctggatacagctttaccacctactggatcggctgggtgcgccagatgcccgggaaaggcctggaatggatggggatcatctatcctggtgactctgataccagatatagcccgtccttccaaggccaggtcaccatctcagccgacaagtccatcagcaccgcctacctgcagtggagcagcctgaaggccacggacaccgccatgtattactgtgcgagacagagagatatagtggctacgacctactactactacggtatggacgtctggggccaagggaccacggtcaccgtctcctca

SEQ ID NO: 4880 - DNA, 375 bp, Homo sapiens; identical to SEQ ID NO: 4879

SEQ ID NO: 4881 - DNA, 375 bp, Homo sapiens; identical to SEQ ID NO: 4879

SEQ ID NO: 4882 - DNA, 375 bp, Homo sapiens; identical to SEQ ID NO: 4879

SEQ ID NO: 4883 - DNA, 375 bp, Homo sapiens; identical to SEQ ID NO: 4879

SEQ ID NO: 4884 - DNA, 375 bp, Homo sapiens; identical to SEQ ID NO: 4879

SEQ ID NO: 4885 - DNA, 375 bp, Homo sapiens; identical to SEQ ID NO: 4879

SEQ ID NO: 4886 - DNA, 370 bp, Homo sapiens
caggtggaggtgcaggagtcgggcccaggactggtgaagtcttcggagaccctgtccctcacctgcgctgtctctggttactccatcagcagtgattcctactggggctggatccggcagcccccagggaagggactggagtggattgggaatatctatcatagtggggccacctactacaatccgtccctcaagagtcgagtcaccatatcagttgacatgtccaagaaccaaatctccctggaggtgagatctgtgaccgccgcagacacggccgtgtattattgtgcgagagaggggaagattaccgtgattcggggagttaccttcgacccctggggccagggcaccctggtcaccgtctcctcag

SEQ ID NO: 4887 - DNA, 370 bp, Homo sapiens
caggtgcagctgcaggagtcgggcccaggactggtgaggtcttcggagaccctgtccctcacctgcgctgtctctggttactccatcagcagtgattcctactggggctggatccggcagcccccagggaagggactggaatggattgggaatatttatcatagtggggccacatactacaacccgtccctcaagagtcgagtcaccatatcagttgacacgtccaagaaccaaatttccctggaggtgagatcggtgaccgccgcagacacggccgtgtattattgtgcgagagaggggaagattaccgtgattcggggagttaccttcgacccctggggccagggcaccctggtcaccgtctcctcag

SEQ ID NO: 4888 - DNA, 370 bp, Homo sapiens
caggtgcacctgcaggagtcgggcccaggactggtgaagtcttcggagaccctgtccctcacctgcgctgtctctggttactccatcagcagtgattcctactggggctggatccggcagcccccagggaggggactggagtggattgggaatatctatcatagtggggccacctactacaacccgtccctcaagagtcgagtcaccatatcagtagacacgtccaagaaccaattctccctgaaggtgagctctgtgaccgccgcagacacggccgtgtattattgtgcgagagaggggaagattaccgtgattcggggagtcactttcgacccctggggcccgggcaccctggtcaccgtctcctcag

SEQ ID NO: 4889 - DNA, 370 bp, Homo sapiens
caggtgcagctgcaggagtcgggcccaggacgggtgaggtcttcggagaccctgtccctcacctgcgctgtctctggttactccatcagcagtgactcctactggggctggattcggcagtccccagggaagggactggaatggattggaaatatctatcatagtggggccacctactacaacccgtccctcaagagtcgagtcaccatatcagttgacacgtccaagaaccaaatttccctggaggtgagatctgtgaccgccgcagacacggccgtgtattattgtgcgagagaggggaagattaccgtgattcggggagttaccttcgacccctggggccagggcaccctggtcaccgtctcctcag

SEQ ID NO: 4890 - DNA, 370 bp, Homo sapiens
caggtgcagctgcaggagtcgggcccaggactggtgaagtcttcggagaccctgtccctcacctgcgctgtctctgcttactccatcagcagtgattcctactggggctggatccggcagcccccagggaagggactggagtggattgggaatatctatcatagtggggccacctactacaacccgtccctcaagagtcgagtcaccatatcagtagacacgtccaagaaccaattctccctgaaggtgaggtctgtgaccgccgcagacacggccgtgtattattgtgcgagagaggggataattaccgtgattcggggagtcactttcgacccctggggcccgggcaccctggtcaccgtctcctcag

SEQ ID NO: 4891 - DNA, 358 bp, Homo sapiens
caggtgcagctggtgcagtctggggctgaggtgaagaagcctggggcctcagttaaggtctcctgcaagacttctggagactccttcaccgcctactttatccactgggtgcgacaggcccctggacaagggcttgagtggatgggatggatcagccctaacagtggcgccacaacctatgcacagaagtttcagggcagggtcaccatgaccagggacacgtccatcagcacagcctacatggacctgagcaggctgacatctggcgacacggccgtgtattactgtgcaagagagcatattagcaactggcacccccactcttggggccagggaaccctggtcaccgtctcctcag

SEQ ID NO: 4892 - DNA, 358 bp, Homo sapiens
caggtacagctggtgcagtctggggctgaggtacagaagcctggggcctcagttaaggtctcctgcaagacttctggagactcattcaccgcctactttatccactgggtgcgacaggcccctggacaagggcttgagtggatgggatggatcagccctaacagtggcgccacaacctatgcagagaagtttcagggcagggtcaccatgaccagggacacgtccatcagcacagtctacatggacctgagcaggctgacatctgacgacacggccgtctattactgtgcaagagaacatattagcaactggcacccccactcttggggccagggaaccctggtcaccgtctcctcag

SEQ ID NO: 4893 - DNA, 358 bp, Homo sapiens
caggtacagctggtgcagtctggggctgaggtacagaagcctggggcctcagttaaggtctcctgcaagacttctggagactccttcaccgcctactttatccactgggtgcgacaggcccctggacaagggcttgagtggatgggatggatcagccctaacagtggcgccacaacctatgcacagaagtttcagggcagggtcaccatgaccagggacacgtccatcagcacagtctacatggacctgagcaggctgacatctgacgacacggccgtctattactgtgcaagagagcatattagcaactggcacccccactcttggggccagggaaccctggtcaccgtctcctcag

SEQ ID NO: 4894 - DNA, 358 bp, Homo sapiens; identical to SEQ ID NO: 4893

SEQ ID NO: 4895 - DNA, 363 bp, Homo sapiens
caggtgcagctggtggagtctgggggaggcgtggtccagcctgggaggtccctgagactctcctgtgcagcctctggattcaccttcagtagctatggcatgcactgggtccgccaggctccaggcaaggggctggagtgggtggcacttatatcatatgatggaaataataaatactatgcagactccgtgaagggccgattcaccatctccagagacaattccaagaacacgctgtatctgcaaatgaacagcctgagagctgaggacacggctgtgtattactgtgcgaaagacagcctcggaaactactactacggtatggacgtctggggccaagggaccacggtcaccgtctcctca

SEQ ID NO: 4896 - DNA, 363 bp, Homo sapiens; identical to SEQ ID NO: 4895

SEQ ID NO: 4897 - DNA, 363 bp, Homo sapiens; identical to SEQ ID NO: 4895

SEQ ID NO: 4898 - DNA, 369 bp, Homo sapiens
caggtcaccttgagggagtctggtcctgcgctggtgaaacccacacagaccctcacactgacctgcaccttctctgggttctcactcagcactagtggaatgtgtgtgagttggatccgtcagcccccagggaaggccctggagtggcttgcacgcattgattgggatgatgatgaacacttcagcacatctctgaggaccaggctcaccatctccaaggacacctccaaaaaccaggtggtccttacaatgaccaacatggaccctgtggacacagccacgtattactgtgcacggaggatgtggggttcggggagggactacggtatggacgtctggggccaagggaccacggtcaccgtctcctca

SEQ ID NO: 4899 - DNA, 369 bp, Homo sapiens; identical to SEQ ID NO: 4898

SEQ ID NO: 4900 - DNA, 369 bp, Homo sapiens; identical to SEQ ID NO: 4898

SEQ ID NO: 4901 - DNA, 361 bp, Homo sapiens
caggtgcaactacagcagtggggcgcaggactgttgaagccttcggagaccctgtcccgcacctgcgctgtgtatggtgggtccttcagtggttactactggacctggatccgccagcccccagggaaggggctggagtggattgggcaaatcgatcacagtggaaccaccaactacaacccggccctcaagagtcgagtcaccatatcagtagacacgtccaagaaccagttctccctgaggctgacctctgtgaccgccgcggacacggctgtctattactgtgcgagaggcccgtattactttgacagtagcagtcatgactactggagccggggatccctggtcaccgtctcctcag

SEQ ID NO: 4902 - DNA, 361 bp, Homo sapiens; identical to SEQ ID NO: 4901

SEQ ID NO: 4903 - DNA, 369 bp, Homo sapiens
caggtgcagctggtggagtctgggggaggcttggtcaagcctggagggtccctgagactctcctgtgcagcctctggattcaccttcagtgactacttcatgacctggatccgccaggctccggggaaggggctggagtgggtttcatacattagtagtagtagtagttacacaaactccgcagactctgtggagggccgattcaccatctccagagacaacgccaagaactcactgtatctgcaaatgaacagcctgagagccgaggacacggctgtgtattactgtgcgagatgtggggttggaggtggtagctgctactacggtatggacgtctggggccaagggaccacggtcaccgtctcctca

SEQ ID NO: 4904 - DNA, 369 bp, Homo sapiens
caggtgcagctggtggagtctgggggaggcttggtcaagcctggagggtccctgagactctcctgtgcagcctctggattcaccttcagtgactactacatgagctggatccgccaggctccagggaaggggctggagtgggtttcatacattagtagtagtggtagttacacaagctacgcagactctgtggagggccgattcaccatctccagagacaaagccaagaattcactgtatctgcaaatgaacagcctgagagccgaggacacggctgtgtattactgtgcgagatgtggggttggcggtggtagctgctacaacggtatggacgtctggggccaagggaccacggtcaccgtctcctca

SEQ ID NO: 4905 - DNA, 367 bp, Homo sapiens
cagctgcagctgcaggagtccggctcaggactggtgaagccttcacagaccctgtccctcacgtgcggtgtctctggtgactccatcagcagtagtatttattcctggcactggctccggcagccaccaggggagggcctggagtggattgggtacatctatcagagtgggagcttctactataacccgtccctcaagagtcgagtcaccatttcactagtcgcgtccaagaaccagttctccctgaaactgacctctgtgaccgccgcggacacggccgtgtatttctgtgccaggggaccggtgccagctgccatcaactggctcgacccctggggccagggaaccctggtcaccgtctcctcag

SEQ ID NO: 4906 - DNA, 367 bp, Homo sapiens
cagctgcagctgcaggagtccggctcaggactggtgaagccttcacagaccctgtccctcacctgcggtgtctctggtgactccatcagcagtaatatttacgcctggaactggctccggcagccaccaggggagggcctggagtggattgggtacatctatgagagtgggagcacctactacaacccgtccctcaagagtcgagtcaccatttcactagtcgagtccaagaaccagttctccctgaagctgacctctgtgaccgccgcggacacggccgtgtattactgtgccaggggaccggtgccagctgccatcaactggctcgacccctggggccagggaaccctggtcaccgtctcctcag

SEQ ID NO: 4907 - DNA, 361 bp, Homo sapiens
gaggtgcagctgttggagtctgggggaggcttggtacagcctggggggtctctgagactctcctgtgcagcctctggattcacctttagcagctatgccatgagctgggtccgccagtctccagggaaggggctggagtgggtctcagctataagtggtagtggtggtaacacaaactacgccgactccgtgaagggccggttcaccatctccagagacaattccaagaaaacactgtctctgctaatgagcagcctgagagccgaggatacggccgtatattactgtgccatggggagtgggagctacttctacggggctaactactggggccagggaaccctggtcaccgtctcctcag

SEQ ID NO: 4908 - DNA, 361 bp, Homo sapiens; identical to SEQ ID NO: 4907

SEQ ID NO: 4909 - DNA, 385 bp, Homo sapiens
caggtgcagctggtggagtctgggggaggcgtggtccagcctgggaggtccctgagactctcctgtgcagcctctggattcaccttcagtagctatgtcatgcattgggtccgccaggctccaggcaaggggctggagtgggtggcagttatgtcaaatgatggatctaataaatactatgcggactccgtgaagggccgattcaccatctccagagacaattccaagaacacgctgtatatgcaaatgaacagcctgagaggtgaggacacggctgtctattactgtgtgaaagatcagcctcctggaccggggtataacagtggcttctacgggggggcctttgactactggggccacggaaccctggtcaccgtctcctcag

SEQ ID NO: 4910 - DNA, 385 bp, Homo sapiens
caggtgcaactggtggagtctgggggaggcgtggtccagcctgggaggtccctgagactctcctgtgcagcctctggattcaccttcagtagctatgtcatgcattgggtccgccaggctccaggcaaggggctggagtgggtggcagtcatgtcaaatgatggagctaataaataccatgcagactccgtgaagggccgattcaccatctccagagacaattccaagaacacgctgtatctgcaaatgaacagcctgagagctgaggacacggctgtctattactgtgtgaaagatcagcctcctggaccggggtataacagtggcttctacgggggggcctttgactcctggggccacggaaccctggtcaccgtctcctcag

SEQ ID NO: 4911 - DNA, 375 bp, Homo sapiens
caggtgcagctggtgcagtctggggctgaggtgaagaagcctgggtcctcggtgaaggtctcctgcaaggcttctggaggcaccttcagcagctatgctatcagctgggtgcgacaggcccctggacaagggcttgagtggatgggagggatcatccctatctatgttacaccaaactacgcacagaagttgcagggcagagtcacgattaccgcggacaaatccacgaccacagcctacatggagctgagcagcctgagatctgaggacacggccgtgtattactgtgcaagacgtggaatcagcttccagggatcatactcctactacggaatggacgtctggggccaagggaccacggtcaccgtctcctca

SEQ ID NO: 4912 - DNA, 375 bp, Homo sapiens; identical to SEQ ID NO: 4911

SEQ ID NO: 4913 - DNA, 379 bp, Homo sapiens
cagatcaccttgaaggagtctggccctacgctagtgcaacccacacagaccctcacgctgacctgcaccttctctggcttctcactcagcactgggacagtgggtgtgggctggatccgtcagcccccaggaaaggccctggagtggctagcaatcatttactgggatgatgataagcgctacagcccatctctgaggagcaggctcatcatctccaaggacacctccaagaaccaggtggtccttacaatgaccaacgtggaccctgtggacacagccacatattactgtgcacgcaatatgattacctatgggggacttatcgggctcgatgcttttgatatctggggccaagggacaatggtcaccgtctcttcag

SEQ ID NO: 4914 - DNA, 379 bp, Homo sapiens
cagatcaccttgaaggagtctggtcctacgctggtgcaacccacacagaccctcacactgacctgcaccttctctgggttctcactcagcactcgtacagtgggtgtgggctggatccgtcagcccccaggagaggccctggagtggctagcaatcatttactgggatgatgataggcgctacagcccatctctgaagagcagggtcaccatcaccaaggacacctccaagaaccaggtggtccttacaatgaccaacgtggaccctgtggacacagccacatattactgtgcacgcaatatgattacctatgggggacttatcgggctcgatgcttttgatatctggggccaagggacaatggtcaccgtctcttcag

SEQ ID NO: 4915 - DNA, 373 bp, Homo sapiens
caggtcaccttgaaggagtctggtcctgtgctggtgaaacccacagagaccctcacgctgacctgcaccgtctctgggttctcactcagcaatgctagaatgggtgtgagctggatccgtcagcccccagggaaggccctggagtggcttgcacacattttttcgaatgacgaaaaatcctacagcacatctctgaagagcaggctcaccatctccaaggacacctccaaaagccaggtggtccttaccatgaccaacatggaccctgtggacacagccacatattactgtgcacggatacggggcagcagctggtaccccggctggtacttcgatctctggggccgtggcaccctggtcactgtctcctcag

SEQ ID NO: 4916 - DNA, 367 bp, Homo sapiens
caggtgcagctgcaggagtcgggcccaggactggtgaagccttcggagaccctgtccctcacctgcactgtctctggtggctccatcagtagttactactggagctggatccggcagcccccagggaagggactggagtggattgggtatatctattacagtgggagcaccaactacaacccctccctcaagagtcgagtcaccatatcagtagacacgtccaagaaccagttctccctgaagctgagctctgtgaccgctgcggacacggccgtgtattactgtgcgagagaggctggttcggggagttattacggtaactggttcgacccctggggccagggaaccctggtcaccgtctcctcag

SEQ ID NO: 4917 - DNA, 370 bp, Homo sapiens
caggtgcagctggtgcagtctggggctgaggtgaagaagcctggggcctcagtgaaggtctcctgcaaggcttctggatacaccttcaccagttatgatatcaactgggtgcgacaggccactggacaagggcttgagtggatgggatggatgaaccctaacagtggtaacacaggctatgcacagaagttccagggcagagtcaccatgaccaggaacacctccataagcacagcctacatggagctgagcagcctgagatctgaggacacggccgtgtattactgtgcgagagcgcgaccgggtatagcaacccgtggtaacttggtcgacccctggggccagggaaccctggtcaccgtctcctcag

SEQ ID NO: 4918 - DNA, 368 bp, Homo sapiens
ggtgcagttggtggagtctgggggaggcttggtccagtcgggggggtccctgagactctcctgtgcagcctctggattcgcctttagtagtttttggatggcttgggtccgccaggctccagggaaggggctgcagtgggttgccagcatcaaggaagatggaagtgagacattctttgtggactctctgaagggtcgattcaccatttccagggacaacgtcaagaattcactctatctgcacttgaacagcctgagagtcgacgacacggccgtctattattgtgcgagagatcccggaaataatagagacgacttcccttcgtccttacactggggccagggaaccctggtcaccgtccgctcag

SEQ ID NO: 4919 - DNA, 366 bp, Homo sapiens
caggtgcagctgcaggagtcgggcccaggactggtgaagccttcggagaccctgtccctcacctgcactgtctctggtggctccatcagtagttactactggagctggatccggcagcccccagggaagggactggagtggattgggtatatctattacagtgggagcaccaactacaacccctccctcaagagtcgagtcaccatatcagtagacacgtccaagaaccagttctccctgaagctgagctctgtgaccgctgcggacacggccgtgtattactgtgcgagacgcgcactaatggtgcaggactactactacggtatggacgtctggggccaagggaccacggtcaccgtctcctca

SEQ ID NO: 4920 - DNA, 369 bp, Homo sapiens
gaggtgcagctggtggagtctgggggaggcttggtccagcctggggggtccctgagactctcctgtgcagcctctggattcacctttagtagctattggatgagctgggtccgccaggctccagggaaggggctggagtgggtggccaacataaagcaagatggaagtgagaaatactatgtggactctgtgaagggccgattcaccatctccagagacaacgccaagaactcactgtatctgcaaatgaacagcctgagagccgaggacacggccgtgtattactgtgcgagagatctccccctatggttctactactactacggtatggacgtctggggccaagggaccacggtcaccgtctcctca

SEQ ID NO: 4921 - DNA, 369 bp, Homo sapiens
caggtgcagctggtggagtctgggggaggcgtggtccagcctgggaggtccctgagactctcctgtgcagcctctggattcaccttcagtagctatggcatgcactgggtccgccaggctccaggcaaggggctggagtgggtggcagttatatcatatgatggaagtaataaatactatgcagactccgtgaagggccgattcaccatctccagagacaattccaagaacacgctgtatctgcaaatgaacagcctgagagctgaggacacggctgtgtattactgtgcgaaagatagggataactggaactacggtcgggggggtatggacgtctggggccaagggaccacggtcaccgtctcctca

SEQ ID NO: 4922 - DNA, 372 bp, Homo sapiens
caggtgcagctgcaggagtcgggcccaggactggtgaagccttcacagaccctgtccctcacctgcactgtctctggtggctccatcagcagtggtggttactactggagctggatccgccagcacccagggaagggcctggagtggattgggtacatctattacagtgggagcacctactacaacccgtccctcaagagtcgagttaccatatcagtagacacgtctaagaaccagttctccctgaagctgagctctgtgactgccgcggacacggccgtgtattactgtgcgagagatatgagatggcagcgccaggggtactacggtatggacgtctggggccaagggaccacggtcaccgtctcctca

SEQ ID NO: 4923 - DNA, 370 bp, Homo sapiens
caggtgcagctggtgcagtctgggactgaggtgaagaagcctggggcctcagtgagggtctcctgcaaggcttctggatacaccttcaccggctactatatacactgggtgcgacaggcccctggacaagggcttgagtggatgggatggatcaaccctaacagcggtgtcacaaactctgcacagaagtttcagggcagggccaccatgaccagggacacgtccatcagcacagcctacatggagctgagcaggctgagatctgacgacacggccgtgttttactgtgcgagagagcccggctactatggctcggggagttacttatttgactactggggccagggaaccctggtcaccgtctcctcag

SEQ ID NO: 4924 - DNA, 370 bp, Homo sapiens
caggtgcagctggtggagtctgggggaggcgtggtccagcctgggaggtccctgagactctcctgtgcagcctctgggctcaccttcagtagctatggcatgcactgggtccgccaggctccaggcaaggggctggagtgggtggcagttatatcatttgatggagataataaatactttgcagactccgtgaagggccgattcaccatctccagagacaattccaagaacacgctgtatttgcaaatgaacaacctgagacctgaggacacggctatatattactgtgcgaaacaagggttcggatatggcagcaggtcgttctactttgactactggggccagggaaccctggtcaccgtctcctcag

SEQ ID NO: 4925 - DNA, 370 bp, Homo sapiens
gaggtacagctgttggagtctgggggaggcttggtacagcctggggggtccctgagactctcctgtgcagtctctggattcacctttagcagctatgccatgagctgggtccgccaggctccagggaaggggctggagtgggtctcagctattagtggtggtggtagtagcacatactacgcagactccgtgaagggccggttcaccatctccagagacaattccaagagcacgctgtatctgcaaatgaacagcctgagagccgacgacacggccgtatattactgtgcggccggagctatggttcggggagttataaggggcggctctgactactggggccagggaaccctggtcaccgtctcctcag

SEQ ID NO: 4926 - DNA, 373 bp, Homo sapiens
caggtgcagctgcaggagtcgggcccaggactggtgaagccttcacagaccctgtccctcacctgcactgtctctggtggctccatcagcagtggtggttactactggagctggatccgccagcacccagggaagggcctggagtggattgggtacatctattacagtgggagcacctactacaacccgtccctcaagagtcgagttaccatatcagtagacacgtctaagaaccagttctccctgaagctgagctctgtgactgccgcggacacggccgtgtattactgtgcgagacttggccctactatgatagtagtgatagatgcttttgatatctggggccaagggacaatggtcaccgtctcttcag

SEQ ID NO: 4927 - DNA, 373 bp, Homo sapiens
caggtgcagctgcaggagtcgggcccaggactggtgaagccttcacagaccctgtccctcacctgcactgtctctggtggctccatcagcagtggtggttactactggagctggatccgccagcacccagggaagggcctggagtggattgggtacatctattacagtgggagcacctactacaacccgtccctcaagagtcgagttaccatatcagtagacacgtctaagaaccagttctccctgaagctgagctctgtgactgccgcggacacggccgtgtattactgtgcgagggcccccctgtattactatggttcggggagtgcttgggactactggggccagggaaccctggtcaccgtctcctcag

SEQ ID NO: 4928 - DNA, 364 bp, Homo sapiens
caggtgcagctggtgcagtctggggctgaggtgaagaagcctggggcctcagtgaaggtctcctgcaaggcttctggatacaccttcaccggctactatatgcactgggtgcgacaggcccctggacaagggcttgagtggatgggatggatcaaccctaacagtggtggcacaaactatgcacagaagtttcagggcagggtcaccatgaccagggacacgtccatcagcacagcctacatggagctgagcaggctgagatctgacgacacggccgtgtattactgtgcgagagagtcgaatggatacagctatggttccaaggactactggggccagggaaccctggtcaccgtctcctcag

SEQ ID NO: 4929 - DNA, 364 bp, Homo sapiens
caggtgcagctggtggagtctgggggaggcttggtcaagcctggagggtccctgagactctcctgtgcagcctctggattcaccttcagtgactactacatgagctggatccgccaggctccagggaaggggctggagtgggtttcatacattagtagtagtagtagttacacaaactacgcagactctgtgaagggccgattcaccatctccagagacaacgccaagaactcactgtatctgcaaatgaacagcctgagagccgaggacacggctgtgtattactgtgcgagaaattacgatattttgactggttatgccttagggtactggggccagggaaccctggtcaccgtctcctcag

SEQ ID NO: 4930 - DNA, 370 bp, Homo sapiens
caggtgcagctgcaggagtcgggcccaggactggtgaagccttcggagaccctgtccctcacctgcgctgtctctggctactccatcagcagtgattattattggggctggatccggcagcccccagggagggggctggagtggattgggaatatctatcgtgatgggagcacctactacagtccgtccctcgagagtcgagtcaccatatcactagacacgtccgaaaaccagttctccctgaaactgagctctgtgaccgccgcagacacggccgtctattactgtgcgagagagggggtgattactttcgttcggggagttacattcgacccctggggccagggaaccctggtcaccgtctcctcag

SEQ ID NO: 4931 - DNA, 362 bp, Homo sapiens
caggtccagctggtacagtctggggctgaggtgaagaagcctggggcctcagtgaaggtctcctgcaaggtttccggatacaccctcattgaattatccatgcactgggtgcgacagactcctggaaaagggcttgagtggatgggaggttttgatcctgaagatggtgaaacaatctacgcacagacattccagggcagagtcaccatgaccgaggacacatctacagacacagcctacatggagctgggcagcctgagatctgacgacacggccgtgtattactgtgcagtagctccagctttactgcgtactggatggttcgacccctggggccagggaaccctggtcaccgtctcctc

SEQ ID NO: 4932 - DNA, 361 bp, Homo sapiens
caggtgcagctgcaggagtcgggcccaggactggtgaagccttcggagaccctgtccctcacctgcactgtctctggtggctccatcagtaattactactggagttgcatccggcagcccccagggaagggactggagtggattgggtatatctattacagtgggagcaccaactacaacccctccctcaagagtcgagtcaccatgtcagtagacacgtccaagaaccagttctccctgaagctgagctctgtgaccgctgcggacacggccgtgtattactgtgcgaggggggtgataccagctgctagggtgcggttcgacccctggggccagggaaccctggtcaccgtctcctcag

SEQ ID NO: 4933 - DNA, 364 bp, Homo sapiens
gaggtgcagctggtggagtctgggggagggttggtccagcctggggggtccctgagactctcctgtgcagcctctggattcaccttcagtagttatggtatgcactgggtccgccaggctccagggaagggactggaatatgtttcagctataagtagtaatgggggcagcacatattatggaaactctgtgaagggcagattcaccatctccagagacaattccaagaacacgctgtatcttcaaatgggcagcctgagagctgaggacatggctgtctattactgtgcgaggacgggtacgggtatagcagcagctgacttcgactactggggccagggaaccctggtcaccgtctcctcag

SEQ ID NO: 4934 - DNA, 370 bp, Homo sapiens
caggtgcagctgcaggagtcgggcccaggactggtgaagccttcggggaccctgtccctcacctgcggtgtctctggtgactccatcagcagtaataactggtggagttgggtccgccagcccccagggaaggggctggagtggattggggaaatctatcatagtgggagcaccaactacaacccgtccctcaagagtcgagtcaccatatcagtagacaagtccaagaaccagttctccctgaagctgaactctgtgaccgccgcggacacggccgtgtattactgtgcgagacttccctccgataggctggattcgcagagttattatactttctggggccagggaaccctggtcaccgtctcctcag

SEQ ID NO: 4935 - DNA, 370 bp, Homo sapiens
caggtgcagctgcaggagtcgggcccaggactggtgaagccttcggggaccctgtccctcacctgcgctgtctctggtgtctccatcagcagtagtaactggtggagttgggtccgccagcccccagggaaggggctggagtggattggggaaatccatcatagtgggagcaccaagtacaacccgtccctcgagagtcgggtcaccatatcagtagacaagtccaagaaccagttctccctgaaggtgagctctgtgaccgccgcggacacggccctgtattactgtgcgagagataagatcttgggcagcagcagctggtactattttgactactggggccagggaaccctggtcaccgtctcctcag

SEQ ID NO: 4936 - DNA, 360 bp, Homo sapiens
cagccgcggctagtggagtctgggggaggcgtggtccagcctgggaggtccctgagactctcctgtggagcgtctggattcaacttcagaacacatgacgcgtactgggtccgccaggctccagccaagggcctggagtgggtggcaatgatttcttctgatgcaagcagtgagaggtatgcagactccgtgaatggccgcttcaccatctccagagacaatcccaggacaactttgtttctccaaatgaacagcctgacagtcgaggacgcggcgatttattattgtgccagagaatcgaagtctctgagaggaacctatatggatgtctggggccaggggaccacggtcaccgtctcc

SEQ ID NO: 4937 - DNA, 361 bp, Homo sapiens
caggtgcagctacagcagtggggcgcaggactgttgaagccttcggagaccctgtccctcacctgcgctgtctatggtgggtccttcagtggttactactggagctggatccgccagccgccaggaaaggggctggagtggattggggaaatcagtcatagtggaagcaccagctacaacccgtccctcaagagtcgagtcaccatatcaggagacacgtccaagaaccagttctccctgaaactgagctctgtgaccgccgcggacacggctgtgtattactgtgcgagagatccggtggtaggtgcgaacaactggttcgacccctggggccagggaaccctggtcaccgtctcctcag

SEQ ID NO: 4938 - DNA, 364 bp, Homo sapiens
caggtgcagctggtggagtctgggggaggcgtggtccagcctgggaggtccctgagactctcctgtgcaccttctggattcaccttcagtacctatggcatgcactgggtccgccaggctcctggcaaggggctggagtgggtggcagttatctggcatgatggaagtaacagatactatgcagactccgtgaagggccgattcaccatttccagagacaattccaagaacacgctgtacttgcaaatgagtagcctgagagccgaggacacggctctatattactgtgcgagaggaaggactccctacggtggtaactcagttgactactggggccagggaaccctggtcaccgtctcctcag

SEQ ID NO: 4939 - DNA, 364 bp, Homo sapiens
caggtgcagctggtggagtctgggggaggcgtggtccagcctgggaggtccctgagactctcctgtgcagcgtctggattcaccttcagtagctatggcatgcactgggtccgccaggctccaggcaaggggctggagtgggtggcacttatatggtatgatggaagtaataagtattatgcagactccgtgaagggccgattcaccatctccagagacaattccaagaacacgctgtatctgcaaatgaacggcctgagagccgaggacacggctgtgtattactgtgcgagagagggtatagtgggagatataactgcgcttgactactggggccagggaaccctggtcaccgtttcctcag

SEQ ID NO: 4940 - DNA, 364 bp, Homo sapiens
gaggtgcagctggtggagtccgggggaggcttagttcagcctggggggtccctgagactctcctgtgcagcctctggattcaccttcagtagctactggatgcactgggtccgccaagctccagggaaggggctggtgtgggtctcacgtattaatagtgatgggagtagcacaagctacgcggactccgtgaagggccgattcaccatctccagagacaacgccaagaacacgctgtatctgcaaatgaacagtctgagagccgaggacacggctgtgtattactgtgcaagagatggggtagagatggctacaattgctttcgatctctggggccgtggcaccctggtcactgtctcctcag

SEQ ID NO: 4941 - DNA, 366 bp, Homo sapiens
cagctgcagctgcaggagtccggctcaggactggtgaagccttcacagaccctgtccctcacctgcgctgtctctggtggctccatcagcagtggtggttactcctggagctggatccggcagccaccagggaagggcctggagtggattgggtacatctatcatagtgggagcacctactacaacccgtccctcaagagtcgagtcaccatatcagtagacaggtccaagaaccagttctccctgaagctgagctctgtgaccgccgcggacacggccgtgtattactgtgccagagcagttggtaactactactactacggtatggacgtctggggccaagggaccacggtcaccgtctcctca

SEQ ID NO: 4942 - DNA, 364 bp, Homo sapiens
gaggtgcagctgttggagtctgggggaggcttggtacagcctggggggtccctgagactctcctgtgcagcctctggattcacctttgccaattatggcatgaattgggtccgccaggctccagggaaggggctggagtgggtctcagccattagtggtagaggtgatagaacatactacgcagactccgtgaagggccggttcaccatctccagagacgattccaagaacacgctgtctctgcaaatgaatagcctgagaggcgaggacacggccgtatattactgtgcgagagttagatactatgatagtagtggacacagtgactactggggccagggaaccctggtcaccgtctcctcag

SEQ ID NO: 4943 - DNA, 364 bp, Homo sapiens
gaggtgcagctgttggagtctgggggaggcttggtacagcctggggggtccctgagagtctcctgtgcagcctctggaatcacccttagaaactatgccatgacctgggtccgccaggctccagggaaggggctggagtgggtctcaactattagtggtagtggtggtagcatatactatgcagactccgtgaagggccggttcaccatctccagagacaattccaagaatatggtgtatctgcaaatgaacagcctgagagccgaggacacggccgtatattactgtacgacgcaccggcgtgactacggtgactaccttggggactattggggccagggaaccctggtcaccgtctcctcag

SEQ ID NO: 4944 - DNA, 364 bp, Homo sapiens
gaggtgcagttgttggagtctgggggaggcttggtacagcctggggggtccctgagactctcctgtgcagcctctggattcagttttagcagctatgccatgagctgggtccgccaggctccagggaaggggctggagtgggtctcacttattagtactagtgctgttaatacatactacgtagactccgtgaagggccggttcaccatctccagagacaattccaagaacacgctgtatctgcaaatgaccagcctgagagccgaggacacggccgtctattactgtgcgaaagggacgccgggcgttgtggtggcaggatttgactactggggccagggaaccctggtcaccgtctcctcag

SEQ ID NO: 4945 - DNA, 364 bp, Homo sapiens
gaggtgcagctggtggagtctgggggaggcttggtacagcctggggggtccctgagactctcctgtgcagcctctggattcaccttcagtagctatagcatgaactgggtccgccaggctccagggaaggggctggagtgggtttcatacattagtagtagtagtagtaccatatactacgcagactctgtgaagggccgattcaccatctccagagacaatgccaagaactcactgtatctgcaaatgaacagcctgagagccgaggacacggctgtgtattactgtgcgagagaagggcagctatggtcccactggtacttcgatctctggggccgtggcaccctggtcactgtctcctcag

SEQ ID NO: 4946 - DNA, 363 bp, Homo sapiens
caggtgcagctggtggagtctgggggaggcgtggtccagcctgggaggtccctgagactctcctgtgcagcctctggattcatcttcagtacctatgctatgcactgggtccgccaggctccaggcaaggggctggagtgggtggcacttatatcatatgatggaattaataaatactacgcagacttcgtgaagggccgattcaccatctccagagacaattccaagaacacgctgtatctgcaaatgaacagcctgagagttgaggatacggctgtgtattactgtgcgagagctcggggaggctcatacttctacggtatggacgtctggggccaagggaccacggtcaccgtctcctca

SEQ ID NO: 4947 - DNA, 364 bp, Homo sapiens
caggtgcagctattggagtctgggggaggcgtggtccagcctgggaggtccctgagactctcctgtgcagcgtctggattcaccttcagtacctatggcatgcactgggtccgccaggctccaggcaaggggctggagtgggtggcagttatatcatatgatggaagtaataaatattatgcagagtccgtgaaggaccgattcaccatctccagagacaattccaagaaaacgctgtatctgcaaatgaacagcctgagagctgaggactcggctgtgtattactgtgcgaaagactggggtggtgactgctgccatacctttgactactggggccagggaaccctggtcaccgtctcctcag

SEQ ID NO: 4948 - DNA, 364 bp, Homo sapiens
caggtgcagttggtggagtctgggggaggcgtggtccagcctgggaggtccctgagactctcctgtgcagcctctggattcaccttcagtagctatgctatgtactgggtccgccaggctccaggcaaggggctggagtgggtggcagttatatcatatgatggaagtaataaatactatgcagactccgtgaagggccgatgcaccatctccagagacaattccaagaatacgctgtatgtgcaaatgaacagcctgagagctgaggacacggctgtgtattactgtgcgagagtttattcggggagttactttggcccctttgactactggggccagggaaccctggtcaccgtctcctcag

SEQ ID NO: 4949 - DNA, 364 bp, Homo sapiens
caggtgcagctggtggagtctgggggaggcgtggtccagcctgggaggtccctgagactctcctgtgcagcctctggattcaccttcagtacctatgctatgcactgggtccgccaggctccaggcaaggggctggagtgggtggcagttatatcatatgatggaagtaataaatactacgcagactccgtgaagggccgattcaccatctccagagacaattccaagaactcgctgtatctgcaaatgaacagcctgagagctgaggacacggctgtgtattactgtgcgagagatccctcccttatagcagtggccccctttgactactggggccagggaaccctggtcaccgtctcctcag

SEQ ID NO: 4950 - DNA, 361 bp, Homo sapiens
caggtgcagctgcaggagtcgggcccaggactggtgaagccttcggagaccctgtccctcacctgcactgtctctggtggctccatcagtagttactactggagctggatccggcagcccccagggaagggactggagtggattgggtatatctattacagtgggagcaccaactacaacccctccctcaagagtcgagtcaccatatcagtagacacgtccaagaaccagttctccctgaagctgagctctgtgaccgctgcggacacggccgtgtattactgtgcgaaaagatggggttcggggccttttgatgcttttgatatctggggccaagggacaatggtcaccgtctcttcag

SEQ ID NO: 4951 - DNA, 367 bp, Homo sapiens
caggtgcagctgcaggagtcgggcccaggactggtgaagccttcacagaccctgtctctcacctgcactgtctctggtggctccgtcagcagtggtggttactactggagctggatccgccagcacccagggaagggcctggagtggattgggttcatctataacagtgggggcacctactacaacccgtccctcaagagtcgagttaacatatcagtagacacgtctgagaaccagttctccctgaagctgagctctgtgactgccgcggacacggccgtgtattactgtgcgagccacagctatggataccccctaggggcttttgatatctggggccaagggacaatggtcaccgtctcttcag

SEQ ID NO: 4952 - DNA, 360 bp, Homo sapiens
caagtgcagctgcaggagtcgggcccaggactggtgaagtcttcggggaccctgtccctcacctgcgctgtctctggtggctccatcagcagtagtaactggtggagttgggtccgccagcccccagggaaggggctggagtggattggggaaatctatcatagtgggagcaccaactacaacccgcccctcaagagtcgaggcaccatatcagtagacaagtccaagaaccagttctccctgaacctgaactctgtgaccgccgcggacacggccgtttattactgtgcgagaagggagcagcagacatactacggaatggacgtctggggccaagggaccacggtcaccgtctcctca

SEQ ID NO: 4953 - DNA, 361 bp, Homo sapiens
gaggtgcagctggtggagtctgggggaggcttggtccagcctggggggtccctgagactctcctgtgcagcctctggattcacgtttactatctatttgatgagctgggtccgccaggctccagggaaggggctagagtgggtggccaacataaagcaagatggaagtgagaaatactatgtggactctgtgaagggccgattcaccatctccagagacaacgccaagaactcactggatctgcaaataaacagcctgagagccgaggacacggctgtgtattactgtgcgagagatagcatagcagtggctgggggctttgactactggggccagggaaccctggtcaccgtcgcctcag

SEQ ID NO: 4954 - DNA, 364 bp, Homo sapiens
caggtgcagctgcaggagtcgggcccaggactggtgaagccttcacagaccctgtccctcacctgcactgtctctggtggctccatcagcagtggtgattactactggagttggatccgccagcccccagggaagggcctggagtggattgggtacatctattacagtgggagcacctactacaacccgtccctcaagagtcgagttaccatatcagtagacacgtccaagaaccagttctccctgaagctgagctctgtgactgccgcagacacggccgtgtattactgtgccaggtcgtatggttcggggagttatccctttgactactggggccagggaaccctggtcaccgtctcctcag

SEQ ID NO: 4955 - DNA, 361 bp, Homo sapiens
gaggtgcagctggtgcagtctggagcagaggtgaaaaagcccggggagtctctgaagatctcctgtaagggttctggatacagctttaccagctactggatcggctgggtgcgccagatgcccgggaaaggcctggagtggatggggatcatctatcctggtgactctgataccagatacagcccgtccttccaaggccaggtcaccatctcagccgacaagtccatcagcaccgcctacctgcagtggagcagcctgaaggcctcggacaccgccatgtattactgtgcgaggggtaatgagtggctacgatttccccctgactactggggccagggaaccctggtcaccgtctcctcag

SEQ ID NO: 4956 - DNA, 361 bp, Homo sapiens
gaggtgcagctggtgcagtctggagcagaggtgaaaaagcccggggagtctctgaagatctcctgtaagggttctggatacagctttaccagctactggatcggctgggtgcgccagatgcccgggaaaggcctggagtggatggggatcatctatcctggtgactctgataccagatacagcccgtccttccaaggccaggtcaccatctcagccgacaagtccatcagcaccgcctacctgcagtggagcagcctgaaggcctcggacaccgccatgtattactgtgcgagacatcctcgatcctgggactactactttgactactggggccagggaaccctggtcaccgtctcctcag

SEQ ID NO: 4957 - DNA, 367 bp, Homo sapiens
caggtgcagctggtgcagtctggggctgaggtgaagaagcctggggccgcagtgaaggtctcctgccaggcttctggatacaccttcaccggcttctatatgcactgggtgcgacaggcccctggacaagggcttgagtggatgggatggatcaaccctaacagtggtgtcacaaactatgcacagaagtttcagggcagggtcaccatgaccagggacacgtccatcagcacagcctacatggagctgagcaggctgagatctgacgacacggccgtgtattactgtgcgagagagggcgatattgtagtaggtttcttctcatgggactactggggccagggaaccctggtcaccgtctcctcag

SEQ ID NO: 4958 - DNA, 367 bp, Homo sapiens
gaggtgcagctggtggagtctgggggaggcttggtacagccagggcggtccctgagactctcctgtacttcttatggattcacctttggtgattatgctatgagctgggtccgccaggctccagggaaggggctggagtgggtaggtctcattagaagcaaagcttttggtgggacaacagaatacgccgcgtctgtgaaaggcagtttcaccatctcaagagatgattccaaaaacatcgcctatctggaaatggacagcctgaaaaccgaggacacagccgtgtattactgtgctagagatgatagtccagtcgaccgatactttgactactggggccagggaaccctggtcaccgtctcctcag

SEQ ID NO: 4959 - DNA, 370 bp, Homo sapiens
caggtgcagctgcaggagtcgggcccaggactggtgaagccttcggagaccctgtccctcacctgcactgtctctggtggctccatcagcagtagtacttactactgggcctgggtccgccagcccccagggaaggggctggagtggattgggagtatctattatagtgggaccacctactacacatcgtccctcaagagtcgactcaccatatctatagacacgtccaagaaccacttctccctgaacctgagctctgtgaccgccgcagacgcggctgtgtattactgtgcgagactggtatattgtgatacttccagctgcgtttttgactactggggccagggaaccctggtcaccgtctcctcag

SEQ ID NO: 4960 - DNA, 370 bp, Homo sapiens
cagctgctactgcaggagtcgggcccaggactggtgaagccttcggagaccctgtccctcacctgcactgtctctgatggctccatcagcagtagtgcttactcttggggctggatccgccagcccccagggaaggggctggagtgggttgggagtttcttttctagtgggagcacccactacaacccctccctcaagagtcgactcaccgtatccaaagacacgtccaagaaccaattctccctgaagctgacctctgtgaccgccgcagacacggctgtgtattactgtgcgagacgcccgacgaacggaggaggttacggaggtcttgactactggggccagggaaccctggtcaccgtctcctcag

SEQ ID NO: 4961 - DNA, 361 bp, Homo sapiens
gaggtacagctgttggagtctgggggagacttggtacggcctggggagtccctgagactctcctgtgcagcctccggattcgcctttagtacctatgccatgatttgggtccgccaggctccagggaaggggctggagtgggtctcaagtattagtggtagtggtggtaacacatactacgcagactccgtgaagggccggttcaccatctccagagacaattccgacaatatgttgtatttgcaaatgaacagcctgagagccgacgacacggccctatattactgtacgaaaggcttcctacggcccaccggggggttcgacccctggggccagggaaccctggtcaccgtctcctcag

SEQ ID NO: 4962 - DNA, 361 bp, Homo sapiens
gaggtgcagttgttggagtctgggggaggcttggtacagcctggggggtccctgagactctcctgtgcaggcgctggatacccctttagcacctatgccatgagctgggtccgccaggccccagggaaggggctggagtggatttcagatattagtggtagtggaggtagcacaaattacgcagactccgtgaagggccggttcaccatctccagagacaattccaagaacacactgtatttgcaaatgaacagcctgagagccgaggacacggccgtatattactgtacgaaagcctacctacggcccattggggggttcgacccctggggccagggaaccctggtcaccgtctcctcag

SEQ ID NO: 4963 - DNA, 361 bp, Homo sapiens
gaggtgcagctgttggagtctgggggaggcttggtacagcctggggggtccctgagactctcctgtgcagcctctggattcatctttagtagatatgccatgagctgggtccgccaggctccagggaagggactggagtgggtctcagccattagtggtagtggtggtagcacatactacgcagactccgtgaagggccggttcaccatctccagagacaattccaagataacactgtatctgcaaatgaacagcctgcgagccgaggacacggccgtatattactgtgcgaagggttcccggtataactgggactactttgaccactggggccagggaaccctggtcaccgtctcctcag

SEQ ID NO: 4964 - DNA, 366 bp, Homo sapiens
gaggtgcagctggtggagtctgggggaggcctggtcaagcctggggggtccctgagactctcctgtgcagcctctggattcaccttcagtagctatagcatgaactgggtccgccaggctccagggaaggggctggagtgggtctcatccattagtagtagtagtagttacatatactacgcagactcagtgaagggccgattcaccatctccagagacaacgccaagaactcactgtatctgcaaatgaacagcctgagagccgaggacacggctgtgtattactgtgcgagagatataaggggttcggggaggcccggatgtatggacgtctggggccaagggaccacggtcaccgtctcctca

SEQ ID NO: 4965 - DNA, 369 bp, Homo sapiens
gaggtgcagctggtggagtctgggggaggcctggtcaagccgggggggtccctgagactctcctgtgaagcctctggattcaccatcagtacctataccatgaattgggtccgccaggctccagggaaggggctggagtggctctcagccattagtcctagtagtagtagttacatatactacgcggactcagtgaagggccgattcaccatctccagagacaacgccaagaactcactgtatctgcgaatgaacagcctgacagccgaggacacggctgtgtattactgtgcgagagatttatttggccgtatcctcccaaacgggatggacgtctggggccaagggaccacggtcaccgtctcctca

SEQ ID NO: 4966 - DNA, 361 bp, Homo sapiens
cagttccagctggtggagtctgggggaggcgtggtccagcctgggaggtccctgagactctcctgtgcagcctctggattcaccttcagtagctatggcatgcactgggtccgccaggctccgggcaaggggctggagtgggtggcagttatatcatatgatggaagttataaagactatgcagactccgtgaagggccgattcaccatctccagagacaattccaagaacacgctgtatctgcaaatgaacagtctgagagctgaggacacggctgtgtattactgtgcgaaagatgacggtgactacgtcacctggttcgacccctggggccagggaaccctggtcaccgtctcctcag

SEQ ID NO: 4967 - DNA, 357 bp, Homo sapiens
gaggtgcagctggtggagtctgggggaggcctggtccagcctggggggtccctgagactctcctgtgcagcctctggattcaccgtcagtagcaaatacatgagctgggtccgccaggctccagggaagagcctggagtgggtctcagttattcagagcggtggcactacatactacgcagactccgtgaagggcagatccaccgtctccagagacaattccaagaacatgctgtggcttcaaatcaacagtctgagagccgaggacacggctgtgtattactgtgcgagctccccgcgctactactactacgctatagacgtctggggccaagggaccacggtcaccgtctcctca

SEQ ID NO: 4968 - DNA, 357 bp, Homo sapiens
gaggtgcagctggtggagtctgggggaggcttggtccagcctggggggtccctgagactctcctgtgcagcctctggattcaccgtcagtagcaactacatgagctgggtccgccaggctccagggaaggggctggagtgggtctcagttatttatagcggtggtagcacatactacgcagactccgtgaagggcagattcaccatctccagagacaattccaagaacacgctgtatcttcaaatgaacagcctgagagccgaggacacggctgtgtattactgtgcgagaggtactaattactatgatagtagtggtccagtctggggccaagggaccacggtcaccgtctcctca

SEQ ID NO: 4969 - DNA, 361 bp, Homo sapiens
gaagtgcagctggtgcagtccggagcagaagtgaaaaagcccggggagtctctgaggatctcctgtaagggttctggatacagctttaccagctactggatcagctgggtgcgccagatgcccgggaaaggcctggagtggatggggacgattgatcctagtgactcttataccaactacagcccgtccttccaaggccacgtcaccatctcagctgacaagtccatcagcactgcctacctgcagtggagcagcctgaaggcctcggacaccgccatgtattactgtgcgaggtcccccggtattactagcaactggttcgacccctggggccagggaaccctggtcaccgtctcctcag

SEQ ID NO: 4970 - DNA, 361 bp, Homo sapiens
caggtgcagctgcaggagtcgggcccaggactggtgaagccttcggggaccctgtccctcacctgcgctgtctctggtggctccatcagcagtagtaactggtggagttgggtccgccagcccccagggaaggggctggagtggattggggaaatctatcatagtgggagcaccaactacaacccgtccctcaagagtcgagtcaccatatcagtagacaagtccaagaaccagttctccctgaagctgagctctgtgaccgccgcggacacggccgtgtattactgtgcgacccggagggcagagtggctggttgggtttgactactggggccagggaaccctggtcaccgtctcctcag

SEQ ID NO: 4971 - DNA, 361 bp, Homo sapiens
caggtgcagctgcaggagtcgggcccaggactggtgaagccttcggggaccctgtccctcacctgcgctgtctctggtggctccatcagcagtagtaactggtggagttgggtccgccagcccccagggaaggggctggagtggattggggaaatctatcatagtgggagcaccaactacaacccgtccctcaagagtcgagtcaccatatcagtagacaagtccaagaaccagttctccctgaagctgagctctgtgaccgccgcggacacggccgtgtattactgtgcgaggtgggggtatagcagtggctggtacgctgactactggggccagggaaccctggtcaccgtctcctcag

SEQ ID NO: 4972 - DNA, 367 bp, Homo sapiens
caggtgcagctggtgcagtctggggctgaggtgaagaagcctggggcctcagtgaaggtctcctgcaaggcttctggatacaccttcaccggctactatatgcactgggtgcgacaggcccctggacaagggcttgagtggatgggatggatcaaccctaacagtggtggcacaaactatgcacagaagtttcagggcagggtcaccatgaccagggacacgtccatcagcacagcctacatggagctgagcaggctgagatctgacgacacggccgtgtattactgtgcgggcgagggggcccagtaccagctctacaactggttcgacccctggggccagggaaccctggtcaccgtctcctcag

SEQ ID NO: 4973 - DNA, 364 bp, Homo sapiens
caggtgcagctacagcagtggggcgcaggactgttgaagccttcggagaccctgtccctcacctgcgctgtctatggtgggtccttcagtggttactactggagctggatccgccagcccccagggaaggggctggagtggattggggaaatcaatcatagtggaagcaccaactacaacccgtccctcaagagtcgagtcaccatatcagtagacacgtccaagaaccagttctccctgaagctgagctctgtgaccgccgcggacacggctgtgtattactgtgcgagaggcttaggatatagcagtggcccgcgctggttcgacccctggggccagggaaccctggtcaccgtctcctcag

SEQ ID NO: 4974 - DNA, 364 bp, Homo sapiens
caggtgcagctgcaggagtcgggcccaggactggtgaagccttcggagaccctgtccctcacctgcactgtctctggtggctccatcagtagttactactggagctggatccggcagcccgccgggaagggactggagtggattgggcgtatctataccagtgggagcaccaactacaacccctccctcaagagtcgagtcaccatgtcagtagacacgtccaagaaccagttctccctgaagctgagctctgtgaccgccgcggacacggccgtgtattactgtgcgagagatcgtgagagatggctaccatctcgtgcttttgatatctggggccaagggacaatggtcaccgtctcttcag

SEQ ID NO: 4975 - DNA, 361 bp, Homo sapiens
caggtgcggctggtggagtctgggggaggcgtggtgcagcctggggggtccctgagactctcctgtacagcgtcaggattcagcttcatttcgtatggcatgcactgggtccgccaggccccaggcaaggggctggagtgggtggcagttatatggtatgatggaagtaatgaaaattatgcagactccgtgcagggccgattcaccatctccagggacaattccaagagcacactgtatttgcaaatgagtagcctgagagccgaggacacgggtgtgtattattgtgcgagatatgcctcatggtttggacagttaccagagatttggggccagggaaccctggtcaccgtctcctcag

SEQ ID NO: 4976 - DNA, 367 bp, Homo sapiens
gaggtgcagctgttggagtctgggggaggcttggtacagcctggggggtccctgagactctcctgtgcagcctctggattcacctttagcagctatgccatgagctgggtccgccaggctccagggaaggggctggagtgggtctcagctattagtggtagtggtggtagcacatactacgcagactccgtgaagggccggttcaccatctccagagacaattccaagaacacgctgtatctgcaaatgaacagcctgagagccgaggacacggccgtatattactgtgcgaaaattcggggcagcagctggtattatgatgcttttgatatctggggccaagggacaatggtcaccgtctcttcag

SEQ ID NO: 4977 - DNA, 367 bp, Homo sapiens
gaggtgcagttggtagagtctgggggaggcttggtacagcctggagggtccctgagactctcctgtgcagcctctggattcaccttcagcaattatgaaatgatctgggtccgccaggctccagggaaggggctggagtgggttgcttattttggtaatagtgggactgacgtatactatgcagactctgtgaagggccgattcaccatctccagagacaactccgagaagtcactgtatctgcaaatgaacagcctgagagccgacgacacggctgtttattactgtgcgagagataaggtggtagtaggtgaaactgatgcttttgatatctggggccaagggacaatggtcaccgtctcttcag

SEQ ID NO: 4978 - DNA, 367 bp, Homo sapiens
gaggagcagttggtggagtctgggggaaccttggtccagcctggggggtccctgagagtctcctgtgcagcctctggattcgcctttggaacctattggatgacctgggtccgccaggctccagggcaggggctggagtgggtggccaacataaaggaagatggaagtgagaaatactatgtggagtctgtgaagggccgattcaccatctccagagacaacgccaagagctcactgtatctgcaaatgaacagcctgagagtcgacgacacggccgtatattactgtgcgagagggggaagaggccaatacgtcggttggtgcttcgatctctggggccgtggcaccctcgtcactgtctcctcag

SEQ ID NO: 4979 - DNA, 367 bp, Homo sapiens
caggttcagctggtgcagtctggaggtgaggtgaagaagcctggggcctcagtgaaggtctcctgcaaggcctctggttacacctttaccaactacggtatcagctgggtgcgacaggcccctggacaagggctcgagtggatgggatggatcagcccttacaatggtaacacaaactatgcacagaaggtccagggcagagtcaccatgaccacagacacatccacgagcacagcctacatggagctgaggagcctgagatctgacgacacggccgtgtattactgtgcgagaggtggagctcctctggttcccctcaactggttcgacccctggggccagggaaccctggtcaccgtctcctcag

SEQ ID NO: 4980 - DNA, 370 bp, Homo sapiens
cagctgcagctgcaggagtccggctcaggactggtgaagccttcacagaccctgtccctcacctgcgctgtctctggtggctccatcagtagtggtggttactcctggagctggatccggcagccaccagggaagggcctggagtggattgggtacatctatcatagtgggaacacctactacaacccgtccctcaagagtcgagtcaccatatcagtagacaggtccaagaaccagttctccctgaagctgagctctgtgaccgccgcggacacggccgtgtattactgtgccagagccccttcggtttttggagtgcttatctactttgactactggggccagggaaccctggtcaccgtctcctcag

SEQ ID NO: 4981 - DNA, 367 bp, Homo sapiens
gaagtgcagctgttggagtctgggggaggcttggtacagcctggggggtccctgagactctcctgtgcagcctctggattcacctttagtagctatgccatgagctgggtccgccaggctccagggaaggggctggagtgggtctcaagtattagtggtagtggtggtagcacatactacgcagactccgtgaagggccggttcaccatctccagagacaattccaagaacacgttgtatctgcaaatgaacaccatgagagccgaggacacggccgtatattactgtgcgaaatcggatacagctatggccccgtacaactggttcgacccctggggccagggaaccctggtcaccgtctcctcag

SEQ ID NO: 4982 - DNA, 366 bp, Homo sapiens
caggtgcagctggtggagtctgggggaggcgtggtccagcctgggaggtccctgagactctcctgtgcagcctctggattcaccttcagtagctatgctatgcactgggtccgccaggctccaggcaaggggctggagtgggtggcagttatatcatatgatggaagtaataaatactacgcagactccgtgaagggccgattcaccatctccagagacaattccaagaacacgctgtatctgcaaatgaacagcctgagagctgaggacacggctgtgtattactgtgcgagagcggaacgatattttccctactactacggtatggacgtctggggccaagggaccacggtcaccgtctcctca

SEQ ID NO: 4983 - DNA, 367 bp, Homo sapiens
gaggtgcagctggtggagtctgggggagccttggtccagcctggggggtccctgagactctcctgtgcagcctctggattcacctttagtagctattggatgagctgggtccgccaggctccagggaaggggctggagtgggtggccaacataaagcaagatggaagtgagaaacactatgtggactctgtgaagggccgattcaccatctccagagacaacgccaagaactcactgtatctgcaaatgaacagcctgagagccgaggacacggctgtgtatttctgtgcgaggaccgaagagatgccttcaattgatggggcttttgatgtctggggccaagggacaatggtcaccgtctcttcag

SEQ ID NO: 4984 - DNA, 382 bp, Homo sapiens
caggtgcagctggtgcagtctggggctgaggtgaagaagcctgggtcctcggtgaaggtctcctgcaaggcttctggaggcaccttcagcagctatgctatcagctgggtgcgacaggcccctggacaagggcttgagtggatgggagggatcatccctatctttggtacagcagactacgcacagaagttccagggcagagtcacgattaccgcggacgaatccacgagcacagcctacatggagctgagcagcctgagatctgaggacacggccgtgtattactgtgcgagagtaaaggattactatgatagtagtggttattactcccccgcggttgttgactactggggccagggaaccctggtcaccgtctcctcag

SEQ ID NO: 4985 - DNA, 366 bp, Homo sapiens
caggtgcaggtggtggagtctgggggaggcgtggtccagcctgggaggtccctgagactctcctgtgcagcgtctggattcacgttcagtggctatggcatgcattgggtccgccagtctccaggcaaggggctggagtgggtggcagttttatggtctgatggaagtaataaatactatgcagactccgtgaagggccggttcaccatctccagagacactgccaagaacaccctgtatctgcaaatgaacagcctgagagccgaggacacggctgtgtattactgtgcgagaaactatggttcggggcgttatggctacggtatggaggtttggggccaagggaccacggtcaccgtctcctca

SEQ ID NO: 4986 - DNA, 367 bp, Homo sapiens
caggtgcagctgggggagtctgggggaggcgtggtccagcctgggaggtccctgagactctcctgtgcagcctctggattcaccttcagtagctatgctatgcactgggtccgccaggctccaggcaaggggctggagtgggtggcaattgtatcatatgatggaagtaataaatactacgcagactccgtgaagggccgattcaccatctccagagacaattccaagaacacggtgtatctgcaaatgaacagcctgagacctgaggacacggctgtgtattactgtgcgagagatggggagtatagcagtggctggtactactttgactactggggccagggaacgctggtcaccgtctcctcag

SEQ ID NO: 4987 - DNA, 367 bp, Homo sapiens
caggtgcagctggtggagtctgggggaggcgtggtccagcctgggaggtccctgagactctcctgtgcagcctctggattcaccttcagtagctttgctatgcactgggtccgccaggctccaggcaaggggctggagtgggtggcagttatatcatatgatggaactaataaaaactacgcagactccatgaagggccgattcaccgtctccagagacaactccaagaacacgctgtatctgcaaatgaacagcctgagaactgaggacacggctgtgtattactgtgcgagaacctacccctattactatgatagtactggttctctgtcgtggggccagggaaccctggtcaccgtctcctcag

SEQ ID NO: 4988 - DNA, 367 bp, Homo sapiens
caggtgcagctggtggagtctgggggaggcgtggtccagcctgggaggtccctgagactctcctgtgcagcctctggattcaccttcagtagctatggcatgcactgggtccgccaggctccaggcaaggggctggagtgggtggcagttatatcatatgatggaagtgataaatactatgcagactccgtgaagggccgattcaccatctccagagacaattccaagaatacgttgtatctgcaaatgaacagcctgagacctgaggacacggctttgtattactgtgcgaaaggtcttcgaggtagcagtggctggtactcctttgactactggggccagggaaccctggtcaccgtctcctcag

SEQ ID NO: 4989 - DNA, 381 bp, Homo sapiens
caggttcagctggtgcagtctggagctgaggtgaagaagcctggggcctcagtgaaggtctcctgtaagacttctggttacacctttaccacctacggtatcagctgggtgcgacaggcccctggacaagggcttgagtggatgggatggatcagcgcttacaatggtaacacaaactatgcacagaagctccagggcagagtcaccatgaccacagacacatccacgagcacagcctacatggagctgaggagcctgagaactgacgacacggccgtgtattactgtgcgagaggggccggggcttggaggggttattacccaaactactactacggtatggacgtctggggccaagggaccacggtcaccgtctcctca

SEQ ID NO: 4990 - DNA, 378 bp, Homo sapiens
gaggtgcagctggtggagtctgggggaggcttggtccagcctggggggtccctgagactctcctgtgcagcctctggattcaccgtcagtagcaactacatgagctgggtccgccaggctccagggaaggggctggagtgggtctcagttatttatagcggtggtagcacatactacgcagactccgtgaagggcagattcaccatctccagagacaattccaagaacacgctgtatcttcaaatgaacagcctgagagccgaggacacggctgtgtattactgtgcgagagatggatatagtagtggttacctcccagaggtctactactacggtatggacgtctggggccaagggaccacggtcaccgtctcctca

SEQ ID NO: 4991 - DNA, 381 bp, Homo sapiens
caggtccagctggtgcagtctggggctgaggtgaagaagcctgggtcctcggtgaaggtctcctgcaaggcttctggaggcaccttcagcagctatgctatcagctgggtgcgacaggcccctggacaagggcttgagtggatgggaaggatcatccctatccttgatatagcaaactacgcacagaagttccagggcagagtcacgattaccgcggacaaatccacgagcacagcctacatggagctgagcagcctgagatctgaagacacggccgtgtattactgtgcgagagatcccagacccctccttagtccggtgactagagtcgactacggtatggacgtctggggccaagggaccacggtcaccgtctcctca

SEQ ID NO: 4992 - DNA, 367 bp, Homo sapiens
caggtgcggctggtggagtctgggggaggcgtggtccagcctgggaggtccctgagactctcctgtgcagcctctggattcaccttcagtaactatggcatgcactgggtccgccaggctccaggcaaggggctggagtgggtggcagttatatcatatgatggaggtaataacatctattcagactccgtgaagggccgattcaccatctccagagacaattccaagaacacactgtatctgcaaatgaacagcctgagagctgacgacacggctgtgtattactgtgctaaagatccaactatagcagtggccccccgcgcttttgatttctggggccaagggacaatggtcaccgtctcttcag

SEQ ID NO: 4993 - DNA, 367 bp, Homo sapiens
caggtgcagctggtggagtctgggggaggcgtggtccagcctgggaggtccctgagactctcctgtgcagcctctggattcaccttcagtagttatgctatgcactgggtccgccaggctccaggcaaggggctggagtgggtggcagttatatcatatgatggaagtaataaatactacgcagactccgtgaagggccgattcaccatctccagagacaattccaagaacacgctgtatctgcaaatgaacagcctgagagctgaggacacggctgtgtattactgtgcgacaccccaggggggggggagctactacggagcttttgatatctggggccaagggacaatggtcaccgtctcttcag

SEQ ID NO: 4994 - DNA, 367 bp, Homo sapiens
gaggtgcagctggtgcagtctggagcagaggtgaaaaagcccggggagtctctgaggatctcctgtaagggttctggatacagttttatcagctactggatcggctgggtgcgccagatgcccgggaaaggcctgcagtggatggggatcatctatcctggtgactctgataccagatacagcccgtccttccaaggccaggtcaccttctcagccgacaagtccatcagcaccgcctacctgcagtggcgcagcctgaaggcctcggacaccgccatgtattactgtgcgagacatagtgactacggtgactacggaggggtccaaatggattggggccagggaaccctggtcaccgtctcctcag

SEQ ID NO: 4995 - DNA, 381 bp, Homo sapiens
gaagtgcagctggtggagtctgggggaggcttggtacagcctggcaggtccctgagactctcctgtgcagcctctggattcacctttgatgattatgccatgcactgggtccggcaagctccagggaagggcctggagtgggtctcaggtattagttggaatagtggtagcataggctatgcggactctgtgaagggccgattcaccatctccagagacaacgccaagaactccctgtatctgcaaatgaacagtctgagagctgaggacacggccttgtattactgtgcaaaagatatgagtcaaggggaccccagccattactactactactacggtatggacgtctggggccaagggaccacggtcaccgtctcctca

SEQ ID NO: 4996 - DNA, 367 bp, Homo sapiens
caggtgcagctggtggagtctgggggaggcgtggtccagcctgggaggtccctgagactctcctgtgcagcctctggattcaccttcagtagctatgctatgcactgggtccgccaggctccaggcaaggggctggagtgggtggcagttatatcatatgatggaagtaataaatactacgcagactccgtgaagggccgattcaccatctccagagacaattccaagaacacgctgtatctgcaaatgaacagcctgagagctgaggacacggctgtgtattactgtgcgagagatggaggtgggagctacctaccccggtacttcgatctctggggccgtggcaccctggtcactgtctcctcag

SEQ ID NO: 4997 - DNA, 385 bp, Homo sapiens
caggtgcagctgcaggagtcgggcccaggactggtgaagccttcacagaccctgtccctcacctgcactgtctctggtggctccatcagcagtggtggttactactggagctggatccgccagcacccagggaagggcctggagtggattgggtacatctattacagtgggagcacctactacaacccgtccctcaagagtcgagttaccatatcagtagacacgtctaagaaccagttctccctgaagctgagctctgtgactgccgcggacacggccgtgtattactgtgcgagaggcaccccggtgggttatgatagtagtggttattaccctgctggttttgactactggggccagggaaccctggtcaccgtctcctcag

SEQ ID NO: 4998 - DNA, 382 bp, Homo sapiens
caggtgcagctggtggagtctgggggaggcgtggtccagcctgggaggtccatgagactctcctgtgcagcctctggattcaccttcagtagctatggcatgcactgggtccgccaggctccaggcaaggggctggattgggtggcagttatttcatatgatggaagtaataaatcctatgcagactccgtgaagggccgattcaccgtctccagagacaattccaagaacacgctgtatctgcaaatgaacagcctgagagctgaggacacggctgtgtattactgtgcgaaagccataccaccctattactatgatagtagtggttatcaaaggtatttccagcactggggccagggcaccctggtcaccgtctcctcag

SEQ ID NO: 4999 - DNA, 367 bp, Homo sapiens
gaggtgcagctgttggagtctgggggaggcttggtacagcctggggggtccctgagactctcctgtgcagcctctggattcacctttagcagctatgccatgagctgggtccgccaggctccagggaaggggctggactgggtctcaactattagtactagtggtggtaccacatactacgcagactccgtgaagggccgattcaccgtctccagagacaattccaagaacatgttgtatttgcaaatgcacagcctgagagccgaggacacggccctatattactgtggcctcaattcggggagttcttttggagggggtctagtgaactactggggccagggaaccctggtcaccgtctcctcag

SEQ ID NO: 5000 - DNA, 367 bp, Homo sapiens
gaggtgcagctgttggagtctgggggaggcttggtacagcctggggggtccctgagactctcctgtgcagcctctggattcacctttagcagctatgccatgagctgggtccgccaggctccagggaaggggctggagtgggtctcagctattagtggtagtggtggtagcacatactacgcagactccgtgaagggccggttcaccatctccagagacaattccaagaacacgctgtatctgcaaatgaacagcctgagagccgaggacacggccgtatattactgtgcgaaagatccccgcccctatggtggctacgatttctttgactactggggccagggaaccctggtcaccgtctcctcag

SEQ ID NO: 5001 - DNA, 387 bp, Homo sapiens
gaggtgcagctggtggagtctgggggaggcctggtcaagcctggggggtccctgagactctcctgtgcagcctctggattcaccttcagtagctatagcatgaactgggtccgccaggctccagggaaggggctggagtgggtctcatccattagtagtagtagtagttacatatactacgcagactcagtgaagggccgattcaccatctccagagacaacgccaagaactcactgtatctgcaaatgaacagcctgagagccgaggacacggctgtgtattactgtgcgagagaccgtattacgatttttggagtggttattattggggactactactacggtatggacgtctggggccaagggaccacggtcaccgtctcctca

SEQ ID NO: 5002 - DNA, 388 bp, Homo sapiens
caggcgcacctggcggagtctgggggaggcgtggtccagcctgggaggtccctgagactctcctgtgcagcctctggattcaccttcagcacctgtggcatgcactgggtccgccaggctgcaggcaaggggctggagtgggtggcacttatatcacatgatggaactgataaatactatgcagactccgtgaagggccgattcaccgtctccagagacaattccaggagcacgctgtatctgcaaatgaacagcctgcgacctgaggacacggctgtctattattgtgcgaaagatgccctccacatattcgatattgtagaagtaccacctgcccaaaactggttcgacccctggggccagggaaccctggtcaccgtctcctcag

SEQ ID NO: 5003 - DNA, 381 bp, Homo sapiens
caggtgcagctgcaggagtcgggcccaggactggtgaagccttcggagaccctgtccctcacctgcactgtctctggtggctccatcagtagttactactggagctggatccggcagcccgccgggaagggactggagtggattgggcgtatctataccagtgggagcaccaactacaacccctccctcaagagtcgagtcaccatgtcagtagacacgtccaagaaccagttctccctgaagctgagctctgtgaccgccgcggacacggccgtgtattactgtgcgagtgcccgagctggccccccaggtctccggaggtactactactactacggtatggacgtctggggccaagggaccacggtcaccgtctcctca

SEQ ID NO: 5004 - DNA, 384 bp, Homo sapiens
gaggtgcagctgttggagtctgggggaggcttggtacagcctggggggtccctgagactctcctgtgcagcctctggattcacctttagcagctatgccatgagctgggtccgccaggctccagggaaggggctggagtgggtctcagctattagtggtagtggtggtagcacatactacgcagactccgtgaagggccggttcaccatctccagagacaattccaagaacacgctgtatctgcaaatgaacagcctgagagccgaggacacggccgtatattactgtgcgaaaggatcaggcggggatcggggagacccaaattactactactactacggtatggacgtctggggccaagggaccacggtcaccgtctcctca

SEQ ID NO: 5005 - DNA, 387 bp, Homo sapiens
gaggtgcagctggtggagtctgggggaggcttggtccagcctggggggtccctgagactctcctgtgcagcctctggattcacctttagtagctattggatgagctgggtccgccaggctccagggaaggggctggagtgggtggccaacataaagcaagatggaagtgagaaatactatgtggactctgtgaagggccgattcaccatctccagagacaacgccaagaactcactgtatctgcaaatgaacagcctgagagccgaggacacggccgtgtattactgtgcgagatttaaggggcgatattttgactggttagtcaacggttactactactacggtatggacgtctggggccaagggaccacggtcaccgtctcctca

SEQ ID NO: 5006 - DNA, 387 bp, Homo sapiens
cagctgcagctgcaggagtccggctcaggactggtgaagccttcacagaccctgtccctcacctgcgctgtctctggtggctccatcagcagtggtggttactcctggagctggatccggcagccaccagggaagggcctggagtggattgggtacatctatcatagtgggagcacctactacaacccgtccctcaagagtcgagtcaccatatcagtagacaggtccaagaaccagttctccctgaagctgagctctgtgaccgccgcggacacggccgtgtattactgtgccagaggcaggtgtagtggtggtagctgctacggttactactactactacggtatggacgtctggggccaagggaccacggtcaccgtctcctca

SEQ ID NO: 5007 - DNA, 385 bp, Homo sapiens
cagctgcagctgcaggagtccggctcaggactggtgaagccttcacagaccctgtccctcacctgcgctgtctctggtggctccatcagcagtggtggttactcctggagctggatccggcagccaccagggaagggcctggagtggattgggtacatctatcatagtgggagcacctactacaacccgtccctcaagagtcgagtcaccatatcagtagacaggtccaagaaccagttctccctgaagctgagctctgtgaccgccgcggacacggccgtgtattactgtgccagagatggggggatgaattactatgatagtagtggttactcttttgcttttgatatctggggccaagggacaatggtcaccgtctcttcag

SEQ ID NO: 5008 - DNA, 381 bp, Homo sapiens
caggtgcagctgcaggagtcgggcccaggactggtgaagccttcggagaccctgtccctcacctgcactgtctctggtggctccatcagtagttactactggagctggatccggcagcccccagggaagggactggagtggattgggtatatctattacagtgggagcaccaactacaacccctccctcaagagtcgagtcaccatatcagtagacacgtccaagaaccagttctccctgaagctgagctctgtgaccgccgcagacacggccgtgtattactgtgcgagacatctggactacagtaaccgccctccgtattactactactactacggtatggacgtctggggccaagggaccacggtcaccgtctcctca

SEQ ID NO: 5009 - DNA, 384 bp, Homo sapiens
cagttgcagctgcaggagtcgggcccaggactggtgaagccttcggagaccctgtccctcaactgcactgtctctgatggctccctcagcactagcagttactactgggcctggatccgccagcccccagggaaggggctggagtggattgggagtatctattatagtgggagcacccactacaacccgtccctcaagagtcgagtcaccatatccgtagacacgtccaagaaccagttctccctgaagctgagctctgtgaccgccgcagacacggctgtgtattactgtgcgagacggcccacgtatagcaataggtggtacctggacgactactacggtatggacgtctggggccaggggaccacggtcaccgtctcctca

SEQ ID NO: 5010 - DNA, 385 bp, Homo sapiens
caggtgcagctggtgcagtctggggctgaggtgaagaagcctggggcctcagtgaaggtctcctgcaaggcttctggatacaccttcaccgactactttatgcactgggtgcgacaggcccctggacaagggcttgagtggatgggatggatcaaccctaacagtggtggcacaaactatgcacagaagtttcagggcagggtcaccatgaccagggacacgtccatcaccacagcctacatggagctgagcaggctgaaatctgacgacacggccgtgtattactgtgcgagagattgttggcggttcggggagttattaaactttggctactactactacggtatggacgtctggggccaagggaccacggtcaccgtctcct

SEQ ID NO: 5011 - DNA, 391 bp, Homo sapiens
gaggtgcagctggtggagtctgggggaggcttggtacagccagggcggtccctgagactctcctgtacagcttctggattcacctttggtgattatgctatgagctgggtccgccaggctccagggaaggggctggagtgggtaggtttcattagaagcaaagcttatggtgggacaacagaatacgccgcgtctgtgaaaggcagattcaccatctcaagagatgattccaaaagcatcgcctatctgcaaatgaacagcctgaaaaccgaggacacagccgtgtattactgtactagagatgggggggggtattacgatattttgactggttattgggctgaagcttttgatatctggggccaagggacaatggtcaccgtctcttcag

SEQ ID NO: 5012 - DNA, 381 bp, Homo sapiens
gaggtgcagctggtggagtctgggggaggcttggtccagcctggggggtccctgagactctcctgtgcagcctctggattcaccgtcagtagcaactacatgagctgggtccgccaggctccagggaaggggctggagtgggtctcagttatttatagcggtggtagcacatactacgcagactccgtgaagggcagattcaccatctccagagacaattccaagaacacgctgtatcttcaaatgaacagcctgagagccgaggacacggctgtgtattactgtgcgagagatacagtagggggatacagctatggttacaagtactactactacggtatggacgtctggggccaagggaccacggtcaccgtctcctca

SEQ ID NO: 5013 - DNA, 351 bp, Homo sapiens
gaggtgcagctggtggagtctgggggaggcttggtccagcctggggggtccctgagactctcctgtgcagcctctggattcaccgtcagtagcaactacatgttctgggtccgccaggctccagggaaggggctggagtgggtctcacttatttatagcggtggtagcacattctacgcagactccgtgaagggcagattcaccatctccagagacaattccaagaacacactgtatcttcaaatgaacagcctgagagccgaggacacggctgtgtattactgtgcgagagatatcgtttactacggtatggacgtctggggccaagggaccacggtcaccgtctcctca

SEQ ID NO: 5014 - DNA, 355 bp, Homo sapiens
caggtgcagctggtggagtctgggggaggcgtggtccagcctgggaggtccctgagactctcctgtgcagcctctggattcaccttcagtagctatggcatgcactgggtccgccaggctccaggcaaggggctggagtgggtggcagttatatcatatgatggaagtaataaatactatgcagactccgtgaagggccgattcaccatctccagagacaattccaagaacacgctgtatctgcaaatgaacagcctgagagctgaggacacggctgtgtattactgtgcgaaaggtttttccgggtttgcttttgatatctggggccaagggacaatggtcaccgtctcttcag

SEQ ID NO: 5015 - DNA, 358 bp, Homo sapiens
cagctgcagctgcaggagtcgggcccaggactggtgaagccttcggagaccctgtccctcacctgcactgtctctggtggctccatcagcagtagtagttactactggggctggatccgccagcccccagggaaggggctggagtggattgggagtatctattatagtgggagcacctactacaacccgtccctcaagagtcgagtcaccatatccgtagacacgtccaagaaccagttctccctgaagctgagctctgtgaccgccgcagacacggctgtgtattactgtgcgagacaaccccccccgaactggttcgacccctggggccagggaaccctggtcaccgtctcctcag

SEQ ID NO: 5016 - DNA, 385 bp, Homo sapiens
caggtgcagctggtggagtctgggggaggcgtggtccagcctgggaggtccctgagactctcctgtgtagcctctggactctccttcagcagctatggcatgcactgggtccgccaggctccaggcaaggggctggagtgggtggcagttatgtcatctgatggaattaataaatactatgcagactccgtgaagggccgattcaccatctccagagacaattccaagaacacgctgtatctgcaaatgaacagcctgagagctgaggacacggctgtgtactactgtgcgaaagggagctcagaatcccccgggtatagcagcagcttttacggggactggttcgacccctggggccagggaaccctggtcaccgtctcctcag

SEQ ID NO: 5017 - DNA, 355 bp, Homo sapiens
gaagtgcagctggtgcagtccggagcagaggtgaaaaagcccggggagtctctgaggatctcctgtaagggttctggatacagctttaccatctactggatcagctgggtgcgccagatgcccgggaaaggcctggagtggatggggaggattgatcctagtgactcttataccaactacagcccgtccttccaaggccacgtcaccatctcagctgacaagtccatcagcactgcctacctgcagtggagcagcctgaaggcctcggacaccgccatgtattactgtgcgaggccggaccggctcaacgaaccaacaacatggggccagggaaccctggtcaccgtctcctcag

SEQ ID NO: 5018 - DNA, 355 bp, Homo sapiens
gaggtgcagctgttggagtctgggggaggcttggtacagcctggggggtccctgagactctcctgtgcagcctctggattcacctttagcagctatgccatgagctgggtccgccaggctccagggaaggggctggagtgggtctcagctattagtggtagtggtggtagcacatactacgcagactccgtgaagggccggttcaccatctccagagacaattccaagaacacgctgtatctgcaaatgaacagcctgagagccgaggacacggccgtatattactgtgcgaaagataacccccctatcacttttgactactggggccagggaaccctggtcaccgtctcctcag

SEQ ID NO: 5019 - DNA, 384 bp, Homo sapiens
caggtccagctggtacagtctggggctgaggtgaagaagcctggggcctcagtgaaggtctcctgcaaggtttccggatacaccctcattgaattatccatgcactgggtgcgacaggctcctggaaaagggcttgagtggatgggaggttttgatcctgaagatgctaaaacaatctacgcacagaagttccagggcagagtcaccatgaccgaggacacatctacagacacagcctatatggagctgagcagcctgagatctgaggacacggccgtgtattactgtgcaacagctatagcagtggctggtgcccccgactcttactactactactacggtatggacgtctggggccaagggaccacggtcaccgtctcctca

SEQ ID NO: 5020 - DNA, 355 bp, Homo sapiens
caggtgcagctgcaggagtcgggcccaggactggtgaagccttcggggaccctgtccctcacctgcgctgtctctggtggctccatcagcagtagtaactggtggagttgggtccgccagcccccagggaaggggctggagtggattggggaaatctatcatagtgggagcaccaactacaacccgtccctcaagagtcgagtcaccatatcagtagacaagtccaagaaccagttctccctgaagctgagctctgtgaccgccgcggacacggccgtgtattactgtgcggccgggaggggtgttatccctccggagttctggggccaagggacaatggtcaccgtctcttcag

SEQ ID NO: 5021 - DNA, 355 bp, Homo sapiens
caggtgcagctggtggagtctgggggaggcgtggtccagcctgggaggtccctgagactctcctgtgcagcgtctggattcaccttcagaaaccatggcatgcactgggtccgccaggctccaggcaaggggctggagtgggtggcagttatatggtatgatggaagtattgaatactatgcagactccgtgaagggccgattcaccatctccagagacaattccaagaacacggtgtctttgcaaatgaacagcctgagagccgaggacacggctgtgtattactgcgcgagagatcgggattccagacactttgacttctgggcccagggaaccctggtcatcgtctcctcag

SEQ ID NO: 5022 - DNA, 355 bp, Homo sapiens
caggtgcagctggtggagtctgggggaggcgtggtccagcctgggaggtccctgagactctcctgtgcagcctctggattcaccttcagtagctatgctatgcactgggtccgccaggctccaggcaaggggctggagtgggtggcagttatatcatatgatggaagtaataaatactacgcagactccgtgaagggccgattcaccatctccagagacaattccaagaacacgctgtatctgcaaatgaacagcctgagagctgaggacacggctgtgtattactgtgcgagagatggggggtatggttcctgggactactggggccagggaaccctggtcaccgtctcctcag

SEQ ID NO: 5023 - DNA, 355 bp, Homo sapiens
gaggtgcaggtggtggagtctgggggaggcttggtgcagcctggagggtccctgagactctcctgtgcagcctctggattcaccttcagtatttatgaattcaactgggtccgccaggctccagggaaggggctggagtgggtttcatacattagtactagtggtactaccatgtactacgcagactctgtgaagggccgattcaccatctccagagacaacgccaagaactcactgtatctgcaaatgaacagcctgagagccgaggacacggctgtttattactgtgcgagagatcgagggttttggtggttcgacccctggggccagggaaccctggtcaccgtctcctcag

SEQ ID NO: 5024 - DNA, 375 bp, Homo sapiens
gaggtgcagctgttggagtctgggggaggcttggtacagcctggggggtccctgagactctcctgtgcagcctctggattcacctttagcagctatgccatgagctgggtccgccaggctccagggaaggggctggagtgggtctcagctattagtggtagtggtggtagcacatactacgcagactccgtgaagggccggttcaccatctccagagacaattccaagaacacgctgtatctgcaaatgaacagcctgagagccgaggacacggccgtatattactgtgcgaaagagactcataactggaacgatcggatctactactacggtatggacgtctggggccaagggaccacggtcaccgtctcctca

SEQ ID NO: 5025 - DNA, 355 bp, Homo sapiens
gaggtgcagctggtgcagtctggagcagaggtgaaaaagcccggggagtctctgaagatctcctgtaagggttctagatacagctttaccagctactggatcgcctgggtgcgccagatgcccgggaaaggcctggagtggatggggatcatctatcctggtgactctgataccagatacagcccgtccttccaaggccaggtcaccatctcagccgacaagtccatcagcaccgcctacctgcagtggagcagcctgaaggcctcggacaccgccatgtattactgtgcgagatcccgatccaatgactacggtgactactggggccagggaaccctggtcaccgtctcctcag

SEQ ID NO: 5026 - DNA, 358 bp, Homo sapiens
cagatcaccttgaaggagtctggtcctacgctggtgaaacccacacagaccctcacgctgacctgcaccttctctgggttctcactcagcactagtggagtgggtgtgggctggatccgtcagcccccaggaaaggccctggagtggcttgcactcatttattgggatgatgatcagcgctacagcccatctctgaagaccaggctcaccatcaccaaggacacctccaaaaaccaggtggtccttacaatgaccaacatggaccctgtggacacagccacatattactgtgcacaccatactataccggagatttttgactactggggccagggaaccctggtcaccgtctcctcag

SEQ ID NO: 5027 - DNA, 358 bp, Homo sapiens
cagatcaccttgaaggagtctggtcctacgctggtgaaacccacacagaccctcacgctggcctgcaccttctctgggttctcactcagcactagtggactgggtgtgggctggatccgtcagcccccaggaaaggccctggagtggcttgcactcatttattgggatgatgataagctctacagcccatctctgaagaccaggctcaccatcaccaaggacacctccaaaaaccaggtcgtccttacaatgaccaacatggaccctgtggacacagccacatattactgtgcacaccaaacggtgactacggcctttcactactggggccagggaaccctggtcaccgtctcctcag

SEQ ID NO: 5028 - DNA, 372 bp, Homo sapiens
caggtgcagctgcaggagtcgggcccaggactggtgaagccttcggagaccctgtccctcacctgcactgtctctggtggctccatcagtagttactactggagctggatccggcagcccccagggaagggactggagtggattgggtatatctattacagtgggagcaccaactacaacccctccctcaagagtcgagtcaccatatcagtagacacgtccaagaaccagttctccctgaagctgagctctgtgaccgccgcagacacggccgtgtattactgtgcgagactgcgtagcagcagctggtactcggttttctactacggtatggacgtctggggccaagggaccacggtcaccgtctcctca

SEQ ID NO: 5029 - DNA, 379 bp, Homo sapiens
caggtgcagctgcaggagtcgggcccaggactggtgaagccttcacagaccctgtccctcacctgcactgtctctggtggctccatcagcagtggtggttactactggagctggatccgccagcacccagggaagggcctggagtggattgggtacatctattacagtgggagcacctactacaacccgtccctcaagagtcgagttaccatatcagtagacacgtctaagaaccagttctccctgaagctgagctctgtgactgccgcggacacggccgtgtattactgtgcgagagattccttaggatattgtagtggtggtagctgtgggtggttcgacccctggggccagggaaccctggtcaccgtctcctcag

SEQ ID NO: 5030 - DNA, 355 bp, Homo sapiens
caggttcagctggtgcagtctggagctgaggtgaagaagcctggggcctcagtgaaggtctcctgcaaggcttctggttacacctttaccagctatggtatcagctgggtgcgacaggcccctggacaagggcttgagtggatgggatggatcagcgcttacaatggtaacacaaactatgcacagaagctccagggcagagtcaccatgaccacagacacatccacgagcacagcctacatggagctgaggagcctgagatctgacgacacggccgtgtattactgtgcgagagggggttactatgaccgctttgactactggggccagggaaccctggtcaccgtctcctcag

SEQ ID NO: 5031 - DNA, 375 bp, Homo sapiens
caggtgcagctggtggagtctgggggaggcgtggtccagcctgggaggtccctgagactctcctgtgcagcctctggattcgccttcagtacctatggcatgcactgggtccgccaggctccaggcaaggggctggagtgggtggcagttatatcatttgatggaactaataaatactatgcagactccgtgaagggccgattcaccatctccagagacaattccaagaacacgctgtatctgcaaatgaacagcctgagagctgaggacacggctgtgtattactgtgcgaacgccatggttcggggagttattatatcaaactactacggtatggacgtctggggccaagggaccacggtcaccgtctcctca

SEQ ID NO: 5032 - DNA, 375 bp, Homo sapiens
caggtgcagctggtggagtctgggggaggcgtggtccagcctgggaggtccctgagactctcctgtgcagcctctggattcaccttcagtagctatggcatgcactgggtccgccaggctccaggcaaggggctggagtgggtggcagttatatcatatgatggaagtaataaatactatgcagactccgtgaagggccgattcaccatctccagagacaattccaagaacacgctgtatctgcaaatgaacagcctgagagctgaggacacggctgtgtattactgtgcgaaagataatgggtgggtggtagtaccagctgctataggcggtatggacgtctggggccaagggaccacggtcaccgtctcctca

SEQ ID NO: 5033 - DNA, 375 bp, Homo sapiens
caggtgcagctggtggagtctgggggaggcgtggtccagcctgggaggtccctgagactctcctgtgcagcctctggattcgcctttagtacctatggcatgcactgggtccgccaggctccaggcaaggggctggagtgggtggcagttatatcatatgatggaagtaataaatactatgcagactccgtgaagggccgattcaccctctccagagacaattacaagaacacgttgtatctgcaaatgaacagcctgagagctgaggacacggctgtctattactgtgcgaaggttatgcttcggggagttactataacactctactacggtatggacgtctggggccaggggaccacggtcaccgtctcctca

SEQ ID NO: 5034 - DNA, 376 bp, Homo sapiens
gaagtgcagctggtggagtctgggggaggcttggtacagcctggcaggtccctgagactctcctgtgcagcctctggattcacctttgatgattatgccatgcactgggtccggcaagctccagggaagggcctggagtgggtctcaggtattagttggaatagtggtagcataggctatgcggactctgtgaagggccgattcaccatctccagagacaacgccaagaactccctgtatctgcaaatgaacagtctgagagctgaggacacggccttgtattactgtgcaaaaggtgttgctttgtattactatgatagtagtgctgggtacttcgatctctggggccgtggcaccctggtcactgtctcctcag

SEQ ID NO: 5035 - DNA, 374 bp, Homo sapiens
ggtgcaactggtggagtctgggggaggcttggtacagtctggagggtccctgcgactctcctgtacaggctctgaattcaccttcaaaaattatgagatgaactgggtccgccaggctcccgggaaagggctggagtgggtttcatacattagtagttggggcacagccctatactacccagactctgtgaagggccgattcaccgtctccagagacaacgccaagagctccctgtatctgcaaatggacagcctgagggccgaggatacggctgtttattactgtgcgagagggggcttctttagcagtggctggaacggatattggtacttcgacctctggggccgtggcaccctggtcactgtctcctcag

SEQ ID NO: 5036 - DNA, 373 bp, Homo sapiens
gaggtgcagctggtggagtctgggggaggcttggtacagcctggggggtccctgagactctcctgtgcagcctctggattcaccttcagtagctacgacatgcactgggtccgccaacctacaggaaaaggtctggagtgggtctcaactattggtactgctggtgacacatactatccaggctccgtgaagggccgattcaccatctccagagaaaatgccaagaactccttctatcttcaaatgaacagcctgagagccggggacacggctgtgtatttctgtgcaagaatgggtcactatggaaggagtggccggacctactggtacttcgatctctggggccgtggcaccctggtcactgtctcctcag

SEQ ID NO: 5037 - DNA, 376 bp, Homo sapiens
caggtccacctggtgcagtctggggctgaggtgaagaagcctgggtcctcggtgaaggtctcctgtaaggcttctggagacaccttcagcagatatgctatcagctggctgcgacaggcccccggacaagggcttgagtggatgggaaggatcatcccgatgtttggtatagcaaaccacgcacagaagttccagggcagagtcacgattaccgcggacaaatccacgagcacagcctacatggagctgagcagcctgagatctgaggacacggccgtgtattactgtgcgacatattactatgatagtagtggtcaaaccaccgcctatgcttttgatatctggggccaagggacattggtcaccgtctcttcag

SEQ ID NO: 5038 - DNA, 376 bp, Homo sapiens
caggtccagctggtgcagtctggggctgaggtgaagaagcctgggtcctcggtgaaggtctcctgcaaggcttctggaggcaccttcagcagctatgctatcagctgggtgcgacaggcccctggacaagggcttgagtggatgggaaggatcatccctatgcttggtatagcaaactacgcacagaagttccagggcagagtcacgattaccgcggacaaatccacgaacacagcctacatggagctgagcagcctgagatctgaggacacggccgtgtattactgtgcgggaagagaagggtgggtgggagatggctacaatttcgatgcttttgatatctggggccaagggacaatggtcaccgtctcttcag

SEQ ID NO: 5039 - DNA, 376 bp, Homo sapiens
gaggtacaactgttggagtctgggggaggcttggtacagcctggggggtccctgagactctcctgtgcagcctctggattcacctttagcagctttgccatgaactgggtccgccaggctccagggaaggggctggagtgggtctcaactcttagtggtagtggtggtcacacatactacgcagactccgtgaagggccggttcaccatctccagagacaattccaagaacacgctgtatctgcaaatgaacagcctgagagccgaggacacggccgtatattactgtgcgaaacacgttcgatttttggattggtttttgtaccctgatgcctttgatatctggggccaagggacaatggtcaccgtctcttcag

SEQ ID NO: 5040 - DNA, 376 bp, Homo sapiens
caggtgcagctggtggagtctgggggaggcttggtcaagcctggagggtccctgagactctcctgtgcagcctctggattcaccttcagtgactactacatgagctggatccgccaggctccagggaaggggctggagtgtgtttcataccttactattagtggtaataccatatactacgcagactctgtgaagggccgattcaccatctccagggacaacgccaagaactcactgtatctgcaaatgaacagcctgagagccgaggacacggccgtgtattactgtgcgagagattttcgcccgtattactatgataatagtggttattactgggactactggggccagggaaccctggtcaccgtctcctcag

SEQ ID NO: 5041 - DNA, 372 bp, Homo sapiens
caggtgcagctggtggagtctgggggaggcgtggtccagcctgggaggtccctgagactctcctgtgcagcctctggattcaccttcagtagctatgctgtacactgggtccgccaggctccaggcaaggggctggagtgggtggcagttatatcatatgatggaagtaataaataccacgcagactccgtgaagggccgattcaccatctccagagacaattccaagaacacgctggatctgcaaatgaacagcctgagagctgaggacacggctgtgtattactgtgcgagagagcgcgtcagcggccgaatctactattactacggtatggacgtctggggccaagggaccacggtcaccgtctcctca

SEQ ID NO: 5042 - DNA, 372 bp, Homo sapiens
caggtccagcttgtgcagtctggggctgaggtgaagaagcctggggcctcagtgaaggtttcctgcaaggcttctggatacaccttcactagctatgctatgcattgggtgcgccaggcccccggacaaaggcttgagtggatgggatggatcaacgctggcaatggtaacacaaaatatttacagaagttccagggcagagtcaccattaccagggacacatccgcgagcacagcctacatggagttgagcagcctgagatctgaagacacggctgtgtattactgtgcgaggtccttcgcttcggggagtttttataacgtggacgctatggacgtctggggccaagggacctcggtcaccgtctcctca

SEQ ID NO: 5043 - DNA, 376 bp, Homo sapiens
gaggtgcagctggtggagtctgggggaggcttggtccagcctggggggtccctgagactctcctgtgcagcctctggattcacctttagtagctattggatgagctgggtccgccaggctccagggaaggggctggagtgggtggccaacataaagcaagatggaagtgagaaatactatgtggactctgtgaagggccgattcaccatctccagagacaacgccaagaactcactgtatctgcaaatgaacagcctgagagccgaggacacggccgtgtattactgtgcgagagattttagttgggatttttggagtggttatcctaactggttcgacccctggggccagggaaccctggtcaccgtctcctcag

SEQ ID NO: 5044 - DNA, 376 bp, Homo sapiens
gaggtgcagctgttggagtctgggggaggcttggtacagcctggggggtccctgagactctcctgtgcagcctctggattcacctttagcagctatgccatgagctgggtccgccaggctccagggaaggggctggagtgggtctcaactattagtggtagtggtgatagcacatactacgcagactccgtgaagggccggttcaccatctccagagacaattccaagaacacgctgtatctgcaaatgaacagcctgagagccgaggacacggccgtatattactgtgcgaaagatccaagggtgggagctactaccctacccccttactactttgactactggggccagggaaccctggtcaccgtctcctcag

SEQ ID NO: 5045 - DNA, 369 bp, Homo sapiens
gaggtgcagctggtggagtctgggggaggcttggtccagcctggggggtccctgagactctcctgtgcagcctctggattcaccgtcagtagcaactacatgagctgggtccgccaggctccagggaaggggctggagtgggtctcagttatttatagcggtggtagcacatactacgcagactccgtgaagggcagattcaccatctccagagacaattccaagaacacgctgtatcttcaaatgaacagcctgagagccgaggacacggctgtgtattactgtgcgagaggcggtagcagctcgggcccctactactactacggtatggacgtctggggccaagggaccacggtcaccgtctcctca

SEQ ID NO: 5046 - DNA, 372 bp, Homo sapiens
caggtccagctggtgcagtctggggctgaggtgaagaagcctgggtcctcggtgaaggtctcctgcaaggcttctggaggcaccttcagcagctatgctatcagctgggtgcgacaggcccctggacaagggcttgagtggatgggaaggatcatccctatccttggtatagcaaactacgcacagaagttccagggcagagtcacgattaccgcggacaaatccacgagcacagcctacatggagctgagcagcctgagatctgaggacacggccgtgtattactgtgcgagagatgacgatttttggagtggtaaagggcccctcggtatggacgtctggggccaagggaccacggtcaccgtctcctca

SEQ ID NO: 5047 - DNA, 372 bp, Homo sapiens
caggtgcagctggtgcagtctggggctgaggtgaagaggcctgggtcctcggtgaaggtctcctgcaaggcttctggaggcaccttcagcaactatgctatcagctgggtgcgacaggcccctggacaagggcttgagtggatgggagggatcatccctatctatgttacaccaaactacgcacagaagttccagggcagagtcacgattaccgcggacaaatccacgactactgcctacatggagctgagcagcctgagatctgaggacacggccgtgtattactgtgcgagatctaaagctgctatggaagactcctactactacggtctggacgtctggggccaaggcaccacggtcaccgcctcctca

SEQ ID NO: 5048 - DNA, 372 bp, Homo sapiens
caggtgcagctggtggagtctgggggaggcgtggtccagcctgggaggtccctgagactctcctgtgcagcgtctggattcaccttcagtagctatggcatgcactgggtccgccaggctccaggcaaggggctggagtgggtggcagttatatggtatgatggaagtaataaatactatgcagactccgtgaagggccgattcaccatctccagagacaattccaagaacacgctgtatctgcaaatgaacagcctgagagccgaggacacggctgtgtattactgtgcgagagatatggacggtgactacgtttcctactactacggtatggacgtctggggccaagggaccacggtcaccgtctcctca

SEQ ID NO: 5049 - DNA, 372 bp, Homo sapiens
gaagtgcagctggtggagtctgggggaagcttggtacagcctggcaggtccctgagactctcctgtgcagcctctggattcacctttgatgattatgccatgcactgggtccggcaagctccagggaagggcctggagtgggtctcaggtattagttggaatagtggtagcataggctatgcggactctgtgaagggccgattcaccatctccagagacaacgccaagaactccctgtatctgcaaatgaacagtctgagagctgaggacacggccttctattactgtgcaaaagatattaggtactatgcttcggggaactactacggtttggacgtctggggccacgggaccacggtcaccgtctcctca

SEQ ID NO: 5050 - DNA, 373 bp, Homo sapiens
caggtccagctggtgcagtctggggctgaggtgaagaagcctgggtcctcggtgaaggtctcctgcaaggcttctggaggcaccttcagcagctatgctatcagctgggtgcgacaggcccctggacaagggcttgagtggatgggaaggatcatccctatccttggtatagcaaactacgcacagaagttccagggcagagtcacgattaccgcggacaaatccacgagcacagcctacatggagctgagcagcctgagatctgaggacacggccgtgtattactgtgcgagagagtattacgatttttggagtggttatgaggcgaaagatgactactggggccagggaaccctggtcaccgtctcctcag

SEQ ID NO: 5051 - DNA, 373 bp, Homo sapiens
gaggtgcagctgttggagtctgggggaggcttggtacagcctggggggtccctgagactctcctgtgcagcctctggattcacctttagcagctatgccatgagctgggtccgccaggctccagggaaggggctggagtgggtctcagctattagtggtagtggtggtagcacatactacgcagactccgtgaagggccggttcaccatctccagagacaattccaagaacacgctgtatctgcaaatgaacagcctgagagccgaggacacggccgtatattactgtgcgaaagatccctggtttgactacagtaactaccgggccttttgtgactactggggccagggaaccctggtcaccgtctcctcag

SEQ ID NO: 5052 - DNA, 376 bp, Homo sapiens
caggtgcagctgcaggagtcgggcccaggactggtgaagccttcacagaccctgtccctcacctgcactgtctctggtggctccatcagcagtggtggttactactggagctggatccgccagcacccagggaagggcctggagtggattgggtacatctattacagtgggagcacctactacaacccgtccctcaagagtcgagttaccatatcagtagacacgtctaagaaccagttctccctgaagctgagctctgtgactgccgcggacacggccgtgtattactgtgcgagagaccgtaactcgtattactatgatagtagtggttattttgactactggggccagggaaccctggtcaccgtctcctcag

SEQ ID NO: 5053 - DNA, 373 bp, Homo sapiens
gaggtgcagctggtggagtctgggggaggcctggtcaagcctggggggtccctgagactctcctgtgcagcctctggattcaccttcagtagctatagcatgaactgggtccgccaggctccagggaaggggctggagtgggtctcatccattagtagtagtagtagttacatatactacgcagactcagtgaagggccgattcaccatctccagagacaacgccaagaactcactgtatctgcaaatgaacagcctgagagccgaggacacggctgtgtattactgtgcgagaggaggggtatattgtagtggtggtagctgctcctcactgggctactggggccagggaaccctggtcaccgtctcctcag

SEQ ID NO: 5054 - DNA, 373 bp, Homo sapiens
caggtgcagctggtggagtctgggggaggcgtggtccagcctgggaggtccctgagactctcctgtgcagcgtctggattctccttcagtagctatggcatgcactgggtccgccaggctccaggcaaggggctggagtgggtggcagttctgtcatttgatggaagtattaaatactatgcagactccgtgaagggccgattcaccatctccagagacaattccaagaacacgctgtatctgcaaatgaacagcctgagagctgaggacacggctgtatattactgtgcgaaagcccctctgaattattgtgctaatggtgtatgctattttgactactggggccagggaaccctggtcaccgtctcctcag

SEQ ID NO: 5055 - DNA, 373 bp, Homo sapiens
caggtgcagctggtggagtctgggggaggcgtggtccagcctgggaggtccctgagactctcctgtgcagcctctggattcgccttcagtcgctatggcatgtactgggtccgccaggctccaggcaaggggctggagtggataacagttttgtcatttgatggaagttacacatactattcagactccgtgaagggccgattcaccatgtccagagacaattccaagagcaccctgtacctgcaaatgaacagtctgagacctgaggacacgggagtgtattactgtgctaaggccacagtaggttattgcactaatggtgtctgctatcctgactcgtggggccagggaaccctggtcaccgtctccccag

SEQ ID NO: 5056 - DNA, 373 bp, Homo sapiens
caggtgcagctggtgcagtctggggctgaggtgagggagcctggggcctcagtgaaggtctcctgcgaggcctctggatacaccttcaccggctactttatacactgggtgcgacaggcccctggacaagggcttgagtggatgggatgggtcaaccctgacagtggtggcaccaactatgcacagaggtttcaggtcagggtcaccatggccagtgacacgtccattaccacagcctacatggagctgagcaggctgacatctgacgacacggccgtctattactgtgcgagagggtcgcgatattacgatattttgactggttatcaaattgacttctggggccagggaaccctggtcaccgtctcctcag

SEQ ID NO: 5057 - DNA, 372 bp, Homo sapiens
gaggtgcaactggtggagtctgggggaggcttggtacagcctggggggtccctgagactctcctgtgcagcctctggattcaccttcagtaactatagcatgaactgggtccgccaggctccagggagggggctggagtgggtttcatacataagtagtagtagtagtaccatattctacgcagactctgtgaagggccgattcaccatctccagagacaatgccaagaagtcactgtctctgcaaatgaacagcctgagagccgaggacacggctgtgtatttctgtgccaaaggagggaatacacctatgccaaacggctactacggtatggacgtctggggccaagggaccacggtcaccgtctcctca

SEQ ID NO: 5058 - DNA, 373 bp, Homo sapiens
gaggtgcagctggtggagtctgggggaggcttggtacagcctggagggtccctgagactctcctgtgcagcctctggattcaccttcagtagttatgaaatgaactgggtccgccaggctccagggaaggggctggaatgggtttcatacattagtagtagtggtagtagcatatactacgcagactctgtgaagggccgattcaccatctccagagacaacgccaagaactcactgtatctgcaaatgaacagcctgagagccgaggacacggctgtttattactgtgcgagagaggttgattcggggagttattatagagtatactactttgactactggggccagggagccctggtcaccgtctcctcag

SEQ ID NO: 5059 - DNA, 373 bp, Homo sapiens
gaaatgcagctggtggagtctgggggagtcgtggtacagcctggggggtccctgagactctcctgtgcagcctctggattcacctttgatgattatgccatgcactgggtccgtcaagctccggggaagggtctggagtgggtctctcttattagttgggatggtggtagcacatactatgcagactctgtgaagggtcgattcaccatctccagagacaacagcaaaaactccctgtatctgcaaatgaacagtctgagagctgaggacaccgccttgtattactgtgcaaaagataggaaatccctatggttcggggactacgatgcttttgatatctggggccaagggacaatggtcaccgtctcttcag

SEQ ID NO: 5060 - DNA, 373 bp, Homo sapiens
caggtgcagctggtgcagtctggggctgaggtgaagaagcctgggtcctcggtgaaggtctcctgcaaggcttctggaggcaccttcagcagctatgctatcagctgggtgcgacaggcccctggacaagggcttgagtggatgggagggatcatccctatctttggtacagcaaactacgcacagaagttccagggcagagtcacgattaccgcggacaaatccacgagcacagcctacatggagctgagcagcctgagatctgaggacacggccgtgtattactgtgcgagagaagggtttgactgggtatctcaggggggccactggttcgacccctggggccagggaaccctggtcaccgtctcctcag

SEQ ID NO: 5061 - DNA, 373 bp, Homo sapiens
caggtgcagctggtggagtctgggggaggcgtggtccagcctgggaggtccctgacactctcctgtgcagcctctggattcgccttcattacctatgctatgcactgggtccgccaggctccaggcaaggggctggagtgggtggcagttatatcatatgatggaagtaataaatactacgcagactccgtgaagggccgattcaccatctccagagacaattcccagaacacgctgtatctgcaaatgaacagcctgagagctgaggacacggctgtgtattactgtgcgagagtgaatttaagaggagagatggctacacaccgagcttttgatatctggggccaagggacaatggtcaccgtctcttcag

SEQ ID NO: 5062 - DNA, 376 bp, Homo sapiens
cagatcaccttgaaggagtctggtcctacgctggtgaaacccacacagaccctcacgctgacctgcatgttctctgggttctcactcagcacttatggagtgggtgtgggctggatccgtcagcccccaggaaaggccctggagtggcttgcactcatttattgggatgatgataagcgctacagcccatctctgaagagcaggctcaccatcaccaaggacacctccaaaaaccaggtggtccttacaatgaccaacatggaccctgtggacacaggcacatattactgtgcacacaggccccccgcagcagctggtacttcatcagcttggttcgacccctggggccagggaaccctggtcaccgtctcctcag

SEQ ID NO: 5063 - DNA, 355 bp, Homo sapiens
caggtgcagctgcaggagtcgggcccaggactggtgaagccttcggagaccctgtccgtcacctgcactgtctctggtggctccatcagccgttactactggagctggatccggcagcccccagggaagggactggagtggattgggtatatctatgacagtgggagcacccacttcaacccctccctcaagagtcgagtcaccatatcagtagacacgtccaagaaccagttctccctgaacctgagctctgtgaccgctgcggacacggccgtgtattattgtgcgagagagggccgagactactggtacttcgatctctggggccgtggcaccctggtcactgtctcctcag

SEQ ID NO: 5064 - DNA, 376 bp, Homo sapiens
caggtgcggctgcaggagtccggctcaggactggtgaagccttcacagaccctgtccctcacctgcgtcgtctctggtggcttcatcaatagcaatgggtattcttggagttggatccggcagccaccagggaagggcctggagtggattgggtacacctatgacagtggaaaaacctattacaacccgaccctcaagagtcgagtcaccatttctgcggacacgcccaggaaccagttctccctgaagttgaggtctgtgaccgccgcggacacggccgtgtatttctgtgccagaggtttcggtagtagtggtttttcttccggctactacttcgatctctggggccgtggcaccctggtcattgtctcctcag

SEQ ID NO: 5065 - DNA, 358 bp, Homo sapiens
caggttcagctggtgcagtctggagctgaggtgaagaagcctggggcctcagtgaaggtctcctgcaaggcttctggttacacctttaccagctatggtatcagctgggtgcgacaggcccctggacaagggcttgagtggatgggatggatcagcgcttacaatggtaacacaaactatgcacagaagctccagggcagagtcaccatgaccacagacacatccacgagcacagcctacatggagctgaggagcctgagatctgacgacacggccgtgtattactgtgcgagacgtaggtatagcagcagctggtttgactactggggccagggaaccctggtcaccgtctcctcag

SEQ ID NO: 5066 - DNA, 358 bp, Homo sapiens
caggtccagcttgtgcagtctggggctgaggtgaagaagcctggggcctcagtgaaggtttcctgcaaggcttctggatacaccttcactagttatggtatgcattgggtgcgccaggcccccggacaaaggcttgagtggatgggatggatcaacgctggcaatggtaacagaaaatattcacagaacttccagggcagagtcaccattaccagggacacatccgcgagcacagcctacatggagctgagcagcctgagatctgaagacacggctgtgtattattgtgcggggggtgggagcttttacaccggagttgactcctggggccagggaaccctggtcaccgtctcctcag

SEQ ID NO: 5067 - DNA, 358 bp, Homo sapiens
caggtgcagctgcaggagtcgggcccaggactggtgaagccttcggggaccctgtccctcacctgcgctgtctctggtggctccatcagcagtagtaactggtggagttgggtccgccagcccccagggaaggggctggagtggattggggaaatctatcatagtgggagcaccaactacaacccgtccctcaagagtcgagtcaccatatcagtagacaagtccaagaaccagttctccctgaagctgagctctgtgaccgccgcggacacggccgtgtattactgtatgcgaagtggttattactacgctgcttttgatatctggggccaagggacaatggtcaccgtctcttcag

SEQ ID NO: 5068 - DNA, 361 bp, Homo sapiens
cagctgcagctgcaggagtcgggcccaggactggtgaagccttcggagaccctgtccctcacctgcactgtctctggtggctccatcagcagtagtagttactactggggctggatccgccagcccccagggaaggggctggagtggattgggagtatctattatagtgggagcacctactacaacccgtccctcaagagtcgagtcaccatatccgtagacacgtccaagaaccagttctccctgaagctgagctctgtgaccgccgcagacacggctgtgtattactgtgcgagacaggcgagccgtagatcagcttttgatatctggggccaagggacaatggtcaccgtctcttcag

SEQ ID NO: 5069 - DNA, 361 bp, Homo sapiens
cagctgcagctgcaggagtcgggcccaggactggtgaagccttcggagaccctgtccctcacctgcactgtctctggtggctccatcagcagtagtagttactactggggctggatccgccagcccccagggaaggggctggagtggattgggagtatctattatagtgggagcacctactacaacccgtccctcaagagtcgagtcaccatatccgtagacacgtccaagaaccagttctccctgaagctgagctctgtgaccgccgcagacacggctgtgtattactgtgcgagacaccattacgatttttggggtggggatatctggggccaagggacaatggtcaccgtctcttcag

SEQ ID NO: 5070 - DNA, 373 bp, Homo sapiens
gaagtgcagctggtgcagtccggagcagaggtgaaaaagcccggggagtctctgaggatctcctgtaagggttctggatacagctttaccagctactggatcagctgggtgcgccagatgcccgggaaaggcctggagtggatggggaggattgatcctagtgactcttataccaactacagcccgtccttccaaggccacgtcaccatctcagctgacaagtccatcagcactgcctacctgcagtggagcagcctgaaggcctcggacaccgccatgtattactgtgcgacaggtcgaaccctattctatgatagtagtggcccctactttgactactggggccagggaaccctggtcaccgtctcctcag

SEQ ID NO: 5071 - DNA, 358 bp, Homo sapiens
caggtgcagctggtggagtctgggggaggcgtggtccagcctgggaggtccctgagactctcctgtgcagcctctggattcaccttcagtagctatggcatgcactgggtccgccaggctccaggcaaggggctggagtgggtggcagttatatcatatgatggaagtaataaatactatgcagactccgtgaagggccgattcaccatctccagagacaattccaagaacacgctgtatctgcaaatgaacagcctgagagctgaggacacggctgtgtattactgtgcgaaagaatatggttcggggagcgcgtttgactactggggccagggaaccctggtcaccgtctcctcag

SEQ ID NO: 5072 - DNA, 357 bp, Homo sapiens
gaggtgcagctggtgcagtctggagcagaggtgaaaaagccgggggagtctctgaagatctcctgtaagggttctggatacagctttaccagctactggatcggctgggtgcgccagatgcccgggaaaggcctggagtggatggggatcatctatcctggtggctctgataccagatacagcccgtccttccaaggccaggtcaccatctcagccgacaagtccatcagcaccgcctacctgcagtggagcagcctgaaggcctcggacaccgccatgtattactgtgcgagtctcctgtatgctcgggggggtatggacgtctggggccaagggaccacggtcaccgtctcctca

SEQ ID NO: 5073 - DNA, 361 bp, Homo sapiens
caggtcaccttgagggagtctggtcctgcgctggtgaaacccacacagaccctcacactgacctgcaccttctctgggttctcactcagcactagtggaatgtgtgtgagctggatccgtcaggccccagggaaggccctggagtggcttgcacgcattgattgggatgatgataaatattacagcacatctctgaacaccaggctcaccatctccaaggacacctccaaaaaccaggtggtcctgacaatgaccaacatggaccctgtggacacagccacgtattactgtgcacggacgtccttgccagctgtagcttttgatatctggggccgagggacaatggtcaccgtctcttcag

SEQ ID NO: 5074 - DNA, 354 bp, Homo sapiens
caggtgcagctgcaggagtcgggcccaggactggtgaagccttcggagaccctgtccctcacctgcactgtctctggtggctccatcagtagttactactggagctggatccggcagcccccagggaagggactggagtggattgggtatatctattacagtgggagcaccaactacaacccctccctcaagagtcgagtcaccatatcagtagacacgtccaagaaccagatctccctgaagctgagctctgtgaccgccgcagacacggccgtgtattactgtgcgagacatacctactactactacggtatggacgtctggggccaagggaccacggtcaccgtctcctca

SEQ ID NO: 5075 - DNA, 358 bp, Homo sapiens
gaggtgcagctggtgcagtctggagcagaggtgaaaaagcccggggagtctctgaagatctcctgtaagggttctggatacagctttaccagctactggatcggctgggtgcgccagatgcccgggaaaggcctggagtggatggggatcatctatcctggtgactctgataccagatacagcccgtccttccaaggccaggtcaccatctcagccgacaagtccatcagcaccgcctacctgcagtggagcagcctgaaggcctcggacaccgccatgtattactgtgcgagaccagggtcgtatagcagcagctggaactactggggccagggaaccctggtcaccgtctcctcag

SEQ ID NO: 5076 - DNA, 358 bp, Homo sapiens
gaggtgcagctggtggagtccgggggaggcttagttcagcctggggggtccctgagactctcctgtgcagcctctggattcaccttcagtagctactggatgcactgggtccgccaagctccagggaaggggctggtgtgggtctcacgtattaatagtgatgggagtagcacaagctacgcggactccgtgaagggccgattcaccatctccagagacaacgccaagaacacgctgtatctgcaaatgaacagtctgagagccgaggacacggctgtgtattactgtgcaagaggcgtgtatagcagtggctggtacgtctactggggccagggaaccctggtcaccgtctcctcag

SEQ ID NO: 5077 - DNA, 358 bp, Homo sapiens
gaggtgcagctggtggagtctgggggaggcttggtccagcctggggggtccctgagactctcctgtgcagcctctggattcacctttagtagctattggatgagctgggtccgccaggctccagggaaggggctggagtgggtggccaacataaatcaagatggaagtgagaaatactatgtggactctgtgaagggccgattcaccatctccagagacaacgccaagaactcactgtatctgcaaatgaacagcctgagagccgaggacacggctgtgtattactgtgcgagagtggggggcagcagctggcactttgactactggggccagggaaccctggtcaccgtctcctcag

SEQ ID NO: 5078 - DNA, 358 bp, Homo sapiens
gaggtgcagctggtggagtctgggggaggcttggtccagcctggggggtccctgagactctcctgtgcagcctctggattcacctttagtagctattggatgagctgggtccgccaggctccagggaaggggctggagtgggtggccaacataaagcaagatggaagtgagaaatactatgtggactctctgaagggccgattcaccatctccagagacaacgccaagaactcactgtatctgcaaatgaacagcctgagagccgaggacacggctgtgtattactgtgcgagaagagagtggctacgaggccaatatgactactggggccagggaaccctggtcaccgtctcctcag

SEQ ID NO: 5079 - DNA, 358 bp, Homo sapiens
gaggtgcagctggtggagtctgggggaggcttggtacagcctggagggtccctgagactctcctgtgcagcctctggattcaccttcagtagttatgaaatgaactgggtccgccaggctccagggaaggggctggagtggatttcttacattcgtagtagcggtagtgccatatactacgcagactctgtgaagggccgattcaccatctccagagacaacgccaagaactcactgtatctgcgaatgaacagcctgagagccgaggacacggctgtttattactgtgcgagatcacagtggctacgcgcaccttttgactactggggccagggaaccctggtcaccgtctcctcag

SEQ ID NO: 5080 - DNA, 388 bp, Homo sapiens
gaggtgcagctggtggagtctgggggaggcttggtccagcctggggggtccctgagactctcctgtgcagcgtctggattcaccttcagtaccaactacatgaactgggtccgccaggctccagggaaggggctggagtgggtctcagttatttatagcggcggtggcacatactacgcagactccgtgaagggcagattcaccatctccagagacaattccaagaacacactgtatcttcaaatgaacagcctgagagccgaggacacggctcgctattactgtgcgagagatcctgggcaaaaccgatattgtggtggtggtaggtgctactggaacatcatgtttgactactggggccagggaaccctggtcaccgtctcctcag

SEQ ID NO: 5081 - DNA, 391 bp, Homo sapiens
caggtgcagctgcaggagtcgggcccaggactggtgaagccttcggggaccctgtccctcacctgcgctgtctctggtggctccatcagcagtagtaactggtggagttgggtccgccagcccccagggaaggggctggagtggattggggaaatctatcatagtgggagcaccaactacaacccgtccctcaagagtcgagtcaccatatcagtagacaagtccaagaaccagttctccctgaagctgagctctgtgaccgccgcggacacggccgtgtattactgtgcgagagaatctcagtatcccatgtattattactatggttcggggagttacttctactactttgactactggggccagggaaccctggtcaccgtctcctcag

SEQ ID NO: 5082 - DNA, 355 bp, Homo sapiens
gaggtgcagctggtggagtctgggggaggcttggtccagcctggggggtccctgagactctcctgtgcagcctctggattcaccgtcagtagcaactacatgagctgggtccgccaggctccagggaaggggctggagtgggtctcagttatttatagcggtggtagcacatactacgcagactccgtgaagggcagattcaccatctccagagacaattccaagaacacgctgtatcttcaaatgaacagcctgagagccgaggacacggctgtgtattactgtgcgagagtaacgatttccctacatgcttttgatatctggggccaagggacaatggtcaccgtctcttcag

SEQ ID NO: 5083 - DNA, 358 bp, Homo sapiens
caggtgcagctgatgcagtctggggctgaggtgaggaagcctggggcctcagtgaaagtgtcctgtaagacttctggatacaccttcagcgccttctatatccactgggtgcgacaggcccctggacaagggcttgagtggatgggattcatctaccccaacactggtggcacatcgtatgcccaaacccttcaagacagggtcaccatgagcagtgacacgtccatccgcacagcctacatggagctgcgcaggctcagatctgacgacacggccgtttattactgtgtgagagtgtggagtggagaattctggttcgacccctggggccagggaaccctggtcaccgtctccacag

SEQ ID NO: 5084 - DNA, 358 bp, Homo sapiens
caggtgcagctggtggagtctgggggaggcttggtcaagcctggagggtccctgagactctcctgtgcagcctctggattcaccttcagtgactactacatgagctggatccgccaggctccagggaaggggctggagtgggtttcatacattagtagtagtggtagtaccatatactacgcagactctgtgaagggccgattcaccatctccagggacaacgccaagaactcactgtatctgcaaatgaacagcctgagagccgaggacacggccgtgtattactgtgcgagaggatgggtggaacggagtggttacttcccttggggccagggaaccctggtcaccgtctcctcag

SEQ ID NO: 5085 - DNA, 388 bp, Homo sapiens
gaggtgcagctggtggagactggaggaggcttgatccagcctggggggtccctgagactctcctgtgcagcctctgggttcaccgtcagtagcaactacatgagctgggtccgccaggctccagggaaggggctggagtgggtctcagttatttatagcggtggtagcacatactacgcagactccgtgaagggccgattcaccatctccagagacaattccaagaacacgctgtatcttcaaatgaacagcctgagagccgaggacacggccgtgtattactgtgcgagaagtgggtattactatgatagtagtggttattgggcccttgaagctggctggtacttcgatctctggggccgtggcaccctggtcactgtctcctcag

SEQ ID NO: 5086 - DNA, 379 bp, Homo sapiens
gaggtgcagctggtgcagtctggagcagaggtgaaaaagcccggggagtctctgaagatctcctgtaagggttctggatacagcttttccagctactggatcggctgggtgcgccagatgcccgggaaaggcctggagtggatggggatcatctattctggtgactctgataccagatacagcccgtccttccaaggccaggtcaccatctcagccgacaagtccatcagcaccgcctacctgcagtggagcagcctgaaggcctcggacaccgccatgtattattgtgcgagatggtcagcctattactatggttcggggagttattattactactttgactactggggccagggaaccctggtcaccgtctcctcag

SEQ ID NO: 5087 - DNA, 379 bp, Homo sapiens
caggttcagctggtgcagtctggagctgaggtgaagaagcctggggcctcagtgaaggtctcctgtaaggcttctggttacacctttaccagctatggtatcacctgggtgcgacaggcccttggacaagggcttgagtggatgggatggatcagcgcttacaatgatcacacaaactatgcacagaagctccagggcagagtcaccatgaccacagacacatccacgagcacagcctacatggagctgaggagcctgagatctgacgacacggccgtgtattactgtgcgagagatacgggccaaggggactattattactatggttcggggagttatgactactggggccagggaaccctggtcaccgtctcctcag

SEQ ID NO: 5088 - DNA, 382 bp, Homo sapiens
cagatcaccttgaaggagtctggtcctacgctggtgaaacccacacagaccctcacgctgacctgcaccttctctgaattctcactcagcactagtggagtgggtgtgggctggatccgtcagcccccaggaaaggccctggagtggcttgcactcatttattgggatgatgataaacactacagtccctctctgaagagcaggctcaccatcaccaaggacacctccaaaaaccaggtggtccttacaatgaccaacatggaccctgtggacacagccacatatttctgtgcacacagaaatcttttgaattcggggagttatcgggacgattacttctttgactactggggccagggaaccctggtcaccgtctcctcag

SEQ ID NO: 5089 - DNA, 378 bp, Homo sapiens
gaggtccagctggtacagtctggggctgaggtgaagaagcctggggctacagtgaaaatctcctgcaaggtttctggatacaccttcaccgactgctacatgcactgggtgcaacaggcccctggaaaagggcttgagtgggtgggacttattgatcctgaagatggtgaaacaatatacgcagagaagttccagggcagagtcaccataaccgcggacacgtctacagacacagcctacatggagctgagcagcctgagatctgaggacacggccgtgtattactgtgcaacagattcgcggaatttctatgatagtagtggcaagcggtggggtatggacgtctggggccaagggaccacggtcaccgtctcctca

SEQ ID NO: 5090 - DNA, 378 bp, Homo sapiens
gaggtgcagctggtggagtctgggggaggcttggtccagcctggggggtccctgagactctcctgtgcagcctctggattcaccttcagtagctatgctatgcactgggtccgccaggctccagggaagggactggaatatgtttcagctattagtagtaatgggggtagcacatattatgcaaactctgtgaagggcagattcaccatctccagagacaattccaagaacacgctgtatcttcaaatgggcagcctgagagctgaggacatggctgtgtattactgtgcgaggggacaggatacagctatggttactctctactactactacggtatggacgtctggggccaagggaccacggtcaccgtctcctca

SEQ ID NO: 5091 - DNA, 387 bp, Homo sapiens
caggtacagctgcagcagacagggccaggactggtgaagccctcgcagaccctctcactcacctgtgccatctccggggacagtgtctctagcaacagtgctgcttggagctggatcaggcagtccccatcgagaggccttgagtggctgggaaggacatattacaggtccaagtggaataatgattatgcagtctctgtgaaaggtcgaataaccatcaactcagacacatccaagaaccaattctctctgcaactgaactccgtgactcccgacgacacggctatttactactgtgcaagagatcgggtggatgcagtttcggttggcctctattattacggtatggacgtctggggccaagggaccacggtcaccgtctcctca

SEQ ID NO: 5092 - DNA, 379 bp, Homo sapiens
caggtgcagctggtgcagtctggggctgaggtgaagaagcctggggcctcagtgaaggtctcctgcaaggcttctggatacaccttcaccggctactatatgcactgggtgcgacaggcccctggacaagggcttgagtggatgggatggatcaaccctaacagtggtggcacaaactatgcacagaagtttcagggcagggtcaccatgaccagggacacgtccatcagcacagcctacatggagctgagcaggctgagatctgacgacacggccgtgtattactgtgcgagaggggtcccgtcatacgatttttggagtggttcccggtcctggttcgacccctggggccagggaaccctggtcaccgtctcctcag

SEQ ID NO: 5093 - DNA, 390 bp, Homo sapiens
caggtgcagctggtgcagtctggggccgaagtgaagaagcctgggtcctcggtgaaggtctcctgcaaggcttctggagacaccttcagcacctatgctattagttgggtgcgacaggcccctggacaggggcctgagtggatgggagggatcatccctatctttggtacaacgaactatgcacagaagttccagggcagagtcaccataaccgcggacaaatccacgaccacagcctacatggacctgagcagcctgacatctgacgacacggccgtgtattactgtgcgagagacagcgatattctgactggatatcacccaataaatggctactactactactttatggacgtctggggccaagggaccacggtcaccgtctcctca

SEQ ID NO: 5094 - DNA, 378 bp, Homo sapiens
caggtccagctggtgcagtctggggctgaggtgaagaagcctgggtcctcggtgaaggtctcgtgcaaggcttctggaggcaccttcatcacctatggtataagctgggtgcgacaggcccctggacaagggcttgagtggatgggaaggatcatccctattcttggtatagcaaactacgcacagaagttccagggcagagtcacgattaccgcggacaaatccacgagcacagcctacatggagctgagcagcctgagatctgaggacacggccgtctactactgtgcgagagctaatgatagcagtggtcattactctgttgaggggaacggtatgggcgtctggggccaagggaccacggtcaccgtctcctca

SEQ ID NO: 5095 - DNA, 378 bp, Homo sapiens
caggtgcagctggtgcagtctggggctgaggtgaagaagcctgggtcctcggtgaaggtctcctgcaaggcttctggaggcaccttcagcaactatgctatcagctgggtgcgacaggcccctggacaagggcttgagtggatgggagggatcatccctatctttggtccaccaaactacgcacagaagttccagggcagagtcacgattaccgcgaacaaatccacgagcacagcctacatggaactgagcagcctgagatctgaggacacggccgtatattactgtgcgagagaagaactcggggagtccatagattactacaactactacggcatggacgtctggggccaagggaccacggtcaccgtctcctca

SEQ ID NO: 5096 - DNA, 382 bp, Homo sapiens
caggtgcagctgcaggagtcgggcccaggactggtgaagccttcacagaccctgtccctcacctgcactgtctctggtggctccatcagcagtggtgattactactggagttggatccgccagcccccagggaagggcctggagtggattgggtacatctattacagtgggagcacctactacaacccgtccctcaagagtcgagttaccatatcagtagacacgtccaagaaccagttctccctgaagctgagctctgtgactgccgcagacacggccgtgtattactgtgccagtggggcgcagccgtattactatggttcggggagacaaaactggttcgacccctggggccagggaaccctggtcaccgtctcctcag

SEQ ID NO: 5097 - DNA, 378 bp, Homo sapiens
caggtgcagcttgtggagtctgggggaggcgtggtccagcctgggaggtccctgagactctcctgtgcagcgtctggattcaccttcagtacctatggcatgcactgggtccgccaggctccaggcaaggggctggagtgggtggcagttatatggtatgatggaagtaaaaaatactatggagaccccgtgaagggccgattcaccatctccagagacaattccaagaacacgctgtatctgcaaatgaacagcctgagagccgaggacacggctgtgtattactgtgcgagagatcgggtccgcggagtcggggagtcaacctaccactacggtatggacgtctggggccaagggaccacggtcaccgtctcctca

SEQ ID NO: 5098 - DNA, 379 bp, Homo sapiens
gaagtgcagctggtggagtctgggggaggcttggtacagcctggcaggtccctgagactctcctgtgcagcctctggattcacctttgatgagtatgccatgcactgggtccggcaaggtccagggaagggcctggagtgggtctcaggtattagttggaatagtggtagcataggctatgcggactctgtgaagggccgattcaccatctccagagacaacgccaagaactccctgtatctgcaaatgaacagtctgagagctgaggacacggccttgtattattgtggaaaagatattagaaggtatagcagaagctactacgccgggcccctgttcgacccctggggccagggaaccctggtcaccgtctcgtcag

SEQ ID NO: 5099 - DNA, 385 bp, Homo sapiens
gaggtgcagctggtggagtccgggggaggcttggtccagcctggggggtccctgaaactctcctgtgcagcctctgggttcaccttcagtggctctgctatgcactgggtccgccaggcttccgggaaagggctggagtgggttggccgtattagaagcaaagctaacagttacgcgacagcatatgctgcgtcggtgaaaggcaggttcaccatctccagagatgattcaaagaacacggcgtatctgcaaatgaacagcctgaaaaccgaggacacggccgtgtattactgtactagacccctgtattactatgatagtagtggttattgggactggtacttcgatctctggggccgtggcaccctggtcactgtctcctcag

SEQ ID NO: 5100 - DNA, 379 bp, Homo sapiens
gaggtgcagctggtggagtctgggggaggcttggtccagcctggggggtccctgagactctcctgtgcagcctctggattcacctttagtagctattggatgagctgggtccgccaggctccagggaaggggctggagtgggtggccaacataaagcaagatggaagtgagaaatactatgtggactctgtgaagggccgattcaccatctccagagacaacgccaagaactcactgtatctgcaaatgaacagcctgagagccgaggacacggctgtgtattactgtgcgagagtcgtattacgatattttgactggccgaagcaccatgatgcttttgatatctggggccaagggacaatggtcaccgtctcttcag

SEQ ID NO: 5101 - DNA, 411 bp, Homo sapiens
caggtgcagctacagcagtggggcgcaggactgttgaagccttcggagaccctgtccctcacctgcgctgtctatggtgggtccttcagtggttactactggagctggatccgccagcccccagggaaggggctggagtggattggggaaatcaatcatagtggaagcaccaactacaacccgtccctcaagagtcgagtcaccatatcagtagacacgtccaagaaccagttctccctgaagctgagctctgtgaccgccgcggacacggctgtgtattactgtgcgagaggttggattaaaggcactaacccaaatcgtggatacagctatggttacgttaaatcctattactactactactacggtatggacgtctggggccaagggaccacggtcaccgtctcctca

SEQ ID NO: 5102 - DNA, 393 bp, Homo sapiens
cagggccagtttgtgcagtctggggctgaggtcaagaagcctggagcctcagtgaagttttcgtgcaaagcctctggatacaccttcacaaattatgctattcattgggtgcgccaggcccccggacaaagccttgagtggatgggatggatcaacgttggctatggtgacacgaattattcacagaagttccagggcagagtcaccattgccagcgacacatccgcgagcacagcctacatggagctgagcagcctgacatctgaagacacagctgtctattactgtgcgagagggggatattgtgcttattccagctgctcaactgacttttacttctactactacggtctggacgtctggggccaagggacctcgatcaccgtctcctca

SEQ ID NO: 5103 - DNA, 390 bp, Homo sapiens
gaggtgcagctggtggagactggaggaggcttgatccagcctggggggtccctgagactctcctgtgcagcctctgggttcaccgtcagtaccaactacatgagctgggtccgccaggctccagggaaggggctggagtgggtctcagttatttatagcggtggtagcacatactacgcagactccgtgaagggccgattcaccatctccagagacaattccaagaacacgctgtatcttcaaatgaacagcctgagagccgaggacacggccgtgtattactgtgcgagagtatacggcgaatcttacgatattttgactggttataatcccctctactacaacggtatggacgtctggggccaagggaccacggtcaccgtctcctca

SEQ ID NO: 5104 - DNA, 352 bp, Homo sapiens
caggtgcagctgcaggagtcgggcccaggactggtgaagccttcggggaccctgtccctcacctgcgctgtctctggtggctccatcaccagtaataactggtggagttgggtccgccagcccccagggaaggggctggagtggattggagaaatctatcatggtgggagcaccaactacaacccgtccctcaagagtcgcgtcaccatatccctagacaagtccaagaaccagttctccctgaggctgagctctgtgaccgccgcggacacggccgtgtattactgtgcgagagatcagtgggatgcttttgatatctggggccaagggacaatggtcaccgtctcttcag

SEQ ID NO: 5105 - DNA, 358 bp, Homo sapiens
gaggtgcagctggtggagtctgggggaggcttggtaaagcctggggggtcccttagactctcctgtgcagcctctggattcactttcagtgacgtctggatgacttgggtccgccaggctccagggaaggggctggagtgggttggccgcgttaaaagcaaatctcatggtgggacaacagactacgctgcgcccgtgaaagacagattcaccatctccagagatgattcaaaaaacacgctgtttctgcaaatgaacagcctgacaaccgaggacacagccgtgtattactgttccacacggggatctaatgcttttgatatctggggccaagggacaatggtcaccgtctcttcag

SEQ ID NO: 5106 - DNA, 379 bp, Homo sapiens
gaggtgcagctggtggagtctgggggaggctcggtccagcctggggagtccctgagactctcctgttcagcctctggattcaccttcagtcacaatgctatgcactgggtccgccaggctccagggaagggactggaatatgtttcagggattagtagtaatgggggtagcacctactacgcagactccgtgaggggcagattcaccatctccagagacaattccaagaacacggtgtatcttcagatgagcagtctgagaactgaggacacggctgtgtattattgtgtgaaagggggttcctccttcaacatctggtcccccgcttacaactggttcgacccctggggccagggaaccccggtcaccgtctcctcag

SEQ ID NO: 5107 - DNA, 343 bp, Homo sapiens
caggtgcagctacagcagtggggcgcaggactgttgaagccttcggagaccctgtccctcacctgcgctgtctatggtgggtccttcagtggttactactggagctggatccgccagcccccagggaaggggctggagtggattggggaaatcaatcatagtggaagcaccaactacaacccgtccctcaagagtcgagtcaccatatcagtagacacgtccaagaaccagttctccctgaagctgagctctgtgaccgccgcggacacggctgtgtattactgtgcgagaggctcccaattactactctggggccagggaaccctggtcaccgtctcctcag

SEQ ID NO: 5108 - DNA, 356 bp, Homo sapiens
caggtgcagctggtggagtctgggggaggcgtggtccagcctgggaggtccctgagactctcctgtgcagcgtctggattcaccttcagtagctatggcatgcactgggtccgccaggctccaggcaaggggctggagtgggtggcagttatatggtatgatggaagtaataaatactatgcagactccgtgaagggccgattcaccatctccagagacaattccaagaacacgctgtatctgcaaatgaacagcctgagagccgaggacacggctgtgtattactgtgcgatgaggggggccaggatatagtggctacgattgctgtgagggaaccctggtcaccgtctcctcag

SEQ ID NO: 5109 - DNA, 352 bp, Homo sapiens
caggtccagctggtgcagtctggggctgaggtgaagaagcctgggtcctcggtgaaggtctcctgcaaggcttctggaggcaccttcaacatcaatgctatcagttgggtgcgacaggcccctggacaagggcttgagtggatgggaaggatcatccctatcgttggtatggcaaactacgcacagaagttccagggcagagtcacgatgaccgcggacaaatccacgagcacggcctacatggagctgagtaatttgagatctgaggacacggccgtgtattactgtgcgagaggcccccatgatgcttttgctatctggggccaagggacactggtcaccgtctcttcag

SEQ ID NO: 5110 - DNA, 324 bp, Homo sapiens
caggtgcagctggtggagtctgggggaggcgtggtccagcctgggaggtccctgagactctcctgtgcagcgtctggattcaccttcagtagaaacggcatgcactgggtccgccaggctccaggcaaggggctggagtgggtggcaattatatggtatgatggaactaataaatactgtgcgggctccgtgaagggccgattcaccatctccagagacaattccaagaacacgctgtatctgcaaatgaacagcctgagggccgaggatagtagtggctattaaggaccactggccagggaaccctggtcaccgtctcctcag

SEQ ID NO: 5111 - DNA, 343 bp, Homo sapiens
gaggtgcagctggtggagtctgggggaggcttggtacagcctggggggtccctgagactctcctgtgcagcctctggattcatcttcagcacctatcccatgaactgggtccgccaggctccagggaaggggctggagtggatttcatacattaccagtagtagtagtaccatatactacgcagactctgtgaagggccgattcaccatctccagagacaatgccaagaactcactgtatctgcaaatgaacagcctgagaggcgaggacacggctgtgtattactgtgcgagaggtgccccgaactactggggccagggaaccctggtcaccgtctcctcag

SEQ ID NO: 5112 - DNA, 368 bp, Homo sapiens
cagatcaccttaaaggagtctggtcctacactggtgaaacccacacagaccctcacgctgacctgcaccttctctgggttctcactcagcacttatggaatgggtgtgggctggatccgtcagcccccaggaaaggccctggattggcttgcactcatttattgggatgatgataagcgctgcagcccatctgtgaagagcaggctcaccatcaccaaggacacctccaaaaactaggtggtcctaacaatgaccaacctggaccctgtggacacagccacatattactgtgcacactccgtattagtattcttccccggggcggtatggacgtctggggccaagggaccacggtcaccgtctcctca

SEQ ID NO: 5113 - DNA, 331 bp, Homo sapiens
cagtctgtgttgacgcagccgccctcagtgtctgcggccccaggacagaaggtcaccatctcctgctctggaagcagctccaacatttggaaaaattatgtatcctggtatcagcagttcccaggaacagcccccaaactcctcatttttgacaataataagcgaccctcagggattcctgaccgattctctggctccaagtctggcacgtcagccaccctgggcatcaccggactccagactggggacgaggccgattattactgcggaacatgggatagcagcctgagtgcggtggtattcggcggagggaccaagctgaccgtcctag

SEQ ID NO: 5114 - DNA, 331 bp, Homo sapiens; identical to SEQ ID NO: 5113

SEQ ID NO: 5115 - DNA, 331 bp, Homo sapiens; identical to SEQ ID NO: 5113

SEQ ID NO: 5116 - DNA, 331 bp, Homo sapiens; identical to SEQ ID NO: 5113

SEQ ID NO: 5117 - DNA, 331 bp, Homo sapiens; identical to SEQ ID NO: 5113

SEQ ID NO: 5118 - DNA, 331 bp, Homo sapiens; identical to SEQ ID NO: 5113

SEQ ID NO: 5119 - DNA, 331 bp, Homo sapiens; identical to SEQ ID NO: 5113

SEQ ID NO: 5120 - DNA, 331 bp, Homo sapiens
cagtctgccctgactcagcctgcctccgtgtctgggtctcctggacagtcgatcgccatctcctgcactggaaccagcaatgacgttggtggttataactatgtctcctggtaccaacaacacccaggcaaagcccccaaactcatgatttatgatgtcactaatcggctctcaggggtttctgatcgcttctctggctccaagtctggcaacacggcctccctgaccatctctgggctccaggctgaggacgaggctgattattactgcagctcatatacaggcagcagcactgtggtgttcggcggagggaccaagctgaccgtcctag

SEQ ID NO: 5121 - DNA, 331 bp, Homo sapiens
cagtctgccctgactcagcctgcctccgtgtctgggtctcctggacagtcgatcgccatctcctgcactggaacctacaatgacgttggtggctataactatgtctcctggtaccaacaacacccaggcaaagcccccaaattcttgatttatgatgtcactaatcggccctcaggggtttctgatcgcttctctggctccaagtctggcaacacggcctccctgaccatctctgggctccaggctgaggacgaggctgattattactgcagctcatatacaggcagcagcactgtggtgttcggcggagggaccaaggtgaccgtcctag

SEQ ID NO: 5122 - DNA, 331 bp, Homo sapiens
cagtctgccctgactcagcctgcctccgtgtctgggtctcctggacagtcgatcgccatctcctgcactggaaccagcaatgacgttggtggttataactatgtctcctggtaccaacaacacccaggcaaagcccccaaactcatgatttatgatgtcagtaatcggccctcaggggtttctgatcgcttctctggctccaagtctggcaacacggcctccctgaccatctctgggctccaggctgaggacgaggctgattattactgcagctcatatacaggcagcagcactgtggtgttcggcggagggaccaagctgaccgtcctag

SEQ ID NO: 5123 - DNA, 331 bp, Homo sapiens
cagtctgccctgactcagcctgcctccgtgtctgggtctcctggacagtcgatcgccatctcctgcactggaacctacaatgacgttggtggctataactatgtctcctggtaccaacaacacccaggcaaagcccccaaattcttgatttatgatgtcactaatcggccctcaggggtttctgatcgcttctctggctccaagtctggcaacacggcctccctgaccatctctgggctccaggctgaggacgaggctgattattattgcagctcatatacaggtagcagcactgtggtgttcggcggagggaccaaggtgaccgtcctag

SEQ ID NO: 5124 - DNA, 331 bp, Homo sapiens; identical to SEQ ID NO: 5122

SEQ ID NO: 5125 - DNA, 329 bp, Homo sapiens
cagtctgccctgactcagcctgcctccgtgtctgggtctcctggacagtcgatcaccttctcctgcactggaaccagcagtgatattgggagttatgaccttgtctcctggttccaacagcacccaggcagagcccccaaactcatgatttttgacgtcagtaagcggccctcaggggtttctaatcgcttctctggctccaagtctggcaacatggcctccctgacaatctctgggctccagactgaggacgaggctgattattattgctgctcatatgcaggtagtaatactttgttattcggcggagggaccaagctgaccgtcct

SEQ ID NO: 5126 - DNA, 329 bp, Homo sapiens
cagtctgccctgactcagcctgcctccgtgtctgggtctcctggacagtcgatcaccttctcctgcactggaaccagcagtgatattgggagttatgaccttgtctcctggttccaacaccacccaggcagagcccccaaactcatgatttttgacgtcactaagcggccctcaggggtttctaatcgcttctctggctccaagtctggcaacatggcctccctaacaatctctgggctccagactgaggacgaggctgattattattgctgctcatatgcaggcagtaacactttgttattcggcggagggaccaagctgaccgtcct

SEQ ID NO: 5127 - DNA, 329 bp, Homo sapiens
cagtctgccctgactcagcctgcctccgtgtctgggtctcctggacagtcgatcaccttctcctgcactggaaccagcagtgatattgggagttatgaccttgtctcctggttccaacaccacccaggcagagcccccaaactcatgatttttgacgtcactaagcggccctcaggggtttctaatcgcttctctggctccaagtctggcaacatggcctccctgacaatctctgggctccagactgaggacgaggctgattattattgctgctcatatgcaggcagtaacactttgttattcggcggagggaccaagctgaccgtcct

SEQ ID NO: 5128 - DNA, 329 bp, Homo sapiens; identical to SEQ ID NO: 5127

SEQ ID NO: 5129 - DNA, 322 bp, Homo sapiens
gacatccagatgacccagtctccatcctccctgtctgcatctgtaggagacagagtcaccatcacttgccgggcaagtcagaccattagcacctatttaaattggtatcagcagaaaccagggaaagcccctaagctcctggtctatgctgcatccagtttgcaaagtggggtcccatcaaggttcagtggcagtggatctgggacagatttcactctcaccatcagcagtctgcaacctgaagattttgcaactttctactgtcaacagagttacagttccccattcactttcggccctgggaccaaagtggatatcaaac

SEQ ID NO: 5130 - DNA, 322 bp, Homo sapiens; identical to SEQ ID NO: 5129

SEQ ID NO: 5131 - DNA, 322 bp, Homo sapiens; identical to SEQ ID NO: 5129

SEQ ID NO: 5132 - DNA, 322 bp, Homo sapiens
gacatccagatgacccagtctccatcctccctgtctgcatctgtaggagacagagtcaccatcacttgccgggcaagtcagagcattagcagctatttaaattggtatcagcagaaaccagggaaagccccaaagctcctgatctatgctgcatccagtttgcaaagtggggtcccatcaaggttcagtggcagtggatctgggacagatttcactctcaccatcagcagtctgcaacctgaagattttgcaacttactactgtcaacagagttacagtacccctcgggcgttcggccaagggaccaaggtggaaatcaaac

SEQ ID NO: 5133 - DNA, 322 bp, Homo sapiens; identical to SEQ ID NO: 5132

SEQ ID NO: 5134 - DNA, 322 bp, Homo sapiens
gacatccagatgacccagtctccatcctccctgtctgcctctgtaggagacagagtcaccatcacttgccgggcaagtcagagcattagcacctatttaaattggtatcagcagaaaccagggaaagccccaaagctcctgatctatgctgcatccagtttgcaaagtggggtcccatcaaggttcagtggcagtggatctgcgacagatttcactcttaccatcagcagtctgcaacctgaagattttgcaacttactactgtcaacagagttacagtacccctcgggcgttcggccaagggaccaaggtggaaatcaaac

SEQ ID NO: 5135 - DNA, 337 bp, Homo sapiens
gatattgtgatgactcagtctccactctccctgcccgtcacccctggagagccggcctccatctcctgcaggtctagtcagcgcctcctgcatcgtgatggatactactatttggattggtacctgcagaagccagggcagtctccacagctcctgatctatttgggttctaatcgggcctccggggtccctgacaggttcagtggcagtggatcaggcacagattttacactgaaaatcagcagagtggaggctgaggatgttggggtttattactgcatgcaagctctacaaactccgatcaccttcggccaagggacacgactggagattaaac

SEQ ID NO: 5136 - DNA, 337 bp, Homo sapiens; identical to SEQ ID NO: 5135

SEQ ID NO: 5137 - DNA, 325 bp, Homo sapiens
gacatccagatgacccagtctccatcctccctgtctgcatctgtaggagacagagtcaccatcacttgccgggcaagtcagagcattagcaactatttaaattggtatcaacagaaaccagggaaagcccctaaactcctgatgtatgctgcatccagtttgccaagtggggtcccatcaaggttcagtggcagtggatctgggacagacttcactctcaccatcagcagtctgcaacctgaagattttgcaacttacttctgtcaacagagttacactacccctcacttcactttcggccctgggaccaaagtggaaatcaaac

SEQ ID NO: 5138 - DNA, 325 bp, Homo sapiens
gacatgcagatgacccagtctccatcctccctgtctgcatctgtaggagacagagtcaccatcacttgccgggcaagtcagagcattagcaactatttaaattggtatcagcagaaaccagggaaagcccctaagctcctgatctatgctgcatccagtttgcaaagtggggtcccatcaaggttcagtggcagtggatctgggacagattatactctcaccatcagcagtctacaacctgaagattttgcaacttactactgtcaacagagttacactacccctcttttcactttcggccctgggaccaaagtggatatcaaac

SEQ ID NO: 5139 - DNA, 334 bp, Homo sapiens
cagtctgccctgactcagcctgcctccgtgtctgggtctcctggacagtcgatcaccatctcctgcactggaaccagcagtgacgttggtggttttaactatgtctcctggtaccaacagcacccaggcaaagcccccaaactcatcatttttgaggtcagtaatcggccctcagagatttctaatcgcttctctggctccaagtctgccaacacggcctccctgaccatctctgggctccaggctgaggacgaggctgattattactgcagctcatatacaggcagcgccactctttatgtcttcggaactgggaccaagatcaccgtcctag

SEQ ID NO: 5140 - DNA, 334 bp, Homo sapiens
cagtctgccctgactcagcctgcctccgtgtctgggtctcctggacagtcgatcaccatctcctgcactggaaccagcagtgacgttggtggttttaactatgtctcctggtaccaacaccacccaggcaaagcccccaaactcatcatttttgaggtcagtaatcggccctcagggatttctgatcgcttctctggctccaagtctgccaacacggcctccctgaccatctctgggctccaggctgaggacgaggctgattattactgcagctcatatacaagcagcaccactctttatgtcttcggaactgggaccaagatcaccgtcctag

SEQ ID NO: 5141 - DNA, 331 bp, Homo sapiens
caggctgtggtgactcaggagccctcactgactgtgtccccaggagggacagtcactctcacctgtggctccagcactggaactgtcaccagtggtcattatacctactggttccagcagaagcctggccaagcccccaggacactgatttatgatacatacaacaaacactcctggacacctacccggttctcaggctccctccttgggggcaaagctgccctgaccctttcgggcgcgcagcctgaggatgaggctgactattattgcttgatctcctatagtggtgctcggggggtattcggcggagggaccaagctgaccgtcctag

SEQ ID NO: 5142 - DNA, 331 bp, Homo sapiens; identical to SEQ ID NO: 5141

SEQ ID NO: 5143 - DNA, 322 bp, Homo sapiens
gacatccagatgacccagtctccatcctccctgtctgcatctgtaggagacagagtcaccatcacttgccgggcaagtcagaccattagcacctttttaaattggtatcagcagaaaccagggcaagcccctaagctcctgatctatgctgcatccactttggaaagtgggatcccatcaaggttcagtggcagtggatctgggacagatttcactctcaccatcagcagtctgcaacctgaagattttgcaacttactactgtcaacagagttacaatgcccctcgaacgttcggccaagggaccaaggtggagatcaaac

SEQ ID NO: 5144 - DNA, 322 bp, Homo sapiens
gacatccagatgacccagtctccatcgtccctgtctgcatctgtaggagacagagtcaccatcacttgccgggcaagtcagaccatcagcacctttttaaattggtatcagcagaaaccagggaaagcccctaagctcctgatctatgctgcatccactttggaaagtgggatcccatcaaggttcagtggcagtggatctgggacagatttcactctcaccatcagcagtctgcaacctgaagattttgcaacttactactgtcaacagagttacaatgcccctcgaacgttcggccaagggaccaaggtggagatcaaac

SEQ ID NO: 5145 - DNA, 322 bp, Homo sapiens
gacatccagatgacccagtctccatcctccctgtctgcatctgtaggagacagagtcaccatcacttgccaggcgagtcaggacattagcaactatttaaattggtatcagcagaaaccagggaaagcccctaagctcctgatctacgatgcatccaatttggaaacaggggtcccatcaaggttcagtggaagtggatctgggacagattttactttcaccatcagcagcctgcagcctgaagatattgcaacatattactgtcaacagtatggtaatctcccgctcactttcggcggagggaccaaggtggagatcaaac

SEQ ID NO: 5146 - DNA, 322 bp, Homo sapiens; identical to SEQ ID NO: 5145

SEQ ID NO: 5147 - DNA, 329 bp, Homo sapiens
cagtctgccctgactcagcctcgctcagtgtccgggtctcctggacagtcagtcaccatctcctgcactggaaccagcagtgatgttggtgcttataactatgtctcctggtaccaacaacacccaggcaaagccccccaattgatgctttatgatgtcagtaagcggccctcaggggtccctgatcgcttctctggctccaagtctgacaacacggcctccctgaccatctctggggtccaggctgaggatgaggctgattattactgctgctcatatgtaggcgggtacagttgggtgttcggcggagggaccaagctgaccgtcct

SEQ ID NO: 5148 - DNA, 331 bp, Homo sapiens
cagtctgccctgactcagcctcgctcagtgtccgggtctcctggacagtcagtcaccatctcctgctctggaaccagcagtaatgttggtgcttataactatgtctcctggtaccaacaacacccaggcaaagccccccgattcatgatttatgatgtcagtaagcggccctcaggggtccctgatcgcttctctggctccaagtctgacaacacggcctccctgaccatctctgggctccaggctgaggatgaggctgattattactgctgttcatatgcaggcagttacagttgggtgttcggcggagggaccaagctgaccgtcctag

SEQ ID NO: 5149 - DNA, 334 bp, Homo sapiens
gatattgtgatgacccagactccactctctctgtccgtcacccctggacagccggcctccatctcctgcaagtctagtcagagcctcctgcatagtgatggaaagacctatttgtattggtacctgcagaagccaggccagtctccacagctcctgatctatgaagtttccaaccggttctctggagtgccagataggttcagtggcagcgggtcagggacagatttcacactgaaaatcagccgggtggaggctgaggatgttggggtttattactgcatgcaaagtatacagcctctcactttcggcggagggaccaaggtggagatcaaac

SEQ ID NO: 5150 - DNA, 322 bp, Homo sapiens; identical to SEQ ID NO: 1668

SEQ ID NO: 5151 - DNA, 322 bp, Homo sapiens
gacatccagatgacccagtctccttccaccctgtctgcatctgtaggagacagagtcaccatcacttgccgggccagtcagagtattagtagctggttggcctggtatcagcagaaaccagggaaagcccctaagctcctgatctataaggcgtctagtttagaaagtggggtcccatcaaggttcagcggcagtggatctgggacagaattcactctcaccatcagcagcctgcagcctgatgattttgcaacttattactgccaacagtataatagttattctccgacgttcggccaagggaccaaggtggaaatcaaac

SEQ ID NO: 5152 - DNA, 332 bp, Homo sapiens
cagcttatgctgactcaatcgccctctgcctctgcctccctgggagcctcggtcacactcacctgcactctgagcagcgggcacagcacctacgccatcgcctggcatcagcagcagccagacacgggccctcgttacttgatgagagttaatgatgatgggagccataccaagggagatgggattcctgatcgattctccggctccagctctggggctgagcgctacctcaccatctccagcctccagtctgacgatgaggctgactattattgtcagacctggcacagtggcgttcgggttttcggcggagggaccaaactgaccgtcct

SEQ ID NO: 5153 - DNA, 322 bp, Homo sapiens
gacatccagatgacccagtctccatcctccctgtctgcatctgtaggagacagagtcaccatcacttgccgggcaagtcagagcattagcagctatttaaattggtatcagcagaaaccagggaaagcccctaagctcctgatctatgctgcatccagtttgcaaagtggggtcccatcaaggttcagtggcagtggatctgggacagatttcactctcaccatcagcagtctgcaacctgaagattttgcaacttactactgtcaacagagttacagtacccctcccacttttggccaggggaccaagctggagatcaaac

SEQ ID NO: 5154 - DNA, 325 bp, Homo sapiens
gaaattgtgttgacgcagtctccaggcaccctgtctttgtctccaggggaaagagccaccctctcctgcagggccagtcagagtgttagcagcagctacttagcctggtaccagcagaaacctggccaggctcccaggctcctcatctatggtgcatccagcagggccactggcatcccagacaggttcagtggcagtgggtctgggacagacttcactctcaccatcagcagactggagcctgaagattttgcagtgtattactgtcagcagtatggtagctcaccggtcactttcggcggagggaccaaggtggagatcaaac

SEQ ID NO: 5155 - DNA, 322 bp, Homo sapiens; identical to SEQ ID NO: 3903

SEQ ID NO: 5156 - DNA, 331 bp, Homo sapiens
cagtctgccctgactcagcctgcctccgtgtctgggtctcctggacagtcgatcaccatctcctgcactggaaccagcagtgacgttggtggttataactatgtctcctggtaccaacagcacccaggcaaagcccccaaactcatgatttatgatgtcagtaatcggccctcaggggtttctaatcgcttctctggctccaagtctggcaacacggcctccctgaccatctctgggctccaggctgaggacgaggctgattattactgcagctcatatacaagcagcagcacttatgtcttcggaactgggaccaaggtcaccgtcctag

SEQ ID NO: 5157 - DNA, 331 bp, Homo sapiens
cagtctgccctgactcagcctgcctccgtgtctgggtctcctggacagtcgatcaccatctcctgcactggaaccagcagtgacgttggtgcttataactatgtctcctggtaccaacagcacccaggcaaagcccccaaactcatgatttatgaggtcagtaatcggccctcaggggtttctaatcgcttctctggctccaagtctggcaacacggcctccctgaccatctctgggctccaggctgaggacgaggctgattattactgcagctcacatagaagcagcaccactgtggtattcggcggagggaccaagctgaccgtcctag

SEQ ID NO: 5158 - DNA, 322 bp, Homo sapiens
gacatccagatgacccagtctccaccctccctgtctgcatctgtaggagacagagtcaccatcacttgccaggcgagtcaggacattagcaactatttaaattggtatcagcagaaaccagggaaagcccctaagctcctgatctacgatgtatccaatttggaaacaggggtcccatcaaggttcagtggaagtggatctgggacagattttactttcaccatcagcagcctgcagcctgaagatattgcaacatattactgtcaacagtatgataatctcccgctcactttcggcggagggaccaaggtggagatcaaac

SEQ ID NO: 5159 - DNA, 322 bp, Homo sapiens
gacatccagatgacccagtctccatcctccctgtctgcatctgtaggagacagagtcaccatcacttgccgggcgagtcagggcattagtaattatttagcctggtatcagcagaaaccagggaaaggtcctaagctcctgatctatgctgcatccactttgcaatcaggggtcccatctcggttcagtggcagtggatctgggacagatttctctctcaccatcagcagcctgcagcctgaagatgttgcaacttattactgtcaaaagtataacagtgccccttggacgttcggccaagggaccaaggtggaaatcaaac

SEQ ID NO: 5160 - DNA, 322 bp, Homo sapiens; identical to SEQ ID NO: 1798

SEQ ID NO: 5161 - DNA, 316 bp, Homo sapiens
gacatccagatgacccagtctccttccaccctgtctgcatctgtaggagacagagtcaccatcacttgccgggccagtcagagtattagtagctggttggcctggtatcagcagaaaccagggaaagcccctaagctcctgatctatgatgcctccagtttggaaagtggggtcccatcaaggttcagcggcagtggatctgggacagaattcactctcaccatcagcagcctgcagcctgatgattttgcaacttattactgccaacagtataatagttacctcttcggccctgggaccaaagtggatatcaaac

SEQ ID NO: 5162 - DNA, 322 bp, Homo sapiens
gaaattgtgttgacgcagtctccaggcaccctgtctttgtctccaggggaaagagccaccctctcctgcagggccagtcagagtgttagcagcagctacttagcctggtaccagcagaaacctggccaggctcccaggctcctcatctatggtgcatccagcagggccactggcatcccagacaggttcagtggcagtgggtctgggacagacttcactctcaccatcagcagactggagcctgaagattttgcagtgtattactgtcagcagtatggtagctcgatcaccttcggccaagggacacgactggagattaaac

SEQ ID NO: 5163 - DNA, 325 bp, Homo sapiens
gaaattgtgttgacgcagtctccaggcaccctgtctttgtctccaggggaaagagccaccctctcctgcagggccagtcagagtgttagcagcagctacttagcctggtaccagcagaaacctggccaggctcccaggctcctcatctatggtgcatccagcagggccactggcatcccagacaggttcagtggcagtgggtctgggacagacttcactctcaccatcagcagactggagcctgaagattttgcagtgtattactgtcagcagtatggtagctcctccctcactttcggcggagggaccaaggtggagatcaaac

SEQ ID NO: 5164 - DNA, 330 bp, Homo sapiens
cagtctgccctgactcagcctgcctccgtgtctgggtctcctggacagtcgatcaccatctcctgcactggaaccagcagtgacgttggtggttataactatgtctcttggtaccaacagtattcaggcaaagcccccaaactcatgatttatgatgtcagttatcggccctcagggctttctaatcgcttctctggctccaagtctggcaacacggcctccctgaccatctctgggctccaggctgaggacgaggctgactattactgcagctcatatagaagcagcagcactgtggtgttcggcggagggaccaagctgaccgtccta

SEQ ID NO: 5165 - DNA, 328 bp, Homo sapiens
cagtctgccctgactcagcctcgctcagtgtccgggtctcctggacagtcagtcaccatctcctgcactggaaccagcagggatgttggtggttataattctgtctcctggtaccaacaacacccaggcaaagcccccaaactcatgatttatgatgtcagtaagcggccctcaggggtccctgatcgcttctctggctccaagtctggcaacacggcctccctgaccatctctgggctccaggctgaggatgaggctgattattactgctgctcatatgcaggcagccttcatgtcttcggaagtgggaccaaggtctccgtcctag

SEQ ID NO: 5166 - DNA, 328 bp, Homo sapiens
cagtctgccctgactcagcctcgctcagtgtccgggtctcctggacagtcagtcaccatctcctgcactggaaccagcagtgatgttggtggttataactatgtctcctggtaccaacaacacccaggcaaagcccccaaactcatgatttatgatgtcagtgagcggccctcaggggtccctgatcgcttctctggctccaagtctgccaacacggcctccctgaccatctctggtctccaggctgaggatgaggctgattattactgctgctcatatgcaggcagctccgtggttttcggcggagggaccaagctgaccgtcctag

SEQ ID NO: 5167 - DNA, 330 bp, Homo sapiens
cagtctgtgttgacgcagccgccctcagtgtctgcggccccaggacggaaggtcaccatctcctgctctggaagcacctccaacattgggaataattatgtatcctggtaccagcagctcccaggaacagcccccaaactcctcatttatgacaataataagcgaccctcagggattcctgaccgattctctggctccaagtctggcacgtcagccgccctgggcatcaccggactccagactggggacgaggccgattattactgcggagcatgggatagcagcctgagtgctggggtgttcggcggagggaccaagctgaccgtccta

SEQ ID NO: 5168 - DNA, 325 bp, Homo sapiens
tcctatgagctgacacagtcaccctcggcgtcagtgtccccaggacaaacggccaggatcacctgctctggagatgcattgccaaaaaaatatgcttattggtaccagcagaagtcaggcgaggtccctgtgctggtcatctatgaggacaacaaacgaccctccgggatccctgagagattctctggctccagctcagggacaatggccaccttgactatcagtggggcccaggtggaggatgaagctgactactattgttactcaacagacagcagtggtaatcatagggtgttcggcggagggaccaagctgaccgtcctag

SEQ ID NO: 5169 - DNA, 322 bp, Homo sapiens
gacatccagatgacccagtctccatcctccctgtctgcatctgtaggtgacagagtcaccatcacttgccgggcaagtcagagcattagcacctttttaaattggtatcagcagaaaccagggaaagcccctaacctcctgatctatgctgcatccagtttgcaaagtggggtcccatcaaggttcagtggcagtggatttgggacagagttcactctcaccatcagcagtctgcaacctgaagattttgcaacttactactgtcaacagagttacagtaccccgtggacattcggccaagggaccaaggtggaaatcaaac

SEQ ID NO: 5170 - DNA, 335 bp, Homo sapiens
caatctgccctgactcagcctgcctccgtgtctgggtctcctggacagtcgatcaccatctcctgcactggaaccagcagtgacattggtgggcatgactctgtctcctggtaccaacaacacccaggcgaagcccccaaattgataatttatgacgtgagttctcggccctcagggatttctcctcgcttctctggctccaagtctggcaacagggcctccctgatcatctctgggctccaggctgacgacgaggctgattattactgtcggtcatatacgaccagtcgttccgccccttgtctcttcggatctgggaccaaggtcaccgtcct

SEQ ID NO: 5171 - DNA, 325 bp, Homo sapiens
gacatccagatgacccagtctccatcctccctgtctgcatctgtaggagacagagtcaccatcacttgccgggcaagtcagagcattagcaggtatttaaattggtatcaacagaaaccagggaaagcccctaagctcctgatctatgctgcatccagtttgcaaagtggggtcccatcaaggttcagtggcagtggatctgggacagatttcactctcaccatcagcagtctgcaacctgaagattttgcaacttactactgtcaacagagttacagtacccccccgtacacttttggccaggggaccaagctggagatcaaac

SEQ ID NO: 5172 - DNA, 322 bp, Homo sapiens
gccatccagttgacccagtctccatcctccctgtctgcatctgtaggagacggagtcaccatcacttgtcgggcaagtcagggcattagcagtgctttagcctggtatcatcagaaaccagggaaagttccaaagctcctgatctatgatgcctccagtttggaaagtggggtcccatcaaggttcagcggcagtggatctgggacagatttcactctcaccatcagcagcctgcagcctgaagattttgcaacttattactgtcaacagtttaatagttaccctctcactttcggcggagggaccaaggtggagatcaaac

SEQ ID NO: 5173 - DNA, 325 bp, Homo sapiens
tcctatgagctgacacagccaccctcggtgtcagtgtccccaggacaaacggccaggatcacctgctctggagatgcattgccaaaaaaatatgcttattggtaccagcagaagtcaggccaggcccctgtgctggtcatctatgaggacagcaaacgaccctccgggatccctgagagattctctggctccagttcagggacaatggccaccttgattatcagtggggcccaggtggaggatgaagctgactactactgttactcaacagacagcagtggtaatcatagagtgttcggcggagggaccaagctgaccgtcctag

SEQ ID NO: 5174 - DNA, 319 bp, Homo sapiens
tcctatgagctgactcagccaccctcagtgtccgtgtccccaggacagacagccagcatcacctgctctggagataaattgggggataaatatgcttgctggtatcagcagaagccaggccagtcccctgtgttggtcatctatcaagataacaagcggccctcagggatccctgagcgattctctggctccaactctgggaacacagccactctgaccatcagcgggacccaggctatggatgaggctgactattactgtcaggcgtgggacagcagcacgggggtattcggcggagggaccaagctgaccgtcctag

SEQ ID NO: 5175 - DNA, 322 bp, Homo sapiens; identical to SEQ ID NO: 3970

SEQ ID NO: 5176 - DNA, 319 bp, Homo sapiens
gaaattgtgatgacgcagtctccagccaccctgtctgtgtctccaggggaaagagccaccctctcctgcagggccagtcagagtgttagcagcaacttagcctggtaccagcagaaacctggccaggctcccaggctcctcatctatgatgcatccaccagggccactggtatcccagccaggttcagtggcagtgggtctgggacagagttcactctcaccatcagcagcctgcagtctgaagattttgcagtttattactgtcagcagtatcataactggccgtacacttttggccaggggaccaagctggagatca

SEQ ID NO: 5177 - DNA, 325 bp, Homo sapiens
gaaatagtgatgacgcagtctccagccaccctgtctgtgtctccaggggaaagagccaccctctcctgcagggccagtcagagtgttaccagcaacttagcctggtaccagcagacacctggccaggctcccagactcctcatctatggtgcatccaccagggccactggtatcccagccaggttcagtggcagtgggtctgggacagagttcactctcaccatcagcagcctgcagtctgaagattttgcagtttattactgtcagcagtataatacctggcctccgctcactttcggcggagggaccaaggtggagatcaaac

SEQ ID NO: 5178 - DNA, 319 bp, Homo sapiens
gacatccagatgacccagtctccttccaccctgtctgcatctgtaggagacagagtcaccatcacttgccgggccagtcagagtattagtagctggttggcctggtatcagcagaaaccagggaaagcccctaagctcctgatctataaggcgtctaatttagaaagtggggtcccatcaaggttcagcggcagtggatctgggacagaattcactctcaccatcagcagcctgcagcctgatgattttgcaacttattactgccaacaatataacagttattggacgttcggccaagggaccaaggtggaaatcaaac

SEQ ID NO: 5179 - DNA, 334 bp, Homo sapiens
cagtctgccctgactcagcctcgctcagtgtccgggtctcctggacagtcagtcaccatctcctgcactggaaccagcagtgatgttggtggttataactatgtctcctggtaccaacagcacccaggcaaagcccccaaactcatgatttatgatgtcagtaagcggccctcaggggtccctgatcgcttctctggctccaagtctggcaacacggcctccctgaccatctctgggctccaggctgaggatgaggctgattattactgctgctcatatgcaggcagctacactttgggggtgttcggcggagggaccaagctgaccgtcctag

SEQ ID NO: 5180 - DNA, 325 bp, Homo sapiens
gacatccagatgacccagtctccatcctcactgtctgcatctgtaggagacagagtcaccatcacttgccgggcaagtcagagcattagcacttatttaaattggtatcagcagaaaccagggaaagcccctaagctcctgatctatgctgcatccagtttgcaaagtggggtcccatcaaggttcagtggcagtggatctgggacagatttcactctcaccatcagcagtctgcaacctgaagattttgcaacttactactgtcaacagagttacagtaccctcttattcactttcggccctgggaccaaagtagatatcaaac

SEQ ID NO: 5181 - DNA, 340 bp, Homo sapiens
gatattgtgatgactcagtctccactctccctgtccgtcacccctggagagccggcctccatctcctgcaggtctaatcagagcctcctgcatagtaatgcatacaactatttggattggttcctgcagaagccagggcagtctccacacctcctgatctatttgggttctaatcgggcctccggggtccctgacaggttcagtggcagtggatcaggcacagattttacactgaaaatcagcagagtggaggttgaggatgttggggtttattactgcatgcaaactctacaaactcctccgtacacttttggccaggggaccaagctggagatcaaac

SEQ ID NO: 5182 - DNA, 322 bp, Homo sapiens; identical to SEQ ID NO: 1645

SEQ ID NO: 5183 - DNA, 340 bp, Homo sapiens
gatgttgtgatgactcagtctccactctccctgcccgtcacccttggacagccggcctccatctcctgcaggtctagtcaaagcctcgtatacagtgatggaaacacctacttgaattggtttcagcagaggccaggccaatctccaaggcgcctaatttataaggtttctaaccgggactctggggtcccagacagattcagcggcagtgggtcaggcactgatttcacactgaaaatcagcagggtggaggctgaggatgttggggtttattactgcatgcaaggtacacactggcctatgtacacttttggccaggggaccaagctggagatcaaac

SEQ ID NO: 5184 - DNA, 322 bp, Homo sapiens
gacatccagatgacccagtctccatcctccctgtctgcatctgtaggagacagagtcaccatcacttgccgggcaagtcagagcattagcagctatttaaattggtatcagcagaaaccagggaaagcccctaagctcctgatctatgctgcatccagtttgcaaagtggggtcccatcaaggttcagtggcagtggatctgggacagatttcactctcaccatcagcagtctgcaacctgaagattttgcaacttactactgtcaacagagttacagtaccctattcactttcggccctgggaccaaagtggatatcaaac

SEQ ID NO: 5185 - DNA, 322 bp, Homo sapiens
gacatccagatgacccagtctccttccaccctgtctgcatctgtaggagacagagtcaccatcacttgccgggccagtcagagtattaatagttggttggcctggtatcagcagaaaccagggaaagcccctaagctcctgatctataaggcgtctagtttagaaagtggggtcccaccaaggttcagcggcagtggatctgggacagaattcactctcaccatcagcagcctgcagcctggtgattttgcaacttattactgccaacagtataatagtttctcttggacgttcggccaagggaccaacgtggaaatcaaac

SEQ ID NO: 5186 - DNA, 319 bp, Homo sapiens
tcctatgacctgactcagccaccctcagtgtccgtgtccccaggacagacagccagcatcacctgctctggagataaattgggggataaatatgcttgctggtatcagcagaagccaggccagtcccctgtgctggtcatctatcaagataccaagcggccctcagggatccctgcgcgattctctggctccaactctgggaacacagccactctgaccatcagcgggacccaggctatggatgaggctgactattactgtcaggcgtgggacagcggcactgctgtcttcggaactgggaccaaggtcaccgtcctag

SEQ ID NO: 5187 - DNA, 322 bp, Homo sapiens
tcctatgagctgactcagccaccctcagtgtccgtgtccccaggacagacagccagcatcacctgctctggagataaattgggggatacatatgcttgctggtatcagcagaagccaggccagtcccctgtgctggtcatctatcaagataacaggcggccctcagggatccctgagcgattctctggctccaactctgggaacacagccactctgagcatcagcgggacccaggctatggatgaggctgactattactgtcaggcgtgggacagcagcacttctgtggtattcggcggagggaccaagctgaccgtcctag

SEQ ID NO: 5188 - DNA, 322 bp, Homo sapiens
gccatccggatgacccagtctccatcctcactctctgcatctacaggagacagagtcaccatcacttgtcgggcgagtcagggtattagcagttatttagcctggtatcagcaaaaaccagggaaagcccctaagctcctgatctatgctgcatccactttgcaaagtggggtcccatcaaggttcagcggcagtggatctgggacagatttcactctcaccatcagctgcctgcagtctgaagattttgcaacttattactgtcaacagtattatagttaccctcgagctttcggcggagggaccaaggtggagatcaaac

SEQ ID NO: 5189 - DNA, 325 bp, Homo sapiens; identical to SEQ ID NO: 965

SEQ ID NO: 5190 - DNA, 322 bp, Homo sapiens
gacatccagatgacccagtctccttccaccctgtctgcatctgtaggagacagagtcaccatcacttgccgggccagtcagagtattagtagctggttggcctggtatcagcagaaaccagggaaagcccctaagctcctgatctatgatgcctccagtttggaaagtggggtcccatcaaggttcagcggcagtggatctgggacagaattcactctcaccatcagcagcctgcagcctgatgattttgcaacttattactgccaacagtataatagttattcggggacgttcggccaagggaccaaggtggaaatcaaac

SEQ ID NO: 5191 - DNA, 337 bp, Homo sapiens
cagtctgccctgactcagcctgcctccgtgtctgggtctcctggacagtcgatcaccatctcctgcactggaaccagcagtgacgttggtgcttataactatgtctcctggtaccaacagcacccaggcaaagcccccaaactgatgatttatggtgtcagtaatcggccctcaggggtttctaatcgcttctctggctccaagtctggcaacacggcctccctgaccatctctgggctccacgctgaggacgaggctgattattactgcagctcatatacaagcagcagcactctcgcctatgtcttcggaagtgggaccaaggtcaccgtcctag

SEQ ID NO: 5192 - DNA, 334 bp, Homo sapiens
caggctgtggtgactcaggagccctcactgactgtgtccccaggagggacagtcactctcacctgtggctccagcactggagctgtcaccagtggtcattatccctactggttccagcagaagcctggccaagcccccaggacactgatttatgatacaagcaacaaacactcctggacaccggcccggttctcaggctccctccttgggggcaaagctgccctgaccctttcgggtgcgcagcctgaggatgaggctcattattactgcttgctctcctatagtggtgctcggggaagggtgttcggcggagggaccaagctgaccgtcctag

SEQ ID NO: 5193 - DNA, 307 bp, Homo sapiens
gaaatagtgatgacgcagtctccagccaccctgtctgtgtctccaggggaaagagccaccctctcctgcagggccagtcagagtgttggcagcaacgtagcctggtaccagcagaaacctggccaggctcccaggctcctcatgtttggtgcatccaccagggccactggtatcccggccaggttcagtggcagtgggtctgggacagagttcactctcaccatcagcagcctgcagtctgaagatcttgcagtttattactgtcagaagtcgggtacgttcggccaagggaccaaggtggaaatca

SEQ ID NO: 5194 - DNA, 322 bp, Homo sapiens
gaaattgtgttgacacagtctccagccaccctgtctttgtctccaggggaaagagccaccctctcctgcagggccagtcagagtgttagcatctacttagcctggtaccaacagaaacctggccaggctcccaggctcctcatctatgatgcatccagcagggccactggcatcccagccaggttcagtggcagtgggtctgggacagacttcactctcaccatcagcagcctagagcctgaagattttgcagcttattactgtcagcagcgtttcaactggcctctcaccttcggccaagggacacgactggagattaaac

SEQ ID NO: 5195 - DNA, 340 bp, Homo sapiens
gacatcgtgatgacccagtctccagactccctggctgtgtctctgggcgagagggccaccatcaactgcaagtccagccagagtgttttaggcagctccaacaataagaactacttagcttggtaccaacagaaagcaggacagcctcctaagttgctcatttactgggcatctacccgggaatccggggtccctgaccgattcagtggcggcgggtctgggacagatttcactctcaccatcagcggcctgcaggctgaagatgtggcagtttattactgtcagcaggattatagtactccgtacacttttggccaggggaccaagctggagatcaaac

SEQ ID NO: 5196 - DNA, 338 bp, Homo sapiens
gacatcgtgatgacccagtctccagactccctggctgtgtctctgggcgagagggccaccatcaactgcaagtccagccagactgttttatacagttccgacaataagaactacttagcctggtaccagcagaaaccaggacagcctcctaagcagctaatttactgggcatctatccgggaatccggggtccctgaccgattcagtggcagcgggtctgggacagatttcactctcaccatcagcagcctgcaggctgaagatgtggcagtttattactgtcagcactattatagtactccgtacacttttggccaggggaccaagctggagatcaa

SEQ ID NO: 5197 - DNA, 325 bp, Homo sapiens
gacatccagatgacccagtctccttccaccctgtctgcatctgtaggagacagagtcaccatcccttgccgggccagtcagagtattggtagctggttggcctggtatcagcagaaaccagggaaagcccctaagctcctgatctatgatgcctccagtttggaaagtggggtcccatcaaggttcagcggcagtggatctgggaccgaattcactctcaccatcagcagcctgcagcctgatgattttgcaacttattactgccaacagtataaaactaattcgccgtggacgttcggccaagggaccaaggtggaaatcaaac

SEQ ID NO: 5198 - DNA, 322 bp, Homo sapiens; identical to SEQ ID NO: 3522

SEQ ID NO: 5199 - DNA, 331 bp, Homo sapiens
cagtctgccctgactcagcctgcctccgtgtctgggtctcctggacagtcgatcaccatctcctgcactggaaccagcagtgaccttggtggttataactatgtctcctggtaccaacagcacccaggcaaagcccccaaactcttgatttatgatgtcagtaatcggccctcaggggtttctaatcgcttctctggctccaagtctgacaacacggcctccctgaccatctctgggctccaggctgaggacgaggctgattattactgcacctcatatagaagcggcagcactctggtgttcggcggagggaccaagctgaccgtcgtag

SEQ ID NO: 5200 - DNA, 325 bp, Homo sapiens
gacatccagttgacccagtctccatcctccctgtctgcatctgtaggagacagagtcaccatcacctgccgggcaagtcagaacattaacagctatttaaattggtatcagcagaaaccagggaaagcccctaagctcctgatctatactgcatccagtttgcgaagtggggtcccatcaaggttcagtggcagtggatctgggacagatttcactctcaccatcagcagtctgcaacctgaagattttgcaacttactactgtcaacagagttacaataccccctcgtggacgttcggccaagggaccaaggtggaaatcaaac

SEQ ID NO: 5201 - DNA, 325 bp, Homo sapiens
gaaattgtgttgacgcagtctccaggcaccctgtctttgtctccaggggaaagagccaccctctcctgcagggccagtcagagtgttagcagcaactacttagcctggtaccagcaaaaacctggccaggctcccaggctcctcatctatggtgcatccagcagggccactggcatcccagacaggttcagtggcagtgggtctgggacaggcttcactctcaccatcagcagactggagcctgaagattttgcagtgtattactgtcagcactatggtggctcatcgtggacgttcggccaagggaccaaggtggaaatcaaac

SEQ ID NO: 5202 - DNA, 322 bp, Homo sapiens
gacatccagatgacccagtctccttccaccctgtctgcatctgtaggagacagagtcaccatcacttgccgggccagtcagagtattagtagctggttggcctggtatcagcagaaaccagggaaagcccctaagctcctgatctatgatgcctccagtttggaaagtggggtcccatcaaggttcagcggcagtggatctgggacagaattcactctcaccatcagcagcctgcagcctgatgattttgcaactttttactgccaacagtataatagttattcgtggacgttcggccaagggaccaaggtggaagtcaaac

SEQ ID NO: 5203 - DNA, 328 bp, Homo sapiens
cagtctgccctgactcagcctgcctccgtgtctgggtctcctggacagtcgatcaccgtctcctgcactggaaccagcagtgatgttggaagttataaccttgtctcctggttccaacagcacccaggcaaagcccccaaactcatgatttatgaggtcagtaagcggccctcaggggtttctaatcgcttctctggctccaagtctggcaacacggcctccctgacaatctctgggctccaggctgaggacgaggctgattattactgctgctcatatgcaggtagtaacacggtgttcggcggagggaccaagctgaccgtcctag

SEQ ID NO: 5204 - DNA, 319 bp, Homo sapiens; identical to SEQ ID NO: 1688

SEQ ID NO: 5205 - DNA, 322 bp, Homo sapiens
gccatccggatgacccagtctccatcctcattctctgcatctacaggagacagagtcaccatcacttgtcgggcgagtcagggtattagcagttatttagcctggtatcagcaaaaaccagggaaagcccctaagctcctgatctatgctgcatccactttgcaaagtggggtcccatcaaggttcagcggcagtggatctgggacagatttcactctcaccatcagctgcctgcagtctgaagattttgcaacttattactgtcaacagtattatagttaccctcggacttttggccaggggaccaagctggagatcaaac

SEQ ID NO: 5206 - DNA, 322 bp, Homo sapiens; identical to SEQ ID NO: 1779

SEQ ID NO: 5207 - DNA, 322 bp, Homo sapiens
gccatccggatgacccagtctccatcctcactctctgcatctacaggagacagagtcaccatcacttgtcgggcgagtcagggtattagcagttatttagcctggtatcagcaaaaaccagggaaagcccctaagctcctgatctatgctgcatccactttgcaaagtggggtcccatcaaggttcagcggcagtggatctgggacagatttcactctcaccatcagctgcctgcagtctgaagattttgcaacttattactgtcaacagtattatagttacccccggaccttcggccaagggacacgactggagattaaac

SEQ ID NO: 5208 - DNA, 328 bp, Homo sapiens
cagtctgccctgactcagcctcgctcagtgtccgggtctcctggacagtcagtcaccatctcctgcactggaaccagcagtgatgttggtggttataactatgtctcctggtaccaacagcacccaggcaaagcccccaaactcatgatttatgatgtcagtaagcggccctcaggggtccctgatcgcttctctggctccaagtctggcaacacggcctccctgaccatctctgggctccaggctgaggatgaggctgattattactgctgctcatatgcaggcagcttaagggtgttcggcggagggaccaagctgaccgtcctag

SEQ ID NO: 5209 - DNA, 330 bp, Homo sapiens
cagtctgccctgactcagcctccctccgcgtccgggtctcctggacagtcagtcaccatctcctgcactggaaccagcagtgacgttggtggttatgactttgtctcctggtaccaacagaaaccaggcaaagcccccaaactcatgatttatgaggtcactaagcggccctcaggggtccctgatcgcttctctggctccaagtctggcaacacggcctccctgaccgtctctgggctccaggctgaggatgaggctgattattactgcagctcatatgcaggcagcagccgtgtggtgttcggcggagggaccaagttgaccgtccta

SEQ ID NO: 5210 - DNA, 325 bp, Homo sapiens; identical to SEQ ID NO: 872

SEQ ID NO: 5211 - DNA, 319 bp, Homo sapiens
gacatccagatgacccagtctccttccaccctgtctgcatctgttggagaccgggtcaccgtcacttgccgggccagtcagactattggtaggtggttggcctggtatcagcagaaaccagggaaagcccctaatctcctgatctatgatgcctccagattggaaagtggggtcccatcacggttcagcggcagtggatctgggacagaattcactctcaccatcagcagcctgcagccagatgattttgcaacttattactgtcaacagtatatgagttactggacgttcggccaggggaccaaggtggaaatcaaac

SEQ ID NO: 5212 - DNA, 322 bp, Homo sapiens
gacatccagttgacccagtctccatccttcctgtctgcatctgtaggagacagagtcaccatcacttgccgggccagtcagggcattagcagttttttagcctggtatcagcaaaaaccagggaaagcccctaaggtcctgatctatgctgcatccactttgcaaagtggggtcccatcaaggttcagcggcagtggatctggggcagaattcactctcacaatcagcagcctgcagcctgaagattttgcaacttattactgtcaacattttaatagttacccgctcactttcggcggagggaccaaggtggagatcgaac

SEQ ID NO: 5213 - DNA, 322 bp, Homo sapiens
gacatccagatgacccaggctccatcctccctgtctgcatctgtaggagacagagttaccatcacttgccgggcaagtcagagcattagtaggtctttaaattggtatcagcagaaaccagggaaagcccctaagttcctgatctctggtgcatccagtttgcaaagtggggtcccatcaaggttcagtggcagtggctctgggacagatttcactctcaccatcagcagtctgcaacgtgaagattttgcaacttactactgtcaacagagttacagtaccccgtacacttttggccaggggaccaagctggagatcaaac

SEQ ID NO: 5214 - DNA, 331 bp, Homo sapiens
aattttatgctgactcagccccactctgtgtcggagtctccggggaagacggtaaccatctcctgcacccgcagcagtggcagcattgccagcaactatgtgcagtggtaccagcagcgcccgggcagttcccccaccactgtgatctatgaggataaccaaagaccctctggggtccctgatcgattctctggctccatcgacagctcctccaactctgcctccctcaccatctctggactgaagactgaggacgaggctgactactactgtcagtcttatgatagcggcaatgtggtattcggcggagggaccaagctgaccgtcctag

SEQ ID NO: 5215 - DNA, 322 bp, Homo sapiens
gaaattgtgttgacacagtctccagccaccctgtctttgtctccaggggaaagagccaccctctcctgcagggccagtcagagtgttagcaggtacttagcctggtaccaacagaaaccgggccaggctcccaggctcctcatctatgatgtatccaacagggccactggcgtcccagccaggttcagtggcagtgggtctgggacagacttcactctcaccatcagcagcctagagcctgaagattttgcagtttattactgtcagcagcgtggcaactggcctgggactttcggccctgggaccaaagtggatgtcaaac

SEQ ID NO: 5216 - DNA, 322 bp, Homo sapiens; identical to SEQ ID NO: 3582

SEQ ID NO: 5217 - DNA, 319 bp, Homo sapiens
tcctatgaactgactcagccaccctcagtgtccgtgtccccaggacagacagccagcatcacctgctctggagataaattgggggataaatatgcttcctggtatcagcagaagccaggccagtcccctgtgatggtcatctatcgagataccgagcggccctcagggatccctgagcgattctctggctccaactctgggaacacagccactctgaccatcagcgggacccgggctatggatgaggctgactattactgtcaggcgtgggacagcagcactgccgttttcggcggagggaccaggctgaccgtcctag

SEQ ID NO: 5218 - DNA, 325 bp, Homo sapiens
tcttctgagctgactcaggaccctgctgtgtctgtggccttgggacagacagtcaggatcacatgccaaggagacagcctcagaagctattatgcaagctggtaccagcagaagccaggacaggcccctatacttgtcatctatggtaaaaacaaccggccctcagggatcccagaccgattctctggctccagctcaggaaacacagcttccttgaccatcactggggctcaggcggaagatgaggctgactattactgtaactcccgggacagcagtggtaacctttgggtgttcggcggagggaccaagctgaccgtcctag

SEQ ID NO: 5219 - DNA, 331 bp, Homo sapiens
cagtctgccctgactcagcctgcctccgtgtctgggtctcctggacagtcgatcaccatctcctgcgctggaaccagcagtgacgttggtggttataactatgtctcctggtaccaacagcacccaggcaaagcccccaaactcatgatttatgatgtcagtaatcggccctcaggggtttctaatcgcttctctggctccaagtctggcaacacggcctccctgaccatctctgggctccaggctgaggacgaggctgattattactgcagctcatatacaaccagcagcggtgtggtattcggcggagggaccaagctgaccgtcctag

SEQ ID NO: 5220 - DNA, 319 bp, Homo sapiens
tcctatgagctgactcagccaccctcagtgtccgtgtccccaggacagacagccagcatctcctgctctggaaataaagtgggggataaatatgcttgctggtatcagcagaggccaggccagtcccctgtgctggtcatctatgaagatagtaagcggccctcagggatccctgagcgattctctggctccaactcggggaacacagccactctgaccatcagcgggacccaggctatggatgaggctgactattactgtcaggtgtgggacagcagcactgtggtattcggcggagggaccaagctgaccgtcctag

SEQ ID NO: 5221 - DNA, 319 bp, Homo sapiens
gacatccagatgacccagtctccttccaccctgtctgcatctgtcggagacaaagtcaccatcacttgccgggccagtcagagtattagtgcctggttggcctggtatcagcagaaaccagggaaagcccctaaactcctgatctatgatgcctccactttggaaagtggggtcccatcaaggttcagcggcagtggatctgggacagagttcactctcaccatcagcagcctgcagcctgatgattttacaacttattactgtcaacagtataatacttacccgtacacttttggccaggggaccaagctggagatca

SEQ ID NO: 5222 - DNA, 329 bp, Homo sapiens
ttttatgctgactcagccccactctgtgtcggagtctccggggaagacggtaaccatctcctgcacccgcagcagtggcagcattgccagcaactatgtgcagtggtaccagcagcgcccgggcagttcccccaccactgtgatctatgaggataaccaaagaccctctggggtccctgatcggttctctggctccatcgacagctcctccaactctgcctccctcaccatctctggactgcagactgaggacgaggctgactactactgtcagtcttatgatagcagcaatcgggtgttcggcggagggaccaacctgaccgtcctag

SEQ ID NO: 5223 - DNA, 320 bp, Homo sapiens
gacatccagatgacccagtctccatcctccctgtctgcatctgtaggagacagagtcaccgtcacttgccgggcacgtcagagctttagcagctatttaaattggtatcagcagaaaccagggaaagcccctaacctcctgatctatgctgcatccagtttgcaaagtggggtcccatcaaggttcagtgacagtggatctgggacagatttcactctcaccatcaacagtctgcaacctgaagattttgcaacttactactgtcaacagagttacagtaccgctcacttccggcggagggaccaaggtggagatcaaac

SEQ ID NO: 5224 - DNA, 325 bp, Homo sapiens; identical to SEQ ID NO: 872

SEQ ID NO: 5225 - DNA, 340 bp, Homo sapiens
gatattgtgatgactcagtctccactctccctgcccgtcacccctggagagccggcctccatctcctgcaggtctagtcagagcctcctgcagagtaatggatacaactatttggattggtacctgcagaagccagggcagtctccacagctcctgatctatttgggttctaatcgggcttccggggtccctgacaggttcagtggcagtggatcaggcacagattttacactgaaaatcagcagagtggaggctgaggatgttggggtttattactgcatgcaagctctacaaactcccccgcacacttttggccaggggaccaagctggagatcaaac

SEQ ID NO: 5226 - DNA, 331 bp, Homo sapiens
cagtctgccctgactcagcctccctccgcgtccgggtctcctggacagtcagtcaccatctcctgcactggaaccagcagtgacgttggtgcttataactatgtctcctggtaccaacagcacccagccaaagcccccaagctcatgatttatgaggtcagtaagcggccctcaggggtccctgatcgcttctctggctccaagtctggcaacacggcctccctgaccgtctctgggctccaggctgaggatgaggctgactattactgcagctcatatgcaggcagcaacaatttggtgttcggcggagggaccaagctgaccgtcctag

SEQ ID NO: 5227 - DNA, 319 bp, Homo sapiens
gacatccagatgacccagtctccttccaccctgtctgcatctgtaggagacagagtcaccatcacttgccgggccagtcagagtattagtagctggttggcctggtatcagcagaaaccagggaaagcccctaagctcctgatctatgatgcctccagtttggaaagtggggtcccatcaaggttcagcggcagtggatctgggacagaattcactctcaccatcagcagcctgcagcctgatgattttgcaacttattactgccaacagtataatagtccttggacgttcggccaagggaccaaggtggaaatcaaac

SEQ ID NO: 5228 - DNA, 322 bp, Homo sapiens
gacatccagatgacccagtctccatcttccctgtctgcatctgttggagacagagtcaccatcacttgccgggcaagtcagagcattagcaggcttttaaattggtatcagcagagaccagggaaagcccctaaggtcctgatctatgctgcatccagtttgcaaagtggggtcccattaaggttcagtggcagtggatctgggacagatttcacactcaccctcagcagtctgcaacctgaagattttgcaacttactactgtcaacagagttacactaccccttggacgttcggccaagggaccaaggtggaaatcaaac

SEQ ID NO: 5229 - DNA, 331 bp, Homo sapiens; identical to SEQ ID NO: 2427

SEQ ID NO: 5230 - DNA, 340 bp, Homo sapiens
gacatcgtgatgacccagtctccagactccctggctgtgtctctgggcgagagggccaccatcaactgcaagtccagccagagtgttttatacagctccaacaataagaactacttagcttggtaccagcagaaaccaggacagcctcctaagctgctcatttactgggcatctacccgggaatccggggtccctgaccgattcagtggcagcgggtctgggacagatttcactctcaccatcagcagcctgcaggctgaagatgtggcagtttattactgtcagcaatattatagtactccaatcaccttcggccaagggacacgactggagattaaac

SEQ ID NO: 5231 - DNA, 322 bp, Homo sapiens
gccatccggatgacccagtctccatcctcattctctgcatctacaggagacagagtcaccatcacttgtcgggcgagtcagggtattagcagttatttagcctggtatcagcaaaaaccagggaaagcccctaagctcctgatctatgctgcatccactttgcaaagtggggtcccatcaaggttcagcggcagtggatctgggacagatttcactctcaccatcagctgcctgcagtctgaagattttgcaacttattactgtcaacagtattatagttaccctcagactttcggcggagggaccaaggtggagatcaaac

SEQ ID NO: 5232 - DNA, 325 bp, Homo sapiens
gacatccagatgacccagtctccttccaccctgtctgcatctgtaggagacagagtcaccatcacttgccgggccagtcagagtattaataactggttggcctggtatcagcagaagccagggaaagcccctaagctcctgatctatgatgcctccagtttggaaagtggggtcccatcaaggttcagcggcagtgggtctgggacagaattcactctcaccatcagcagcctgcagcctgatgattttgcaacttattactgccaacagtatcatagttattcctggtccacttttggccaggggaccaagctggagatcaaac

SEQ ID NO: 5233 - DNA, 331 bp, Homo sapiens
caggctgtggtgactcaggagccctcactgactgtgtccccaggagggacagtcactctcacctgtgcctccagcactggagctgtcaccagtggtcatcatccctactggttccagcagaagcctggccaagcccccaagacactgatttatgatacaagcaacaaacactcctggacccctgcccggttctcaggctccctccttgggggcaaagctgccctgaccctttcgggtgcgcagtctgaggatgaggctgactattactgcttgctctcctatagtggtgctcggggggtgttcggcggagggaccaagctgaccgtcctag

SEQ ID NO: 5234 - DNA, 340 bp, Homo sapiens
gacatcgtgatgacccagtctccagactccctggctgtgtctctgggcgagagggccaccatcaactgcaagtccagccagagtgttttatacagctccaacaataagaactacttagcttggtaccagcagaaaccaggacagcctcctaagctgctcatttactgggcatctacccgggaatccggggtccctgaccgattcagtggcagcgggtctgggacagatttcactctcaccatcagcagcctgcaggctgaagatgtggcagtttattactgtcagcaatattatagtactcctccggcgttcggccaagggaccaaggtggaaatcaaac

SEQ ID NO: 5235 - DNA, 322 bp, Homo sapiens
gacatccagatgacccagtctccttccaccctgtctgcatctgtaggagacagagtcaccatcacttgccgggccagtcagagtattagtagctggttggcctggtatcagcagaaaccagggaaagcccctaagctcctgatctatgatgcctccagtttggaaagtggggtcccatcaaggttcagcggcagtggatctgggacagaattcactctcaccatcagcagcctgcagcctgatgattttgcaacttattactgccaacagtataatagttatttgtacacttttggccaggggaccaagctggagatcaaac

SEQ ID NO: 5236 - DNA, 331 bp, Homo sapiens
cagtctgtgctgactcagccaccctcagcgtctgggacccccgggcagagggtcaccatctcttgttctggaagcagctccaacatcggaactaattatgtatcctggtaccagcacctcccaggaacggcccccaaagtcctcatctattcgaataataagcggccctcaggggtccctgaccgattctctggctccaagtctggcacctcagcctccctggccatcagtgggctccggtccgaggatgagggttattattcctgtgcatcatgggatgacagcctgagtggttgggtgttcggcggagggaccaagctgaccgtcctag

SEQ ID NO: 5237 - DNA, 322 bp, Homo sapiens
gacatccagatgacccagtctccatcctccctgtctgcatctgtaggagacagagtcaccatcacttgccgggcaagtcagagcattagcagctatttaaattggtatcagcagaaaccagggaaagcccctaagctcctgatctatgctgcatccagtttgcaaagtggggtcccatcaaggttcagtggcagtggatctgggacagatttcactctcaccatcagcagtctgcaacctgaagattttgcaacttactactgtcaacagagttacagtacccctcctacgttcggccaagggaccaaggtggaaatcaaac

SEQ ID NO: 5238 - DNA, 323 bp, Homo sapiens
gacatccagatgacccagtctccatcctccctgtctgcatctgtaggagacagagtcaccatcacttgccaggcgagtcaggacattagcaactatttaaattggtatcagcagaaaccagggaaagcccctaagctcctgatctacgatgcatccaatttggaaacaggggtcccatcaaggttcagtggaagtggatctgggacagattttactttcaccatcagcagcctgcagcctgaagatattgcaacatattactgtcaacagtatgataatctcccggctcactttcggcggagggaccaaggtggagatcaaac

SEQ ID NO: 5239 - DNA, 328 bp, Homo sapiens; identical to SEQ ID NO: 1767

SEQ ID NO: 5240 - DNA, 331 bp, Homo sapiens
cagtctgtgttgacgcagccgccctcagtgtctgcggccccaggacagaaggtcaccatctcctgctctggaagcagctccaacattgggaataattatgtatcctggtaccagcagctcccaggaacagcccccaaactcctcatttatgacaataataagcgaccctcagggattcctgaccgattctctggctccaagtctggcacgtcagccaccctgggcatcaccggactccagactggggacgaggccgattattactgcggaacatgggatagcagcctgagtgctgtggtgttcggcggagggaccaagctgaccgtcctag

SEQ ID NO: 5241 - DNA, 322 bp, Homo sapiens
gccatccggatgacccagtctccatcctcactctctgcatctacaggagacagagtcaccatcacttgtcgggcgagtcagggtattagcagttatttagcctggtatcagcaaaaaccagggaaagcccctaagctcctgatctatgctgcatccactttgcaaagtggggtcccatcaaggttcagcggcagtggatctgggacagatttcactctcaccatcagctgcctgcagtctgaagattttgcaacttattactgtcaacagtattatagttaccctcggacgttcggccaagggaccaaggtggaaatcaaac

SEQ ID NO: 5242 - DNA, 328 bp, Homo sapiens
gaaattgtgttgacgcagtctccaggcaccctgtctttgtctccaggggaaagagccaccctctcctgcagggccagtcagagtgttagcagcagctacttagcctggtaccagcagaaacctggccaggctcccaggctcctcatctatggtgcatccagcagggccactggcatcccagacaggttcagtggcagtgggtctgggacagacttcactctcaccatcagcagactggagcctgaagattttgcagtgtattactgtcagcagtatggtagctcacctctgctcactttcggcggagggaccaaggtggagatcaaac

SEQ ID NO: 5243 - DNA, 331 bp, Homo sapiens
cagtctgccctgactcagcctgcctccgtgtctgggtctcctggacagtcgatcaccatctcctgcactggaaccagcagtgacgttggtggttataactatgtctcctggtaccaacaccacccaggcaaagcccccaaactgttgatttatgatgtcagtaatcggccctcaggggtttctaatcgcttctctggctccaagtctggcaacacggcctccctgaccatctctgggctccaggctgaggacgaggctgattattactgcagctcatatacaagcagcagctcctgggtgttcggcggagggaccaagctgaccgtcctag

SEQ ID NO: 5244 - DNA, 331 bp, Homo sapiens
cagtctgccctgactcagcctgcctccgtgtctgggtctcctggacagtcgatcaccatctcctgcactggaaccagcagtgacgttggtggttataactatgtctcctggtaccaacagcacccaggcaaagcccccaaactcatgatttatgaggtcagtaatcggccctcaggggtttctaatcgcttctctggctccaagtctggcgacacggcctccctgaccatctctgggctccaggctgaggacgaggctgattattactgcagctcatatacaagcagcagcactcgagtcttcggaactgggaccaaggtcaccgtcctag

SEQ ID NO: 5245 - DNA, 325 bp, Homo sapiens
gaaattgtgttgacgcagtctccaggcaccctgtctttgtctccaggggaaagagccaccctctcctgcagggccagtcagagtgttagcagcagctacttagcctggtaccagcagaaacctggccaggctcccaggctcctcatctatggtgcatccagcagggccactggcatcccagacaggttcagtggcagtgggtctgggacagacttcactctcaccatcagcagactggagcctgaagattttgcagtgtattactgtcagcagtatggtagctcacctccgacgttcggccaagggaccaaggtggaaatcaaac

SEQ ID NO: 5246 - DNA, 335 bp, Homo sapiens
cagcctgtgctgactcagccaacctccctctcagcatctcctggagcatcagccagattcacctgcaccttgcgcagtggcatcaatgttggtacctacaggatatactggtaccagcagaagccagggagtcttccccggtatctcctgaggtacaaatcagactcagataagcagcagggctctggagtccccagccgcttctctggatccaaagatgcttcaaccaatgcaggccttttactcatctctgggctccagtctgaagatgaggctgactattactgtgccatttggccagggactcggcggagggaccaagctgaccgtcctag

SEQ ID NO: 5247 - DNA, 325 bp, Homo sapiens
gacatccagatgacccagtctccatcctccctgtctgcatctgtaggagacagagtcaccatcacttgccgggcaagtcagagcattagcaactatttaaattggtatcaacaaaaaccagggaaagcccctaagctcctgatctatgctgcatccagtttgcaaagtggggtcccatcaaggttcagtggcagtggatctgggacagatttcactctcaccatcagcagtctgcaacctgaagattttgcaacttactactgtcaacagagttacagtacccctcctctcactttcggcggagggaccaaggtggagatcaaac

SEQ ID NO: 5248 - DNA, 328 bp, Homo sapiens
gaaattgtgttgacacagtctccagccaccctgtctttgtctccaggggaaagagccaccctctcctgcagggccagtcagagtgttagcagctacttagcctggtaccaacagaaacctggccaggctcccaggctcctcatctatgatgcatccaacagggccactggcatcccagccaggttcagtggcagtgggtctgggacagacttcactctcaccatcagcagcctagagcctgaagattttgcagtttattactgtcagcagcgtagcaactggcctccctcgtacacttttggccaggggaccaagctggagatcaaac

SEQ ID NO: 5249 - DNA, 340 bp, Homo sapiens
gacatcgtgatgacccagtctccagactccctggctgtgtctctgggcgagagggccaccatcaactgcaagtccagccagagtgttttatacagctccaacaataagaactacttagcttggtaccagcagaaaccaggacagcctcctaagctgctcatttactgggcatctacccgggaatccggggtccctgaccgattcagtggcagcgggtctgggacagatttcactctcaccatcagcagcctgcaggctgaagatgtggcagtttattactgtcagcagtattatagtactcctccgacgttcggccaagggaccaaggtggaaatcaaac

SEQ ID NO: 5250 - DNA, 322 bp, Homo sapiens
gacatccagatgacccagtctccatcctccctgtctgcatctgtgggagacagagtcatcatcacttgccgggcaagtcagaccgtcaacaagtatttaaattggtatcagcaaaaaccagggaaagcccctaaactcctgatctatgctgcaaccagtttacaaagtggggtcccatcaaggttcagtggcagtggatctgggacagatttctctctcaccatcagtagtctgcaacctgaagattgtgcaacttactactgtcaacagagctacaataccccccggacgttcggccaagggaccaaggtgaatttcaaac

SEQ ID NO: 5251 - DNA, 322 bp, Homo sapiens
gacatccagatgacccagtctccttccaccctgtctgcatctgtaggagacagagtcaccatcacttgccgggccagtcagagtattagtagctggttggcctggtatcagcagaaaccagggaaagcccctaagctcctgatctatgatgcctccagtttggaaagtggggtcccatcaaggttcagcggcagtggatctgggacagaattcactctcaccatcagcagcctgcagcctgatgattttgcaacttattactgccaacagtataatagttactcgtggacgttcggccaagggaccaaggtggaaatcaaac

SEQ ID NO: 5252 - DNA, 340 bp, Homo sapiens
gacatcgtgatgacccagtctccagactccctggctgtgtctctgggcgagagggccaccatcaactgcaagtccagccagagtgttttatacagctccaacaataagaactacttagcttggtaccagcagaaaccaggacagcctcctaagctgctcatttactgggcatctacccgggaatccggggtccctgaccgattcagtggcagcgggtctgggacagatttcactctcaccatcagcagcctgcaggctgaagatgtggcagtttattactgtcagcaatattatagtactctcctcactttcggcggagggaccaaggtggagatcaaac

SEQ ID NO: 5253 - DNA, 334 bp, Homo sapiens
cagtctgccctgactcagcctgcctccgtgtctgggtctcctggacagtcgatcaccatctcctgcactggaaccagcagtgacgttggtggttataactatgtctcctggtaccaacaacacccaggcaaagcccccaaactcatgatttatgaggtcagtaatcggccctcaggggtttctaatcgcttctctggctccaagtctggcaacacggcctccctgaccatctctgggctccaggctgaggacgaggctgattattactgcagctcatatacaagcagcagccctctctgggtgttcggcggagggaccaagctgaccgtcctag

SEQ ID NO: 5254 - DNA, 322 bp, Homo sapiens; identical to SEQ ID NO: 5241

SEQ ID NO: 5255 - DNA, 322 bp, Homo sapiens
gaaattgtgttgacacagtctccagccaccctgtctttgtctccaggggaaagagccaccctctcctgcagggccagtcagagtgttagcacctacttagcctggtaccaacagaaacctggccaggctcccaggctcctcatctatgctgcatccaacagggccactggcatcccagccaggttcagtggcagtgggtctgggacagacttcactctcaccatcagcagcctagagcctgaagattttgcagtttattactgtcagcagcgtagcaactggccgctcactttcggcggagggaccaaggtggagatcaaac

SEQ ID NO: 5256 - DNA, 331 bp, Homo sapiens; identical to SEQ ID NO: 2348

SEQ ID NO: 5257 - DNA, 334 bp, Homo sapiens
aattttatgctgactcagccccactctgtgtcggagtctccggggaagacggtaaccatctcctgcacccgcagcagtggcagcattgccagcaaccatgtgcagtggtaccagcagcgcccgggcagatcccccactactgtgatttatgaggataaccaaagaccctctggggtccctgatcggttctctggctccatcgacagctcctccaactctgcctccctcaccatctctggactgaagactgaggacgaggctgactactactgtcagtcttctgataacaccaatccaggggtgttcggcggagggaccaagctgaccgtcctag

SEQ ID NO: 5258 - DNA, 322 bp, Homo sapiens
gacatccagttgacccagtctccatccttcctgtctgcatctgtaggagacagagtcaccatcacttgccgggccagtcagggcattagcagttatttagcctggtatcagcaaaaaccagggaaagcccctaagctcctgatctatgctgcatccactttgcaaagtggggtcccatcaaggttcagcggcagtggatctgggacagaattcactctcacaatcagcagcctgcagcctgaagattttgcaacttattactgtcaacagcttaatagttaccctcgaacgttcggccaagggaccaaggtggaaatcaaac

SEQ ID NO: 5259 - DNA, 322 bp, Homo sapiens
gacatccagatgacccagtctccttccaccctgtctgcatctgtaggagacagagtcaccctcacttgccgggccagtcagagtattagtagcgggttggcctggtatcagcagaaaccagggaaagcccctaagctcctgatctatgatgcctccagtttagaaagtggggtcccatcaaggttcagcggcagtgggtctgggacagaattcactctcaccatcagcagcctgcagcctgatgattttgcaacttattactgccaacagtataaaagttattctcggacgttcggccaagggaccaaggtggaaatcaaac

SEQ ID NO: 5260 - DNA, 334 bp, Homo sapiens
cagtctgccctgactcagcctgcctccgtgtctgggtctcctggacagtcgatcaccatctcctgcactggaaccagcagtgacgttggtggtcataactatgtctcctggttccaacaccacccaggcaaagcccccaaactcatgatttatgaggtcagtaatcggccctcaggggtttctaatcgcttctctggctccaagtctggcaacacggcctccctgaccatctctgggctccaggctgaggacgaggctgattatttctgcagctcatatgcaggcagcagcactctatttgtcttcggaactgggaccaaggtcaccgtcctag

SEQ ID NO: 5261 - DNA, 322 bp, Homo sapiens
gacatccagatgacccagtctccatcctccctgtctgcatctgtaggagacagagttaccatcacttgccgggcaagtcacagcattagaagctatttaaattggtatcagcagagagcagggaaagcccctaagctcctgatctttgttgcatccagtttgcaaagtggggtcccatcaaggttcagtggcagtggatctgggacagacttcactctcaccatcagcagtctgcaacctgaagattttgcaacttactactgtcaacagagttacagtatccctcgaacttttggccaggggaccaagctggagatcaaac

SEQ ID NO: 5262 - DNA, 305 bp, Homo sapiens
gacatccagatgacccagtctccatcctccctgtctgcatctgtaggagacagagtcaccatcacttgccgggcgagtcagggcattagcaattatttagcctggtatcagcagaaaccagggaaagttcctaagctcctgatctatgctgcatccactttgcaatcaggggtcccatctcggttcagtggcagtggatctgggacagatttcactctcaccatcagcagcctgcagcctgaagatgttgcaacttattactgtcaaggggtttttcggccctgggaccaaagtggatatcaaac

SEQ ID NO: 5263 - DNA, 322 bp, Homo sapiens; identical to SEQ ID NO: 5241

SEQ ID NO: 5264 - DNA, 319 bp, Homo sapiens
tcctatgagctgactcagccaccctcagtgtccgtgtccccaggacagacagccagcatcacctgctctggagataaattgggggataaatatgcttgctggtatcagcagaagccaggccagtcccctgtgctggtcatctatcaagatagcaagcggccctcagggatccctgagcgattctctggctccaactctgggaacacagccactctgaccatcagcgggacccaggctatggatgaggctgactattactgtcaggcgtgggacagcagcactggggtcttcggaactgggaccaaggtcaccgtcctag

SEQ ID NO: 5265 - DNA, 331 bp, Homo sapiens
cagtctgccctgactcagcctgcctccgtgtctgggtctcctggacagtcgatcaccatctcctgcactggaaccagcagtgatgttgggagttataaccttgtctcctggtaccaacagcacccaggcaaagcccccaaactcatgatttatgaggtcagtaagcggccctcaggggtttctaatcgcttctctggctccaagtctggcaacacggcctccctgacaatctctgggcttcgggctgaggacgaggctgattattactgctgctcatatgcagatagtagcactttggtattcggcggagggaccaagctgaccgtcctag

SEQ ID NO: 5266 - DNA, 319 bp, Homo sapiens; identical to SEQ ID NO: 1688

SEQ ID NO: 5267 - DNA, 319 bp, Homo sapiens
tcctatgaactgactcagccaccctcagtgtccgtgtccccaggacagacagccagcatcacctgctctggagataaattgggggataaatatgcttgctggtatcagcagaagccaggccagtcccctgtgttggtcatctatcaagatatcaagcggccctcagggatccctgagcgattctctggctccaactctgggaacacagccactctgaccatcagcgggacccaggctatggatgaggctgactattactgtcaggcgtgggacaccagcaccgtggtattcggcggagggaccaagctgaccgtcctag

SEQ ID NO: 5268 - DNA, 331 bp, Homo sapiens
tcttctgagctgactcaggaccctgctgtgtctgtggccttgggacagacagtcaggatcacatgccaaggagacagcctcagaagctattatgcaagctggtaccagcagaagccaggacaggcccctgtacttgtcatctatggtaaaaacaaccggccctcagggatcccagaccgattctctggctccagctcaggaaacacagcttccttgaccatcactggggctcaggcggaagatgaggctgactattactgtaactcccgggacagcagtggtaaccatctgggggtggtattcggcggagggaccaagctgaccgtcctag

SEQ ID NO: 5269 - DNA, 325 bp, Homo sapiens
gaacttgtgttgacgcagtctccaggcaccctgtctttgtctccaggggaaagagccaccctctcctgcagggccagtcagactgttatcagcagttacttagcctggtaccagcagaagcctggccaggctcccaggctcctcatctatggtgcatccagcagggccactggcatcccagacaggttcagtggcagtgggtctgagacagacttcactctcaccatcagcagactggagcctgaagattttgcagtgtattactgtcagcaatatgggacctcacgattcactttcggccctgggaccaaagtggatctcaaac

SEQ ID NO: 5270 - DNA, 322 bp, Homo sapiens
gacatccagatgacccagtctccatcctccctgtctgcatctataggagacagagtcatcatcacttgccgggcaagtcagaccattagcagctatttaaattggtatcaacacaaaccagggaaagcccctaagctcctgatctatgctgcatccagtttgcaaagtggggtcccatcaaggttcagtggcagtggatctgggacagatttcactctcaccatcagcagtctgcaacctgaagattttgcaacttactactgtcaacagagttacagtaccttcgggacgttcggccaagggaccaaggtggaaatcaaac

SEQ ID NO: 5271 - DNA, 322 bp, Homo sapiens
gacatccagatgacccagtctccatcctccctgtctgcatctgtaggtgacagagtcaccatcatttgccgggcaagtcagagcattagcacctttttaaattggtatcagcagaaaccagggaaagcccctaagctcctgatctatgctacatccaatttgcaaagtggggtcccatcaaggttcagtggcagtggatctgggacagatttcactctcaccatcagcagtctgcaacctgaagattttgcaagttactactgtcaacagagttacaatgcccctcgaacgttcggccaagggaccaaggtggaaatcaaac

SEQ ID NO: 5272 - DNA, 325 bp, Homo sapiens
gacatccagatgacccagtctccttccaccctgtctgcatctgtaggagacagagtcaccatcacttgccgggccagtcagagtattaatagctggttggcctggtatcagcagaaaccagggaaagcccctaagctcctgatctatgatgcctccagtttgaaaagtggggtcccatcaaggttcagcggcagtggatctgggacagaattcactctcaccatcagcagcctgcagcctgatgattttgcaacttattactgccaacagtataatagttattctccggtcacttttggccaggggaccaagctggagatcaaac

SEQ ID NO: 5273 - DNA, 334 bp, Homo sapiens
cagtctgccctgactcagcctgcctccgtgtctgggtctcctggacagtcgatcaccatctcctgcactggaaccagcagtgacgttggtggttataactatgtctcctggtaccaacaacacccaggcaaagcccccaaactcatgatttatgaggtcagtaatcggccctcaggggtttctaatcgcttctctggctccaagtctggcaacacggcctccctgaccatctctgggctccaggctgaggacgaggctgattattactgcagctcatattccagcagcagcactctcaaggtcttcggaactgggaccaaggtcaccgtcctag

SEQ ID NO: 5274 - DNA, 334 bp, Homo sapiens
cagtctgccctgactcagcctcgctcaatgtccgggtctcctggacagtcagtcaccatctcctgcactggaaccagcagtgatgttggtggttataactatgtctcctggtaccaacagcacccaggcaaagcccccaaactcatgatttatgatgtcactaagcggccctcaggggtccctgatcgcttctctggctccaagtctggcaacacggcctccctgaccatctctgggctccaggctgaggatgaggctgattattactgctgctcatatgcaggcacctacaccccttatgtcttcggaagtgggaccaaggtcaccgtcctag

SEQ ID NO: 5275 - DNA, 328 bp, Homo sapiens
gaaattctgttgacgcagtctccaggcaccctctctttgtctccaggggaaagagccaccctctcctgcagggccagtcagagtgttagcagcacctacttagcctggtaccagcagaaacctggccaggctcccaggctcctcatctatggtgcatccagcagggccactggcatcccagacaggttcagtggcagtgggtctgggacagacttcactctcaccatcagcagactggagcctgaagattttgcagtgtattactgtcagcagtatggtagctcacctgggctcactttcggcggagggaccaaggtggagatcaaac

SEQ ID NO: 5276 - DNA, 322 bp, Homo sapiens
gacatccagatgacccagtctccttccaccctgtctgcatctgtaggagacagagtcaccatcacttgccgggccagtcagagtattagtacctggttggcctggtatcagcaggaaccagggaaagcccctaagctcctgatctatgatgcctccagtttggaaagtggggtcccatcaaggttcagcggcagtggatctgggacagaattcactctcaccatcagcagcctgcagcctgatgattttgcaacttattactgccaacagtataatagttatccgtggacgttcggccaagggaccaaggcggaaatcaaac

SEQ ID NO: 5277 - DNA, 325 bp, Homo sapiens; identical to SEQ ID NO: 4633

SEQ ID NO: 5278 - DNA, 325 bp, Homo sapiens
tcctatgagctgacacagccaccctcggtgtcagtgtccccaggacagacggccaggatcacctgctctggagatgcattgccaaagcaatatgcttattggtaccagcagaagccaggccaggcccctgtgctggtgatatataaagacagtgagaggccctcagggatccctgagcgattctctggctccagctcagggacaacagtcacgttgaccatcagtggagtccaggcagaagacgaggctgactattactgtcaatcagcagacagcagtggtacttatacggtgttcggcggagggaccaagctgaccgtcctag

SEQ ID NO: 5279 - DNA, 319 bp, Homo sapiens; identical to SEQ ID NO: 2488

SEQ ID NO: 5280 - DNA, 328 bp, Homo sapiens
gacatccagatgacccagtctccttccaccctgtctgcatctgtaggagacagagtcaccatcacttgccgggccagtcagagtattagtagctggttggcctggtatcagcagaaaccagggaaagcccctaagctcctgatctatgatgcctccagtttggaaagtggggtcccatcaaggttcagcggcagtggatctgggacagaattcactctcaccatcagcagcctgcagcctgatgattttgcaacttattactgccaacagtataatagttattcttccgtattcactttcggccctgggaccaaagtggatatcaaac

SEQ ID NO: 5281 - DNA, 334 bp, Homo sapiens
cagtctgccctgactcagcctgcctccgtgtctgggtctcctggacagtcgatcaccatctcctgcactggaaccagccgggacgttggtggttataagtatgtctcctggtaccaacaacacccaggcaaagcccccaaactcatgatttatgaggtcagtaatcggccctcaggggtttctaatcgcttctctggctccaagtctggcaacacggcctccctgaccatctctgggctccaggctgaggacgaggctgattattactgcagctcatatagaagcagtggcaccccagtcgtattcggcggagggaccaagctgaccgtcctag

SEQ ID NO: 5282 - DNA, 334 bp, Homo sapiens
cagtctgccctgactcagcctgcctccgtgtctgggtctcctggacagtcgatcaccatctcctgcactggaaccagcagtgacgttggtggttataactatgtctcctggtaccaacagcacccaggcaaagcccccaaactcatgatttatgatgtcagtaatcggccctcaggggtttctaatcgcttctctggctccaagtctggcaacacggcctccctgaccatctctgggctccaggctgaggacgaggctgattattactgcagctcatatacaagcagcagcactctcgtggtattcggcggagggaccaagctgaccgtcctag

SEQ ID NO: 5283 - DNA, 320 bp, Homo sapiens
catccagttgacccagtctccatcctccctgtctgcatctgtaggagacagagtcaccatcacttgccgggccagtcagggcattagcagttatttagcctggtatcagcaaaaaccagggaaagcccctaagctcctgatctatgctgcatccactttgcaaagtggggtcccatcaaggttcagcggcagtggatctgggacagatttcactctcaccatcagcagcctgcagcctgaagattttgcaacttattactgtcaacagcttaatagttacccgctcactttcggcggagggaccaaggtggagatcaaac

SEQ ID NO: 5284 - DNA, 325 bp, Homo sapiens
gaaattgtgttgacgcagtctccaggcaccctgtctttgtctccaggggaaagagccaccctctcctgcagggccagtcagagtgttagcagcagctacttagcctggtaccagcagaaacctggccaggctcccaggctcctcatctatggtgcatccagcagggccactggcatcccagacaggttcagtggcagtgggtctgggacagacttcactctcaccatcagcagactggagcctgaagattttgcagtgtattactgtcagcagtatggtagctcactgtgcaccttcggccaagggacacgactggagattaaac

SEQ ID NO: 5285 - DNA, 325 bp, Homo sapiens
gacatccagatgacccagtctccatcctccctgtctgcatctgtaggagacagagtcaccatcacttgccgggcaagtcagagcattagcagctatttaaattggtatcagcagaaaccagggaaagcccctaagctcctgatctatgctgcatccagtttgcaaagtggggtcccatcaaggttcagtggcagtggatctgggacagatttcactctcaccatcagcagtctgcaacctgaagattttgcaacttactactgtcaacagagttacagtaccccctatatcactttcggccctgggaccaaagtggatatcaaac

SEQ ID NO: 5286 - DNA, 322 bp, Homo sapiens
tcctatgagctgactcagccaccctcagtgtccgtgtccccaggacagacagccagcatcacctgctctggagataaattgggggataaatatgcttgctggtatcagcagaagccaggccagtcccctgtgctggtcatctatcaagatagcaagcggccctcagggatccctgagcgattctctggctccaactctgggaacacagccactctgaccatcagcgggacccaggctatggatgaggctgactattactgtcaggcgtgggacagcagcaccctttatgtcttcggaactgggaccaaggtcaccgtcctag

SEQ ID NO: 5287 - DNA, 322 bp, Homo sapiens; identical to SEQ ID NO: 3949

SEQ ID NO: 5288 - DNA, 334 bp, Homo sapiens
aattttatgctgactcagccccactctgtgtcggagtctccggggaagacggtaaccatctcctgcaccggcagcagtggcagcattgccaacaactatgtgcagtggtaccagcagcgcccgggcagtgcccccaccactgtgatctatgaggataagcaaagaccctctggggtccctgatcggttctctggctccatcgacagctcctccaactctgcctccctcaccatctctggactgaagactgaggacgaggctgactactactgtcagtcttatgatagcagcaatctttgggtgttcggcggagggaccaagctgaccgtcctag

SEQ ID NO: 5289 - DNA, 337 bp, Homo sapiens
aattttatgctgactcagccccactctgtgtcggagtctccggggaagacggtaaccatctcctgcaccggcagcagtggcagccttgccagcaactatgtgcagtggtaccagcagcgcccgggcagtgcccccacaactgtgatctatgaagatagccaaagaccctctggggtccctgatcgtttctctggctccatcgacagctcctccaactctgcctccctcaccatctctggcctggagactgaggacgaggctgactattactgtcagtcttatgatcctaccaatcacgtgtgggtgttcggcggagggaccaagctgaccgtcctag

SEQ ID NO: 5290 - DNA, 328 bp, Homo sapiens
cagtctgccctgactcagcctgcctccgtgtctgggtctcttggacagtcgatcaccatctcctgcactggaaccagcagtgatgttgggggttataaccttgtctcttggtatcaacaatacccaggcaaagcccccacactcttgatttatgaggtcactaagcggccctcaggggtttctaatcgcttctctggctccaagtctggctacacggcctccctgacaatctctgggctccaggctgaggacgaggctgattatcactgctgttcatttgcagccagtagcacttgggcgttcggcggagggaccaaggtgaccgtcc

SEQ ID NO: 5291 - DNA, 319 bp, Homo sapiens
tcctatgagctgactcagccaccctcagtgtccgtgtccccaggacagacagccagcatcacctgctctggagataaattgggggataaatatgcttgctggtatcagcagaagccaggccagtcccctgtgctggtcatctatcaagataccaagcggccctcagggatccctgagcgattctctggctccaactctgggaacacagccactctgaccatcagcgggacccaggctatggatgaggctgactattactgtcaggcgtgggacagcagcactgtcgtattcggcggagggaccaagctgaccgtcctag

SEQ ID NO: 5292 - DNA, 334 bp, Homo sapiens
cagtctgccctgactcagcctgcctccgtgtctgggtctcctggacagtcgatcaccatctcctgcactggaaccagtagtgatgttgggagttataaccttgtctcctggtaccaacagcacccaggcaaagcccccaaactcataatttatgaggtcagtaagcggccctcaggggtttctaatcgcttctctggctccaagtctggcaacacggcctccctgacaatctctgggctccaggctgaggacgaggctgattattactgctgctcatatggaagtagtagcacttcagtggtattcggcggagggaccaacctgaccgtcctag

SEQ ID NO: 5293 - DNA, 310 bp, Homo sapiens
gacatccagttgacccagtctccatccttcctgtctgcatctgtaggagacagagtcaccatcacttgccgggccagtcagggcattagcagttatttagcctggtatcagcaaaaaccagggaaagcccctaagctcctgatctatgctgcatccactttgcaaagtggggtcccatcaaggttcagcggcagtggatctgggacagaattcactctcacaatcagcagcctgcagcctgaagattttgcaacttattactgtcaacagcttatggacttcggccaagggacacgactggagattaaac

SEQ ID NO: 5294 - DNA, 322 bp, Homo sapiens
gccatccaaatgacccagtctccatcctccctgtctgcatctgtaggagacagagtcaccatcacttgccgggcaagtcagggcattagaaatgatttaggctggtatcagcagaaaccagggaaagcccctaagctcctgatctatgctgcatccagtttacaaagtggggtcccatcaaggttcagcggcagtggatctggcacagatttcactctcaccatcagcagcctgcagcctgaagattttgcaacttattactgtctacaagattacaattaccctcggacgttcggccaagggaccaaggtggaaatcaaac

SEQ ID NO: 5295 - DNA, 340 bp, Homo sapiens
gacatcgtgatgacccagtctccagactccctggctgtgtctctgggcgagagggccaccatcaactgcaagtccagccagagtgttttatacagctccaacaataagaactacttagcttggtaccagcagaaaccaggacagcctcctaacctgctcatttactgggcatctacccgggaatccggggtccctgaccgattcagtggcagcgggtctgggacagatttcactctcaccatcagcagcctgcaggctgaagatgtggcagtttattactgtcagcagtattatagtagtccgctcactttcggcggagggaccaaggtggagatcaaac

SEQ ID NO: 5296 - DNA, 331 bp, Homo sapiens
cagtctgtgctgactcagccaccctcggtgtctgaagcccccaggcagagggtcaccatctcctgttctggaagcagctccaacatcggaaataatgctgtaaagtggtaccaacagctcccaggaaaggctcccaaactcctcatctattatgatgatctgctgccctcaggggtctctgaccgattctctggctccaagtctggcacctcagcctccctggccatcagtgggctccagtctgaggatgaggctgattattactgtgcttcatgggatgacagactgaatggtccggtgttcggcggagggaccaagctgaccgtcctag

SEQ ID NO: 5297 - DNA, 328 bp, Homo sapiens
cagtctgccctgactcagcctgcctccgtgtctgggtctcctggacagtcgatcaccatctcctgcactggaaccagcagtgacgttggttcttataattatgtctcctggtaccaacaccacccaggcaaagcccccaaactcatcatttatgatgtcagtgatcggccctcaggggtttctaatcgcttctctggctccaagtctggcaacacggcctccctgaccatctctgggctccaggctgaggacgaggctgattattactgcaccttatatacaagcgcctttgtgttatttggcggagggaccaagctgaccgtcctag

SEQ ID NO: 5298 - DNA, 325 bp, Homo sapiens
gacatccagttgacccagtctccatccttcctgtctgcgtctgtaggagacagagtcaccatcacttgccgggccagtcacggcattcgcagttttttagcctggtatcagcaaaaaccagggaaagcccctaacctcctgatctatggtgcatccactttgcagcgtggggtcccaccaagattcagcggcagtggatctgggacagaattcactctcacaatcaacagcctgcagcctgaagattttgcaacttattactgtctacagcttaatagttaccctccgtacacttttggccaggggaccaagctggagatcaaac

SEQ ID NO: 5299 - DNA, 334 bp, Homo sapiens
cagtctgccctgactcagcctgcctccgtgtctgggtctcctggacagtcgatcaccatctcctgcactggaaccagcagtgacgttggtggttataactatgtctcctggtaccaacagcacccaggcaaagcccccaaactcatgatttatgaggtcagtaatcggccctcaggggtttctaatcgcttctctggctccaagtctggcaacacggcctccctgaccatctctgggctccaggctgaggacgaggctgattattactgcagctcatatacaagcagcagcacttcctcggtgttcggcggagggaccaagctgaccgtcctag

SEQ ID NO: 5300 - DNA, 331 bp, Homo sapiens
aattttatgctgactcagccccactctgtgtcggagtctccggggaagacggtaaccatctcctgcaccggcagcagtggcagcattgccagcaactatgtgcagtggtaccagcagcgcccgggcagtgcccccaccactgtgatctatgaggataaccaaagaccctctggggtccctgatcggttctctggctccatcgacagctcctccaactctgcctccctcaccatctctggactgaagactgaggacgaggctgactactactgtcagtcttatgatggcaccgcatgggtgttcggcggagggaccaagctgaccgtcctag

SEQ ID NO: 5301 - DNA, 325 bp, Homo sapiens; identical to SEQ ID NO: 872

SEQ ID NO: 5302 - DNA, 325 bp, Homo sapiens
gacatccagatgacccagtctccatcctccctgtctgcatctgtaggagacagagtcaccatcacttgccgggcaagtcagagcattagcagctatttaaattggtatcagcagaaaccagggaaagcccctaagctcctgatctatgctgcatccagtttgcaaagtggggtcccatcaaggttcagtggcagtggatctgggacagatttcactctcaccatcagcagtctgcaacctgaagattttgcaacttactactgtcaacagagttacagtaccccctcgctcactttcggcggagggaccaaggtggagatcaaac

SEQ ID NO: 5303 - DNA, 325 bp, Homo sapiens
gaaattgtgttgacacagtctccagccaccctgtctttgtctccaggggaaagagccaccctctcctgcagggccagtcagagtgttagcagctacttagcctggtaccaacagaaacctggccaggctcccaggctcctcatctatgatgcatccaacagggccactggcatcccagccaggttcagtggcagtgggtctgggacagacttcactctcaccatcagcagcctagagcctgaagattttgcagtttattactgtcagcagcgtagcaactggcctcgagtcactttcggccctgggaccaaagtggatatcaaac

SEQ ID NO: 5304 - DNA, 340 bp, Homo sapiens
gacatcgtgatgacccagtctccagactccctggctgtgtctctgggcgagagggccaccatcaactgcaagtccagccagagtgttttatacagctccaacaataagaactacttagcttggtaccagcagaaaccaggacagcctcctaagctgctcatttactgggcatctacccgggaatccggggtccctgaccgattcagtggcagcgggtctgggacagatttcactctcaccatcagcagcctgcaggctgaagatgtggcagtttattactgtcagcaatattatagtactcctgacacttttggccaggggaccaagctggagatcaaac

SEQ ID NO: 5305 - DNA, 319 bp, Homo sapiens; identical to SEQ ID NO: 1688

SEQ ID NO: 5306 - DNA, 327 bp, Homo sapiens
ttttatgctgactcagccccactctgtgtcggagtctccggggaagacggtaaccatctcctgcaccggcagcagtggcagcattgccagcaactatgtgcagtggtaccagcaccgcccgggcagtgcccccaccactgtgatctatgaggataaccaaagaccctctggggtccctgatcggttctctggctccatcgacagctcctccaactctgcctccctcaccatctctggactgaagactgaggacgaggctgactactactgtcagtcttatgatagcggcaatcaagtgttcggcggagggaccaagctgaccgtcct

SEQ ID NO: 5307 - DNA, 322 bp, Homo sapiens
gacatccagatgacccagtctccatcctccctgtctgcatctgtaggagacagagtcaccatcacttgccgggcaagtcagagcattagcagctatttaaattggtatcagcagaaattagggaaagcccctaagctcctgatccatgctgcatccagtttgcaaagtggggtcccatcaaggttcagtggcagtggatctgggacagatttcactctcaccatcagcagtctgcaacctgaagattttgcaacttactactgtcaacagagttacagtacccctcggacgttcggccaagggaccaaggtggaaatcaaac

SEQ ID NO: 5308 - DNA, 333 bp, Homo sapiens
cagtctgtgctgactcagccaccctcagcgtctgggacccccgggcagagggtcaccatctcttgttctggaagcagctccaacatcggaagtaatattgtaaactggtaccagcagctcccaggaacggcccccaaactcctcatctatagtaataatcagcggccctcaggggtccctgaccgattctctggctccaagtctggcacctcagcctccctggccatcagtgggctccagtctgaggatgaggctgattattactgtgcagcatgggatgacagcctgaatggttatgtggtattcggcggagggaccaagctgaccgtccta

SEQ ID NO: 5309 - DNA, 322 bp, Homo sapiens
gccatccaaatgacccagtctccatcctccctgtctgcatctgtaggagacagagtcaccatcacttgccgggcaagtcagggcattagaaatgatttaggctggtatcagcagaaaccagggaaagcccctaagctcctgatctatgctgcatccagtttacaaagtggggtcccatcaaggttcagcggcagtggatctggcacagatttcactctcaccatcagcagcctgcagcctgaagattttgcaacttattactgtctacaagattacaattacccctggacgttcggccaagggaccaaggtggaaatcaaac

SEQ ID NO: 5310 - DNA, 331 bp, Homo sapiens
cagtctgccctgactcagcctccctccgcgtccgggtctcctggacagtcagtcaccatctcctgcactggaaccagcagtgacgttggtggttataactatgtctcctggtaccaacagcacccaggcaaagcccccaaactcatgatttatgaggtcagtaagcggccctcaggggtccctgatcgcttctctggctccaagtctggcaacacggcctccctgaccgtctctgggctccaggctgaggatgaggctgattattactgcagctcatatgcaggcagcctcttttgggtgttcggcggagggaccaagctgaccgtcctag

SEQ ID NO: 5311 - DNA, 331 bp, Homo sapiens
gatattgtgatgactcagtctccactctccctgcccgtcacccctggagagccggcctccatctcctgcaggtctagtcagagcctcctgcatagtaatggatacaactatttggattggtacctgcagaagccagggcagtctccacagctcctgatctatttgggttctaatcgggcctccggggtccctgacaggttcagtggcagtggatcaggcacagattttacactgaaaatcagcagagtggaggctgaggatgttggggtttattactgcatgcaagctctacaaactcctctcggcggagggaccaaggtggagatcaaac

SEQ ID NO: 5312 - DNA, 334 bp, Homo sapiens
aattttatgctgactcagccccactctgtgtcggagtctccggggaagacggtaacaatctcctgcaccggcagcagtggcagcattgccagcaactatgtgcagtggtaccagcagcgcccgggcagtgcccccaccactgtgatctatgaggataaccaaagaccctctggggtccctgatcggttctctggctccatcgacagctcctccaactctgcctccctcaccatctctggactgaagactgaggacgaggctgactactactgtcagtcttatcatggcagcaatcatgaagtgttcggcggagggaccaagctgaccgtcctag

SEQ ID NO: 5313 - DNA, 334 bp, Homo sapiens
aattttatgctgactcagccccactctgtgtcggagtctccggggaagacggtaattatctcctgcaccgccagcagtggcagcattgccagcaactacgtgcagtggtaccagcagcgcccgggcagtgcccccaccactgtgatctatgaggataaccaaagaccctctggggtccctgatcggttctctggctccatcgacagctcctccaactctgcctccctcaccatctctggactgaagactgaggacgaggctgactactactgtcagtcttatgattacagcaatctttgggtgttcggcggagggacccagctgaccgtcctag

SEQ ID NO: 5314 - DNA, 325 bp, Homo sapiens
gacatccagatgacccagtctccatcctccctgtctgcatctgtaggagacagagtcaccatcacttgccgggcaagtcagagtattaacagctatttaaattggtatcagcagaaaccagggaaagcccctaagctcctgatctatgctgcatccaatttgcaaagtggagtcccatcaaggttcagtggtagtggatctgggacagatttcactctcaccatcagcagtctgcaacctgaagattttgcaacttactactgtcaacagagctacactacccctcaggtcaccttcggccaagggacacgactggagattaaac

SEQ ID NO: 5315 - DNA, 328 bp, Homo sapiens
tcttctgagctgactcaggaccctgctgtgtctgtggccttgggacagacagtcaggatcacatgccaaggagacagcctcagaagctattatgcaagctggtaccagcagaagccaggacaggcccctgtacttgtcatctatggtaaaaacaaccggccctcagggatcccagaccgattctctggctccagctcaggaaacacagcttccttgaccatcactggggctcaggcggaagatgaggctgactattactgtaactcccgggacagcagtggtaaccatctgggagtgttcggcggagggaccaagctgaccgtcctag

SEQ ID NO: 5316 - DNA, 328 bp, Homo sapiens
gaaatagtgatgacgcagtctccagccaccctgtctgtgtctccaggggaaagagccaccctctcctgcagggccagtcagagtgttagcagcaacttagcctggtaccagcagaaacctggccaggctcccaggctcctcatctatggtgcatccaccagggccactggtatcccagccaggttcagtggcagtgggtctgggacagagttcactctcaccatcagcagcctgcagtctgaagattttgcagtttattactgtcagcagtataataactggcctccgatgtacacttttggccaggggaccaagctggagatcaaac

SEQ ID NO: 5317 - DNA, 331 bp, Homo sapiens
cagtctgccctgactcagcctcgctcagtgtccggatctcctggacagtcagtcaccatctcctgcactggaaccagcagtgatgttggtacttataactatgtcgcctggtaccagcagcacccaggcaaagcccccagactcatgatttatgatgtcactaagaggccctcaggggtccctgatcgattttctggttccaagtctggcaacacggcctccctgaccatctctgggctccagggtgaggatgaggctgattatttttgctcctcatatacaggcatctacacctgggtgttcggcggagggaccaaggtgaccgtcctag

SEQ ID NO: 5318 - DNA, 322 bp, Homo sapiens; identical to SEQ ID NO: 5241

SEQ ID NO: 5319 - DNA, 325 bp, Homo sapiens
tcttctgagctgactcaggaccctgctgtgtctgtggccttgggacagacagtcaggatcacatgccaaggagacagcctcagaagctattatgcaagctggtaccagcagaagccaggacaggcccctgtacttgtcatctatggtaaaaacaaccggccctcagggatcccagaccgattctctggctccagctcaggaaacacagcttccttgaccatcactggggctcaggcggaagatgaggctgactattactgtaactcccgggacagcagtggtaaccatctggtgttcggcggagggaccaagctgaccgtcctag

SEQ ID NO: 5320 - DNA, 325 bp, Homo sapiens
tcttctgagctgactcaggaccctgctgtgtctgtggccttgggacagacagtcaggatcacatgccaaggagacagcctcagaagctattatgcaagctggtaccagcagaagccaggacaggcccctgtacttgtcatctgtgataaaacctaccggccctcagggatcccagaccgattctctggctccaggacaggaaacacagcttccttgaccatcactggggctcaggcggaagatgaggctgactattactgtaactcccgggacagcagtggtaaccattgggtgttcggcggagggaccaagctgaccgtcctag

SEQ ID NO: 5321 - DNA, 318 bp, Homo sapiens
tcctatgagctcacacagccatcctcagtgtcagtgtctccgggacagacagccaggatcacctgctcaggagatgtgctggcaaaaaaatatgctcggtggttccagcagaagccaggccaggcccctgtgctggtgatttataaagacagtgagcggccctcagggatccctgagcgattctccggctccagctcagggaccacagtcaccttgaccatcagcggggcccaggttgaggatgaggctgactattactgttactctgcggctgacaacaatggggtattcggcggagggaccaagctgaccgtccta

SEQ ID NO: 5322 - DNA, 319 bp, Homo sapiens
tcctatgagctgacacagccaccctcggtgtcagtgtccccaggacagacggccaggatcacctgctctggagatgcattgccaaagcaatatgcttattggtacgagcagaagccaggccaggcccctgtgttggtgatatataaagacagtgagaggccctcagggatccctgagcgattctctggctccagctcagggacaacagtcacgttgaccatcagtggagtccaggcagaggacgaggctgactattactgtcaaacagcagacagcaggggtcccgtattcggcggagggaccaagctgaccgtcctag

SEQ ID NO: 5323 - DNA, 322 bp, Homo sapiens
gacatccagatgacccagtctccttccaccctgtctgcatctgtaggagacagagtcaccatcacttgccgggccagtcagagtattagtagctggttggcctggtatcagcagaaaccagggaaagcccctaagctcctgatctatgatgcctccagtttgcaaagtggggtcccatcaaggttcagcggcagtggatctgggacagaattcactctcaccatcagcagcctgcagcctgatgattttgcaacttattactgccaacagtataatagttattctccgacgttcggccaagggaccaaggtggaaatcaaac

SEQ ID NO: 5324 - DNA, 319 bp, Homo sapiens
tcctatgagctgactcagccaccctcagtgtccgtgtccccaggacagacagccagcatcacctgctctggagataaattgggggataaatatgcttgctggtatcagcagaagccaggccagtcccctgtgctggtcatctatcaagatagcaagcggccctcagggatccctgagcgattctctggctccaactctgggaacacagccactctgaccatcagcgggacccaggctatggatgaggctgactattactgtcaggcgtgggacagcagcactggggtgttcggcggagggaccaagctgaccgtcctag

SEQ ID NO: 5325 - DNA, 319 bp, Homo sapiens
tcctatgacctgactcagccaccctcagtgtccgtgtccccaggacagacagccagcatcacctgctctggagataaattggggactaaatatgtttattggtatcaccagaagccaggccagtcccctgtgttggtcatgtatcaggataccaagcggccctcagggatccctgagcgattgtctggctccaactctgggaacacagccactctgaccatcagcgggacccaggctatggatgagggtgactattactgtcaggcgtgggacaggagcactgggttattcggcggagggaccaagctgaccgtcctag

SEQ ID NO: 5326 - DNA, 331 bp, Homo sapiens
cagtctgccctgactcagcctgcctccgtgtctgggtctcctggacagtcgatcaccatctcctgcactggaaccagcagtgacgttggtggttataactatgtctcctggtaccaacagcacccaggcaaagcccccaaactcatgatttatgatgtcagtaatcggccctcaggggtttctaatcgcttctctggctccaagtctggcaacacggcctccctgaccatctctgggctccaggctgaggacgaggctgattattactgcagctcatatacaagcagcagccagggggtcttcggaactgggaccaaggtcaccgtcctag

SEQ ID NO: 5327 - DNA, 337 bp, Homo sapiens
cagtctgccctgactcagcctcgctccgtgtccgggtctcctggacagtcagtcaccatctcctgcactggaaccagcagtgatgttggtggttataattatgtctcctggtaccaacagcacccaggcaaagcccccaaactcatgatttatgatgtcaataagcggccctcaggggtccctgatcgcttctctggctccaagtctggcaacacggcctccctgaccatctctgggctccaggctgaggatgaggctgattattactgctgttcatatgcaggcagcaacactttaagatgggtgttcggcggagggaccaagctgaccgtcctag

SEQ ID NO: 5328 - DNA, 325 bp, Homo sapiens
gacatccagatgacccagtctccatcctccctgtctgcatctgtgggagacagagtcaccatcacttgccaggcgagtcaggacattagcaactatttaaattggtatcagcagaaaccagggaaagcccctaagctcctgatctacgatgcatccaatttggaaacaggggtcccatcaaggttcagtggaagtggatctgggacagattttactttcaccatcagtagcctgcagcctgaagatggtgcaacatattactgtcaacagtatgataatctccttttgtacacttttggccaggggaccaagctggagatcgaac

SEQ ID NO: 5329 - DNA, 325 bp, Homo sapiens
gaaatagtgatgacgcagtctccagccaccctgtctgtgtctccaggggaaagagccaccctctcctgcagggccagtcagagtgttagcagcagcttagcctggtaccagcagagacctggccaggctcccaggctcctcatctatggtgcatccaccagggccactggtatcccagccaggttcagtggcagtgggtctgggacagagttcactctcaccatcagcagcctgcagtctgaagattttgcagtttattactgtcagcagtataataattggcctccgtggacgttcggccaagggaccaaggtggaaatcaaac

SEQ ID NO: 5330 - DNA, 322 bp, Homo sapiens
gccatccggatgacccagtctccatcctcactctctgcatctacaggagacagagtcaccatcacttgtcgggcgagtcagggtattagcagttatttagcctggtatcagcaaaaaccagggaaagcccctaagctcctgatctatgctgcatccactttgcaaagtggggtcccatcaaggttcagcggcagtggatctgggacagatttcactctcaccatcagctgcctgcagtctgaagattttgcaacttattactgtcaacagtattatagttaccccctcactttcggcggagggaccaaggtggagatcaaac

SEQ ID NO: 5331 - DNA, 322 bp, Homo sapiens
gacatccagatgatccagtctccatcttccgtgtctgcatctgtaggagacagagtcaccatcacttgtcgggcgagtcagggtattagcagctggttagcctggtatcagcagaaaccacagaaagcccctaagctcctgatctatgctgcatccagtttgcaaagtggggtcccatcaaggttcagcggcagtggatctggggcagatttcactctcaccatcagcagcctgcagcctgaagattttgcaacttactattgtcaacaggctaacagtttcccgctcactttcggcggagggaccaaggtggagatcaaac

SEQ ID NO: 5332 - DNA, 331 bp, Homo sapiens
cagtctgtattgacgcagccgccctcaatgtctgcggccccaggacagaaggtcaccatcccctgctctggaagcagctccaacattgggaataattatgtatcctggtaccagcaactcccaggaacagcccccaaactcctcatttatgacaataataagcgaccctcagggattcctgaccgattctctggctccaagtctggcgcgtcagccaccctgggcatcaccggactccagactggggacgaggccgattattactgcggaacatgggatagcagcctgagtacttgggtgttcggcggagggaccaagctgaccgtcctag

SEQ ID NO: 5333 - DNA, 319 bp, Homo sapiens
gacatccagatgacccagtctccatcttccgtgtctgcatctgtaggagacagagtcaccatcacttgtcgggcgagtcagggtattagcagctggttagcctggtatcagcagaaaccagggaaagcccctaagctcctgatctatgctgcatccagtttgcaaagtggggtcccatcaaggttcagcggcagtggatctgggacagatttcactctcaccatcagcagcctgcagcctgaagattttgcaacttactattgtcaacaggctaacagtttcccgacgttcggccaagggaccaaggtggaaatcaaac

SEQ ID NO: 5334 - DNA, 322 bp, Homo sapiens; identical to SEQ ID NO: 3896

SEQ ID NO: 5335 - DNA, 331 bp, Homo sapiens
cagtctgtgctgactcagccaccctcagcgtctgggacccccgggcagagggtcaccatctcttgttctggaagcagctccaacatcggaagtaattatgtatactggtaccagcagctcccaggaacggcccccaaactcctcatctataggaataatcagcggccctcaggggtccctgaccgattctctggctccaagtctggcacctcagcctccctggccatcagtgggctccggtccgaggatgaggctgattattactgtgcagcatgggatgacagcctgagtgggtgggtgttcggcggagggaccaagctgaccgtcctag

SEQ ID NO: 5336 - DNA, 322 bp, Homo sapiens
gacatccagatgacccagtctccatcctccctgtctgcatctataggagacagcgtcaccatcacttgccgggcaagtcagagcattagtaaatatttaagttggtatcagcagaaaccagggaaagcccctaaactcctcatctatgatgcatccggtttgcaaagcggggtcccatcaaggttcagtggcagtggatctgggacagagttcactctcaccatcagcagtctgcagcctgaagattttgcaacttacttctgtcttcagagttccactgcccctctcactttcggcggggggaccgaggtggacatcaaac

SEQ ID NO: 5337 - DNA, 325 bp, Homo sapiens
gacatccagatgacccagtctccttccaccctgtctgcatctgtaggagacagagtcaccatcacttgccgggccagtcagagtattagtagctggttggcctggtatcagcagaaaccagggaaagcccctaagctcctgatctataaggcgtctagtttagaaagtggggtcccatcaaggttcagcggcagtggatctgggacagaattcactctcaccatcagcagcctgcagcctgatgattttgcaacttattactgccaacagtataatagttattctcagtggacgttcggccaagggaccaaggtggaaatcaaac

SEQ ID NO: 5338 - DNA, 331 bp, Homo sapiens
cagtctgccctgactcagcctgcctccgtgtctgggtctcctggacagtcgatcaccgtctcctgcactggaaccagcagtgacgttggtggttatcactatatctcctggtaccaacatcacccaggcaaagtccccaaactcatgatttatgacgtcagtaatcggccctcaggggtttctaatcgcttctctggctccaagtctggcaacacggcctccctgaccatctctgggctccaggctgaggacgaggctgattattactgcagctcatatacaagcagcagcccccgggtgttcggcggagggaccaagctgaccgtcctag

SEQ ID NO: 5339 - DNA, 330 bp, Homo sapiens
cagtctgccctgactcagcctgcctccgtgtctgggtctcctggacagtcgatcaccatctcctgcactggaagcaacattgaccttggtgcttataactatgtctcctggtaccaacaacacccaggcaaagcccccaaactcatgatttatgatgtcagtaatcggccctcaggggtttctaatcgcttctctggctccaagtctggcaacacggcctccctgaccatctctgggctccagggtgaggacgaggctgattattactgcagctcatctacaagcagcaccccttatgtcttcggaactgggaccaaggtcaccgtccta

SEQ ID NO: 5340 - DNA, 332 bp, Homo sapiens
cagtctgccctgactcagcctgcctccgtgtctgggtctcctggacagtcgatcaccatctcctgcactggcaccagcagtgacgttggtggttataactatgtctcctggtaccaacagcacccaggcaaagcccccaagctcatgatttatgatgtcactaatcggccctcaggggtttctaatcgcttctctggctccaagtctggcaacacggcctccctgaccatctctgggctccaggctgaggacgaggctgattattactgcagctcatatacaagcaccaccactccttatgtcttcggaactgggaccaaggtcaccgtcct

SEQ ID NO: 5341 - DNA, 346 bp, Homo sapiens
caggctgtgctgactcagccggcttccctctctgcatctcctggagcatcagccagtctcacctgcaccttgcgcagtggcatcaatgttggtacctacaggatatactggtaccagcagaagccagggagtcctccccagtatctcctgaggtacaaatcagactcagataagcagcagggctctggagtccccagccgcttctctggatccaaagatgcttcggccaatgcagggattttactcatctctgggctccagtctgaggatgaggctgactattactgtatgatttggcacagcagcgcttgggtgttcggcggagggaccaagctgaccgtcctag

SEQ ID NO: 5342 - DNA, 316 bp, Homo sapiens
tcctatgagctgactcagccaccctcagtgtccgtgtccccaggacagacagccagcatcacctgctctggagataaattgggggataaatatgcttgctggtatcagcagaagccaggccagtcccctgtgctggtcatctatcaagatagcaagcggccctcagggatccctgagcgattctctggctccaactctgggaacacagccactctgaccatcagcgggacccaggctatggatgaggctgactattactgtcaggcgtgggacagcagcgtggtattcggcggagggaccaagctgaccgtcctag

SEQ ID NO: 5343 - DNA, 325 bp, Homo sapiens
gacatccagatgacccagtctccttccaccctgtctgcatctgtaggagacagagtcaccatcacttgccgggccagtcagaatattaatagctggttggcctggtatcagcagaaaccagggaaagcccctaagctcctgatctatgatgcctccagtttggaaagtggggtcccatcaaggttcagcggcagtggatctgggacagaattcactctcaccatcagcagcctgcagcctgatgattttgcaacttattactgccaacagtacaaaagttattctccggtgacgttcggccaagggaccaaggtggaaatcaaac

SEQ ID NO: 5344 - DNA, 325 bp, Homo sapiens
gacatccagatgacccagtctccatcctccctgtctgcatctgtaggagacagagtcaccatcacttgccgggcaagtcagagcattaacaactatttaaattggtatcagcagaaaccagggaaagcccctaagctcctgatctatactacatccactttgcaaagtggggtcccgtcaaggttcagtggcagtggatctgggacagatttcactctcaccatcagcagtctgcaacctgaagattttgcaacttactactgtcaacagagttacactacccttgcgctcactttcggcggagggaccaaggtggagatcaaac

SEQ ID NO: 5345 - DNA, 322 bp, Homo sapiens
gacatccagatgacccagtctccttccaccctgtctgcatctgtgggagacagagtcaccatcacttgccgggccagtcagagtattagtagctggctggcctggtatcagcagaaaccagggaaagcccctaaactcctgatctatgaggcgtctactttagaaagtggggtcccatcaaggttcagcggcagtggatctgggacagagttcactctcaccatcagcagcctgcagcctgatgattttgcaacttattactgccaacagtatcatagttcttcggggacgttcggccaagggaccaaggtgggaatcaaac

SEQ ID NO: 5346 - DNA, 322 bp, Homo sapiens
gacatccagatgacccagtctccatcttccgtgtctgcatctgtaggagacagagtcaccatcacttgtcgggcgagtcagggtattagcagctggttagcctggtatcagcagaaaccagggaaagcccctaagctcctgatctatgatgcatccagtttgcaaagtggggtcccatcaaggttcagcggcagtggatctgggacagatttcactctcaccatcagcagcctgcagcctgaagattttgcaacttactattgtcaacaggctatcaggttcccttacacttttggccaggggaccaagctggagatcaaac

SEQ ID NO: 5347 - DNA, 361 bp, Homo sapiens
gaagtgcagctggtggagtctgggggaggcttggtacagcctggcaggtccctgagactctcctgtgcagcctctggattcacctttgatgaatatgccatgcactgggtccggcaagctccagggaagggcctggagtgggtctcaggtattagttggagtagtgttagcatagcctatgcggactctgtgaagggccgattcaccatctccagagacaaggccaagaactccctgtatctgcaaatgaatagtctgagagctgaggacacggccttgtattactgtgcaaaatcgaatagcagtggcttgaccccctttgaccactggggccagggactcctggtcaccgtctcctcag

SEQ ID NO: 5348 - DNA, 361 bp, Homo sapiens; identical to SEQ ID NO: 5347

SEQ ID NO: 5349 - DNA, 361 bp, Homo sapiens; identical to SEQ ID NO: 5347

SEQ ID NO: 5350 - DNA, 361 bp, Homo sapiens; identical to SEQ ID NO: 5347

SEQ ID NO: 5351 - DNA, 361 bp, Homo sapiens; identical to SEQ ID NO: 5347

SEQ ID NO: 5352 - DNA, 361 bp, Homo sapiens; identical to SEQ ID NO: 5347

SEQ ID NO: 5353 - DNA, 361 bp, Homo sapiens; identical to SEQ ID NO: 5347

SEQ ID NO: 5354 - DNA, 361 bp, Homo sapiens; identical to SEQ ID NO: 5347

SEQ ID NO: 5355 - DNA, 361 bp, Homo sapiens
gaagtgcagctggtggagtctgggggaggcttggtacagcctggcaggtccctgagactctcctgtgcagcctctggattcacctttgatgaatatgccatgcactgggtccggcaagctccagggaagggcctggagtgggtctcaggtattagttggagtagtgttagcatagcctatgcggactctgtgaagggccgattcaccatctccagagacaaggccaagaactccctgtatctgcaaatgaatagtctgagagctgaggacacggccttgtattactgtgcaaaatcgaatagcagtggcttgaccccctttgaccactggggccagggaatcctggtcaccgtctcctcag

SEQ ID NO: 5356 - DNA, 361 bp, Homo sapiens; identical to SEQ ID NO: 5355

SEQ ID NO: 5357 - DNA, 361 bp, Homo sapiens; identical to SEQ ID NO: 5347

SEQ ID NO: 5358 - DNA, 361 bp, Homo sapiens; identical to SEQ ID NO: 5355

SEQ ID NO: 5359 - DNA, 361 bp, Homo sapiens; identical to SEQ ID NO: 5347

SEQ ID NO: 5360 - DNA, 361 bp, Homo sapiens; identical to SEQ ID NO: 5347

SEQ ID NO: 5361 - DNA, 361 bp, Homo sapiens; identical to SEQ ID NO: 5347

SEQ ID NO: 5362 - DNA, 361 bp, Homo sapiens; identical to SEQ ID NO: 5347

SEQ ID NO: 5363 - DNA, 361 bp, Homo sapiens; identical to SEQ ID NO: 5347

SEQ ID NO: 5364 - DNA, 361 bp, Homo sapiens; identical to SEQ ID NO: 5347

SEQ ID NO: 5365 - DNA, 361 bp, Homo sapiens; identical to SEQ ID NO: 5347

SEQ ID NO: 5366 - DNA, 361 bp, Homo sapiens; identical to SEQ ID NO: 5347

SEQ ID NO: 5367 - DNA, 361 bp, Homo sapiens; identical to SEQ ID NO: 5355

SEQ ID NO: 5368 - DNA, 361 bp, Homo sapiens; identical to SEQ ID NO: 5347

SEQ ID NO: 5369 - DNA, 361 bp, Homo sapiens; identical to SEQ ID NO: 5355

SEQ ID NO: 5370 - DNA, 361 bp, Homo sapiens; identical to SEQ ID NO: 5347

SEQ ID NO: 5371 - DNA, 361 bp, Homo sapiens; identical to SEQ ID NO: 5347

SEQ ID NO: 5372 - DNA, 361 bp, Homo sapiens; identical to SEQ ID NO: 5347

SEQ ID NO: 5373 - DNA, 361 bp, Homo sapiens; identical to SEQ ID NO: 5347

SEQ ID NO: 5374 - DNA, 361 bp, Homo sapiens; identical to SEQ ID NO: 5347

SEQ ID NO: 5375 - DNA, 361 bp, Homo sapiens; identical to SEQ ID NO: 5355

SEQ ID NO: 5376 - DNA, 361 bp, Homo sapiens; identical to SEQ ID NO: 5347

SEQ ID NO: 5377 - DNA, 361 bp, Homo sapiens; identical to SEQ ID NO: 5347

SEQ ID NO: 5378 - DNA, 361 bp, Homo sapiens; identical to SEQ ID NO: 5355

SEQ ID NO: 5379 - DNA, 361 bp, Homo sapiens; identical to SEQ ID NO: 5347

SEQ ID NO: 5380 - DNA, 361 bp, Homo sapiens; identical to SEQ ID NO: 5347

SEQ ID NO: 5381 - DNA, 361 bp, Homo sapiens; identical to SEQ ID NO: 5347

SEQ ID NO: 5382 - DNA, 361 bp, Homo sapiens; identical to SEQ ID NO: 5347

SEQ ID NO: 5383 - DNA, 355 bp, Homo sapiens
cagctgcagctgcaggagtcgggcccaggactggtgaagccttcggagaccctgtccctcacctgcactgtctctggtggctccatcagcgggagtagttaccagtggggctgggtccgccagccccccgggaaggggctggcatggattgcaggtattcattatagtgggagcacctactacaacccgtccctcaagagtcgggtcaccatatccgtagagacgtccaagaatcagttctccctgagactgtattctgtgaccgccacagacacgtccttatattactgtgcgcgtagagacggctcctactttgactactggggccagggagccctggtcaccgtctcctcag

SEQ ID NO: 5384 - DNA, 355 bp, Homo sapiens
cagctgcagatgcaggagtcgggcccgggactggtgaggccttcggagaccctgtccctcacctgcactgtctctggtggctccatcagcgggagtagttaccagtggggctgggtccgccagcccccagggaaggggctggcgtggattgcaggtattcattatagtgggagcacttactacaacccgtccctcaagagtcgagtcaccatatccgtagagacgtccaggaatcagttctccctgagactgttttctgtgaccgccacagacacgtctttatattattgtgcgcgtagagacggctcctactttgactactggggccagggagccctggtcaccgtctcctcag

SEQ ID NO: 5385 - DNA, 355 bp, Homo sapiens
cagctgcggctgcaggagtcgggcccaggactggtgaagccttcggagaccctgtccctcacctgcactgtctctggtggctccatcagcgggagtagttaccagtggggctgggtccgccagcccccagggaaggggctggcgtggattgcaggtattcactatagtgggaacacctactacaacccgtccctgaagagtcgggccaccatatctgtagagacgtccaagaatcagttctccctgagactgtattctgtgaccgccacagacacgtctttatattattgtgcgcgtagagacggctcctactttgactactggggccagggagccctggtcaccgtctcctcag

SEQ ID NO: 5386 - DNA, 355 bp, Homo sapiens
cagctgcagctgcaggagtcgggcccaggactggtgaagccttcggagaccctgtccctcacctgcactgtctctggtggctccatcagcgggagtagttaccagtggggctgggtccgccagcccccagggaaggggctggcgtggattgcaggtattcactatagtgggagcacctactacaacccgtccctcaagagtcgggtcaccatatctgtagagacgtccaagaatcagttctccctgagactgtattctgtgaccgccacagacacgtctttatattattgtgcgcgtagagacggctcctactttgactactggggccagggagccctggtcaccgtctcctcag

SEQ ID NO: 5387 - DNA, 355 bp, Homo sapiens
cagctgcagttgcaggagtcgggcccaggactggtgaggccttcggagaccctgtccctcacctgcactgtctctggtggctccatcagcgggagtagttaccagtggggctgggtccgccagcccccagggaaggggctggcgtggattgcaggtattcattatagtgggagcacctactacaacccgtccctcaagagtcgggtcaccatatccgtagagacgtccaggaatcagttctccctgagactgtattctgtgaccgccacagacacgtctttatattattgtgcgcgtagagacggctcctactttgactactggggccagggagccctggtcaccgtctcctcag

SEQ ID NO: 5388 - DNA, 355 bp, Homo sapiens
cagctgcagctgcaggagtcgggcccaggactggtgaagccttcggagaccctgtccctcacctgcactgtctctggtggctccatcagcgggagtagttaccagtggggctgggtccgccagcccccagggaaggggctggcgtggattgcaggtattcattatagtgggagcacctactacaacccgtccctcaagagtcgggtcaccatatccgtagagacgtccaggaatcagttctccctgagactgtattctgtgaccgccacagacacgtctttatattattgtgcgcgtagagacggctcctactttgactactggggccagggagccctggtcaccgtctcctcag

SEQ ID NO: 5389 - DNA, 355 bp, Homo sapiens
cagctgcagctgcaggagtcgggcccaggactggtgaggccttcggagaccctgtccctcacctgcactgtctctggtggctccatcagcgggagtagttaccagtggggctgggtccgccagcccccagggaaggggctggcgtggattgcaggtattcattatagtgggagcacctactacaacccgtccctcaagagtcgggtcaccatatccgtagagacgtccaggaatcagttctccctgagactgtattctgtgaccgccacagacacgtctttatattattgtgcgcgtagagacggctcctactttgactactggggccagggagccctggtcaccgtctcctcag

SEQ ID NO: 5390 - DNA, 355 bp, Homo sapiens
cagttgcagctgcaggagtcgggcccaggactggtgaggccttcggagaccctgtccctcacctgcactgtctctggtggctccatcagcgggagtagttatcagtggggctgggtccgccagcccccagggaaggggctggcgtggattgcaggtattcattatagtgggagcacctactacagcccgtccctcaagagtcgcgtcaccatctccgtagagacgtcccggaatcagttctccctgagactgtattctgtgaccgccacagacacgtctttatattattgtgcgcgtcgagacggctcctactttgactactggggccagggagccctggtcaccgtctcctcag

SEQ ID NO: 5391 - DNA, 355 bp, Homo sapiens; identical to SEQ ID NO: 5389

SEQ ID NO: 5392 - DNA, 355 bp, Homo sapiens
cagctgcagctgcaggagtcgggcccaggactggtgaggccttcggagaccctgtccctcacctgcactgtctctggtggctccatcagcgggagtagttaccagtggggctgggtccgccagcccccagggaaggggctggcgtggattgcaggtattcattatagtgggagcacctactacaacccgtccctcaagagtcgggtcaccgtctccgtagagacgtcccggaatcagttctccctgagactgtattctgtgaccgccacagacacgtctttatattattgtgcgcgtagagacggctcctactttgactactggggccagggagccctggtcaccgtctcctcag

SEQ ID NO: 5393 - DNA, 355 bp, Homo sapiens
cagctgcagctgcaggagtcgggcccaggactggtgaggccttcggagaccctgtccctcacctgcactgtctctggtggctccatcagcgggagtagttaccagtggggctgggtccgccagcccccagggaaggggctggcgtggattgcaggtattcattatagtgggagcacctactacaacccgtccctcaagagtcgggtcaccatctccgtagagacgtcccggaatcagttctccctgagactgtattctgtgaccgccacagacacgtctttatattattgtgcgcgtagagacggctcctactttgactactggggccagggagccctggtcaccgtctcctcag

SEQ ID NO: 5394 - DNA, 355 bp, Homo sapiens
cagctgcagctgcaggagtcgggcccaggactggtgaagccttcggagaccctgtccctcacctgcactgtctctggtggctccatcagcgggagtagttaccagtggggctgggtccgccagcccccagggaaggggctggcgtggattgcaggtattcattatagtgggagcacctactacaacccgtccctcaagagtcgggtcaccatatccgtagagacgtccaagaatcagttctccctgagactgtattctgtgaccgccacagacacgtctttatattactgtgcgcgtagagacggctcctactttgactactggggccagggagccctggtcaccgtctcctcag

SEQ ID NO: 5395 - DNA, 355 bp, Homo sapiens
cagctgcagctgcaggagtcgggcccgggactggtgaggccttcggagaccctgtccctcacctgcactgtctctggtggctccatcagcgggagtagttaccagtggggctgggtccgccagcccccagggaaggggctggcgtggattgcaggtattcattatagtgggagcacctactacaacccgtccctcaagagtcgagtcaccatatccgtagagacgtccaggaatcagttctccctgagactgttttctgtgaccgccacagacacgtctttatattattgtgcgcgtagagacggctcctactttgactactggggccagggagccctggtcaccgtctcctcag

SEQ ID NO: 5396 - DNA, 355 bp, Homo sapiens; identical to SEQ ID NO: 5389

SEQ ID NO: 5397 - DNA, 355 bp, Homo sapiens
cagctgcagctgcaggagtcgggcccaggactggtgaagccttcggagaccctgtccctcacctgcactgtctctggtggctccatcagcgggagtagttaccagtggggctgggtccgccagcccccagggaaggggctggcgtggattgcaggtattcattatagtgggagcacctactacaacccgtccctcaagagtcgggtcaccatatccgtagagacgtccaggaatcagttctccctgagactgtattctgtgaccgccactgacacgtctttatattactgtgcgcgtagagacggctcctactttgactactggggccagggagccctggtcaccgtctcctcag

SEQ ID NO: 5398 - DNA, 379 bp, Homo sapiens
cagctacagctgcaggagtcgggcccaggactggtgaagccttcggagaccctgtccctcacctgcactgtctccggtgactccatgagcagtagaagttattattggggctggatccgccagcccccagggaaggggctggagtggattgggagtatctattatagtggggacacctactacgacccgtccctcaagagtcgagtcaccatatccgttgacacgtccaagattcagttcaccctgaacctgagctctgtgaccgccgcagacacggctgtttattactgtgcgagacatgtgagtgatggccagagcattggctggctttactactttgactgctggggccagggaaccctggtcaccgtctcctcag

SEQ ID NO: 5399 - DNA, 379 bp, Homo sapiens; identical to SEQ ID NO: 5398

SEQ ID NO: 5400 - DNA, 379 bp, Homo sapiens
cagctacagctgcaggagtcgggcccaggactggtgaagccttcggagaccctgtccctcacctgcactgtctccggtgactccatgagcagtagaagttactactggagctggatccgccagcccccagggaaggggctggagtggattgggagtatctattatagtggggacacctactacgacccgtccctcaagagtcgagtcaccatatccgttgacacgtccaagaatcagttcaccctgaacctgagctctgtgaccgccgcagacacggctgtttattactgtgcgagacatgtgagcgatggccagagcattggctggctttactactttgactgctggggccagggaaccctggtcaccgtctcctcag

SEQ ID NO: 5401 - DNA, 379 bp, Homo sapiens; identical to SEQ ID NO: 5400

SEQ ID NO: 5402 - DNA, 379 bp, Homo sapiens
cagctacagatgcaggagtcgggcccaggactggtgaagccttcggagaccctgtccctcacctgcactgtctctggtgactccatgagcagtagaagttactactggggctggatccgccagcccccagggaaggggctggagtggattgggagtatctattatagtgggaacacctactacaacccgtccctcaagagtcgagtcaccatatccgttgacacgtccaagaatcagttcaccctgaacctgagctctgtgaccgccacagacacggctgtttattactgtgcgagacatgtgagcgatggccagagcattggctggctttactactttgactactggggccagggaaccctggtcaccgtctcctcag

SEQ ID NO: 5403 - DNA, 379 bp, Homo sapiens; identical to SEQ ID NO: 5402

SEQ ID NO: 5404 - DNA, 379 bp, Homo sapiens; identical to SEQ ID NO: 5402

SEQ ID NO: 5405 - DNA, 379 bp, Homo sapiens
cagctacagctgcaggagtcgggcccaggactggtgaagccttcggagaccctgtccctcacctgcactgtctccggtgactccatgagcagtagaagttactactggggctggatccgccagcccccagggaaggggctggagtggattgggagtatctattttagtggggacacctactacgacccgtccctcaagagtcgagtcaccatttccgttgacacgtccaagaatcagttcaccctgaacctgagctctgtgaccgccgcagacacggctgtttattactgtgcgagacatgtgagcgatggccagagcattggctggctttaccagtttgactgctggggccagggaaccctggtcaccgtctcctcag

SEQ ID NO: 5406 - DNA, 379 bp, Homo sapiens
cagctacagctgcaggagtcgggcccaggactggtgaagccttcggagaccctgtccctcacctgcactgtctccggtgactccatgagcagtagaagttactactggggctggatccgccagcccccagggaaggggctggagtggattgggagtatctattatagtggggacacctactacgacccgtccctcaagagtcgagtcaccatatccgttgacacgtccaagaatcagttcaccctgaacctgagctctgtgaccgccgcagacacggctgtttattactgtgcgagacatgtgagcgatggccagagcattggctggctttaccagtttgactgctggggccagggaaccctggtcaccgtctcctcag

SEQ ID NO: 5407 - DNA, 381 bp, Homo sapiens
caggtgcagctgcaggagtcgggcccgggattcgtaaagccttcacagaccctgtccctcacctgcactgtctctggtggctccctcagcagcggtggttactactggacctggatccgccaacacccaggaaagggcctggagtggattgggtacatctcttccagtgggagcaccttctacaacccgtccctcaagagtcgaattaccatatcaatagacacgtctgagaaccagttctccctgaaagtgagctctgtgactgccgcggacacggccgtatattactgtgcgagactggccccgttcggggagcgccgggtggaccagtactacctcatggacgtctggggccaagggaccacggtcaccgtctcctca

SEQ ID NO: 5408 - DNA, 381 bp, Homo sapiens; identical to SEQ ID NO: 5407

SEQ ID NO: 5409 - DNA, 381 bp, Homo sapiens; identical to SEQ ID NO: 5407

SEQ ID NO: 5410 - DNA, 381 bp, Homo sapiens; identical to SEQ ID NO: 5407

SEQ ID NO: 5411 - DNA, 381 bp, Homo sapiens; identical to SEQ ID NO: 5407

SEQ ID NO: 5412 - DNA, 381 bp, Homo sapiens; identical to SEQ ID NO: 5407

SEQ ID NO: 5413 - DNA, 381 bp, Homo sapiens; identical to SEQ ID NO: 5407

SEQ ID NO: 5414 - DNA, 381 bp, Homo sapiens; identical to SEQ ID NO: 5407

SEQ ID NO: 5415 - DNA, 381 bp, Homo sapiens; identical to SEQ ID NO: 5407

SEQ ID NO: 5416 - DNA, 354 bp, Homo sapiens
caggtgcagctgcaggagtcgggcccaggactggtgaggccttcggggaccctgtccctcacctgcggtgtctctggtggctccatcagcagtaataactggtggagttgggtccgccagcccccagggaaggggctggaatggattggggaaatccattatagtgggggcaccaactacaacccgtccctcaagagtcgagtcactatatcactagacaggtccacgaaccagttctccctgaggctgacctctgtgaccgccgcggacacggccgtgtattactgtgcgagagcctactactactactacatggacgtctgggccgaagggaccacggtcaccgtcgcctca

SEQ ID NO: 5417 - DNA, 354 bp, Homo sapiens; identical to SEQ ID NO: 5416

SEQ ID NO: 5418 - DNA, 354 bp, Homo sapiens
caggtgcagctgcaggagtcgggcccaggactggtgaggccttcggggaccctgtccctcacctgcggtgtctctggtggctccatcagcagtaataactggtggagttgggtccgccagcccccagggaaggggctggaatggattggggaaatccattttagtgggggcaccaactacaacccgtccctcaagagtcgagtcactatatcactagacaggtccacgaaccagttctccctgaggctgacctctgtgaccgccgcggacacggccgtgtattactgtgcgagagcctactactactactacatggacgtctgggccgaagggaccacggtcaccgtcgcctca

SEQ ID NO: 5419 - DNA, 354 bp, Homo sapiens
caggtgcagctgcaggagtcgggcccaggactggtgaagccttcggggaccctgtccctcacctgcggtgtctctggtggctccatcagcagtaataactggtggagttgggtccgccagcccccagggaaggggctggaatggattggggaaatccattatagtgggagcaccaactacaacccgtccctcaagagtcgagtcactatatcactagacaggtccacgaaccagttctccctgaggctgacctctgtgaccgccgcggacacggccgtgtattactgtgcgagagcctactactactactacatggacgtctgggccgaagggaccacggtcaccgtcgcctca

SEQ ID NO: 5420 - DNA, 354 bp, Homo sapiens; identical to SEQ ID NO: 5418

SEQ ID NO: 5421 - DNA, 354 bp, Homo sapiens; identical to SEQ ID NO: 5416

SEQ ID NO: 5422 - DNA, 354 bp, Homo sapiens; identical to SEQ ID NO: 5416

SEQ ID NO: 5423 - DNA, 354 bp, Homo sapiens; identical to SEQ ID NO: 5418

SEQ ID NO: 5424 - DNA, 379 bp, Homo sapiens
caggtgcagctgcaggagtcgggcccaggactggtgaagccttcggagaccctgtccctcacctgcactgtctctggtggctccatcagcagtactagttactactggagctgggtccggcagcccccagggaagggactggagtggattgggtatatctattacagtgggaacaccaactacaacccctccctcaagagtcgagtcaccatgtcagtagacacgtccaagaaccagttctccctgaagctgagttctgtgaccgctgcggacacggccgtttattactgtgcgagagccgacaggggatattgtactattaccgactgctttatctttaactactggggccagggaaccctggtcaccgtctcctcag

SEQ ID NO: 5425 - DNA, 379 bp, Homo sapiens; identical to SEQ ID NO: 5424

SEQ ID NO: 5426 - DNA, 379 bp, Homo sapiens; identical to SEQ ID NO: 5424

SEQ ID NO: 5427 - DNA, 379 bp, Homo sapiens; identical to SEQ ID NO: 5424

SEQ ID NO: 5428 - DNA, 379 bp, Homo sapiens; identical to SEQ ID NO: 5424

SEQ ID NO: 5429 - DNA, 379 bp, Homo sapiens
caggtgcacctgcaggagtcgggcccaggactggtgaagccttcggagaccctgtccctcacctgcactgtctctggtggctccatcagcagtactagttactactggagctgggtccggcagcccccagggaagggactggagtggattggctatatctattacagtgggaacaccaactacaacccctccctcaagagtcgagtcaccatgtcagtagacacgtccaagaaccagttctccctgaagctgagctctgtgaccgctgcggacacggccgtttattactgtgcgagagccgacaggggatattgttctattaccgactgctttatctttaactactggggccagggaaccctggtcaccgtctcctcag

SEQ ID NO: 5430 - DNA, 384 bp, Homo sapiens
gaggtgcagctggtggagtctgggggaggcttggtacagcctggggagtccctgagactctcctgtacagcctctgcattcagtgtcaatacttacgacatgtactgggtccgccaacctacaggaaaaggtctggagtgggtctcaactattagagttactggtgacacatactatccagactccgtgaagggccgattcaccatctccagagaaagtgccacgaactcgttgtatcttcaaatgaacagcctgagagccggggacacggctatttattattgtacaagaggggcccattacgatttttggcgtggttattataccgatgaccaccactacatggacgtctggggcaaagggaccacggtcaccgtctcctca

SEQ ID NO: 5431 - DNA, 384 bp, Homo sapiens; identical to SEQ ID NO: 5430

SEQ ID NO: 5432 - DNA, 384 bp, Homo sapiens; identical to SEQ ID NO: 5430

SEQ ID NO: 5433 - DNA, 384 bp, Homo sapiens; identical to SEQ ID NO: 5430

SEQ ID NO: 5434 - DNA, 384 bp, Homo sapiens
gaggtgcagctggtggagtctgggggaggcttggtacagcctggggagtccctgagactctcctgtacagcctctggattcagtgtcaatacttacgacatgtactgggtccgccaagctacaggaaaaggtctggagtgggtctcaactattagagttactggtgacacatactatccagactccgtgaagggccgattcaccatctccagagaaagtgccacgaactcgttgtatcttcaaatgaacagcctgagagccggggacacggctatttattattgtgcaagaggggcccattacgatttttggcgtggttattataccgatgaccaccactacatggacgtctggggcaaagggaccacggtcaccgtctcctca

SEQ ID NO: 5435 - DNA, 384 bp, Homo sapiens; identical to SEQ ID NO: 5434

SEQ ID NO: 5436 - DNA, 361 bp, Homo sapiens
cagatggagctggtggagtctgggggaggcttggtcaagcctggagggtccctgagactctcctgtgcatcctctgggttcagtctcggtgactactacatgacctggatccgccaggctccagggaaggggctggaatgggtttcatacattagtcgtagtgacggaaagacattctacgcagactctgtcaagggccgattcaccctctccacggacgacggcaagaagtcactgtatttgcaaatgaacagcctaagagccgaggacacggccgtgtattattgtgtgcgaggggaggggggtccccatgatgcttttgatatctggggccaagggacaatggtcaccgtctcttcag

SEQ ID NO: 5437 - DNA, 361 bp, Homo sapiens; identical to SEQ ID NO: 5436

SEQ ID NO: 5438 - DNA, 361 bp, Homo sapiens
cagatggagctggtggagtctgggggaggcttggtcaagcctggagggtccctgagactctcatgtgcatcctctgggttcagtctcggtgactactacatgacctggatccgccaggctccagggaaggggctggaatgggtttcatacattagtcgtagtgacggaaagacattctacgcagactctgtcaagggccgattcaccctctccacggacgacgacaagaagtcactgtccttgcaaatgaacagcctgagagccgaggacacggccatttattattgtgtgcgaggggaggggggtccccatgatgcttttgatatctggggccaagggacaatggtcaccgtctcttcag

SEQ ID NO: 5439 - DNA, 361 bp, Homo sapiens
caggtgcagctggtggagtctgggggaggcttggtcaagcctggagggtccctgagactctcctgtgcagcctctggattcagcctcagtgactactacatgacctggatccgccaggctccagggaaggggctgcagtgggtttcatatattagtcggagcgatggaaccacatactacgcagagtctgtgaagggccgattcaccctctccacggacaacgccaagaactcactgttcttgcaaatgcacagcctgagagccgaggacacggccgtgtattactgtgcgcgaggggaggggggtccccatgatgcttttgatatctggggccaagggacaatggtcaccgtctcttcag

SEQ ID NO: 5440 - DNA, 361 bp, Homo sapiens
caggtgcagctggtggagtctgggggaggcttggtcaagcctggagggtccctgagactctcctgtgcagcctctggattcaccttcagtgactactacatgacctggatccgccaggctccagggaaggggctggcgtgggtttcatacattagtcgtagtgatggaaccacatactacgcagactctgtgaagggccgattcaccctctccacggacaacgccaagaactcactgtacttgcaaatgaacagcctgagagccgaggacacggccgtgtattactgtgcgcgaggggaggggggtccccatgatgcttttgatatctggggccaagggacaatggtcaccgtctcttcag

SEQ ID NO: 5441 - DNA, 358 bp, Homo sapiens
gaggtgcagctggtggagtctgggggaggcttggtccagccgggggggtccctgagactctcctgtgcagcctctggattcacctttaggaactattggatgagctgggtccgccaggctccagggaaggggctggagtgggtggccaacataaagcaagatggaagtgagaaatactatgtggactctgtgaagggccgattcaccatctccagagacaacgccaagaactcactgtatctgcaaatgaacagcctgagagccgaggacacggctgtgtattactgtgtgagatgcggctacgatgactggtacttcgatgtctggggccgtggcaccctggtcactgtctcctcag

SEQ ID NO: 5442 - DNA, 358 bp, Homo sapiens
gaggtgcagctggtggagtctgggggaggcttggtccagcctggggggtccctgagactctcctgtgcagcctctggattcacctttaataaccattggatgagctgggtccgccaggctccagggaaggggctggagtgggtggccaacataaagcaagatggaagtgagaagtactatgtggactctgtgaagggccgattcaccacctccagagacaacgccaagaactcactgtatctgcaaatgaacagcctgagagccgaggacacggctgtgtattactgtgtgagatgcggctacgatgactggtacttcgatgtctggggccgtggcaccctggtcactgtctcctcag

SEQ ID NO: 5443 - DNA, 358 bp, Homo sapiens
gaggtgcagctggtggagtctgggggaggcttggtccagcctggggggtccctgagactctcctgtgcagcctctggattcacctttagtaactattggatgagctgggtccgccaggctccagggaaggggctggagtgggtggccaacataaagcaagatggaagtgagaaatactatgtggactctgtgaagggccgattcaccatctccagagacaacgccaagaactcactgtatctgcaaatgaacagcctgagagccgaggacacggctgtgtattactgtgtgagatgcggctacgatgactggtacttcgatgtctggggccgtggcaccctggtcactgtctcctcag

SEQ ID NO: 5444 - DNA, 358 bp, Homo sapiens
gaggtgcagctggtggagtctgggggaggtttggtccagcctggggggtccctgagactctcttgtgcagcctctggattcacctttagtaactattggatgacctgggtccgccaggctccagggaaggggctggagtgggtggccaacataaagcaagatggaagtgagaaatactatgtggactctgtgaagggccgattcaccatctccagagacaacgccaagaactcactgtatctgcaaatgaacagcctgagagccgaggacacggctgtatattactgtgtgagatgcggctacgatgactggtacttcgatgtctggggccgtggcaccctggtcactgtctcctcag

SEQ ID NO: 5445 - DNA, 358 bp, Homo sapiens
gaggtgcagctagtggagtctgggggaggcttggtccagcctggggggtccctgagactctcctgtgcagcctctggattcacctttagtagctattggatgacctgggtccgccaggctccagggaaggggctggagtgggtggccaacataaaacaagatggaaatgagaaatactatgtggactctgtgaagggccgattcaccatctccagagacaacgccaagaactcactgtatctgcaaatgaacagcctgagagccgaggacacggctatctattactgtgtgagatgcggctacgatgactggtacttcgatctctggggccgtggcaccctggtcactgtctcctcag

SEQ ID NO: 5446 - DNA, 369 bp, Homo sapiens
caggtgcagctggtgcagtctggggctgaggtgaagaagcctggggcctcagtgaaggtctcctgcaaggcttctggatacatcttcaccaattatgatatcaactgggtgcgacaggccactggacaagggcttgagtggatgggatggatgaaccctaacagtggtaacgcaggctatgcacagaagttccagggcagagtcaccatgaccaggaacacctccataaccacagcctacatggagctgagcagcctgagatctgaggacacggccgtgtattactgtgggagaggccccacgacagcgaagtcgggggtcgaatggttcgacccctggggccagggaaccctggtcaccgtctcctca

SEQ ID NO: 5447 - DNA, 370 bp, Homo sapiens
caggtacaactggtgcagtctggggctgaggtgaagaagcctggggcctcagtgaaggtctcctgcaaggcttctggatacaccttcaccagttatgatatcaactgggtgcgacaggccactggacaagggcttgagtggatgggatggatgaaccctaacagtggtaacacaggctatgcacagaagttccagggcagagtcaccatgaccaggaacacctccataaacacagcctacatggagctgagcagcctgagatctgaggacacggccgtgtattactgtgcgagaggccccacgacagcgaagtcgggggtcgaatggttcgacccctggggccagggaaccctggtcaccgtctcctcag

SEQ ID NO: 5448 - DNA, 370 bp, Homo sapiens
caggtgcagctggtgcagtctggggctgaggtgaagaagcctggggcctcagtgaaggtctcctgcaaggcttctggatacaccttcaccagttatgatatcaactgggtgcgacaggccactggacaagggcttgagtggatgggatggatgaaccctaacagtggtaacacaggctatgcacagaagttccagggcagagtcaccatgaccaggaacacctccataagcacagcctacatggagctgagcagcctgagatctgaggacacggccgtgtattactgtgcgagaggccccacgacagcgaagtcgggggtcgaatggttcgacccctggggccagggaaccctggtcaccgtctcctcag

SEQ ID NO: 5449 - DNA, 370 bp, Homo sapiens; identical to SEQ ID NO: 5448

SEQ ID NO: 5450 - DNA, 363 bp, Homo sapiens
gaagtgcagctggaggagtctgggggaggcttggtacagcctggcaggtccctgagactctcctgtgtagcctctggattcagctttgatgattatgccgtgcactgggtccggcaagctccagggaagggcctcgagtgggtctcaggtattaattggaatagtgattccacagactatgcggactctgtggagggccgattcaccatctccagagacaacgccaagaagtccgtgtatctgcaaatgagaagtctgagagctgaggactcggccttgtattactgtgcaaaagatatggggtggaatgtgtttcaaggtctggacgtctggggccaagggaccacggtcaccgtctcctca

SEQ ID NO: 5451 - DNA, 363 bp, Homo sapiens; identical to SEQ ID NO: 5450

SEQ ID NO: 5452 - DNA, 364 bp, Homo sapiens
gaagtgcagctggtggagtctgggggaggcttggtacagcctggcgggtccctgagactctcctgtgcagcctctggattcggttttgatgattatgccgtgcactgggtccggcaagctccagggaagggcctcgagtgggtctcaggtattaattggaatagtgattccacagactatgcggactctgtggagggccgattctccatctccagagacaacgccaaaaagtccgtgtatttgcaaatgaggagtctgagacctgaggactcggccttgtattactgtgcaaaagatatggggtggaatgtgtttcaaggtctggacgtctggggtcaagggaccacggtcattgtctcctcag

SEQ ID NO: 5453 - DNA, 361 bp, Homo sapiens
caggttcagctggtgcaatctggagctgaggtgaagaagcctggggcctcagtgaaggtctcctgcatggcttctggtttcagctttaccagctttgttatcagctgggtgcgacaggcccctggacaagggcttgagtggatgggatggatcagcgcttacaatggtaatacagactatgcacagaagttccagggcagagtcaccatgaccacagacacatccacgagcacagcctacatggagctgaggagcctgagatctgacgacacggccatatattactgtgcgagaagttggagtgcttattataattggttcgacccctggggccagggaaccctggtcaccgtctcctcag

SEQ ID NO: 5454 - DNA, 361 bp, Homo sapiens; identical to SEQ ID NO: 5453

SEQ ID NO: 5455 - DNA, 361 bp, Homo sapiens
cagatcaccttgaaggagtctggtcctacgctggtgaaacccacacagaccctcacgctgacctgcaccttctctgggttctcactcagcactagtggagtgggtgtgggctggatccgtcagcccccaggaaaggccctggagtggcttgcactcatttattgggatgatgataagcgctacagcccatctctgaagagcaggctcaccatcaccaaggacacctccaaaaaccaggtggtccttacaatgaccaacatggaccctgtggacacagccacatattactgtgcacacagggtcggagtccttggggcttttgactactggggccagggaaccctggtcaccgtctcctcag

SEQ ID NO: 5456 - DNA, 361 bp, Homo sapiens; identical to SEQ ID NO: 5455

SEQ ID NO: 5457 - DNA, 390 bp, Homo sapiens
gaggtgcagctggtggagtctgggggagacttggtaaagcctggggggtcccttagactctcctgtacagtctctagattcacgttcaaaaacgcctggatgagctgggtccgccaggctccagggaagggactggagtgggttggccgtatcaaaagcaaggctgatggtgggacaacagactacgctgctcccgtgaggaccagattcaccatctcaagagatgattcaaaaaacactctgtatctgcaaatgaacagcctgacatccgaggacacagccgtgtattattgtaccacagatcgacacgtaagggggacttattggggggcctactactactacggtatggacgtctggggccaagggaccacggtcaccgtctcctca

SEQ ID NO: 5458 - DNA, 390 bp, Homo sapiens; identical to SEQ ID NO: 5457

SEQ ID NO: 5459 - DNA, 385 bp, Homo sapiens
gaggtgcagctggtggagtccgggggaggcttagttcagcctggggggtccctgagactctcctgtgcagcctctggattcaccttcagtagctactggatgcactgggtccgccaagctccagggaaggggctggtgtgggtctcacgtattaataatgatgggagtagtacaagctacgcggactccgtgaagggccgattcaccatctccagagacaacgccaagaacacgctgtatctgcaaatgaacagtctgagagccgaggacacggctgtgtattactgtgcaagagccgtgaggatctctagtggctacggtctctacggtgactccgactactttgactactggggccagggaaccctggtcaccgtctcctcag

SEQ ID NO: 5460 - DNA, 385 bp, Homo sapiens; identical to SEQ ID NO: 5459

SEQ ID NO: 5461 - DNA, 352 bp, Homo sapiens
gaggtgcagctggtggagtctgggggaggctcggtacagcctggggggtccctgagactctcctgtgcagcctctggattcaccttcagtccttatagtatgacctgggtccgccaggctccagggaaggggctggagtgggtttcatacattagtagtagtagtagtaccatacactacgcagagtctgtgaagggccgattcaccatctccagagacaatgccagggattcattgtatctgcaaatgaacagcctgaaagacgaggacacggctgtgtattactgtgcgagagctaggggggacgcttttgatatctggggccaagggacaatggtcaccgtctcttcag

SEQ ID NO: 5462 - DNA, 352 bp, Homo sapiens
gaggtgcagctggtggagtctgggggaggctcggtacagcctggggggtccctgagactctcctgtgcagcctctggattcaccttcagtccttatagtatgaactgggtccgccaggctccagggaaggggctggagtgggtttcatacattagtagtagtagtagtaccatacactacgcagactctgtgaagggccgattcaccatctccagagacaatgccagggattcattgtatctgcaaatgaacagcctgaaagacgaggacacggctgtgtattactgtgcgagagcgaggggggacgcttttgatatctggggccaagggacaatggtcaccgtctcttcag

SEQ ID NO: 5463 - DNA, 355 bp, Homo sapiens
gaggtgcagctgttggagtcggggggaggcttggtacagcctggggggtccctgagactctcctgtgcagcctctggagtcacctttagcggctatgacatgagctgggtccgccaggctccagggaaggggctggagtgggtctcaggtgtaagtggtaatgggggtaccacataccacgcagactccgtgaagggccggttcaccatctccagagacaattccaagcacacgctgtatctgcaaatgaacagcctgagagccgaggacacggccgtatattactgtgctcaggggcaactcgtaggggtctttgactactggggccagggaacccaggtcaccgtctcctcag

SEQ ID NO: 5464 - DNA, 355 bp, Homo sapiens; identical to SEQ ID NO: 5463

SEQ ID NO: 5465 - DNA, 352 bp, Homo sapiens
gaggtgcagctggtggagtctggaggaggcttgatccagcctggggggtccctgagactctcctgtgcagcctctgggttcaccgtcagtagtaactacatgagctgggtccgccaggctccagggaaggggctggagtgggtctcagttatttatagcgatggtagcacatactccgcagactccgtgaagggccgattcatcatctccagagacaattccaagaacacgctgtatcttcaaatgaacagcctgagagccgaggacacggccgtgtattactgtgcgagggccaactacggtgccccctttgactactggggccagggaaccctggtctccgtctcctcag

SEQ ID NO: 5466 - DNA, 352 bp, Homo sapiens; identical to SEQ ID NO: 5465

SEQ ID NO: 5467 - DNA, 370 bp, Homo sapiens
gaggtgcagctggtgcagtctggagcagaggtgaaaaagccgggggagtctctgaggatctcctgtaagggttttggatactactttcccagttactggatcgcctgggtgcgccagatgcccgggaaaggcctggagtggatggggatcatctatcctggtgactctggtaccagatacagcccgtccttccgaggccaggtcaccatctcagccgacaggtccatcagcaccgcctacttgcagtggagcagcctgaaggcctcggacaccgccatatattactgtgcgagaccccttttctattgtagtggtggtagttgcttaactggctactggggccagggaaccctggtcaccgtctcctcag

SEQ ID NO: 5468 - DNA, 370 bp, Homo sapiens
gaggtgcagctggtgcagtctggagcagaggtgaaaaagccgggggagtctctgaagatctcctgtaagggttctggatactactttcccagctactggatcgcctgggtgcgccagatgcccgggaaaggcctggagtggatggggatcatctatcctgctgactctggtaccacatacagcccgtccttccgaggccaggtcaccatctcagtcgacaagtccatcagcaccgcctacttgcagtggagcagcctgaaggcctcggacagcgccatgtattactgtgcgagaccccttttctattgtagtggtggtagctgcttgactggctactggggccagggaaccctggtcaccgtctcctcag

SEQ ID NO: 5469 - DNA, 364 bp, Homo sapiens
gaggtgcagctggtggagtctgggggaggcttggtacagcctggggggtccctgagactctcctgtgcagcctctggattcacgttcagtaactataacatgaactgggtccgccaggctccagggaaggggctggagtgggtttcatatattagtggtagtagtagtaccaaaaactacgcagactctgtgaagggccgattcaccatctccagagacaatgccaagaactcactgtatctgcaaatgaacagcctgagagacgaggacacggctgtgtattactgtgcgagagatgcccttccgttcgggcggagacagattgcctactggggccagggaaccctggtcaccgtctcctcag

SEQ ID NO: 5470 - DNA, 364 bp, Homo sapiens; identical to SEQ ID NO: 5469

SEQ ID NO: 5471 - DNA, 364 bp, Homo sapiens
gaggtgcagctggtggagtccgggggaggcttagttcagcctggggggtccctgagactctcctgtgcagcctctggattcacctttagtagctactgcatgcactgggtccgccaagctccagggaaggggctggtgtgggtctcacgtattaaaagtgatggaagcggcacaacctacgcggactccgtgcagggccgattcaccatctccagagacaacgccaagaacgcgctgtttctgcaaatgaacagtctgagagccgaggatacggctgtctattactgtgcaagaggacgtcgagatggaaacgacctggcccctgactactggggccagggaaccctggtcaccgtctcctcag

SEQ ID NO: 5472 - DNA, 364 bp, Homo sapiens
gaagtacagctggtggagtccgggggaggcttagttcagcctggggggtccctgagactctcctgtgcagcctctggattcgcctttagtagctactggatgtactgggtccgccaaactccagggaagcggctggtgtgggtctcacgtattaacagtgatgaaagtagcacaacctacgcggactccgtgaagggccgattcaccatctccagagacaacgccaagaacgcgctgtttttgcaaatgaacagtctgagagccgaggatacggctgtgtattactgtgcaagaggacgtcgagatggaaacgacctggcccctgactactggggccagggaaccctggtcaccgtctcctcag

SEQ ID NO: 5473 - DNA, 362 bp, Homo sapiens
caggtgcagctggtggagtctgggggaggcgtggtccagcctgggaggtccctgagactctcctgtgcagcctctggattccccttcatcatctccggcatgcactgggtccgccaggctccaggcaaggggctggagtgggtggcagttctatcttttgatggaagtaatgagtactatgcagactccgtgaagggccggttcaccatctccagagacaattccaagaacacgctgtatttgcaaatagacagcctgggacctgaggacacggctgtgtattactgtgtgaaagatcttggtgcctatgcttcagggagacttgctgactggggccagggaaccctggtcaccgtctcctc

SEQ ID NO: 5474 - DNA, 362 bp, Homo sapiens; identical to SEQ ID NO: 5473

SEQ ID NO: 5475 - DNA, 375 bp, Homo sapiens
gaggtgcagctggtccagtctggagcagaggtgaaaaagccgggggagtctctgaagatctcctgtaagggttctggatacagctttaccagctactggatcggctgggtgcgccagatgcccgggaaaggcctggagtggatgggggtcatctatcctggtgactctgataccagatacagcccgtccttccaaggccaggtcaccatctcagccgacaagtccataagcaccgcctacctgcagtggagcagcctgaaggcctcggacaccgccatgtattactgtgcgagaactcaatggggatacaactatggttcgcactttttctacatggacgtctggggcaaagggaccacggtcaccgtctcctca

SEQ ID NO: 5476 - DNA, 375 bp, Homo sapiens
gaggtgcagctggtgcagtctggagcagaggtgaaaaagccgggggagtctctgaagatctcctgtaagggttctggatacagctttaccaattactgggtcgcctgggtgcgccagatgcccgggaaaggcctggagtggatggcgatcatctatcctgatgactctgataccagatacagcccgtccttccaaggccaggtcaccatctcagccgacaagtccatcagcaccgcctacctgcagtggagcagcctgaaggcctcggacaccgccatgtattactgtgcgagaactcaatggggatacaactatggttcgcacttccactacatggacgtctggggcaaagggaccacggtcaccgtctcctca

SEQ ID NO: 5477 - DNA, 361 bp, Homo sapiens
gaggtgcagctggtggagtccgggggaggcttagttcagcctggggggtccctgagactctcctgtgcagcctctggattcaccttcagtatctactggatgcactgggtccgccaagctccagggaaggggctggtttgggtctcacgtattaatagtgatgggggtagcacaatctacgcggactccgtgaagggccgattcaccatctccagagacaacgccaagaacacgctgtatctgcaaatgaacagtctgagagccgaagacacggctgtgtattactgtgcaagagagggtcacagtaactctgtttactttgactactggggccagggaaccctggtcaccgtctcctcag

SEQ ID NO: 5478 - DNA, 361 bp, Homo sapiens
gaggtgcagctggtgcagtctggagcagaggtgaaaaagccgggggagtctctgaagatctcctgtaagggttctggatacagctttacccgctactggatcggctgggtgcgccagatgcccgggaaaggcctggagtggatggggatcatctatcctggtgactctgataccagatacagcccgtccttccaaggcctggtcaccatctcagccgacaagtccatcagcaccgcctacctgcagtggaacagcctgaaggcctcggacaccgccatgtattactgtgcgagacaggtgactggagcgacgtgggcctttgactactggggccagggaaccctggtcaccgtctcctcag

SEQ ID NO: 5479 - DNA, 358 bp, Homo sapiens
caggtgcagctacagcagtggggcgcaggactgttgaagccttcggagaccctgtccctcacctgcgctgtctatggtgggtccttcagtggttactactggagctggatccgccagcccccagggaaggggctggagtggattggggaaatcaatcatagtggaagcaccaactacaacccgtccctcaagagtcgagtcaccatatcagtagacacgtccaagaaccagttctccctgaagctgagctctgtgaccgccgcggacacggctgtgtattactgtgcgaaaccacgtggatacagctatggggagcttgactactggggccagggaaccctggtcaccgtctcctcag

SEQ ID NO: 5480 - DNA, 361 bp, Homo sapiens
caggtgcagctggtgcagtctggggctgaggtgaggaagcctggggcctcagtgaaggtctcctgcaaggcttctggatacactttcaccgactattatatgcactgggtgcgacaggcccctggacaagggcttgagtggatgggatgggtcagccctaatagtggtggcacaaactttgcacggaagtttcagggcagggtcaccatgaccagggacacgtccatcagcacagtctacatggagctgaacaggctgacatctgacgacacggccatttattactgtgcgagatcattacgtatagcagtggctggtgttgactactggggccagggaaccctggtcaccgtctcctcag

SEQ ID NO: 5481 - DNA, 358 bp, Homo sapiens
caggtgcagctgcaggagtcgggcccaggactggtgaagccttcggagaccctgtccctcacctgcactgtctctggtggctccatcagtagttactactggagctggatccggcagcccgccgggaagggactggagtggattgggcgtatctataccagtgggagcaccaactacaacccctccctcaagagtcgagtcaccatgtcagtagacacgtccaagaaccagttctccctgaagctgagctctgtgaccgccgcggacacggccgtgtattactgtgcgagagacagacttttcctgaggtggtacttcgatctctggggccgtggcaccctggtcactgtctcctcag

SEQ ID NO: 5482 - DNA, 367 bp, Homo sapiens
gaggtgcacctggtggagtctgggggaggcttggtccagcctggagggtccctgagactctcctgtgcagcctctggattcaccttcagtgaccactacatggactgggtccgccaggctccagggaaggggctggagtgggttggccatattagaaacaaagctaacagttacaccacagaatacgccgcgtctgtgaaaggcagattcaccatctcaagacaagattcaaagaactcactgtatctccaaatgaagagcctgaaaaccgaggacacggccgtgtacttctgtgctagagggggtaactggaacttggggggctttgactactggggccagggaaccctggtcaccgtctcctcag

SEQ ID NO: 5483 - DNA, 364 bp, Homo sapiens
caggtgcagctgcaggagtcgggcccaggactggtgaagccttcacagaccctgtccctcacctgcactgtctctggtggctccatcagcagtggtggttactactggagctggatccgccagcacccagggaagggcctggagtggattgggtacatctattacagtgggagcacctactacaacccgtccctcaagagtcgagttaccatatcagtagacacgtctaagaaccagttctccctgaagctgagctctgtgactgccgcggacacggccgtgtattactgtgcgagctgtagtggtggcacgaccggtgcttttgatatctggggccaagggacaatggtcaccgtctcttcag

SEQ ID NO: 5484 - DNA, 361 bp, Homo sapiens
gaggtgcagctgttggagtctgggggaggcttggtacagcctggggggtccctgagactctcctgtgcagcctctggattcacctttagtagctatgccatgagctgggtccgccaggctccagggaaggggctggagtgggtctcagctattagtggtagtggtggtagcacatactacgcagactccgtgaagggccggttcaccatctccagagacaattccaagaacacgctgtatctgcaaatgaacagcctgagagccgaggacacggccgtatattactgtgcgaaggggtatgactacggtgactggtacttcgatctctggggccgtggcaccctggtcactgtctcctcag

SEQ ID NO: 5485 - DNA, 364 bp, Homo sapiens
caggtcaccttgagggagtctggtcctgcgctggtgaaacccacacagaccctcacactgacctgcaccttctctgggttctcactcagcactagtggaatgtgtgtgggctggatccgtcagcccccagggaaggccctggagtggcttgcactcattgattgggatgatgataaatactacagcacatctctgaagaccaggctcaccatctccaaggacacctccaaaaaccaggtggtccttacaatgaccaacatggaccctgtggacacagccacgtattactgtgcacggattccctcctacggtgactacgggtttgactactggggccagggaaccctggtcaccgtctcctcag

SEQ ID NO: 5486 - DNA, 366 bp, Homo sapiens
gaggtgcagctggtggagtctgggggaggcttggtacagccagggcggtccctgagactctcctgtacagcttctggattcacctttggtgattatgctatgagctgggtccgccaggctgcagggaaggggctggagtgggtaggtttcattagaagcaaagcttatggtgggacaacagaatacgccgcgtctgtgaaaggcagattcaccatctcaagagatgattccaaaagcatcgcctatctgcaaatgaacagcctgaagaccgaggacacagccgtgtattactgtactagagatcaatacttctactactactacatggacgtctggggcaaagggaccacggtcaccgtctcctca

SEQ ID NO: 5487 - DNA, 364 bp, Homo sapiens
caggtgcagctgcaggagtcgggcccaggactggtgaagccttcacagaccctgtccctcacctgcactgtctctggtggctccatcagcagtggtggttactactggagctggatccgccagcacccagggaagggcctggagtggattgggtacatctattacagtgggagcacctactacaacccgtccctcaagagtcgagttaccatatcagtagacacgtctaagaaccagttctccctgaagctgagctctgtgactgccgcggacacggccgtgtattactgtgcgaggatacctacgatttttggagtggcccgggactactggggccagggaaccctggtcaccgtctcctcag

SEQ ID NO: 5488 - DNA, 361 bp, Homo sapiens
caggtgcagctgcaggagtcgggcccaggactggtgaagccttcggggaccctgtccctcacctgcgctgtctctggtgcctccatcagcagtagtaactggtggagttgggtccgccagcccccagggaaggggctggagtggattggggaaatctatcatagtgggagcaccaactacaacccgtccctcaagagtcgagtcaccatatcagtagacatgtccaagaatcagttctccctgaaactgagctctgtgaccgccgcggacacggccgtatattactgtgcgagagctgtgggtggctacgttcattactttgactactggggccagggaaccctggtcaccgtctcatcag

SEQ ID NO: 5489 - DNA, 361 bp, Homo sapiens
caggtgcagctggtggagtctgggggaggcgtggtccagcctgggaggtccctgagactctcctgtgcagcctctggattcaccttcagtatctatgctatgcactgggtccgccaggctccaggcaaggggctggagtgggtggcagttatatcatatgatggaaacaatcaatactacgcagactccgtgaagggccgattcgccttctccagagacaattccaagaacacactgtatctgcaaatgaacagcctgagagctgaggacacggctgtgtattactgtgcgagagggtcgggtaactacgtgtcctggttcgacccctggggccagggaaccctggtcaccgtctcctcag

SEQ ID NO: 5490 - DNA, 360 bp, Homo sapiens
gaggtgcagctggtggagtctgggggaggcttggtccagcctggggggtccctgagactctcctgtgcagcctctggattcacctttagtagctattggatgagctgggtccgccaggctccagggaaggggctggagtgggtggccaacataaagcaagatggaagtgagaaatactatgtggactctgtgaagggccgattcaccatctccagagacaacgccaagaactcactgtatctgcaaatgaacagcctgagagccgaggacacggctgtgtattactgtgcgagggactgggaatactactactactacatggacgtctggggcaaagggaccacggtcaccgtctcctca

SEQ ID NO: 5491 - DNA, 373 bp, Homo sapiens
caggtgcagctggtggagtctgggggaggcgtggtccagcctgggaggtccctgagactctcctgtgcagcgtctggattcaccttcagtagctatggcatgcactgggtccgccaggctccaggcaaggggctggagtgggtggcagttatatggtatgatggaagtaataaatactatgcagactccgtgaagggccgattcaccatctccagagacaattccaagaacacgctgtatctgcaaatgaacagcctgagagccgaggacacggctgtgtattactgtgcgagagatcaaaccccgtataactggaacgacggctcggactttgactactggggccagggaaccctggtcaccgtctcctcag

SEQ ID NO: 5492 - DNA, 373 bp, Homo sapiens
caggtgcagctggtgcagtctggggctgaggtgaagaagcctgggtcctcggtgaaggtctcctgcaaggcttctggaaacaccttcagcagctatgctatcagctgggtgcgacaggcccctggacaagggcttgagtggatgggagggatcatccctatctttggtacagcaaactacgcacagaagttccagggcagagtcacgattaccgcggacgaatccacgagcacagcctacatggagctgagcagcctgagatctgaggacacggccgtgtattactgtgcacacattctaggatattgtagtggtggtagctgcccaaggactgactactggggccagggaaccctggtcaccgtctcctcag

SEQ ID NO: 5493 - DNA, 373 bp, Homo sapiens
caggtccaacttgtgcagtctggggctgaggtgaagaagcctggggcctcagtgaaggtttcctgcaaggcttctggatacaccttcactaactttgctatgcattgggtgcgccaggcccccggacaaaggcttgagtggatgggatggatcaacgctggcagtggtaacacaaaatattcacagagcttccagggcagagtcaccattaccaggaatacatccgcgagcacagcctacatggagctgagcagcctgagatctgaagacacggctgtgtattactgtgcgagagatcatgattacttttgggggacttttcgtttttcgtttggctactggggccagggaaccctggtcaccgtctcctcag

SEQ ID NO: 5494 - DNA, 373 bp, Homo sapiens
gaggtgcagctggtgcagtctggagtagaggtgaaaaagccgggggagtctctgaagatctcctgtaggggttctggatacaactttaacgaccactggatcgcctgggtgcgccagatgcccgggagaggcctggagtggatggggaccatctggcctgggaactctgaaaccagatacagcgcgtccttccaaggccaggtcaccatctcagccgacaagtccaccaacaccgcccacctgcagtggagcagcctgacggcctcggacaccgccatctattattgtgggagagggctaggttattgtagtgctggtaggtgctactattatgactattggggccagggaaccctggtcatcgtctcctcag

SEQ ID NO: 5495 - DNA, 373 bp, Homo sapiens
caggtgcagctggtgcagtctggggctgaggtgaagaagcctggggcctcagtgaaggtctcctgcaaggtttttggatacaccttcaccgactactatatgcactgggtgcgacaggcccctggacaagggcttgagtggatgggacgaatcaaccctaacagtggtgtcgcaagatatgcacagaggtttcagggcagggtcaccatgaccagggacacgtccatcagcacagcctacatggaggtgagcagactgagatctgacgacacggccgtctattattgtcagagcggggaggatattttgactggttatccgagcttccatcctgaccactggggccagggaaccctggtcaccgtctcctcag

SEQ ID NO: 5496 - DNA, 373 bp, Homo sapiens
caggtgcacctgcaggagtcgggcccaggactggtgaagccttcggggaccctgtccctcacctgcgctgtctctggtggctccatcagcagtagtaactggtggagttgggtccgccagcccccagggaaggggctggagtggattggggaaatctatcatagtgggagcaccaactacaacccgtccctcaagagtcgagtcaccatatcagtagacaagtccaagaaccagttctccctgaatctgagttctgtgaccgccgcggacacggccgtgtattactgtgcgagatcaaatacatttgggggagttgtcgttacccaggcccttggctactggggccagggaaccctggtcaccgtctcctcag

SEQ ID NO: 5497 - DNA, 373 bp, Homo sapiens
gaggtgcagctggtggagtctgggggaggcctggtcaagcctggggggtccctgagactctcctgtgcagcctctggattcaccttcagtagctatagcatgaactgggtccgccaggctccagggaaggggctggagtgggtctcatccattagtagtagtagtagttacatatactacgcagactcagtgaagggccgattcaccatctccagagacaacgccaagaactcactgtatctgcaaatgaacagcctgagagccgaggacacggctgtgtattactgtgcgagagatcccaggccgtattactatgatagtagtggttattacgactactggggccagggaaccctggtcaccgtctcctcag

SEQ ID NO: 5498 - DNA, 376 bp, Homo sapiens
cagctgcagctgcaggagtcgggcccaggactggtgaagccttcggagaccctgtccctcacctgcactgtctctggtggctccatcagcagtagtacttactactggggctggatccgccagcccccagggaaggggctggagtggattgggagtatctattatagtgggagcacctactacaacccgtccctcaagagtcgagtcaccatatccgcagacacgtccaagaaccagttctccctgaagctgagctctgtgaccgccgcagacacggctgtgtattactgtgcgagcccacgagccggtgtgagtggttattactaccaacgaattgactactggggccagggaaccctggtcaccgtctcctcag

SEQ ID NO: 5499 - DNA, 373 bp, Homo sapiens
caggtgcagctggtggagtctgggggaggcttggtcaagcctggagggtccctgagactctcctgtgcagcctctggattcaccttcagtgactactacatgagctggatccgccaggctccagggaaggggctggagtgggtttcatacattagtagtagtggtagtaccatatactacgcagactctgtgaagggccgattcaccatctccagggacaacgccaagaactcactgtatctgcaaatgaacagcctgagagccgaggacacggccgtgtattactgtgcgagtggcgttttccgatattttgactggttattatctccgtttgactactggggccagggaaccctggtcaccgtctcctcag

SEQ ID NO: 5500 - DNA, 373 bp, Homo sapiens
caggtgcagctggtgcaatctgggtctgagttgaagaagcctggggcctcagtgaaggtttcctgcaaggcttctggatacaccttcactagctatgctatgaattgggtgcgacaggcccctggacaagggcttgagtggatgggatggatcaacaccaacactgggaacccaacgtatgcccagggcttcacaggacggtttgtcttctccttggacacctctgtcagcacggcatatctgcagatcagcagcctaaaggctgaggacactgccgtgtattactgtgcgagaagtcggatacagctatggccactaaggggggctgactttgactactggggccagggaaccctggtcaccgtctcctcag

SEQ ID NO: 5501 - DNA, 373 bp, Homo sapiens
caaatgcagctggtgcagtctgggcctgaggtgaagaagcctgggacctcagtgaaggtctcctgcaaggcttctggattcacctttactagctctgctgtgcagtgggtgcgacaggctcgtggacaacgccttgagtggataggatggatcgtcgttggcagtggtaatacaaactacgcacagaagttccaggaaagagtcaccattaccagggacatgtccacaggcacagcctacatggagctgagcagcctgagatccgaggacacggccgtgtattactgtgcggcccagtattattatgatagtagtggttatttcaactggttcgacccctggggccagggaaccctggtcaccgtctcctcag

SEQ ID NO: 5502 - DNA, 370 bp, Homo sapiens
caggtgcagctgcaggagtcgggcccaggactggtgaagccttcggagaccctgtccctcacctgcactgtctctggtggctccatcagtagttactactggagctggatccggcagcccccagggaagggactggagtggattgggtatatctattacagtgggagcaccaactacaacccctccctcaagagtcgagtcaccatatcagtagacacgtccaagaaccagttctccctgaagctgagctctgtgaccgccgcagacacggccgtgtattactgtgcgagacatcgaattgatagcagtggctggtggtacaactggttcgacccctggggccagggaaccctggtcaccgtctcctcag

SEQ ID NO: 5503 - DNA, 373 bp, Homo sapiens
caggtgcagctggtggagtctgggggaggcttggtcaagcctggagggtccctcagactctcctgtgcagcctctggattcaccttcagtgactactacatgacgtggatccgccaggctccagggaaggggctggagtgggtttcatacattagtggcagtggtagttccatgtactacgcagactctgtgcagggccgattcaccatctccagggacaacgccaagaactcactatacctgcaaatgagcagcctgagagccgaggacacggccgtgtattactgtgcgagaggccaccatacgtattacgattttaacgggccctggttcgacccctggggccagggaaccctggtcaccgtctcctcag

SEQ ID NO: 5504 - DNA, 361 bp, Homo sapiens
gaggtgcaactgttggagtctgggggaggcttgatacagcctggggggtccctgagactctcctgtgcagcctctggattcacctttaccacgtatatcatgaactgggtccgccaggctccagggaaggggctggagtgggtctcagctatgagtggtgatggttctatcagaaggtacgcagactccgtgcagggccggttcaccatctccagagacaattccaagaacacggtgtttctgcaaatgaacggcctgagagtcgaggacacggccgtatattactgtgcgaaagatggccccagctgggggtcccactttgactcctggggccagggaaccctggtcaccgtctcctcag

SEQ ID NO: 5505 - DNA, 361 bp, Homo sapiens
gaggtgcagctgttggagtctgggggaggcttggtacagcctggggggtccctgagactctcctgcgcagcctctggattcacctttagcagctatgccatgagctgggtccgccaggctccagggaaggggctggagtgggtctcagctattagtggtagcggtggtttcacatactacgcagactccgtgaagggccggttcaccttctccagagacaattccaagaacacgctgtttctgcagatgaacagcctgagagccgaggacacggccgtatattactgtgcgaaaaacaaattactaccccagtacttctttgacttctggggccagggaaccctggtcaccgtctcctcag

SEQ ID NO: 5506 - DNA, 358 bp, Homo sapiens
caggtgcagctgcaggagtcgggcccaggactggtgaagccttcggagaccctgtccctcacctgcactgtctctggtggctccatcagtagttactactggagctggatccggcagcccccagggaagggactggagtggattgggtatatctattacagtgggagcaccaactacaacccctccctcaagagtcgagtcaccatatcagtagacacgtccaagaaccagttctccctgaagctgagctctgtgaccgctgcggacacggccgtgtattactgtgcgagaggccctgatttttggagtggttatttcggctactggggccagggaaccctggtcaccgtctcctcag

SEQ ID NO: 5507 - DNA, 358 bp, Homo sapiens
caggtgcagctgcaggagtcgggcccaggactggtgaagccttcggagaccctgtccctcacctgcactgtctctggtggctccatcagtacttcctactggacctggatccggcagcccccaggaaagggactggagtggattgggtatatctatcacagtgggaccaccaactacaacccctccctcaagagtcgagtcaccatgtcaatagacacgtccaagaaccagttctccctgaagctgagctctgtgaccgctgcggacacggccttttattattgtgcgagagaggcttatggttcggggagttattataactactggggccagggaaccctggtcaccgtctcctcag

SEQ ID NO: 5508 - DNA, 358 bp, Homo sapiens
gaggtgcagctggtggagtctggaggaggcttgatccagcctggggggtccctgagactctcctgtgcagtctctgggttcaccgtcagtagcaactacatgagctgggtccgccaggctccagggaaggggctggagtgggtctcagttatttatagcagtggtagcacatactacgcagactccgtgaagggccgattcgccatctccagagacgattccaagaacacgctgtatcttcaaatgaacagcgtgagagccgaggacacggccgtatattactgtgcgagcgcctctccgatggggttcggggccctcgacccctggggccagggaaccctggtcaccgtctcctcag

SEQ ID NO: 5509 - DNA, 358 bp, Homo sapiens
gaggtgcagctggtggagtctggaggaggcttgatccagcctggggggtccctgagactctcctgtgcagcctctgggttcaccgtcagtagcaactacatgagctgggtccgccaggctccagggaaggggctggagtgggtctcagttatttatagcggtggtagcacattctacgcagactccgtgaagggccgattcatcatctccagagacaattccaagaacacactgtatcttcaaatgaacatcctgagagccgaggacacggccgtatattactgtgcgagagaactgccctttagtgggagctactttgactactggggccagggaaccctggtcaccgtctcttcag

SEQ ID NO: 5510 - DNA, 361 bp, Homo sapiens
caggtgcagctggtgcagtctggggctgaggtgaagaagcctggggcctcagtgaaggtttcctgcaaggcatctggatacaccttcaccacctactatatgcactgggtgcgacaggcccctggacaagggcttgagtggatgggaataatctaccctagtggtggtagcacaagctacacacagaagttccagggcagagtcaccatgaccagggacacgtccacgagcacagtttacatggaactgagcagcctgagatctggggacacggccgtgtattactgtgcgagagagggttgtagtagtaccagctgctacacagattggggccagggaaccctggtcaccgtctcctcag

SEQ ID NO: 5511 - DNA, 361 bp, Homo sapiens
caggtgcagctggtgcagtctggggctgaggtgaagaagcctggggcctcagtgaaaatttcctgcaaggcatctggatacaccttcatcagctactatatgcactgggtgcgacaggcccctggacaagggcttgagtggatgggaataatcaaccctagtggtggtagcacaagctacgcacagaggttccagggcagagtcaccatgaccagggacacgtccacgagcacagtctacatggagctgagcagcctgagatctgaggacacggccgtttattactgtgcgggtacgatttttggagtggttaagggctttgactactggggccagggaaccctggtcaccgtctcctcag

SEQ ID NO: 5512 - DNA, 361 bp, Homo sapiens
caggtgcagctggtgcagtctggggctgaggtgaagaagcctggggcctcagtgaaggtttcctgcaaggcatctggatacaccttcaccagctactatatgcactgggtgcgacaggcccctggacaagggcttgagtggatgggaataatcaaccctagtggtggtagcacaagctacgcacagaagttccagggcagagtcaccatgaccagtgacacgtccacgagcacagtctacatggagctgagcagcctgagatctgaggacacggccgtgtattactgtgcgagagtatattactctgatagtagtttctttgactgctggggccagggaaccctggtcaccgtctcctcag

SEQ ID NO: 5513 - DNA, 361 bp, Homo sapiens
caggtgcagctggtgcagtctggggctgaggtgaagaagcctggggcctcagtgaaggtttcctgcaaggcatctggatacaccttcaccagctactatatacactgggtgcgacaggcccctggacaagggcttgagtggatgggaataatcaaccctagtggtggtagcacaagctacgcacagaagttccagggcagagtcaccatgaccagggacacgtccacgagcacagtctacatggagctgagcagcctgagatctgaggacacggccgtgtattattgtgcgagaggatattgtactaatggtgtatgcctttgggactggggccagggaaccctggtcaccgtctcctcag

SEQ ID NO: 5514 - DNA, 369 bp, Homo sapiens
gaggtgcagctggtggagtctgggggaggcttggtacagcctggggggtccctgagactctcctgtgcagcctctggattcaccttcagtagctacgacatgcactgggtccgccaagctacaggaaaaggtctggagtgggtctcagctattggtactgctggtgacacatactatccaggctccgtgaagggccgattcaccatctccagagaaaatgccaagaactccttgtatcttcaaatgaacagcctgagagccggggacacggctgtgtattactgtgcaagaggcggtacacccccaaactactactactactactacatggacgtctggggcaaagggaccacggtcaccgtctcctca

SEQ ID NO: 5515 - DNA, 361 bp, Homo sapiens
gaagtgcagctggtggagtctgggggaggcttggtacagcctggcaggtccctgagactctcctgtgcagcctctggattcacctttgatgattatgccatgcactgggtccggcaagctccagggaagggcctggagtgggtctcaggtattagttggaatagtggtagcataggctatgcggactctgtgaagggccgattcaccatctccagagacaacgccaagaactccctgtatctgcaaatgaacagtctgagagctgaggacacggccttgtattactgtgcaaaagatgggggttactatggttcagggagtttcggctggggccagggaaccctggtcaccgtctcctcag

SEQ ID NO: 5516 - DNA, 373 bp, Homo sapiens
caggtgcagctggtgcagtctggggctgaggtgaagaagcctggggcctcagtgaaggtctcctgcaaggcttctggatacaccttcaccggctactatatgcactgggtgcgacaggcccctggacaagggcttgagtggatgggacggatcaaccctaacagtggtggcacaaactatgcacagaagtttcagggcagggtcaccatgaccagtgacacgtccatcagcacagcctacatggagctgagcaggctgagatctgacgacacggccgtgtattactgtgcgagagcccccctctcgtatagcagctcgtctatggggtggttcgacccctggggccagggaaccctggtcaccgtctcctcag

SEQ ID NO: 5517 - DNA, 373 bp, Homo sapiens
gaggtgcagctggtggagtctgggggaggcttggtccagcctggggggtccctgagactctcctgtgcagcctctggattcagctttagtagctattggatgacctgggtccgccaggctccagggaaggggctggagtgggtggccaaaataaagcaagatggaagtgagaaagactatgtggactctgtgaagggccgattcaccatctccagagacaacgccaagaacttactgtatctgcaaatgaacagcctgagagccgaggacacggctgtgtattactgtgcgagaatttcgggggacagctatggtgggagagatgatgcatttgatatttggggccaagggacaatggtcaccgcctcttcag

SEQ ID NO: 5518 - DNA, 373 bp, Homo sapiens
caggtgcagctggtggagtctgggggaggcttggtcaagcctggagggtccctgagactctcctgtgcagcctctggattcaccttcagtgactactacatgagctggatccgccaggctccagggaaggggctggagtgggtttcatacattagtaatagtggtagtaccatatactacgtagactctgtgaagggccgattcaccatctccagggacaacgccaagaactcactgtatctgcaaatgaacagcctgagagccgaggacacggccgtctattactgtgcgagagatcggcggctgggctactgggggctagatgatgcttttgatttctggggccatgggacaatggtcaccgtctcttcag

SEQ ID NO: 5519 - DNA, 373 bp, Homo sapiens
caggtgcagctggtggagtctgggggaggcttggtcaagcctggagggtccctgagactctcctgtgcagcctctggattcaccttcagtgactactacatgagctggatccgccaggctccagggagggggctggagtgggtttcatacattagtagtggtggtagtaccatatactacgcagactctgtgaagggccgattcaccatctccagggacaacgccaagagctcactgtatctgcaaatgaacagcctgagagccgaggacacggccgtgtattactgtgcgagagatcggcggctgggctaccggtacctagatgatgcttttgatatctggggccaagggacaatggtcaccgtctcttcag

SEQ ID NO: 5520 - DNA, 376 bp, Homo sapiens
cagctgcagctgcaggagtcgggcccaggactggtgaagccttcggagaccctgtccctcacctgcactgtctctggtggctccatcagcagtagtagttactactggggctggatccgccagcccccagggaaggggctggagtggattgggagtatctattatactgggagcacctactacaacccgtccctcaagagtcgagtcaccatatccgtagacacgtccaagaaccagttctccctaaacctgagctctctgaccgccgcagacacggctgtgtattactgtgcgagcctgtattacgatttttggagtggtgataacggcggtttcgacccctggggccagggaaccctggtcaccgtctcctcag

SEQ ID NO: 5521 - DNA, 376 bp, Homo sapiens
cagctgcaactgcaggagtcgggcccaggactggtgaagccttcggagaccctgtccctcacctgcactgtctctggtggttccatcagcagtagtccttactactggggctggatccgccggcccccagggaaggggctggagtgggttgggagtatctattatagtgggggcacctactacaacccgtccctcaagagtcgagtcaccatatccatagacccgtccaagaaccagttctccctgaagctgaactctgtgaccgccgcagacacggctgtgtattactgtgtgagacaacccagttctgggattgcagttgtgccagccgctatcgtctcctggggccagggaaccctggtcaccgtctcctcag

SEQ ID NO: 5522 - DNA, 373 bp, Homo sapiens
gaggtacagctggtggagtccgggggagccttggtccagccgggagggtccctgagactctcctgtgcagcctccggattcatcctcagcaactttgccatgcactgggtccgccaggctccagggaagggactgaaacatgtttcaactattagtggttatggggctagtatatcttatgcaccctctgtgaagggcagattcaccgtctccagagacaactccaagaacacgctctatcttcaaatgggcagcctcagagttgaggacatggctgtttactactgtgcgaggggactaagtgaacacagtggctacgtcgaggatgggtttgatgtctggggccaagggacaacgctcaccgtcacttcag

SEQ ID NO: 5523 - DNA, 373 bp, Homo sapiens
gaagtgcagctggtggagtctgggggaggcttggtgcagcctggcaggtccctgagactctcctgtgcagcctctggattcacctttgaggattatgacatgcactgggtccggcaagctccagggaagggcctggagtgggtctcaggtatgagttggaatagtggtagtataggctatgcggactctgtgaagggccgattcatcatctccagagacaacgccaagaactccctctatctgcaaatgaacagtctgagagctgaggacacggccttgtattactgtgcaaaaaccaggcacccctttgactacggtgactatgatgcttttgatatctggggccaagggacaatggtcaccgtctcttcag

SEQ ID NO: 5524 - DNA, 376 bp, Homo sapiens
cagctgcagctgcaggagtcgggcccaggactggtgaagccttcggagaccctgtccctcacctgcgctgtctctggtggctccatcagcagtagtagttactactggggctggatccgccagcccccagggaaggggctggagtggattgggagtatctattatagtgggagcacctactacaacccgtccctcaagagtcgagtcaccatatccgtagacacgtccaagaaccagttctccctgaagctgagctctgtgaccgccgcagacacggctgtgtattactgtgcgactcatattgtggtggtgactgctaccccggggtggtacttcgatctctggggccgtggcaccctggtcactgtctcctcag

SEQ ID NO: 5525 - DNA, 370 bp, Homo sapiens
gaggtgcagctggtggagtctgggggaggcttggtacagcctggggggtccctgagactctcctgtgcagcctctggattcacgttcagtagctacgacatgtactgggtccgccaacctacaggaaaaggtctggagtgggtctcaattataggtactgctggtgacacatattatccaggctccgtgaagggccgattcaccatctccagagaaaatgccaagaactccttgtatcttcaaatgaacagccttagagccggggacacggctgtgtattactgtgcaagagtctcctatgatagtagtaattatgcgtactggtacttcgatctctggggccgtggcaccctggtcactgtctcctcag

SEQ ID NO: 5526 - DNA, 370 bp, Homo sapiens
gaggtgcagctggtggagtctgggggaggcttggtacagcctggggggtccctgagactctcctgttcagcctctggattcaccttcagtacctacgacatgcactgggtccgccaaggtacagggaaaggtctggagtgggtctcagcaattggtcctactggtgacacatactatccaggctccgtgaagggccgattcaccatctccagagagaatgccaagaactccttgtatcttcaaatgaacaccctgagagccggggacacggctgtgtattactgtgcggtgggtagttgtagtggtggaatctgctactcggtctacttccaacactggggccagggcaccctggtcaccgtctcctcag

SEQ ID NO: 5527 - DNA, 367 bp, Homo sapiens
gaggtgcagctggtggagtctgggggaggcttggtacagcctggcaggtccctgagactctcctgtgcagcctctggattcaccttccataattttgaaatgaactgggtccgccaggctccagggaaggggctggagtgggtttcatacattagtactagtggtagtaccatttactacgcagactctgtgaagggccgattcaccatctccagagacaacgccaagggctcactgtatctgcaaatggacagcctgggagccgaggacacggctgtttattactgtgcgcgagatcattgtgctggtggtgtgtgctccttctttgactactggggccagggaaccccggtcaccgtctcctcag

SEQ ID NO: 5528 - DNA, 367 bp, Homo sapiens
gaagtgcagctggtggagtctgggggaggcttggtacagcctggcaggtccctgagactctcctgtgcagcctctggattcacctttggtgattatgccatgcactgggtccggcaagctccagggaagggcctggagtgggtctcaggtattagttggaatagtggtagcataggctatgcggactctgtgaagggccgattcaccatctccagagacaacgccaagagctccctgtatctgcaaatgaacagtctgagagctgaggacacggccttgtattactgtgctaaagataagggaagtgggagctacttttactacttcgactactggggccagggaaccctggtcaccgtctcctcag

SEQ ID NO: 5529 - DNA, 367 bp, Homo sapiens
gaagtgcaactggtggagtctgggggaggcttggtacagcctggcaggtccctgagactctcctgtgcagcctctggattcacctttgataattatgccatgcactgggtccggcaagctccagggaagggcctggagtgggtctcaggtattagttggaatagtggttacataggctatgcggactctgtgaagggccgattcaccatctccagagacaacgccaagaactccctctatctgcagatgaacagtctgagagctgaggacacggccttgtattactgtgcaaaaggctttacgatttttggagtgattgggcccgctgattattggggccagggaaccctggtcaccgtctcctcag

SEQ ID NO: 5530 - DNA, 190 bp, Homo sapiens
acagaagttccagggcagagtcaccatgaccacagagacatccacgagcacagcctacttggatgtgtggagcctgagatctgacgactcggccgtgtattactgtgcgagagccttcggtgactacccttactacttctactactacatggacgtctggggcacagggaccacggtcatcgtctcctca

SEQ ID NO: 5531 - DNA, 367 bp, Homo sapiens
caggtgcaactggtgcagtctggggctgaggtgaagaagcctgggtcctcggtgaaggtctcctgcaaggcttctggaggcaccttcaacagctatgctttcagctgggtgcgacaggcccctggacaagggcttgagtggatgggagggatcatccctatctttggtacagcaaactacgcacagaagttccagggcagagtcacgattaccgcggacgaatccacgagcacagcctacatggagctgagcagcctgagatctgaggacacggccgtgtattactgtgcgacaatatcccattactatgatagtggtagttactttgactactggggccagggaaccctggtcaccgtctcctcag

SEQ ID NO: 5532 - DNA, 367 bp, Homo sapiens
caggtgcagctggtgcagtctggggctgaggtgaagaagcctgggtcctcggtgaaggtctcctgcaaggcttctggaggcaccttcagcagctatgctatcagctgggtgcgacaggcccctggacaagggcttgagtggatgggagggatcatccctatctttggtacagcaaactacgcacagaagttccagggcagagtcacgattaccgcggacgaatccacgagcacagcctacatggagctgagcagcctgagatctgaggacacggccgtgtattactgtgcgagagttgggggctatgatagtagtggttattaccctgaatactggggccagggaaccctggtcaccgtctcctcag

SEQ ID NO: 5533 - DNA, 372 bp, Homo sapiens
caggtgcagctggtgcagtctggggctgaggtgaagaagcctggggcctcagtgaaggtctcctgcaaggcttctggatacatcttcaccggctactatatgcactgggtgcgacaggcccctggacaagggcttgagtggatgggacggatcaaccctaacagtggtggcacaaactatgcacagaagtttcagggcagggtcaccatgaccagggacacgtccatcagcacagcctacatggagctgagcaggctgagatctgacgacacggccgtgtattactgtgcgagagggatgagtggctacgacctctactactactactacatggacgtctggggcaaagggaccacggtcaccgtctcctca

SEQ ID NO: 5534 - DNA, 367 bp, Homo sapiens
caggttcagctggtgcagtctggagctgaggtgaagaagcctggggcctcagtgaaggtctcctgcaaggcttctggttacacctttaccagctatggtatcagctgggtgcgacaggcccctggacaagggcttgagtggatgggatggatcagcgcttacaatggtaacacaaactatgcacagaagctccagggcagagtcaccatgaccacagacacatccacgagcacagcctacatggagctgaggagcctgagatctgacgacacggccgtgtattactgtgcgagagaaggcccgacgatttttggagtggtttcattggactactggggccagggaaccctggtcaccgtctcctcag

SEQ ID NO: 5535 - DNA, 367 bp, Homo sapiens
gaagtgcagctggtggagtctgggggagtcgtggtacagcctggggggtccctgagactctcctgtgcagcctctggattcacctttgatgattataccatgcactgggtccgtcaagctccggggaagggtctggagtgggtctctcttattagttgggatggtggtagcacatactatgcagactctgtgaagggccgattcaccatctccagagacaacagcaaaaactccctgtatctgcaaatgaacagtctgagaactgaggacaccgccttgtattactgtgcaaaagatcatacagctatggtaccatacgactactttgactactggggccagggaaccctggtcaccgtctcctcag

SEQ ID NO: 5536 - DNA, 369 bp, Homo sapiens
caggtgcagctgcaggagtcgggcccaggactggtgaagccttcggagaccctgtccctcacctgcactgtctctggtggctccatcagtagttactactggagctggatccggcagcccccagggaagggactggagtggattgggtatatctattacagtgggagcaccaactacaacccctccctcaagagtcgagtcaccatatcagtagacacgtccaagaaccagttctccctgaagctgagctctgtgaccgctgcggacacggccgtgtattactgtgcgagagcggcgaaaggagggctacaccactactactactacatggacgtctggggcaaagggaccacggtcaccgtctcctca

SEQ ID NO: 5537 - DNA, 372 bp, Homo sapiens
caggtgcaactggtggagtctgggggaggcggggtccagcctgggaggtccctgagactctcctgtgcagcgtctggattcaccttcagcagccacggcatgcactgggtccgccaggctccaggcaaggggctggagtggatagcagttatatggtatgatggaaattatatacactatgcagactccgtgaagggccgattcagcgtctccagggacaattccgagaacacgctgtatctgcaaatgaacagcctgagaaccgaggacacggctgtatactactgtgcgagaggacgggtggaagtgccctattactactactatggtttggacggctggggcccagggaccacggtcaccgtctcctca

SEQ ID NO: 5538 - DNA, 367 bp, Homo sapiens
caggtgcagctggtggagtctgggggaggcgtggtccagcctgggaggtccctgagactctcctgtgcagcctctggattcaccttcagtagctatggcatgcactgggtccgccaggctccaggcaaggggctggagtgggtggcagttatatcatatgatggaagtaataaatactatgcagactccgtgaagggccgattcaccatctccagagacaattccaagaacacgctgtatctgcaaatgaacagcctgagagctgaggacacggctgtgtattactgtgcgaaagatcagggcagtggctggcctaagtactactttgactactggggccagggaaccctggtcaccgtctcctcag

SEQ ID NO: 5539 - DNA, 366 bp, Homo sapiens
caggttcagctggtgcagtctggagctgaggtgaagaagcctggggcctcagtgaaggtctcctgcaaggcttctggttacacctttaccagctatggtatcagctgggtgcgacaggcccctggacaagggcttgagtggatgggatggatcagcgcttacaatggtaacacaaactatgcacagaagctccagggcagagtcaccatgaccacagacacatccacgagcacagcctacatggagctgaggagcctgagatctgacgatacggccgtgtattactgtgcgagagacggcgcgtaccagctgctattaaataacatggacgtctggggcaaagggaccacggtcatcgtctcctca

SEQ ID NO: 5540 - DNA, 370 bp, Homo sapiens
cagctgcagctgcaggagtcgggcccaggactggtaaagccttcggagaccctgtccctcacttgcactgtctctggtggctccatcagcactgctactgtctactggggctggatccgccagtccccagggaaggggctggagtggattgggagtgcctattatagtgggaacacctactacaacccgtccctcaagagtcgagtcaccatatccgtagacacgtccaagaaccagttctccctgaagctgagctctgtgaccgccgcagacacggctgtgtattactgtgcgagactttatggaggggcaccatctggtacttctttgaactactggggccagggaaccctggtcaccgtctcctcag

SEQ ID NO: 5541 - DNA, 370 bp, Homo sapiens
cagctgcagctgcaggagtcgggcccaggactggtgaggccttcggagaccctgtccctcacctgcactgtctctggtggctccatcagcagtattagttactactggggctggatccgccagcccccagggaaggggctggagtggattgggagtatctattatattgggagcacctactacaacccgtccctcaagagtcgagtcaccatatccgtagacacgtccaagaaccagttctccctgaagctgagctctgtgaccgccgcagacacggctgtgtattactgtgcgagacagagcccctctactatggttcagggttgctttgactactggggccagggaaccctggtcaccgtctcctcag

SEQ ID NO: 5542 - DNA, 372 bp, Homo sapiens
gaagtgctattggtggagtctgggggaggtttggtgcagcctggcgggtcccggagactctcctgcgcagcctctggattcagtttttatgactatgccatgcactgggtccggcaagtcccagggaagggcctgcaatgggtctcaggtatgagttggaacggtggaactctaggctatgcggactctgtgaagggccgattcaccatctccagagacaacgccaagaagtccctgtatctacaaatgactggtctgagagttgaggacacggccttgtattactgtgcaaaaggactaatcggcccaatagttgactacatttggtacatggacgtctggggcaaagggaccgcggtctccgtctcctca

SEQ ID NO: 5543 - DNA, 372 bp, Homo sapiens
gaagtgcagctggtggagtctgggggaggcttggtacagcctggcaggtctctgagactctcctgtgcagcctctggattcacctttgatgattatgccatgcactgggtccggcaagctccagggaagggcctggagtgggtctcaggtattagttggaatagtggtagcataggctatgcggactctgtgaagggccgattcaccatctccagagacaacgccaagaactccctgtatctgcaaatgaacagtctgagagctgaggacacggccttgtattactgtgcaaaagatataagtcccctgggggggcactactactacggtatggacgtctggggccaagggaccacggtcaccgtctcctca

SEQ ID NO: 5544 - DNA, 368 bp, Homo sapiens
caggtgcagctgcaggagtcgggcccaggactggtgaggccttcacagaccctgtccctcacctgcgctgtctctggtggctccttcagcagtggtggtttctactggcactggatccgccagcacccagggaagggcctggagtggattggctacatctactacactgggaccacctactacaacccgtccctcaagagtcgagttaccatatcagtagacacgtctaagaaccagttctccctgaacctgagttctgtgactgccgcggacacggccgtgtattactgtgcgagagcccaaaccgattggaacaactactactacatggacgtctggggcaaaggggccacggtcaccgtctcctc

SEQ ID NO: 5545 - DNA, 373 bp, Homo sapiens
caggttcagctggtgcagtctggagctgaggaaaagaagcctggggcctcagtgaaggtctcctgcaaggcttctggttacacctttaccagttatggtatcagttgggtgcgacaggcccctggacaagggcttgagtggatgggatggattagtgcctacagtggtgacaccaattatgcacaggagttccagggcagagtcacagtgaccgctgacacatccacgaacacagcctacatggaattgaggggcctgagacctgacgacacggccgtatattactgtgcgagagacccccgatacagtagagtctactatcgggcgggggagtggtggtggggccagggaaccctggtcaccgtctcctcag

SEQ ID NO: 5546 - DNA, 366 bp, Homo sapiens
gaggtgcagctggtggagtctgggggaggcttggtacagcctggggggtccctgagactctcctgtgcagcctctggattcaccttcagtagctatagcatgaactgggtccgccaggctccagggaaggggctggagtgggtttcatacattagtagtagtagtagtaccatatactacgcagactctgtgaagggccgattcaccatctccagagacaatgccaagaactcactgtatctgcaaatgaacagcctgagagacgaggacacggctgtgtattactgtgcgagaggcgtagtgggagctattcaccccctcggtatggacgtctggggccaagggaccacggtcaccgtctcctca

SEQ ID NO: 5547 - DNA, 373 bp, Homo sapiens
gaggtgcagctgttggagtctgggggaggcttggtacagcctggggggtccctgagactctcctgtgcagcctctggattcacctttagcagctatgccatgagctgggtccgccaggctccagggaaggggctggagtgggtctcagctattagtggtagtggtggtagcacatactacgcagactccgtgaagggccggttcaccatctccagagacaattccaagaacacgctgtatctgcaaatgaacagcctgagagccgaggacacggccgtatattactgtgcgaaatcttcaactacggtggtaactccgtgggttttttactttgactactggggccagggaaccctggtcaccgtctcctcag

SEQ ID NO: 5548 - DNA, 367 bp, Homo sapiens
gaggtgcagctggtggagtctgggggaggcctggtcaagcctggggggtccctgagactctcctgtgcagcctctggattcaccttcagtagctatagcatgaactgggtccgccaggctccagggaaggggctggagtgggtctcatccattagtagtagtagtagttacatatactacgcagactcagtgaagggccgattcaccatctccagagacaacgccaagaactcactgtatctgcaaatgaacagcctgagagccgaggacacggctgtgtattactgtgcgagagatagccattacgatttttggagtggccggttcgacccctggggccagggaaccctggtcaccgtctcctcag

SEQ ID NO: 5549 - DNA, 367 bp, Homo sapiens
caggtgcagctggtgcagtctggggctgaggtgaagaagcctggggcctcagtgaaggtttcctgcaaggcatctggatacaccttcaccagctactatatgcactgggtgcgacaggcccctggacaagggcttgagtggatgggaataatcaaccctagtggtggtagcacaagctacgcacagaagttccagggcagagtcaccatgaccagggacacgtccacgagcacagtctacatggagctgagcagcctgagatctgaggacacggccgtgtattactgtgcgagagattacgatttttggagtggttaccaccgccttgactactggggccagggaaccctggtcaccgtctcctcag

SEQ ID NO: 5550 - DNA, 367 bp, Homo sapiens
caggtgcagctggtgcagtctggggctgaggtgaagaagcctgggtcctcggtgaaggtctcctgcaaggcttctggaggcaccttcagcagctatgctatcagctgggtgcgacaggcccctggacaagggcttgagtggatgggagggatcatccctatctttggtacagcaaactacgcacagaagttccagggcagagtcacgattaccgcggacgaatccacgagcacagcctacatggagctgagcagcctgagatctgaggacacggccgtgtattactgtgcgagaaccagggcagcagctggctccactgatgcttttgatatctggggccaagggacaatggtcaccgtctcttcag

SEQ ID NO: 5551 - DNA, 367 bp, Homo sapiens
gaagtgcagctggtggagtctgggggaggcttggtacagcctggcaggtccctgagactctcctgtgcagcctctggattcacctttgatgattatgccatgcactgggtccggcaagctccagggaagggcctggagtgggtctcaggtattagttggaatagtggtaacataggctatgcggactctgtgaagggccgattcaccatctccagagacaacgccaagaactccctgtatctgcaaatgaacagtctgagagctgaggacacggccttgtattactgtgcaaaagctggggaggctcagctcgtcttttctgcttttgatatctggggccaagggacaatggtcaccgtctcttcag

SEQ ID NO: 5552 - DNA, 367 bp, Homo sapiens
gaagtgcagctggtggagtctgggggaggcttggtacagcctggcaggtccctgagactctcctgtgcagcctctggattcacctttgatgattatgccatgcactgggtccggcaagctccagggaagggcctggagtgggtctcaggtattagttggaatagtggtagcataggctatgcggactctgtgaagggccgattcaccatctccagagacaacgccaagaactccctgtatctgcaaatgaacagtctgagagctgaggacacggccttgtattactgtgcaaaagatctagaaattatgattacatttgggggagtccagatctggggccaagggacaatggtcaccgtctcttcag

SEQ ID NO: 5553 - DNA, 367 bp, Homo sapiens
gaggtgcagctggtggagtctgggggaggcttggtccagcctggggggtccctgagactctcctgtgcagcctctggattcacctttggcacctattggatgagctgggtccgccaggctccagggaaggggctggagtgggtggccaatataaagcaagatggcagtgagaaatactatgtggcctctgtgaagggccggttcaccatctccagagacaacgccatgacctcactatatctgcaaatgaacagcctgagagccgaggacacgtctgtatattactgtgcgagggtgcctacactttatccctcgtactggtacttcgatctctggggccgtggcacccaggtcactgtctcctcag

SEQ ID NO: 5554 - DNA, 367 bp, Homo sapiens
caggtgcagctggtgcagtctggggctgaggtgaagaagcctggggccttagtgaaggtctcctgcaaggcttctggatacaccttcaccgactactatatgcactgggtgcgacaggcccctggacaagggcttgagtggatgggatggatcaaccctaacagtggtggcacaaactatgcacagaagtttcagggcagggtcaccatgaccagggacacgtccatcagcacagcctacatggagttgagcaggctgatatctgacgacacggccgtgtattactgtgcgagagacctcacgcacgctattttgacaggttactatgccctctggggccagggaaccctggtcaccgtctcctcag

SEQ ID NO: 5555 - DNA, 367 bp, Homo sapiens
caggtgcagctggtgcagtctggggctgaggtgaagaagcctggggcctcagtgaaggtctcctgcaaggcttctggatacaccttcatcggctactatatacactgggtgcgacaggcccctggagaagggcttgagtggatgggttggatcaaccctaacagtgataacacacactatgcacagaagttccaggacagggtcaccatgaccagggacacgtccagcagcacagcctacatggagctgtccaggctcacatctgacgacacggccgtatattactgtgcgagagaggcggattattatgatagtagtggcacctttgactactggggccagggagccctggtcaccgtctcctcag

SEQ ID NO: 5556 - DNA, 367 bp, Homo sapiens
caggtgcagctggtgcagtctggggctgaggtgaagaagcctggggcctcagtgaaggtctcctgcaaggcttctggatacacctttattggcttctatatacactgggtgcgacaggtccctggacaagggcttgagtggatgggatggatcaacccgaacagtgataacacaaactatgcacggaagtttcagggcagggtcaccatgaccagggacacgtccatcagcacagcctacatggagttgagcagtctgacatccgacgacacggccatctattactgtgcgagagaggccgattactttgatagcagtggtagctttgacttctggggccagggaaccctggtcaccgtctcctcag

SEQ ID NO: 5557 - DNA, 358 bp, Homo sapiens
caggtgcagctggtggagtctgggggaggcgtggtccagcctgggaggtccctgagactctcctgtgcagcctctagattcaccttcaatagctatggcatgcactgggtccgccaggctccaggcaaggggctggagtgggtggcacttatatcatatgatggaagtaataaatactatgcagattccgtgaagggccgattcaccatctccagagacaactccaagaacacgctgtatctgcaaatgaacagcctgagagctgaggacacggctgtgtattactgtgcgaaacccctgggggggtactggtacttcgatctctggggccgtggcaccctggtcactgtctcctcag

SEQ ID NO: 5558 - DNA, 364 bp, Homo sapiens
gaggtgcagctattggagtctgggggaggcttggtgcagcctggggggtccctaagactctcctgtgcagcctctggattcacctttagcagctatgccatgagctgggtccgccaggctccagggaaggggctggagtgggtctcaagtataggtaatggtggtagtagctactacgcagactccgtgaagggccgcttcaccatctccagagacaattccaagaacacgctgtatctgcaaatgaacagcctgagcgccgaggacacggccgtatattactgtgcgaaagcggatacagctatggccccgtacaactggttcgacccctggggccagggaaccctggtcaccgtctcctcag

SEQ ID NO: 5559 - DNA, 372 bp, Homo sapiens
gaggtgcagttggtggagtcggggggaggcttggtaaagccgggggggtcccttagactctcctgtgcagcctctggattcactttcactaacgcctggatgagctgggtccgccaggctccagggatgggcctggagtgggttggccgtattaaaagtatacctgatggtggggcaacagactacgctgcacccgtcaaaggcagattcaccatctcgagagatgattccaaatctacgctgtatctgcaaatggacagcctgaaactcgaggacacagccgtctattactgtaccaaagaggataatgactactactactactactacatggacgtctggggcaaagggaccacggtcaccgtctcctca

SEQ ID NO: 5560 - DNA, 358 bp, Homo sapiens
caggtgcagctggtgcagtctggggctgaggtgaagaagcctggggcctcagtgaaggtctcctgcaaggcttctggatacaccttcaccggctactatatgcactgggtgcgacaggcccctggacaagggcttgagtggatgggatggatcaaccctaacagtggtggcacaaactatgcacagaagtttcagggcagggtcaccatgaccagggacacgtccatcagcacagcctacatggagctgagcaggctgagatctgacgacacggccgtgtattactgtgcgagagagacagtggctggctatgcttttgatatctggggccaagggacaatggtcaccgtctcttcag

SEQ ID NO: 5561 - DNA, 366 bp, Homo sapiens
caggagcagctggtggaatctgggggaggcgtggtccagcctgggaggtccctgagactctcctgtgcagcctctggattcagcttcagtacctatggcatgcactgggtccgccaggctccaggcaaggggctggagtgggtggcatttatatcagatgatggaaaaagtaaatattatgcagattccgtgaagggccgattcaccatctccagagacaattccaagaacacgttgtatctgcaaatgagcagcctgagagatgaggacacggctgtgtattactgtgcgggagacggagtaggccagtacttctactactacatggacgtctggggcaaggggaccacggtcaccgtctcctca

SEQ ID NO: 5562 - DNA, 361 bp, Homo sapiens
cagatcaccttgaaggagtctggtcctacgctggtgaaacccacacagaccctcacgctgacctgcaccttctctgggttctcactcagcactagtggagtgggagtgggctggatccgtcagcccccaggaaaggccctggagtggcttgcactcatttattgggatgatgataagcgctacagcccatctctgaagaccaggctcaccatcaccaaggacacctccaaaaaccaggtggtccttacaatgaccaacatggaccctgtggacacaggcacatattactgtgcacactttcaggggattctgggagcttttgatatctggggccaagggacaatggtcaccgtctcttcag

SEQ ID NO: 5563 - DNA, 358 bp, Homo sapiens
caggtgcagctggtggagtctgggggaggcgtggtccagcctgggaggtccctgagactctcctgtgcagcctctggattcaccttcagtagctatggcatgcactgggtccgccaggcgccaggcaaggggctggagtgggtggcagttacatcatatgatggaagtcataaatactatgcagactccgtgaagggccgattcaccatctccagagacaattccaagaacacgctgtatctgcaaatgaacagcctgagagctgaggacacggctgtgtatttctgtgcgaaggactacggtgactacggtgctcttgatatctggggccaagggacaatggtcaccgtctcttcag

SEQ ID NO: 5564 - DNA, 370 bp, Homo sapiens
caggtgcagctgcaggagtcgggcccaggactggtgaagccttcacagaccctgtccctcacctgcactgtctctggtggctccatcagcagtggtggttactactggagctggatccgccagcacccagggaagggcctggagtggattgggtacatctattacagtgggagcacctactacaacccgtccctcaagagtcgagttaccatatcagtagacacgtctaagaaccagttctccctgaagctgagctctgtgactgccgcggacacggccgtgtattactgtgcgagagtacgcaaaaactggaactacgtggtggggttcgacccctggggccagggaaccctggtcaccgtctcctcag

SEQ ID NO: 5565 - DNA, 370 bp, Homo sapiens
caggtgcagctgcaggagtcgggcccaggactggtgaagccttcacagaccctgtccctcacctgcactgtctctggtggctccatcagcagtggtggttactactggagctggatccgccagcacccagggaagggcctggagtggattgggtacatctattacagtgggagcacctactacaacccgtccctcaagagtcgagttaccatatcagtagacacgtctaagaaccagttctccctgaagctgagctctgtgactgccgcggacacggccgtgtattactgtgcgagagatggggagtatagcagcagctggagacccgttaacccctggggccagggaaccctggtcaccgtctcctcag

SEQ ID NO: 5566 - DNA, 357 bp, Homo sapiens
caggtgcagctggtggagtctgggggaggcgtggtccagcctgggaggtccctgagactctcctgtgcagcctctggattcaccttcagtagcagtgccatgcactgggcccgccaggctccaggcaaggggctggagtgggcggcagttatatcatatgatggaagtaataaatactattcagactccgtgaagggccgattcaccatctccagagacaataccaagaacacgctgtttctgcaaatgaacagcctgagagctgaggacacggctgtgtattactgtgcgaaagccctttattcctactactacatggacgtctggggcaaagggaccacggtcaccgtctcctca

SEQ ID NO: 5567 - DNA, 357 bp, Homo sapiens
caggtgcagctggtggagtctgggggaggcgtggtccagcctgggaggtccctgagactctcctgtgcagcctctggattcaccttcagtagctatgctattcactgggtccgccaggctccaggcaaggggctggagtgggtggcagttatatcatatgatggaagcaataaatactacgcagactccgtgaagggccgattcaccatctccagagacaattccaagaacacgctgtatctgcaaatgaacagcctgagagctgaggacacggctgtgtattactgtgcgagagggctaggggggtactactacatggacgtctggggcaaagggaccacggtcaccgtctcctca

SEQ ID NO: 5568 - DNA, 354 bp, Homo sapiens
caggtgcagctgcaggagtcgggcccaggactggtgaagccttcggagaccctgtccctcacctgcactgtctctggtggctccatcagtagttactactggagctggatccggcagcccccagggaagggactggagtggattgggtatatctattacagtgggagcaccaactacaacccctccctcaagagtcgagtcaccatatcagtagacacgtccaagaaccagttctccctgaagctgagctctgtgaccgctgcggacacggccgtgtattactgtgcgagattcttttactactactacggtatggacgtctggggccaagggaccacggtcaccgtctcctca

SEQ ID NO: 5569 - DNA, 355 bp, Homo sapiens
gaagtacagctggtggagtctggaggaggcttgatccagcctggggggtccctgagactctcctgtgcagcctctgggttcaccgtcagtagcaattacatgagctgggtccgccaggctccagggaaggggctggagtgggtctcagatttttatagcggtgaaagcacatactacgcagactccgtgaagggccgattcaccatctccagagacaattccaagaacacgctgtatcttcagatgaacagcctgagagccgaggacacggccgtgtatttctgtgcgagtaaaagatggctacgaggggcttttgatatctggggccaagggacaatggtcatcgtctcttcag

SEQ ID NO: 5570 - DNA, 355 bp, Homo sapiens
gaggtgcagctagtggagtctggaggaggcttgatccagcctggggggtccctgagactctcctgtgcagcctctgggttcaccgtcagtagcaactacatgagctgggtccgccaggctccagggaaggggctggagtgggtctcagttatttatagcggtggtagcccatactatgcagactccctgaagggccgattcaccatctccagagacaattccaagaacaccctgtttcttcaaatgaacagcctgagagccgaggacacggccgtgtattactgtgcgagagcgcagtggctacggggtgcttttgatatctggggccaagggacaatggtcaccgtctcttcag

SEQ ID NO: 5571 - DNA, 360 bp, Homo sapiens
cagatcactttgaaggagtctggtcctacgctggtgaaacccacacagaccctcacgctgacttgcgccttctctgggttctcactcagcactagtggagtgggtatgggctggatccgtcagcccccaggaaaggccctggagtggctggcactcatttattgggatgatgataagcgctacagcccatctctgaagagcagactcaccatcaccaaggacacctccaaaaaccaggtggtctttattatgaccaacctggaccctgtggacacagccacatattattgtgtatacttgtacgagtactcctattacatggacatctggggcaaagggaccacggtcaccgtctcctca

SEQ ID NO: 5572 - DNA, 358 bp, Homo sapiens
caggtgcagctggtggagtctgggggaggcgtggtccagcctgggaggtccctgagactctcctgtgcagcgtctggattcaccttcagtagctatggcatgcactgggtccgccaggctccaggcaaggggctggagtgggtggcagttatatggtatgatggaagtaataaatactatgcagactccgtgaagggccgattcaccatctccagagacaattccaagaacacgctgtatctgcaaatgaacagcctgagagccgaggacacggctgtgtattactgtgcgagagatttggaatacggtggtaactctgactactggggccagggaaccctggtcaccgtctcctcag

SEQ ID NO: 5573 - DNA, 358 bp, Homo sapiens
caggtgcagctggtgcagtctggggctgaggtgaagaagcctgggtcctcggtgaaggtctcctgcaaggctcctggaggcaccttcagcagctatgctatcagctgggtgcgacaggcccctggacaagggcttgagtggatgggagggatcatccctatctttggtacagtaaactacgcacagaagttccagggcagagtcacgattaccgcggacgaatccacgagcaaagcctacatggagctgagaagcctgagatctgaggacacggccgtgtattactgtgcgagacgtgaagtggttataggtgcttttgatatctggggccaagggacaatggtcaccgtctcttcag

SEQ ID NO: 5574 - DNA, 355 bp, Homo sapiens
gaggtgcacctggtggagtctggaggaggcttgatccagcctggggggtccctgagactctcctgtgcagcctctgggttcaccgtcagtagcaactacatgagctgggtccgccaggctccagggaaggggctggagtgggtctcagttatttatagcggtggtagcacatactacgcagactccgtgaagggccgattcaccatctccagagacaattccaagaacacgctgtctcttcaaatgaacagcctgagagccgaggacacggccgtgtattactgtgcgggaggtagcagtggctggtactactttgacttctggggccagggaaccctggtcaccgtctcctcag

SEQ ID NO: 5575 - DNA, 355 bp, Homo sapiens
gaggtgcagctggaggagtctggaggaggcttgatccagcctggggggtccctgagactctcctgtgcagcctctgggttcaccgtcagtagcaactacatgagctgggtccgccaggctccagggaaggggctggagtgggtctcagttatttatagcggtggtagcacatactacgcagactccgtgaagggccgattcaccatctccagagacaattccaagaacacgctgtatcttcaaatgaatagcctgagagccgaggacacggccatgtattactgtgcgacagagggggattttggtatagcattgaattattggggccagggaaccctggtcaccgtctcctcag

SEQ ID NO: 5576 - DNA, 358 bp, Homo sapiens
caggtgcagctggtgcagtctggggctgaggtgaagaagcctggggcctcagtgaaggtctcctgcgaggcttctggatacaccttcagcagttatgatatcaattgggtgcgacaggccgctggacaagggcttgagtgggtgggatggatgagtcccagcagatatagcacaggctatgcacagacgtttcagggcagagtcaccttgacctgggacacctctataaacacagcctacatggagttgagcagcctgagatctgacgacacggccgtgtattactgtgcgagaaatgagtatgcaactggggactttgactactggggccagggaaccctggtcaccgtctcctcag

SEQ ID NO: 5577 - DNA, 357 bp, Homo sapiens
caggtgcagctggtgcagtctggggctgaggtgatgaagcctggggcctcagtgaaggtctcctgcaaggcctctggatacaccttcaccggctactatatgcactgggtgcgacaggcccctggacaagggcttgagtggatgggatggatcaatcctaacaatggtgacacaaactatgcaaagaagtttcagggcagggtcaccatgacatgggacacgtccatcagcacagtgtacgtggagctgagtaggttgagatctgacgacacggccgtgtattactgtgcccctttggtatttgggtactacggtatggacgtctggggccaagggaccacggtcaccgtctcctca

SEQ ID NO: 5578 - DNA, 364 bp, Homo sapiens
gaggtgcagctggtggagtctgggggaggcttggtaaagccagggcggtccctgagactctcctgtacagcctctggattcacctttggtgatgatgctgtgagttggttccgccaggctccagggaaggggctggagtgggtaggtttcattagaagcaaagcttttggtgggacaacagaatacgccgcgtctgtgaaaggcagattcaccatctcaagagatgattccaaaagcatcgcctatctgcaaatgaacagcctgaaaagcgaggacacagccgtgtattactgtacaagagatcagcagtggctggtaggcattgactactggggccagggaaccctggtcaccgtctcctcag

SEQ ID NO: 5579 - DNA, 364 bp, Homo sapiens
gaggtgcagctggtggagtccgggggaggcttggtccagcctggggggtccctgaaactctcctgtgcagcctctgggttcaccttcagtggctctgctatgcactgggtccgccaggcttccgggaaagggctggagtgggttggccgtattagaagcaaagctaacagttacgcgacagcatatgctgcgtcggtgaaaggcaggttcaccatctccagagatgattcaaagaacacggcgtatctgcaaatgaacagcctgaaaaccgaggacacggccgtgtattactgtactagacatcaggagtgggagccattctttgactactggggccagggaaccctggtcaccgtctcctcag

SEQ ID NO: 5580 - DNA, 358 bp, Homo sapiens
caggtgcagctggtgcagtctggggctgaggtgaagaagcctggggcctcagtgaaggtctcctgcaaggcttctggatacaccttcaccggctactatatgcactgggtgcgacaggcccctggacaagggcttgagtggatgggatggatcaaccctaacagtggtggcacaaactatgcacagaagtttcagggcagggtcaccatgaccagggacacgtccatcagcacagcctacatggagctgagcaggctgagatctgacgacacggccgtgtattactgtgcgagggaaatagcagcagctgccacaaccgactactggggccagggaaccctggtcaccgtctcctcag

SEQ ID NO: 5581 - DNA, 353 bp, Homo sapiens
caggtgcagctgcggcagtggggcgccggactgttgaagccttcggagaccctgtccctcacctgcgctgtctatggtgggtccttcagtgattactactggatctggatccgccagcccccagggaaggggctggagtggattggggaaatcaatcatagtggaatcaccagctacaacccgtccctcaagagtcgagtcactatatcagttgacacgtccaagaaccagttctccctggagctaaactctgtgaccgccgcggacacggctgtgtattactgtgcgagacctgggggggggacctactactttgactattggggccagggaatcctggtcaccgtctcctc

SEQ ID NO: 5582 - DNA, 385 bp, Homo sapiens
caggtgcagctggtggagtctgggggaggcgtggtccagcctgggaggtccctgagactctcctgtgtggcgtctgcattctccttcagtggctatgccatgcactgggtccgccaggctccaggcaaggggctggagtgggtggcacttatatactatgatggaagtaataacttctatgcagactccgtgaagggccgattcaccatctccagagacaattccaagaacacgctgtatctgcaaatgaacagcctgagagccgaggacacggctgtgtattactgtgcgagagatgggtattcagagggggacctacttcgtacttcgcccgattgttattttgactactggggccagggaaccctggtcaccgtctcctcag

SEQ ID NO: 5583 - DNA, 367 bp, Homo sapiens
caggtacagctgcagcagtcaggtccaggactggtgaagccctcgcagaccctctcactcacctgtgccatctccggggacagtgtctctagcaacactgctgcttggaactggatcaggcagtccccatcgagaggccttgagtggctgggaaggacatactacaggtccaagtggtataatgattatgcagtatctgtgaaaagtcgaataaccatcaacccagacacatccaagaaccagttctccctgcagctgaactctgtgactcccgaggacacggctgtgtattactgtgctcgtagcagctggtacgtagggtggttcgacccctggggccagggaaccctggtcaccgtctcctcag

SEQ ID NO: 5584 - DNA, 382 bp, Homo sapiens
caggtgcagctacagcagtggggcgcaggactgttgaagccttcggagaccctgtccctcacctgcgctgtctatggtgggtccttcagtggttactactggagctggatccgccagcccccagggaaggggctggagtggattggggaaatcaatcatagtggaagcaccaactacaacccgtccctcaagagtcgagtcaccatatcagtagacacgtccaagaaccagttctccctgaagctgagctctgtgaccgccgcggacacggctgtgtattactgtgcgagaggccgattggtggttatggatttttggagtggttattccttagactactttgactactggggccagggaaccctggtcaccgtctcctcag

SEQ ID NO: 5585 - DNA, 358 bp, Homo sapiens
gaggtgcagctggtggagtctgggggaggcttggtccagcctggggggtccctgagactctcctgtgcagcctctagattcacctttagtttctattggatgagctgggtccgccaggctccagggaaggggctggagtgggtggccaacataaaacaagatggaagtgagaaatactatgtggactctgtgaagggccgattcaccatctccagagacaacgccaagaactcactgtatctgcaaatgaacagcctgagagccgaggacacggctatgtattactgtgcgagattaggcagcagcagctggtactttgactactggggccagggaaccctggtcaccgtctcctcag

SEQ ID NO: 5586 - DNA, 385 bp, Homo sapiens
gaggtgcagctgttggagtctgggggaggcttgatacagcctggggagtccctgagactctcctgtgcagcctctggattctcctttagcagctttgccatgagctgggtccgccaggcttcagggaaggggctggaatgggtctcagctatcagtggtagtgcttataacatacactacgcagactccgtgaagggccggttcaccatctccagagacaattccaagaacacactttatctgcaaatgaacagcctgagagccgaggacacggccgtatattactgtgcgaggaccaattattgtactggtggtgtgtgctattggcgcgtctatgatgcttttgatatgtggggccgagggacaatggtcaccgtctcttcag

SEQ ID NO: 5587 - DNA, 384 bp, Homo sapiens
gaggtgcagctggtggagtctgggggaggcctggtcaagcctggggggtccctgagactctcctgtgcagcctctggattcaccttcagtagctatagcatgaactgggtccgccaggctccagggaaggggctggagtgggtctcatccattagtagtagtagtagttacatatactacgcagactcagtgaagggccgattcaccatctccagagacaacgccaagaactcactgtatctgcaaatgaacagcctgagagccgaggacacggctgtgtattactgtgcgagtttgtttggttcggggagttcccacctgcggtactactactactacggtatggacgtctggggccaagggaccacggtcaccgtctcctca

SEQ ID NO: 5588 - DNA, 384 bp, Homo sapiens
gaggtgcagctggtggagtctgggggaggcttggtccagcctggggggtccctgagactctcctgtgcagcctctggattcacctttagtagctattggatgagctgggtccgccaggctccagggaaggggctggagtgggtggccaacataaagcaagatggaagtgagaaatactatgtggactctgtgaagggccgattcaccatctccagagacaacgccaagaactcactgtatctgcaaatgaacagcctgagagccgaggacacggctgtgtattactgtgcgagagaaggagattgtagtagtaccagctgctattttccctactactacggtatggacgtctggggccaagggaccacggtcaccgtctcctca

SEQ ID NO: 5589 - DNA, 355 bp, Homo sapiens
caggtgcagctgcaggagtcgggcccaggactggtgaagccttcggagatcttgtccctcacctgcactgtctctggtgactccatcagtagtttctactggagttggatccggcagcccccagggaagggactggagtggattgggcatatctataacagtgggagcaccaactacaagccctccctcaagagtcgagtcaccatatcagtagacacgtccaagaatcagttctccctgaagctgagctctgtgaccgctgcggacacggccgtgtattactgtgcgagaagtcagtggctacgcgggggctttgactactggggccagggaaccctggtcaccgtctcctcag

SEQ ID NO: 5590 - DNA, 384 bp, Homo sapiens
caggtgcagctggtggagtctgggggaggcgtggtccagcctgggaggtccctgagactctcctgtgcagcgtctggattcaccttcagtagctatggcatgcactgggtccgccaggctccaggcaaggggctggagtgggtggcagttatatggtatgatggaagcaataaatactatgcagactccgtgaagggccgattcaccatctccagagacaattccaagaacacgctgtatctgcaaatgaacagcctgagagccgaggacacggctgtgtattactgtgcgagaggacggctcgggaacctggaacgacctagggactactactacttctacatggacgtctggggcaaagggaccacggtcaccgtctcctca

SEQ ID NO: 5591 - DNA, 384 bp, Homo sapiens
gaagtgcagctggtggagtctgggggaggcttggtacagcctggcaggtccctgagactctcctgtgcagcctctggattcacctttgatgattatgccatgcactgggtccggcaagctccagggaagggcctggagtgggtctcaggtattagttggaatagtggtagcataggctatgcggactctgtgaagggccgattcaccatctccagagacaacgccaagaactccctgtatctgcaaatgaacagtctgagagctgaggacacggccttgtattactgtgcaaaagatttcgccccgtattactatggttcagggagccggtactactactacatggacgtctggggcaaagggaccacggtcaccgtctcctca

SEQ ID NO: 5592 - DNA, 387 bp, Homo sapiens
cagctgcagctgcaggagtccggctcaggactggtgaagccttcacagaccctgtccctcacctgcgctgtctctggtggctccatcagcagtggtggttactcctggagctggatccggcagccaccagggaagggcctggagtggattgggtacatctatcatagtgggagcacctactacaacccgtccctcaagagtcgagtcaccatatcagtagacaggtccaagaaccagttctccctgaagctgagctctgtgaccgccgcggacacggccgtgtattactgtgccagagtacgaggttatggttcagggagttattcaggctactactactactacatggacgtctggggcaaagggaccacggtcaccgtctcctca

SEQ ID NO: 5593 - DNA, 382 bp, Homo sapiens
caggtgcagctacagcagtggggcgcaggactgttgaagccttcggagaccctgtccctcacctgcgctgtctttggtgggtccttcagtgattactactggagctggattcgccagcccccagggaagggcctggagtggattggggaaattaatcatagtggaagcaccaactacaacccgtccctcaagagtcgagtcaccatatcagtagacacgtccaagaaccatttctccctgaaactgagctctgtgaccgccgcggacacggctgtgtattactgtgcgcgaggccatgattatggtattacgattcctggagtggttattacccgctggttcgacccctggggccagggaacccaggtcaccgtctcctcag

SEQ ID NO: 5594 - DNA, 352 bp, Homo sapiens
caggttcagctggtgcagtctggagctgaggtgaagaagcctggggcctcagtgattgtctcctgcagggcttctggttacacctttaccacctatggtatcagctgggtgcgacaggcccctggacaagggcttgagtggatgggatggatcagcggttacaatggtaacacaaactatgcacagaagctccagggcagaatcaccatgaccacagacacatccacgagcacagtctacatggagctgaggagcctgagaactgacgacacggccgtttatttctgtgcgagagaggatgcatactactttgactactggggccagggaaccctggtcaccgtctcctcag

SEQ ID NO: 5595 - DNA, 352 bp, Homo sapiens
gaggtgcagctgttggagtctgggggaggcttggttcagcctggggggtccctgagactctcctgtggagcctctggattcatttttacctcctatggcatggcctgggtccgccaggctccagggaaggggctggagtgggtctcttctattactggaaatggtgctatcacattctacgcaggctccgtgaagggccgggtcgccatctccagagacaattccaggaacacgttgtatttgcaactgagtagtctgagagccggggacacggccgtatatttctgtgcgacagtacgtgacgcgacttctgatcattggggccagggaaccctggtcaccgtctcctcag

SEQ ID NO: 5596 - DNA, 352 bp, Homo sapiens
gaggtgcagctgttggagtctgggggtgcctcggtacagccgggggggtccctgagactctcctgtgcagcctctggattcacctttagcaatcatgtcatgagctgggtccgccaggctccagggaaggggctggagtgggtctcgactcttagttacactggtattagcacatactacgcagactccgtgaagggccggttcaccatctccagagacatctccaagaacacgctgtatctggaaatgggcagcctgaaagccgaggactcggccgtatattactgtgcgctcgggggagtgggaactatcagggagtggggccagggagcgctggtcaccgtctcctcag

SEQ ID NO: 5597 - DNA, 352 bp, Homo sapiens
caggtgcagctggtggagtctgggggaggcgtggtccagcctgggaggtccctgagactctcctgtgcagcgtctggattcaccttcagtagctatggcatgcactgggtccgccaggctccaggcaaggggctggagtgggtggcagttatatggtatgatggaagtaataaatactatgcagactccgtgaagggccgattcaccatctccagagacaattccaagaacacgctgtatctgcaaatgaacagcctgagagccgaggacacggctgtgtattactgtgcgagagaaaagatgatggaagttgactactggggccagggaaccctggtcaccgtctcctcag

SEQ ID NO: 5598 - DNA, 352 bp, Homo sapiens
caggtgcagctggtgcagtctggggctgaagtgaagcagcctggggcctcagtgaaggtctcctgcacggcttctggatacaccttcacctccttctatatgcactgggtgcgacaggcccctggacaagggtttgagtgggtgggacggatcagcccttacagtggtgccacagaccttgaacagaagtttcagggcagggtcaccttgaccagggacacatccaccaacacactctacatggagctgagtggactgagatctgacgacacggccgttttttactgtatgagggcggcaggggttgccattgactactggggccagggaaccccggtcaccgtctcctcag

SEQ ID NO: 5599 - DNA, 352 bp, Homo sapiens
caggtgcagctggtggagtctgggggaggcgtggtgcagcctgggaggtccctgagactctcctgtgcagcctctggattcaccttcagtagctatggcatgcactgggtccgccaggctccaggcaaggggctggagtgggtggcagtcatatcatatgatggaagtaataaatactatgcagactccatgaagggccgattcaccatctccagagacaattccaagaacacgctgtatctgcaaatgaacagcctgagagctgaggacacggctgtgtattactgtgcgaaagatacggacggtggttttgatacctggggccaagggacaatggtcaccgtctcttcag

SEQ ID NO: 5600 - DNA, 352 bp, Homo sapiens
caggtgcagctgcaggagtcgggcccaggactggtgaagccttcggagaccctgtccctcacctgcactgtctctggtggctccatcagtagttactactggagctggatccggcagcccccagggaagggactggagtggattgggtatatctattacagtgggagcaccaactacaacccctccctcaagagtcgagtcaccatatcagtagacacgtccaagaaccagttctccctgaagctgagctctgtgaccgccgcagacacggccgtgtattactgtgcgaggggaactgggccccactattttgactactggggccagggaaccctggtcaccgtctcctcag

SEQ ID NO: 5601 - DNA, 355 bp, Homo sapiens
gaggtgcagctggtggagtctgggggaggcctggtcaagcctggggggtccctgagactctcctgtgcagcctctggattcaccttcggtgactataacatgcactgggtccgccaggctccagggaaggggctggagtgggtctcatccattagtgatggtagtagttacatatactacgcagactcaatgaagggccgattcaccatctccagagacaacgccaagaactcactgtatctgcaaatgaacagcctgagagccgaggacacggctgtgtattactgtgcgagggggaagatgctcccattttgtgactcctggggccagggaaccctggtcaccgtctcctcag

SEQ ID NO: 5602 - DNA, 355 bp, Homo sapiens
caggtgcagctggtggagtctgggggaggcgtggtccagcctgggaggtccctaagactctcctgtgcagcctctggattcaccttcagtacctatggcatgcactgggtccgccaggctccaggcaaggggctggagtgggtggcagttatatcatatgatggaagtaataaatactatgcagactccgtgaagggccgattcaccatctccagagacaattccaagaacacgctgtatctgcaaatgaacagcctgagagctgaggacacggctgtgtattactgtgcgaaaggaaactatgtcgtgggccttgactactggggccagggaaccctggtcaccgtctcctcag

SEQ ID NO: 5603 - DNA, 352 bp, Homo sapiens
caggtgcagctggtggagtctgggggaggcgtggtccagcctgggaggtccctgagactctcctgtgcagcctctggattcaccttcagtagctatgacatgcactgggtccgccaggctccaggcaaggggctggagtgggtggcagttatttcatatgatggaaataataaatactatgcagactccgtgaagggccgattcaccttctccagagacaattccaagaacacgctgtatctgcaaatgaacagcctgagagctgaggacacggctgtgtattactgtgcgaaagataacggtggctatcccgacttctggggccagggaaccctggtcaccgtctcctcag

SEQ ID NO: 5604 - DNA, 355 bp, Homo sapiens
caggtgcacctggtgcagtctggggctgaggtgaagaagcctggggcctcagtgaaggtttcctgcaaggcttctggatacattttcaccagctaccaaatacactgggtgcgacaggcccctggacaaggccttgagtggatgggaataatcaaccctagtggtagtgctacaacctacgcacagaacctccagggcagagtcaccatgaccagggacacgtccacgagtacagtctacatggagctgagcagtctgagatccgaggacacggccgtgtattactgtgcgagaggggggcttgatagtagagccgactactggggccagggaacccgggtcaccgtctcctcag

SEQ ID NO: 5605 - DNA, 352 bp, Homo sapiens
gaggtgcagctggtggagtctggaggaggcttggtccagcctggggggtccctgagactctcctgtgcagcctctgggttcaccgtcactaactactacatgagctgggtccgccaggctccagggaaggggctggaatgggtctcgctgacttatagcggtggtaccacatactacgcagactccgtgaagggccgattcaccatctccagagacacttccaagaacacgctctatcttcaaatgagcagcctgagaaccgaggacacggccgtgtattactgtgcgagagctcattggtcttactgctttgactactggggccagggaaccctggtcaccgtctcctcag

SEQ ID NO: 5606 - DNA, 355 bp, Homo sapiens
caggtgcagttggtgcagtctggggctgaggtgaagaagcctggggcctcagtgaaggtctcctgcaaggcttctggatacaccttcatcagttatgatatcatctgggtgcgacaggccactggacaagggcttgagtggatgggatggatgaaccctagaagtggtatcacgggctatgcacagaagttccagggcagagtcaccatgaccaggaacacctccataagtacagcctacctggagttgaatagcctgacatctgacgacgcggccgtatatttttgtgtgagaggagacagtggtggctggcctttctactggggccagggaaccctggtcaccgtctcctcag

SEQ ID NO: 5607 - DNA, 355 bp, Homo sapiens
caggtgcagctggtggagtctgggggaggcgtggtccagcctgggaggtccctgagactctcctgtgcagcgtctggattcaccttcagtagctatggcatgcactgggtccgccaggctccaggcaaggggctggagtgggtggcagttatatggtatgatggaagtaataaatactatgcagactccgtgaagggccgattcaccatctccagagacaattccaagaacacgctgtatctgcaaatgaacagcctgagagccgaggacacggccgtgtattactgtgcgagggccaactacggtgccccctttgactactggggccagggaaccctggtcaccgtctcctcag

SEQ ID NO: 5608 - DNA, 353 bp, Homo sapiens
ggtgcagctggtggagtctgggggaggcttggtgcagcctggagggtccctgagactctcctgtgtaacctctggattcaccttcggtagttttgaaatgaattgggtccgccaggctccagggaaggggctggagtgggtttcgtacattagtagtagtggtggtaccatatattacgcaggctctgtgaagggccgattcaccatctccagagacaacgccaagagctcactgtttctgcatatgaacagcctgagagccgaggacacggctctttattactgtgcgagagagggacggtacgatgaatttgactcctggggccagggaaccctggtcaccgtctcctcag

SEQ ID NO: 5609 - DNA, 354 bp, Homo sapiens
caggtgcagctggtgcagtctggggctgaggtgaagaagcctggggcctcagtgaaggtttcctgcaaggcatctggatacaccttcaccagctactatatgcactgggtgcgacaggcccctggacaagggcttgagtggatgggagtaatcaaccctagtgctggtagcacaagctacgcacagaagttccagggcagagtcaccatgaccagggacacgtccacgagcacagtctacatggagctgagcagcctgagatctgaggacacggccgtgtattactgtgcgaggggggcggagtactacggtatggacgtctggggccaagggaccacggtcaccgtctcctca

SEQ ID NO: 5610 - DNA, 351 bp, Homo sapiens
caggtgcagctggtggagtctgggggaggcgtggtccagcctgggaggtccctgagactctcctgtacagcctctggattcaccttcagtagttatgctatgcactgggtccgccaggctccaggcaaggggctggagtgggtggcagttatatcatatgatggaaacaataaatactacgcagactccgtgaagggccgattcaccatctccagagacaattccaagaacacgcagtatctgcaaatgaacagcctgagagctgaggacacggctgtgtattactgtgcgagatccgagggctactactatatggacgtctggggcaaagggaccacggtcaccgtctcc

SEQ ID NO: 5611 - DNA, 351 bp, Homo sapiens
gaggtgcagctggtggagtctggaggaggcttgatccagcctggggggtccctgagactctcctgtgcagcctctgggttcaccgtcagtagcaactacatgagctgggtccgccaggctccagggaaggggctggagtgggtctcagttatttatagcggtggtagcacatactacgcagactccgtgaagggccgattcaccatctccagagacaattccaagaacacgctgtatcttcaaatgaacagcctgagagccgaggacacggccgtgtattactgtgcgagagatttatactactacggtatggacgtctggggccaagggaccacggtcaccgtctcctca

SEQ ID NO: 5612 - DNA, 355 bp, Homo sapiens
gaggtgcagttggtggagtctgggggaggcttggtacagcctggagggtccctgagactctcctgtgcagcctctggattcaccttcagtaattatgaaataaactgggtccgccaggctccagggaaggggctggagtgggtttcatacattagtcgtagtggtagtcccgtatactacgcagactctgtgaagggccgattcaccatctccagagacaacgccaagaactcactgtatctgcaaatgaacagcctgagagccgaggacacggctgtttatttctgtgcgagagaaaatgacttcgcttggttcgacccctggggccagggaaccctggtcaccgtctcctcag

SEQ ID NO: 5613 - DNA, 358 bp, Homo sapiens
caggtgcagctgcaggagtcgggcccaggactggtgaagccttcacagaccctgtccctcatctgcactgtctctggtggctccatcagtagtggtggtcactactggagctggatccgccagcacccagggaagggcctggagtggattgggtacatctattacagtgggaacacctactacaacccgtccctcaagagtcgagttaccatatcactagacacgtctaagaaccagttctccctgaagctgagctctgtgactgccgcggacacggccgtgtattactgtgcgagagtggatgactacgactggttcgacccctggggccagggaaccctggtcaccgtctcctcag

SEQ ID NO: 5614 - DNA, 358 bp, Homo sapiens
cagctgcagctgcaggagtcgggcccagggctggtgaggccttcggagaccctgtccctcacctgcactgtctctggtggctccatcagctatagtagttattactggggctgggtccgccagcccccagggaaggggctggagtggattgggagcatctcttttagtgggaacatcgactacaacccgtccctcaagagtcgcgtcaccatatccgttgacacgtcccagaaccacttctccctgaagctgagttctgtgaccgccgcagacacggctgtgtattactgtgcgagacacgtggtagttgctgatcttgcctactggggccagggaaacctggtcaccgtctcctcag

SEQ ID NO: 5615 - DNA, 355 bp, Homo sapiens
caggtgcagctggtgcaatctgggtctgagttgaagaagcctggggcctcagtgaaggtttcctgcaaggcttctggatacaccttcaataactacgctatgaattgggtgcgacaggcccctggacaagggcttgagtggatgggatggatcaacaccaacactgggaacccaacgtatgcccagggcttcacaggacggtttgtcttctccttggacacctctgtcagcacggcatatctgcagatcagcagcctgagggctgcggacactgccgtgtattactgtgcgactccctcggtactggggggctttgactattggggccagggaaccctggtcaccgtctcctcag

SEQ ID NO: 5616 - DNA, 373 bp, Homo sapiens
caggtgcagctgcaggagtcgggcccaggactggtgaagccttcacagaccctgtccctcacctgcgctgtctctggtggctccatcagcagtggtggttactactggagttggatccgccagcccccagggaagggcctggagtggattgggtacatctattacagtgggagcacctactacaacccgtccctcaagagtcgagttaccatatcagtagacacgtccaagaaccagttctccctgaagctgagctctgtgactgccgcagacacggccgtgtattactgtgccagagtccacggatattgtagtagtaccagctgctttatcgacccctggggccagggaaccctggtcaccgtctcctcag

SEQ ID NO: 5617 - DNA, 352 bp, Homo sapiens
caggtgcagctaaagcagtggggcgcaggactgttgaagcctacggagaccctgtcccgcacgtgcgctgtgtatagtgggtccttcagtgggtattattggacctggatccgccagcccccagggaaggggctggagtggattggggaaatcaaccatagtggaagcaccaagtacaatccgtcactcaagagtcgagtcaccatatcagtggacacgtccaagaaccagttctccctggaattgaggtctgtgaccgccgcggacacggctgtgtattattgtgcgagaggcccttcgaggggggccggctacaattggggccggggaaccctggtcaccgtctcctcag

SEQ ID NO: 5618 - DNA, 367 bp, Homo sapiens
caggtgcagctgcaggagtcgggcccaggactggtgaagccttcggagaccctgtccctcacctgcactgtctctggtggctccatcagtagttactactggagctggatccggcagcccccagggaagggactggattggattgggtatatctattacagtgggagcaccaactacaacccctccctcaagagtcgagtcaccatatcagtagacacgtccaagaaccagttctccctgaagctgagctctgtgaccgctgcggacacggccgtgtattactgtgcgagagtgcgggcgtcgatttttggagtggttgatgcttttgatatctggggccaagggacaatggtcaccgtctcttcag

SEQ ID NO: 5619 - DNA, 370 bp, Homo sapiens
caggtgcagctggtggagtctgggggaggcgtggtccagcctgggaggtccctgagactctcctgtgcagcctctggattcaccttcagtagctatgctatgcactgggtccgccaggctccaggcaaggggctggagtgggtggcagttatatcatatgatggaagcaataaatactacgcagactccgtgaagggccgattcaccatctccagagacaattccaagaacacgctgtatctgcaaatgaacagcctgagagctgaggacacggctgtgtattactgtgcgagtgggcgctatggttcagggagttattatagtgcttttgatatctggggccaagggacaatggtcaccgtctcttcag

SEQ ID NO: 5620 - DNA, 370 bp, Homo sapiens
gaagtgcagctggtggagtctgggggaggcttggtacagcctggtaggtccctgagactctcctgtgcagcctctggattcacctttgatgattatgccatgcactgggtccggcaagctcctgggaagggcctggagtgggtctcaggtattagttggaatagtgatagcataggctatgcggactctgtgaagggccgattcaccatctccagagacaacgccaagaactccctgtatctgcaaatgaacagtctgagagctgacgacacggccttgtattactgtacaaaagtctatagcaggtcgtcgtttttcttcggggcttttgatatctggggccaagggacaatggtcaccgtctcttcag

SEQ ID NO: 5621 - DNA, 373 bp, Homo sapiens
cagctgcagctgcaggagtcgggcccaggactggtgaagccttcggagaccctgtccctcacctgcactgtctctggtggctccatcagcagtagtagttactactggggctggatccgccagcccccagggaaggggctggagtggattgggagtatctattatagtgggaacacctactacaacccgtccctcaagagtcgagtcaccatatccgtagacacgtccaagaaccagttctccctgaagctgagctctgtgaccgccgcagacacggctgtttattactgtgcgagtggtgatccctatggttcgaatcttttgaacttattcgacccctggggccagggaaccctggtcaccgtctcctcag

SEQ ID NO: 5622 - DNA, 358 bp, Homo sapiens
cagatcaccttgaaggagtctggtcctacgctggtgaaacccacacagaccctcacgctgacctgcaccttctctgggttctcactcagcactagtggagtgggtgtgggctggatccgtcagcccccaggaaaggccctggagtggcttgcactcatttattgggatgatgataagcgctacagcccatctctgaagagcaggctcaccatcaccaaggacacctccaaaaaccaggtggtccttacaatgaccaacatggaccctgtggacacagccacatattactgtgcacaccatcaagtgacaacgatttttgaccagtggggccagggaaccctggtcaccgtctcctcag

SEQ ID NO: 5623 - DNA, 358 bp, Homo sapiens
cagatcaccttgaaggagtctggtcctacgctggtgaaacccacacagaccctcacgctgacctgcaccttctctgggttctcactcagcactagtggagtgggtgtgggctggatccgtcagcccccaggaaaggccctggagtggcttgcactcatttattgggatgatgataagcgctacagcccatctctgaagagcaggctcaccatcaccaaggacacctccaaaaaccaggtggtccttacaatgaccaacatggaccctgtggacacagccacatattactgtgcacaccatacggtgactacgatatttgactactggggccagggaaccctggtcaccgtctcctcag

SEQ ID NO: 5624 - DNA, 358 bp, Homo sapiens
cagatcaccttgaaggagtctggtcctacgctggtgaaacccacacagaccctcacgctgacctgcaccttctctgggttctcactcagcactagtggagtgggtgtgggctggatccgtcagcccccaggaaaggccctggagtggcttgcactcatttattgggatgatgataagcgctacagcccgtctctgaagagcaggctcaccatcaccaaggactcctccaaaaaccaggtggtccttacaatgaccaacatggaccctgtggacacagccacatattactgtgcacaccatctagtgcctacgatttttgactactggggccagggaaccctggtcaccgtctcctcag

SEQ ID NO: 5625 - DNA, 337 bp, Homo sapiens
ggtcctacgctggtgaaacccacacagaccctcacgctgacctgcaccttctctgggttctcactcagcactagtggagtgggtgtgggctggatccgtcagcccccaggaaaggccctggagtggcttgcactcatttattgggatgatgataagcgctacagcccatctctgaagagcaggctcaccatcaccaaggacacctccaaaaaccaggtggtccttacaatgaccaacatggaccctgtggacacagccacatattactgtgcacacagaagttcggtgacagaatttgactactggggccagggaaccctggtcaccgtctcctcag

SEQ ID NO: 5626 - DNA, 358 bp, Homo sapiens
cagatcaccttgaaggagtctggtcctacgctggtgaaacccacacagaccctcacgctgacctgcaccttctctgggttctcactcagcactagtggagtgggtgtgggctggatccgtcagcccccaggaaaggccctggagtggcttgcactcatttattgggatgatgataagcgctacagcccatctctgaagagcaggctcaccatcaccaaggacacctccaaaaaccaggtggtccttacaatgaccaacatggaccctgtggacacagccacatattactgtgcacacagacgagcagtgtgggagtacggctactggggccagggaaccctggtcaccgtctcctcag

SEQ ID NO: 5627 - DNA, 358 bp, Homo sapiens
cagatcaccttgaaggagtctggtcctacgctggtgaaacccacacagaccctcacgctgacctgcaccttctctgggttctcactcagcactagtggagtgggtgtgggctggatccgtcagcccccaggaaaggccctggagtggcttgcactcatttattgggatgatgataagcgctacagcctgtctctggagagccggctcaccatcaccaaggacccctccaaaaaccaggtggtccttacactgaccaacatggaccctgtggacacagccacatattactgtgcacgccatacagtggctacaatttttgactactggggccagggagccctggtcaccgtctcctcag

SEQ ID NO: 5628 - DNA, 370 bp, Homo sapiens
gaggtgcagctggtgcagtctggagcggcagtgaaaaagcccggggagtctctgaggatctcctgtcaggcctctggatatacttttacttccttctggatcgcctgggtgcgccagaggcccggggaaggcctggaatggatgggcattgtgtaccctactgactcttctactgtgtacagcccgtccttccaagaccaggtcaccatctccgccgacaagtccgtcagcaccgcctacctgcagtggcgcggcctgaaggcctcggacaccgccatgtattactgtgccaggcaggcttatgctggaagttattactctggtcacccagaccactggggccacggaacccacgtcaccgtctcctcag

SEQ ID NO: 5629 - DNA, 370 bp, Homo sapiens
caggtgcagctggtggagtctgggggaggcgtggtccagcctgggaggtccctgagactctcctgtgcagcctctggattcaccttcagtagctatggcatgcactgggtccgccaggctccaggcaaggggctggagtgggtggcagttatatcatatgatggaagtaataaatactatgcagactccgtgaagggccgattcaccatctccagagacaattccaagaacacgctgtatctgcaaatgaacagcctgagagctgaggacacggctgtgtattactgtgcgaaagattttggacacagcagctggtaccaaaactggttcgacccctggggccagggaaccctggtcaccgtctcctcag

SEQ ID NO: 5630 - DNA, 370 bp, Homo sapiens
caggtgcagctggtggagtctgggggaggcgtgattcagcctgggaggtccctgagactctcctgtgcagcctctggattcagcttcagtacctatggcatgcactgggtccgccaggctccaggcaaggggctggagtgggtggcagttatctcatatgatggaagtaataaatactatacagactccgtgaagggccgattcaccatctccagagacaattccaagaacacgctgtatctgcagatgaacagcctgagacctgaggacacggctgtgtattactgtgcgaaagatttaactattgtaatagtaccagctgccgaaatcgactcctggggccagggaaccctggtcaccgtctcctcag

SEQ ID NO: 5631 - DNA, 373 bp, Homo sapiens
cagatcaccttgaaggagtctggtcctacgctggtgaaacccacacagaccctcacgctgacctgcaccttctctgggttctcactcagcactagtggggtgggtgtggcctggatccgtcagcccccaggaaaggccctggagtggcttgcactcatttactgggatgatgataagcgctacagcccatctctgaagagcaggctcaccatcaccaaggacacctccaaaaaccaggtggtccttacaatgaccaacatggaccctgtagacacagccacatattactgtgcacacaggcgtagcagtggctggtatgggggagactactttgactactggggccagggaaccctggtcaccgtctcctcag

SEQ ID NO: 5632 - DNA, 373 bp, Homo sapiens
cagatcaccttgaaggagtctggtcctacactggtgaaacccacacagaccctcacgctgacctgcaccttctctgggttctcactcagaactagtggagtgggtgtgggctggatccgtcagcccccaggaaaggccctggagtggcttgcgctcattttttggaatgataataagttctacagcccatctctgaagagcagggtcaccatcaccaaggacacctccaaaaaccaggtggtccttacaatcaccaacacggaccctttggacacagccacatattactgtgcacacagacagagggaccaagggggatttatcgttacgtttgactactggggccagggagccctggtcaccgtctcctcag

SEQ ID NO: 5633 - DNA, 370 bp, Homo sapiens
gacgtggagctggtggaatctgggggaggctcggtccagccggggaggtccctgagactctcctgtgcagtctcaggattcagtattagtgactattggatgagttgggtccgccaggctccagggaaggggctggagtgggtggccgacataaatcaagatggaagtgagaaatactatgtggactctgtgaagaaccgatttaccttctccagagacaacgccaagaactcactgtatctgcaaatgaacagcgtgagagccgaggacacggctatctattactgtgcgagagaccgtaggtcacaattcggggagtttttttcctttgactactggggccagggaaccctggtcaccgtctcctcag

SEQ ID NO: 5634 - DNA, 355 bp, Homo sapiens
caggttcagctggtgcagtctggagctgaggtgaagaagcctggggcctcagtgaaggtctcctgcaaggcttctggttacacctttaccagctatggtatcagctgggtgcgacaggcccctggacaagggcttgagtggatgggatggatcagcgcttacaatggtaacacaaactatgcacagaagctccagggcagagtcaccatgaccacagacacatccacgagcacagcctacatggagctgaggagcctgagatctgacgacacggccgtgtattactgtgcgagagcgtggtggctacaatcctttgactactggggccagggaaccctggtcaccgtctcctcag

SEQ ID NO: 5635 - DNA, 370 bp, Homo sapiens
caggtgcagctggtggagtctgggggaggcgtggtccagcctgggaggtccctgagactctcctgtgcagcctctggattcaccttcagtatctatgctatgcactgggtccgccaggctccaggcaaggggctggagtgggtggcagttatatcatatgatggaagcaataaatactacgcagactccgtgaagggccgattcagcatctccagagacaattccaagaacactctgtttctccaaatgaacagcctgagagctgaggacacggctgtgtattactgtgcgagcctagattgtaggactatcaggtgctcacttccgtttgactactggggccagggaaccctggtcaccgtctcctcag

SEQ ID NO: 5636 - DNA, 370 bp, Homo sapiens
caggtccagctggtacagtctggggctgaggtgaagaagcctggggcctcagtgaaggtctcctgcaaggtttccggatacaccctcactgaattatccatgcactgggtgcgacaggctcctggaaaagggcttgagtggatgggaggttttgatcctgaagatggtgaaacaatctacgcacagaagttccagggcagagtcaccatgaccgaggacacatctacagacacagcctacatggagctgagcagcctgagatctgaggacacggccgtgtattactgtgcaacagggggatttgcgatttttggagtggttgcatactttgactactggggccagggaaccctggtcaccgtctcctcag

SEQ ID NO: 5637 - DNA, 370 bp, Homo sapiens
caggtccagctggtacagtctggggctgaggtgaagaagcctggggcctcagtgaaggtctcctgcaaggtttccggatacaccctccctgaattatccatacactgggtgcgacaggctcctggaaaagggcttgagtggatgggaggttttgatcctgaagatgctgaaacaatttacgcacagaagttccagggcagagtcaccatgaccgaggacacatctacagacacagcctacatggagctgagcagcctgagatctgaggacacggccatttattactgtgcaacaggacccgcagtaccagatgccccctcatactggttcgacccctggggccagggaaccctggtcaccgtctcctcag

SEQ ID NO: 5638 - DNA, 370 bp, Homo sapiens
caggtgcagctggtgcagtctggggctgaggtgaagaagcctggggcctcagtgaaggtctcctgcaaggcttctggatacaccttcaccggctattatatgcactgggtgcgacaggcccctggacaagggcttgagtggatgggatggatcaaccctatcagtggtggcacaaactatgcacagaagtttcagggcagggtcaccatgaccacggacacgtccaccagcacagcctacatggacctgagcagtctgagatctgacgacacggccgtgtattactgtgcgagagcccgccagtattacgatttttggagtggtctcgagggctactggggccagggaaccctggtcaccgtctcctcag

SEQ ID NO: 5639 - DNA, 370 bp, Homo sapiens
caggtgcagctggtgcagtctggggctgaggtgaagaagcctggggcctcagtgaaggtctcctgcaaggcttctggatacaccttcaccggcttctatatccactgggtgcgacaggcccctggacaagggcttgagtggatgggatggatcaaccctaacagtggtgtcacaaactatgcacagaaatttcagggcagggtcaccatgaccagcgacacgtccatcagcacagcctacatggagctgagcagggtgagatctgacgacacggccttctattactgtgcgagagaggggggctacggtgacccgccgtacaactggttcgacccctggggccagggaaccctggtcaccgtctcctcag

SEQ ID NO: 5640 - DNA, 370 bp, Homo sapiens
gaggtgcagctgttggagtctgggggaggcttggtacagcctggggggtccctgagactctcctgtgcagcctctggattcacctttagcagctatggcatgagctgggtccgccaggctccagggaaggggctggagtgggtctcagttattagtggcagtggtggtagcacatattacgcagactccgtgaagggccggttcaccatctccagagacaattccaagaacacgctgtttctgcaaatgaacagcctgagagccgaggacacggccgtatatcactgtgcgaaagaacacggaagtgaaaactactttttgagggcctttgactattggggccagggaaccctggtcaccgtctcctcag

SEQ ID NO: 5641 - DNA, 370 bp, Homo sapiens
gaggtgcagctggtggagtccgggggaggcttagttcagcctggggggtccctgagactctcctgtgcagcctctggattcaccttcagtacctactggatgcactgggtccgccaaactccagggaaggggctggtgtgggtctcacgtattaatcctgatgggagttccatagactacgcggactccgtgaagggccgattcaccatctccagagacaacgccaggaacatgttgaatctgcaaatgaacagtctgagagacgaagacacggctgtttattactgtgtaagagatgggggctgggatagcagcgactggcgaaactttgactactggggccagggaaccctggtcaccgtctcctcag

SEQ ID NO: 5642 - DNA, 367 bp, Homo sapiens
gaggtgcagctggtggagtctgggggaggcttggtacagcctggggggtccctgagactctcctgtgcagcctctggattcaccttcagtagctacgacatgcactgggtccgccaagctacaggaaacggtctggagtgggtctcaactattggtacttctggtgacacatactatccagactccgtgaagggccgcttcaccatctccagagaaaatgccaagaactccttgtatcttcaaatgaacagcctgagagccggggacacggctgtgtattactgtgcaagagccatttttgatagtagtggttattatcactggttcgacccctggggccagggaaccctggtcaccgtctcctcag

SEQ ID NO: 5643 - DNA, 367 bp, Homo sapiens
gaggtgcaactggtggagtctgggggaggcttggtacagcctggggggtccctgagactctcctgtgcagcctctggattcaccttcagtacctacgacatgcactgggtccgccaaggtacaggaaaaggtctggagtgggtctcaactattggtacttctggtgacacatactatccaggctccgtgaagggccgattcaccatctccagagaaaatgccaagaactccttgtatcttcaaatgaacagcctgagagccggggacacggctgtgtatttctgtgcaagagcagaatttgactacaatgacttttcgtactactttgactactggggccagggaaccctggtcaccgtctcctcag

SEQ ID NO: 5644 - DNA, 366 bp, Homo sapiens
caggtgcagctgcaggagtcgggcccaggactggtgaggccttcggagaccctgtccctcacctgcactgtctctggtggctccatcagtagttactactggagctggatccggcagcccccggggaagggactggagtggattgggtatatctattacagtgggagcaccaactacaacccctccctcaagagtcgagtcaccatatcagtagacacgtccaagagccagttctccctgaagctgagctctgtgaccgctgcggacacggccgtgtattactgtgcgagagcggacgggtcgctaccctactactactacggtatggacgtctggggccaaggggccacggtcaccgtctcctca

SEQ ID NO: 5645 - DNA, 369 bp, Homo sapiens
caggtgcagctggtgcagtctggggctgaggtgaagaagcctggggcctcagtgaaggtttcctgcaaggcatctggatacaccttcaccagctactatatgcactgggtgcgacaggcccctggacaagggcttgagtggatgggaataatcatccctagtggtggtagcacaagctacgcacagaagttccagggcagagtcaccatgaccagggacacgtccacgagcacagtctacatggagctgagcagcctgagatctgaggacacggccgtgtattactgtgcgagagacctactaccgggccaccacgtcgactactacatggacgtctggggcaaagggaccacggtcaccgtctcctca

SEQ ID NO: 5646 - DNA, 367 bp, Homo sapiens
caggtgaggctgcaggagtcgggcccaggactggtgaagccttcggagaccctgtccctcacatgttctgtgtctggtggctccgtcactactgcctactggagttggatccggcagaccgccgggaagggactggaatggattggccgtgtgtatcttagtgggagtaccgactacaacccctccgtcaagagtcgagtcgccatctccatagacacgtccaagaaccagttctccctgaaggtaaactctttgaccgccgcggacacggccatatattactgtgcgagagatggcgatttttggagtggttttcacaactggttcgactcctggggcccgggaaccctggtcgtcgtctcctcag

SEQ ID NO: 5647 - DNA, 370 bp, Homo sapiens
caggtgcagctgcaggagtcgggcccaggactggtgaagccttcggggaccctgtccctcacctgcgctgtctctggtggctccatcagcagtagtaactggtggagttgggtccgccagcccccagggaaggggctggagtggattggggaaatctatcatagtgggagcaccaactacaacccgtccctcaagagtcgagtcaccatatcagtagacaagtccaagaaccagttctccctgaagctgagctctgtgaccgccgcggacacggccgtgtattactgtgtatcaaccccacgcacccgcacagtggctggtacctggttcgacccctggggccagggaaccctggtcaccgtctcctcag

SEQ ID NO: 5648 - DNA, 369 bp, Homo sapiens
caggtgcagctggtggagtctgggggaggcgtggtccagcctgggaggtccctgagactctcctgtgcagtctctggattcaccttcagtagctatggcatgcactgggtccgccaggctccaggcaaggggctggagtgggtggcaggtatatcatatgatggaagtaacaaatattatgcagactccgtgaagggccgattcaccatctccagagacaattccaagaacacgctgtatctgcaaatgaacagcctgagagctgaggacacggctgtatattactgtgcgaagaccggtgcgccctattactactactactacggtatggacgtctggggccaagggaccacggtcaccgtctcctca

SEQ ID NO: 5649 - DNA, 369 bp, Homo sapiens
caggtgcagctggtggagtctgggggaggcgtggtccagcctgggaggtccctgagactctcctgtgcagcctctggattcaccttcagtagctatggcatgcactgggtccgccaggctccaggcaaggggctggagtgggtggcagttatatcatatgatggaagtgataaatactatgcagactccgtgaagggccgattcaccatctccagagacaattccaagaacacgctgtatctgcaaatgaacagcctgagagctgaggacacggctgtgtattactgtgcgaagtccgtggctacccattactactactactacggtatggacgtctggggccaagggaccacggtcaccgtctcctca

SEQ ID NO: 5650 - DNA, 369 bp, Homo sapiens
caggtgcagctggtggagtctgggggaggcgtggtccagcctgggaggtccctgagactctcctgtgcagcctctggattcaccttcagtagctatggcatgcactgggtccgccaggctccaggcaaggggctggagtgggtggcagttatatcatatgatggaagtaataaatactatgcagactccgtgaagggccgattcaccatctccagagacaattccaagaacacgctgtatctgcaaatgaacagcctgagagctgaggacacggctgtgtattactgtgcgaaggctagtaactcttattactactactactactacatggacgtctggggcaaagggaccacggtcaccgtctcctca

SEQ ID NO: 5651 - DNA, 370 bp, Homo sapiens
gaagtgcagctggtggagtctgggggaggcttggtacagcctggcaggtccctgagactctcctgtgcagcctctggattcacctttgatgattatgccatgcactgggtccggcaagctccagggaagggcctggagtgggtctcaggtattagttggaatagtggtagcataggctatgcggactctgtgaagggccgattcaccatctccagagacaacgccaagaactccctgtatctgcaaatgaacagtctgagagctgaggacacggccttgtattactgtgcaaaaaaaatgaccttttattttgactggttagggtacttcgatctctggggccgtggcaccctggtcactgtctcctcag

SEQ ID NO: 5652 - DNA, 370 bp, Homo sapiens
gaagtgcagctggtggagtctgggggaggcttggtacagcctggcaggtccctgagactctcctgtgcagcctctggattcacctttgatgattatgccatgcactgggtccggcaagctccagggaagggcctggagtgggtctcaggtattagttggaatagtggtagcataggctatgcggactctgtgaagggccgattcaccatctccagagacaacgccaagaactccctgtatctgcaaatgaacagtctgagagctgaggacacggccttgtattactgtgcaaaagtggtgaggagcagctggtacttagttgggccttttgactactggggccagggaaccctggtcaccgtctcctcag

SEQ ID NO: 5653 - DNA, 369 bp, Homo sapiens
gaggggcagctggtggagtctgggggaggcttggtacagcctggggggtccctgagactctcctgtgcagcctctggattcaccttcagtagttataacatgaactgggtccgccaggctccagggaaggggctggagtgggtttcatacattagtagtagtagtagtaccatatactacgcagactctgtgaagggccgattcaccatctccagagacaatgccaagaactcattgtatctgcaaatgaacagcctgagagacgaggacacggctgtgtattactgtgcgaggggagtgggaccgaaatcctattactactacggtatggacgtctggggccaagggaccacggtcaccgtctcctca

SEQ ID NO: 5654 - DNA, 364 bp, Homo sapiens
caggtgcagctggtgcagtctgggggaggcgtggtccagcctgggaggtccctgagactctcctgtgcagcctctggattcaccttcagtagctctggcatgcactgggtccgccaggctccaggcaaggggctggagtgggtggcagttatatcatatgatggaagtaataaatactatgcagactccgtgaagggccgattcaccatctccagagacaattccaagaacacgctggatctgcaaatgaacagcctgagagctgacgacacggctgtgtattactgtgcgaacgaggtagtggtggtaggcacagatgtttttgatatctggggccaagggacaatggtcaccgtctctgcag

SEQ ID NO: 5655 - DNA, 364 bp, Homo sapiens
gaggtgcagctggtgcagtctggagcagaggtgaaaaagcccggggagtctctgaagatctcctgtaagggttctggatacagttttaccagctactggatcggctgggtgcgccagatgcccgggaaaggcctggagtggatggggatcatctatcctggtgactctgatatcagatacagcccgtccttccaaggccaggtcaccatctcagccgacaagtccatcagcaccgcctacctgcagtggagcagcctgaaggcctcggacaccgccatgtattactgtgcgagctattatagcagtggctgggatgatgcttttgatgtctggggccaagggacattggtcaccgtctcttcag

SEQ ID NO: 5656 - DNA, 364 bp, Homo sapiens
gaggtgcagctggtggagtccgggggaggcttagttcagcctggggggtccctgagactctcctgtgcagcctctggattcaccttcagtagctactggatgcactgggtccgccaagctccagggaaggggctggtgtgggtctcacgtattaatagtgatgggagtagcacaagctacgcggactccgtgaagggccgattcaccatctccagagacaacgccaagaacacgctgtatctgcaaatgaacagtctgagagccgaggacacggctgtatattactgtgcaagagatctggtgacttcccccacgcacgcttttgatatctggggccaagggacaatggtcaccgtctcttcag

SEQ ID NO: 5657 - DNA, 364 bp, Homo sapiens
gaagtgcagctggtggagtctgggggagtcgtggtacagcctggggggtccctgagactctcctgtgcagcctctggattcacctttgatgattataccatgcactgggtccgtcaagctccggggaagggtctggagtgggtctctcttattagttgggatggtggtagcacatactatgcagactctgtgaagggccgattcaccatctccagagacaacagcaaaaactccctgtatctgcaaatgaacagtctgagaactgaggacaccgccttgtattactgtgcaaaaggaggaggttggaatggctacgatgggattgactactggggccagggaaccctggtcaccgtctcctcag

SEQ ID NO: 5658 - DNA, 364 bp, Homo sapiens
caggttcagctggtgcagtctggagctgaggtgaagaagcctggggcctcagtgaaggtctcctgcaaggcttctggttacacctttaccagctatggtatcagctgggtgcgacaggcccctggacaagggcttgagtggatgggatggatcagcgcttacaatggtaacacaaactatgcacagaagctccagggcagagtcaccatgaccacagacacatccacgagcacagcctacatggagctgaggagcctgagatctgacgacacggccgtgtattactgtgcgagagatcttgatcccttggactatgcttactttgactactggggccagggaaccctggtcaccgtctcctcag

SEQ ID NO: 5659 - DNA, 364 bp, Homo sapiens
caggttcagctggtgcagtctggagctgaggtgaagcagcctggggcctcagtgaaggtctcctgtaaggcttctggtttcacctttaccaactatgctatcagctgggtgcgacaggcccctggacaagggcttgagtggatgggttggatcagcgcttacaatggtaacacgaactatgtacagaaactccagggcagagtcaccatgaccacagacccatccacgagcacagcctacatggagctgaggagcctgagatctgacgacacggccgtgtattactgtatacgttatgattacatttgggggagttatacccttgactactggggccagggaaccctggtcaccgtctcctcag

SEQ ID NO: 5660 - DNA, 364 bp, Homo sapiens
gaggtgcagctggtggagtccgggggaggcttagttcagcctggggggtccctgagactctcctgtgcagcctctggattcaccttcagtatctactggatgcactgggtccgccaagctccagggaaggggctggtgtgggtctcacgtattaagagtgatgggagtagcacaacctacgcggattccgtgaagggccgattctccatctccagagacaacgccaagaacacgctgtatctgcaaatgaacagtctgagagccgaggacacggctgtgtattactgtgcaagagaggggatagcagtggctgacaactcctttgactattggggccagggaaccctggtcaccgtctcctcag

SEQ ID NO: 5661 - DNA, 364 bp, Homo sapiens
caggtgcagctggtggagtctgggggaggcgtggtccagcctgggaggtccctgagactctcctgtgcagcctctggattcaccttcaataactatgctctgtactgggtccgccaggctccaggcaaggggctggagtgggtggcagttatatcatatgatggaagcaataactactacgcagattccgtgaagggccgattcaccatctccagagacaattccaagaacacactgtatctgcaaatgaacagcctgagacttgaggacacggctgtgtatttttgtgcgagagggatcggacatgcttataataactactttgactactggggccagggaaccctggtcaccgtctcctcag

SEQ ID NO: 5662 - DNA, 364 bp, Homo sapiens
caggtgcagctggtggagtctgggggaggcgtggtccagcctgggaggtccctgagactctcctgtgcagcctctggattcaccttcagtagctatgctatgcactgggtccgccaggctccaggcaaggggctggagtgggtggcagttatatcatatgatggaagcaataaatactacgcagactccgtgaagggccgattcaccatctccagagacaattccaagaacacgctgtatctgcaaatgaacagcctgagagctgaggacacggctgtgtattactgtgcgagactgaatagtgggagctacctgggctactttgactactggggccagggaaccctggtcaccgtctcctcag

SEQ ID NO: 5663 - DNA, 364 bp, Homo sapiens
caggtgcagctggtggagtctgggggaggcgtggtccagcctgggaggtccctgagactctcctgtgcagccactggattcaccttcactatttatgctatgtactgggtccgccaggctccaggcaaggggctggagtgggtggcagttatatcatatgatggaagcaataaatactacgcagactccatgaagggccgattctccatctccagagacaattccaagaacacgctgtatctgcaaatgaacagcctgagagctgaggacacggctgtgtattactgtgcgagagcgcagggtggtggctaccattctccctttgactactggggccagggaaccctggtcaccgtctcctcag

SEQ ID NO: 5664 - DNA, 364 bp, Homo sapiens
gaggtgcagctgttggagtctgggggaggcttggtacagcctggggggtccctgagactctcctgtgcagcctctggattcacctttagcagctatgccatgacctgggtccgccaggctccggggaaggggctggagtgggtctcaagtattaatgacaatggcggtagcacatattacccagactccgtgaagggccggttcaccatctccagggacaattccaagaacacactatatctgcaaatgaacagcctgagaaccgaggacacggccgtatattactgtgcgaaagtggcgacgatgactaatatattttactttgactactggggccagggaaccctggtcaccgtctcctcag

SEQ ID NO: 5665 - DNA, 364 bp, Homo sapiens
caggtccagctggtacagtctggggctgaggtgaagaagcctggggcctcagtgaaggtctcctgcaaggtttccggatacaccctcactgaattatccatgcactgggtgcgacaggctcctggaaaagggcttgagtggatgggaggttttgatcctgaagatggtgaaacaatctacgcacagaagttccagggcagagtcaccatgaccgaggacacatctacagacacagcctacatggagctgagcagcctgagatctgaggacacggccgtgtattactgtgcaacaggctatgctataactggaacgacaccgccactctactggggccagggaaccctggtcaccgtctcctcag

SEQ ID NO: 5666 - DNA, 370 bp, Homo sapiens
gaagtgcagctggtggagtctgggggaggcttggtacagcctggcaggtccctgagactctcctgtgcagcctctggattcacctttgatgattatgccatgcattgggtccggcaagctccagggaagggcctggagtggatctcaggtattagttggaatagtggtagcataggctatgcggactctgtgaagggccgattcatcatctccagagacaacgccgagaactccctgaatctgcaaatgaacagtctgagagctgaggacacggccttgtattactgtgcaatgggggaaccttactacggtgactacggactcgcgatggacgtctggggcaaagggaccacggtcaccgtctcctcag

SEQ ID NO: 5667 - DNA, 364 bp, Homo sapiens
caggtgcagctggtggagtctgggggaggcgtggtccagcctgggaggtccctgagactctcctgtgcagcgtctggattcaccttcagtagctatggcatgcactgggtccgccaggctccaggcaaggggctggagtgggtggcagttatatggtatgatggaagtaataaatactatgcagactccgtgaagggccgattcaccatctccagagacaattccaagaacacgctgtatctgcaaatgaacagcctgagagccgaggacacggctgtgtattactgtgcgagagatggggtggtgggagctactactggtattgactactggggccagggaaccctggtcaccgtctcctcag

SEQ ID NO: 5668 - DNA, 364 bp, Homo sapiens
caggtgcaactggtggactctgggggaggcgtggtccagcctgggaggtccctgagactctcctgtgcagcgtctggattcaccttcagtaactatggcatccactgggtccgccaggctccaggcaagggcctggagtgggtggcagttatatggcatgacggaagtaataaaaactatgcagactccgtgaagggccgattcaccatctccagagacaattccaagaacacgctgtatctgcaaatgaacagcctgagagccgaagacacggctgtgtatttctgtgcgagagagggtatagtgggagctactaccggctttgaccactggggccagggaaccctggtcaccgtctcctcag

SEQ ID NO: 5669 - DNA, 364 bp, Homo sapiens
caggtgcagctggtggagtctgggggaggcgtggtccagcctgggaggtccctgagactctcctgtgcagcgtctggattcaccttcagtagctatggcatgcactgggtccgccaggctccaggcaaggggctggagtgggtggcagttatatggtatgatggaagtaataaaaagtatgtagactccgtgaagggccgattcaccatctccagagacaattccaagaacacgctgtatctgcaaatgaacagcctgagagccgaggacacggctgtgtattactgtgcgagagaaggtgcagctctggctcaatcgggttttgactactggggccagggaaccctggtcaccgtctcctcag

SEQ ID NO: 5670 - DNA, 367 bp, Homo sapiens
caggtgcagctgcaggagtcgggcccaggactggtgaagccttcacagaccctgtccctcacctgcgctgtctctggtggctccatcagcagtggtggttactactggagttggatccgccagcccccagggaagggcctggagtggattgggtacatctattacagtgggagcacctactacaacccgtccctcaagagtcgagttaccatatcagtagacacgtccaagaaccagttctccctgaagctgagctctgtgactgccgcagacacggccgtgtattactgtgccagagaggattactatgatagtagtggttcggttgactactggggccagggaaccctggtcaccgtctcctcag

SEQ ID NO: 5671 - DNA, 370 bp, Homo sapiens
gaggtgcagctggtggagtctgggggaggcttggtacagccagggcggtccctgagactctcctgtacagcttctggactcacctttggtgattatgctatgaactgggtccgccaggctccagggagggggctggagtgggtaggtttcattagaagcaaagcttatggtgggacaacaggatacgccgcgtctgtgaaaggcagattcaccatctcaagagatgattccaaaagcatcgcctatctgcaaatgaacagcctgaaaaccgaggacacagccgtgtattactgtactaggagcatgttcatgactacggtgactccttttgactactggggccagggaaccctggtcaccgtctcctcag

SEQ ID NO: 5672 - DNA, 364 bp, Homo sapiens
caggtgcagctggtggagtctgggggaggcgtggtccagcctgggaggtccctgagactctcctgtgcagcctctggattcaccttcagtagctatgccatgcactgggtccgccaggctccaggcaaggggctggagtgggtggcagttatttcatatgatggaagtaataaatactatgcagactccgtgaagggccgattcaccatctccagagacaattccaagaacacgctgtctctgcaaatgaacagcctgagagctgaggacacggctgtgtattactgtgcgaaaggtaaaacaggtggctacattacccctcttgactactggggccagggaaccctggtcaccgtctcctcag

SEQ ID NO: 5673 - DNA, 364 bp, Homo sapiens
caggtgcagctggtggagtctgggggaggcgtggtccagcctgggaggtccctgagactctcctgtgcagcctctggattcaacttcaataactatggcatccactgggtccgccaggctccaggcaaggggctggagtgggtggcagttatatcatatgatggaagtaataaatactatgcagactccgtgaagggccgattcaccatctccagagacaattccaggaacacgctgtatctgcaaatgaacagcctgagagctgaggacacggctgtgtattactgtgcgaaaagcttatcagggagttattatagttctcttgactactggggccagggaaccctggtcaccgtctcctcag

SEQ ID NO: 5674 - DNA, 364 bp, Homo sapiens
caggtgcagctggtggagtctgggggaggcgtggtccagcctgggaggtccctgagactctcctgtgcagcctctggattcaccttcagtagctttggcatgcactgggtccgccaggctccaggcaaggggctggagtgggtggcacttgtatcatatgatggagataataaatactatgcagactccgtgaagggccgattcaccatctccagagacaattccaagaacaccctgtatctgcaaatgaacagcctgggagctgaggacacggctgtgtattactgtgcgaccccgaggggtgggagctattgggcgggctttgactactggggccagggaaccctggtcaccgtctcctcag

SEQ ID NO: 5675 - DNA, 364 bp, Homo sapiens
caggtgcagctggtggagtctgggggaggcgtggtccagcctgggaggtccctgagactctcctgtgcagcctctggattcaccttcagtaactatggcatgcactgggtccgccaggctccagggaaggggctggagtgggtggcagttatatcatatgatggaagtaataaatactatgcagactccgtgaagggccgattcaccatctccagagacaattccaagaacacgctgtatctgcaaatgaacagcctgagacctgaggacacggctgtgtattactgtgcgaaagaaggggaagtgggagctactacaggaattgactactggggccagggaaccctggtcaccgtctcctcag

SEQ ID NO: 5676 - DNA, 364 bp, Homo sapiens
caggtgcagctggtgcagtctggggctgaggtgaagaagcctggggcctcagtgaaggtctcctgcaaggtttctggatacagcttcaccggctactatatgcactgggtgcgccaggcccctggacaagggcttgagtggatgggatgggtcaaccctaacactggtgccacaaactatgcacagaagtttcagggcagggtcaccatgaccagggacacgtccatcagtacagcctacatggagttgagcaggctgagatctgatgacacggccgtctattactgtgcgagagaggtggtggtggtaggaactacgaactttgactactggggccagggaaccctggtcaccgtctcctcag

SEQ ID NO: 5677 - DNA, 364 bp, Homo sapiens
caggtgcagctggcgcagtctggggctgaggtgaagaagcctggggcctcagtgaaggtctcctgcaaggcttctggatacagtttcagcggctactatatgcactgggtgcgacaggcccctggacaagggcttgagtggatgggatggatcaaccctaacagtggtgacacaaactatgcacagaagtttcagggcaggctcaccatgaccagggacacgtccatcagcacagcctacatggagttgagcaggctgagatctgacgacacggccgtgtattattgtgcgagacggagccgtatagtgggagctaatcaccttgactcatggggccagggaaccctggtcaccgtctcctcag

SEQ ID NO: 5678 - DNA, 364 bp, Homo sapiens
gaggtgcagctggtgcagtctggagcagaggtgaaaaagccgggggagtctctgaagatctcctgtaagggttctggatacgactttaccagctactggatcggctgggtgcgccagatgcccgggaaaggcctggagtggatggggatcatctatcctggtgactctgataccagatacagcccgtccttccaaggccaggtcaccatctcagccgacaagtccatcagcaccgcctacctgcagtggagcagcctgaaggcctcggacaccgccatatatttctgtgcgagacatgcagacgatttttggagtggttattattacaactggggccagggaaccctggtcaccgtctcctcag

SEQ ID NO: 5679 - DNA, 360 bp, Homo sapiens
gaggtgcagctggtggagtctggaggaggcttgatccagcctggggggtccctgagactctcctgtgcagcctctgggttcaccgtcagtagcaactacatgaactgggtccgccaggctccagggaaggggctggagtgggtctcacttattaatagcggtggtagcacatactacgtagactccgtgaagggccgattcaccatctccagagacaactccaagaacacactatttcttcaaatgaacagtctgagagccgaggacacggccgtgtattactgtgcgagagatgtgctactgggtgctcactacggtatggacgtctggggccaagggaccacggtcaccgtctcctca

SEQ ID NO: 5680 - DNA, 360 bp, Homo sapiens
gaggtgcagctggtggagtctgggggaggcttggtacagcctggggggtccctgagactctcctgtgcagcctctggattcaccttcagtgactacgacatgcactgggtccgccaggctacaggagaaggtctggagtgggtctcagctattggtacttccggtgacacatggtatccaggctccgtgaagggccgattcaccatctccagagaaaatgccaagaactccttgtatcttcaaatgaacagcctgagagccggggacacggctgtgtattactgtgcaagggggactacttctcactactactactacatggacgtctggggcaaagggaccacggtcaccgtctcctca

SEQ ID NO: 5681 - DNA, 360 bp, Homo sapiens
caggtgcagctgcaggagtcgggcccaggactggtgaagccttcggagaccctgtccctcacctgcactgtctctggtggctccatcagtagttactactggagctggatccggcagcccccagggaagggactggagtggattgggtatatctattacagtgggagcaccaactacaacccctccctcaagagtcgagtcaccatatcagtagacacgtccaagaaccagttctccctgaagctgagctctgtgaccgctgcggacacggccgtgtattactgtgcgagggcgaggggagggtactactactactacatggacgtctggggcaaagggaccacggtcaccgtctcctca

SEQ ID NO: 5682 - DNA, 360 bp, Homo sapiens
caggtgcagctgcaggagtcgggcccaggactggtgaagccttcggagaccctgtccctcacctgcactgtctctggtggctccatcagtaattccttctggagctggatccggcagcccccagggaagggactggagtggattgggtatatctcatacagtgggagcaccaactacaacccctccctcacgagtcgagtcaccatatcagtagacacgtccaagaaccagttctccctgaagctgagctctgtgaccgccgcagacacggccgtgtattactgtgcgggaggggcagctgcctactactactactacatggacgtctggggcaaagggaccacggtcaccgtctcctca

SEQ ID NO: 5683 - DNA, 367 bp, Homo sapiens
caggtcaccttgaaggagtctggtcctgtgctggtgaaacccacagagaccctcacgctgacctgcaccgtctctgggttctcactcagcaatgctagaatgggtgtgacctggatccgtcagcccccagggaaggccctggagtggcttgcacacattttttcggatgacgaaaaatcctacagcacatctctgaagagcaggctcaccatctccaaggacacctccaaaagccaggtgttccttaccatgaccaacatggaccctgtggacacagccacatattactgtgcacggatcgttgactggttaaaaaacaactgcttcgacccctggggccagggaaccctggtcaccgtctcctcag

SEQ ID NO: 5684 - DNA, 363 bp, Homo sapiens
caggtgcagctggtggagtctgggggaggcgtggtccagcctgggaggtccctgagactctcctgtgcagcgtctggattcaccttcagtagctatggcatgcactgggtccgccaggctccaggcaaggggctggagtgggtggcagttatatggtatgatggaagtaataaatactatgcagactccgtgaagggccgattcaccatctccagagacaattccaagaacacgctgtatctgcaaatgaacagcctgagagccgaggacacggctgtgtattactgtgcgagagttgggggctggaacaaaggttacggtatggacgtctggggccaagggaccacggtcaccgtctcctca

SEQ ID NO: 5685 - DNA, 363 bp, Homo sapiens
caggtgcagttggtggagtctgggggaggcgtggtccagcctgggaggtccctgacactctcctgtgcagcgtctggattcaccttcactacccatggcatgcactgggtccgccaggctccaggcaaggggctggagtgggtggcagttatttggtatgatggaaataataaatactatgcagactccgtgaagggccgattcaccatctccagagacaattccaagaacacgctgtatctgcaaatgaacagcctgagagccgaggacacggctgtgtattactgtgcgattatagcagtgactgtttttgcggaggccacggacgtctggggccaagggaccacggtcaccgtctcctca

SEQ ID NO: 5686 - DNA, 363 bp, Homo sapiens
caggtgcagttggtggagtctgggggaggcgtggtccagcctgggaggtccctgagactctcctgtgcagcgtctggattcaccttcagtagctatggcatgcactgggtccgccaggctccaggcaaggggctggagtgggtggcaattatatggtatgatggaagtaataaatactatgcagactccgtgaagggccgattcaccatctccagagacaattccaagaacacgttgtatctgcaaatgaacagcctgagagccgaggacacggctgtatattactgtgcgagagaccaggtgggagctacttcccacggtatggacgtctggggccaagggaccacggtcaccgtctcctca

SEQ ID NO: 5687 - DNA, 362 bp, Homo sapiens
caggtgcagctggtgcagtctggggctgaggtgaagaagcctgggtcctcggtgaaggtctcctgcaagacttctggaggcaccttcagcagctatgctatcagctgggtgcgacaggcccctggacaagggcttgagtggatgggagggatcatccctctctttggtacaacaaactactcacagaggtttcagggcagagtcacggtgaccgcggacgaatccacgagcacagcctacatggaactgagcagcctgagatctgaggacacggccgtgtattattgtgcgagagctgaggccagtgatgggcgcgtggttaatgactactggggccagggaaccctggtcaccgtctcctc

SEQ ID NO: 5688 - DNA, 364 bp, Homo sapiens
caggtgcagctggtgcagtctggggctgaggtgaagaagcctgggtcctcggtgaaggtctcctgcaaggcttctggaggcaccttcaacagctatgctattagttgggtgcgccaggcccctggacaagggcttgcgtggataggagggatcatccctgtctttggaacaacaaactacgcacagaagttccagggcagagtcacgattaccgcggacgaatccacgagcacagcctacatggagctgagcagcctgagatctgaggacacggccgtgtattattgtgcgagagggctcagtggatggtatttaagctggttcgacccctggggccagggaaccctggtcaccgtctcctcag

SEQ ID NO: 5689 - DNA, 363 bp, Homo sapiens
gaagtgcagctggtggaatctgggggaggcttggtacagcctggcaggtccctgagactctcctgtgcagcctctggattcacctttgagaattatgccatgaactgggtccgccaagctccagggaagggcctcgagtgggtctcatttattagttggaatagtggtagcagagtctatgcggactctgtgaagggccgattcaccatctccagagacaacgccaaaaagtccgtgtatctgcaaatggacagtctgagagctgacgacacggccatgtattactgtgcaaaagatatgggctgggaggtgtttcaaggtttggacgcctggggccaagggaccacggtcaccgtctcctca

SEQ ID NO: 5690 - DNA, 361 bp, Homo sapiens
gaggtgcagctggtggagtctggaggaggcttgatccagcctggggggtccctgagactctcctgtgcagcctctgggttcaccgtcagtagcaactacatgagctgggtccgccaggctccagggaaggggctggagtgggtctcagttatttatagcggtggtagcacatactacgcagactccgtgaagggccgattcaccatctccagagacaattccaagaacacgctgtatcttcaaatgaacagcctgagagccgaggacacggccgtgtattactgtgcgagagtaggagaggttcggggagttaactggttcgacccctggggccagggaaccctggtcaccgtctcctcag

SEQ ID NO: 5691 - DNA, 364 bp, Homo sapiens
gaggtgcagctggtgcagtctggagcagaggtgaaaaagcccggggagtctctgaagatctcctgtaagggttctggatacagctttaccagctactggatcggctgggtgcgccagatgcccgggaaaggcctggagtggatggggatcatctatcctggtgactctgataccagatacagcccgtccttccaaggccaggtcaccatctcagccgacaagtccatcagcaccgcctacctgcagtggagcagcctgaaggcctcggacaccgccatgtattactgtgcgagacggctagcagtggctggtaccgggtggttcgacccctggggccagggaaccctggtcaccgtctcctcag

SEQ ID NO: 5692 - DNA, 364 bp, Homo sapiens
gaggtgcagctggtgcagtctggagcagaggtgaaaaagccgggggagtctctgaagatctcctgtaagggttctggatacagctttaccagctactggatcggctgggtgcgccagatgcccgggaaaggcctggagtggatggggatcatctatcctggtgactctgataccagatacagcccgtccttccaaggccaggtcaccatctcagccgacaagtccatcaccaccgcctacctgcagtggagcagcctgaaggcctcggacaccgccatgtattactgtgcgagacggaccgtagctggtatattttactggttcgacccctggggccagggaaccctggtcaccgtctcctcag

SEQ ID NO: 5693 - DNA, 364 bp, Homo sapiens
caggtccagctggtacagtctggggctgaggtgaagaagcctggggcctcagtgaaggtctcctgcaaggtttccggatacaccctcactgaattatccatgcactgggtgcgacaggctcctggaaaagggcttgagtggatgggaggttttgatcctgaagatggtgaaacaatctacgcacagaagttccagggcagagtcaccatgaccgaggacacatctacagacacagcctacatggagctgagcagcctgagatctgaggacacggccgtgtattactgtgcaacagctccccccctcggtgaacccaactggttcgacccctggggccagggaaccctggtcaccgtctcctcag

SEQ ID NO: 5694 - DNA, 359 bp, Homo sapiens
ggtgcagctggtggagtctgggggagacttggtacagcctggggggtccctgagactctcctgtgcagcctctggattcaccttcagtagctacgacatgcactgggtccgccaagctacaggaaaaggtctggagtgggtctcagttattggtactgctggtgacacatactatccagactccgtcaagggccgcttcaccatctccagagaaaatgccaagaactccttgtatcttcaaatgaacagcctgagagccggggacacggctgtgtattactgtgcaagagtcgggtggctacacctaaaggggtacttcgatctctggggccgtggcaccctggtcactgtctcctcag

SEQ ID NO: 5695 - DNA, 376 bp, Homo sapiens
gaggtgcagctgttggagtctgggggaggcttggtacagcctggggggtccctgagactctcctgtgcagcctctggattcacctttagcagctatgccatgagctgggtccgccaggctccagggaaggggctggagtgggtctcagctattagtggtagtggtggtagcacatactacgcagactccgtgaagggccggttcaccatctccagagacaattccaagaacacgctgtatctgcaaatgaacagcctgagagccgaggacacggccgtatattactgtgcgaaacaaattcgcgtattactatggttcagggagccggactcgttcgacccctggggccagggaaccctggtcaccgtctcctcag

SEQ ID NO: 5696 - DNA, 379 bp, Homo sapiens
caggtgcagctgcaggagtcgggcccaggactggtgaagccttcacagaccctgtccctcacctgcactgtctctggtggctccatcagcaggggtggttactactggagctggatccgccagcacccagggaagggcctggagtggattgggtacatccattacaatgggagcacctactacaacccgtccctcaggagtcgcgttattatctcgaaagacacgtctaagaaccagttttacgtgaagctgagctctgtgactgccgcggacacggccgtgtattactgtgcgagaggcatccggatgtggtatagcagcgtctgggaaaactggttcgacccctggggccagggaaccctggtcaccgtctcctcag

SEQ ID NO: 5697 - DNA, 370 bp, Homo sapiens
caggttcagctggtgcaatctggagctgaggtgaagaggcctggggcctcagtgaaggtctcctgcaaggcttctggttacacctttctcagttatggtattagttgggtgcgacaggcccctggacaagggcttgagtggatgggatggatccacaatggtaacacaaactatgcacagaagctccggggcagagtcaccatggccacagacacatccacgagcacagcctacatggagctgaggagcctgagatctgacgacacggccgtgtattactgtgcgagagttgggtaccagctgctattcttcctgtcggaagatgcttttgatatctggggccaagggacaatggtcaccgtctcttcag

SEQ ID NO: 5698 - DNA, 376 bp, Homo sapiens
caggtccagctggtgcagtctggggctgaggtgaagaagcctgggtcctcagtgaaggtctcctgcaaggcttctggaggcaccttcagcagctatgctatcagctgggtgcgacaggcccctggacaagggcttgagtggctgggaagtatcatccctatccttgctatagcaaactacgcacagaagttccagggcagagtcacgatcaccgcggacaaatccacgagcacagcctacatggagctgaccagcctgagatctgaggacacggccgtgtatttctgtgcgagagattcttgtggtggtggtagctgctaccccgggcaatggttcgacccctggggccagggaaccctggtcaccgtctcctcag

SEQ ID NO: 5699 - DNA, 374 bp, Homo sapiens
caggtccagttggtgcagtctggggctgaggtgaagaagccagggtcctcagtgaaggtctcctgcacggcctctggaggcacattcggccactatgctttcagctgggtgcgacaggcccctggacaaggacttgaatggatgggagggatcgtcactttcgttgggatggcgaactacgcacagaagtttcagggcagagtcacgattaccgcggacaggtccacgaacacagcctacatggaactccacagcctgaagtatgaagacacggccatatatttttgtgcgacttcgaaaggcggcgccataactggaacaacgtggggctgccacggtccctggggccagggaactctggtcaccgtctcctc

SEQ ID NO: 5700 - DNA, 376 bp, Homo sapiens
caggtccagctggtgcagtctggggctgaggtgaagaagcctgggtcctcagtgaaggtctcctgcaaggcttctggaggcaccttcagcagctatgctatcagctgggtgggacaggcccctggacaagggcttgagtggatgggagggatcatccctatccttggtatagcaaactacgcacagaagttccagggcagagtcacgattaccgcggacaaatccacgagcacagcctacatggagctgagcagcctgagatctgaggacacggccgtgtattactgtgcgagagactattgtactggtggtgtatgccagggtccccactggttcgacccctggggccagggaaccctggtcaccgtctcctcag

SEQ ID NO: 5701 - DNA, 379 bp, Homo sapiens
cagatcaccttgaaggagtctggtcctacgctggtggaacccacacagaccctcacgctgacctgcaccttttctgggttctcactcaccacttatacagtgggtgtgggctggatccgtcagcccccaggaaaggccctggagtggcttgcagtcatttattgggataatgataagcgatacagcccagttttgagcagcagactcagcatcaccaaggacacctccaaaaatgaggtggtcctgacaatgaccaatgtggaccctgtggacacagccacatatcagtgtgcacgagtcacaattacatatgggggagttagcggtcttgacgcctttgatgtctggggccaagggacattggtcaccgtgtcttcag

SEQ ID NO: 5702 - DNA, 361 bp, Homo sapiens
gaggtgcagctggtggagtctgggggaggcttggtacagcctggggggtccctgagactctcctgtgcagcctctggattcaccttcagtagctacgacatgcactgggtccgccaagctacaggaaaaggtctggagtgggtctcagctattggtactgctggtgacacatactatccaggctccgtgaagggccgattcaccatctccagagaaaatgccaagaactccttgtatcttcaaatgaacagcctgagagccggggacacggctgtgtattactgtgcaagaggcgatagcagtggctggccttactactttgactactggggccagggaaccctggtcaccgtctcctcag

SEQ ID NO: 5703 - DNA, 376 bp, Homo sapiens
caggtgcgactggtggagtctgggggaggcttggtcgagcctggagggtccctgacactctcctgtgcggcgtctgggttcaccttcagtgacttctacatgacctggatccgccaggctccagggaaggggctggagtgggtttcatacattagtcccagtggtaataccatatactacggagactctgtgaggggccgattcaccatcttcagggacaacgccaagaactcactgtatctgcaaatgaacaacctgagagccgaggacacggccgtctattattgtgcgagagatgaatactttcgggcctacgcgctccagggcaactggttcgactcctggggccagggaaccctggtcaccgtctcctcag

SEQ ID NO: 5704 - DNA, 376 bp, Homo sapiens
caggtgcagctggtggagtctgggggaggcgtggtccagcctgggaggtccctgagactctcctgtgcagcctctggattcaccttcagtagctatggcatgcactgggtccgccaggctccaggcaaggggctggagtgggtggcagttatatcatatgatggaagtaataaatactatgcagactccgtgaagggccgattcaccatctccagagacaattccaagaacacgctgtatctgcaaatgaacagcctgagagctgaggacacggctgtgtattactgtgcgaaagccatgcgattataccagctgctattggggtgggatgcttttgatatctggggccaagggacaatggtcaccgtctcttcag

SEQ ID NO: 5705 - DNA, 376 bp, Homo sapiens
caggtgcagctggtgcagtctggggctgaggtgaagaagcctggggcctcagtgaaggtttcctgcaaggcatccggatacaccatcaccagctactatatacactgggtgcgacaggcccctggacaagggcttgagtggatgggaataatcaaccctagtggtggtagcacaagctacgcacagaagttccagggcagagtcaccatgacgagggacacgtccacgagcacagtctacatggagctgagcagcctgagatctgaggacacggccgtgtattactgtgcgagagggggagattactatgatagtagtgcctatggagatgcttttgatatctggggccaagggacaatggtcaccgtctcttcag

SEQ ID NO: 5706 - DNA, 376 bp, Homo sapiens
caggtgcagctgcaggagtcgggcccaggactggtgaagccttcggggaccctgtccctcacctgcgctgtctctggtggctccatcagcagtagtaactggtggagttgggtccgccagcccccagggaaggggctggagtggattggggaaatctatcatagtgggagcaccaactacaacccgtccctcaagagtcgagtcaccatatcagtagacaagtccaagaaccagttctccctgaagctgagctctgtgaccgccgcggacacggccgtgtattactgtgcgagagggtattgtagtggtggtagctgctacggtgggtactactttgactactggggccagggaaccctggtcaccgtctcctcag

SEQ ID NO: 5707 - DNA, 376 bp, Homo sapiens
gaggtgcagctggtgcagtctggagcagaggtgaaaaagcccggggagtctctgaagatctcctgtaagggatctggatacagctttaccagctactggatcgcctgggtgcgccagatgcccgggaaaggcctggagtggatggggatcatctatcctggtgactctgaaaccagatacagcccgtccttccaaggccaggtctccatctcagccgacaagtccatcagcaccgcctacctgcagtggagcagcctgaaggcctcggacaccgccatgtattactgtgcgagaaccttcttctttgagggtactgcttattactccccctactttgactactggggccagggaaccctggtcaccgtctcctcag

SEQ ID NO: 5708 - DNA, 376 bp, Homo sapiens
caggtgcagctggtggagtctgggggaggcttggtcaagcctggagggtccctgagactctcctgtgcagcctctggattcaccttcagtgactactacatgagctggatccgccaggctccagggaaggggctggagtgggtttcatacattagtagtagtggtagtaccatatactacgcagactctgtgaagggccgattcaccatctccagggacaacgccaagaactcactgtatctgcaaatgaacagcctgagagccgaggacacggccgtgtattactgtgcgagagattggtattgtagtagtaccagctgctatgccgggggtattgactactggggccagggaaccctggtcaccgtctcctcag

SEQ ID NO: 5709 - DNA, 376 bp, Homo sapiens
caggttcagctggtgcagtctggagctgaggtgaagaagcctggggcctcagtgaaggtctcctgcaaggcttctggttacacctttaccagctatggtatcagctgggtgcgacaggcccctggacaagggcttgagtggatgggatggatcagcgcttacaatggtaacacaaactatgcacagaagctccagggcagagtcaccatgaccacagacacatccacgagcacagcctacatggagctgaggagcctgagatctgacgacacggccgtgtattactgtgcgagagcgcccccagtactggtggtgtatgctagtaattggtcttttgactactggggccagggaaccctggtcaccgtctcctcag

SEQ ID NO: 5710 - DNA, 376 bp, Homo sapiens
caggtgcagctggtgcagtctggggctgaggtgaagaagcctggggcctcagtgaaggtctcctgcaaggcttctggatacaccttcaccggctactatatgcactgggtgcgacaggcccctggacaagggcttgagtggatgggatggatcaaccctaacagtggtggcacaaactatgcacagaagtttcagggcagggtcaccatgaccagggacacgtccatcatcacagcctacatggaactgagcaggctgagatctgacgacacggccgtgtattactgtgcgaggtaccccaattactatgatagtagtggttacaaagggtcttttgactactggggccagggaaccctggtcaccgtctcctcag

SEQ ID NO: 5711 - DNA, 375 bp, Homo sapiens
caggtgcagctggtggagtctgggggaggcgtggtccagcctgggaggtccctgagactctcctgtgcagcctctggattcaccttcagtagctatggcatgcactgggtccgccaggctccaggcaaggggctggagtgggtggcaattatatcatatgatggaagtaataaatactatgcagactccgtgaagggccgattcaccatctccagagacaattccaagaacacgctgtttctgcaaatgaacagcctgagagctgaggacacggctgtgtatttctgtgcgaaagaggtgcgatttttggagtggttattattaagcgcggggatggacgtctggggccaagggaccacggtcaccgtctcctca

SEQ ID NO: 5712 - DNA, 375 bp, Homo sapiens
caggtgcagctggtgcagtctggggctgaggtgaagaagcctggggcctcagtgaaggtctcctgcaaggcttctggatacaccttcaccggctactatatgcactgggtgcgacaggcccctggacaagggcttgagtggatgggacggatcaaccctaacagtggtggcacaaactatgcacagaagtttcagggcagggtcaccatgaccagggacacgtccatcagcacagcctacatggagctgagcaggctgagatctgacgacacggccgtgtattactgtgcggcggacagtggctacgattataattactactactactactacatggacgtctggggcaaagggaccacggtcaccgtctcctca

SEQ ID NO: 5713 - DNA, 364 bp, Homo sapiens
gaggtgcagctggtggagtctgggggaggcctggtcaagcctggggggtccctgagactctcctgtgcagcctctggattcaccttcagtatttatagcatgaactgggtccgccaggctccagggaaggggctggagtgggtctcatccattagtactagtagtaattacatatactacgcagactcagtgaagggccgattcaccatctccagagacaacgccaagaactcactgtatctgcaaatgaagagcctgagagccgaggacacggctgtgtattactgtgcgaggatagcggcaggtggtatttacaactggttcgacccctggggccagggaaccctggtcaccgtctcctcag

SEQ ID NO: 5714 - DNA, 373 bp, Homo sapiens
caggtgcagctacagcagtggggcgcaggactgttgaagccttcggagaccctgtccctcacctgcgctgtctatggtgggtccttcagtggttactactggagctggatccgccagcccccagggaaggggctggagtggattggggaaatcaatcatagtggaagcaccaactacaacccgtccctcaagagtcgagtcaccatatcagtagacacgtccaagaaccagttctccctgaagctgagctctgtgaccgccgcggacacggctgtgtattactgtgcgagagatcaccttgggggtttacgatttttggagtggttcccatttgactactggggccagggaaccctggtcaccgtctcctcag

SEQ ID NO: 5715 - DNA, 375 bp, Homo sapiens
caggtgcagctggtggagtctgggggaggcctggtcaagcctggagggtccctgagactctcctgtgcagcctctggattcaccttcagtgactactacatgagttggatccgccaggctccagggaaggggctggagtgggtttcatacattagtagtagtggtagtattatatactatgcagactctgtgaagggccgattcaccatctccagggacaccgccaagaactcactgtatctgcaaatgaacagcctgagagccgaggacacggccgtctattattgtatgcatagtccaaccagctgttataataatgaaggccgccaatgtctggacgtctggggccaagggaccacggtcaccgtctcctca

SEQ ID NO: 5716 - DNA, 379 bp, Homo sapiens
caggtgcagctgcaggagtcgggcccaggactggtgaagccttcggagaccctgtccctcacctgcactgtctctggtggctccgtcagcagtaatagttactactggagctggatccggcagcccccagggaagggactggagtgggttggttatatctcttacagtgggagcaccaactacaacccctccctcaagagtcgagtcaccatatcagtagacacgtccaggaaccagttctccctgaagctgagctctgtgaccgctgcggacacggccgtgtattactgtgcgagagccgacaggggatattgtagtattaccaactgctatatctttgactgctggggccagggaaccctggtcaccgtctcctcag

SEQ ID NO: 5717 - DNA, 372 bp, Homo sapiens
gaggtgcagctggtggagtctggaggaggcttgatccagcctggggggtccctgagactctcctgtgcagcctctgggttcaacgtcagtgggaaatacatgagctgggtccgccaggctccaggggaggggctggagtgggtctcagttatttatagcggtgctggtatatcctacgcagactccgtgaagggccgattcaccatctccagagacaatcccaagaacacgctgtatcttcaaatgaacagcctgagagccgaggacacggccgtgaattactgtgcgagagacccgctctagcagctcgtcccctactactactacgttatggacgtctggggccaagggaccacggtcaccgtctcctca

SEQ ID NO: 5718 - DNA, 375 bp, Homo sapiens
caggtgcagctggtggagtctgggggaggcgtggtccagcctgggaggtccctgagactctcctgtgcagcgtctggattcaccttcagtagtcatgccatgcactgggtccgccaggctccaggcaaggggctggaatgggtggcagttgtctggtctgatggaagtaagaaattctctgcagactccgtgaagggccgattcaccatctccagagacaattccaagaacacgctgtctctgcaaatgaacagcctgagagtcgaggacacggctgtgtattactgtgcgaggataaattgtggtggtgactgctatcctgggtactacggtatggacgtctggggccaagggaccacggtcaccgtctcctca

SEQ ID NO: 5719 - DNA, 378 bp, Homo sapiens
caggtcaccttgaaggagtctggtcctgtgctggtgaaacccacagagaccctcacgctgacctgcaccgtctctgggttctcactcagcaatgctagaatgggtgtgagctggatccgtcagcccccagggaaggccctggagtggcttgcacacattttttcgaatgacgaaaaatcctacagcacatctctgaagagcaggctcaccatctccaaggacacctccaaaagccaggtggtccttaccatgaccaacatggaccctgtggacacagccacatattactgtgcacggtcctcgggttggtggctacggtccgactactactactacatggacgtctggggcaaagggaccacggtcaccgtctcctca

SEQ ID NO: 5720 - DNA, 372 bp, Homo sapiens
caggtgcagctgcaggagtcgggcccaggactggtgaagccttcggagaccctgtccctcacctgcactgtctctggtggctccatcagtagttactactggagctggattcggcagcccccagggaagggactggagtggattgggtatgtccattatagtgggagcaccaactacaacccctccctcgagggtcgagtcatcatatcagaagagacgtccaagaaccagttctccctgaagctgatctctgtgactgctgcggacacggccgtgtattactgtgcgagagaggtgttacgctatttccacatggggtactactactacatggacgtctggggcaaagggaccacggtcaccgtctcctca

SEQ ID NO: 5721 - DNA, 372 bp, Homo sapiens
caggtgcagctgcaggagtcgggcccaggactggtgaagccttcggagaccctgtccctcacctgcactgtctctggtggctccatcagtagttactactggagctggatccggcagcccccagggaagggactggagtggattggatatatcttttacagtgggagcaccaactacaaccccgccctcaagagtcgagtctccatgtcagtagacacgtccaagaatcagttctccctgaagctgagctctgtgaccgctgcggacacggccgtgtattactgtgcgagagtgtattcggaggtgactacggaagggctcgggctcggtatggacgtctggggccaagggaccacggtcaccgtctcctca

SEQ ID NO: 5722 - DNA, 384 bp, Homo sapiens
caggtgctgctacagcagtggggcgcaggactgttgaagccttcggagaccctgtccctctcctgcgctgtctatggtgggtccttcagtggttactactggagctggatccgccagcccccagggaaggggctggagtggattggggaaatcaatcatagtggaagcaccaactacaacccgtccctcaagagtcgagtcaccatatcagtagacacgtccaagaaccagttctccctgaagctgagctctgtgaccgccgcggacacggctgtgtattactgtgcgagagcggggtactgtggttcagggagttattacccccggtactactgctactacatggacgtctggggcaaagggaccacggtcaccgtctcctca

SEQ ID NO: 5723 - DNA, 387 bp, Homo sapiens
gaggtgcagctggtggagtctgggggaggcttggtccagcctggggggtccctgagactctcctgtgcagcctctggattcacctttagtagctattggatgagttgggtccgccaggctccagggaaggggctggagtgggtggccaacacaaggcaagatggaagtgagaaatactatgtggactctgtgaagggccgattcaccatctccagagacaacgccaagaactcactgtatctgcaaatgaacagactgagagccgaggacacggctgtgtattactgtgcgagagaggtggtctcctctgacgatttttggagtggttatcactattaccactacatggacgtctggggcaaagggaccacggtcaccgtctcctca

SEQ ID NO: 5724 - DNA, 387 bp, Homo sapiens
gaggtgcagctggtggagtctgggggaggcttggtccagcctggggggtccctgagactctcctgtgcagcctctggattcaccttcagtagctattggatgaactgggtccgccaggctccagggaaggggctggagtgggtggccaacataaagcaagatggaagtgagaaatactatgtggactctgtgaagggccgactcaccatctccagagacaacgccaagaactcactgtatctgcaaatgaacagcctgagagccgaggacacggctgtgtattactgtgcgaggtcgagttgggaggcaaaatatagcagtggctggtacaactactactactacatggacgtctggggcgaagggaccacggtcaccgtctcctca

SEQ ID NO: 5725 - DNA, 388 bp, Homo sapiens
caggtgcagctggtggagtctgggggaggcgtggtccagcctgggaggtccctgagactctcctgtgcagcctctggattcaccttcagtagctatggcatgcactgggtccgccaggctccaggcaaggggctggagtgggtggcagttatatcatatgatggaagtaataaatactatgcagactccgtgaagggccgattcaccatctccagagacaattccaagaacacgctgtatctgcaaatgaacagcctgagagctgaggacacggctgtgtattactgtgcgaaagatctcccccccggggatttttggagtggttattattttggaccctccaaccctgactactggggccagggaaccctggtcaccgtctcctcag

SEQ ID NO: 5726 - DNA, 379 bp, Homo sapiens
caggtgcagctgcaggagtcgggcccaggactggtgaagccttcacagaccctgtccctcacctgcgctgtctctggtggctccatcagcagtggtggttactactggagttggatccgccagcccccagggaagggcctggagtggattgggtacatctattacagtgggagcaccaactacaacccgtccctcaagagtcgagttaccatatcagtagacacgtccaagaaccagttctccctgcagctgagctctgtgactgtcgcagacacggccgtgtattactgtgccaggttcggggcgagtgcttcagggagttattataaaacccgctttgacttctggggccagggaaccctggtcaccgtctcctcag

SEQ ID NO: 5727 - DNA, 387 bp, Homo sapiens
caggtgcagctggtgcaatctgggtctgagttgaagaagcctggggcctcagtgaaggtttcctgcaaggcttctggatacaccttcactaactatgctatgaattgggtgcgacaggcccctggacaaggacttgagtggatgggatggatcaacaccaacactgggaacccaacgtatgcccagggcttcacaggacggtttgtcttctccttggacacctctgtcagcacggcttatttggaaatcagcagtctaaaggctgaggacactgccgtgtattactgtgcgagagatggggcgttttactatgggtcagggagttgggtctactactactactacatggacgtctggggcaaagggaccacggtcaccgtctcctca

SEQ ID NO: 5728 - DNA, 388 bp, Homo sapiens
caggtgcagctggtgcagtctggggctgaggtgaagaagcctgggtcctcggtgaaggtctcctgcaaggcttctggaggcaccttcagcagatatactatcagctgggtgcgacaggcccctggacaagggcttgagtggatgggagggatcatccctgtctttggtacagcaaactacgcacagaggttccagggcagagtcacgattaccgcggacgaatccacgagcacagcctacatggagttgagcagcctgagatctgaggacacggccgtgtattactgtgcgagagattcggttccgtattactatgatagtagtggtttctcctggggagactactttgactactggggccagggaaccctggtcaccgtctcctcag

SEQ ID NO: 5729 - DNA, 385 bp, Homo sapiens
caggtgcagctacagcagtggggcgcaggactgttgaagccttcggagaccctgtccctcacctgcgctgtctatggtgggtccttcagtggtaactactggagctggatccgccagcccccagggaaggggctggagtggattggggaaatcaatcatagaggaagcaccaactacaacccgtccctcaagagtcgagtctccatatcagtagacacgtccaagaaccagttctccctgaacttgaactctgtgaccgccgcggacacggctgtgtattactgtgcgagccccgagcctgatgattacatttgggggagttctcgtcccgacgccgatgcttttgatgtctggggccgagggacaatggtcaccgtctcttcag

SEQ ID NO: 5730 - DNA, 388 bp, Homo sapiens
gaagtgcaactggtggagtctgggggaggcttggtacagcctggcaggtccctgagactctcctgtgcagcctctggattcacctttgatgattatgccatgcactgggtccggcaagctccagggaagggcctggagtgggtctcaggtgttagttggaatggtggtaccatagactatgcggactctgtgaagggccgattcatcatcaccagagacaacgccaagaactccctatatctgcaaatgaacagtctgagacctgaggacacggccttgtatttctgtgcaaagggcggggattacatttgggggagttatcgttatagggagtattggggatacttccagcactggggccagggcaccctggtcaccgtctcctcag

SEQ ID NO: 5731 - DNA, 384 bp, Homo sapiens
gaggtgcagctggtggagtcggggggaggcttggtacagcctggggggtccctgagactctcctgtgcagcctctggattcaccttcagtagctacgacatgcactgggtccgccaagctacaggaaaaggtctggagtgggtctcagctattggtactgctggtgacacatactatccaggctccgtgaagggccgattcaccatctccagagaaaatgccaagaactccttgtatcttcaaatgaacagcctgagagccggggacacggctgtgtattactgtgcaagagctgagtcaatgttttatgattcaggggggcgctactactactactactacatggacgtctggggcaaggggaccacggtcaccgtctcctca

SEQ ID NO: 5732 - DNA, 385 bp, Homo sapiens
caggtgcagctacaggagtcgggcccaggactggtgaagccttcggagaccctgtccctcacctgcactgtctctggtggctccatcagtagttactactggagctggatccggcagcccccagggaagggactggagtggattggatatatctattacagtgggagcaccaagtacaacccctccctcaagagtcgagtcaccatatcagaagacacgtccaagaaccagttctccctgaagctgacctctgtgaccgctgcggacacggccgtgtattactgtgcgagagatcggtgggattactacgatagtattggttattactcccagtcctggtacttcgatctctggggccgtggcaccctggtcactgtctcctcag

SEQ ID NO: 5733 - DNA, 378 bp, Homo sapiens
caggtccagctggtgcagtctggggctgaggtgaagaagcctgggtcctcagtgaaggtctcctgcaaggcttctggaggcaccttcagcagctatgctatcagctgggtgcgacaggcccctggacaagggcttgagtggatgggagggatcatccctatccttggtgtagcaaactacgcacagaagttccggggcagagtcacgattaccgcggacaaatccacgagcacagcctacatggagctgagcagcctgagatctgaggacacggccgtgtattactgtgcgagcccgggtatagcagtggctgcattcaactactactactactacatggacgtctggggcaaagggaccacggtcaccgtctcctca

SEQ ID NO: 5734 - DNA, 378 bp, Homo sapiens
gaggtgcaggtgttggagtctgggggagacttggtacagcctggggggtccctgagactctcctgtgcagcctctggattcacctttagcagccatgccatgagctgggtccgccaggctccagggaaggggctggagtgggtctcaactattagtggtagtggtggtagcacatactacgcaggctccgtgaagggccgcttcaccatctccagagacaattccaagaacacgctgtatctgcaaatgaacagcctgagagccgaggacacggccgtatattactgtgcgaaagatctggagtacgctgactacgattactactactactacggtatggacgtctggggccaggggaccacggtcaccgtctcctca

SEQ ID NO: 5735 - DNA, 380 bp, Homo sapiens
cagctgctgctgcaggagtcgggcccaggactggtgaagccctcggagaccctgtccctcacctgcactgtctctggtggctccatcaccagtggtagttactactggggctggattcgccagcccccagggaaggggctggaatggattggaagtatctattatagtgggagcatctactacaacccgtccctcaagagtcgagtcaccatgtccgtagacacgtccaagaaccagttctccctgaagctgagctctgtgaccgccgcagacacggctgtgtattactgtgcgagacaaccccggccaacggtagctgctatgcactactactactacatggacgtctggggcaaagggaccacggtcaccgtctcctc

SEQ ID NO: 5736 - DNA, 382 bp, Homo sapiens
cagctgcagctgcaggagtcgggcccaggactggtgaagccttcggagaccctgtccctcacctgcactgtctctggtggctccatcagcagtagtagttactactggggctggatccgccagcccccagggaaggggctggagtggattgggagtttctattatagtgggaccacctactacaacccgtccctaaagactcgagtcaccatatccggagacacgtccaagaaccagttctccctgaggttgagctctgtgaccgccgcagacacggctgtgtattactgtgcgacacatggagtctggtcggtggtggtagctgctactcagtacgcttttgatatctggggccaagggacaatggtcaccgtctcttcag

SEQ ID NO: 5737 - DNA, 375 bp, Homo sapiens
caggttcagctggtgcagtctggagctgaggtgaagaagcctggggcctcagtgaaggtctcctgcaaggcttctggttacacctttaccagctatggtatcagctgggtgcgacaggcccctggacaagggcttgagtggatgggatggatcagcgcttacaatggtaacacaaactatgcacagaagctccagggcagagtcaccatgaccacagacacatccacgagcacagcctacatggagctgaggagcctgagatctgacgacacggccgtgtattactgtgcgagagatggtctcccgtattacgatttttggagtggttatcttatggacgtctggggccaagggaccacggtcaccgtctcctca

SEQ ID NO: 5738 - DNA, 375 bp, Homo sapiens
caggttcagctggtgcagtctggagctgaggtgaagaagcctggggcctcagtgaaggtctcctgcaaggcttctggttacacctttaccagctatggtatcagctgggtgcgacaggcccctggacaagggcttgagtggatgggatggatcagcgcttacaatggtaacacaaactatgcacagaagctccagggcagagtcaccatgaccacagacacatccacgagcacagcctacatggagctgaggagcctgagatctgacgacacggccgtgtattactgtgcgaggcgaggaaataactggaactacgtctactactactacggtatggacgtctggggccaagggaccacggtcaccgtctcctca

SEQ ID NO: 5739 - DNA, 378 bp, Homo sapiens
caggtgcagctggtgcaatctgggtctgagttgaagaagcctggggcctcagtgaaggtttcctgcaaggcttctggatacaccttcagtaactatgctatgaattgggtgcgacaggcccctggacaagggcttgagtggatgggatggatcaacaccaacactgggaacccaacgtatgcccagggcttcacaggacggtttgtcttctccttggacacctctgtcagcacggcatatctgcagatcagcagcctaaaggctgaggacactgccgtgtattactgtgcgagagacggcaccgagacagttggtagcatctactactactactacatggacgtctggggcaaagggaccacggtcaccgtctcctca

SEQ ID NO: 5740 - DNA, 385 bp, Homo sapiens
gaggtgcagctggtggagtctgggggaggcttggtaaagcctggggggtcccttagactctcctgtgcagcctctggattcagtttcagtaacgcctggatgagctgggtccgccaggctccagggaaggggctggagtgggttggccgtattaaaagcaaaactgatggtgaaacaacagactacgctgcacccgtgaaaggcagattcaccatctcaagagatgattcaaaaaacacgctgtatctgcaaatgaagagcctgaaaaccgaggacacagccgtgtattactgtaccaccgttacgtattactatgatagtagtgcttacttgaatgatgcttttgacatctggggccaagggacaatggtcaccgtctcttcag

SEQ ID NO: 5741 - DNA, 385 bp, Homo sapiens
gaggtgcagctggtggagtctgggggaggcttggtaaagcctggggggtcccttagactctcctgtgcagcctctggattcactttcagtaacgcctggatgagctgggtccgccaggctccagggaaggggctggagtgggttggccgtattaaaagcaaaactgatggtgggacaacagactacgctgcacccgtgaaaggcagattcaccatctcaagagatgattcaaaaaacacgctgtatctgcaaatgaacagcctgaaaaccgaggacacagccgtgtattactgtaccagaacaacgtattactatgatagtagtgcttatccgaatgatgcttttgatatctggggccaagggacaatggtcaccgtctcttcag

SEQ ID NO: 5742 - DNA, 382 bp, Homo sapiens
cagctgcagctgcaggagtcgggcccaggactggtgaagccttcggagaccctgtccctcacctgcactgtctctggtggctccatcagcagtagtagttactactggggctggatccgccagcccccagggaaggggctggagtggattgggagtatctattatagtgggagcacctactacaatttgtccctcaagagtcgagtcaccatatccgtagacacgtccaagaaccagttctccctgaagctgagctctgtgaccgccgcagacacggctgtgtattactgtgcgagacatcatcgtatagcagctcgtggtgggacatgggcggactggttcgacccctggggccagggaaccctggtcaccgtctcctcag

SEQ ID NO: 5743 - DNA, 382 bp, Homo sapiens
cagatcaccttgaaggagtctggtcctacgctggtgaaacccacacagaccctcacgctgacctgcaccttctctgggttctcactcagcactagtggagtgggtgtgggctggatccgtcagcccccaggaaaggccctggagtggcttgcactcatttattgggatgatgataagcgctacagcccatctctgaagagcaggctcaccatcaccaaggacacctccaaaaaccaggtggtccttacaatgaccaacatggaccctgtggacacagccacatattactgtgcacacagctcgggggggtgtagtcttaccagctgctatgagggctggttcgacccctggggccagggaaccctggtcaccgtctcctcag

SEQ ID NO: 5744 - DNA, 379 bp, Homo sapiens
caggtccagcttgtgcagtctggggctgaggtgaagaagcctggggcctcagtgaaggtttcctgcaaggcttctggatacaccttcagtgattatactatacattgggtgcgccaggcccccggacaaaggcttgagtggatgggatggatcaacgctggcaatggtaacacaaaatattcacagaacttgcagggcagagtcaccattaccagggacacattcgcgaacacagcgtacttggacttgagtagcctgagatctgaagacacggctgtctattattgtgcgagagagggttacgattttcggagtgcttattattggggcaattggttcgacccctggggccagggaaccctggtcaccgtctcctcag

SEQ ID NO: 5745 - DNA, 376 bp, Homo sapiens
caggtgcagctgcaggagtcgggcccaggactggtgaagccttcggagaccctgtccctcacctgcactgtctctggtggctccatcagtagttactactggagctggatccggcagcccccagggaagggactggagtggattgggtatatctattacagtgggagcaccaactacaacccctccctcaagagtcgagtcaccatatcagtagacacgtccaagaaccagttctccctgaagctgagctctgtgaccgctgcggacacggccgtgtattactgtgcgagaggggtaggacgaattactatggttcagggagttattttctggttcgacccctggggccagggaaccctggtcaccgtctcctcag

SEQ ID NO: 5746 - DNA, 379 bp, Homo sapiens
caggtccagctggtgcagtctggggctgaggtgaagaagcctgggtcctcagtgaaggtctcctgcaaggcttctggaggcaccttcagtagctatgctattagctgggtgcgacaggcccctggacaagggcttgagtggatgggagggatcatccctctcctcgatatagaaaactacgcacagaagttccagggcagagtcacggttaccgcggacaaatccacgagcacagcctacatggagctgagcagcctgagatctgaggacacggccgtgtattactgtgtgagagattctgaccttttttgtggtagtaccaactgttatactcttttcgactactggggccagggaacccgggtcaccgtctcctcag

SEQ ID NO: 5747 - DNA, 393 bp, Homo sapiens
caggttcagctggtgcagtctggagctgaggtgaagaagcctggggcctcagtgaaggtctcctgcaaggcttctggttacacctttaccagctatggtatcagctgggtgcgacaggcccctggacaagggcttgagtggatgggatggatcagcgcttacaatggtaacacaaactatgcacagaagctccagggcagagtcaccatgaccacagacacatccacgagcacagcctacatggagctgaggagcctgagatctgacgacacggccgtgtattactgtgcgagagaccaccctctaggatattgtagtagtaccagctgctatgatcttaactactactacatggacgtctggggcaaagggaccacggtcaccgtctcctca

SEQ ID NO: 5748 - DNA, 393 bp, Homo sapiens
caggtgcagctggtgcagtctggggctgaggtgaagaagcctgggtcctcggtgaaggtctcctgcaaggcttctggaggcaccttcagcagctatggtatcagttgggtgcgacaggcccctggacaagggcttgagtggatgggagggatcatccgtatctttggtccagcaaagtacgcacagaagtttcagggcagagtcacgattaccgcggacgaatccacgaggacagtctacatggagttgagcagcctgagatctgaggacacggccgtgtattattgtgcgagagactttatggaaggtattactatgattcggggagttacctttccccacttctacggttcggacgtctggggccaagggaccacggtcaccgtctcctca

SEQ ID NO: 5749 - DNA, 394 bp, Homo sapiens
aggtgcacctggtggagtctgggggaggcctggtcaggcctggggggtccctgagactctcctgtgcagcctctggattcactttcaatacatatgacaataactgggtccgccaggctccagtgaaggggctggagtgggtctcatccattagttctttttggacttacatataatatgcagacttactgaagggccgagtcaccatctccagagacaacgccgtgagctcactgtatctgcaaatgaacagcctgagagccgaggacacggctgtctattactgtgcgtgaaaaacgatttttggagtagatgggaacgagtgcagccccacgcgacggtcttacgggacttcacttatggggccagggaaccctggtcaccgtctcctcag

SEQ ID NO: 5750 - DNA, 382 bp, Homo sapiens
caggtgcagctgcaggagtcgggcccaggactggtgaagccttcacagaccctgtccctcacctgcgctgtctctggtggctccatcagcagtggtgattactactggagttggatccgccagcccccagggcagggcctggagtggattgggtacatctattacagtggattcaactcccaaaacccgtccctcaagagtcgagtcaccatatcagtagacacgtccaggaaccagttctccctgaagctgagctctgtgactgccgcagacacggccgtgtattactgtgtcagaggtgaacgagttacatttgggggaactgtcgtaacggcggcttttgatatctggggcccaggggccatggtcaccgtctcttcag

SEQ ID NO: 5751 - DNA, 397 bp, Homo sapiens
cagctgcagctgcaggagtccggctcaggactggtgaagccttcacagaccctgtccctcacctgcgctgtctctggtggctccatcagcagtggtggttactcctggagctggatccggcagctaccagggaagggcctggagtgcattgggtacatctatcatagtgggatcacctactacaacccgtccctcaagagtcgagtcaccatatcagtagacaggtccaagaaccagttctccctgaagctgagctctgtgaccgccgcggacacggccgtctattactgtgccagagcccgcattggactaggatattgtagtggtggtagttgttactctcccccgcgatactttgactactggggccagggaaccctggtcaccgtctcctcag

SEQ ID NO: 5752 - DNA, 355 bp, Homo sapiens
caggtacagctgcagcagtcaggtccaggactggtgaagccctcgcagaccctctcactcacctgtgccatctccggggacagtgtctctaataagaatgttgcttggaactggatcaggcagtccccatcgagaggccttgagtggctgggaaggacatactacaggtccaagtggcataatgattatgcagtatctgtgaaaagtcgaataaccatcaacccagacacatccaggaaccagttctccctgcagctgaactctatgactcccgaggacacggctatgtattactgtgcacgaggaggccgctttgacttctggggccagggaaccctggtcaccgtctcctcag

SEQ ID NO: 5753 - DNA, 346 bp, Homo sapiens
caggtgcagctgcaggagtcgggcccaggactggtgaagccttcggagaccctgtccctcagttgcactgtctctggtggctccatcagtaattactactggacctggatccggcagtccccagggaagggactggagtggattgggtatatcaatgacagtgggagaaccaaatacaatccctccctcaagagtcgagtcaccatatcagtagacacgtccaagaaccagttctccctgaaactgacctctgtgaccgctgcggacacggccgtgtattactgtgcgagaggtcatgtaataacccaaaactggggccagggaaccctggtcaccgtctcctcag

SEQ ID NO: 5754 - DNA, 349 bp, Homo sapiens
gaggtgcagctggtgcagtctggagcagaggtgaaaaagccgggggagtctctgaagatctcctgtaagggttctggatacagctttaccagctactggatcggctgggtgcgccagatgcccgggaaaggcctggagtggatggggatcatctatcctggtgactctgataccagatacagcccgtccttccaaggccaggtcaccatctcagccgacaagtccatcagcaccgcctacctgcagtggagcagcctgaaggcctcggacaccgccatgtattactgtgcgagacgggggctatggttagagtactggggccagggaaccctggtcaccgtctcctcag

SEQ ID NO: 5755 - DNA, 392 bp, Homo sapiens
caggtgcagctggtgcagtctggggctgaggtgaagaagcctggggcctcagtgaaggtttcctgcaaggcatctggatacaccttcaccagctactatgtgaactgggtgcgacaggcccctggacaagggcttgagtggatgggaataatgaaccctagtggtggtggcacaacctacgcacagaagttccagggaagagtcaccatggccagcgacacgtccacgagcacagtctacatggagttgagcagcctgagatctgaggacacggccgtgtattactgtgcgagatgggcagtactaccagccacgcgggaaggggggggggttactactactactactacatggacgtctggggcaaagggaccacggtcaccgtctcctca

SEQ ID NO: 5756 - DNA, 349 bp, Homo sapiens
gaggtgcagctggtggagtccgggggaggcttagttcagcctggggggtccctgagactctcctgtgcagcctctggattcaccttcagtagctactggatgcactgggtccgccaagctccagggaaggggctggtgtgggtctcacgtattaatagtgatgggagtagcacaagctacgcggactccgtgaagggccgattcaccatctccagagacaacgccaagaacacgctgtatctgcaaatgaacagtctgagagccgaggacacggctgtgtattactgtgcaagagccccttacctttttgactactggggccagggaaccctggtcaccgtctcctcag

SEQ ID NO: 5757 - DNA, 349 bp, Homo sapiens
caggtgcagctgcaggagtcgggcccaggactagtgaagcctgcggggaccctgtccctcacctgcgttgtctctggtggctccatcaccagtagtcattggtggagttgggtccgccagcccccaggacaggggctggagtggattggggaaatctatcctagtgggagcaccaactacaacccgtccctcaagagtcgagtcaccatatccgtagacaagtccaagaaccagttctccctgaatctgacctctgtgaccgccgcggacacggccctgtatttttgtgtgagaagagctggctggttcgacccctggggccagggaaccctggtcaccgtctcctcag

SEQ ID NO: 5758 - DNA, 340 bp, Homo sapiens
caggtgcagctgcaggagtcgggcccaggactggtgaagccttcggagaccctgtccctcaactgcactgtctctggtgcctccatcagtagtttctactggagctggatccggcagcccccagggaagggactggagttcattgggtatttctattacagtggcaacaccaactacaacccctccctcaagagtcgagtcaccatatcagtagacacgtccaagaaccacttctccctgaagctgagctctgtgaccgctgcggacacggccctgtattactgtgcgagagggtttggcgaagtttggggccagggaaccctggtcaccgtctccacag

SEQ ID NO: 5759 - DNA, 382 bp, Homo sapiens
caggtgcagctggtgcagtctggggctgaggtgaagaagcctggggcctcagtgaaggtctcctgcaaggcttctggatacaccttcaccggctactatatgcactgggtgcgacaggcccctggacaagggcttgagtggatgggatggatcaaccctaacagtggtggcacaaactatgcacagaagtttcagggcagggtcaccatgaccagggacacgtccatcagcacagcctacatggagctgagcaggctgagatctgacgacacggccgtgtattactgtgcgagaggaacgtattactatgatagtagtggttccccagcggccccacgatctgactactggggccagggaaccctggtcaccgtctcctcag

SEQ ID NO: 5760 - DNA, 388 bp, Homo sapiens
gaggtgcagctggtggagtctgggggaggcttggtccagcctggagggtccctgagactctcctgtgtagcctctggattctccttcagtgaccactacatggactgggtccgccaggctccagggaaggggctggagtgggttggccgtagtagaagcaaagctaacagttacataacagaatacgccgcgtctgtgaaaggcagattcagcatcgcaagagatgattcagagaactcactgtacctccaaatgaacagcctgagaaccgaggacacggccgtgtattattgtgctagagatgggagacattgtactggtggttcctgctactccgagtactactttgactactggggccagggaaccctggtcaccgtctccgcag

SEQ ID NO: 5761 - DNA, 352 bp, Homo sapiens
caggtgcagctgcaggagtcgggcccaggactggtgaagccctcacagaccctgtccctcacctgcactgtctctggtggctccgtcagcagttatggtcactactggagctgggtccgccagcacccagggaagggcctggagtggattgggtacatccattacagtgggaccacctactacaacccgtccctccagagtcgagtttccatatcaatagacacgtctaagaaccagttctccctgaaggtgaactctgtgactgccgcggactcggccgtatattactgtgcgagagaccatacagcccttgactcctggggccagggaaccctggtcaccgtctcctcag

SEQ ID NO: 5762 - DNA, 382 bp, Homo sapiens
gaggtgcagctgttggagtctgggggaggcttagtaccgcctggggggtccctgaaactctcctgtgcagcctctggattcacctttagtaattatgccctgacctgggtccgccaggctccagggaaggggctggagtgggtctctcttattactggtagtggctctagcacatactacgcagactccgtgaggggccggttcaccatctccagagacaattccaaggacattctgcacctggaaatgaacaacctgagagccgaggacacggccttatactactgtgcgaaagatcgggggtactactttgatcggagtggttattccctggtcggatttgactcctggggccagggaaccctggtcaccgtctcctcag

SEQ ID NO: 5763 - DNA, 366 bp, Homo sapiens
gaagtgcagctggtggagtctgggggaggcttggtacagcctggcaggtccctgagactctcctgtgcagcctctggattcacctttgatgattatgccatgcactgggtccggcaagctccagggaagggcctggagtgggtctcaggtattctttggaatagtggtagcataggctatgcggactctgtgaagggccgattcaccatctccagagacaacgccaagaactccctgtatctgcaaatgaacagtctgagagctgaggacacggccttgtattactgtgcaaaaatctggtgcgttacgatgactctgatggttttgatatatggggccaagggacaatggtcaccgtctcttcag

SEQ ID NO: 5764 - DNA, 382 bp, Homo sapiens
caggtgcagctggtgcagtctggggctgaggtgaagaagcctgggtcctcggtgaaggtctcctgcaaggcttctggaggcaccttcagcagctatgctatcagctgggtgcgacaggcccctggacaagggcttgagtggatgggagggatcatccctatctttggtacagcaaactacgcacagaagttccagggcagagtcacgattaccgcggacgaatccacgagcacagcctacatggagctgagcagcctgagatctgaggacacggccgtgtattactgtgcgagaggcccggcttattgtagtggtggtagctgctaccggaactggtacttcgatctctggggccgtggcaccctggtcactgtctcctcag

SEQ ID NO: 5765 - DNA, 382 bp, Homo sapiens
caggtgcagctggtggagtctgggggaggcgtggtccagcctgggaagtccctgagactctcctgtgcagcctctggattcaccttcagtaactatggcatgcactgggtccgccaggctccaggcaaggggctggagtgggtggcagttatatcatatgatggaagtaataaatactatgcagactccgtgaagggccgattcaccatctccagagacaattccaagaacacgctgtatctgcaaatgaacagcctgagaactgaggacacggctgtgtattactgtgcgaaaaatcttgggggatattgtagtggtggtagttgctacgggggggcctttgactactggggccagggaaccctggtcaccgtctcctcag

SEQ ID NO: 5766 - DNA, 382 bp, Homo sapiens
caggtgcagctggtggagtctgggggaggcgtggtccagcctgggaggtccctgagactctcctgtgcagcctctggattcaccttcagtagctatggcatgcactgggtccgccaggctccaggcaaggggctggagtgggtggcagttatatcatatgatggaagtaataaatactatgcagactccgtgaagggccgattcaccatctccagagacaattccaagaacacgctgtatctgcaaatgaacagcctgagagctgaggacacggctgtgtattactgtgcgagagagggcggtattgtagtggcggtagctgccacagctgccccttactttgactactggggccagggaaccctggtcaccgtctcctcag

SEQ ID NO: 5767 - DNA, 386 bp, Homo sapiens
gaggtgcagctggtggagtccgggggaggcttagttcagcctggggggtccctgagactctcctgtgcagcctctggattcaccttcagaagctactggatgaactgggtccgccaagctccagggaaggggctggtgtgggtctgacgtattaatagtgatgggagtagcacaagctacgcggactccgtgaagggccgaatcaccatctccagagacaacgccaagaacacgctgtatctgcaaatgaacagtctgagagccgaggacacggctgtgtattactgtgccccacccgtgaagatccgcgggatttttggagtggttattactactactactacatggacgtctggggcaaagggaccacggtcaccgtctcctca

SEQ ID NO: 5768 - DNA, 402 bp, Homo sapiens
caggtgcagctggtggagtctgggggaggcgtggtccagcctgggaggtccctgagactctcctgtgcagcctctggattcaccttcagtaattttggcatgcactgggtccgccaggctccaggcaaggggctggagtgggtggcagttatatcatatgatggaagtaataaatactatgcagactccgtgaagggccgattcaccatctccagagacaattccaagaacacgctgtatctgcaaatgaacagcctgagagctgaggacacggctgtgtattactgtgcgaaagatgccgcttattgtactaatggtgtatgttatagaggtgggagctacgaaaagtactactacggtatggacgtctggggccaagggaccacggtcaccgtctcctca

SEQ ID NO: 5769 - DNA, 400 bp, Homo sapiens
caggtgcagctggtggagtctgggggaggcgtggtccagcctgggaggtccctgagactctcctgtgcagcctctggattcaccttcagtagctatggcatgcactgggtccgccaggctccaggcaaggggctggagtgggtggcagttatatcatatgatggaagtaataaatactatgcagactccgtgaagggccgattcaccatctccagagacaattccaagaacacgctgtatctgcaaatgaacagcctgagagctgaggacacggctgtgtattactgtgcgaacgacgaacgatattgtagtggtggtacctgctactcccgctcccgcttattccgaactgaatacttccagcactggggccagggcaccctggtcaccgtctcctcag

SEQ ID NO: 5770 - DNA, 397 bp, Homo sapiens
gaggtgcagctgttggagtctgggggaggcttggtacagcctggggggtccctgagactctcctgtgcagcctctggactcacctttagcagctatgccatgagctgggtccgccaggctccagggaaggggctggagtgggtctcagctattagtggtagtggtggtagcacatactacgcagactccgtgaagggccggttcaccatctccagagacaattccaagaacacgctgtatctgcaaatgaacagcctgagagccgaggacacggccgtatattactgtgcgaaagacttcttgcgtcgacacgtattagcagcagttggtattcagggtgaccgcgactggtacttcgatctctggggccgtggcaccctggtcactgtctcctcag

SEQ ID NO: 5771 - DNA, 394 bp, Homo sapiens
cagctgcagctgcaggagtcgggcccaggactggtgaagccttcggagaccctgtccctcacctgcactgtctctggtggctccatcagcagtagtagttactactggggctggatccgccagcccccagggaaggggctggagtggattgggagtatctattatagtgggagcacctactacaacccgtccctcaagagtcgagtcaccatatccgtagacacgtccaagaaccagttctccctgaagctgagctctgtgaccgccgcagacacggctgtgtattactgtgcgagacattgggcctcttatgattacatttgggggagttatcgttttgcgtgttactggttcgacccctggggccagggaaccctggtcaccgtctcctcag

SEQ ID NO: 5772 - DNA, 381 bp, Homo sapiens
caggtgcagctggtacagtctggggctgaggtgaagaagcctggggcctcagtgaaggtctcctgcaaggcttctggatacaccttcaccggctactatatgcactgggtgcgacaggcccctggacaagggcttgagtggatgggatggatcaatcctaacagtggtggcacagactatgcacagaagtttcagggcagggtcaccatgaccagggacatgtccatcagcacagcctacatggagatgagcaggctgagatctgacgacacggccgtgtattactgtgcgatcctcgagtatcacgattctctcggtgacgaaaactcctattacggtatggacgtctggggccaagggaccacggtcaccgtctcctca

SEQ ID NO: 5773 - DNA, 346 bp, Homo sapiens
gaggttcagctgatggagtccgggggaggcttggtccagcctggggggtccctgaaactctcctgtgcagcctctgggttcaccttcagcgcctctgctgtgcactgggtccgccaggcttccgggaaagggctggagtgggttggccgcattagaagcaaacgtaacaattacgcgacaggatatgctgcgtcagtgaaaggcaggttcagcatctccagagatgattcaaagaacacggcgtttctgcaaatgaagagcctgaaaaccgaggacacggccgtgtattactgttctcaggacggacgcgcttggggccagggaaccctggtcaccgtctcgtcag

SEQ ID NO: 5774 - DNA, 322 bp, Homo sapiens
gacatccagatgacccagtctccatcctccctgtctgcatctgtaggagacagagtcaccatcacttgccgggcaagtcacagcattagtgactatttaaattggtatcagcagaaaccagggaaagcccctaagctcctgatctatgctgcatccagtttgcaaagtggggtcccatcaaggttcagtggcagtggatctgggacagatttcactctcaccatcagcagtctgcaacctaaagattttgcaacttactactgtcaacagagttacagtaacccattcactttcggccctgggaccaaagtggatatcaaac

SEQ ID NO: 5775 - DNA, 322 bp, Homo sapiens; identical to SEQ ID NO: 5774

SEQ ID NO: 5776 - DNA, 322 bp, Homo sapiens; identical to SEQ ID NO: 5774

SEQ ID NO: 5777 - DNA, 322 bp, Homo sapiens; identical to SEQ ID NO: 5774

SEQ ID NO: 5778 - DNA, 322 bp, Homo sapiens; identical to SEQ ID NO: 5774

SEQ ID NO: 5779 - DNA, 322 bp, Homo sapiens; identical to SEQ ID NO: 5774

SEQ ID NO: 5780 - DNA, 322 bp, Homo sapiens; identical to SEQ ID NO: 5774

SEQ ID NO: 5781 - DNA, 322 bp, Homo sapiens; identical to SEQ ID NO: 5774

SEQ ID NO: 5782 - DNA, 322 bp, Homo sapiens
gacatccagatgacccagtctccatcctccctgtctgcatctgtaggagacagagtcaccatcacttgccgggcaagtcagagcattagtgactatttaaattggtatcagcagaaaccagggaaagcccctaagctcctgatctatgctgcatccagtttgcaaagtggggtcccatcaaggttcagtggcagtggatctgggacagatttcactctcaccatcagcagtctgcaacctaaagattttgcaacttactactgtcaacagagttacagtaacccattcactttcggccctgggaccaaagtggatatcaaac

SEQ ID NO: 5783 - DNA, 322 bp, Homo sapiens; identical to SEQ ID NO: 5782

SEQ ID NO: 5784 - DNA, 322 bp, Homo sapiens; identical to SEQ ID NO: 5774

SEQ ID NO: 5785 - DNA, 322 bp, Homo sapiens; identical to SEQ ID NO: 5782

SEQ ID NO: 5786 - DNA, 322 bp, Homo sapiens; identical to SEQ ID NO: 5774

SEQ ID NO: 5787 - DNA, 322 bp, Homo sapiens; identical to SEQ ID NO: 5774

SEQ ID NO: 5788 - DNA, 322 bp, Homo sapiens; identical to SEQ ID NO: 5774

SEQ ID NO: 5789 - DNA, 322 bp, Homo sapiens; identical to SEQ ID NO: 5774

SEQ ID NO: 5790 - DNA, 322 bp, Homo sapiens; identical to SEQ ID NO: 5774

SEQ ID NO: 5791 - DNA, 322 bp, Homo sapiens; identical to SEQ ID NO: 5774

SEQ ID NO: 5792 - DNA, 322 bp, Homo sapiens; identical to SEQ ID NO: 5774

SEQ ID NO: 5793 - DNA, 322 bp, Homo sapiens; identical to SEQ ID NO: 5774

SEQ ID NO: 5794 - DNA, 322 bp, Homo sapiens; identical to SEQ ID NO: 5782

SEQ ID NO: 5795 - DNA, 322 bp, Homo sapiens; identical to SEQ ID NO: 5774

SEQ ID NO: 5796 - DNA, 322 bp, Homo sapiens; identical to SEQ ID NO: 5782

SEQ ID NO: 5797 - DNA, 322 bp, Homo sapiens; identical to SEQ ID NO: 5774

SEQ ID NO: 5798 - DNA, 322 bp, Homo sapiens; identical to SEQ ID NO: 5774

SEQ ID NO: 5799 - DNA, 322 bp, Homo sapiens; identical to SEQ ID NO: 5774

SEQ ID NO: 5800 - DNA, 322 bp, Homo sapiens; identical to SEQ ID NO: 5774

SEQ ID NO: 5801 - DNA, 322 bp, Homo sapiens; identical to SEQ ID NO: 5774

SEQ ID NO: 5802 - DNA, 322 bp, Homo sapiens; identical to SEQ ID NO: 5782

SEQ ID NO: 5803 - DNA, 322 bp, Homo sapiens; identical to SEQ ID NO: 5774

SEQ ID NO: 5804 - DNA, 322 bp, Homo sapiens; identical to SEQ ID NO: 5774

SEQ ID NO: 5805 - DNA, 322 bp, Homo sapiens; identical to SEQ ID NO: 5782

SEQ ID NO: 5806 - DNA, 322 bp, Homo sapiens; identical to SEQ ID NO: 5774

SEQ ID NO: 5807 - DNA, 322 bp, Homo sapiens; identical to SEQ ID NO: 5774

SEQ ID NO: 5808 - DNA, 322 bp, Homo sapiens; identical to SEQ ID NO: 5774

SEQ ID NO: 5809 - DNA, 322 bp, Homo sapiens; identical to SEQ ID NO: 5774

SEQ ID NO: 5810 - DNA, 319 bp, Homo sapiens
tcctatgagctgactcagccaccctcagtgtccgtgtccccaggacagacagccaccatcacctgctctggagataaattgggggatcagtttgtttcctggtatcggcagaggccaggccagtcccctgtagtggtcatctatcaagatatcaagcggccctcagggatccctgagcgattctctggctccaactctgggaacagagccactctgaccatcagggggacccaggctctggatgaggctgactattactgtcaggcgggggacagcgacactgtgcttttcggcggagggacccagctgaccgtcctag

SEQ ID NO: 5811 - DNA, 319 bp, Homo sapiens
tcctatgagctgactcagccaccctcagtgtccgtgtccccaggacagacagccaccatcacctgctctggagataaattgggggatcagtttgtttcctggtatcggcagaggccaggccagtcccctgtagtggtcatctatcaagatatcaagcggccctcagggatccctgagcgattctctggctccaactctgggaacagagccactctgaccatcagcgggacccaggctttggatgaggctgactattactgtcaggcgggggacagcgacactgtgcttttcggcggagggacccagctgaccgtcctag

SEQ ID NO: 5812 - DNA, 319 bp, Homo sapiens
tccaatgagctgactcagccaccctcagtgtccgtgtccccaggacagacagccaccatcacctgctctggagataaattgggggatcagtttgtttcctggtatcggcagaggccaggccagtcccctgtagtggtcatctatcaagatatcaagcggccctcagggatccctgagcgattctctggctccaactctgggaacagagccactctgaccatcagcgggacccaggctatggatgacgctgactattactgtcaggcgggggacagcgacactgtgcttttcggcggagggacccagctgaccgtcctag

SEQ ID NO: 5813 - DNA, 319 bp, Homo sapiens
tcctatgagctgactcagccaccctcagtgtccgtgtccccaggacagacagccaccatcacctgctctggagataaattgggggatcagtttgtttcctggtatcggcagaggccaggccagtcccctgtagtggtcatctatcaagatatcaagcggccctcagggatccctgagcgattctctggctccaactctgggaacagagccactctgaccatcagcgggacccaggctatggatgaggctgactattactgtcaggcgggggacagcgacactgtgcttttcggcggagggacccagctgaccgtcctag

SEQ ID NO: 5814 - DNA, 319 bp, Homo sapiens
tcctatgagctgactcagccaccctcagtgtccgtgtccccaggacagacagccaccatcacctgctctggagataaattgggggatcagtttgtttcctggtatcggcagaggccaggccagtcccctgtagtagtcatctatcaagatatcaagcggccctcagggatccctgagcgattctctggctccaactctgggaacagagccactctgaccatcagcgcgacccaggctttggatgaggctgactattactgtcaggcgggggacagcgacactgtgcttttcggcggagggacccagctgaccgtcctag

SEQ ID NO: 5815 - DNA, 319 bp, Homo sapiens; identical to SEQ ID NO: 5813

SEQ ID NO: 5816 - DNA, 319 bp, Homo sapiens; identical to SEQ ID NO: 5814

SEQ ID NO: 5817 - DNA, 319 bp, Homo sapiens; identical to SEQ ID NO: 5814

SEQ ID NO: 5818 - DNA, 319 bp, Homo sapiens; identical to SEQ ID NO: 5811

SEQ ID NO: 5819 - DNA, 319 bp, Homo sapiens; identical to SEQ ID NO: 5814

SEQ ID NO: 5820 - DNA, 319 bp, Homo sapiens; identical to SEQ ID NO: 5814

SEQ ID NO: 5821 - DNA, 319 bp, Homo sapiens
tcctatgagctgactcagccaccctcagtgtccgtgtccccaggacagacagccaccatcacctgctctggagataaattgggggatcagtttgtttcctggtatcggcagaggccaggccagtcccctgaagtggtcatctatcaagacatcaagcggccctcagggatccctgagcgattctctggctccaactctgggaacagagccactctgaccatcagcgggacccaggctatggatgaggctgactattactgtcaggcgggggacagcgacactgtgcttttcggcggagggacccagctgaccgtcctag

SEQ ID NO: 5822 - DNA, 319 bp, Homo sapiens; identical to SEQ ID NO: 5811

SEQ ID NO: 5823 - DNA, 319 bp, Homo sapiens; identical to SEQ ID NO: 5811

SEQ ID NO: 5824 - DNA, 319 bp, Homo sapiens
tcctatgaggtgactcagccaccctcagtgtccgtgtccccaggacagacagccaccatcacctgctctggagataaattgggggatcagtttgtttcctggtatcggcagaggccaggccagtcccctgtagtagtcatctatcaagatatcaagcggccctcagggatccctgagcgattctctggctccaactctgggaacagagccactctgaccatcagcgggacccaggctttggatgaggctgactattactgtcaggcgggggacagcgacactgtgcttttcggcggagggacccagctgaccgtcctag

SEQ ID NO: 5825 - DNA, 316 bp, Homo sapiens
tcctatgtgctgactcagccaccctcggtgtcagtggccccaggacagacggccaggatttcctgtgggggagacaagattggaagtaaaaatgtgcactggtaccagcagaagccaggccaggcccctgtactggtcgtctatgatgacagcgaccggccctcagggatccctgagcgattctctggctccaactctggcaacacggccaccctgaccatcaccagggtcgaagccagggatgaggccgactattactgtcaggtgtgggatcgtagtagtgtcttcggaactgggaccaaggtctccgtcctag

SEQ ID NO: 5826 - DNA, 316 bp, Homo sapiens; identical to SEQ ID NO: 5825

SEQ ID NO: 5827 - DNA, 316 bp, Homo sapiens; identical to SEQ ID NO: 5825

SEQ ID NO: 5828 - DNA, 316 bp, Homo sapiens; identical to SEQ ID NO: 5825

SEQ ID NO: 5829 - DNA, 324 bp, Homo sapiens
gacatccagatgacccagtctccatcctccctgtctgcatctgtcggagacagagtcaccatcacttgccgggcaagtcagagcaatagcgcctatttaaattggtatccgaagaaaccatagaaagcccctaacctcctgatctatgctgcatccagtttgcaaagtggggtcccgtccaggttcagtggcggtggatctgggacagacttcactctcaccatcggcagtctgcaacctgaagattttgcaacttagttttgtcagcagacttatagtacccctcgctcactttcggcggagggtccaaggtggagatcaaac

SEQ ID NO: 5830 - DNA, 316 bp, Homo sapiens
tcctatgtgctgactcagccaccctcggtgtcagtggccccaggacagacggccaggatttcctgtgggggagacaagattggaagtaaaaatgtgcactggtaccagcagaagccaggccaggcccctgtactggtcgtctatgatgacagcgaccggccctcagggatccctgagcgattctctggctccaactctggcaacacggccaccctgaccatcaccagggtcgaagccagggatgaggccgactattactgtcaggtgtgggatcgtagtagtgtcttcggaactgggaccaaggtcaccgtcctag

SEQ ID NO: 5831 - DNA, 316 bp, Homo sapiens; identical to SEQ ID NO: 5830

SEQ ID NO: 5832 - DNA, 316 bp, Homo sapiens
tcctctgtgctgactcagccaccctcggtgtcagtggccccaggacagacggccaggatttcctgtgggggagacaagattggaagtaaaaatgtgcactggtaccagcagaagccaggccaggcccctgtactggtcgtctatgatgacagcgaccggccctcagggatccctgagcgattctctggctccaactctggcaacacggccaccctgaccatcaccagggtcgaagccagggatgaggccgactattactgtcaggtgtgggatcgtggtagtgtcttcggaactgggaccaaggtctccgtcctag

SEQ ID NO: 5833 - DNA, 316 bp, Homo sapiens; identical to SEQ ID NO: 5832

SEQ ID NO: 5834 - DNA, 337 bp, Homo sapiens
gatattgtgatgacccagactccactctctctgtccgtcacccctggacagccggcctccttttcctgcaggtctagtgagagcctcctgtatagtgacggaaagacctatttgcattggtacctgcggaagccaggccagcctccacagctcctgatctatgaagtttccaagcggttttctggagtgccagataggttcagtggcagcgggtcagggacagatttcacactgaaaatcagccgggtggaggctgaggatgttggggtttattactgcatgcaaagtacacagcttccgtggacgttcggccaagggaccaaggtggaaatccaac

SEQ ID NO: 5835 - DNA, 337 bp, Homo sapiens; identical to SEQ ID NO: 5834

SEQ ID NO: 5836 - DNA, 337 bp, Homo sapiens; identical to SEQ ID NO: 5834

SEQ ID NO: 5837 - DNA, 337 bp, Homo sapiens; identical to SEQ ID NO: 5834

SEQ ID NO: 5838 - DNA, 337 bp, Homo sapiens; identical to SEQ ID NO: 5834

SEQ ID NO: 5839 - DNA, 337 bp, Homo sapiens; identical to SEQ ID NO: 5834

SEQ ID NO: 5840 - DNA, 337 bp, Homo sapiens; identical to SEQ ID NO: 5834

SEQ ID NO: 5841 - DNA, 337 bp, Homo sapiens; identical to SEQ ID NO: 5834

SEQ ID NO: 5842 - DNA, 337 bp, Homo sapiens; identical to SEQ ID NO: 5834

SEQ ID NO: 5843 - DNA, 331 bp, Homo sapiens
cagtctctgctgactcagccaccctcagcgtctgggacccccgggcagagggtcaccatctcttgttctggaggcagctccaacatcggaagtaattctgtatgctggtatcagcaactcccaggaacggcccccaaactcctcatctataggagtaatcagcggccctcaggggtccctgaccgattctctggctccaagtctggcacctcagcctccctggccatcagtgggctctggtccgaggatgaggctgattattactgttcagcgtgggatgacagcctgcgtggtccggtattcggcggagggaccaagctgaccgtcctag

SEQ ID NO: 5844 - DNA, 331 bp, Homo sapiens
cagtctctgctgactcagccaccctcagcgtctgggacccccgggcagagggtcaccatctcttgttctggaggcagctccaacatcggaagtaattctgtatgctggtaccagcaactcccaggaacggcccccaaactcctcatctataggagtaatcagcggccctcaggggtccctgaccgattctctggctccaagtctggcacctcagcctccctggccatcagtgggctccggtccgaggatgaggctgattattactgttcagcgtgggatgacagcctgcgtggtccggtattcggcggagggaccaagctgaccgtcctag

SEQ ID NO: 5845 - DNA, 331 bp, Homo sapiens
cagtctctgctgactcagccaccctcagcgtctgggacccccgggcagagggtcaccatctcttgttctggaggcagctccaacatcggaagtaattctgtatgctggtatcagcaactcccaggaacggcccccaaactcctcatctataggagtaatcagcggccctcaggggtccctgaccgattctctggctccaagtctggcacctcagcctccctggccatcagtgggctctggtccgaggatgaggctgattattactgttcagcgtgggatgacagcctgcgtggtccggtcttcggcggagggaccaagctgaccgtcctag

SEQ ID NO: 5846 - DNA, 331 bp, Homo sapiens; identical to SEQ ID NO: 5844

SEQ ID NO: 5847 - DNA, 331 bp, Homo sapiens; identical to SEQ ID NO: 5845

SEQ ID NO: 5848 - DNA, 331 bp, Homo sapiens; identical to SEQ ID NO: 5845

SEQ ID NO: 5849 - DNA, 331 bp, Homo sapiens; identical to SEQ ID NO: 5845

SEQ ID NO: 5850 - DNA, 331 bp, Homo sapiens; identical to SEQ ID NO: 5845

SEQ ID NO: 5851 - DNA, 338 bp, Homo sapiens
gacatcgtgatgacccagtctcccgactccctggctgtgtctctgggcgacagggccaccatcaactgcaagtccagccagaatcttttattcagttccaataataagaactacttagcttggtaccagcagaaaccaggacagcctcctaagttgctcatttactgggcatctacccgggaatccggggtccctgaccgattcagtggcagcgggtctgggacagatttcactctcaccatcaccagcctgcaggctgaagatgtggcagtttattactgtcagcaatattatagtaccccgctcactttcggcggagggaccaaggtggagatcaa

SEQ ID NO: 5852 - DNA, 338 bp, Homo sapiens; identical to SEQ ID NO: 5851

SEQ ID NO: 5853 - DNA, 338 bp, Homo sapiens; identical to SEQ ID NO: 5851

SEQ ID NO: 5854 - DNA, 338 bp, Homo sapiens; identical to SEQ ID NO: 5851

SEQ ID NO: 5855 - DNA, 338 bp, Homo sapiens; identical to SEQ ID NO: 5851

SEQ ID NO: 5856 - DNA, 338 bp, Homo sapiens
gacatcgtgatgacccagtctccagactccctggctgtgtctctgggcgagagggccaccatcaactgcaagtccagccagagtgttttattcagttccaataataagaactacttagcttggttccagcagaaaccaggacagcctcctaagttgctcatttactgggcatctacccgggaatccggggtccctgaccgattcagtggcagcgggtctgggacagatttcactctcaccatcaccagcctgcaggctgaagatgtggcagtttattactgtcagcaatattatagtaccccgctcactttcggcggagggaccaaggtggagatcaa

SEQ ID NO: 5857 - DNA, 334 bp, Homo sapiens
cagtctgtgctgacgcagccgccctcagtgtctggggccccagggcagagggtcaccatctcctgcactgggagcacctccaacatcggggcaggttatgatgtacactggtaccaacaacttccaggaacagcccccaaactcctcatctatgctaacaccaatcggccctcaggggtccctgaccgattctctggctccaagtctggcacctcagcctccctggccatcagtgggctccaggctgaggatgaggctgattatttctgccagtcttatgacagcagactgagtgcttgggtgttcggcggagggaccaagttgaccgtcctag

SEQ ID NO: 5858 - DNA, 334 bp, Homo sapiens; identical to SEQ ID NO: 5857

SEQ ID NO: 5859 - DNA, 334 bp, Homo sapiens; identical to SEQ ID NO: 5857

SEQ ID NO: 5860 - DNA, 334 bp, Homo sapiens; identical to SEQ ID NO: 5857

SEQ ID NO: 5861 - DNA, 334 bp, Homo sapiens
cagtctgtgctgacgcagccgccctcagtgtctggggccccagggcagagggtcaccatctcctgcactgggagcacctccaacatcggggcaggttatgatgtacactggtaccaacaacttccaggaacagcccccaaactcctcatctatgctaacaccaatcggccctcaggggtccctgaccgattctctggctccaagtctggcacctcagcctccctggccatcagtgggctccaggctgaggatgaggctgattatttctgccagtcctatgacagcagactgagtgcttgggtgttcggcggagggaccaagttgaccgtcctag

SEQ ID NO: 5862 - DNA, 334 bp, Homo sapiens; identical to SEQ ID NO: 5861

SEQ ID NO: 5863 - DNA, 325 bp, Homo sapiens
tcctatgtgctgactcagccaccctcggtgtcagtggccccaggacagacggccaggatttcctgtgggggaaacaacattgaaagtaaaactgtgcactggtaccagcagaagccaggccaggcccctatattggtcgtctatgatgataacgaccggccctcagggatccctgagcgattctctggctccaactctgggaacacggccaccctgagcatcagcagggccgaagccggggatgaggccgactattactgtcaggtgtgggatagtagtcgtgatctcagggtgttcggcggagggaccaagctgtccgtcctag

SEQ ID NO: 5864 - DNA, 325 bp, Homo sapiens; identical to SEQ ID NO: 5863

SEQ ID NO: 5865 - DNA, 325 bp, Homo sapiens
tcctatgtgctgactcagtcaccctcggtgtcagtggccccaggacagacggccaggatttcctgtgggggaaacaacattgaaagtaagactgtgcactggtaccagcagaagccaggccaggcccctatattggtcgtctatgatgataacgaccggccctcagggatccctgagcgattctctggctccaactctgggaacacggccaccctgagcatcagcagggccgaagccggggatgaggccgactattactgtcaggtgtgggatagtagtcgtgatctcagggtgttcggcggagggaccaagctgtccgtcctag

SEQ ID NO: 5866 - DNA, 325 bp, Homo sapiens
tcctatgtgctgactcagccaccctcggtctcagtggccccaggacagacggccgggatttcctgtgggggaaacaacattgaaagtaaaactgtgcactggtaccagcagaagccaggccaggcccctatattggtcgtctttgatgatagtgaccggccctcagggatccctgagcgattctctggctccaattctgggaacacggccaccctgaccatcagcagggtcgaagtcggggacgaggccgactattactgtcaggtgtgggatagtagtcgtgatctcagggtgttcggcggagggaccaagctgtccgtcctag

SEQ ID NO: 5867 - DNA, 325 bp, Homo sapiens
tcctatgtgctgactcagccaccctcggtgtcagtggccccaggacagacggccaggatttcctgtgggggaaacaacattggaagtaaaagtgtgcactggtaccagcagaggccaggccaggcccctatattggtcgtctatgatgatagtgaccggccctcagggatccctgagcgaatctctggctccaactctgggaacacggccaccctgatcatcagcagggtcgaagccggggatgaggccgactattactgtcaggtgtgggatagtagtcgtgatctcagggtgttcggcggagggaccaagctgtccgtcctag

SEQ ID NO: 5868 - DNA, 319 bp, Homo sapiens
tcctatgaactgactcagccaccctcagtgtccgtgtccccaggacagacagccagcatcacctgctctgtagataaattggggaataaatatgtttgctggtatcagcagaagccaggccagtcccctgtcctggtcatctatcaggatagcaagcggccctcagggatccctgagcgattctctggctccaactctgggaacacagccactctgaccatcagcgggacccaggctatggatgaggctgactattactgtcaggcgtgggacagcagcactggagtattcggcggagggaccaagctgaccgtcctag

SEQ ID NO: 5869 - DNA, 319 bp, Homo sapiens
tcctatgaactgactcagccaccctcagtgtccgtgtccccaggacagacagccagcatcacctgctctgtagataaattggggaataaatatgtttgctggtatcagcagaagccaggccagtcccctgtcctggtcatctatcaggataacaagcggccctcagggatccctgagcgattctctggctccaactctgggaacacagccactctgaccatcagcgggacccaggctatggatgaggctgactattactgtcaggcgtgggacagcagcactggagtattcggcggagggaccaagctgaccgtcctag

SEQ ID NO: 5870 - DNA, 328 bp, Homo sapiens
gaaattgtgttgacacagtctccagccaccctgtctttgtctccaggggaaagagccaccctctcctgcagggccagtcagactgttagcagctacttagcctggtaccaacagaaacctggccaggctcccaggctcctcatctatgatgcatccatcagggccactggcatcccagccaggttcagtggcagtgggtctgggacagacttcactctcaccatcagtagcctagagcctgaagattttgcagtttattactgtcagcagcgtagcaactggcctccgaagatcaccttcggccaagggacacgactggagattaaac

SEQ ID NO: 5871 - DNA, 319 bp, Homo sapiens; identical to SEQ ID NO: 5869

SEQ ID NO: 5872 - DNA, 319 bp, Homo sapiens
tcctatgagctgactcagccaccctcagtgtccgtgtccccaggacagacagccagcatcacctgctctgtagataaattggggaataaatatgtttgctggtatcagcagaagccaggccagtcccctgtcctggtcatctatcaggatagcaagcggccctcagggatccctgagcgattctctggctccaactctgggaacacagccactctgaccatcagcgggacccaggctatggatgaggctgactattactgtcaggcgtgggacagcagcactggagttttcggcggagggaccaagctgaccgtcctag

SEQ ID NO: 5873 - DNA, 337 bp, Homo sapiens
cagtctgtgctgacgcagccgccctcagtgtctggggccccagggcagagggtcaccatctcctgcactgggagcagctccgacatcggggcaggttataatgtacactggtaccagcagcttccaggaacagcccccaaactcctcatctatggtaacaacaatcggccctcaggggtccctgaccgattctctggctccaagtctggcgcctcagcctccctggccatcagtgggctccaggctgaggatgaggctgattattactgccagtcctttgacagcagcctgagtggtttttatgtcttcggaactgggaccaaggtcaccgtcctag

SEQ ID NO: 5874 - DNA, 337 bp, Homo sapiens
cagtctgtgctgacgcagccgccctcagtgtctggggccccagggcagagggtcaccatctcctgcactgggagcagctccaacatcggggcaggttatgatgtacactggtaccagcagcttccaggaacagcccccaaactcctcatctatgttaacagcaatcggccctcaggggtccctgaccgattctctggctccaagtctggcacctcagcctccctggccatcagtgggctccaggctgaggatgaggctgattattactgccagtcctttgacagcagcctgactggtttttatgtcttcggaactgggaccaaggtcaccgtcctag

SEQ ID NO: 5875 - DNA, 337 bp, Homo sapiens
cagtctgtgctgacgcagccgccctcagtgtctggggccccagggcagagggtcaccatctcctgcactgggagcagctccaacatcggggcaggttatgatgtacactggtaccagcagcttccaggaacagcccccaaactcctcatctatggtaacagcaatcggccctcaggggtccctgaccgattctctggctccaagtctggcacctcagcctccctggccatcagtgggctccagactgaggatgaggctgattattactgccagtcctatgacagcagcctgagtggtttttatgtcttcggaactgggaccaaggtcaccgtcctag

SEQ ID NO: 5876 - DNA, 337 bp, Homo sapiens
cagtctgtgctgacgcagccgccctcagtgtctggggccccagggcagagggtcaccatctcctgcactgggagcagctccaacatcggggcaggttatgatgtacactggtaccagcagcttccaggaacagcccccaaactcctcatctatggtaacagcaatcggccctcaggggtccctgaccgattctctggctccaagtctggcacctcagcctccctggccatcagtgggctccaggctgaggatgaggctgattattactgccagtcctatgacagcagcctgagtggtttttatgtcttcggaactgggaccaaggtcaccgtcctag

SEQ ID NO: 5877 - DNA, 334 bp, Homo sapiens
cagtctgccctgactcagcctgcctccgtgtctgggtctcctggacagtcgatcaccatctcctgcactggaaccaccagtgacgttggtggttataattatgtctcctggtaccaacaacacccaggcaaagcccccaaactcatgatttttgaggtcagtaatcggccctcaggggtttctgatcgcttctctggctccaagtctggcaacacggcctccctgaccatctctgggctccaggctgaggacgaggctgattattactgcacctcatatagaagcagcagcctccagggtgtcttcggaactgggaccaaggtcaccgtcctag

SEQ ID NO: 5878 - DNA, 334 bp, Homo sapiens; identical to SEQ ID NO: 5877

SEQ ID NO: 5879 - DNA, 334 bp, Homo sapiens
cagtctgccctgactcagcctgcctccgtgtctgggtctcctggacagtcgatcaccatctcctgcactggaaccaccagtgacgttggtggttataattatgtctcctggtaccaacagcacccaggcaaagcccccaaactcataatttttgaggtcagtaatcggccctcaggtgtttctgatcgcttctctggctccaagtctggcaacacggcctccctggccatctctgggctccaggctgaggacgaggctgattattactgcacctcatatagaagcagcagcctccagggtgtcttcggaactgggaccaaggtcaccgtcctag

SEQ ID NO: 5880 - DNA, 328 bp, Homo sapiens
gaaattgtgttgacgcagtctccaggcaccctgtctttgtctccaggggaaagagccaccctctcctgcagggccagtcagagtgttagcagcatctacttagcctggtaccagcagaaacctggccaggctcccaggctcctcatctatggtgcatccagcagggccactggcatcccagacaggttcagtggcagtgggtctgggacagacttcactctcaccatcagcagactggagcctgaagattttgcagtgtattactgtcagcactatggtagctcacctccggtcacttttggccaggggaccaagctggagatcaaac

SEQ ID NO: 5881 - DNA, 328 bp, Homo sapiens; identical to SEQ ID NO: 5880

SEQ ID NO: 5882 - DNA, 340 bp, Homo sapiens
gacatcgtgatgacccagtctccagactccctggctgtgtctctgggcgagagggccaccatcaactgcaagtccagccagagtgttttatacagctccaacaataagaactacttagcttggtaccagcagaaaccaggacagcctcctaagctgctcatttactgggcatctacccgggaatccggggtccctgaccgattcagtggcagcgggtctgggacagatttcactctcaccatcagcagcctgcaggctgaagatgtggcagtttattactgtcagcaatattatagtactcccttcactttcggcggagggaccaaggtggagatcaaac

SEQ ID NO: 5883 - DNA, 322 bp, Homo sapiens
tcctatgagctgactcagccaccctcagtgtccgtgtccccaggacagacagccagcatcacctgctctggagataaattgggggataaatatgcttgctggtatcagcagaagccaggccagtcccctgtgctggtcatctatcaagatagcaagcggccctcagggatccctgagcgattctctggctccaactctgggaacacagccactctgaccatcagcgggacccaggctatggatgaggctgactattactgtcaggcgtgggacagcagcacggatgtggtattcggcggagggaccaagctgaccgtcctag

SEQ ID NO: 5884 - DNA, 334 bp, Homo sapiens
cagtctgtactgactcagccaccctcagcgtctgggacccccgggcagagagtcaccatctcttgttctggaagcagctccaacatcggaagtaatactgtaaactggtaccagcagctcccaggaacggcccccaaactcctcatctacactaataatcagcggccctcaggggtccctgaccgattctctggctccaagtctggcacctcagcctccctggccatcagtgggcttcagtctgaggatgaggctgattattactgtgcagcatgggatgacagcctgaatggcctttatgtcttcggaactgggaccaaggtcaccgtcctag

SEQ ID NO: 5885 - DNA, 334 bp, Homo sapiens; identical to SEQ ID NO: 5884

SEQ ID NO: 5886 - DNA, 325 bp, Homo sapiens
tcctatgtgctgactcagccaccctcggtgtcagtggccccaggacagacggccaggattacctgtgggggaaacaacattggaagtaaaagtgtgcactggtaccagcagaagccaggtcaggcccctgtgctggtcgtctatgatgatagcgaccggccctcagggatccctgagcgattctctggctccaactctgggaacacggccaccctgaccatcagcagggtcgaagccggggatgaggccgactattactgtcaggtgtgggatagtagtagtgatccttgggtgttcggcggagggaccaaggtgaccgtcctag

SEQ ID NO: 5887 - DNA, 325 bp, Homo sapiens; identical to SEQ ID NO: 5886

SEQ ID NO: 5888 - DNA, 331 bp, Homo sapiens
cagtctgtgttgacgcagccgccctcagtgtctgcggccccaggacagaaggtcaccatctcctgctctggaaacagctccaacattgggaataattatgtatcctggtaccatcaactcccaggaacagcccccaaactcctcatttatgacaataataagcgaccctcagggattcctgaccgattctctggctccaaatctggcacgtcagccaccctgggcatcaccggactccagactggggacgaggccgattattactgcggaacatgggataacagcctgagtgttggggtattcggcggagggaccaagttgaccgtcctag

SEQ ID NO: 5889 - DNA, 331 bp, Homo sapiens
cagtctgtgttgacgcagccgccctcagtgtctgcggccccaggacagaaggtcaccatctcctgctctggaaacagctccaacattgggaataattatgtatcctggtaccatcaactcccaggaacagcccccaaactcctcatttatgacaataataagcgaccctcagggattcctgaccgattctctggctccaaatctggcacgtcagccaccctgggcatcaccggactccagactggggacgaggccgattattactgcggaacatgggataacagcctgagtgctggggtattcggcggagggaccaagttgaccgtcctag

SEQ ID NO: 5890 - DNA, 316 bp, Homo sapiens
tcctatgagctgattcagccaccctcagtgtccgtgtccccaggacagacagccagcatcacctgctctggagataaattgggggataaatatgcttgctggtatcagcagaagccaggccagtcccctgtgctggtcatctatcaagatagcaagcggccctcagggatccctgagcgattctctggctccaactctgggaacacagccactctgaccatcagcgggacccaggctatggatgaggctgactattactgtcaggcgtgggacagcagcgtggtattcggcggagggaccaaactgaccgtcctag

SEQ ID NO: 5891 - DNA, 316 bp, Homo sapiens; identical to SEQ ID NO: 5890

SEQ ID NO: 5892 - DNA, 316 bp, Homo sapiens
tcctatgtgctgactcagccaccctcggtgtctgtggccccaggacagacggccaggattacctgtgggggaaacaacattgtaagtaagagtgtacactggtaccagcagaagccaggccaggcccctgtgctggtcgtctatgatgatagcgaccggccctcggggatccctgagcgattctctggctccaactctgggcacacggccaccctgaccatcagcagggtcgaagccgcggatgaggccgactattactgtcaggtgtgggatagtactgtggtattcggcggagggaccaggctgaccgtcctag

SEQ ID NO: 5893 - DNA, 316 bp, Homo sapiens; identical to SEQ ID NO: 5892

SEQ ID NO: 5894 - DNA, 331 bp, Homo sapiens
cagtctgccctgactcagcctccctccgcgtccgggtctcctgggcagtcagtcaccatctcctgcactggaaccagcagtgacattggtgcttataactatgtctcctggtaccaacagcacccagacaaagcccccaaactcatgatttatgaggtcaataaccggccctcaggggtctctgatcgcttctctggctccaagtctggcaacacggcctccctgaccgtctctgggctccaggctgaggatgaggctgattattactgcagctcatatgcaggcagcgacaattgggtgttcggcggagggaccaagctggccgtcctag

SEQ ID NO: 5895 - DNA, 331 bp, Homo sapiens
cagtctgccctgactcagcctccctccgcgtccgggtctcctgggcagtcagtcaccatctcctgcactggaaccagcagtgacattggtgcttataactatgtctcctggtaccaacagcacccagacaaagcccccaaactcatgatttatgaggtcaataaccggccctcaggggtccctgatcgcttctctggctccaagtctggcaacacggcctccctgaccgtctctgggctccaggctgaggatgaggctgattattactgcagctcatatgcaggcagcgacaattgggtgttcggcggagggaccaagctggccgtcctag

SEQ ID NO: 5896 - DNA, 325 bp, Homo sapiens
tcctatgtgttgactcagccaccctcggtgtcagtggccccaggacagacggccaggattacctgtgggggaaatagtattggaagtaaaagtgtgcactggtaccagcagaagccaggccaggcccctgcgctggtcgtccatgatgatagcgaccggccctccgggatccctgagcgattctctggctccaactctgggaacacggccaccctgaccatcagtagcgtcgaagccggggatgaggccgactattactgtcaggtgtgggatagtagtagtgatcatgtggtattcggcggagggaccaagctgaccgtcctag

SEQ ID NO: 5897 - DNA, 325 bp, Homo sapiens; identical to SEQ ID NO: 5896

SEQ ID NO: 5898 - DNA, 325 bp, Homo sapiens
tcctatgcgctgacacagccaccctcggtgtcagtgtccccaggacaaacggccaggatcacctgctctggagatgctttgccaaggagatatgcttattggtaccaacagaagtcaggccaggcccctgtgctggtcatctatgaggacaccaaacgcccctccgggatccctgagagattctctggctccagctcagggacaatggccaccttgactatcagtggggcccaggtggaggatgaagctgactactactgttactcaacagacagcagtgataatcatcgggtgttcggcggagggaccaagctgaccgtcctag

SEQ ID NO: 5899 - DNA, 325 bp, Homo sapiens
tcctatgagctgacacagccaccctcggtgtcagtgtccccaggacaaacggccaggatcacctgctctggagatgcattgccaaggagatatgcttattggtatcaacagaagtcaggccaggcccctgtgctggtcatctatgaggacaccaaacgcccctccgggatccctgagagattctctggctccagtttagggacaatggccaccttgactatcagtggggcccaggtggaggatgaagctgactactactgttactcaacagacagcagtgataatcatcgggtgttcggcggagggaccaagctgaccgtcctag

SEQ ID NO: 5900 - DNA, 319 bp, Homo sapiens
gacatccagatgacccagactccatcctccctgtctgcttctgtaggagacagagtcagcatcacttgccgggcaagtcagaacattcacacctttttaatttggtatctgcagagaccagggaaagcccctaacttccttatctatgctgcatccagtttacaaagtggggtcccttcaaggttcagtggcagtggatctgagacagatttcactctcaccatcagcagtctgcaacctgaagattttggaacttactactgtcaacagagttacactaccccgtacacttttggccaggggaccaagttggagatca

SEQ ID NO: 5901 - DNA, 319 bp, Homo sapiens; identical to SEQ ID NO: 5900

SEQ ID NO: 5902 - DNA, 331 bp, Homo sapiens
cagtctgtgctgactcagccaccctcagcgtctgggacccccgggcagagggtcaccatctcttgttctggaagcagctccaacatcggaagtgatcatgtatactggtaccagcagctcccaggaacggcccccaaactcttcatctataggaataatcagcggccctcaggggtccctgaccgattctctggctccaagtctggcacctcagcctccctggccatcagtgggctccggtccgaggatgaggctgattattactgtgcagcatgggatgccagcctgagtgggtatgtcttcggaactgggaccaaggtcaccgtcctag

SEQ ID NO: 5903 - DNA, 331 bp, Homo sapiens
cagtctgtgctgactcagccaccctcagcgtctgggacccccgggcagagggtcaccatctcttgttctggaagcagctccaacatcggaagtgattatgtttactggtaccagcagctcccgggaacggcccccaaactcctcatctataggaataatcagcggccctcaggggtccctgaccgattctctggctccaagtctggcacctcagcctccctggccatcagtgggctccggtccgaggatgaggctgattattactgtgcagcctgggatgacagcctgcgtggttatgtcttcggaactgcgaccaaggtcaccgtcctag

SEQ ID NO: 5904 - DNA, 322 bp, Homo sapiens
tcctatgagctgactcagccaccctcagtgtccgtgtccccaggacagacagccagcatcacctgctctggagataaattggggaataaatatgcttgctggtatcagcagaagccaggccagtcccctgtgatggtcatctatcaggattacaagcggccctcagggatccctgagcgattctctggctccaactctgggaacacagccactctgaccatcagcgggacccaggctatggatgaggctgactattactgtcaggcgtgggacagcagcactggagaggtattcggcggagggaccaagctgaccgtcctag

SEQ ID NO: 5905 - DNA, 322 bp, Homo sapiens
gacatccagatgacccagtctccatcttccgtgtctgcatctgtaggagacagagtcaccatcacttgtcgggcgagtcagggtattagcagctggttagcctggtatcagcagaaaccagggaaagcccctaagctcctgatctatgctgcatcccgtttgcaaagtggggtcccatcaaggttcagcggcagtggatctgggacacatttcactctcaccatcagcagcctgcagcctgaagattttgcaacttactattgtcaacaggctaacagtttccctcacacttttggccaggggaccaagttggagatcaaac

SEQ ID NO: 5906 - DNA, 322 bp, Homo sapiens
gacatccagatgacccagtctccatcctccctgtctgcatctgtaggagacagagtcaccatcacttgccgggcgagtcagggcattagcaattatttagcctggtatcagcagaaaccagggaaagttcctaagctcctgatctatgctgcatccactttgcaatcaggggtcccatctcggttcagtggcagtggatctgggacagatttcactctcaccatcagcagcctgcagcctgaagatgttgcaacttattactgtcaaaagtataacagtgcccctcggacgttcggccaagggaccaaggtggaaatcaaac

SEQ ID NO: 5907 - DNA, 331 bp, Homo sapiens
cagtctgccctgactcagcctccctccgcgtccgggtctcctggacagtcagtcaccatctcctgcacgggaaccagcagtgacgttggtgcttataactatgtctcctggtaccaacaccacccaggcaaagcccccaaactcatgatttatgaggtcactaagcggccctcaggggtccctgatcgcttctctggctccaagtctggcaacacggcctccctgaccgtctctgggctccaggctgaggatgaggctgattattactgcagctcatatgcaggcagcaacaacttggtgttcggcggagggaccaaggtgaccgtcctag

SEQ ID NO: 5908 - DNA, 319 bp, Homo sapiens
gacatccagatgacccagtctccatcctccctgtctgcatctgtaggagacagagtcaccatcacttgccaggcgagtcaggacattagcaactatttaaattggtatcagcagaaaccagggaaagcccctaagctcctgatctacgatgcatccaatttggaaacaggggtcccatcaaggttcagtggaagtggatctgggacagattttactttcaccatcagcagcctgcagcctgaagatattgcaacatattactgtcaacagtatgataatctactcactttcggcggagggaccaaggtggagatcaaac

SEQ ID NO: 5909 - DNA, 325 bp, Homo sapiens
tcctatgagctgactcagccaccctcagtgtccgtgtccccaggacagacagccagcatcacctgctctggagataaattggggaataaacatgcttgctggtatcagcagaagccaggccagtcccctgtgctggtcatctatcaagataacaagcggccctcagggatccctgagcgattctctggctccaaatatgggaacacagccactctgaccatcagcgggacccaggctatggatgaggctgactattactgtcaggcgtgggacagcagcactgcagattatgtcttcggaactgggaccaaggtcaccgtcctag

SEQ ID NO: 5910 - DNA, 322 bp, Homo sapiens
gccatccggatgacccagtctccatcctcattctctgcatctacaggagacagagtcaccatcacttgtcgggcgagtcagggtattagcagttatttagcctggtatcagcaaaaaccagggaaagcccctaagctcctgatctatgctgcatccactttgcaaagtggggtcccatcaaggttcagcggcagtggatctgggacagatttcactctcaccatcagctgcctgcagtctgaagattttgcaacttattactgtcaacagtattatagttaccccaggacgttcggccaagggaccaaggtggaaatcaaac

SEQ ID NO: 5911 - DNA, 328 bp, Homo sapiens
cagtctgccctgactcagcctcgctcagtgtccgggtctcctggacagtcagtcaccatctcctgcactggaaccagtagtgatgttggtggttataactatgtctcctggtaccaacagcacccaggcaaagcccccaaactcatgatttatgatgtcagtaagcggccctcaggggtccctgatcgcttctctggctccaagtctggcaacacggcctccctgaccatctctgggctccaggctgaggatgaggctgattattactgctgctcatatgcaggcagctattgggtgttcggcggagggaccaagctgaccgtcctag

SEQ ID NO: 5912 - DNA, 337 bp, Homo sapiens
cagtctgccctgactcagcctgcctccgtgtctgggtctcctggacagtcgatcaccatctcctgcactggaaccagcagtgatgttgggagttataaccttgtctcctggtaccaacagcacccaggcaaagcccccaaactcatgatttatgagggcagtaaggggccctcaggggtttctaatcgcttctctggctccaagtctggcaacacggcctccctgacaatctctgggctccaggctgaggacgaggctgattattactgctgctcatatgcaggtagtagcagttcttcttgggtgttcggcggagggaccaagctgaccgtcctag

SEQ ID NO: 5913 - DNA, 325 bp, Homo sapiens
tccgatgagctgacacagccaccctcggtgtcagtgtccccaggacaaacggccaggatcacctgctctggagatgcattgccaaaaaaatatgcttattggtaccagcagaagtcaggccaggcccctgtgctggtcatctatgaggacagcaaacgaccctccgggatccccgagagattctctggctccagctcagggacaatggccaccttgactatcagtggggcccaggtggaggatgaaactgactactactgttactcagcagacagcagtggtaatcccggggtgttcggcggagggaccaagctgaccgtcctag

SEQ ID NO: 5914 - DNA, 328 bp, Homo sapiens
gaaatagtgatgacgcagtctccagccaccctgtctgtgtctccaggggaaagagccaccctctcctgcagggccagtcagagtgttagcagcaacttagcctggtaccagcagaaacctggccaggctcccaggctcctcatctatggtgcatccaccagggccactggtatcccagccaggttcagtggcagtgggtctgggacagagttcactctcaccatcagcagcctgcagtctgaagattttgcagtttattactgtcagcagtataataactggcctcccatgtacacttttggccaggggaccaagctggagatcaaac

SEQ ID NO: 5915 - DNA, 331 bp, Homo sapiens
cagtctgtgctgactcagccaccctcggtgtctgaagcccccaggcagagggtcaccatctcctgttctggaagcaactccaacatcggaaataatgctgttaactggtaccagcaactcccaggaaaggctcccaaactcctcatctattatggtgatctgctgccctcaggggtctctgaccgattctctgcctccaagtctggcacctcagcctccctggccatcagtgggctccagtctgaggatgaggctgattattactgtgcagcatgggatgacagcctgaatggagtgatattcggcggagggaccaagctgaccgtcctag

SEQ ID NO: 5916 - DNA, 322 bp, Homo sapiens
gaaatagtgatgacgcagtctccagccaccctgtctgtgtctccaggggaaagagccaccctctcctgcagggccagtcagagtgttaccaccaacttagcctggtaccagcagaaacctggccaggctcccaggctcctcgtctatggtgcatccaccagggccactggtatcccagccaggttcagtggcagtgggtctgggacagagttcactctcaccatcagcagcctgcagtctgaagattttgcagtttattactgtcagcagtttaataactggcctcagacgttcggccaagggaccaaggtggaaatcaaac

SEQ ID NO: 5917 - DNA, 328 bp, Homo sapiens
gaaattgtgttgacgcagtctccaggcaccctgtctttgtctccaggggaaagagccaccctctcctgcagggccagtcagagtgttagcagcagctacttagcctggtaccagcagaaacctggccaggctcccaggctcctcatctatggtgcatccagcagggccactggcatcccagacaggttcagtggcagtgggtctgggacagacttcactctcaccatcagcagactggagcctgaagattttgcagtgtattactgtcagcagtatggtagctcaccgacgtggacgttcggccaagggaccaaggtggaaatcaaac

SEQ ID NO: 5918 - DNA, 322 bp, Homo sapiens
gacatccagatgacccagtctccatcctcactgtctgcatctgtaggagacagagtcaccatcacttgtcgggcgagtcagggcattagcaattatttagcctggtttcagcagaaaccagggaaagcccctaagtccctgatctatgctgcatccagtttgcaaagtggggtcccatcaaagttcagcggcagtggatctgggacagatttcactctcaccatcagcagcctgcagcctgaagattttgcaacttattactgccaacagtataatagttaccctcggacgttcggccaagggaccaaggtggaaatcaaac

SEQ ID NO: 5919 - DNA, 328 bp, Homo sapiens
gaaattgtgttgacacagtctccagccaccctgtctttgtctccaggggatagagccaccctctcctgcagggccagtcagagtgttagcaacttcttagcctggtaccagcagaaacctggccaggctcccaggctcctcatctatgatgcatccaacagggccactggcatcccagccaggttcagtggcagtgggtctgggacagacttcactctcaccatcagcagcctagagcctgaagattttgcagtttattactgtcagcagcgtagcaactggcctccgcgggtcaccttcggccaagggacacgactggagattaaac

SEQ ID NO: 5920 - DNA, 326 bp, Homo sapiens
gaaattgtgttgacgcagtctccaggcaccctgtctttgtctccaggggaaagagccaccctctcctgcagggccagtcagagtgttagcagcagctacttagcctggtaccagcagaaacctggccaggctcccaggctcctcatctatggtgcgtccagcagggccactggcatcccagacaggttcagtggcagtgggtctgggacagacttcagtctcaccatcagcagactggagcctgaagattttgcagtgtattactgtcagcagtatggtggctcacacctattcagtttcggccctgggaccaaagtggatatcaa

SEQ ID NO: 5921 - DNA, 328 bp, Homo sapiens
gaaattgtgttgacacagtctccagccaccctgtctttgtctccaggggaaagagccaccctctcctgcagggccagtcagagtattaccaactacctagcctggtaccaacagaaacctggccaggctcccaggctcctcatctatgatgcatccaacagggccactggcatcccaggcaggttcagtggcagtgggtctgggacagacttcactctcaccatcaacaccctagagcctgaagattttgcagtttattactgtcagcagcgtagcaactggccaaactggcccactttcggcggagggaccacggtggagatcaaac

SEQ ID NO: 5922 - DNA, 325 bp, Homo sapiens
tcctatgagctgacacagccaccctcggtgtcagtgtccccaggacaaacggccacgatcacctgctctggagatgcattgccaaaaaaatttgcttattggtaccagcagaggccaggccaggcccctgttctggtcatctatgaagacaagaaacgaccctccgggatccctgagagattctctggctccagctcagggacaatggccacattgacaatcagtggggcccaggtggaggatggagctgactactattgttactcaacagacggcagtggaagtcaagtggttttcggcggagggaccaaactgaccgtcctag

SEQ ID NO: 5923 - DNA, 322 bp, Homo sapiens
gacatccagatgacccagtctccttccaccctgtctgcatctgtaggagacagagtcaccctcacttgccgggccagtcagagtattagtagctggttggcctggtatcagcagacaccagggaaagcccctaacctcctgatctataaggcgtctagtttagaaagtggggtcccatcaaggttcagcggcagtggatctgggacagaattcactctcaccatcagcagcctgcagcctgatgattttgcaacttattactgccaacagtataatagttacccgtacacttttggccaggggaccaagctggagatcaaac

SEQ ID NO: 5924 - DNA, 331 bp, Homo sapiens
gaaatagtgatgacgcagtctccagccaccctgtctgtgtctccaggggaaagagccaccctctcctgcagggccagtcagagtgttagcagcaacttagcctggtaccagcagaaacctggccaggctcccaggctcctcatctatggtgcatccaccagggccactggtatcccagccaggttcagtggcagtgggtctgggacagagttcactctcaccatcagcagcctgcagtctgaagattttgcagtttattactgtcagcagtataataactggcctccgggttatgtgactttcggcggagggaccaaggtggagatcaaac

SEQ ID NO: 5925 - DNA, 322 bp, Homo sapiens
gacatccagatgacccagtctccatcctccctgtctgcatctgtaggagacagagtcaccatcacttgccgggcaagtcagagcattaacaagtatttaaattggtatcagcagaaaccagggaaagcccctaagctcctgatctatgctgcatccagtttgcaaagtggggtcccatcaaggttcagtggcagtggatctgggacagatttcactctcaccatcagcagtctgcaacctgaagattttgcaacttactactgtcaacagagttacagtaccccagaattcactttcggccctgggtccaaagtggatatca

SEQ ID NO: 5926 - DNA, 340 bp, Homo sapiens
gacatcgtgatgacccagtctccagactccctggctgtgtctctgggcgagagggccaccatcaactgcaagtccagccagagtgttttatacagctccaacaataagaactacttagcttggtaccagcagaaaccaggacagcctcctaagctgctcatttactgggcatctacccgggaatccggggtccctgaccgattcagtggcagcgggtctgggacagatttcactctcaccatcagcagcctgcaggctgaagatgtggcagtttattactgtcagcaatattatagtactcccctcactttcggcggagggaccaaggtggagatcaaac

SEQ ID NO: 5927 - DNA, 331 bp, Homo sapiens
tcctatgtgctgactcagccaccctcggtgtcagtggccccaggacagacggccaggattacctgtgggggaaacaacattggaagtaaaagtgtgcactggtaccagcagaagccaggccaggcccctgtgctggtcgtctatgatgatagcgaccggccctcagggatccctgagcgattctctggctccaactctgggaacacggccaccctgaccatcagcagggtcgaagccggggatgaggccgactattactgtcaggtgtgggatagtggtagtgatcatccgaaatgggtgttcggcggagggaccaagctgaccgtcctag

SEQ ID NO: 5928 - DNA, 331 bp, Homo sapiens
cagtctgtgctgactcagccaccctcagcgtctgggacccccgggcagagggtcaccatatcttgttctggaagcaactccaacatcggaagtaagactgtaaactggtaccagcagctcccaggaacggcccccaaactcctcatctatagtaataatcagcggccctcaggggtccctgaccgattctctggctccaagtctggcacctcagcctccctggccatcagtgggctccagtctgaggatgaggctgattattactgtgcagcatgggatgacagtgtgaatggtccggtattcggcggggggaccaaggtgaccgtcctag

SEQ ID NO: 5929 - DNA, 322 bp, Homo sapiens; identical to SEQ ID NO: 837

SEQ ID NO: 5930 - DNA, 328 bp, Homo sapiens
tcctatgtgctgactcagccaccctcggtgtcagtggccccaggacagacggccaggattacctgtgggggaaacaacattggaagtaaaagtgtgcactggtaccagcagaagccaggccaggcccctgtgctgctcgtcgatgatgaaagcgaccggccctccgggatccctgagcgattctctggctccaactctgggaacacggccaccctgaccatcagcagggtcgaagtcggggatgaggccgactattattgtcaggtgtgcgatagtagtagcgatcatccgggggtgttcggcggagggaccaagctgaccgtcctag

SEQ ID NO: 5931 - DNA, 319 bp, Homo sapiens
gacatccagatgacccagtctccttccaccctgtctgcatctgtaggagacagagtcaccatcacttgccgggccagtcagagtattagtgactggttggcctggtatcagcagaaaccagggaaagcccctaacctcctgatctataaggcgtctagtttagaaagtggggtcccatcaaggttcagcggcagtgggtctgggacagaatacactctcaccatcagcagcctgcagcctgatgattttgcaacttattactgccaacagtataatagttattctctcactttcggcggagggaccaaggtggagatca

SEQ ID NO: 5932 - DNA, 331 bp, Homo sapiens
cagtctgtgctgactcagccaccctcagcgtctgggacccccgggcagagggtcaccatctcttgttctggaagcagctccaacatcggaagaaatcctgtcaactggtaccagcaggtcccaggaacggcccccaaagtcctcatctatagtagtaatcagcggccctcaggggtccctgaccgattctctggctccaagtctggcacctcagcctccctggccatcagtgggctccagtctgaggatgaggctgattattactgtgcagcatgggatgacagcctgaatggttgggtgttcggcggagggaccaagctgaccgtcctag

SEQ ID NO: 5933 - DNA, 325 bp, Homo sapiens; identical to SEQ ID NO: 3887

SEQ ID NO: 5934 - DNA, 340 bp, Homo sapiens
gacatcgtgatgacccagtctccagactccctggctgtgtctctgggcgagagggccaccatcaactgcaagtccagccagagtgttttatacagttccaacaataagaactacttagcttggtaccagcagaaaccaggacagcctcctaagctgctcatttactgggcatctacccgggaatccggggtccctgaccgattcagtggcagcgggtctgggacagatttcactctcaccatcagcagcctgcaggctgaagatgtggcagtttattactgtcagcaatattataatactcctccgacgttcggccaagggaccaaggtggaaatcaaac

SEQ ID NO: 5935 - DNA, 322 bp, Homo sapiens
gaaatagtgatgacgcagtctccagccaccctgtctgtgtctccaggggaaagagccaccctctcctgcagggccagtcaggatattagcagccacttagtctggtaccagcagaaatttggccaggctcccaggctcctcatctatggtgcatcctccagggcctctggtatcccggccaggttcagtggcagtgggtctgggacagagttcactctcaccatcagcagcctgcagtctgaagattttgcagtttattactgtcagcagtataatatctggccgctcactttcggcggagggaccaaggtggagatcaaac

SEQ ID NO: 5936 - DNA, 310 bp, Homo sapiens
gacatccagatgacccagtctccatcttctgtgtctgcatctgtaggagacagagtcaccatcacttgtcgggcgagtcagggtattagcagctggttagcctggtatcagcagaaaccagggaaagcccctaagctcctgatctatgctgcatccagtttgcaaagtggggtcccatcaaggttcagcggcagtggatctgggacagatttcactctcactatcagcagcctgcagcctgaagattttgcaacttattattgtcaacacgctaacagtttcggcggagggaccaaggtggagatcaaac

SEQ ID NO: 5937 - DNA, 328 bp, Homo sapiens
tcctatgtgctgactcagccaccctcggtgtcagtggccccaggacagacggccaggattacctgtgggggaaacaacattggaagtaaaagtgtgcactggtaccagcagaagccaggccaggcccctgtactggtcgtctatgatgatagcgaccggccctcagggatccctgagcgattctctggctccaactctgggaacacggccaccctgaccatcagcagggtcgaagccggggatgaggccgactattactgtcaggtgtgggatggtagtagttatcatcatgtggtattcggcggagggaccaagctgaccgtcctag

SEQ ID NO: 5938 - DNA, 328 bp, Homo sapiens
tcctatgtgctgactcagccaccctcggtgtcagtggccccaggacagacggccaggattacctgtgggggaaacaacattggaagtaaaagtgtgcactggtaccagcagaagccaggccaggcccctgtgctggtcgtctatgatgatagcgaccggccctcagggatccctgagcgattctctggctccaactctgggaacacggccaccctgaccatcagcagggtcgaagccggggatgaggccgactattactgtcaggtgtgggatagtagtagtgatcataattgggtgttcggcggagggaccaagctgaccgtcctag

SEQ ID NO: 5939 - DNA, 322 bp, Homo sapiens
tcctatgtgctgactcagccaccctcggtgtcagtggccccaggacagacggccaggattacctgtgggggaaacaacattggaagtaaaagtgtgcactggtaccagcagaagccaggccaggcccctgtgctggtcgtctatgatgatagcgaccggccctcagggatccctgagcgattctctggctccaactctgggaacacggccaccctgaccatcagcagggtcgaagccggggatgaggccgactattactgtcaggtgtgggatagtagtagtgatgtggtattcggcggagggaccaagctgaccgtcctag

SEQ ID NO: 5940 - DNA, 323 bp, Homo sapiens
tcctatgagctgacacagccaccctcggtgtcagtgtccccaggacaaacggccaggatcacctgctctggagatgcattgccaaaaaaatatgcttattggtaccagcagaagtcaggccaggcccctgtgctggtcatctatgaggacaacaaacgaccctccgggatccctgagagattctctggctccagctcagggacagtggccaccttgactatcagtggggccctagtggaggatgaagctgattactattgttactcaacagacagcagtggtttcaattgggtgttcggcggagggaccaagctgaccgtcct

SEQ ID NO: 5941 - DNA, 325 bp, Homo sapiens
gacatccagatgacccagtctccatcctccctgtctgcatctgtaggagacagagtcaccatcacttgccgggcaagtcagagcattagcagctatttaaattggtatcagcagaaaccagggaaagcccctaagctcctgatctatgctgcatccagtttgcaaagtggggtcccatcaaggttcagtggcagtggatctgggacagatttcactctcaccatcagcagtctgcaacctgaagattttgcaacttactactgtcaacagagttacagtacccctccgtggacgttcggccaagggaccaaggtggaaatcaaac

SEQ ID NO: 5942 - DNA, 325 bp, Homo sapiens
gacatccagatgacccagtctccatcctccctgtctgcatctgtaggagacagagtcaccatcacttgccgggcaagtcagagcattagcagctatttaaattggtatcagcagaaaccagggaaagcccctaagctcctgatctatgctgcatccagtttgcaaagtggggtcccatcaaggttcagtggcagtggatctgggacagatttcactctcaccatcagcagtctgcaacctgaagattttgcaacttactactgtcaacagagttacagtacccattcgtggacgttcggccaagggaccaaggtggaaatcaaac

SEQ ID NO: 5943 - DNA, 337 bp, Homo sapiens
aattttatgctgactcagccccactctgtgtcggagtctccggggaagacggtaaccatctcctgcacccgcagcagtggcagcattgccagcaactatgtgcagtggtaccagcagcgcccgggcagttcccccaccactgtgatctatgaggataaccaaagaccctctggggtccctgatcggttctctggctccatcgacagctcctccaactctgcctccctcaccatctctggactgaagactgaggacgaggctgactactactgtcagtcttatgatagcagcaatcatgggggggtgttcggcggagggaccaagctgaccgtcctag

SEQ ID NO: 5944 - DNA, 319 bp, Homo sapiens
tcctatgagctgactcagccaccctcagtgtccgtgtccccaggacagacagccagcatctcctgctctggagataagttgggggataaatacgcttgctggtatgagcagaagccaggccagtcccctgtgctggtcatctatcaagataacaagcggccctcagggatccctgagcgattttctggctccaactctgggaacacagccactctgaccatcagcgggacccaggctatggatgaggctgactattactgtcaggcgtgggacagcagcactgtggtattcggcggagggaccaagctgaccgtcctag

SEQ ID NO: 5945 - DNA, 337 bp, Homo sapiens
gatgttgtgatgactcagtctccactctccctgtccgtcacccttggacagccggcctccatctcctgcaggtctagtcaaagcctcgtatacaatgatggaaacacctacttgaattggtttcagcagaggccaggccaatctccaaggcgcctaatttataaggtttctaaccgggactctggggtcccagacagattcagcggcagtgggtcaggcactgatttcacactgaaaatcagcagggtggaggctgaggatattggggtttattactgcatgcaaggtacacactggccccggacgttcggccaagggaccaaggtggaaatcaaac

SEQ ID NO: 5946 - DNA, 337 bp, Homo sapiens
gatgttgtgatgactcagtctccagtctccctgcccgtcacccttggacagccggcctccatctcctgcatgtctagtcaaagcctcgtatacagtgatggaaacacctacttgaattggtttcagcagaggccaggccaatctccaaggcgcctaatttataaggtttctaaccgggactctggggtcccagacagattcagcggcagtgggtcaggcactgatttcacactgaaaatcagcagggtggaggctgaggatgttggggtttattactgcatgcaaggtacacactggccccggacgttcggccaagggaccaaggtggaaatcaaac

SEQ ID NO: 5947 - DNA, 322 bp, Homo sapiens
gacatccagatgacccagtctccatcctccctgtctgcatctgtaggagacagagtcaccatcacttgccgggcaagtcagggcattagaaatgatttaggctggtatcagcagaaaccagggaaagcccctaagcgcctgatctatgctgcatccagtttgcaaagtggggtcccatcaaggttcagcggcagtggatctgggacagagttcactctcacaatcagcagcctgcagcctgaagattttgcaacttattattgtctacagcataatagttaccctctcactttcggcggagggaccaaggtggagatcaaac

SEQ ID NO: 5948 - DNA, 334 bp, Homo sapiens
cagcttgtgctgactcaatcgccctctgcctctgcctccctgggagcctcggtcaagctcacctgcactctgagcagtgggcacagcacctacgccatcgcgtggcataagctgcagcctgacaagggccctcgccatttgatgaggcttaacagtgatggcagtcacagtaagggggacgggatccctgatcgcttctcaggctccagttctgggtctgagcgctacctcaccatctccagcctccagtctgatgatgaggctgactattactgtcagacctgggacactggcattcaggtcttcggcggagggaccaagctgaccgtcctag

SEQ ID NO: 5949 - DNA, 325 bp, Homo sapiens
tcctatgagctgacacagccaccctcgatgtcagtgtccccaggacaaacggccaggatcacctgctctggagatgcattgccacaaagaaatgcttattggtaccagcagaagtcaggccaggcccctgtgctggtcatccatggagacaacatacgaccctccgggatccctgagagattctctggcttcaagtcagggacagtggctaccttgaccatcactggggcccaggtggaggatgaagctgactactactgttactcaacagacagcagtgctcatcagggattcttcggaactgggaccaaggtcaccgtcctag

SEQ ID NO: 5950 - DNA, 331 bp, Homo sapiens
cagtctgtgttgacgcagccgccctcagtgtctgcggccccaggacagaaggtcaccatctcctgctctggaagcagctccaacactgggaataattatgtatcctggtaccagcagctcccaggaacagcccccaaactcctcatttatgacaataataagcgaccctcagggattcctgaccgattctctggctccaagtctggcacgtcagccaccctgggcatcaccggactccagactggggacgaggccgattattactgcggaacatgggatcgcagcctgagtgtcgtggtattcggcggagggaccaagctgaccgtcctag

SEQ ID NO: 5951 - DNA, 331 bp, Homo sapiens
cagtctgccctgactcagcctgcctccgtgtctgggtctcctggacagtcgatcaccatctcctgcactggaaccagcagtgacgttggtggttataactatgtctcctggtaccaacagcacccaggcaaagcccccaaactcatgatttatgaggtcagtaatcggccctcaggggtttctaatcgcttctctggctccaagtctggcaacacggcctccctgaccatctctgggctccaggctgaggacgaggctgattattactgcagctcatatacaagcagcagcacttgggtgttcggcggagggaccaagctgaccgtcctag

SEQ ID NO: 5952 - DNA, 325 bp, Homo sapiens
gacatccagatgacccagtctccatcctccctgtctgcttctgtcggagacagagtcaccatcacttgccgggcaagtcagaccattagcagatttttaaattggtaccagcagaaaccagggaaagcccctaagctcctgatctatgctgcatctagtttgcaaagtggggccccatcaaggttcagtggcagtggatctgggacagatttcactctcaccatcagcagtctgcaacctgaagattttgcaatttactactgtcaacagacttacagtacccccggcggcacttttggccaggggaccaaggtggagatcaaac

SEQ ID NO: 5953 - DNA, 324 bp, Homo sapiens
tcctatgaagtgactcagccaccctcagtgtccgtgtccccaggacagacagccatcatcacctgctctggagataaattgggggataaatatgcttgctggtatcagcagaagccaggccagtcccctgtgcaggtcatctatgaagataccaagcggccctcagggatccctgagcgattctctggctccaactctgggaacacagccactctgaccatcagcgggacccaggctatggatgaggctgactattactgtcaggcgtgggacagcagcactgaggatgtggtattcggcggagggaccaagctgaccgtccta

SEQ ID NO: 5954 - DNA, 328 bp, Homo sapiens
gaaactgtgttgacacagtctccagccaccctgtctttgtctccaggggaaagagccaccctctcctgcagggccagtcagagtgttagcacctacttagcctggtaccaacagaaacctggccaggctcccaggctcctcgtctatgatgcatccatcagggccactggcatcccagtcaggttcagtggcagtgggtctgggacagacttcactctcaccatcagcagcctgcagcctgaagattttgcagtttattactgtcagcagcgtaacatctggcctccggcgtacagttttggccaggggaccaagctggagatcaaac

SEQ ID NO: 5955 - DNA, 328 bp, Homo sapiens
gaaatagtgatgacgcagtctccagccaccctgtctgtgtctccaggggaaagagccaccctctcctgcagggccagtcagagtgttagcagcaacttagcctggtaccagcagaaacctggccaggctcccaggctcctcatctatggtgcatccaccagggccactggtatcccagccaggttcagtggcagtgggtctgggacagagttcactctcaccatcagcagcctgcagtctgaagattttgcagtttattactgtcagcagtataataactggcctccccttctcactttcggcggagggaccaaggtggagatcaaac

SEQ ID NO: 5956 - DNA, 322 bp, Homo sapiens
gacatccagatgacccagtctccttccaccctgtctgcatctgtaggagacagagtcaccatcacttgccgggccagtcagagtattagtagctggttggcctggtatcagcagaaaccagggaaagcccctaagctcctgatttataaggcgtctagtttagaaagtggggtcccatcaaggttcagcggcagtggatctgggacagaattcactctcaccatcagcagcctgcagcctgatgattttgcaacttattactgccaacagtataatagttattctctcactttcggcggagggaccaaggtggagatcaaac

SEQ ID NO: 5957 - DNA, 334 bp, Homo sapiens
cagtctgccctgactcagcctccctccgcgtccgggtctcctggacagtcagtcaccatctcctgcactggaaccaacactgacgttggtggttataactatgtctcctggtaccaacaccacccaggcaaagtccccaagctcttgatttttgatgtcaataagcggccctcaggggtccctgatcgcttctctggctccaagtctggcaacacggcctccctgaccgtctctgggctccaggctgaggatgaggctgattattattgcagctcatatacaggcaccgacaatttcggggttttcggcggagggaccaagctgaccgtcctag

SEQ ID NO: 5958 - DNA, 328 bp, Homo sapiens
gaaattgtgttgacacagtctccagccaccctgtctttgtctccaggggaaagagccaccctctcctgcagggccagtcagagtgttagcagctacttagcctggtaccaacagaaacctggccaggctcccaggctcctcatctatgatgcatccaacagggccactggcatcccagccaggttcagtggcagtgggtctgggacagacttcactctcaccatcagcagcctagagcctgaagattttgcagtttattactgtcagcagcgtagcaactggcctccggtgctcactttcggcggagggaccaaggtggagatcaaac

SEQ ID NO: 5959 - DNA, 328 bp, Homo sapiens
gaaattgtgttgacacagtctccagccaccctgtctttgtctccaggggaaagagccaccctctcctgcagggccagtcagagtgttagcagctacttagcctggtaccaacagaaacctggccaggctcccaggctcctcatctatgatgcatccaacagggccactggcatcccagccaggttcagtggcagtgggtctgggacagacttcactctcaccatcagcagcctagagcctgaagattttgcagtttattactgtcagcagcgtagcaactggcctcctatgtacacttttggccaggggaccaagctggagatcaaac

SEQ ID NO: 5960 - DNA, 325 bp, Homo sapiens
tcctatgagctgacacagccaccctcggtgtcagtgtccccaggacagacggccaggatcacctgctctgcagatgcattgccaaagcaatatgcttattggtaccagcagaagccaggccaggcccctgtgctggtgatatataaagacagtgagaggccctcagggatccctgagcgattctctggctccagctcagggacaacagtcacgttgaccctcagtggagtccaggcagaagacgaggctgactattactgtcaatcagcagacagcagtggttcttattgggtgttcggcggagggaccaagctgaccgtcctag

SEQ ID NO: 5961 - DNA, 319 bp, Homo sapiens
gacatccagatgacccagtctccttccaccctgtctgcatctgtaggagacagagtcaccatcacttgccgggccagtcagagtattagtagctggttggcctggtatcagcagaaaccagggaaagcccctaagctcctgatctataaggcgtctagtttagaaagtggggtcccatcaaggttcagcggcagtggatctgggacagaattcactctcaccatcagcagcctgcagcctgatgattttgcaacttattactgccaacagtataatagttaccggacgttcggccaagggaccaaggtggaaatcaaac

SEQ ID NO: 5962 - DNA, 331 bp, Homo sapiens
tcttctgagctgactcaggaccctgctgtgtctgtggccttgggacagacagtcaggatcacatgccaaggagacagcctcagaagctattatgcaagctggtaccagcagaagccaggacaggcccctgtacttgtcatctatggtaaaagcaaccggccctcagggatcccagaccgattctctggctccagctcaggaaacacagcttccttgaccatcactggggctcaggcggaagatgaggctgactattactgtaactcccgggacagcagtggtaaccatctaaatgtggtattcggcggagggaccaagctgaccgtcctag

SEQ ID NO: 5963 - DNA, 322 bp, Homo sapiens; identical to SEQ ID NO: 5205

SEQ ID NO: 5964 - DNA, 340 bp, Homo sapiens
gacatcgtgatgacccagtctccagactccctggctgtgtctctgggcgagagggccaccatcaactgcaagtccagccagactgttttatacagctccagcaataagaactacttagcttggtaccagaagaaaccaggacagcctcctaaattgctcatttactgggcctctacccgggaatccggggtccctgaccgattcagtggcagcgggtctgggacagatttcactctcaccatcagcagcctgcaggctgaagatgtggcagtttattactgtcagcaatattatagtcctccgctcactttcggcggagggaccaaggtggagatcaaac

SEQ ID NO: 5965 - DNA, 325 bp, Homo sapiens
gacatccagatgacccagtctccatcttccgtgtctgcatctgtaggagacagagtcaccatcacttgtcgggcgagtcagggtattagcagctggttagcctggtatcagcagaaaccagggaaagcccctaagctcctgatctatgctgcatccagtttgcaaagtggggtcccatcaaggttcagcggcagtggatctgggacagatttcactctcaccatcagcagcctgcagcctgaagattttgcaacttactattgtcaacaggctaacagtttccctcgggtcaccttcggccaagggacacgactggagattaaac

SEQ ID NO: 5966 - DNA, 331 bp, Homo sapiens
cagtctgtgctgactcagccaccctcagcgtctgggacccccgggcagagggtcaccatctcttgttctggaagcagctccaacatcggaactaattatgtgtgctggtaccagcagctcccaggaacggcccccaaactcctcatctataggaataatcagcggccctcaggggtccctgaccgattatctggctccaagtctggcacctcagcctccctggccatcagtgggctccggtccgaggatgaggctgattattactgtgcagcatgggatgacagcctgagtggtccggtgttcggcggagggaccaaactgaccgtcctag

SEQ ID NO: 5967 - DNA, 340 bp, Homo sapiens
gacatcgtgatgacccagtctccagactccctggctgtgtctctgggcgagagggccaccatcaactgcaagtccagccagagtgttttatacagctccaactataagaactacttagcttggttccagcagaaaccaggacagcctcctaaactgctcattcactgggcatctacccgggaatccggggtccctgaccgattcagtggcagcgggtctgggacagatttcactctcaccatcagcagcctgcaggctgaagatgtggcagcttattattgtcagcagtattatagtattcctcacacttttggccaggggaccaagctggagatcaaac

SEQ ID NO: 5968 - DNA, 331 bp, Homo sapiens
cagtctgccctgactcagcctccctccgcgtccgggtctcctggacagtcagtcaccatctcctgcactggaaccagcagtgacgttggtggttataactatgtctcctggtaccaacagcacccaggcaaagcccccaaactcttgatttatgaggtcagtaagcggccctcaggggtccctgatcgcttctctggctccaagtctggcaacacggcctccctgaccgtctctgggctccaggctgaggatgaggctgattattactgcacctcatatgcaggcagcaacaacttgatattcggcggagggaccaagctgaccgtcctag

SEQ ID NO: 5969 - DNA, 329 bp, Homo sapiens
caatctgccctgactcagcctccctccgcgtccgggtctcctggacagtcagtcaccttctcctgcactggaaccagtggtgacattggtctttatgactatgtctcctggtatcagcaacacccaggcaaagcccccaaactcatgatttatgaggtcactaagcggccctcaggggtccctgatcgcttctctggctccaagtctggcaacacggcctccctgaccgtctctgggctccaggctgaggatgaggctgattattactgcagctcatatacaggcaccagcaatttacttttcggcggagggaccaagctgaccgtcct

SEQ ID NO: 5970 - DNA, 331 bp, Homo sapiens
tcttctgagctgactcaggaccctgctgtgtctgtggccttgggacagacagtcaggatcacatgccaaggagacagcctcagaagctattatgcaagctggtaccagcagaagccaggacaggcccctgtacttgtcatctatggtaaaaacaaccggccctcagggatcccagaccgattctctggctccagctcaggaaacacagcttccttgaccatcactggggctcaggcggaagatgaggctgactattactgtaactcccgggacagcagtggtaaccccctagatgtggtattcggcggagggaccaagctgaccgtcctag

SEQ ID NO: 5971 - DNA, 325 bp, Homo sapiens
gacatccagatgacccagtctccatcctccctgtctgcatctgtagcagacagagtcaccatcacttgccaggcgagtcaggacatttgcaattatttaaattcatatcagcagaaaccagggaaagcccctaggctcctgatctacgatgcatccaatttggaaacaggggtcccatcaaggttcagtggaagtggatctgggacagattttactttcaccgtcaccagcctgcagcctggagatattgcaatatattactgtcgacactataataatctccctccgtgcacttttggccaggggaccaaagtggagatcaaac

SEQ ID NO: 5972 - DNA, 325 bp, Homo sapiens
gaaattgtgttgacgcagtctccaggcaccctgtctttgtctccgggggaaagagccaccctctcctgcagggccagtcagagtgttagcagcgcccgcttactctggtctcaacaaaaacctggccaggctcccaggctcctcatctctggttcagccagcagggccactggcatcccagaccggttcagcggcagtgggtctgggacagacttcactctcaccatcagcagactggagcctgaagattttgcagtctactattgtcatcaatatgacaatttaagggagactttcggccaggggaccagggtggaaatcaaac

SEQ ID NO: 5973 - DNA, 325 bp, Homo sapiens
tcctatgagctgacacagccaccctcggtgtcagtgtccccaggacaaacggccaggatcacctgctctggagatgcattgccaaaaaaatatgcttattggtaccagcagaagtcaggccaggcccctgtcctggtcatctatgaggacagcaaacgaccctccgggatccctgagagattctctggctccagctcagggacaatggccaccttgactatcagtggggcccaggtggaggatgaagctgactactactgttactcaacagacagcagtggtaatcatggggtgttcggcggagggaccaagctgaccgtcctag

SEQ ID NO: 5974 - DNA, 305 bp, Homo sapiens
gacatccagatgacccagtctccatcctccctgtctgcatctgtaggagacagagtcaccatcacttgccaggcgagtcaggacattagcaactatttaaattggtatcagcagaaaccagggaaagcccctaagctcctgatctacgatgcatccaatttggaaacaggggtcccatcaaggttcagtggaagtggatctgggacagattttactttcaccatcagcagcctgcagcctgaagatattgcaacatattactgtcaacagtatgataatctccctttcacggctggagattaaac

SEQ ID NO: 5975 - DNA, 322 bp, Homo sapiens; identical to SEQ ID NO: 1037

SEQ ID NO: 5976 - DNA, 328 bp, Homo sapiens
gaaattgtgttgacacagtctccagccaccctgtctttgtctccaggggaaagagccaccctctcctgcagggccagtcagagtgttagcagctacttagcctggtaccaacagaaacctggccaggctcccaggctcctcatctatgatgcatccaacagggccactggcatcccagccaggttcagtggcagtgggtctgggacagacttcactctcaccatcagcagcctagagcctgaagattttgcagtttattactgtcagcagcgtagcaactggcctccggagctcactttcggcggagggaccaaggtggagatcaaac

SEQ ID NO: 5977 - DNA, 319 bp, Homo sapiens
gacatccagatgacccagtctccttccaccctgtctgcatctgtaggagacagagtcaccatcacttgccgggccagtcagagtattagtagctggttggcctggtatcagcagaaaccagggaaagcccctaagctcctgatctataaggcgtctagtttagaaagtggggtcccatcaaggttcagcggcagtggatctgggacagaattcactctcaccatcagcagcctgcagcctgatgattttgcaacttattactgccaacagtataatagttatcccacttttggccaggggaccaagctggagatcaaac

SEQ ID NO: 5978 - DNA, 316 bp, Homo sapiens
tcctatgtgctgactcagccaccctcggtgtcagtggccccaggacagacggccaggattacctgtgggggaaacagcattggaagtaaaagtgtgcactggtaccagcggaagccaggccaggcccctgtgctggtcgtctatgatgatagcgaccggccctcagggatccctgagcgattctctggctccaactctgggaacacggccaccctgaccatcagcagggtcgaagccggggatgaggccgactattactgtcaggtgtgggataggggggtggtattcggcggagggaccaagctgaccgtcctag

SEQ ID NO: 5979 - DNA, 322 bp, Homo sapiens; identical to SEQ ID NO: 927

SEQ ID NO: 5980 - DNA, 328 bp, Homo sapiens
cagactgtggtgacccaggagccatcgttctcagtgtcccctggagggacagtcacactcacttgtggcttgagctctggctcagtctctaattactaccccagctggtaccagcagaccccaggccaggctccacgcgctctcatctacagcacaaaaattcgctcttctggggtccctgatcgcttctctggctccatcgttgggagcaaagctgccctcaccatcacgggggcccaggcagatgacgaatcggattattactgtgtgctatatatgggtggtggcatttctgtcttcggaactgggaccagggtcaccgtcctag

SEQ ID NO: 5981 - DNA, 331 bp, Homo sapiens
cagtctgccctgactcagcctccctccgcgtccgggtctcatggacagtcagtcaccatctcctgcactggaaccagcagtgacgttggtggttataactatgtctcctggtgccaacagcacccaggcaaagcccccaaactcatgatttatgaggtcagtaagcggccctcaggggtccctgatcgcttctctggctccaagtctggcaacacggcctccctgaccgtctctgggctccaggctgaggatgaggctgattattactgcggctcatatgcaggcagcaacaattgggtgttcggcggagggaccaagctgaccgtcctag

SEQ ID NO: 5982 - DNA, 331 bp, Homo sapiens
cagtctgccctgactcagcctcgctcagtgtccgggtctcctggacagtcagtcaccatctcctgcactggaaccagcagtgatgttggtggttataagtatgtctcctggtaccaacagcacccaggcaaagcccccaaactcatgatttatgatgtcaataagcggccctcaggggtccctgatcgcttctctggctccaagtctggcaacacggcctccctgaccatctctgggctccaggctgaggatgaggctgattactactgctgctcatatgcgggcatttacagttcagtcttcggaactgggacaaaggtcaccgtcctag

SEQ ID NO: 5983 - DNA, 331 bp, Homo sapiens
cagtctgccctgactcagcctcgctcagtgtccgggtctcctggacagtcagtcaccatctcctgcactggaaccagcagggatgttggtggttataagtatgtctcctggtaccagcagcacccaggcaaagcccccaaactcatgatttatgatgtcagtaagcggccctcaggggtccctgatcgcttctctggctccaagtctggcaacacggcctccctgaccatctctgggctccaggctgaggatgaggctgattattactgctgctcatatgcaggcagttacgcctctgtcttcggcactgggaccaaggtctccgtcttag

SEQ ID NO: 5984 - DNA, 322 bp, Homo sapiens
gacatccagatgacccagtctccttccaccctgtctgcatctgtcagagacagagtcaccatcacttgccgggccagtcagaatattagtagctggttggcctggtttcagcagaaaccagggaaagcccctaagctcctgatctataaggcgtctagtttaggaagtggggtcccatcaaggttcagcggcagtggatctgggacagaattcactctcaccatcagcagcctgcaccctgatgactttgcaacttattactcccaacagtataatacttactggtacacttttggccaggggaccaagctggagatcaaac

SEQ ID NO: 5985 - DNA, 322 bp, Homo sapiens
gaaattgtgttgacacagtctccagtcaccctgtctatgtctccaggggaaagagccaccctctcctgcagggccagtcagagtgttcgcagctacttagcctggtaccaacagaaacctggccaggctcccaggctcctcatctatgatgcatccaacagggccactggcatcccagccaggttcagtggcagtgggtctgggacagacttcactctcaccatcagcagcctagagcctgaagattttgcagtttattactgtcagcaccgaagcagctggcccggtgctttcggcggagggaccaaggtggagatcaaac

SEQ ID NO: 5986 - DNA, 322 bp, Homo sapiens
gacatccagatgacccagtcgccatcctccctgtctgcatctgtaggagacagagtcaccatcacttgccgggcaagtcagagcattagcagttttttaaattggtatcagcagagaccagggaaagcccctaagctcctgacctatgctgcatccagtttgcgaagtggggtcccatctaggttcattggcagtatctctgggacagattacactctcaccatcagcagtctgcaacctgaagattttgcaacttactactgtcaacaaaattacaatcccccgtacacttttggccaggggaccaagctggagatcaaac

SEQ ID NO: 5987 - DNA, 322 bp, Homo sapiens; identical to SEQ ID NO: 927

SEQ ID NO: 5988 - DNA, 334 bp, Homo sapiens
cagtctgccctgactcagcctccctccgcgtccgggtctcctggacagtcagtcaccatctcctgcactggaaccagcagtgacgttggtggttataactatgtctcctggtaccaacagcacccaggcaaagcccccaaactcttgatttatgaggtcaataagcggccctcaggggtccctgatcgcttctctggctccaagtctggcaacacggcctccctgaccgtctctgggctccagactgaggatgaggctgattattactgcagctcatatgaaggcaacactttgaatgtggtattcggcggagggaccaagctgaccgtcctag

SEQ ID NO: 5989 - DNA, 316 bp, Homo sapiens
tcctatgagctgactcagccaccctcagtgtccgtgtccccaggacagacagccagcatcacctgctctggagataaattgggggataaatatgcttgctggtatcagcagaagccaggccagtcccctgtactggtcatctatcaagatagcaagcggccctcagggatccctgagcgattctctggctccaactctgggaacacagccactctgaccatcagcgggacccaggctatggatgaggctgactatttctgtcaggcgtgggacagcatcactggattcggcggggggaccaagctgaccgtcctag

SEQ ID NO: 5990 - DNA, 337 bp, Homo sapiens
gacatcgtgatgacccagtctccagactccctggctgtgtctctgggcgagagggccaccatcaactgcaagtccagccagagtgttttatacagctccaacaataagaactacttagcttggtaccagcagaaaccaggacagcctcctaagctgctcatttactgggcatctacccgggaatccggggtccctgaccgattcagtggcagcgggtctgggacagatttcactctcaccatcagcagcctgcaggctgaagatgtggcagtttattactgtcagcaatattatcctactcctggtttcggccctgggaccaaagtgcatatcaaac

SEQ ID NO: 5991 - DNA, 331 bp, Homo sapiens
cagtctgccctgactcagcctgcctccgtgtctgggtctcctggacagtcgatcaccatctcctgcactggaaccagcagtgacgttggtggttataactatgtctcctggtaccaacagcacccaggcaaagcccccaaactcatgatttatgaggtcagtaatcggccctcaggggtttctaatcgcttctctggctccaagtctggcaacacggcctccctgaccatctctgggctccaggctgaggacgaggctgattattactgcagctcatatacaagcagcagtcctgtggtattcggcggagggaccaagctgaccgtcctag

SEQ ID NO: 5992 - DNA, 322 bp, Homo sapiens; identical to SEQ ID NO: 5205

SEQ ID NO: 5993 - DNA, 325 bp, Homo sapiens
gaagttgtgttgacacagtctccagccaccctgtctttgtctccaggggatagagccaccctctcctgcagggccagtcagagtgttagcagctacttagcctggtaccaacagaaacctggccaggctcccaggctcctcatctatgatgcatccaacagggccactggcatcccagccaggttcagtggcagtgggtctggggcagacttcactctcaccatcagcagcctagagcctgaagattttgcagtttattactgtcagcagcgtagcaactggcctccgaacacttttggccaggggaccaagctggagatcaaac

SEQ ID NO: 5994 - DNA, 310 bp, Homo sapiens
gacatccagatgacccagtctccatcctccctgtctgcatctgtaggagacagagtcaccatcacttgccgggcgagtcagggcattagcaattatttagcctggtatcagcagaaaccagggaaagttcctaagctcctgatctatgctgcatccactttacaatcaggggtcccatctcggttcagtggcagtggatctgggacagatttcactctcaccatcagcagcctgcagcctgaagatgttgcagcttattactgtcaaaacgggctcactttcggcggagggaccaagttggagatcaaac

SEQ ID NO: 5995 - DNA, 328 bp, Homo sapiens
gaaattgtgttgacgcagtctccaggcaccctgtctttgtctccaggggaaagagccaccctctcctgcagggccagtcagagtgttagcagcagctacttagcctggtaccagcagaaacctggccaggctcccaggctcctcatctatggtgcatccagcagggccactggcatcccagacaggttcagtggcagtgggtctgggacagacttcactctcaccatcagcagactggagcctgaagattttgcagtgtattactgtcagcagtatggtagctcacctccattcactttcggccctgggaccaaagtggatatcaaac

SEQ ID NO: 5996 - DNA, 334 bp, Homo sapiens
aattttatgctgactcagccccactctgtgtcggagtctccggagaagacggtaaccatctcctgcaccggcggcagtggccacattgccagcaactatgtgcagtggtaccagcagcgcccgggcagtgcccccaccattttgatctatgaggataaccaaagaccctctggggtccctgatcggttctctggctccatcgacagctcctccaactctgcctccctcaccatctctggactgaagactgaggacgaggctgactactactgtcagtcttatgatagcatcaatcatgtggtattcggcggagggaccaagctgaccgtcctag

SEQ ID NO: 5997 - DNA, 340 bp, Homo sapiens
aattttatgctgactcagccccactctgtgtcggagtctccggggaagacggtaatcatctcctgcacccgcagcagtggcagcattgccagcaactatgtgcagtggtaccagcaacgcccgggcagttcccccaccaatgtgatctatgaggataaccaaagaccctctggggtccctgatcggttctctggctccatcgacagctcctccaactctgcctccctcaccatctctggactgaagactgaggacgaggctgactactactgtcagtcttatgatagcagcaattcccccaattgggtgttcggcggagggaccaagctgaccgtcctag

SEQ ID NO: 5998 - DNA, 322 bp, Homo sapiens
gaaatagtgatgacgcagtctccagcctccctgtctgtgtctccaggggagagagccaccctctcctgcagggccagtcagagtattagcaggcacttagcctggtaccagcagaaacctggcgaggctcccaggctcctcatctatggtgcttccaccagggccactggtatcccagccaggttcagtggctttgggtctgggacagacttcaccctcaccatcaacagcctgcagtctgaagattttgcagtttattactgtcagcagtataagaattggctccggacgttcggccaagggaccaaggtggaaatcaaac

SEQ ID NO: 5999 - DNA, 337 bp, Homo sapiens
gacatcgtgatgacccagtctccagactccctggctgtgtctctgggcgagagggccaccatcaactgcaagtccagccagagtgttttaaacagctccaacaataagaattacttagcttggtaccagcagaaaccaggacagcctcctaagctgctcatttactgggcatctacccgggaatccggggtccctgaccgattcagtggcagcgggtctgggacagatttcactctcaccatcagcagcctgcaggctgaagatgtggcagtttattactgtcagcaatattatagtactcggacgttcggccaagggaccaaggtggaaatcaaac

SEQ ID NO: 6000 - DNA, 337 bp, Homo sapiens
gagatcgtgatgacccagactccactctccttgtctatcacccctggagagcaggcctccatgtcctgcaggtctagtcagagcctcctacatagtgatggatacacctatttgtattggtttctgcagaaagccaggccagtctccacagctcctgctctgtgaagtttccaaccggttctctggagtgccagataggttcagtggcagcgggtcagggacagatttcacactgaaaatcagccgggtggaggctgaggatgttggactttattactgcatgcaagatgcacaaggtccccctcacgcggcggagggaccaaggtggtgatcaaac

SEQ ID NO: 6001 - DNA, 319 bp, Homo sapiens
tcctatgagctgactcagccaccctcagtgtccgtgtccccaggacagacagccaacatcacctgctctggagataaattgggggataaatatgcttcctggtatcagcagaagccaggccagtcccctgtactggtcatctatcaagatagcaggcggccctcagggatccctgagcgattctctggctccaactctgggaacacagccactctgaccatcagcgggacccaggctatggatgaggctgactattactgtcaggcgtgggacagcagcactgtggtattcggcggagggaccaagttgaccgtcctag

SEQ ID NO: 6002 - DNA, 322 bp, Homo sapiens
gacatccagatgacccagtctccttccaccctgtctgcatctgtaggagacagagtcaccatcacttgccgggccagtcagagtattagtagctggttggcctggtatcagcagaaaccagggaaagcccctaagctcctgatctataaggcgtctagtttaaaaagtggggtcccatcaaggttcagcggcagtggatctgggacagaattcactctcaccatcagcagcctgcagcctgatgattttgcaacttattactgccaacaatataatacttattcttccacttttggccaggggaccaagctggagatcaaac

SEQ ID NO: 6003 - DNA, 346 bp, Homo sapiens
caggctgtgctgactcagccgtcttctctctctgcatctcctggagcatcagccagtctcacctgcaccctgcgcagtggcatcaatgttggtacctacaagatatactggttccagcagaagccagggagcccaccccaatatctcctgaaatacaaatcagactcagataagcagcagggctctggagtccccagccgcttctctggattcaaagatgcttcggccaatgcagggattttactcatctctgggctccagtttgaggatgaggctgactattattgtatgatttgggacaacagcgcttgggtgttcggcggagggaccaagctgaccgtcctag

SEQ ID NO: 6004 - DNA, 316 bp, Homo sapiens
gaaattgtgttgacgcagtctccaggcaccctgtctttgtctccaggggaaagagccaccctctcctgcagggccagtcagagtgttagcagcagctacttagcctggtaccagcagaaacctggccaggctcccaggctcctcatctctggttcatccagcagggccactggcatcccagacaggttcagtggcagtgggtctgggacagacttcactctcaccatcagcagactggagcctgaagattttgcagtgtattactgtcagcagtatggtagaactttcggcggagggaccaaggtggagatcaaac

SEQ ID NO: 6005 - DNA, 343 bp, Homo sapiens
gatattgtgatgactcagactccactctccctgcccgtcacccctggagaggcggcctccatctcctgcaggtctagtcagagcctcttcaatagtgatgatggaaacacctatttggactggtatgtgcagaagccagggcagtctccacagctcctgatctatacgctttcctatcgggcctctggagtcccagacaggttcagtggcagtgggtcaggcactgatttcacactgaaaatcagcagtgtggaggctgaggatgttggaatttattactgcatgcaacgtatagagtttcctccgtacacttttggccaggggaccaagctggagatcaaac

SEQ ID NO: 6006 - DNA, 331 bp, Homo sapiens
gaaattgtgttgacgcagtctccaggcaccctgtctttgtctccaggggaaagagccaccctctcctgcagggccagtcagagtgttagcagcagctacttagcctggtaccagcagaaacctggccaggctcccaggctcctcatctatggtgcatccagcagggccactggcatcccagacaggttcagtggcagtgggtctgggacagacttcactctcaccatcagcagactggagcctgaagattttgcagtgtattactgtcagcagtatggtagcctacctccggagtacacttttggccaggggaccaagctggagatcaaac

SEQ ID NO: 6007 - DNA, 322 bp, Homo sapiens; identical to SEQ ID NO: 927

SEQ ID NO: 6008 - DNA, 340 bp, Homo sapiens
gacatcgtgatgacccagtctccagactccctggctgtgtctctgggcgagagggccaccatcaactgcaagtccagccagagtgttttatacagcttcaataataagaactacttagcttggtaccagcagaaaccaggacagcctcctaagctgctcatttactgggcatctacccgggaatccggggtccctgaccgattcagtggcagcgggtctgggacagatttcactctcaccttcagcagcctgcaggctgaagatgtggcagtttattactgtcagcaatattatagttctccgtggacgttcggccaagggaccaaggtggaaatcaaac

SEQ ID NO: 6009 - DNA, 322 bp, Homo sapiens
gacatccagatgacccagtctccttccaccctgtctgcatctgtaggagacagagtcaccatcacttgccgggccagtcagagtattagtagctggttggcctggtatcagcagaaaccagggaaagcccctaagcttctgatctataaggcgtccagtttagaaagtggggtcccatcaaggttcagcggcagtggatctgggacagaattcactctcaccatcagcagcctgcagccagatgattttgcaacttattactgccaacaatataatagttatccgctcactttcggcggagggaccaaggtggagatcaaac

SEQ ID NO: 6010 - DNA, 325 bp, Homo sapiens
gaaattgtgttgacgcagtctccaggcaccctatctttgtctccaggggaaagagccaccctctcctgcagggccagtcagagtgttagcagcagctacttagcctggtaccagcagaaacctggccaggctcccaggctcctcatctatggtgcatccagcagggccactggcatcccagacaggttcagtggcagtgggtctgggacagacttcactctcaccatcagcagactggagcctgaagattttgcagtgtattactgtcagcagtatggtagctcacctctcactttcggcggagggaccaaggtggagatcaaac

SEQ ID NO: 6011 - DNA, 325 bp, Homo sapiens
tcttctgagctgactcaggaccctgctgtgtctgtggccttgggacagacagtcaggatcacatgccaaggagacagcctcagaagctattatgcaagctggtaccagcagaagccaggacaggcccctgtacttgtcatctatggtaaaaacaaccggccctcagggatcccagaccgattctctggctccagctcaggaaacacagcttccttgaccatcactggggctcaggcggaagatgaggctgactattactgtaactcccgggacagcagtggtaaccatctcctattcggcggagggaccaagctgaccgtcctag

SEQ ID NO: 6012 - DNA, 319 bp, Homo sapiens
tcctatgagttgactcagccaccctcagtgtccgtgtccccaggacagacagccagcatcacctgctctggagataaattgggggataaatttgcttgctggtatcagcagaagccaggccagtcccctgtggtggtcatctatcaagatagtaagcggccctcagggatccctgagcgattctctggctccaactctgggaacacagccactctgaccatcagcgggacccaggctatggatgaggctgactattactgtcaggcgtggggcagcagcactgccgttttcggcggagggaccaagctgaccgtcctag

SEQ ID NO: 6013 - DNA, 322 bp, Homo sapiens
gaaattgtgttgacgcagtctccaggcaccctgtctttgtctccaggggaaagagccaccctctcctgcagggccagtcaaagtgttaacagtaactccttagcctggtaccagcagaaacctggccaggctcccaggctcctcatctatggtgcatccagcagggccactggcatcccagacagcttcagtggcagtgggtctgggacagacttcactctcaccatcagcagactggagcctgaagattttgcagtgtattactgtcagcagtatggtagctcggtcaccttcggccaagggacacgactggagattaaac

SEQ ID NO: 6014 - DNA, 325 bp, Homo sapiens
gaaattgtgttgacgcagtctccaggcaccctgtctttgtctccaggggaaagagccaccctctcctgcagggccagtcagagtgttagcagcagctacttagcctggtaccagcagaaacctggccaggctcccaggctcctcatctatggtgcatccagcagggccactggcatcccagacaggttcagtggcagtgggtctgggacagacttcactctcaccatcagcagactggagcctgaagattttgcagtgtattactgtcagcagtatggtagctcaccagggacttttggccaggggaccaagctggagatcaaac

SEQ ID NO: 6015 - DNA, 337 bp, Homo sapiens; identical to SEQ ID NO: 3975

SEQ ID NO: 6016 - DNA, 331 bp, Homo sapiens
aattttatgctgactcagccccactctgtgtcggagtctccggggaagacggtaaccatctcctgcaccggcagcagtggcagtattgccagcaactatgtgcagtggtaccagcagcgcccgggcagtgcccccaccactgtgatctatgaggataaccaaagaccctctggggtccctgatcggttctctggctccatcgacagctcctccaactctgcctccctcaccatctctggactgaagactgaggacgaggctgactactactgtcagtcttataatagcaacacctgggtgttcggcggagggaccaagctgaccgtcctag

SEQ ID NO: 6017 - DNA, 331 bp, Homo sapiens
cagtctgccctgactcagcctcgctcagtgtccgggtctcctggacagtcagtcaccatctcctgcactggaaccagcagtgatgttggtggttataactatgtctcctggtaccaacagcacccaggcaaagcccccaaactcatgatttatgatgtcagtaagcggccctcaggggtccctgatcgcttctctggctccaagtctggcaacacggcctccctgaccatctctgggctccaggctgaggatgaggctgattattactgctgctcatatgcaggcagctactcttcggtgttcggcggagggaccaagctgaccgtcctag

SEQ ID NO: 6018 - DNA, 322 bp, Homo sapiens; identical to SEQ ID NO: 3877

SEQ ID NO: 6019 - DNA, 325 bp, Homo sapiens; identical to SEQ ID NO: 2345

SEQ ID NO: 6020 - DNA, 323 bp, Homo sapiens
gaaaatgtgttgacgcagtctccaggcaccctgtctttgtctccaggggaaagagccaccctctcctgcagggccagtcagagtgttagcagcacctacatagcctggtacctccagaaacctggccaggctcccaggctcctcatctatggtgcatccaccagggccactggcatcccagacaggttcagtggcagtgggtctgggacagacttcactctcaccatcagcagactggagcctgaagattttgcagtgtactactgtcagcaatatggtagctcaccgatcaccttcggccaagggtcacgactggagattaa

SEQ ID NO: 6021 - DNA, 322 bp, Homo sapiens
tcctatgagctgactcagccaccctcagtgtccgtgtccccaggacagacagccatcatcacctgctctggagataaattgggggataaatatgcttcctggtatcagcagaagccaggccagtcccccgtacaggtcatctatcaagatagcaagcggccctcagggatccctgagcgattctctggctccaactctgggaacacagccactctgaccatcagcgggacccaggctatggatgaggctgactattactgtcaggcgtgggacagcaccactctttatgtcttcggaactgggaccaaggtcaccgtcctag

SEQ ID NO: 6022 - DNA, 332 bp, Homo sapiens
cagcctgtgctgactcaatcatcctctgcctctgcttccctgggatcctcggtcaagctcacctgcactctgagcagtggccacaggacttacagcatcgcatggcatcaccagcagccagggaaggcccctcgatacttgatgaagcttgaaggtagtggagcctacagcaaggggagcggagttcctgatcgcttctcaggctccagctctggggctgaccgctacctcaccatctccaacctccaacttgaggatgaggctgattattactgtgagaccgcggacagttacactcgggtattcggcggagggaccaagctgaccgtcct

SEQ ID NO: 6023 - DNA, 331 bp, Homo sapiens
cagtctgccctgactcagcctgcctccgtgtctgggtctcctggacagtcgatcaccatctcctgcactggaactaatagtgacgttggtggttataattatgtctcctggttccagcagcacccgggcaaagcccccaaactcatgatttatgaggtcactaatcggccctcaggggtttctgatcgcttctctggctccaagtctggcaacacggcctccctgaccatctctgggctccaggctgaggacgagtctgattattattgcagctcatatgcattcggcaacattatgctattcggcggagggaccaagctgaccgtcctag

SEQ ID NO: 6024 - DNA, 325 bp, Homo sapiens
tcctatgagctgacacagccaccctcggtgtcagtgtccccaggacaaacggccaggatcacctgctctggagatgcattgccaaaaaaatatgcttattggtaccagcagaagtcaggccaggcccctgtgctggtcatctatgaggacagcaaacgaccctccgggatccctgagagattctctggctccagctcagggacaatggccaccttgactatcagtggggcccaggtggaggatgaagctgactactactgttactcaacagacagcagtggtaatcatagggtgttcggcggagggaccaagctgaccgtcctag

SEQ ID NO: 6025 - DNA, 328 bp, Homo sapiens
gaaattgtgttgacgcagtctccaggcaccctgtctttgtctccgggggagagagccaccctctcctgcagggccagtcagactcttagcagcagttacttagcctggttccagcagaaatttggccagcctcccaggctcctcgtctctggtgcgtttggcagggccactggcatcccagacaagttcagtggcagtgggtctgggacagatctcactctcaccatcagcagactggagcctgaggattctgcactgtattactgtcagcagtatgggacttcacccgcgattatattcggccaagggacacgactggagattaaac

SEQ ID NO: 6026 - DNA, 334 bp, Homo sapiens
cagtctgccctgactcagcctgcctccgtgtctgggtctcctggacagtcgatcaccatctcctgcactggaaccagcagtgacgttggtggttataagtatgtctcctggtaccaacagcacccaggcaaagcccccaaactcatgatttatgaggtcagtaatcggccctcaggggtttctaatcgcttctctggctccaagtctggcaacacggcctccctgaccatctctgggctccaggctgaggacgaggctgattattactgcagctcatatacaaccagcagcactctcgtggtattcggcggagggaccaagctgaccgtcctag

SEQ ID NO: 6027 - DNA, 337 bp, Homo sapiens; identical to SEQ ID NO: 1041

SEQ ID NO: 6028 - DNA, 334 bp, Homo sapiens
aattttatgctgactcagccccactctgtgtcggagtctccggggaagacggtaaccatctcctgcaccggcagcagtggcagcattgccagcaactatgtgcagtggtaccagcagcgcccggacagtgcccccaccactgtgatctatgaggataaccaaagaccgtctggggtccctgatcggttctctggctccatcgacagctcctccaactctgcctccctcaccatctctggactgaagactgaggacgaggctgactactactgtcagtcttatgatagcaccaagtcttgggtgtttggcggagggaccaagttgaccgtcctag

SEQ ID NO: 6029 - DNA, 340 bp, Homo sapiens
gacatcgtgatgacccaatctccagactccctggctgtgtctctgggcgagaggaccaccatcaactgcaagtccagccagagtgttttacacatctccaacaataagaactacttagcttggtaccagcagaaaccaggacagcctcctcagctgctcatttactgggcatcttcccgggaatccggggtccctgaccgattcagtggcagcgggtctgggacagatttcactctcaccatcagcagcctgcaggctgaagatgtggcagtttattactgtcagcaatattatagtactcccttaacttttggccaggggaccaagctggagatcaaac

SEQ ID NO: 6030 - DNA, 322 bp, Homo sapiens
tcctatgagctgacacagccaccctcggtgtcagtgtccccaggacaaacggccaggatcacctgctctggagatgcattgccaaaaaaatatgcttattggtaccagcagaagtcaggccaggcccctgtgctggtcatctatgaggacagcaaacgaccctccgggatccctgagagattctctggctccagctcagggacaatggccaccttgactatcagtggggcccaggtggaagatgaagctgactactactgttactcaacagacagcagtggtaatccccctttcggaactgggaccaaggtcaccgtcctag

SEQ ID NO: 6031 - DNA, 328 bp, Homo sapiens
gaagttgtgttgacgccgtctccaggcaccctgtctttgtctccaggggaaagagtcaccctctcctgcagggccagtcagagtgttagcagcaactatttagcctggtatcaacagaaacctggccagactcccaggctcctcatctatggtgcatccagcagggccactggcatcccagacaggttcagtggcagtgggtctgggacagacttcactctcaccagcagcagactggagcctgaagattttgcagtgtattcctgccagcagtatggtccctcacctccggacacttttggccaggggaccaagctggagatcaaac

SEQ ID NO: 6032 - DNA, 334 bp, Homo sapiens
cagtctgccctgactcagcctccctccgcgtccgggtctcctggacagtcagtcaccatctcctgcactggaaccagcagtgacgttggtgattataactatgtctcctggtaccaacaacagtacccaggcaaagcccccaaactcatgatttatgaggtcagtaagcggccctcaggggtccctgatcgcttctctggctccaagtctggcaacacggcctccctgaccgtctctgggctccaggctgaggatgaggctgattattactgcagctcatatgcaggcagcaacaatttggtgttcggcggagggaccaagctgaccgtcctag

SEQ ID NO: 6033 - DNA, 325 bp, Homo sapiens
tcctatgagctgacacagccaccctcggtgtcagtgtccccaggacaaacggccaggatcacctgctctggagatgcattgccaaaaaaatatacttattggtaccagcagaagtcaggccaggcccctgtggtggtcatctatgaggacaacaaacgaccctccgggatccctgagagattctctgcctccagctcagggacaatggccaccttgactatcagtggggcccaggtggaggatgaagctgactactactgttactcaacagacatcagcggtagtctttgcgtgttcggcagagggaccaagctgaccgtcctag

SEQ ID NO: 6034 - DNA, 328 bp, Homo sapiens
tcctatgagctgacacagccaccctcggtgtcagtgtccccaggacaaacggccaggatcacctgctctggagatgcattgccaaaaaaatatgcttattggtaccagcagaagtcaggccaggcccctgtgctggtcatctatgaggacagcaaacgaccctccgggatccctgagagattctctggctccagctcagggacaatggccaccttgactatcagtggggcccaggtggaggatgaagctgactactactgttactcaacagacagcagtggtaatcatagcggggtattcggcggagggaccaagctgaccgtcctag

SEQ ID NO: 6035 - DNA, 335 bp, Homo sapiens
cagcttgtgctgactcaatcgccctctgcctctgcctccctgggagcctcggtcaagctcacctgcactctgaacagtgggcacaacagatacgccgtcgcatggcatcagcagctgccagagaagggccctcggtccttgatgaagcttacctctgatggcagccacagcaggggtgacgggattcctggtcgcttctcaggctccagctctggggctgagggttacctcaccatctccagcctccagtctgaagatgaggctgactattactgtcagacctggggcactggccgagggggtcttcggcggagggaccaagttgaccgtcctag

SEQ ID NO: 6036 - DNA, 322 bp, Homo sapiens
tcctatgaggtgactcagccaccctcagtgtccgtgtccccaggacagacagccagcatcacctgctctggacataaattgggggataaatatgcttgctggtatcagcagaagccaggccagtcccctgtgctggtcatctatcaagataccaagcggccctcagggatccctgagcgattctctggctccaactctgggaacacagccactctgaccatcagcgggacccaggctatggatgaggctgactattactgtcaggcgtgggacagcagcacttctgtggtattcggcggagggaccaagttgaccgtcctag

SEQ ID NO: 6037 - DNA, 328 bp, Homo sapiens
gaaattgtgttgacgcagtctccaggcaccctgtctttgtctccaggggaaagagccaccctctcctgcagggccagtcagagtgttagcagccgctacttagcctggtaccaccagaaacctggccagcctcccaggctcctcatctatggtgcatccagcagggccactggcatcccagacaggttcagtggcagtgggtctgggacagacttcactctcaccatcagcagactggagcctgaagattttgcagtgtattactgtcagcagtatggtagctcacctctattcgctttcggccctgggaccaaagtggatatcaaac

SEQ ID NO: 6038 - DNA, 319 bp, Homo sapiens
gacatccagttgacccagtctccatccttcctgtctgcatctgtaggagacagagtcaccatcacttgccgggccagtcagggcattagcagttatttagcctggtatcagcaaaaaccagggaaagcccctaagctcctgatctatgctgcatccactttgcaaagtggggtcccatcaaggttcagcggcagtggatctgggacagaattcactctcacaatcagcagcctgcagcctgaagatttagcaacttattactgtcaacaggttaatagttacccccttttcggccaagggacacgactggagatcaaac

SEQ ID NO: 6039 - DNA, 325 bp, Homo sapiens
gaaattgtgttgacacagtctccagccaccctgtctttgtctccaggggaaagagccaccctctcctgcagggccagtcagagtgttagcacctacttagcctggtaccaacagaaacctggccaggctcccaggctcctcatctatgatgcatcctacagggccactggcgtcccagccaggttcagtggcagtgggtctgggacagacttcactctcaccatcagcagcctagagcctgaagattttgcagtttattactgtcagcagcgtagcaactggcctccgtggacgttcggccaagggaccaaggtggaaatcaaac

SEQ ID NO: 6040 - DNA, 325 bp, Homo sapiens
gagattgtgttgacacagtctccagccaccctgtctttgtctccaggagaaagagccaccctctcctgcagggccagtcagagtgttagcagctacttagcctggtaccaacagaaacctggccaggctcccaggctcctcatctatgatgcatccaacagggccactggcatcccagccaggttcagtggcagtgggtctgggacagacttcactctcaccatcagcagcctagagcctgaagattttgcagtttattactgtcagcagcgttacaactggcctccgctcactttcggcggagggaccaaggtggagatcaaac

SEQ ID NO: 6041 - DNA, 319 bp, Homo sapiens
gacatccagatgacccagtctccatcctccctgtctgcatctgtaggagacagagtcaccatcacttgccgggcaagtcagagtattagtagttatttaaattggtatcagcagaaaccagggaaagcccctaatctcctgatctatggtgcatccagtttgcaaagtggggtcccatctaggttcagtggcagtggatccgggacagaattcactctcaccatcagcagtctgcaacctgaagattttgcaacttactactgtcaacagagttacaattccccctggacgttcggccaagggaccaaggtggaagtca

SEQ ID NO: 6042 - DNA, 319 bp, Homo sapiens
gacatccaggtgacccagtctccatcctccctgtctgcatctgtaggagacagagtcaccatcacttgccaggcgagtcaggacattagcaactatttaagttggtatcagcagaagccagggaaagcccctaacctcctgatctacgatgcattcaatttggaagcgggggtcccatcaaggttcagtggaagtggatctgggacagattttactttcaccatcagcaacctgcagcctgaagatattgcaacatattactgtcaacagtatgataatctgtacacttttggccaggggaccaagctggagatcaaac

SEQ ID NO: 6043 - DNA, 328 bp, Homo sapiens
gaaattgtgttgacacagtctccagccaccctgtctttgtctccaggggaaagagccaccctctcctgcagggccagtcagagtgttagcagctacttagcctggtaccaacagaaacctggccaggctcccaggctcctcatctatgatgcatccaacagggccactggcatcccagccaggttcagtggcagtgggtctgggacagacttcactctcaccatcagcagcctagagcctgaagattttgcagtttattactgtcagcagcgtagcaactggcctccggggctcactttcggcggagggaccaaggtggagatcaaac

SEQ ID NO: 6044 - DNA, 319 bp, Homo sapiens
gaaattgtgttgacacagtctccagccaccctgtctttgtctccaggggaaagagccaccctctcctgcagggccagtcagagtattaccaactacttagcctggtatcaacagaaacctggccaggctcccagactcctcatctatgatgcatccaacagggccactggcatcccagccaggttcagtggcagtgggtctgggacagacttcactctcaccatcagccgcctagagcctgaagattttgcaatttattactgtcaccaccgtagcgactggcctcttttcggcggagggaccaaggtggagatcaaac

SEQ ID NO: 6045 - DNA, 325 bp, Homo sapiens; identical to SEQ ID NO: 3887

SEQ ID NO: 6046 - DNA, 316 bp, Homo sapiens
gacatccagatgacccagtctccttccaccctgtctgcatctgtaggagacagagtcaccatcacttgccgggccagtcagagtattagtagctggttggcctggtatcagcagaaaccagggaaagcccctaagctcctgatctataaggcgtctagtttagaaagtggggtcccatcaaggttcagcggcagtggatctgggacagaattcactctcaccatcagcagcctgcagcctgatgattttgcaacttattactgccaacagtataatagtttcaccttcggccaagggacacgactggagattaaac

SEQ ID NO: 6047 - DNA, 322 bp, Homo sapiens
gaaatagtgatgacgcagtctccagccaccctgtctgtgtctccaggggagagagccaccctctcctgcagggccagtcagagtgttagcagcaacttagcctggtaccagcagaaacctggccaggctcccaggctcctcatctatggtgcatccaccagggccactggtgtcccagccaggttcagtggcagtgggtctgggacagagttcactctcaccatcagcagcctgcagtctgaagattttgcagtttattactgtcagcagtataataactggcccctcactttcggcggagggaccaaggtggagatcaaac

SEQ ID NO: 6048 - DNA, 328 bp, Homo sapiens
tcctatgtgctgactcagccaccctcggtgtcagtggccccagggcagacggccaggattacctgtgggggaaacaacattggaagtaaaagtgtgcactggtaccagcagaagccaggccaggcccctgtgttggtcgtctatgatgatagcgaccggccctcagggatccctgagcgattctctggctccaactctgggaacacggccaccctgaccatcagcagggtcgaagccggggatgaggccgactattactgtcaggtgtgggataatactagtgctcatccctgggtgttcggcggagggaccaagctgaccgtcctag

SEQ ID NO: 6049 - DNA, 327 bp, Homo sapiens
cagtctgccctgactcagcctgcctccgtgtctgggtctcctggacagtcgatcaccatctcctgcactgcaaccagcagtgacgttggtgtttataactatgtctcctggtaccaacagcacccaggcaaagcccccaaactcatgatttatgaggtcagtaatcggccctcaggggtttctaatcgcttctctggctccaagtctggcaacacggcctccctgaccatctctgggctccaggctgaggacgaggctgattatttctgctcctcatatacaaccagcagcaccccattcggcggagggaccaagctgaccgtccta

SEQ ID NO: 6050 - DNA, 328 bp, Homo sapiens
cagtctgccctgactcagcctgcctccgtgtctgggtctcctggacagtcgatcaccatctcctgcactggaaccagcagtgacgttggtggttataactatgtctcctggtaccaacagcacccaggcaaagcccccaaactcatgatttatgaggtcagtaatcggccctcaggggtttctaatcgcttctctggctccaagtctggcaacacggcctccctgaccatctctgggctccaggctgaggacgaggctgattattactgcagctcatatacaagcagcagcacggtattcggcggagggaccaagctgaccgtcctag

SEQ ID NO: 6051 - DNA, 334 bp, Homo sapiens
cagtctgccctgactcagcctgcctccgtgtctgggtctcctggacagtcgatcaccatctcctgcactgcaaccagcagtgacgttggtggttataactatgtctcctggtaccaacagcacccaggcaaagcccccaaactcatgatttatgaggtcagtaatcggccctcaggggtttctaatcgcttctctggctccaagtctggcaacacggcctccctgaccatctctgggctccaggctgaggacgaggctgattattactgcagctcatatacaagcagcagcactaaaatggtattcggcggagggaccaagctgaccgtcctag

SEQ ID NO: 6052 - DNA, 329 bp, Homo sapiens
caggctgtggtgactcaggagccctcactgactgtgtccccaggagggacagtcactctcacctgtggctccagcactggagctgtcaccagtggtcattatccctactggttccagcagaagcctggccaagcccccaggacactgatttatgatacaagcaacaaacactcctggacacctgcccggttctcaggctccctccttgggggcaaagctgccctgaccctttcgggtgcgcagcctgaggatgaggctgagtattactgcttgctctcctatagtggtgctcgtggtattcggcggagggaccaagctgaccgtcctag

SEQ ID NO: 6053 - DNA, 322 bp, Homo sapiens; identical to SEQ ID NO: 1013

SEQ ID NO: 6054 - DNA, 334 bp, Homo sapiens
cagtctgccctgactcagcctgcctccgtgtctgggtctcctggacagtcgatcaccatctcctgcactgcaaccagcagtgacgttggtgcttataactatgtctcctggtaccaacagcacccaggcaaagcccccaaacttatgatttatgaggtcagtaatcggccctcaggggtttctaatcgcttctctggctccaagtctggcaacacggcctccctgaccatctctgggctccaggctgaggacgaggctaattattactgcagctcatatacagccagcagcactaaactgcttttcggcggagggaccaagctgaccgtcctag

SEQ ID NO: 6055 - DNA, 334 bp, Homo sapiens
cagtctgtgctgactcagccaccctcagcgtctgggacccccgggcagagggtcaccatctcttgttctgggcgcagctctaacatcggaagtaatactgttaactggtaccagcaactcccaggaacggcccccaaacttctcatttatagtaataatcagcgaccctcaggggtccctggccgattctctggctccaagtctgggacctcagcctccctggccatcagtgggctccaatctgaggatgaggctgattattattgtgcagcatgggactccagcctgaagggtccttgggtgttcggcggagggaccacgctgaccgtcctag

SEQ ID NO: 6056 - DNA, 325 bp, Homo sapiens
tcctatgagctgacacagccaccctcggtgtcagtgtccccaggacaaacggccaggatcacctgctctggagatgcattgccaaaaaaatatgcttattggtaccagcagaagtcaggccaggcccctgtgctggtcatctatgaggacagcaaacgaccctccgggatccctgagagattctctggctccagctcagggacaatggccaccttgactatcagtggggcccaggtggaggatgaagctgactactactgttactcaacagacagcagtggtaatcattgggtgttcggcggagggaccaagctgaccgtcctag

SEQ ID NO: 6057 - DNA, 322 bp, Homo sapiens
gacatccagatgacccagtctccatcctccctgcctgcatctgtgggagacagagtcaccatcagttgccgggcaagtcagagcactagcagctatttaaattggtatcagcagaaaccagggaaagcccctaagctcctgatccacgctgcatccagtttgcaaagtggggtcccatcaaggttcagtggcagtggatctgggacagatttcactctcaccatcagcagtctgcaacctgaagattttgcaacttactactgtcaacagggttccagtacccccttcactttcggccctgggaccaaagtggatttcaaac

SEQ ID NO: 6058 - DNA, 334 bp, Homo sapiens
cagtctgtgctgactcagccaccctcagcgtctgggacccccgggcagagggtcaccatctcttgttctggaagcagctccaacatcggaagtaattatgtaaactggtaccagcagctcccaggaacggcccccaaactcgtcatctatagtaatgatcagcggccctcaggggtccctgaccgattctctggctccaagtctggcacctcagcctccctggccatcagtgggctccagtctgaggatgaggctgattattactgtgctacatgggatgacagcctgaatggttactgggtgttcggcggagggaccaagctgaccgtcctag

SEQ ID NO: 6059 - DNA, 334 bp, Homo sapiens
cagtctgtgctgactcagccaccctcagcgtctgggacccccgggcagagggtcaccatctcttgttctggtagcagctccaacatcggaagtaattctgcaaactggttccagcagctcccaggaacggcccccaaactcctcatccataatgataatcagcggccctcaggggtccctgaccgattctctggctccaggtctggcacctcagcctccctggccatcagtgggctccagtctgaggatgaggctgattattactgtggaatatgggatgacagcctgaatggtttttgggtgttcggcggagggaccaagctgaccgtcctag

SEQ ID NO: 6060 - DNA, 322 bp, Homo sapiens
tcctatgagctgactcagccaccctcactgtccgtgtccccaggacagacagccagcatcacctgctctggagataaattgggaaataagtttgcttcctggtatcaacagcggccaggccagtcccctgtgctgctcatctaccaagataccaggcggccctcagggatccctgagcgattctctggctccaactctgggaacacagccactctgaccatcagcgggacccaggctttggacgaggctgactactactgtcaggcgtgggacagcagatcctatgtggtattcggcggagggaccaagctgaccgtcctag

SEQ ID NO: 6061 - DNA, 337 bp, Homo sapiens
aattttatgctgactcagccccactctgtgtcggagtctccggggaagacggtaaccatctcctgcaccggcagcagtggcagcattgccagcaactatgtgcagtggtaccagcagcgcccgggcagtgcccccgccactgtgatctatgaggataaccaaagaccctctggggtccctgatcggttctctggctccatcgacagctcctccaactctgcctccctcaccatctctggactgaggactgaggacgaggctgactactactgtcagtcttatgatagcagcaatagggctgctgtgttcggaggaggcacccagctgaccgtcctcg

SEQ ID NO: 6062 - DNA, 349 bp, Homo sapiens
cagcctgtgctgactcagccaccttctgcatcagcctccctgggagcctcggtcacactcacctgcaccctgagcagcggctacagtaattataaagtggactggtaccagcagagaccagggaagggcccccggtttgtgatgcgagtgggcactggtgggattgtgggatccaagggggatggcatccctgatcgcttctcagtcttgggctcaggcctgaatcggtacctgaccatcaagaacatccaggaagaggatgagagtgactaccactgtggggcggaccatggcagtgggagcaacttcgtgcatgtattcggcggagggaccaagctgaccgtcctag

SEQ ID NO: 6063 - DNA, 334 bp, Homo sapiens
cagtctgtgttgacgcagccgccctcagtgtctgcggccccaggacagaaggtcaccatctcctgctctggaagcagctccaacattgggaataattatgtatcctggtaccagcagctcccaggaacagcccccaaactcctcatttatgacaataataagcgaccctcagggattcctgaccgattctctggctccaagtctggcacgtcagccaccctgggcatcaccggactccagactggggacgaggccgattattactgcggaacatgggatagcagcctgagtgcccattgggtgttcggcggagggaccaagctgaccgtcctag

SEQ ID NO: 6064 - DNA, 354 bp, Homo sapiens
cagcctgtgctgactcagccaccttctgcatctgcctccctgggaacctcggtcacactcacctgcaccctgagcagcggctacagtaattataaagtggactggtaccagcagagaccagggaagggcccccggtttgtgatgcgagtgggcactggtgggattgtgggatccaagggggatggcatccctgatcgcttctcagtcttgggctcaggcctgaatcggtacctgaccgtcaagaacatccaggaagaggatgagagtgactaccactgtggggcagaccatggcagtgggagcaacttcgtgtaacggtggtattcggcggagggaccaagctgaccgtcctag

SEQ ID NO: 6065 - DNA, 337 bp, Homo sapiens
gatgttgtgatgactcagtctccactctccctgcccgtcacccttggacagccggcctccatctcctgcaggtctagtcaaagcctcgtatacagtgatggaaacacctacttgaattggtttcagcagaggccaggccaatctccaaggcgcctaatttataaggtttctaaccgggactctggggtcccagacagattcagcggcagtgggtcaggcactgatttcacactgaaaatcagcagggtggaggctgaggatgttggggtttattactgcatgcaaggtacacactggcccctcactttcggcggagggaccaaggtggagatcaaac

SEQ ID NO: 6066 - DNA, 331 bp, Homo sapiens
cagtctgccctgactcagcctcgctcagtgtccgggtctcctggacagtcagtcaccatctcctgcactggaaccagcagtgaggttggtggttataactatgtctcctggtaccaacagcacccaggcaaagcccccaaactcatgatttatgatgtcattaagcggccctcaggggtccctgatcgcttctctggctccaagtctggcaacacggcctccctggccatctctgggctccaggctgaggatgaggctgattattattgctgctcatatgcaggcagctacacttgggtgttcggcggagggaccaaggtgaacgtcctag

SEQ ID NO: 6067 - DNA, 316 bp, Homo sapiens
gaaattgtgttgacgcagtctccaggcaccctgtctttgtctccaggggaaagagccaccctctcctgcagggccagtcagagtgttagcagcagctacttggcctggtaccagcagaaacctggccaggctcccaggctcctcatctatggtgcatccagcagggccactggcatcccagacaggttcagtggcagtgggtctgggacagacttcactctcaccatcagcagactggagcctgaagattttgcagtgtattactgtcagcagtatggtagaacgttcggccaagggaccaaggtggaaatcaaac

SEQ ID NO: 6068 - DNA, 328 bp, Homo sapiens
gaagtcgtgttgacgcagtctccaggcaccctgtctttgtctccaggggaaagagccaccctctcctgtagggccagtcagagtgttagcagcagctacttaggctggtaccaacggaaacctggccaggctcccaggctcctcatctatggtgcatccagaagggccactggcatcccagacaggttcagtggcagtgggtctgggacagacttcactctcaccatcagcagactggagcctgaagattttgcagtatattactgtcagcactatggtagctcccctatatacatttttggccaggggaccaagctggagatcaaac

SEQ ID NO: 6069 - DNA, 325 bp, Homo sapiens
gacatccagatgacccagtttccatcctccctgtctgcatctgtaggagacagagtcaccatcacttgccgggcaagtcagagcattagcaactatttaaattggtatcagcagaaaccagggaaagcccctaaggtcctgatctatgttgcatccagtttgcaaagtggggtcccatcaaggttcagtggcagtggatctgggacagatttcactctcaccatcagcagtctgcaacctgaagattttgcaacttactactgtcaacagacttacagtattcctccgtggacgttcggccaagggaccaaggtggaaatcaaac

SEQ ID NO: 6070 - DNA, 325 bp, Homo sapiens
gacatccagatgacccagtctccatcctccctgtctgcatctgtaggagacagagtcaccatcacttgccgggcaagtcagagcattagcagctatttaaattggtatcagcagaaaccagggaaagcccctaagctcctgatctatgctgcatccagtttgcaaagtggggtcccatcaaggttcagtggcggtggatctgggacagatttcactctcaccatcagcagtctgcaacctgaagattttgcaacttactactgtcaacagagttacagtacccccccgtggacgttcggccaagggaccaaggtggaaatcaaac

SEQ ID NO: 6071 - DNA, 331 bp, Homo sapiens
cagtctgtgctgactcagccaccctcagcgtctgggacccccgggcagagggtcaccatctcttgttctggaagcagctccaacatcggaagtaatactgtaaactggtaccagcagctcccaggaacggcccccaaactcctcatctatagtaataatcagcggccctcaggggtccctgaccgattctctggctccaagtctggcacctcagcctccctggccatcagtgggctccagtctgaggatgaggctgattattactgtgcagcatgggatgacagcctgaatgctttcttattcggcggagggaccaagctgaccgtcctag

SEQ ID NO: 6072 - DNA, 331 bp, Homo sapiens
cagtctgccctgactcagcctgcctccgtgtctgggtctcctggacagtcgatcaccatctcctgcactggaaccagcagtgacgttggtggttataactatgtctcctggtaccaacagcacccaggcaaagcccccaaactcatgatttatgaggtcagtaatcggccctcaggggtttctaatcgcttctctggctccaagtctggcaacacggcctccctgaccatctctgggctccaggctgaggacgaggctgattattactgcagctcatatacaagcagcagcactctaggattcggcggagggaccaagctgaccgtcctag

SEQ ID NO: 6073 - DNA, 322 bp, Homo sapiens
gaaattgtgttgacgcagtctccaggcaccctgtctttgtctccaggggaaagagccaccctctcctgcagggccagtcagagtgtaagcagcggctacttagcctggtaccagcagagacctggccaggctcccagactcctcatctctggtgcttccaacagggcgactggcgtcccagacaggttcagaggcagtgggtctgggaccgacttcactctcaccatcaccagattggagcctgaagactttgcagtgtattactgtcagcagtatcatatctcacggacgttcggccaagggaccaaggtggaaatcaaac

SEQ ID NO: 6074 - DNA, 322 bp, Homo sapiens; identical to SEQ ID NO: 1668

SEQ ID NO: 6075 - DNA, 340 bp, Homo sapiens
cagtctgccctgactcagcctgcctccgtgtctgggtctcctggacagtcgatcaccatctcctgcactggaaccagcagtgacgttggtggttataactatgtctcctggtaccaacagcacccaggcaaagcccccaaactcatgatttatgaggtcagtaatcggccctcaggggtttctaatcgcttctctggctccaagtctggcaacacggcctccctgaccatctctgggctccaggctgaggacgaggctgattattactgcagctcatatacaaacagcagcacctttacctcttatgtcttcggaactgggaccaaggtcaccgtcctag

SEQ ID NO: 6076 - DNA, 331 bp, Homo sapiens
cagtctgccctgactcagcctgcctccgtgtctgggtctcctggacagtcgatcaccatctcctgcactggaaccagcagtgacgttggtggttataactatgtctcctggtaccaacagcacccaggcaaagcccccaaactcatgatttatgaggtcagtgatcggccctcaggtgtttctaatcgcttctctggctccaagtttggcaacacggcctccctgaccatctctgggctccaggctgaggacgaggctgattattactgcagctcatatacaagcagcagcacttgggtgttcggcggagggaccaagctgaccgtcctag

SEQ ID NO: 6077 - DNA, 325 bp, Homo sapiens
tcctatgtgctgactcagccaccctcggtgtcagtggccccaggacagacggccaggattacctgtgggggaaacaacattggaagtaaaagtgtgcactggtaccagcagaagccaggccaggcccctgtgctggtcgtctatgatgatagcgaccggccctcagggatccctgagcgattctctggctccaactctgggaacacggccaccctgaccatcagcagggtcgaagccggggatgaggccgactattactgtcaggtgtgggatagtagtagtgatcaaggggtattcggcggagggaccaagctgaccgtcctag

SEQ ID NO: 6078 - DNA, 322 bp, Homo sapiens
gaaatagtgatgacgcagtctccagccaccctgtctgtgtctccaggggaaagagccaccctctcctgcagggccagtcagagtgttagcagcaacttagcctggtaccagcagaaacctggccaggctcccaggctcctcatctatggtgcatccaccagggccactggtatcccagccaggttcagtggcagtgggtctgggacagagttcactctcaccatcagcagcctgcagtctgaagattttgcagtttattactgtcagcagtataataactggccgatcaccttcggccaagggacacgactggagattaaac

SEQ ID NO: 6079 - DNA, 328 bp, Homo sapiens
gaaatagtgatgacgcagtctccagccaccctgtctgtgtctccaggggaaagagccaccctctcctgcagggccagtcagagtgttagcagcaacttagcctggtaccagcagaaacctggccaggctcccaggctcctcatctatggtgcatccaccagggccactggtatcccagccaggttcagtggcagtgggtctgggacagagttcactctcaccatcagcagcctgcagtctgaagattttgcagtttattactgtcagcagtataataactggcctccggcggtcactttcggcggagggaccaaggtggagatcaaac

SEQ ID NO: 6080 - DNA, 322 bp, Homo sapiens
gacatccagatcacccagtctccatcctccctgtctgcatctttaggagacagagtcaccatcacttgccgggcaagtcagagcattagcaactatttaaattggtatcagcagaaaccagggaaagcccctaagctcctgatctttggtgcaaccagtttgcaaagtggggtcccatcaaggttcagtggcagtggatctgggacagatttcactctcaccatcagcagtctgcaacctgaagattttgcaacttactactgtcaacagagttacagtacccctccgacgttcggccaagggaccaaggtggaaatcaaac

SEQ ID NO: 6081 - DNA, 325 bp, Homo sapiens
tcctatgagctgacacagccaccctcggtgtcagtgtccccaggacaaacggccaggatcacctgctctggagatgcgttgccaaaaaaatatgcttattggtaccagcagaagtcaggccaggcccctgtgctggtcatctatgaggacagcaaacgaccctccgggatccctgagagattctctggctccagctcagggacaatggccaccttgactatcagtggggcccaggtggaggatgaagctgactactactgttactcaacagacagtaatgggttatcccgggtgttcggcggagggaccaagctgaccgtcctag

SEQ ID NO: 6082 - DNA, 334 bp, Homo sapiens
cagtctgccctgactcaacctgcctccgtgtctgggtctcctggacagtcgatcaccatctcctgcactggaaccagcagtgatgttgggagttataaccttctctcctggtaccaacagcacccaggcaaagcccccaaactcatgatttatgagggcagtaagcggccctcaggggtttctaatcgcttctctggctccaagtctggcaacacggcctccctgacaatctctgggctccaggctgaggacgaggctgattattactgctgctcatatgcaggtagtagcactgttcgggtgttcggcggagggaccatgctgaccgtcctag

SEQ ID NO: 6083 - DNA, 319 bp, Homo sapiens
tcctatgagctgactcagccaccctcagtgtccgtgtccccaggacagacagccagcatcacctgctctggagataaattgggggataaatatgcttgctggtatcagcagaagccaggccagtcccctgtgctggtcatctatcaagatagcaagcggccctcagggatccctgagcgattctctggctccaactctgggaacacagccactctgaccatcagcgggacccaggctatggatgaggctgactattactgtcaggcgtgggacagcagcactggagtattcggcggagggaccaagctgaccgtcctag

SEQ ID NO: 6084 - DNA, 330 bp, Homo sapiens
cagtctgccctgactcagcctccctccgcgtccgggtctcctggacagtcagtcaccatctcctgcactggaaccagcagtgacgttggtggttataactatgtctcctggtaccaacagcacccaggcaaagcccccaaactcatgatttatgaggtcagtaagcggccctcaggagtccctgatcgcttctctggctccaagtctggcaacacggcctccctgaccgtctctgggctccagactgaggatgaggctgattattactgcagctcatatgcaggcagcaacaatttcgtcttcggaactgggaccaaggtcaccgtccta

SEQ ID NO: 6085 - DNA, 322 bp, Homo sapiens; identical to SEQ ID NO: 1798

SEQ ID NO: 6086 - DNA, 325 bp, Homo sapiens
gaaattgtgttgacacagtctccagccaccctgtctttgtctccaggggaaagagccaccctctcctgcagggccagtcagagtgttagcagctacttagcctggtaccaacagaaacctggccaggctcccaggctcctcatctatgatgcatccaacagggccactggcatcccagccaggttcagtggcagtgggtctgggacagacttcactctcaccatcagcagcctagagcctgaggattttgcagtttattactgtcagcagcgtagcaactggccttcgatcaccttcggccaagggacacgactggagattaaac

SEQ ID NO: 6087 - DNA, 322 bp, Homo sapiens
tcctatgagctgactcagccaccctcagtgtccgtgtccccaggacagacagccagcatctcctgctctggagataaattgggggatagatatgcttgctggtatcaacagaagccaggccagtcccctgtgctggtcatctatcaagataacaagcggccctcagggatccctgagcgattctctggctccaactctgggaacacagccactctgaccatcagcgggacccaggctatggatgaggctgactatttctgtcaggcgtgggacagcagcaccaatgtggtattcggcggagggaccaagctgaccgtcctag

SEQ ID NO: 6088 - DNA, 340 bp, Homo sapiens
gacatcgtgatgacccagtctccagactccctggctgtgtctctgggcgagagggccaccatcaactgcaagtccagccagagtgttttatacagctccaacaataagaactacttagcttggtaccagcagaaaccaggacagcctcctattctgctcatttactgggcatctacacgggaatccggggtccctgaccgattcagtggcagcgggtctgggacagacttcactctcaccatcagcagcctgcaggctgaagatgtggcaatttattactgtcagcaatataatagtcatcctccgacttttggccaggggaccaagctggagatcaaac

SEQ ID NO: 6089 - DNA, 322 bp, Homo sapiens; identical to SEQ ID NO: 4573

SEQ ID NO: 6090 - DNA, 325 bp, Homo sapiens; identical to SEQ ID NO: 883

SEQ ID NO: 6091 - DNA, 340 bp, Homo sapiens
gacatcgtgatgacccagtctccagactccctggctgtgtctctgggcgagagggccaccatcaactgcaagtccagccagagtgttttatacagttacaacaataagaactacttagcttggtaccagcagaaattaggacagcctcctaagctgctcatttactgggcatctacccgggaatccggggtccctgaccgattcagtggcagcgggtctgggacagatttcactctcaccatcagcagcctgcagcctgaagatgtggcagtttattactgtcagcaatattatagtaatccgctcactttcggcggagggaccaaggtggagatcaaac

SEQ ID NO: 6092 - DNA, 334 bp, Homo sapiens
cagtctatactgactcagccaccctcagcgtctgggacccccgggcagagggtcagcatctcttgttctggaagcagctccaacatcggaattaatactgtaaactggtaccagcagctcccaggaacggcccccaaactcctcatgtatagtaataatcagcggccctcaggggtccctgaccgattctctggctccaagtctggcacctcagcctccctggccatcagtgggctccagtctgaggatgaggctgattattactgtgcagcatgggatgacagcctgaatggccgttatgtcttcggaactgggaccaaggtcaccgtcctag

SEQ ID NO: 6093 - DNA, 328 bp, Homo sapiens
gacatccagatgacccagtctccatcctccctgtctgcatctgtaggagacagagtcaccatcacttgccgggcaagtcagggcattagaaatgatttaggctggtatcagcagaaaccagggaaagcccctaagcgcctgatctatgctgcatccagtttgcaaagtggggtcccatcaaggttcagcggcagtggatctgggacagaattcactctcacaatcagcagcctgcagcctgaagattttgcaacttattactgtctacagcataataattaccctccaaggctcactttcggcggagggaccaaggtggagatcaaac

SEQ ID NO: 6094 - DNA, 319 bp, Homo sapiens
tcctatgagctgacacagccaccctcggtgtcagtgtccccaggacaaacggccaggatcacctgctctggagatgcattgccaaaaaaatatgcttattggtaccagcagaagtcaggccaggcccctgtgctggtcatctatgaggacagcaaacgaccctccgggatccctgagagattctctggctccagctcagggacaatggccaccttgactatcagtggggcccaggtggaggatgaagctgactactactgttactcaacagacagcagtggtaatgtcttcggaactgggaccaaggtcaccgtcctag

SEQ ID NO: 6095 - DNA, 328 bp, Homo sapiens
tcctatgagctgacacagccaccctcggtgtcagtgtccccaggacaaacggccaggatcacctgctctggagatgcattgccaaaaaaatatgcttattggtaccagcagaagtcaggccaggcccctgtgctggtcatctatgaggacagcaaacgaccctccgggattcgtgagagattctctggctccagctcagggacaacggccaccctgactatcagtggggcccaggtggaggatgaagctgactactactgttactcaacagacagcagtgataatcatagaggggtcttcggaactgggaccaaggtcaccgtcctag

SEQ ID NO: 6096 - DNA, 322 bp, Homo sapiens
tcctatgagctgacacagccaccctcggtgtcagtgtccccaggacaaacggccaggatcacctgctctggagatgcattgccaaaaaaatatgcttattggtaccagcagaagtcaggccaggcccctgtgctggtcatctatgaggacagcaaacgaccctccgggatccctgagagattctctggctccagctcagggacaatggccaccttgactatcagtggggcccaggtggaggatgaagctgactactactgttactcaacagacagcagtggtaatggggtgttcggcggagggaccaagctgaccgtcctag

SEQ ID NO: 6097 - DNA, 322 bp, Homo sapiens
gacatccagatgacccagtctccttccaccctgtctgcatctgtaggagacagagtcaccatcacttgccgggccagtcagagtattagtagctggttggcctggtatcagcagaaaccagggaaagcccctaagctcctgatctataaggcgtctagtttagaaagtggggtcccatcaaggttcagcggcagtggatctgggacagaattcactctcaccatcagcagcctgcagcctgatgattttgcaacttattactgccaacagtataatagttattctaagacgttcggccaagggaccaaggtggaaatcaaac

SEQ ID NO: 6098 - DNA, 340 bp, Homo sapiens
gatattgtgatgactcagtctccactctccctgcccgtcacccctggagagccggcctccatctcctgcaggtctagtcagagcctcctacatagtaatggatacaactatttggattggtacctgcagaagccagggcagtctccacagctcctgatctatttgggttctaatcgggcctccggggtccctgacaggttcagtggcagtggatcaggcacagattttacactgaaaatcagcagagtggaggctgaggatgttgggatttattactgcatgcaagctctacagactcccccgctcactttcggcggagggaccaaggtggagatcaaac

SEQ ID NO: 6099 - DNA, 316 bp, Homo sapiens
gacatccagatgacccagtctccttccaccctgtctgcatctgtaggagacagagtcaccatcacttgccgggccagtcagagtattagtaactggttggcctggtatcagcagaaaccagggaaagcccctaagctcctgatctataaggcgtctagtttagaaagtggggtcccatcaaggttcagcggcagtggatctgggacagaattcactctcaccatcagcagcctgcagcctgatgattttgcaacttattactgccaacagtataatagttattactttggccaggggaccaagctggagatcaaac

SEQ ID NO: 6100 - DNA, 328 bp, Homo sapiens
tcctatgtactgactcagccaccctcggtgtcagtggccccaggacagacggccaggattacctgtgggggaaacaacattggaagtaaaagtgtgcactggtaccagcagaagccaggccaggcccctgtgctggtcgtctatgatgatagcgaccggccctcagggatccctgagcgattctctggctccaactctgggaacacggccaccctgaccatcagcagggtcgaagccggggatgaggccgactattactgtcaggtgtgggatagtagtagtgatcatcctgtggtattcggcggagggaccaagctgaccgtcctag

SEQ ID NO: 6101 - DNA, 319 bp, Homo sapiens
gaaatagtgatgacgcagtctccagccaccctgtctgtgtctccaggggaaagagccaccctctcctgcagggccagtcagagtgttagcagcaacttagcctggtaccagcagaaacctggccaggctcccaggctcctcatctatggtgcatccaccagggccactggtatcccagccaggttcagtggcagtgggtctgggacagagttcactctcaccatcagcagcctgcagtctgaagaatttgcagtttattactgtcagcagtataataacaggtacacttttggccaggggaccaagctggagatcaaac

SEQ ID NO: 6102 - DNA, 325 bp, Homo sapiens
tcctatgagctgacacagccaccctcggtgtcagtgtccccaggacaaacggccaggatcacctgctctggagatgcattgccaagaaaatatgcttattggtaccagcagaagtcaggccaggcccctgtgctggtcatctatgaggacagcaaacgaccctccgggatccctgagagattctctggctccagctcagggacaatggccaccttgactatcagtggggcccaggtggaggatgaagctgactactactgtttctcaacaggcagcagtggtaatcattgggtgttcggcggagggaccaagctgaccgtcctag

SEQ ID NO: 6103 - DNA, 322 bp, Homo sapiens
gacatccagatgacccagtctccatcctccctgtctgcgtctgtaggagacagagtcaccatcacttgccgggcaagtcagagcattagcaactatttaaattggtatcagcagaaaccagggaaagcccctaaactcctgatgtatgttgcatccagtttgcaaagtggggtcccatcaaggttcagtggcagtggatctgggacagatttcactctcaccatcagcagtctgcaacctgaagattttgcaacttactactgtcaacagacttacactacctccgtgacgttcggccaagggaccaaggtggaaatcaaac

SEQ ID NO: 6104 - DNA, 331 bp, Homo sapiens
cagtctgtgctgactcagccaccctcagcgtctgggacccccgggcagagggtcaccatctcttgttctggaagcagctccaacatcggaagaaatactgtaaactggtaccagcagctcccaggaacggcccccaaactcctcatctatagttataatcagcggccctcaggggtccctgaccgattctctggctccaagtctggcacctcagcctccctggccatcagtgggctccagtctgaggatgaggctgattattactgtgcagcatgggatgacagcctgaattccgtggttttcggcggagggaccaagctgaccgtcctag

SEQ ID NO: 6105 - DNA, 325 bp, Homo sapiens
gaagtagtgatgacgcagtctccagccaccctgtctgtgtctccaggggaaagagccaccctctcctgcagggccagtcagagtgttagcagcaacttagcctggtaccagcagaaacctggccaggctcccaggctcctcatctatggtgcatccaccagggccactggtatcccagccaggttcagtggcagtgggtctgggacagagttcactctcaccatcagcagcctgcagtctgaagattttgcactttattactgtcagcagtataataactggcctccgtggacgttcggccaagggaccaaggtggaaatcaaac

SEQ ID NO: 6106 - DNA, 325 bp, Homo sapiens
gacatccagatgacccagtctccatcctccctgtctgcatctgtaggaggcacagtcaccatcacttgccgggcaagtcagagcattagcagttatttaaattggtatcagcagaaaccagggaaagcccctaaactcctgatctatgctgcatccagtttgcaaagtggggtcccatcaaggttcagcggcagtggatctgggacagatttcactctcaccatcagcagtctgcaacctgaagattttgcaacttactactgtcaacagagttacagtacccctccgtacacttttggccaggggaccaaggtggagatcaaac

SEQ ID NO: 6107 - DNA, 325 bp, Homo sapiens
gacatccagatgacccagtctccatcctccctgtctgcatctgtaggagacagagtcaccatcacttgccgggcaagtcacagcattagcagctatttaaattggtatcagcagaaaccagggaaagcccctaaactcctgatctatgctgcatccactttgcaaagtggggtcccatcaaggttcagtggcagtggatctgggacagatttcactctcaccatcagcagtctgcagcctgaagattttgcaacttactactgtcaacagagttacagtacccctccgtggacgttcggccaagggaccaaggtggaaatcaaac

SEQ ID NO: 6108 - DNA, 316 bp, Homo sapiens
tcctatgagctgactcagccaccctcagtgtccgtgtccccaggacagacagccagcatcacctgctctggagataaattgggggataaatatgcttgctggtatcagcagaagccaggccagtcccctgtgctggtcatctatcaagatagcaagcggccctcagggatccctgagcgattctctggctccaactctgggaacacagccactctgaccatcagcgggacccaggctatggatgaggctgactattactgtcaggcgtgggacagcagagtggtattcggcggagggaccaagctgaccgtcctag

SEQ ID NO: 6109 - DNA, 319 bp, Homo sapiens
gacatccagatgacccagtctccatcctccctgtctgcatctgtaggagacagagtcaccatcacttgccgggcaagtcagagcattagcaactatttaaattggtatcaacagaaaccagggaaagcccctaagctcctgatctatgctgcatccagtttgcaaagtggggtcccatcaaggttcagtggcagtggatctgggacagatttcactctcaccatcagcagtctgcaacctgaagattttgcaacttactactgtcaacagagttacagtaccctcactttcggccctgggaccaaagtggatatcaaac

SEQ ID NO: 6110 - DNA, 331 bp, Homo sapiens
cagtctgccctgactcagcctgcctccgtgtctgggtctcctggacagtcgatcaccatctcctgcactggaaccagcagtgatgttgggagttataaccttgtctcctggtaccaacagcacccaggcaaagcccccaaactcatgatttatgagggcagtaagcggccctcaggggtttctaatcgcttctctggctccaagtctggcaacacggcctccctgacaatctctgggctccaggctgaggacgaggctgattattactgctgctcatatgcaggtagtagcacttacgtcttcggaactgggaccaaggtcaccgtcctag

SEQ ID NO: 6111 - DNA, 316 bp, Homo sapiens
tcctatgagctgactcagccaccctcagtgtccgtgtccccaggacagacagccagcatcacctgctctggagataaattgggggataaatatgcttgctggtatcagcagaagccaggccagtcccctgtgctggtcatctatcaagatagcaagcggccctcagggatccctgagcgattctctggctccaactctgggaacacagccactctgaccatcagcgggacccaggctatggatgaggctgactattactgtcaggcgtgggacagcagcacggtgttcggcggagggaccaagctgaccgtcctag

SEQ ID NO: 6112 - DNA, 325 bp, Homo sapiens
tcctatgagctgacacagccaccctcggtgtcagtgtccccaggacaaacggccaggatcacctgctctggagatgcattgccaaaaaaatatgcttattggtaccagcagaagtcaggccaggcccctgtgctggtcatctatgaggacaacaaacgaccctccgggatccctgagagattctctggctccagctcagggacattggccaccttgactatcagtggggcccaggtggacgatgaagctgactactactgttcctcaacagacagcagtggttatcatgtggtattcggcggagggaccaagctgaccgtcctag

SEQ ID NO: 6113 - DNA, 322 bp, Homo sapiens
tcctatgagctgactcagccaccctcagtgtccgtgtccccaggacagacagccagcatcacctgctctggagataaattgggggataaatatgcttgctggtatcagcagaagccaggccagtcccctgtgctggtcatctatcaagataccaagcggccctcagggatccctgagcgattctctggctccaactctgggaacacagccactctgaccatcagcgggacccaggctatggatgaggcagactatttctgtcaggcgtgggacggcagcactgctgtggcattcggcggagggaccaagctgaccgtcctag

SEQ ID NO: 6114 - DNA, 328 bp, Homo sapiens
gaaattgtgttgacacagtctccagccaccctgtctttgtctccaggggaaagagccaccctctcctgcagggccagtcagagtattagtaacttcttagcctggtaccaacagaaacctggccaggctcccaggctcctcatctatgatgcatccaacagggccactggcatcccagccaggttcagtggcagtgggtctgggacagacttcactctcaccatcagcagcctagagcctgaagattttgcaatttattactgtcagcagcgtagcaactggcctccgaacctcactttcggcggagggaccaaggtggagatcaaac

SEQ ID NO: 6115 - DNA, 325 bp, Homo sapiens
gaaattgtgttgacgcagtctccagacaccctgtctttgtctccaggggaaagagccaccctctcctgcagggccagtcagagtgttagcagcagctacttagcctggtaccagcagaaacctggccaggctcccaggctcctcatctatggtgcatccagcagggccactggcatcccagacaggttcagtggcagtgggtctgggacagacttcactctcaccatcagcagactggagcctgaagattttgcagtgtattactgtcagcagtatggtagctcaccgggaacgttcggccaagggaccaaggtggaaatcaaac

SEQ ID NO: 6116 - DNA, 334 bp, Homo sapiens
cagtctgtcctgactcagcctgcctccgtgtctgggtctcctggacagtcgatcaccatctcctgcactggaaccagcaatgacgtcggtggttataactatgtctcctggtaccaacaacacccaggcaaagcccccaaactcatgatttatgaggtcagtaatcggccctcaggggtttctagtcgcttctctggctccaagtctggcaacacggcctccctgaccatctctggtctccaggctgaggacgaggctgattattactgcagctcatatacaagcagcagcatccagggtgtcttcggaattgggaccaaggtcaccgtcctag

SEQ ID NO: 6117 - DNA, 322 bp, Homo sapiens
gccatccagatgacccagtctccatcctccctgtctgcatctgtaggagacagagtcaccatcacttgccgggcaagtcagggcattagaaatgatttaggctggtatcagcagaaaccagggaaagcccctaagctcctgatctatgctgcatccagtttacaaagtggggtcccatcaaggttcagcggcagtggatctggcacagatttcactctcaccatcagcagcctgcagcctgaagattttgcaacttattactgtctacaagattacaattacccgtggacgttcggccaagggaccaaggtggaaatcaaac

SEQ ID NO: 6118 - DNA, 322 bp, Homo sapiens
gaaattgtgttgacacagtctccagccaccctgtctttgtctccaggggaaagagccaccctctcttgcagggccagtcagagtgttagcagctacttagcctggtaccaacagaaacctggccaggctcccaggctcctcatctatgatgcatccaacagggccactggcatcccagccaggttcagtggcagtgggtctgggacagacttcactctcaccatcagcagcctagagcctgaagattttgcagtttattactgtcagcagcgtagcaactggcctcccactttcggcggagggaccaaggtggagatcaaac

SEQ ID NO: 6119 - DNA, 322 bp, Homo sapiens
gacatccagatgacccagtctccatcctccctgtctgcatctgtaggagacagagtcaccatcacttgccgggcaagtcagagcattagcagctatttaaattggtatcagcagaaaccagggaaagcccctaagctcctgatctatgctgcatccagtttgcaaagtggggtcccatcaaggttcagtggcagtggatctgggacagatttcactctcaccatcagcagtctgcaacctgaagattttgcaacttactactgtcaacagagttacagtaccctgtggacgttcggccaagggaccaaggtggaaatcaaac

SEQ ID NO: 6120 - DNA, 319 bp, Homo sapiens; identical to SEQ ID NO: 5264

SEQ ID NO: 6121 - DNA, 325 bp, Homo sapiens
gacatccagatgacccagtctccatcctccctgtctgcatctgtaggagacagagtcaccgtcacttgccgggcaagtcagaggattagcagctatttaaattggtatcagcagaaaccagggaaagcccctaagctcctgatctatgctacatccagtttgcaaagtggggtcccatcaaggttcagtggcagtggatctgggacagatttcactctcaccatcagcagtctgcaacctgaagattttgcaacttactactgtcaacagagttacagtatgccttcctggacgttcggccaagggaccaaggtggaaatcaaac

SEQ ID NO: 6122 - DNA, 322 bp, Homo sapiens
gacatccagatgacccagtctccttccaccctgtctgcatctgtaggagacagagtcaccatcacttgccgggccagtcagagtattagtagctggttggcctggtatcagcagaaaccagggaaagcccctaagctcctgatctataaggcgtctagtttagaaagtggggtcccatcaaggttcagcggcagtggatctgggacagaattcactctcaccatcagcagcctgcagcctgatgattttgcaacttattactgccaacagtataatagttattctgagacgttcggccaagggaccaaggtggaaatcaaac

SEQ ID NO: 6123 - DNA, 331 bp, Homo sapiens
cagtctgtgctgactcagccaccctcagcgtctgggacccccgggcagagggtcaccatctcttgttctggaagcagctccaacatcggaagtaatactgtaaactggtaccagcagctcccaggaacggcccccaaactcctcatctatagtaataggcagcggccctcaggggtccctgaccgattctctggctccaagtctggcacctcagcctccctggccatcagtgggctccagtctgaggatgaggctgattattactgtgcagcatgggatgacaccctgaatggctgggtgttcggcggagggaccaagctgtccgtcctag

SEQ ID NO: 6124 - DNA, 343 bp, Homo sapiens
gacatcgtgatgacccagtctccagactccctggctgtgtctctgggcgagagggccaccatcaactgcaagtccagccagagtgttttatacagctccaacaataagacctacttagcttggtaccagcagaaaccaggacagcctcctaagctgctcatttactgggcatctacccgggaatccggggtccctgaccgattcagtggcagcgggtctgggaccgatttcactctcaccatcagcagcctgcaggctgaagatgtggcagtttatttctgtcatcaatattatagtgctccgcggttcactttcggccctgggaccaaagtggatatccaac

SEQ ID NO: 6125 - DNA, 325 bp, Homo sapiens
gacatccagatgacccagtctccgtcctccctgtctgcatctgtaggagacagagtcaccatcacttgccaggcgagtcaggacattatcaactctttaaattggtatcagcagaaaccagggaaagcccctaagctcctgatctacgatgcatccaatttggaagcaggggtcccatcaaggttcagtggaagtgggtctgggacagattttactttcaccatcagcagcctgcagcctgaagatattgcaacatattactgtcaacagtatgatactctccctcagtacacttttggccaggggaccacggtggagatcaaac

SEQ ID NO: 6126 - DNA, 322 bp, Homo sapiens
gacaaccagatgacccagtctccttccaccctgtctgcatctgtcggagacagagtcaccatcacttgtcgggccagtcaggggatcagtgattggttggcctggtatcagcagaagccagggaaagcccctaaggtcctgatctataaggcgtctaatttagaaagtggggtcccacctaggttcagcggcagtgggtctgggacagaattcactctcaccatcagcagcctgcagcctgatgattttgcaacttattactgccaacagtatcagagtttgccctacacttttggccaggggaccaaactggagatcaaac

SEQ ID NO: 6127 - DNA, 334 bp, Homo sapiens
cagtctgtgctgacgcagccgccctcagtgtctggggccccagggcagagggtcaccatctcctgcactgggagcagctccaacatcggggcaggttatgatgtacactggtaccagcagcttccaggaacagcccccaaactcctcatctatggtaacagcaatcggccctcaggggtccctgaccgattctctggctccaagtctggcacctcagcctccctggccatcagtgggctccaggctgaggatgaggctgattattactgccagtcctatgacagcagcctgagtggttatgtcttcggaactgggaccaaggtcaccgtcctag

SEQ ID NO: 6128 - DNA, 331 bp, Homo sapiens
cagtctgccctgactcagcctcactcagtgtccgggtctcctggacagtcagtcaccctctcctgcactggtaccagcagtgatgtgggtggttacaactatgtctcctggtaccagcaccacccaggcacagcccccaaactcatcgtttatcatgtctctcagcggccctctggggtccctgatcgcttctctggctccaagtctggcaacacggcctccctgaccatctctgggctccaggctgaggatgaggctgatttttactgctgctcatatgcaggctcctactcctgggtgtttggcggagggaccaaactgaccgtcctag

SEQ ID NO: 6129 - DNA, 325 bp, Homo sapiens; identical to SEQ ID NO: 5941

SEQ ID NO: 6130 - DNA, 331 bp, Homo sapiens
cagtctgtgttgacgcagccgccctcagtgtctgcggccccaggacagacggtcaccatctcctgctctggaagcagttccaacattgggaatagatatctatcctggtatcagcaactcccaggagcagcccccaaactcctcatttatgacaattataagcggccctcagggattcctgaccgattctctggctccaagtctggctcgttagccaccctcgacatcaccggactccggactggggacgaggccgattattattgcggagcctgggataccagcctgagtgttgtggtattcggcggagggaccaagctgaccgtcctag

SEQ ID NO: 6131 - DNA, 334 bp, Homo sapiens
cagtctgccctgactcagcctgcctccgtgtctgggtctcctggacagtcgatcaccatctcctgcactggaaccagcagtgacgttggtggttataactatgtctcctggtaccaacagcacccaggcaaagcccccaaactcatgatttatgaggtcagtaatcggccctcaggggtttctaatcgcttctctggctccaagtctggcaacacggcctccctgaccatctctgggctccaggctgaggacgaggctgatttttactgcagctcatatacactcagcagcactctatatgtcttcggaactgggaccaaggtcaccgtcctag

SEQ ID NO: 6132 - DNA, 331 bp, Homo sapiens
cagtctgtgctgactcagccaccctcagcgtctgggacccccgggcagagggtcaccatctcttgttctggaagcagctccaacatcggaagtaattatatatactggtaccagcagctcccaggaacggcccccaaactcctcatctataggaataatcagcggccctcaggggtccctgaccgattctctggctccaagtctggcacctcagcctccctggccatcagtgggctccggtccgaggatgaggctgattattactgtgcaacatgggatgacagcctgagtgggtgggtgttcggcggagggaccaagctgaccgtcctag

SEQ ID NO: 6133 - DNA, 322 bp, Homo sapiens; identical to SEQ ID NO: 5205

SEQ ID NO: 6134 - DNA, 322 bp, Homo sapiens
cagtctgtgttgacgcagccgccctcagtgtctgcggccccaggacagaaggtcaccatctcctgctctggaagcagctccaacattgggaataattatgtatcctggtaccagcatctcccaggaacagcccccaaactcctcatttatgacaatgataagcgaccctcagggattcctgaccgattctctggctccaagtctggcacgtcagccaccctgggcatcaccggactccagactggggacgaggccgattattactgcggaacatgggatagcagccttgtgttcggcggagggaccaagctgaccgtcctag

SEQ ID NO: 6135 - DNA, 337 bp, Homo sapiens
cagcttgtgctgactcaatcgccctctgcctctgcctccctgggagcctcggtcaagctcacctgcactctgagcagtgggcacagcagctacgccatcgcatggcatcagcagcagccagagaagggccctcggtacttgatgaagcttaacagtgatggcagccacagcaagggggacgggatccctgatcgcttctcaggctccagctctggggctgagcgctacctcaccatctccagcctccagtctgaggatgaggctgactattactgtcagacctggggcactggcattcatagggtgttcggcggagggaccaagctgaccgtcctag

SEQ ID NO: 6136 - DNA, 331 bp, Homo sapiens
cagtctgccctgactcagcctgcctccgtgtctgggtctcctggacagtcgatcaccatctcctgcactggaaccagcagtgatgttgggagttataaccttgtctcctggtaccaacagcacccaggcaaagcccccaaactcatgatttatgagggcagtaagcggccctcaggggtttctaatcgcttctctggctccaagtctggcaacacggcctccctgacaatctctgggctccaggctgaggacgaggctgattattacttctgctcatatgcaggtagtagcacttgggtgttcggcggagggaccaagctgaccgtcctag

SEQ ID NO: 6137 - DNA, 331 bp, Homo sapiens
cagtctgccctgactcagcctgcctccgtatctgggtctcctggacagtcgatcaccatctcctgcactggaaccagcagtgacgttggtggttataactttgtctcctggtaccaacagcacccaggcaaagcccccaaactcatgatttatgaggtcagtaatcggccctcaggggtttctaatcgcttctctggctccaagtctggcaacacggcctccctgaccatctctgggctccaggctgaggacgacgctgattattactgcagctcatatacaagcagcagcactctcgtcttcggaactgggaccaaggtcaccgtcctag

SEQ ID NO: 6138 - DNA, 334 bp, Homo sapiens
cagtctgccctgactcagcctgcctccgtgtctgggtctcctggacagtcgatcaccatctcctgcactggaaccagcagtgacgttggtggttataactatgtctcctggtaccaacagcacccaggcaaagcccccaaactcatgatttatgaggtcagtaatcggccctcaggggtttctaatcgcttctctggctccaagtctggcaacacggcctccctgaccatctctgggctccaggctgaggacgaggctgattattactgcagctcatatacaagcagcatcactcttgtagtattcggcggagggaccatgctgaccgtcctag

SEQ ID NO: 6139 - DNA, 334 bp, Homo sapiens
cagtctgtgctgactcagccaccctcagcgtctgggacccccgggcagagggtcaccatctcttgttctggaagcagctccaacatcggaagtaatactgtaaactggtaccagcagctcccaggaacggcccccaaactcctcatctatagtaataatcagcggccctcaggggtccctgaccgattctctggctccaagtctggcacctcagcctccctggccatcagtgggctccagtctgaggatgaggctgattattactgtgcagcatgggatgacagcctgaatggtcggggggtattcggcggagggaccaagctgaccgtcctag

SEQ ID NO: 6140 - DNA, 322 bp, Homo sapiens
gacatccagatgacccagtctccatcctccctgtctgcatctgtaggagacagagtcaccatcgcttgccgggcaagtcagagcattagcagctatttaaattggtatcagcagaaaccagggaaagcccctaagcccctgatctatgctgcatccagtttgcaaagtggggtcccatcaaggttcagtggcagtggatctgggacagatttcactctcaccatcagcagtctgcaacctgaagattttgctacttactactgtcaacagagttacaatacccctcggacgttcggccaagggaccaaggtggaaatcaaac

SEQ ID NO: 6141 - DNA, 322 bp, Homo sapiens; identical to SEQ ID NO: 837

SEQ ID NO: 6142 - DNA, 331 bp, Homo sapiens
cagtctgtgctgactcagccaccctcagcgtctgggacccccgggcagaggttcaccatctcttgttttggaagcagctccaacatcgggagtaattatgtatactggtttcagctactcccaggaacggcccccaaactcctcacctataagaataaccagcggccctcaggggtccctgaccgattctctggctccaagtctggcacctcagcctccctggccatcagtgggctccggtccgaggatgaggctgattattactgtgcagcatgggatgacagcctgaggggttgggtgttcggcggagggaccaagctgaccgtcctag

SEQ ID NO: 6143 - DNA, 340 bp, Homo sapiens
gacatcgtgatgacccagtctccagactccctggctgtgtctctgggcgagagggccaccatcaactgcaagtccagccagagtgttttatacagctccaacaataagaactacttagcttggtaccagcagaaacccggacagcctcctaaactgctcatttactgggcttctacccgggaatctggggtccctgaccgattcagtggcagcgggtctgggacagatttcactctcaccatcagcagcctgcaggctgaagatgtggcagtttattactgtcagcaatattatggtactccgctcactttcggcggagggaccaaggtggagatcaaac

SEQ ID NO: 6144 - DNA, 325 bp, Homo sapiens
gacatccagatgacccagtctccatcctccctgtctgcatctgtaggagacagagtcaccattacttgccgggcaagtcagagtattagcagctttttaaattggtatcagcagaaaccagggaaaggccctaagctcctgatctatgctgcatctagtttgccaagtggggtcccatcaaggttcagtggcagtggatctgggacagatttcactctcaccatcagcagtctgcaacctgaagattttgcgacttacttctgtcaacagagttacgttacccctcagctcactttcggcggagggaccaaggtggagatcaaac

SEQ ID NO: 6145 - DNA, 333 bp, Homo sapiens
cagtctgccctgactcagcctgcctccgtgtctgggtctcctggacagtcgatcaccatctcctgcactggaaccagcagcgatgttgggatttataacgttgtctcctggtaccaacagcacccaggcaaggcccccaaactcatgatttatgaggcctataagcggccctcaggggtttctaatcgcttctctggctccaagtctggcaacacggcctccctgacaatctctgggctccagtctgaggacgaggctgattattattgctgctcatatgcaggtagtagcacttcttgggtgttcggcggagggaccaagctgaccgtccta

SEQ ID NO: 6146 - DNA, 328 bp, Homo sapiens
gaaatagtgatgacgcagtctccagccaccctgtctgtgtctccaggggaaagagccaccctctcctgcagggccagtcagagtgttagcagcaacttagcctggtaccagcagaaacctggccaggctcccaggctcctcatctatggtgcatccaccagggccactggtatcccagccaggttcagtggcagtgggtctgggacagagttcactctcaccatcagcagcctgcagtctgaagattttgcagtttattactgtcagcagtataataactggcctcctacgtggacgttcggccaagggaccaaggtggaaatcaaac

SEQ ID NO: 6147 - DNA, 322 bp, Homo sapiens
gaaacagtgatgacgcagtctccagtcaccctgtctgtgtctccgggggaaagagccaccctctcctgcagggccagtcagagtgttagcagcgacttaggctggtaccagcagaagcctggccaggctccccggctcctcatctatggtgcatccaccagggccactggtatcccagccaggttcagtggcagtgggtctgggacagagttcactctcaccatcagcagcctgctctctgaagattttgcagtttattactgtcaacagtataatagctggcctcggacgttcggccaagggaccaaggtggaaatcaaac

SEQ ID NO: 6148 - DNA, 322 bp, Homo sapiens
gaaattgtgttgacgcagtctccaggcaccctgtctttgtctccaggggaaagagccaccctctcctgcagggccagtcagagtgttagcagcagctacttagcctggtaccagcagaaacctggccaggctcccaggctcctcttctatggtgcatccagcagggccactggcatcccacacaggttcagtggcagtgggtctgggacagacttcactctcaccatcagcagactggagcctgaagattttgcagtgtattactgtcagcaattcacctccggattcactttcggccctgggaccaaagtggatatcaaac

SEQ ID NO: 6149 - DNA, 331 bp, Homo sapiens
cagtctgtgttgacgcagccgccctcagtgtctgcggccccaggacagaaggtcaccatctcctgctctggaagcagctccaacattgggaataattatgtatcctggtaccagcagctcccaggaacagcccccaaactcctcatttatgacaataataagcgaccctcagggattcctgaccgattctctggctccaagtctggcacgtcagccaccctgggcatcaccggactccagactggggacgaggccgattattactgcggaacatgggatagcagcctgagtgctggggtattcggcggagggaccaagctgaccgtcctag

SEQ ID NO: 6150 - DNA, 322 bp, Homo sapiens
tcctatgagctgacacagccaccctcggtgtcagtgtccccaggacagacggccaggatctcctgctctgcagatgcattgccaaagctatatgcttattggtatcagcagaagccaggccaggcccctgtgctggtgatatataaagacagtgagaggccctcagggatccctgagcgattctctggctccagttcagggacaacagtcacgttgaccatcagtggagtccaggcagaagacgaggctgactattactgtcaatcaacagacagcagtggtacttgggtgttcggcggagggaccaagctgaccgtcctag

SEQ ID NO: 6151 - DNA, 322 bp, Homo sapiens
gaaatagtgatgacgcagtctccagccaccctgtctgtgtctccaggggaaagagccaccctctcctgcagggccagtcagagtgttagcagcgacttagcctggttccagcagaaacctggccaggctcccaggctcctcatctatggtgcatccaccagggccactggtatcccagccaggttcagtggcagtcggtctgggacagagttcactctcaccatcagcagcctgcagtctgaagattttgcagtttattactgtcagcagtataataactggcctccgtacacttttggccaggggaccaagctggagatca

SEQ ID NO: 6152 - DNA, 343 bp, Homo sapiens
cagtctgccctgactcagcctgcctccgtgtctgggtctcctggacagtcgatcaccatctcctgcactggaaccagcagtgacgttggtggttataactatgtctcctggtaccaacagcacccaggcaaagcccccaaactcatgatttatgaggtcagtaatcggccctcaggggtttctaatcgcttctctggctccaagtctggcaacacggcctccctgaccatctctgggctccaggctgaggacgaggctgattattactgcagctcatatacaagcagcagcacttcggggaaccattgggtgttcggcggagggaccaagctgaccgtcctag

SEQ ID NO: 6153 - DNA, 319 bp, Homo sapiens
tcctatgagctgactcagccaccctcagtgtccgtgtccccaggacagacagccagcatcacctgctctggagatagattgggaaataaatatgcttgctggtatcagcagaggccaggccagtcccctgtggtggtcatctatgaagatagcaagcggccctcagggatccctgagcgattctctggctccaactctgggaacacagccactctgaccatcagcgggacccaggctatggatgaggctgactattactgtcaggcgtgggacagcagcactgtggtgttcggcggagggaccaagctgaccgtcctag

SEQ ID NO: 6154 - DNA, 337 bp, Homo sapiens
gatattgtgatgacccagactccactctctctgtccgtcacccctggacagccggcctccatctcctgtaagtctagtcagagcctcctgcaaagtgatggaaagacctatttgtattggtacctgcagaagccaggccagcctccacaactcctgatctatgaactttccaaccggttctctggagtgccagataggttcagtggcagcgggtcagagacagatttcacactgaaaatcagccgggtggaggctgaggatgttgggacttattactgcatgcaaagtatacagtttccgtacacttttggccaggggaccaagctggagatcaaac

SEQ ID NO: 6155 - DNA, 319 bp, Homo sapiens
gacatccagatgacccagtctccttctaccctgtctgcatctgtaggagacagagtcaccatcacttgccgggccagtcagagtattagtagctggttggcctggtatcagcagagaccaggggaagcccctaagctgctcatctataaggcgtctagtttagaaagtggggtcccatcaaggttcagcggcagtagatctgggacagaattcactctcaccatcgacagcctgcagcctgatgattttgcaacttattactgccaacagtatcatagttaccggacgttcggccaagggaccaaggtggaaatcaaac

SEQ ID NO: 6156 - DNA, 337 bp, Homo sapiens
cagtctgtgctgacgcagccgccctcagtgtctggggccccagggcagagggtcaccatctcctgcactgggagcagctccaacatcggggcaggttatgatgtacactggtaccagcagcttccaggaacagcccccaaactcctcatctatggtaacagcaatcggccctcaggggtccctgaccgattctctggctccaagtctggcacctcagcctccctggccatcactgggctccaggctgaggatgaggctgattattactgccagtcctatgacagcagcctgagtggttgggtggtattcggcggagggaccaagctgaccgtcctag

SEQ ID NO: 6157 - DNA, 340 bp, Homo sapiens
gatattgtgatgactcagtctccactctccctgcccgtcacccctggagagccggcctccatctcctgcaggtctagtcagagcctcctgtatagtaatggatacaactatttggattggtacctgcagaagccagggcagtctccacagctcctgatctatttgggttctaatcgggcctccggggtccctgacaggttcagtggcagtggatcaggcacagattttacactgaaaatcagcagagtggaggctgaggatgttggggtttattactgcatgcaagctcttcaaactcctgagtacacttttggccaggggaccaagctggagatcaaac

SEQ ID NO: 6158 - DNA, 325 bp, Homo sapiens
gacatccagatgacccagtctccatcctccctgtctgcatctgtaggagacagagtcaccatcacttgccgggcaagtcagaccattagtagctatttaaattggtatcagcagaaaccagggaaagcccctaagctcctgatctatgctgcatccagtttacaaagtggggtcccatcaaggttcagtggcagtggatctgggacagatttcactctcaccatcagcagtctgcaacctgaagattttgcaacttactactgtcaacagagttacagtatgcctccgtggacgttcggccaagggaccaaggtggaaatcaaac

SEQ ID NO: 6159 - DNA, 322 bp, Homo sapiens
gaaatagtgatgacgcagtctccagccaccctgtctgtgtctccaggggaaagagccaccctctcctgcagggccagtcagagtattagcatcaacttagcctggtaccagcagaaacctggccaggctcccaggctcctcatctatggtgcatccaccagggccactggtatcccagccacgttcagtggcagtgggtctgggacagagttctctctcaccatcagcagcctgcagtctgaagattttgcagtttattactgtcagcagtataataactggcctgggacgttcggccaagggaccaaggtggaaatcaaac

SEQ ID NO: 6160 - DNA, 322 bp, Homo sapiens
gaaattgtgttgacgcagtctccaggcaccctgtctttgtctccaggggaaagagccaccctctcctgcagggccagtcagagtattagcagcagctacttagcctggtaccagcagaaacctggccaggctcccaggctcctcatctttggtgcatccagcagggccactggcatcccagacaggttcagtggcagtgggtctgggacagacttcactctcaccatcagcagactggagcctgaagattttgcagtgtattactgtcagcagtatggtagttcaccgccgttcggccaagggaccaaggtggaaatcaaac

SEQ ID NO: 6161 - DNA, 322 bp, Homo sapiens
gacatccagatgacccagtctccatcttccgtgtctgcgtctgtaggagacagagtcaccatcacttgtcgggcgagtcagggtattcacagctggttagtctggtatcagcagaaaccagggaaagcccctaacctcctgatctatgctgcatccaatttgcaaagtggggtcccatcaagattcagcggcagtggatctgggacagacttcactctcaccatcagcggcctgcagcctgaagattttgcaacttactattgtcaacaggttaacagtttcccctggacgttcggccaagggaccaaggtggaaatcaaac

SEQ ID NO: 6162 - DNA, 324 bp, Homo sapiens
tcctatgagttgactcagccaccctcagtgtccgtgtccccaggacagacagccagcatcacctgctctggagataaattgggggataaatatgcttgctggtatcaacagaagccaggccagtcccctgcgctggtcatctatcaagatatcaagcggccctcagggatccctgagcgattctctggctccaactctgggaacacagccactctgaccatcagcgggacccaggctatggatgaggctgactattactgtcaggcgtgggacatcagcactgcccatgtggtattcggcggagggaccaagctgaccgtccta

SEQ ID NO: 6163 - DNA, 346 bp, Homo sapiens
gacatcgtgatgacccagtctccagactccctggctgtgtctctgggcgagagggccaccatcaactgcaagtccagccagagtgttttatacagctccaacaataagaactacttagcttggtaccagcagaaaccaggacagcctcctaagctgctcatttactgggcatctacccgggaatccggggtccctgaccgattcagtggcagcgggtctgggacagatttcactctcaccatcagcagcctgcaggctgaagatgtggcagtttattactgtcagcaatattataatactcccctcatgtacacttttggccaggggaccaagctggagatcaaac

SEQ ID NO: 6164 - DNA, 328 bp, Homo sapiens
gaaattgtgttgacgcagtctccaggcaccctgtctttgtctccaggggaaagagccaccctctcctgcagggccagtcagagtgttagcagcagctacttagcctggtaccagcagaaacctggccaggctcccaggctcctcatctatggtgcatccagcagggccactggcatcccagacaggttcagtggcagtgggtctgggacagacttcactctcaccatcagcagactggagcctgaagattttgcagtgtattactgtcagcagtatggtagctcacctctatggacgttcggccaagggaccaaggtggaaatcaaac

SEQ ID NO: 6165 - DNA, 322 bp, Homo sapiens
tcctatgagctgactcagccaccctcagtgtccgtgtccccaggacagacagccagcatcacctgctctggagataaattgggggataaatatgcttgctggtatcagcagaagccaggccagtcccctgtgctggtcatctatcaagatagcaagcggccctcagggatccctgagcgattctctggctccaactctgggaacacagccactctgaccatcagcgggacccaggctatggatgaggctgactattactgtcaggcgtgggacagcagcactggagtggtattcggcggagggaccaagctgaccgtcctag

SEQ ID NO: 6166 - DNA, 337 bp, Homo sapiens
gatattgtgatgacccagactccactctctctgtccgtcacccctggacagccggcctccatctcctgcaagtctagtcagagcctcctacatagtgatggaaagacctatttgtattggtacctgcagaagccaggccagcctccacaactccttatctatgaactttccgaccggttctctggagtgccacataggttcagtggcagcgggtcagggacagatttcacactgaaaatcagccgggtggaggctgaggatgttggggtttattactgcatgcaaagtatacagcttccttacacttttggccaggggaccaagctggagatcaaac

SEQ ID NO: 6167 - DNA, 325 bp, Homo sapiens
tcctatgagctgacacagccaccctcggtgtcagtgtccccaggacaaacggccaggatcacctgctctggagatgcattgccaaaaaaatatgcttattggtaccagcagaagtcaggccaggcccctgtgctggtcatctttgaggacagcagacgaccctccgggatccctgagagattctctggctccagctcagggacaatggccaccttgactatcagtggggcccaggtggaggatgaagctgactactactgttactcaacagacagcagtggtaatcatcgagtgttcggcggagggaccaagctgaccgtcctag

SEQ ID NO: 6168 - DNA, 325 bp, Homo sapiens
tcctatgagctgacacagccaccctcggtgtcagtgtccccaggacaaacggccaggatcacctgctctggagatgcattgccaaaaaaatatgcttattggtaccagcagaagtcaggccaggcccctgtgctggtcatctatgaggacagcaaacgaccctccgggatccctgagagattctctggctccagctcagggacaatggccaccttgactatcagtggggcccaggtggaggatgaagctgactactactgttactcaacagacagcagtggtaatcatagggtattcggcggagggaccaagctgaccgtcctag

SEQ ID NO: 6169 - DNA, 322 bp, Homo sapiens
gacatccagatgacccagtctccttccaccctgtctgcatctgtaggagacagagtcaccatcacttgccgggccagtcagagtattagtagctggttggcctggtatcagcagaaaccagggaaagcccctaagctcctgatgtataaggcgtctagtttagaaagtggggtcccatcaaggttcagcggcagtggatctgggacagaattcactctcaccatcagcagcctgcagcctgatgattttgcaacttattactgccaacagtataatagtcacccgctcactttcggcggagggaccaaggtggagatcaaac

SEQ ID NO: 6170 - DNA, 334 bp, Homo sapiens; identical to SEQ ID NO: 2534

SEQ ID NO: 6171 - DNA, 322 bp, Homo sapiens
gacatccagatgacccagtctccatccgcgctgtctgcatctgtaggagacagagtcaccatcacttgccgggcaagtcaaaacatcaacaactatttaaattggtatcagcagaaaccagggaaagcccctaacgtcctcatctatgctgcatccagtttgcgtagtggggtcccatcgaggttcagcggcagtggatctgggacagatttcactctcaccatcagcagtctgcaacctgaagattttgcaacttactactgtcaacagagttacaacacccctgtaacttttggccaggggaccacgctggagatcaaac

SEQ ID NO: 6172 - DNA, 319 bp, Homo sapiens; identical to SEQ ID NO: 1688

SEQ ID NO: 6173 - DNA, 334 bp, Homo sapiens
gatattgtgatgacccagactccactctctctgtccgtcacccctggacagccggcctccatctcctgcaagtctagtcagagcctcctgcatggtgatggaaagacctacttgtattggtatctgcagaagccaggccagcctccacagctcctgatctatgaagtttccaaccggttctctggagtgccagataggttcagtggcagcgggtcagggacagatttcacactgaaaatcagccgggtggaggctgaggatgttggggtttattactgcatgcaaagtatacagcgttacacttttggccaggggaccaagttggagatcaaac

SEQ ID NO: 6174 - DNA, 316 bp, Homo sapiens
tcctatgagctgactcagccaccctcagtgtccgtgtccccaggacagacagccagcatcacctgctctggagataaattgggggataaatatgcttgctggtatcagcagaagccaggccagtcccctgtgctggtcatctatcaagatagcaagcggccctcagggatccctgagcgattctctggctccaactctgggaacacagccactctgaccatcagcgggacccaggctatggatgaggctgactattactgtcaggcgtgggacagcagcagggtattcggcggagggaccaagctgaccgtcctag

SEQ ID NO: 6175 - DNA, 340 bp, Homo sapiens
gacatcgtgatgacccagtctccagactccctggctgtgtctctgggcgagagggccaccatcaactgcaagtccagccagagtgttttatacagctccaacaataagaactacttagcttggtaccagcagaaaccaggacagcctcctaagctgctcatttactgggcatctacccgggaatccggggtccctgaccggttcagtggcagcgggtctgggacagatttcactctcaccatcagcagcctgcaggctgaagatgtggcagtttattactgtcagcaatattttagtactcctctcactttcggccctgggaccaaagtggatatcaaac

SEQ ID NO: 6176 - DNA, 318 bp, Homo sapiens
tcctatgagctgactcagccaccctcattgtccgtgtccccaggacagacagccagcatcacctgctctggagataaattgggaaataaatttgcttcctggtatcagcagaggccaggccagtcccctgtcctggtcatctttcaagataagaagcggccctcagggatccctgagcgattctctggctccaactctgggaacacagccactctgaccatcagcgggagccaggctatggatgaggctgactattactgtcaggcgtgggacagcgacactgtggttttcggcggagggaccaagctgaccgtccta

SEQ ID NO: 6177 - DNA, 334 bp, Homo sapiens
cagtctgccctgactcagcctccctccgcgtccgggtctcctggacagtcagtcaccatctcctgcactggggccagcagtgacgttggtggttataactatgtctcctggtacctacagcacccaggcaaagcccccaaactcatgatttatgaggtcaataagcggccctcaggggtccctgatcgcttctctggctccaagtctggcaacacggcctccctgaccgtctctgggctccaggctgaggatgaggctgattattactgcagctcatatgcaggcagcaacaatcgtgtggtattcggcggagggaccaagctgaccgtcctag

SEQ ID NO: 6178 - DNA, 346 bp, Homo sapiens
cagcctgtgctgactcagccaacctccctctcagcatctcctggagcttcagccagattcacctgcaccttgcgcagtggcgtcaatgttggtacctacaggatatactggtaccagcagaagccagggagtcttccccggtatctcctgaggtacaaatcagactcagataagcagcagggctctggagtccccagccgcttctctggatccaaagatgcttcaacaaatgtaggccttttattcatctctgggctccagtctgaagatgaggctgactattactgtgccatttggtacagcagcacttgggtgttcggcggagggaccaagctgaccgtcctag

SEQ ID NO: 6179 - DNA, 331 bp, Homo sapiens
cagtctgtgctgactcagccaccctcagcgtctgggacccccgggcagagggtcaccgtctcttgttctggaagcagctccaccatcggaagaaatactgtaaactggtaccagcacctcccaggaacggcccccaaactcctcatctatagtaataatcagcggccctcaggggtccctgaccgattctctggctccaagtctggcacctcagcctccctggccatcagtgggctccagtctgaggatgaggctgattattactgtgcagcatgggatgacagcgtgagtggttgggtgttcggcggagggaccaagctgaccgtcctag

SEQ ID NO: 6180 - DNA, 325 bp, Homo sapiens
gaaattgtgttgatgcagtctccaggcaccctgtctttgtctccaggggatagagccaccctctcctgcagggccagtcagagtgttggcagcagctacttagcctggttccagcaaaaacctggccaggctcccaggctcctcatctatggtgcttccgtcagggccactgacatcccagacaggttcagtggcagtgggtctgggacagacttcactctcaccatcagcagactggagcctgaagattttgcagtgtattactgtcagcagtatggtggctcaccgtacacttttggccaggggaccaagctggagatcaaac

SEQ ID NO: 6181 - DNA, 322 bp, Homo sapiens; identical to SEQ ID NO: 3871

SEQ ID NO: 6182 - DNA, 325 bp, Homo sapiens
gaaattgtgttgacgcagtctccaggcaccctgtctttgtctccaggggaaagaggcaccctctcctgcagggccagtcagagtgttagcagcagctccttagtctggtaccagcagaaacctggccaggctcccaggctcctcatctatggtgcatccagcagggccactggcatcccagacaggttcagtggcagtgggtctgggacagacttcactctcaccatcaacagactggagcctgaagattttgcagtgtattactgtcagcagtatggtagctctcagtggacgttcggccaagggactaaggtggaaatcaaac

SEQ ID NO: 6183 - DNA, 331 bp, Homo sapiens
cagtctgccctgactcagcctgcctccgtgtctgggtctcctggacagtcgatcaccatctcctgcactggaaccagcagtgatgttgggagttataaccttgtctcctggtaccaacagcacccaggcaaagcccccaaactcatgatttatgagggcagtaagcggccctcaggggtttctaatcgcttctctggctccaagtctggcaacacggcctccctgacaatctctgggctccaggctgaggacgaggctgattattactgctgctcatatgcaggtagtagcactgtggtattcggcggagggaccaagctgaccgtcctag

SEQ ID NO: 6184 - DNA, 337 bp, Homo sapiens
cagtatgtgctgacgcagccgccctcagtgtctggggccccaggacagagggtcaccatctcctgcactgggagcaactccaacatcggggcacgttatgatgtacactggtaccagcaacttccaggaacagcccccaaactcctcatctatgttaacaccaatcggccctcaggggtccctgaccgattctctgcctccaagtctggcacctcagcctccctggccatcactgggctccaggctgaagatgaggctgattattactgccagtcctatgacaggagcctgggtggttcgacggtgttcggcggagggaccaagctgaccgtcctag

SEQ ID NO: 6185 - DNA, 325 bp, Homo sapiens
gaagttgtgttgacgcagtctccaggcaccctgtctttgtctccaggggaaagagccaccctctcctgcagggccagtcagagtgttagcagcatctacttagcctggtaccagcagaaacctggccaggctcccaggctcctcatctttggtgcatccagcagggccactggcatcccagacaggttcagtggcagtgggtctgggacagacttcactctcaccatcagcagactggagcctgaagattttgcagtgtattactgtcagcagtatggaagctcaccgtggacgttcggccaagggaccaaggtggaaatcaaac

SEQ ID NO: 6186 - DNA, 322 bp, Homo sapiens; identical to SEQ ID NO: 927

SEQ ID NO: 6187 - DNA, 340 bp, Homo sapiens
gacatcgtgatgacccagtctccagactccctggctgtgtctctgggcgagagggccaccatcaactgcaagtccagccagagtgttttatacagctccactaataagaactacttagcttggtaccagcagaaaccaggacagcctcctaagttgctcttttactgggcatctacccgggaatccggggtccctgaccgattcagtggcagcgggtctgggacagatttcactctcaccatcagcagcctgcaggctgaagatgtggcagtttattactgtcagcaatattatactactcctccgacgttcggccaagggaccaaggtggaaatcaaac

SEQ ID NO: 6188 - DNA, 325 bp, Homo sapiens
gacatccagatgacccagtctccttccaccctgtctgcatctgtaggagacagagtcaccatcacttgccgggccagtcagagtattgataatagttggttggcctggtatcagcagaaaacagggaaggcccctaagctcctgatctataaggcgtccactttgcaaagtggcgtcccatcaagattcagcggcagtggatttgggacagaattcactctcaccatcagcagcctgcagcctgaggattttgcaacttattactgccaacaatataatagttattcaaggacgttcggccaagggaccaaggtggaaatcaaac

SEQ ID NO: 6189 - DNA, 349 bp, Homo sapiens
gaaattgtgttgacgcagtctccaggcaccctgtctttgtctccaggggaaagagccaccctctcctgctgggccagacagactattagcaccggggccagtcagagtgttagcgacaggtacttagcctggtaccagcacaaacctggccaggctcccagactcctcatctatgggacatccagcagggccactggcatcccagacaggttcagtgccagtgggtctgcgacagactccactctcaccatcagcagactggagcctgaagattttgcagtgtattactgtcagcagtatggtagttcaccttccgctttcggccctgggaccaaggtggatatcaaac

SEQ ID NO: 6190 - DNA, 322 bp, Homo sapiens
tcctatgagctgactcagccaccctcagtgtccgtgtccccaggacagacagccagcatcacctgctctggagataaattgggggataaatatgcttgctggtatcagcagaagccaggccagtcccctgtgctggtcatctatcaagatagcaagcggccctcagggatccctgagcgattctctggctccaactctgggaacacagccactctgaccatcagcgggacccaggctatggatgaggctgactattactgtcaggcgtgggacagcagcacttctgtggtattcggcggagggaccaagctgaccgtcctag

SEQ ID NO: 6191 - DNA, 334 bp, Homo sapiens
cagtctgccctgactcagcctgcctccgtgtctgggtctcctggacagtcgatcaccatctcctgcactggaaccagcagtgacgttggtggttataactatgtctcctggtaccaacagcacccaggcaaagcccccaaactcatgatttatgaggtcagtaatcggccctcaggggtttctaatcgcttctctggctccaagtctggcaacacggcctccctgaccatctctgggctccaggctgaggacgaggctgattattactgcagctcatatacaagcagcagcacccatgtggtattcggcggagggaccaagctgaccgtcctag

SEQ ID NO: 6192 - DNA, 322 bp, Homo sapiens
gacatccagatgacccagtctccatcctccctgtctgcatctgtaggagacagagtcaccatcacttgccaggcaagtcaggacattagcaactatttaaattggtatcagcagaaaccagggaaagcccctaagctcctgatttacgatgcatccaatttggaaacaggggtcccatcaaggttcagtggaagtggatctgggacagattttagtttcaccatcagcagcctgcagcctgaagatattgcaacatattactgtcaacagtatgataatctcccgtacacttttggccaggggaccaagctggagatcaaac

SEQ ID NO: 6193 - DNA, 325 bp, Homo sapiens
gacatccagatgacccagtctccatcctccctgtctgcatctgtaggagacagagtcaccatcacttgccgggcaagtcagagcattagcagctatttaaattggtatcagcagaaaccagggaaagcccctaagctcctgatctatgctgcatccagtttgcaaagtggggtcccatcaaggttcagtggcagtggatctgggacagatttcactctcaccatcagcagtctgcaacctgaggattttgcaacttactactgtcaacagagttacagtacctcggcgctcactttcggcggagggaccaaggtggagatcaaac

SEQ ID NO: 6194 - DNA, 325 bp, Homo sapiens; identical to SEQ ID NO: 6024

SEQ ID NO: 6195 - DNA, 322 bp, Homo sapiens
gacatccagatgacccagtctccatcctccctgtctgcatctgtaggagacagagtcaccatcacttgccaggcgagtcaggacattagcaactctttaaattggtatcagcagaaaccagggaaagcccctaagctcctgatctacgatgcatccaatttggaaacaggggtcccatcaaggttcagtggaagtggatctgggacagattttagtttcaccatcagcagcctgcagcctgaagatattgcaacatattactgtcaacagtattataatctcccattcactttcggccctgggaccaaagtggatatcaaac

SEQ ID NO: 6196 - DNA, 328 bp, Homo sapiens
gaaattgtgttgacgcagtctccaggcaccctgtctttgtctccaggggaaagagccaccctctcctgcagggccagtcagagtgttagcagcagctacttagcctggtaccagcagaaacctggccaggctcccaggctcctcatctatggtgcatccagcagggccactggcatcccagacaggttcagtggcagtgggtctgggacagacttcactctcaccatcagcagactggagcctgaagattttgcagtgtattactgtcagcagtatggtagctcacttacgtggacgttcggccaagggaccaaggtggaaatcaaac

SEQ ID NO: 6197 - DNA, 334 bp, Homo sapiens
cagtctgtgctgacgcagccgccctcagtgtctggggccccagggcagagggtcaccatctcctgcactgggagcagctccaacatcggggcaggttatgatgtacactggtaccagcagtttccaggaacagcccccaaactcctcatctatggtaacagcaatcggccctcaggggtccctgaccgattctctggctccaagtctggcacctcagcctccctggccatcagtgggctccaggctgaggatgaggctgattattactgccagtcctatgacagcagcctgagtggttcggtgttcggcggagggaccaagctgaccgtcctag

SEQ ID NO: 6198 - DNA, 343 bp, Homo sapiens
gacatcgtgatgacccagtctccagactccctggctgtgtctctgggcgagagggccaccatcaactgcaagtccagccagagtgttttatacagctccaacaataagaactacttagcttggtaccagcagaaaccaggacagcctcctaagctgctcatttactgggcatctacccgggaatccggggtccctgaccgattcagtggcagcgggtctgggacagatttcactctcaccatcagcagcctgcaggctgaagatgtggcagtttattactgtcagcaatattatagtactcccgcgctcactttcggcggagggaccaaggtggagatcaaac

SEQ ID NO: 6199 - DNA, 324 bp, Homo sapiens
tcctatgagctgacacagccaccctcggtgtcagtgtccccaggacaaacggccaggatcacctgctctggagatgcattgccaaaaaaatatgcttattggtaccagcagaagtcaggccaggcccctgtggcggtcatctatgaggacagcaaacgaccctccgggatccctgagagattctctggctccagctcagggacaatggccaccttgactatcagtggggcccaggtggaggatgaagctgactactactgttactcaatagacagcagtggtaatcattatgtcttcggaactgggaccaaggtcaccgtccta

SEQ ID NO: 6200 - DNA, 325 bp, Homo sapiens
gaaattgtgttgacgcagtctccaggcaccctgtctttgtctccaggggaaagagccaccctctcctgcagggccagtcagagtgtcagcagcagctacttagcctggtaccagaaaaaacctggccaggctcccaggctcctcatctatggtgcatccagcagggccactggcatcccagacaggttcagtggcagtgagtctgggacagacttcactctcaccatcagcagactggagcccgaagattttgcagtgtattactgtcagcagtatgatacttcaccctacagttttggccaggggaccaagctggagatcaaac

SEQ ID NO: 6201 - DNA, 385 bp, Homo sapiens
caggtgcagctacagcagtggggcgcaggactgttgaagccttcggagaccctgtccctcaactgcgttgtctatggtgggtccttcagtggttactactggagctggatccgccagcccccagggaaggggctggagtggattggggaaatcaatcatagtggtaccaccaactacaacccgtccctcaagagtcgagtcaccatatcagtagacacgtccaagaaccagttctccctgaagctgagctctgtgaccgccgcggacacggctgtgtattactgtgcgagaaatgaggcgtattacgatgttttgactgcttattataggggccgttactactttgactactggggccagggaaccctggtcaccgtctcctcag

SEQ ID NO: 6202 - DNA, 385 bp, Homo sapiens; identical to SEQ ID NO: 6201

SEQ ID NO: 6203 - DNA, 385 bp, Homo sapiens; identical to SEQ ID NO: 6201

SEQ ID NO: 6204 - DNA, 385 bp, Homo sapiens; identical to SEQ ID NO: 6201

SEQ ID NO: 6205 - DNA, 385 bp, Homo sapiens; identical to SEQ ID NO: 6201

SEQ ID NO: 6206 - DNA, 385 bp, Homo sapiens; identical to SEQ ID NO: 6201

SEQ ID NO: 6207 - DNA, 385 bp, Homo sapiens; identical to SEQ ID NO: 6201

SEQ ID NO: 6208 - DNA, 385 bp, Homo sapiens; identical to SEQ ID NO: 6201

SEQ ID NO: 6209 - DNA, 385 bp, Homo sapiens; identical to SEQ ID NO: 6201

SEQ ID NO: 6210 - DNA, 385 bp, Homo sapiens; identical to SEQ ID NO: 6201

SEQ ID NO: 6211 - DNA, 385 bp, Homo sapiens; identical to SEQ ID NO: 6201

SEQ ID NO: 6212 - DNA, 385 bp, Homo sapiens; identical to SEQ ID NO: 6201

SEQ ID NO: 6213 - DNA, 385 bp, Homo sapiens; identical to SEQ ID NO: 6201

SEQ ID NO: 6214 - DNA, 385 bp, Homo sapiens; identical to SEQ ID NO: 6201

SEQ ID NO: 6215 - DNA, 385 bp, Homo sapiens; identical to SEQ ID NO: 6201

SEQ ID NO: 6216 - DNA, 385 bp, Homo sapiens; identical to SEQ ID NO: 6201

SEQ ID NO: 6217 - DNA, 385 bp, Homo sapiens; identical to SEQ ID NO: 6201

SEQ ID NO: 6218 - DNA, 385 bp, Homo sapiens; identical to SEQ ID NO: 6201

SEQ ID NO: 6219 - DNA, 385 bp, Homo sapiens; identical to SEQ ID NO: 6201

SEQ ID NO: 6220 - DNA, 361 bp, Homo sapiens
cagatcaccttgaaggagtctggtccttcgctggtgaaacccacacagaccctcacgctgacctgcaacttctctgggttctcactcagcactagtggagagggtgtgggctggatccgtcagcccccaggaaaggccctgcaatggcttggagtcattttctgggataatgatgagtggtacagtccatctctgaagagcaggctcaccatcaccaaggacacctccaaaaaccaggtggtccttgcaatgaccaacgtggaccctgaggacacaggcacatatttctgtgcacacagaccccttggctggggttcatttgactactggggccagggactcccggtcaccgtctcctcag

SEQ ID NO: 6221 - DNA, 361 bp, Homo sapiens; identical to SEQ ID NO: 6220

SEQ ID NO: 6222 - DNA, 361 bp, Homo sapiens; identical to SEQ ID NO: 6220

SEQ ID NO: 6223 - DNA, 361 bp, Homo sapiens; identical to SEQ ID NO: 6220

SEQ ID NO: 6224 - DNA, 361 bp, Homo sapiens; identical to SEQ ID NO: 6220

SEQ ID NO: 6225 - DNA, 361 bp, Homo sapiens; identical to SEQ ID NO: 6220

SEQ ID NO: 6226 - DNA, 361 bp, Homo sapiens; identical to SEQ ID NO: 6220

SEQ ID NO: 6227 - DNA, 361 bp, Homo sapiens; identical to SEQ ID NO: 6220

SEQ ID NO: 6228 - DNA, 361 bp, Homo sapiens; identical to SEQ ID NO: 6220

SEQ ID NO: 6229 - DNA, 361 bp, Homo sapiens; identical to SEQ ID NO: 6220

SEQ ID NO: 6230 - DNA, 361 bp, Homo sapiens; identical to SEQ ID NO: 6220

SEQ ID NO: 6231 - DNA, 361 bp, Homo sapiens; identical to SEQ ID NO: 6220

SEQ ID NO: 6232 - DNA, 361 bp, Homo sapiens; identical to SEQ ID NO: 6220

SEQ ID NO: 6233 - DNA, 361 bp, Homo sapiens; identical to SEQ ID NO: 6220

SEQ ID NO: 6234 - DNA, 361 bp, Homo sapiens; identical to SEQ ID NO: 6220

SEQ ID NO: 6235 - DNA, 364 bp, Homo sapiens
gaggtgcagctggtgcagtctggagcagaggtgaaaaagcccggggagtctctgaagatctcctgtaagggttctggatacagctttaccacctactggatcgcctgggtgcgccagatgcccgggaaaggcctggaatggatggggatcatctatcctggtggctctgataccagatacagcccgtccttccaaggccaggtcaccatctcagccgacaagtccatcagcaccgcctacctgcagtggaccagcctgaaggcctcggacaccgccatgtattactgtgcgagacctagagatgtctacaatttcggtggttttgatatctggggccaagggacaatggtcaccgtctcttcag

SEQ ID NO: 6236 - DNA, 364 bp, Homo sapiens; identical to SEQ ID NO: 6235

SEQ ID NO: 6237 - DNA, 364 bp, Homo sapiens; identical to SEQ ID NO: 6235

SEQ ID NO: 6238 - DNA, 364 bp, Homo sapiens; identical to SEQ ID NO: 6235

SEQ ID NO: 6239 - DNA, 364 bp, Homo sapiens; identical to SEQ ID NO: 6235

SEQ ID NO: 6240 - DNA, 364 bp, Homo sapiens; identical to SEQ ID NO: 6235

SEQ ID NO: 6241 - DNA, 364 bp, Homo sapiens; identical to SEQ ID NO: 6235

SEQ ID NO: 6242 - DNA, 364 bp, Homo sapiens; identical to SEQ ID NO: 6235

SEQ ID NO: 6243 - DNA, 364 bp, Homo sapiens; identical to SEQ ID NO: 6235

SEQ ID NO: 6244 - DNA, 364 bp, Homo sapiens
gaggtgcagctggtgcagtctggagcagaggtgaaaaagcccggggagtctctgaagatctcctgtaagggttctggatacagctttaccacctactggatcgcctgggtgcgccagatgcccgggaaaggcctggaatggatggggatcatctatcctggtggctctgataccagatacagcccgtccttccaaggccaggtcaccatctcagccgacaagtccatcagcaccgcctacctgcagtggagcagcctgaaggcctcggacaccgccatgtattactgtgcgagacctagagatgtctacaatttcggtggttttgatatctggggccaagggacaatggtcaccgtctcttcag

SEQ ID NO: 6245 - DNA, 364 bp, Homo sapiens; identical to SEQ ID NO: 6235

SEQ ID NO: 6246 - DNA, 364 bp, Homo sapiens; identical to SEQ ID NO: 6235

SEQ ID NO: 6247 - DNA, 355 bp, Homo sapiens
gaggtgcagctggtggagtctggaggaggcttgatccagcctggggggtccctgagactctcctgtgcagcctctgggttcaccgtcagtagcaactacatgagctgggtccgccaggctccagggaaggggctggagtgggtctcagttctttatagcggtggtagttcattctacgcagactccgtgaagggccgattcaccatctccagagacaattccaagaacacactgtttcttcaaatgaacagcctgagagccgaggacacggccgtgtattactgtgcgagagatataagttcagctggaactctcgactactggggccagggaaccctggtcaccgtctcctcag

SEQ ID NO: 6248 - DNA, 355 bp, Homo sapiens; identical to SEQ ID NO: 6247

SEQ ID NO: 6249 - DNA, 355 bp, Homo sapiens; identical to SEQ ID NO: 6247

SEQ ID NO: 6250 - DNA, 355 bp, Homo sapiens; identical to SEQ ID NO: 6247

SEQ ID NO: 6251 - DNA, 355 bp, Homo sapiens; identical to SEQ ID NO: 6247

SEQ ID NO: 6252 - DNA, 355 bp, Homo sapiens; identical to SEQ ID NO: 6247

SEQ ID NO: 6253 - DNA, 355 bp, Homo sapiens; identical to SEQ ID NO: 6247

SEQ ID NO: 6254 - DNA, 355 bp, Homo sapiens; identical to SEQ ID NO: 6247

SEQ ID NO: 6255 - DNA, 355 bp, Homo sapiens; identical to SEQ ID NO: 6247

SEQ ID NO: 6256 - DNA, 355 bp, Homo sapiens; identical to SEQ ID NO: 6247

SEQ ID NO: 6257 - DNA, 355 bp, Homo sapiens; identical to SEQ ID NO: 6247

SEQ ID NO: 6258 - DNA, 355 bp, Homo sapiens; identical to SEQ ID NO: 6247

SEQ ID NO: 6259 - DNA, 358 bp, Homo sapiens
gaggtgcagctggtagagtctggaggaggcttgatccagcctggggggtccctgagactctcctgtgcagcctctgaattcaccgtcagtagcaacgacatgagctgggtccgccaggctccagggaaggggctggagtgggtctcagttatttatagcgatggtaacacatactacgcagactccgtgaagggccgattcaccatctccagagacaattccaagaacacgctgtatcttcaaatgaacagcctgagagccgaggacacggccatttattactgtgcgagagatcgggatttttcctactatgtttttgatatctggggccaagggacaatggtcaccgtctcttcag

SEQ ID NO: 6260 - DNA, 358 bp, Homo sapiens; identical to SEQ ID NO: 6259

SEQ ID NO: 6261 - DNA, 358 bp, Homo sapiens; identical to SEQ ID NO: 6259

SEQ ID NO: 6262 - DNA, 358 bp, Homo sapiens; identical to SEQ ID NO: 6259

SEQ ID NO: 6263 - DNA, 358 bp, Homo sapiens; identical to SEQ ID NO: 6259

SEQ ID NO: 6264 - DNA, 358 bp, Homo sapiens; identical to SEQ ID NO: 6259

SEQ ID NO: 6265 - DNA, 358 bp, Homo sapiens; identical to SEQ ID NO: 6259

SEQ ID NO: 6266 - DNA, 358 bp, Homo sapiens; identical to SEQ ID NO: 6259

SEQ ID NO: 6267 - DNA, 358 bp, Homo sapiens; identical to SEQ ID NO: 6259

SEQ ID NO: 6268 - DNA, 358 bp, Homo sapiens; identical to SEQ ID NO: 6259

SEQ ID NO: 6269 - DNA, 379 bp, Homo sapiens
gaggtgcagctggtggagtctgggggaggcctggtcaagcctggggggtccctgagactctcctgtgcagcctctggattcaccttcagtagctataccatgaactgggtccgccaggctccagggaaggggctggagtgggtctcatccattagtactagtagcagttacatatactacgcacagtcagtgaagggccgattcatcatctcaagagacaacgccaagaactcactgtatctgcaaatgaacagcctgagagccgaggacacggctgtgtattactgtgcgagagccccgtattactatgatagtagtggttattactcctactactttgactactggggccagggaaccctggtcaccgtctcctcag

SEQ ID NO: 6270 - DNA, 379 bp, Homo sapiens; identical to SEQ ID NO: 6269

SEQ ID NO: 6271 - DNA, 379 bp, Homo sapiens; identical to SEQ ID NO: 6269

SEQ ID NO: 6272 - DNA, 379 bp, Homo sapiens; identical to SEQ ID NO: 6269

SEQ ID NO: 6273 - DNA, 379 bp, Homo sapiens; identical to SEQ ID NO: 6269

SEQ ID NO: 6274 - DNA, 379 bp, Homo sapiens; identical to SEQ ID NO: 6269

SEQ ID NO: 6275 - DNA, 379 bp, Homo sapiens; identical to SEQ ID NO: 6269

SEQ ID NO: 6276 - DNA, 379 bp, Homo sapiens; identical to SEQ ID NO: 6269

SEQ ID NO: 6277 - DNA, 379 bp, Homo sapiens; identical to SEQ ID NO: 6269

SEQ ID NO: 6278 - DNA, 379 bp, Homo sapiens; identical to SEQ ID NO: 6269

SEQ ID NO: 6279 - DNA, 385 bp, Homo sapiens
caggtgcagctgcaggagtcgggcccaggactggtaaagccttcggagaccctgtccctcacctgcactgtctctggtggctccatcaggacttactactggagctggatgcggcagcccccagggaagggactggagtggattggctatatctattacagtgggaccaccaactacaacccctccctgaagagtcgtgtcaccatatcagtggacacgtccaagaaccagttctccctgaagctgagctctgtgaccgctgcggacacggccgtctattactgtgcgagagtgcaatcttattacgatggtttgactgtctcttatagtcccgctcactatcttgactactggggccagggaaccctggtcaccgtctcctcag

SEQ ID NO: 6280 - DNA, 385 bp, Homo sapiens; identical to SEQ ID NO: 6279

SEQ ID NO: 6281 - DNA, 385 bp, Homo sapiens; identical to SEQ ID NO: 6279

SEQ ID NO: 6282 - DNA, 385 bp, Homo sapiens; identical to SEQ ID NO: 6279

SEQ ID NO: 6283 - DNA, 385 bp, Homo sapiens; identical to SEQ ID NO: 6279

SEQ ID NO: 6284 - DNA, 385 bp, Homo sapiens; identical to SEQ ID NO: 6279

SEQ ID NO: 6285 - DNA, 385 bp, Homo sapiens; identical to SEQ ID NO: 6279

SEQ ID NO: 6286 - DNA, 385 bp, Homo sapiens; identical to SEQ ID NO: 6279

SEQ ID NO: 6287 - DNA, 367 bp, Homo sapiens
caggtgcaactggtggagtctgggggaggcgtggtccagcctgggaggtccctgagactctcctgtgcagcctctggattcatcttcagtagctatgctatgcactgggtccgccaggctccaggcaaggggctggagtgggtgacaattatatcatatgatggaagcaataaatactacgcagactccgtgaagggccgattcaccatctccagagacaattccaagaacacgctgtatctgcaaatgaacagcctgagagctgaggacatggctgtgtattactgtgcgagagcggttgagtggctggtccgatacgacctctttgactactggggccagggaaccctggtcaccgtctcctcag

SEQ ID NO: 6288 - DNA, 367 bp, Homo sapiens; identical to SEQ ID NO: 6287

SEQ ID NO: 6289 - DNA, 367 bp, Homo sapiens; identical to SEQ ID NO: 6287

SEQ ID NO: 6290 - DNA, 367 bp, Homo sapiens; identical to SEQ ID NO: 6287

SEQ ID NO: 6291 - DNA, 367 bp, Homo sapiens; identical to SEQ ID NO: 6287

SEQ ID NO: 6292 - DNA, 367 bp, Homo sapiens; identical to SEQ ID NO: 6287

SEQ ID NO: 6293 - DNA, 367 bp, Homo sapiens; identical to SEQ ID NO: 6287

SEQ ID NO: 6294 - DNA, 367 bp, Homo sapiens; identical to SEQ ID NO: 6287

SEQ ID NO: 6295 - DNA, 376 bp, Homo sapiens
caggtgcacctggtggagtctgggggaggcgtggtccagcctgggaggtccctgagactcccctgtgcagcctctggattcaccttcagtagctatgctatgcactgggtccgccaggctccaggcaaggggctggagtgggtggcagttatatcatatgatggaagtaataaatattacgcagactccgtgaagggccgattcaccatctccagagacaattccaagaacacactgtatctgcaaatgaacagcctgagagctgaggacacggctgtgtactactgtgcgagagatggcgtgacccatagcactggctggtatactgccccccatgactactggggccagggaaccctggtcaccgtctcttcag

SEQ ID NO: 6296 - DNA, 376 bp, Homo sapiens; identical to SEQ ID NO: 6295

SEQ ID NO: 6297 - DNA, 376 bp, Homo sapiens
caggtgcagctggtggagtctgggggaggcgtggtccagcctgggaggtccctgagactcccctgtgcagcctctggattcaccttcagtagctatgctatgcactgggtccgccaggctccaggcaaggggctggagtgggtggcagttatatcatatgatggaagtaataaatattacgcagactccgtgaagggccgattcaccatctccagagacaattccaagaacacactgtatctgcaaatgaacagcctgagagctgaggacacggctgtgtattactgtgcgagagatggcgtaacccatagcactggctggtatactgccccccatgactactggggccagggaaccctggtcaccgtctcttcag

SEQ ID NO: 6298 - DNA, 376 bp, Homo sapiens; identical to SEQ ID NO: 6295

SEQ ID NO: 6299 - DNA, 376 bp, Homo sapiens
caggtgcagctggtggagtctgggggaggcgtggtccagcctgggaggtccctgagactcccctgtgcagcctctggattcaccttcagtagctatgctatgcactgggtccgccaggctccaggcaaggggctggagtgggtggcagttatatcatatgatggaagtaataaatattacgcagactccgtgaagggccgattcaccatctccagagacaattccaagaacacactgtatctgcaaatgaacagcctgagagctgaggacacggctgtgtattactgtgcgagagatggcgtgacccatagcactggctggtatactgccccccatgactactggggccagggaaccctggtcaccgtctcttcag

SEQ ID NO: 6300 - DNA, 376 bp, Homo sapiens; identical to SEQ ID NO: 6295

SEQ ID NO: 6301 - DNA, 376 bp, Homo sapiens; identical to SEQ ID NO: 6295

SEQ ID NO: 6302 - DNA, 367 bp, Homo sapiens
caggttcaactggtggagtctgggggaggcgtggtccagcctgggaggtccctgagactctcctgtgcagcctctggattcaccttcagtagctatgccgtgcactgggtccgccaggctccaggcaaggggctggagtgggtggcagttatatcatatgatggaaccaataaatactacgcagactccgtgaagggccgattcaccatctccagagacaattccaagaacacgttgtatctgcaaatgaacagcctgagagctgaggacacggctgtgtattactgtgcgagaggggcctactttttgactggttatcgggacgtggtctactggggccagggaaccctggtcaccgtctcctcag

SEQ ID NO: 6303 - DNA, 367 bp, Homo sapiens
caggtgcagctggtggagtctgggggaggcgtggtccagcctgggaggtccctgagactctcctgtgcagcctctggattcaccttcaataactatgctatacactgggtccgccaggctccaggcaaggggctggagtgggtggcagttatatcgtatgatggaagcaataaatactacgcagactccgtgaagggccgaatcaccatctccagagacaattccaagaacacactgtatctgcaaatgaacagcctgagagctgaggacacggctgtgtattactgtgcgagaggggcctactttttgactggttatcgggacgtggtctactggggccagggaaccctggtcaccgtctcctcag

SEQ ID NO: 6304 - DNA, 367 bp, Homo sapiens
caggtgcagctggtggagtctgggggaggcgtggtccagcctgggaggtccctgagactctcctgtgcagcctctggattcaccttcagtaactatgccatgcactgggtccgccaggctccaggcaaggggctggagtgggtggcagttatatcatatgatggaagcaagaaatacttcgcagactccgtgaagggccgattcaccatctccagagacaattccaagaacacgttgtatctgcaaatgaacagcctgagagctgaggacacggctgtgtattactgtgcgagaggggcctactttttgactggttatcgagacgtggtctactggggccagggaaccctggtcaccgtctcctcag

SEQ ID NO: 6305 - DNA, 367 bp, Homo sapiens
caggtgcagctggtggagtctgggggaggcgtggtccagcctgggaggtccctgagactctcctgtgcagcctctggattcaccttcagtagctatgccgtgcactgggtccgccaggctccaggcaaggggctggagtgggtggcagttatatcatatgatggaaccaataaatactacgcagactccgtgaagggccgattcaccatctccagagacaattccaagaacacgttgtatctgcaaatgaacagcctgagagctgaggacacggctgtgtattactgtgcgagaggggcctactttttgactggttatcgggacgtggtctactggggccagggaaccctggtcaccgtctcctcag

SEQ ID NO: 6306 - DNA, 367 bp, Homo sapiens
caggtgcagctggtggagtctgggggaggcgtggtccagcctgggaggtccctgagactctcctgtgcagcctctggattcaccttcagtagctatgccatgcactgggtccgccaggctccaggcaaggggctggagtgggtggcagttatatcatatgatggaaacaataaatactacgcagactccgtgaagggccgattcaccatctccagagacaattccaagaacacgttgtatctgcaaatgaacagcctgagagttgaggacacggctgtgtattactgtgcgagaggggcctactttttgactggttatcgggacgtgatctactggggccagggaaccctggtcaccgtctcctcag

SEQ ID NO: 6307 - DNA, 367 bp, Homo sapiens
caggtgcagctggtggagtctgggggaggcgtggtccagcctgggaggtccctgagactctcctgtgcagcctctggattcaccttcagtagctatgccgtgcactgggtccgccaggctccaggcaaggggctggagtgggtggcaggtatatcatatgatggaaccaaaaaatactacgcagactccgtgaagggccgattcaccatctccagagacaattccaagaacacgttgtatctgcaaatgaacagcctgagaggtgaggacacggctgtatattactgtgtgagaggggcctactttttgactggttatcgggacgtggtctactggggccagggaaccctggtcaccgtctcctcag

SEQ ID NO: 6308 - DNA, 373 bp, Homo sapiens
caggtgcagctggcgcagtctggggctgaggtgaagaagcctggggcctcagtgaaggtctcctgcaaggcttctggatacaccttcaccgactactatatacactgggtgcggcaggcccctggacaagggcttgagtggatgggacgcatcaaccctaatagtggtgtcacaaactttgcacagaggtttcagggcagggtcaccatgactagggacacgtctatcaccacagcctacatggaactgagcagcctgagatctgacgacacggccgtttattactgtgcgaaagatgggggaaaaaccgggtggctcaccagctgggggttcgacccctggggccagggaaccctggtcaccgtctcctcag

SEQ ID NO: 6309 - DNA, 373 bp, Homo sapiens
caggtgcagctggtgcagtctggggctgaggtgaagaagcctggggcctcagtgaaggtctcctgcaaggcttctggatacaccttcaccgactactatatacactgggtgcggcaggcccctggacaagggcttgagtggatgggacgcatcaaccctaatagtggtgccacaaactatgcacagaagtttcagggcagggtcaccgtgactagggacacgtctatcaccacagcctacctggagctgagcagcctgagatctgacgacacggccgtttattactgtgcgaaagatgggggaaaaactgggtggctcaccagctgggggttcgacccctggggccagggaaccctgctcaccgtctcctcag

SEQ ID NO: 6310 - DNA, 373 bp, Homo sapiens; identical to SEQ ID NO: 6309

SEQ ID NO: 6311 - DNA, 373 bp, Homo sapiens
cacgtgcagttggcgcagtctggggctgaggtgaagaagcctggggcctcagtgagggtctcctgcaaggcttctggatacaccttcaccgactactatatacactgggtgcggcaggcccctggacaagggcttgagtggatggggcgcatcaaccctaatagtggtgtcacaaactttgcacagaagtttcagggcagggtcaccatgactcgggacacgtctatcaccacagcctacatggagctgagcagcctgagatctgacgacacggccctttattactgtgcgaaagatgggggaaaaaccgggtggctcaccagctgggggttcgacccctggggccagggaaccctgctcaccgtctcctcag

SEQ ID NO: 6312 - DNA, 373 bp, Homo sapiens
caggtgcaactggtgcagtctggggctgaggtgaagaagcctggggcctcagtgaaggtctcctgcaaggcttctggatacaccttcaccctctactatgtccactgggtgcggcaggcccctggacaagggcttgagtggatgggacgggtcaaccccaatagtggtgtcacaaactatgcacagaactttcagggcagggtcaccatgaccagggacacgtccatcagtacagcctacatggaactgagcagcctgagatctgacgacacggccgtctactactgtgccaaagatggggggaaaaccggatggaccaccagttgggggttcgacccctggggccagggaaccctggtcaccgtctcctcag

SEQ ID NO: 6313 - DNA, 370 bp, Homo sapiens
cagctgcagctggtggagtctgggggaggcttggtcaagcctggagggtccctgagactctcctgtgcagcctctggattcaccttcagtgactactacatgagctggatccgccaggctccagggaaggggctggagtgggtttcatatattagtagtagtggtagtaccatatactacgcagactctgtgaagggccgattcaccatctccagggacaacgcccagaactcactgtatctgctaatgaacagcctgagagtcgaggacacggccgtgtattactgtgcgagagataagttttttggcaactggaacgggaactggttcgactcctggggccagggaaccctggtcaccgtctcctcag

SEQ ID NO: 6314 - DNA, 370 bp, Homo sapiens
cagctgcagctggtggagtctgggggaggcttggtcaagcctggagggtccctgagactctcctgtgcagcctctggattcaccttcagtgactactacatgagctggatccgccaggctccagggaaggggctggagtgggtttcatacattagtagtagtggtagtaccatatactacgcagactctgtgaggggccgattcaccatctccagggacaacgcccagaactcactttatctgctaatgaacagcctgagagtcgaggacacggccgtttattactgtgcgagagataagttttttggcaactggaatgggaactggttcgactcctggggccagggaaccctggtcaccgtctcctcag

SEQ ID NO: 6315 - DNA, 370 bp, Homo sapiens
cagctgcagctggtggagtctgggggaggcttggtcaagcctggagggtccctgagactctcctgtgcagcctctggattcaccttcagtgactactacatgagctggatccgccaggctccagggaaggggctggagtgggtttcatacattagtagtagtggtagtaccatatactacgcagactctgtgaagggccgattcaccatctccagggacaacgcccagaactcactgtatctgctaatgaacagcctgagagtcgaggacacggccgtgtattactgtgcgagagataagttttttggcaactggaacgggaactggttcgactcctggggccagggaaccctggtcaccgtctcctcag

SEQ ID NO: 6316 - DNA, 370 bp, Homo sapiens
cagctgcatctggtggagtctgggggaggcttggtcaagcctggagggtccctgagactctcctgtgcagcctctggattcaccttcagtgactactacatgagctggatccgccaggctccagggaaggggctggagtgggtttcatacattagtagtagtggtagtaccatatactacgcggactctgtgaagggccgattcaccatctccagggacaacgcccagaactcactgtatctgctaatgaacagcctgagagtcgaggacacggccgtgtattactgtgcgagagataagttttttggcaactggaacgggaactggttcgactcctggggccagggaaccctggtcaccgtctcctcag

SEQ ID NO: 6317 - DNA, 370 bp, Homo sapiens; identical to SEQ ID NO: 6316

SEQ ID NO: 6318 - DNA, 393 bp, Homo sapiens
gaggtgcagctggtggagtctgggggaggcgtcgtaaagcctggggagtcccttcgactctcctgtgcagcctctggtttcactttcactaacgcctggatgaattgggtccgccaggctccagggaaggggctggagtgggtcggccgtattaaaagcaaaactgatggtgggacaacagactacgctgcacccgtgaaaggcagattcaccatctcaagagatgattcaaaaaacacgctgtatctgcaaatgaacagcctggaaaccgaggacacagccgtgtattactgtaccacagatcgagattgtagtactgttagttgttatgggtactacaattactactacatggacgtctggggcaaagggaccacggtcaccgtctcttca

SEQ ID NO: 6319 - DNA, 393 bp, Homo sapiens
gaggtgcagctggtggagtctgggggaggcgtcgtaaagcctggggagtcccttcgactctcctgtgcagcctctggtttcactttcactaacgcctggatgaattgggtccgccaggctccagggaaggggctggagtgggtcggccgtattaaaagcaaaactgatggtgggacaacagactacgctgcacccgtgaaaggcagattcaccatctcaagagatgattcaaaaaacacgctgtatctgcaaatgaacagcctggaaaccgaggacacagccgtgtattactgtaccacagatcgagattgtagtactgttagttgttatgggtactacaattactactacatggacgtctggggcaaagggaccacggtcaccgtctcctca

SEQ ID NO: 6320 - DNA, 393 bp, Homo sapiens; identical to SEQ ID NO: 6319

SEQ ID NO: 6321 - DNA, 393 bp, Homo sapiens
gaggtgcagctggtggagtctgggggaggcgtcgtaaagcctggggagtcccttagactctcctgtgcagcctctggtttcagtttcactaacgcctggatgaattgggtccgccaggctccagggaaggggctggagtgggtcggccgtattaaaagcaaaactgatggtgggacaacagactacgctgcatccgtgaaaggcagattcaccatctcaagagatgattcaaaaaacaagttgtatctgcaaatgaacagcctggaaaccgaggacacagccgtgtattactgtaccacagatcgagattgtagtactgttagttgttatgggtactacaattactactacatggacgtctggggcaaagggaccacggtcaccgtctcctca

SEQ ID NO: 6322 - DNA, 393 bp, Homo sapiens
gaggtgcagctggtggagtctgggggaggcgtcgtaaagcctggggagtcccttagactctcctgtgcagcctctggtttcactttcactaacgcctggatgaattgggtccgccaggctccagggaaggggctggagtgggtcggccgtattaaaagcaaaactgatggtgggacaacagactacgctgcacccgtgaaaggcagattcaccatctcaagagatgattcaaaaaacacgctgtatctgcaaatgaacagcctggaaaccgaggacacagccgtgtattactgtaccacagatcgagattgtagtactgttagttgttctgggtactacaattactactacatggacgtctggggcaaagggaccacggtcaccgtctcctca

SEQ ID NO: 6323 - DNA, 361 bp, Homo sapiens
caggtgcagctggtggagtctgggggaggcgtggtccagcctgggaggtccctgagactctcctgtgcagcctctggattcaccttcagtgactatgctatgcactgggtccgccaggccccaggcaaggggctggagtgggtggcagttatgtcatataatggaattaataaatactacgcagattccgtgaagggccgcttcaccatctccagagacaattccaagaacacgctgtatctgcaaatgaacaccctgagacctgaggacacggctgtatattactgtgcgagagatacggactcccgcaggataagggtcgacccctggggccagggaaccctggtcaccgtctcctcag

SEQ ID NO: 6324 - DNA, 361 bp, Homo sapiens; identical to SEQ ID NO: 6323

SEQ ID NO: 6325 - DNA, 361 bp, Homo sapiens; identical to SEQ ID NO: 6323

SEQ ID NO: 6326 - DNA, 361 bp, Homo sapiens; identical to SEQ ID NO: 6323

SEQ ID NO: 6327 - DNA, 361 bp, Homo sapiens; identical to SEQ ID NO: 6323

SEQ ID NO: 6328 - DNA, 370 bp, Homo sapiens
cagctgcagctgcaggagtcgggcccaggactggtgaagccttcggagaccctgtccctcacctgcactgtctctggtggctccatcagcagtagtagttactactggggctggatccgccagcccccagggaaggggctggagtggattgggagtatctattatagtgggagcacctactacaacccgtccctcaagagtcgagtcaccatgtcagtagacacgtccaagaaccagttctccctgaagctgaggtctgtgaccgcagcggacacggccgtgtattactgtgcgagagtaggtgatagtagtggttatacgtctccttttgactactggggccagggaaccctggtcaccgtctcctcag

SEQ ID NO: 6329 - DNA, 370 bp, Homo sapiens
cagctgcagctgcaggagtcgggcccaggactggtgaagccttcggagaccctgtccctcacctgcactgtctctggtggctccatcagcagtagtagttactactggggctggatccgccagcccccagggaaggggctggagtggattgggagtatctattatagtgggagcacctactacaacccgtctctcaagagtcgagtcaccatgtcagtagacacgtccaagaaccagttctccctgaagctgaggtctgtgaccgcagcggacacggccgtgtattactgtgcgcgagtaggtgatagtagtggttatacgtctccttttgactactggggccagggaaccctggtcaccgtctcctcag

SEQ ID NO: 6330 - DNA, 370 bp, Homo sapiens; identical to SEQ ID NO: 6328

SEQ ID NO: 6331 - DNA, 370 bp, Homo sapiens
cagctgcagctgcaggagtcgggcccaggactggtgaagccttcggagaccctgtccctcacctgcactgtctctggtggctccatcagcagtcgtagttactactggggctggatccgccagcccccagggaaggggctggagtggattgggagtatctattatagtgggagcacctactacaacccgtctctcaagagtcgagtcaccatgtcagtagacacgtccaagaaccagttctccctgaagctgaggtctgtgaccgcagcggacacggccgtctattactgtgcgcgagtaggtgatagtagtggttatacgtctccttttgactactggggccagggaaccctggtcaccgtctcctcag

SEQ ID NO: 6332 - DNA, 370 bp, Homo sapiens
cagccgcagctgcaggagtcgggcccaggactggtgaagccttcggagaccctgtccctcacctgcactgtctctggtggctccatcagcagtaggagttactactggggctggctccgccagcccccagggaaggggctggagtggattgggagtatctattatagtgggagcacccactacaacccgtccctcaagagtcgagtcaccatgtcagtagacacgtccaagaaccagttctccctgaagctgaggtctgtgaccgcagcggacacggccgtgtattactgtgcgagagtgggtgatagtagtggttatacgtctccttttgactactggggccagggaaccctggtcaccgtctcctcag

SEQ ID NO: 6333 - DNA, 378 bp, Homo sapiens
gaggtgcagctggtggagtccgggggaggcttggtccagcctggggggtccctgaaactctcctgtgtagcctctgggatcaccttcagtggctctgctatgcactgggtccgccaggcccccgggaaagggctggagtgggttggccgtattagaaggaaaagtaacagttacgcgacagcatatgctgcgtcggtgcaaggcaggttcaccatctccagagatgatgcaaagaacacggcatatttgcaaatgaacagcctgaaaaccgaggacacggccgtgtattattgtactagactagggggtacgatttttggcgactattactactacatggacgtctggggcaaagggaccacggtcaccgtctcctca

SEQ ID NO: 6334 - DNA, 378 bp, Homo sapiens
gaggtgcagctggtggagtccgggggaggcttggtccagcctggggggtccctgaaactctcctgtgtagcctctgggatcaccttcagtggctctgctatgcactgggtccgccaggcctccgggaaagggctggagtgggttggccgtattagaaggaaaagtaacagttacgcgacagcatatgctgcgtcggtgcaaggcaggttcaccatctccagagatgatgcaaagaacacggcatatttgcaaatgaacagcctgaaaaccgaggacacggccgtgtattactgtactagactagggggtacgatttttggcgactattactactacatggacgtctggggcaaagggaccacggtcaccgtctcctca

SEQ ID NO: 6335 - DNA, 378 bp, Homo sapiens; identical to SEQ ID NO: 6333

SEQ ID NO: 6336 - DNA, 378 bp, Homo sapiens; identical to SEQ ID NO: 6333

SEQ ID NO: 6337 - DNA, 373 bp, Homo sapiens
cagctgcagctgcaggagtcgggcccaggactggtgaagccttcggagaccctgtccctcacctgcactgtctctggtggctccatcagcagtagaatttattactggggctggatccgccagcccccagggaaggggctagagtggattgggagtgtcttttatactgggagcacctactacagcccgtccctcaagagtcgagtcaccatatccgtagacacgtccaagagccagttctccctgaagcttagttctgtgaccgccgcagacacggctctgtataactgtgcgagacatagggtcgggtcgtatagcagcgcctgggacgtcgaaacctggggccagggaaccctggtcaccgtctcctcag

SEQ ID NO: 6338 - DNA, 373 bp, Homo sapiens
cagctgcagctgcaggagtcgggcccaggactggtgaagccttcggagaccctgtccctcacctgcactgtctctggtggctccatcagcagtagaatttactactggggctggatccgccagcccccagggaaggggctagagtggattgggagtgtcttttatactgggagcacctactacagcccgtccctcaagagtcgagtcaccatatccgtagacacgtccaagagccagttctccctgaagcttagctctgtgaccgccgcagacacggctgtgtataactgtgcgagacatagggtcgggtcgtatagcagcgcctgggacgtcgaaacctggggccagggaaccctggtcaccgtctcctcag

SEQ ID NO: 6339 - DNA, 373 bp, Homo sapiens
cagctgcagctgcaggagtcgggcccaggactggtgaagccttcggagaccctgtccctcacctgcactgtctctggtggctccatcagcagtagaatttactactggggctggatccgccagcccccagggaaggggctagagtggattgggagtgtcttttatagtgggagcacctactacagcccgtccctcaagagtcgagtcaccatatccgtagacacgtccaagagccagttctccctgaagcttagctctgtgaccgccgcagacacggctgtgtataactgtgcgagacatagggtcgggtcgtatagcagcgcctgggacgtcgaaacctggggccagggaaccctggtcaccgtctcctcag

SEQ ID NO: 6340 - DNA, 373 bp, Homo sapiens; identical to SEQ ID NO: 6338

SEQ ID NO: 6341 - DNA, 385 bp, Homo sapiens
gaggtgcagctggtggagtctgggggaggcttggtacagcctggggggtccctgaaactctcctgtgcagcctctggattcaccttcagtagctatagcatgaactgggtccgccaggctccagggaaggggctggagtggatttcatacattaatattattagtggtaccatatactacgcagactctgtgaagggccgattcaccatctccagagacaatgccaagaactcgctgtatctgcaaatgaacagcctgagaaacgaggacacggctatgtattactgtgcgagagatcgaaggcgtattgtgattacatttgggggagttgtcgctgatgcttttgatatctggggccaagggacaatggtcaccgtctcttcag

SEQ ID NO: 6342 - DNA, 385 bp, Homo sapiens; identical to SEQ ID NO: 6341

SEQ ID NO: 6343 - DNA, 385 bp, Homo sapiens; identical to SEQ ID NO: 6341

SEQ ID NO: 6344 - DNA, 385 bp, Homo sapiens; identical to SEQ ID NO: 6341

SEQ ID NO: 6345 - DNA, 373 bp, Homo sapiens
gaggtgcagctggtggagtctgggggagacttggtccagcctggagggtccctgagactctcctgtgcagcctctggattcaccttcagtgaccactacatggactgggtccgccaggctccagggaaggggctggagtgggttggccgtactagaaacaaagataatggctacaccacagaatacgccgcgactgtgaaaggcagattcaccatctcaagggatgattcaaagaactcagtgtttctgcaaatgaacagtctgagaaccgaggacacggccgtctattactgtgctaggggagagcgtggatctagagcctacgtaacatttgactcctggggccagggaaccctggtcaccgtctcctcag

SEQ ID NO: 6346 - DNA, 373 bp, Homo sapiens; identical to SEQ ID NO: 6345

SEQ ID NO: 6347 - DNA, 373 bp, Homo sapiens; identical to SEQ ID NO: 6345

SEQ ID NO: 6348 - DNA, 373 bp, Homo sapiens; identical to SEQ ID NO: 6345

SEQ ID NO: 6349 - DNA, 367 bp, Homo sapiens
gaggtgcagctggtggagtccgggggaggcttagttcagcctggggggtccctgagactctcctgtgcagcctctggattcaccttcagtagctactggatgcactgggtccgccaagctccagggaaggggctggtgtgggtctcacgtattaatagtgatgggagtagcacaagctacgcggactccgtgaagggccgattcaccatctccagagacaacgccaagaacacgctgtatctgcaaatgaacagtctgagagccgaggacacggctgtgtattactgtgcaagggagaggggttactatgatagtagtggtatcgcggcctactggggccagggaaccctggtcaccgtctcctcag

SEQ ID NO: 6350 - DNA, 367 bp, Homo sapiens; identical to SEQ ID NO: 6349

SEQ ID NO: 6351 - DNA, 367 bp, Homo sapiens; identical to SEQ ID NO: 6349

SEQ ID NO: 6352 - DNA, 367 bp, Homo sapiens; identical to SEQ ID NO: 6349

SEQ ID NO: 6353 - DNA, 378 bp, Homo sapiens
gaggtgcagctggtggagtctgggggaggcctggtcaagcctggggggtccctgagactctcctgtgcagcctctggattcaccttcagtagctatgccatgcattgggtccgccaggctccagggaaggggctacaatgggtctcatccattagtattagaggtaattacatatactacgcagactcagtgaagggccgcctcaccatttccagagacaacgccaagaactcactgtatctgcaaatgaacagcctgagagccgaggacacggctgtgtattactgtgcgagagaagcccttttggagtggtttcgcgaccactactactactacatggacgtctggggcaaagggaccacggtcaccgtctcctca

SEQ ID NO: 6354 - DNA, 378 bp, Homo sapiens; identical to SEQ ID NO: 6353

SEQ ID NO: 6355 - DNA, 378 bp, Homo sapiens; identical to SEQ ID NO: 6353

SEQ ID NO: 6356 - DNA, 378 bp, Homo sapiens; identical to SEQ ID NO: 6353

SEQ ID NO: 6357 - DNA, 364 bp, Homo sapiens
gaagtgcagctggtgcagtctggagcagaggtgaaaaagcccggggagtctctgaggatctcctgtaagggttctggatacagttttaccagctactggatcaactgggtgcgccagatgcccgggaaaggcctggagtggatggggaaggttgatcctagtgactcttacaccgactacagcccgtccttccaaggccacgtcaccatctcagctgacaagtccatcagcacttcctacctgcagtggagcagcctgaaggcctcggacaccgccatgtattactgtgcgactcaatttacgtattacgatattttgactggttattcttggggccagggaaccctggtcaccgtctcctcag

SEQ ID NO: 6358 - DNA, 364 bp, Homo sapiens
gaagtgcagctggtgcagtctggagcagaggtgaaaaagcccggggagtctctgaggatctcctgtaagggttctggatacagctttagcagctactggatcaactgggtgcgccagatgcccgggaaaggcctggagtggatggggaagattgatcctagtgactcttataccaactacaacccgtccttccaaggccgcgtcaccatctcagctgacaagtccatcagcactgcctacctgcagtggagcagcctgaaggcctcggacaccgccatgtattactgtgcgactcaactaacgtattacaatattttgactggttattcttggggccagggaaccctggtcaccgtctcctcag

SEQ ID NO: 6359 - DNA, 364 bp, Homo sapiens
gaagtgcagctggtgcagtctggagcagaggtgaaaaagcccggggagtctctgaggatctcctgtaagggttctggatacagctttcccagctattggatcaactgggtgcgccagatgcccgggaaaggcctggagtggatggggaagattgatcctagtgactcttataccaactacagcccgtccttccaaggccacgtcaccatctcagctgacaagtccatcagtactgcctacctgcagtggagcagcctgaaggcctcggacaccgccatgtattactgtgcgactcaactaacgtattacgatattttgactggctattcttggggccagggaaccctggtcaccgtctcctcag

SEQ ID NO: 6360 - DNA, 364 bp, Homo sapiens
caggtgcagctggtggagtctgggggaggcgtggtccagcctgggaggtccctgagactctcctgtgcagcctctggcttcaccttcgtgagctatgccatgcactgggtccgccaggctccaggcaaggggctggagtgggtggcagttatatcatatgatggaagtaataaatactacgcagactccgtgaagggccggttcaccatctccagagacaattccaagaacacgctgtatctggaaatgagcagcctgagagttgaggacacggctgtgttttactgtgtgagagatcgagcccgatattttgacttattcggggactactggggccagggaaccctggtcaccgtctcctcag

SEQ ID NO: 6361 - DNA, 364 bp, Homo sapiens; identical to SEQ ID NO: 6360

SEQ ID NO: 6362 - DNA, 364 bp, Homo sapiens; identical to SEQ ID NO: 6360

SEQ ID NO: 6363 - DNA, 364 bp, Homo sapiens
cagctgcagctgcaggagtcgggcccaggactggtgaagccttcggagaccctgtccctcacctgcactgtctctggtgcctccatcaggactactaataaatactggggctggatccgccagcccccagggaagggcctggactggattgggactatcttttatagtgggaccacctactacaacccgtccctcaagagtcgagtcaccttatcagtagacacgttcaagaaccagttctccctgaagctgacctctgtgaccgcagctgacacggccgtatattactgtgcgagattatatagcagtagtacggccgtatttgactactggggacagggatccctggtcaccgtctccgcag

SEQ ID NO: 6364 - DNA, 364 bp, Homo sapiens
cagctgcagctgcaggagtcgggcccaggactggtgaagccttcggagaccctgtccctcacctgcagtgtctctggtgcctccatcagcactaccaataaatactggggctggatccgccagcccccagggaagggcctggactggattgggactatcttttatagtgggaccacctactacaacccgtccctcaagagtcgagtcaccatatcagtagacacgttcaagaaccagttctccctgaagttgagctctgtgaccgcagctgacacggccgtgtattactgtgcgagattgtatagcagtagcacggccgtatttgactactggggccagggaaccctggtcaccgtctccgcag

SEQ ID NO: 6365 - DNA, 364 bp, Homo sapiens
cagctgcagctgcaggagtcgggcccaggactggtgaagccttcggagaccctgtccctcacctgcactgtctctggtgcctccatcaggactactaataagtactggggctggatccgccagcccccagggaaggggctggactggattgggactatcttttatagtgggaccacctactacaacccgtccctcaagagtcgagtcaccatatcagtagacacgttcaagaaccagttctccctgaagctgaactctgtgaccgcagctgacacggccgtgtattactgtgcgcgattatatagcagttccacggccgtgtttgatcactggggccagggagccctggtcaccgtctccgcag

SEQ ID NO: 6366 - DNA, 358 bp, Homo sapiens
caggtgcagctgcaggagtcgggcccaggactggtgaagccttcggagaccctgtccctcacctgcactgtctctggtgactccatcagtacttactactggagctggatccggcagcccccagggaagggactggagtggattgggtatatctattacagtgggagcaccaactacaacccctccctcaagagtcgagtcaccatatcagtagacacgtccaagaaccagttctccctgaagctgagctctgtgaccgctgcggacacggccgtgtattactgtgcgagagagggtagtggctacgggaactggttcgacccctggggccagggaaccctggtcaccgtctcctcag

SEQ ID NO: 6367 - DNA, 358 bp, Homo sapiens
caggtgcagctgcaggagtcgggcccaggactggtgaagccttcggagaccctgtccctcacctgcactgtctctggtggctccatcagtacttactactggagctggatccggcagcccccagggaagggactggagtggattgggtatatctattacagtgggagcaccaactacaacccctccctcaagagtcgagtcaccatatcagtagacacgtccaagaaccagttctccctgaagctgagctctgtgaccgctgcggacacggccgtgtattactgtgcgagagagggtagtggctacgggaactggttcgacccctggggccagggaaccctggtcaccgtctcctcag

SEQ ID NO: 6368 - DNA, 358 bp, Homo sapiens; identical to SEQ ID NO: 6366

SEQ ID NO: 6369 - DNA, 355 bp, Homo sapiens
gaggtgcagctggtggagtctggaggaggcttgatccagcctggggggtccctgagactctcctgtgcagcctctgggttcaccgtcagtagcaactacatgggctgggtccgccaggctccaggggggggactggagtgggtctcagttatttatcgcggtggtaacacatactactcagactccgtgaagggccgattcaccatctccagagacaattccaagaacacactgtatcttcaaatgaacagcctgagagccgaggacacggccgtttattactgtgcgagacgtatggccagtagttggggctttgactactggggccagggaaccctggtcaccgtctcctcag

SEQ ID NO: 6370 - DNA, 355 bp, Homo sapiens
gaggtgcagctggtggagtctggaggaggcttgatccagcctggggggtccctgagactctcctgtgcagcctctgggttcaccgtcagtagcaactacatgggctgggtccgccaggctccaggggggggactggagtgggtctcagttatttatcgcggtggtagcacatactacgcagactccgtgaagggccgattcaccatctccagagacaattccaagaacacactgtatcttcaaatgaacagcctgagagccgaggacacggccgtttattactgtgcgagacgtatggccagcagttggggctttgactactggggccagggaaccctggtcaccgtctcctcag

SEQ ID NO: 6371 - DNA, 355 bp, Homo sapiens
gaggtgcagctggtggagtctggaggaggcttgatccagcctggggggtccctgagactctcctgtgcagcgtctgggttcaccgtcagtagcaactacatgggctgggtccgccaggctccaggggggggactggagtgggtctcagttatttatcgcggtggtagcacatactacgcagactccgtgaagggccgattcaccatctccagagacaattccaagaacacactgtatcttcaaatgaacagcctgagagccgaggacacggccgtttattactgtgcgagacgtatggccggcagttggggctttgactactggggccagggaaccctggtcaccgtctcctcag

SEQ ID NO: 6372 - DNA, 358 bp, Homo sapiens
gaggtgcagctggtggagtccgggggaggcttagttcagccgggggggtccctgagactctcctgtgcagcctctggattcaccttcagtagctactggatgcactgggtccgccaaggtccagggaagggactaatgtgggtctcacgtattaatagagatgggagtagcataggttacgcgggctccgtgaagggccgattcaccatctccagagacaacgccaagaacaccctgtatctgcaaatgaacagtctgagagccgaggacacggctgtgtattactgtgcaagagatccccttgaggagcagtggctggtaccttggggccagggaaccctggtcaccgtctcctcag

SEQ ID NO: 6373 - DNA, 358 bp, Homo sapiens; identical to SEQ ID NO: 6372

SEQ ID NO: 6374 - DNA, 358 bp, Homo sapiens; identical to SEQ ID NO: 6372

SEQ ID NO: 6375 - DNA, 355 bp, Homo sapiens
caggtgcagctgcaggagtcgggtccaggactggtgaagccttcggagaccctgtccctcacctgcactgtctctggtggctccatcagtaattactactggagctggatccggcagcccccagggaagggactggagtggattgggtatatctattacagtgggaccaccaactacaacccctccctcaagagtcgagtcaccatatcagttgacacgtccaagaaccagttctccctgaagctgagctctgtgaccgctgcggacacggccgtgtattactgtgcgagagtgtatagcggcagctggttcttagactactggggccagggaaccctggtcaccgtctcctcag

SEQ ID NO: 6376 - DNA, 355 bp, Homo sapiens; identical to SEQ ID NO: 6375

SEQ ID NO: 6377 - DNA, 355 bp, Homo sapiens; identical to SEQ ID NO: 6375

SEQ ID NO: 6378 - DNA, 364 bp, Homo sapiens
caggtgcagctgcaggagtcgggcccaggactggtgaagccttcggagaccctgtccctcacctgcactgtctctggtgactccatcattagttacttctggacctgggtccggcagcccccagggaagggactggagtggattggatatatctattacaatgggagtcccaactacaacccctccctcaagagtcgagtcaccatgtcaatagacacgtccaagaaccagttctccctgaacctgggctctgtcaccgccgcagacacggccgtatattactgtgcgagacgatattgtagtactaccagctgctcttttcatgactactggggccagggaaccctggtcaccgtctcctcag

SEQ ID NO: 6379 - DNA, 364 bp, Homo sapiens
caggtgcaactgcaggagtcgggcccaggactggtgaagccttcggagaccctgtccctcacctgcactgtctctggtaactccatcatcagttacttctggacttggatccggcagcccccagggaagggactggagtggattggatatatctattacaatgggagtcccaactacagcccctccctcaagagtcgagtcaccatgtcaatggacacgtccaggaacgtcttctccctgaacctgggctctgtgaccgccgcagacacggccgtatattactgtgcgagacgatattgtagtactaccagctgctcttttcatgactactggggccagggaaccctggtcaccgtctcctcag

SEQ ID NO: 6380 - DNA, 364 bp, Homo sapiens
caggtgcagctgcaggagtcgggcccaggactggtgaagccttcggagaccctgtccctcacctgcactgtctctggtgactccatcagtagttacttctggacctggatccggcagcccccagggaagggactggagtggattggatatatctattacaatgggagtcccaactacaacccctccctcaagagtcgagtcaccatgtcaatagacacgtccaagaaccagttctccctgaacctgggctctgtgaccgccgcagacacggccgtatattactgtgcgagacgatattgtagtactaccagctgctcttatcatgactactggggccagggaaccctggtcaccgtctcctcag

SEQ ID NO: 6381 - DNA, 367 bp, Homo sapiens
gaggtgcagctggtggagtctgggggaggcttggtccagcctggggggtccctgagactctcctgtgcagcctctggattcacctttagtagctattggatgagctgggtccgccaggctccagggaaggggctggagtgggtggccaacataaaggaagatggaagtgagaaatactatgtggactctgtgaagggccgattcaccatctccagagacaacgccaagaactcactgtatctgcaaatggacagcctgagagccgaggacacggctgtatattactgtgcgaggggcaacgttggctacacctctacccttttttttgactactggggccagggaaccctggtcaccgtctcctcag

SEQ ID NO: 6382 - DNA, 367 bp, Homo sapiens; identical to SEQ ID NO: 6381

SEQ ID NO: 6383 - DNA, 367 bp, Homo sapiens; identical to SEQ ID NO: 6381

SEQ ID NO: 6384 - DNA, 351 bp, Homo sapiens
gaggtgcagctggaggagtctggaggaggcttggtccagcctggggggtccctgagactctcctgtgcagcctctgggctcaccgtcagtagcaactacatgagatgggtccgccaggctccagggaaggggctggagtgggtctcacttatttatagcggtggtagcacattctacgcagactccgtgaagggccgattcaccatctccagacacgattccaagaacaccctgtatcttcaaatgaacagcctgagacctgaggacacggccgtgtattactgtgcgagagatctagtggcttacggtatggacgtctggggccaagggaccacggtcaccgtctcctca

SEQ ID NO: 6385 - DNA, 351 bp, Homo sapiens; identical to SEQ ID NO: 6384

SEQ ID NO: 6386 - DNA, 351 bp, Homo sapiens
gaggtgcagctggtggagtctggaggaggcttggtccagcctggggggtccctgagactctcctgtgcagcctctggggtcaccgtcagtagcaactacatgaggtgggtccgccaggctccagggaaggggctggagtgggtctcagttatttatagcggcggtagcacttactacgcagactccgtgaagggccgattcaccatctccagacacaattccaagaacacgctatctcttcaaatgaacagcctgagagctgaggacacggccgtgtattactgtgcgagagatctagtggcttacggtatggacgtctggggccaagggaccacggtcaccgtctcctca

SEQ ID NO: 6387 - DNA, 373 bp, Homo sapiens
gaggtgcagctggtggagtctgggggaggcctggtcaagccgggggggtccctgagactctcctgtgcagcctctggattcaccttcagtggctataccatgaactgggtccgccaggctccagggaagggactggagtgggtctcatccattactagtagtagtacttacatatactacgcagactcagtgaagggccgattcaccatctccagagacaacgccgagaactcactgtatctgcaaatgaacagcctgagagccgacgacacggctgtctattactgtgcgagaagtcccttatcactacgaccgggtggtgatcgctattctgactactggggccagggaaccctggtcaccgtctcctcag

SEQ ID NO: 6388 - DNA, 373 bp, Homo sapiens
gaggtgcagctggtggagtctgggggaggcctggtcaagccgggggggtccctgagactctcctgtgcagcctctggattcaccttcagtggctatactatgaactgggtccgccaggctccagggaagggactggagtgggtctcatccattactagtagtagtacttacatatactacgcagactcagtgaagggccgattcaccatctccagagacaacgccgagaactcactgtatctgcaaatgaacagcctgagagccgaggacacggctgtctattactgtgcgagaagtcccttatcactacgaccgggtggtgatcgctattctgactactggggccagggaaccctggtcaccgtctcctcag

SEQ ID NO: 6389 - DNA, 376 bp, Homo sapiens
caggtgcagctgatggagtctgggggaggcgtggtccagcctgggaggtccctgagactctcttgtgcagcctctggattcaccttcagtagctatggcatgcactgggtccgccaggctccaggcaaggggctggagtgggtggcagttatatcatatgatgaaagaaataaatattatgcagactccctgaagggccgattcaccatctccagagacaattccaagaacacgctctatctggaaatgaacagcctgagacctgaggacacggctgtgtattactgtgcgaaagatggacaggcattacgatttttggagtggttattaaactttgactactggggccagggaaccctggtcaccgtctcctcag

SEQ ID NO: 6390 - DNA, 376 bp, Homo sapiens
caggtgcagctgatggagtctgggggaggcgtggtccagcctgggaggtccctgagactctcttgtgcagcctctggattcaccttcagtagctatggcatgcactgggtccgccaggctccaggcaaggggctggagtgggtggcagttatatcatatgatgaaagaaataaatattatgcagactccctgaagggccgattcaccatctccagagacaattccaagcacacgctctatctggaaatgaacagcctgagacctgaggacacggctgtgtattactgtgcgaaagatggacaggcattacgatttttggagtggttattaaactttgactactggggccagggaaccctggtcaccgtctcctcag

SEQ ID NO: 6391 - DNA, 370 bp, Homo sapiens
caggtgcagctggtggagtctgggggaggcttggtcaagcccggagggtccctgagactctcctgtgcagcctctgaattcaccttcagtgactactacatgggctggatccgccaggctccagggaaggggctggagtggatttcatacattagtagtggtggaactaccatatactatgcagactctgtgaagggccgattcaccgtctccagggacaacgccaagaactcagtgtatctggaaatgaatagcctgagagccgaagacacggccgtgtatcactgtgcgagagataagtattttggcaactggtacgggaactggttcgacccctggggccagggaaccctggtcaccgtctcctcag

SEQ ID NO: 6392 - DNA, 364 bp, Homo sapiens
caggtgcacctggtggagtctgggggaggcttggtcaagcctggagggtccctgagactctcctgtgcagcctctggattcaccttcagtgactactacatgagctggatccgccaggctccagggaaggggctggagtgggtttcatacattagtggtggtggtagtaccatatactacgcagactctgtgaggggccgattcaccatctccagggacaacgccaagaactcactgtttctgcaaatgaacagcctgagagccgaggacacggccatttattactgtgcgagagataagttttttggcaactggtacgggaactggttcgacccctggggccagggaaccctggtcaccgtct

SEQ ID NO: 6393 - DNA, 370 bp, Homo sapiens
gaagtgcagctggtggagtctgggggaggcttggtacagcctggcaggtccctgagactctcctgtgcagcctctggattcacctttgatgactatgccatgcactgggtccggcaagttccagggaagggcctggagtgggtctcacatattagttggaatagtgttaacataggctatgcggactctttgaggggccgattcaccatctccagagacaacgccaagaattccctctatctgcaaatgaacagtctgagagttgaggacacggccttgtattactgtgcaaaagatacgtctgcaacggcaacatcccggagtccacttcactactggggccacggaaccctggtcaccgtctcctcag

SEQ ID NO: 6394 - DNA, 370 bp, Homo sapiens
gaagtgcagctggtggagtctgggggaggcttggtacagcctggcaggtccctgagactctcctgtgcagcctctggattcacctttgatgactatgccatgcactgggtccggcaagttccagggaagggcctggagtgggtctcacatattagttggaatagtgttaacataggctatgcggactctttgaggggccgattcaccatctccagagacaacgccaagaattccctctatctgcaaatgaacagtctgagagttgaggacacggccttgtattactgtgcaaaagatacgtctgcaacggcaacatcccggagtccgcttcactactggggccacggaaccctggtcaccgtctcctcag

SEQ ID NO: 6395 - DNA, 370 bp, Homo sapiens
gaggtgcagctggtggagtctgggggaggcttggtacagcctggggggtccctgagactctcctgtgcagcctctggattcaccttcagtagcaatagcatgaactgggtccgccaggctccagggaaggggctggagtgggtttcatacattagtattagtagtagcaccatatactacgcagactctgtgaagggccgattcaccatctccagagacaacgccaagaactcactgtatctgcaaatgaacagcctgagagccgaggacacggctgtgtattactgtgcgagagatcaaattagctgctactctccggtatgtgcttttgatatctggggccaagggacaatggtcaccgtctcttcag

SEQ ID NO: 6396 - DNA, 370 bp, Homo sapiens; identical to SEQ ID NO: 6395

SEQ ID NO: 6397 - DNA, 382 bp, Homo sapiens
caggtgcagctacagcagtggggcgcaggactgttgacgccttcggagaccctgtccctcacctgcgctgtctatggtgggtccttcagtggttactactggagctggatccgccagcccccagggagggggctggagtggattggggaaatcaatcatagtggaagcaccaactacaacccgtccctcaagagtcgagtcaccatatcagtagacacgtccaagaaccagatctccctgaagctgatctctgtgaccgccgcggacacggctgtgtattactgtgcgagaggaaagcgttattactctcgtttggggaattattataccaacaactggttcgacccctggggccagggaaccctggtcagcgtctcctcag

SEQ ID NO: 6398 - DNA, 382 bp, Homo sapiens; identical to SEQ ID NO: 6397

SEQ ID NO: 6399 - DNA, 382 bp, Homo sapiens
gaggtgcagctggtggagtctgggggaggcttggtacagcctggggggtccctgagactctcctgtgcagcctctggattcaccttcagtagctacgacatgcactgggtccgccaagctacaggaaaaggtctggaatgggtctcagctattggtactgctggtgacacatactatccaggctccgtgaagggccgattcaccatctccagagaaaatgccaagaactccttgtatcttcaaatgaacagcctgagagccggggacacggctgtgtattactgtgcaagaggtggacgtattactatggttcggggagttattagagcggactggtacttcgatctctggggccgtggcaccctggtcactgtctcctcag

SEQ ID NO: 6400 - DNA, 382 bp, Homo sapiens
gaggtgcagctggtggagtctgggggaggcttggtacagcctggggggtccctgagactctcctgtgcagcctctggattcaccttcagtacttacgacatgcactgggtccgccaagttacaggaaaaggtctggaatgggtctcagctattggtactgctggtgacacatactatccaggctccgtgaagggccgattcaccatctccagagaaaatggcaagaactccttgtatcttcaaatgaacagcctgagagccggggacacggctgtgtattactgtgcaagaggtggacgtattactacggttcggggagtgattagagcggactggtacttcgatctctggggccgtggcaccctggtcactgtctcctcag

SEQ ID NO: 6401 - DNA, 364 bp, Homo sapiens
caggtgcagctggtggagtctgggggaggcgtggcccagtctgggaggtccctgagactctcctgtgcagcctctggattcaccttcagcagctatgctatgcactgggtccgccaggctccaggcaaggggctgaaatgggtggcaactatatcatatgatggaactaataagtattacgcagactccgtgaagggccgattcaccatctccagagacaattccaagaacacggtgtatctgcaaatgaacagcctgagacctgaggacacggctgtgtattactgtgcgagcgatatagggagggttgctgactggtacttcgatctctggggccgtggcaccctggtcactgtctcctcag

SEQ ID NO: 6402 - DNA, 364 bp, Homo sapiens
caggtgcagctggtggagtctgggggaggcgtggtccagcctgggaggtccctgagactctcctgtgcagcctctggattcaccttcagtagctttgctatgcactgggtccgccaggctccaggcaaggggctggagtgggttgcaactatatcatatgatggacgtactaaatactacgcagactccgtgaagggccgattcaccatctccagagacaattccaacaacacgctgtatctgcaaatgaacagcctgagagctgaggacacggctgtgtattactgtgcgagcgatatagggagggttgctgactggtacttcgatctctggggccgtggcaccctggtcactgtctcctcag

SEQ ID NO: 6403 - DNA, 361 bp, Homo sapiens
caggtgcagctgcaggagtcgggcccaggactggtgaagccttcggagaccctgtccctcacctgcactgtctctggtggctccatcagtaattactactggagctggatccggcagtccccagggaagggactggagtggattgggtatgtctattacagtgggagcaccaactacaatccctccctcaagagtcgagtcaccatattagtagacacgtccaagaaccagttctccctgaagctgagctctgtgaccgctgcggacacggccgtgtattattgtgcgaggggggaatatagcagcagctggtactggttcgacccctggggccagggaaccctggtcaccgtctcctcag

SEQ ID NO: 6404 - DNA, 361 bp, Homo sapiens; identical to SEQ ID NO: 6403

SEQ ID NO: 6405 - DNA, 363 bp, Homo sapiens
gaagtgcagctggtggagtctgggggaggcttggtacagcctggcaggtccctgagactctcctgtgcagcctctggattcaggtttgatgattatgccatgcactgggtccggcaagctccagggaagggcctggagtgggtctcaggtattagttggaatagtggtagcataggctatgtggactctgtgaagggccgattcaccatctccagagacaacgccaagaactccctgtatctgcaaatgaacagtctgagagctgaggacacggccttgtatcactgtgcaaaagatatcgcctcgagtcagtactactacatggacgtctggggcaaagggaccacggtcaccgtctcctca

SEQ ID NO: 6406 - DNA, 363 bp, Homo sapiens; identical to SEQ ID NO: 6405

SEQ ID NO: 6407 - DNA, 367 bp, Homo sapiens
caggtgcagctgcaggagtcgggcccaggactggtgaagccttcacagaccctgtccctcacctgcactgtctctggtggctccatcagcagtggtgattactactggagttggatccgccagcccccagggaagggcctggagtggattggatacatctattacagtgggagcacctactacaacccgtccctcaggagtcgagttaccatatcagtagacgcgtccaagaaccggttctccctgaagctgagctctgtgactgccgcagacacggccgtgtattattgtgccagagatcagggaggaagtggctacggaacgctggactactggggccagggagccctggtcaccgtctcctcag

SEQ ID NO: 6408 - DNA, 367 bp, Homo sapiens
caggtgcagctgcaggagtcgggcccaggactggtgaagccttcacagaccctgtccctcacctgcactgtctctggtggctccgtcagcagtggtgattactactggagttggatccgccagcccccagggaagggcctggagtggattgggtacatctattacagtgggagcacctactacaacccgtccctcaggagtcgagttaccatatcagaagacacgtccaagaaccagttctccctgaagctgagctctgtgactgccgcagacacggccgtatattactgtgccagagatcagggaggaagtggctacggaacgttggactactggggccagggaacccgggtcaccgtctcctcag

SEQ ID NO: 6409 - DNA, 370 bp, Homo sapiens
gaggtgctcctggtggagtctgggggaggcttggtccagccgggggggtccctgaagatctcctgtgcagcctctgggttcagcttcagtggctctgctatacattgggtccgccaggcccccgggaaagggctggagtggcttgcccgtatgagaaccaaatctaacggttacgagacagcatatgtagcgtcggtgaaaggcaggttcaccatctccagagatgaatcaaagagtatggcgtatctgcaaatgaacagcctgaggaccggggactcggccgtctattactgtgctagactctatgcagatagctggggttacgcctttgactcctggggccagggaaccctggtcaccgtctcctcag

SEQ ID NO: 6410 - DNA, 254 bp, Homo sapiens
ggcgcccgggaaagggctggagtggcttgcccgtatgagaaccaaatctaacggttacgagacagcatatgcagcgtcggtgaaaggcaggttcaccatctccagagatgaatcaaagagtatggcgtatctgcaaatgaacagcctgaggaccggggactcggccgtctattactgtgctagactctatgcagatagctggggttacgcctttgactcctggggccagggaaccctggtcaccgtctcctcag

SEQ ID NO: 6411 - DNA, 364 bp, Homo sapiens
caggtgcagctggtggagtctgggggaggcgtggtccagcctgggaggtccctgagactctcctgtgcagcctctggattcaccttcagtcgctatgctatgcactgggtccgccaggctccaggcaaggggctggagtgggtggcagttatatcatatgatggaagcaataaatactacgcagactccgtgaagggccgattcaccatctccagagacaattccaagaacacgctgtatctgcaaatgaacagcctgagagctgaggacacggctgtgtattactgtgcgagtgagtacatttgggggagttacccagcgagggactactggggccagggaaccctggtcaccgtctcctcag

SEQ ID NO: 6412 - DNA, 364 bp, Homo sapiens; identical to SEQ ID NO: 6411

SEQ ID NO: 6413 - DNA, 364 bp, Homo sapiens
caggtgcagctgcaggagtcgggcccaggactggtgaagccttcggagaccctgtccctcacgtgcactgtctctggtggctccgtcaggagtggaagttactactggagctggatccggcagcccccagggaagggactggagtggattgcgtatatcttttacagtgggagcaccaactacaacccctccctcaagagtcgagtcaccatatccgtagacacgtccaagaaccagttctccctgaagttgagctctgtgaccgctgcggacacggccatatattactgtgcgagagacaccggccgcaactccgatgcttttgatatctggggccaagggacaatggtcaccgtctcttcag

SEQ ID NO: 6414 - DNA, 364 bp, Homo sapiens; identical to SEQ ID NO: 6413

SEQ ID NO: 6415 - DNA, 361 bp, Homo sapiens
gaagtgcagctggtgcagtctggagcagaggtgaaaaagcccggggagtctctgaggatctcctgtaagggttctggatacagctttaccagctactggatcagctgggtgcgccagatgcccgggaaaggcctggagtggatggggaggattgatcctagtgactcttataccaactacagcccgtccttccaaggccacgtcaccatctcagctgacaagtccatcagcactgcctacctgcagtggagcagcctgaaggcctcggacaccgccatgtattactgtgcgagacagagttgtggtggtgactgcactgttgactactggggccagggaaccctggtcaccgtctcctcag

SEQ ID NO: 6416 - DNA, 361 bp, Homo sapiens
gaagtgcagctggtgcagtctggagcagaggtgaaaaagcccggggagtctctgaggatctcctgtaagggttctggatacagctttaccaggcactggatcagctgggtgcgccagatgcccggaaaaggcctggagtggatggggagaattgatcctagtgactcttataccaactacagcccgtccttccaaggccacgtcaccatctcagctgacaagtccatcagcactgcctacctgcagtggagcagcctgaaggcctcggacaccgccttgtattactgtgcgagacagatttgtggtggtgactgcactgttgactactggggccagggaaccctggtcaccgtctcctcag

SEQ ID NO: 6417 - DNA, 361 bp, Homo sapiens
cagatccagcttgtgcagtctggggctgaggtgaagaagcctggggcctcagtgaaggtttcctgcaaggcttctggatacaccctcactaactatgctatacattgggtgcgccaggcccccggacaaaggcttcagtggatggggtggatcaaccctgggaatggtaacacaaaatattcacagaagttccagggcagagtcaccattaccagggacacatccgcgaacacagcctacatggagctgagcagcctgcgatctgaagacacggctgtgtattactgtgcgagagcccccgtaattgactggttattccatgactactggggccagggaaccctggtcaccgtctcctcag

SEQ ID NO: 6418 - DNA, 361 bp, Homo sapiens
cagatccagcttgtgcagtctggggctgaggtgaagaagcctggggcctcagtgaaggtttcctgcaaggcttctggatacaccctcactaactatgctatacattgggtgcgccaggcccccggacaaaggcttcagtggatggggtggatcaaccctgggaatggtaacacaaaatattcacagaagttccagggcagagtcaccattaccagggacacatccgcgaacacagcctacatggagctgaacagcctgcgatctgaagacacggctgtgtattactgtgcgagagcccccgtaattgactggttattccatgactactggggccagggaaccctggtcaccgtctcctcag

SEQ ID NO: 6419 - DNA, 361 bp, Homo sapiens
gaggtgcagctgttggagtctgggggaggcttggtacagcctggggggtccctgagactctcctgtgcagcctctggattcacctttagcagctatgccatgagctgggtccgccaggctccagggaaggggctggagtgggtctcagctattagtagtagtggtggtagcacgtattacgcagactccgtgaagggccggttcaccatctccagagacagttccaagaacacgctgtttctgcaaatgaacagcctgagagccgaggacacggccgtatattactgtgcgaaagatgacctccgccgcttaaactggttcgacccctggggccagggaaccctggtcaccgtctcctcag

SEQ ID NO: 6420 - DNA, 361 bp, Homo sapiens
gaggtgcagctgttggagtctgggggaggcttggtacagcctggggggtccctgagactctcatgtgcagcctctggattcacctttagcagctatgccatgagctgggtccgccaggctccagggaaggggctggagtgggtctcagctattagtagtagtggtggtagcacatactacgcagactccgtgaagggccggttcaccatctccagagacagttccaagaacacgctgtatctgcaaatgaacagcctgagagccgaggacacggccgtatattactgtgcgaaagatgacctccgccgcttaaactggttcgacccctggggccagggaaccctggtcaccgtctcctcag

SEQ ID NO: 6421 - DNA, 361 bp, Homo sapiens
gaggtgcagctgttggagtctgggggaggcttggtacagccgggggggtccctgagactctcctgtgcagcctctggattcacatttagcagatttgccatgaactgggtccgccaggctccagggaaggggctggagtgggtctcaggtatgagtggtagtggttatagcacatactacgcagactccgtgaagggccggttcaccatctccagagacgcttccgagaacacgctgtatctgcaattgaacagcctgagagccgaggacacggccgtctattactgtgcgaaagatctaagaacttatagcagtggacatgactactggggccggggaaccctggtcaccgtctcctcag

SEQ ID NO: 6422 - DNA, 361 bp, Homo sapiens; identical to SEQ ID NO: 6421

SEQ ID NO: 6423 - DNA, 357 bp, Homo sapiens
gaggtgcaattggtgcagtctggagcagaggtgaaaaagcccggggagtctctgacgatctcctgtaaggcttctggatacatgtttagcacctactggatcggctgggtgcgccagatgcccgggaaaggcctggagtggatggggatcatctatcctggtgactctgataccaaatacagcccggccttccaaggccaggtcaccatctcagccgacacgtccatcaccaccgcctacctgcagtggagcagcctgaaggcctcggacaccgccatctattactgtgccagacgcgcctactattactacggcatggacgtctggggccaagggaccacggtcaccgtctcctca

SEQ ID NO: 6424 - DNA, 357 bp, Homo sapiens; identical to SEQ ID NO: 6423

SEQ ID NO: 6425 - DNA, 361 bp, Homo sapiens
caggtcaccttgaaggagtctggtcctgcgctggtgaaacccacacagaccctcacactgacctgcaccttctctgggttctcactcagcactagtggaatgcgtgtgagctggatccgtcagcccccagggaaggccctggagtggcttgcacgcattgattgggataatgataagttctacagcacatctctgaagaccaggctcaccatctccaaggacacctccaaaaaccaggtggtccttacactgaccaacatggaccctgtggacacagccacgtatttctgtgcacggtcgactacggtgaccgggccttttgactcctggggccagggaaccctggtcaccgtctcctcag

SEQ ID NO: 6426 - DNA, 361 bp, Homo sapiens
caggtcaccttgaaggagtctggtcctgcgctggtgaaactcacacagaccctcacactgacctgcaccttctctgggttctcactcagcactaatggaatgcgtgtgagctggatccgtcagcccccagggaaggccctggagtggcttgcacgcattgattgggataatgataaatactacagcacatctctgaagaccaggctcaccatctccaaggacacctccaaaaaccaggtagtccttacaatgaccaacatggaccctgtggacacagccacctattactgtgcacggtcgactacggtgacgggtccctttgactactggggccagggaaccccggtcaccgtctcctcag

SEQ ID NO: 6427 - DNA, 367 bp, Homo sapiens
gaggtgcacttgttggagtctgggggaggcttggtacagcctggggggtccctgagactctcctgtgcagcctctggattcaccgttagcaactatgccatgagctgggtccgccaggctccagggaaggggctggagtgggtctcagttattagtggtagtggtggtatcacatactacgcagactccgtgaagggccggttcaccatctccagagacaattccaagaacacgctgtatctgcaaatgaacagcctgagagccgaggacacggccgtatattactgtgcgaagtctttagggataggtactttggttcgggggaatgactactggggccagggaaccctggtcaccgtctcctcag

SEQ ID NO: 6428 - DNA, 367 bp, Homo sapiens
gaggtgcacttgttggagtctgggggaggcttggtacagcggggggggtccctgagactctcctgtgcagcctctggattcaccgttagcaactatgccatgagctgggtccgccaggctccagggaaggggctggagtgggtctcagttattagtggtagtggtggtatcacatactacgcagactccgtgaagggccggttcaccatctccagagacaattccaagaacacgctgtatctgcaaatgaacagcctgagagccgaggacacggccgtatattactgtgcgaagtctttagggataggtactttggttcgggggaatgactactggggccagggaaccctggtcaccgtctcctcag

SEQ ID NO: 6429 - DNA, 367 bp, Homo sapiens
caggtgcagctgcaggagtcgggcccaggactggtgaagccttcggagaccctgtccctcacctgcactgtctccggttactccatcagcagtggttactactggggctggatccggcagcccccagggaaggggctggagtggattgcgactatctattatagtgggagcaccttctacaacccgtccctcaagagtcgagtcaccatatcagtagacacgtccaagaaccacttctccctgaagctgagctctgtgaccgccgcagacacggccgtgtattactgtgcgagaattgaaacagaagctagcagtggctcctgggttgactactggggccagggaaccctggtcaccgtctcctcag

SEQ ID NO: 6430 - DNA, 367 bp, Homo sapiens
caggtgcagctgcaggagtcgggcccaggactggtgaggccttcggagaccctgtccctcacctgcactgtctctggttactccatcagcagtggttactactggggctggatccggcagcccccagggaaggggctggagtggattgcgactatctatcatagtgggagcacctactacaacccgtccctcaagagtcgagtcaccatatcagtagacgcgtccaagaacgagttctccctgaagctgagctctgtgaccgccgcagacacggccgtgtattactgtgcgagaattggaacagaagctagcagtggctcctgggttgactactggggccagggaaccctggtcaccgtctcctcag

SEQ ID NO: 6431 - DNA, 370 bp, Homo sapiens
caggtgcagctgcaggagtctggccccggactggtgaagccttcggagaccctgtccctcacatgcactgtctctggtggctccgtcagcggtattggttactactggggctggatccgccagcccccagggaaggggctggagtggattggaactatctatcatactggaaccacctaccacaacccgtccctcacgaggcgagtcaccatgtcaatagacacggccaagacccagttctccctgacgctgacctctgtgaccgcagcggacacggccgtctattactgtgcgagagatcggccttataaccagggttcgggtcgatattggctctggggccgtggcaccctggtcactgtctcctcag

SEQ ID NO: 6432 - DNA, 370 bp, Homo sapiens; identical to SEQ ID NO: 6431

SEQ ID NO: 6433 - DNA, 370 bp, Homo sapiens
cagctgcagctgcaggagtcgggcccaggactggcgaagccttcggagaccctgtccctcacctgcactgtctctggtggctccatcagcaatagtatttactactggggctggatccgccagcccccagggaaggggctggagtggattgggagtatctattatagtgggagcacctactacaacccgtccctcaagagtcgagtcaccatatccgtagacacgtccaagaaccagttctccctgaagctgagctctgtgaccgccgcagacacggctgtgtattactgtgcgagactgggagggatacctggaactccgtactaccttgactactggggccagggaaccccggtcgccgtctcctcag

SEQ ID NO: 6434 - DNA, 370 bp, Homo sapiens; identical to SEQ ID NO: 6433

SEQ ID NO: 6435 - DNA, 367 bp, Homo sapiens
gaggtgcagctggtggagtctgggggaggcttggtacagcctggggggtccctgagactctcctgtgcagcctctggattcacgttcagtagttatagcatgaactgggtccgccaggctccagggaaggggctggagtgggtttcatacattggtagtcgtagtactaccatatactacgcagactctgtgaagggccgattcaccgtctccagagacaacgccaagaactcactgtatctgcaaatgaacagcctgagagccgaggacacggctgtgtattactgtgcgagaaggtcgctatggttcgggggctatgatgcttttgatatctggggccaagggacaatggtcaccgtctcttcag

SEQ ID NO: 6436 - DNA, 367 bp, Homo sapiens
gaggcgcagctggtggagtctgggggaggcttggtacagcctggggggtctctgagactctcctgtgcagcctctggattcacctacagtagctatagcttaaactgggtccgccagactccagggaaggggctggagtggctttcatacattggtagtagtagtataaccatatactacgcagactctgtgaagggccgattcaccatctccagagacaacgccaagaactcactgtatctgcaaatgaacagcctgagagccgaggacacggctgtgtattactgtgcgagaaggtcgctatggttcgggggctatgatgcttttgatatctggggccaagggacaatggtcaccgtctcttcag

SEQ ID NO: 6437 - DNA, 379 bp, Homo sapiens
gaggtgcagctggtgcagtctggagcagaggtgaaaaagcccggggagtctctgaagatctcctgtaagggttctggatacagctttaccaactactggatcgcctgggtgcgccagatgcccgggaaaggcctggagtggatggggatcatctatcctggtgactctgataccagatacagcccgtccttccaaggccaggtcaccatctcagccgacaagtccatcagcaccgcctacctgcagtggagcagcctgaaggcctcggacaccgccatgtattactgtgcgagacaatccgcgtattattatggttcggggagttattataatgcttttgatatctggggccaagggacaatggtcaccgtctcttcag

SEQ ID NO: 6438 - DNA, 379 bp, Homo sapiens
gaggtgcagctggtgcagtctggagcagaggtgaaaaagcccggggagtctctgaagatctcctgtaagggttctggattcatctttaccagctactggatcggctgggtgcgccagatgcccgggaaaggcctggagtggatggggatcatctatcctgatgactctgataccagatacagcccgtccttccaaggccaggtcaccatctcagccgacaagtccatcagcaccgcctacctgcagtggagcagcctgaaggcctcggacaccgccatgtattactgtgcgagacaatccgcgtattactatggttcggggacttattataatgcttttgatatctggggccaagggacaatggtcaccgtctcttcag

SEQ ID NO: 6439 - DNA, 382 bp, Homo sapiens
caggtcaccttgaaggagtctggtcctgcgctggtgaaacccacacagaccctcacactgacctgcaccttctctgggttctcactcaacactcgtggaatgcgtgtgagctggatccgtcagcccccaaggaaggccctggaatggcttgcacgcattgattgggatgatgaaaaattctacagcgcatctctgaggaccaggctcaccatctccaaggacacctccagaaaccaggtggtccttacaatgaccaacatggaccctgtggacacagccacatattactgtgtgcggcagtattgtagtgctggtacctgctttggtgaacactggttcttcgatctctggggccgtggcaccctggtcactgtctcctcag

SEQ ID NO: 6440 - DNA, 382 bp, Homo sapiens
caggtcaccttgaaggagtctggtcctgcgctggtgaaacccacacagaccctcacactgacctgcaccttctctgggttctcactcaacactcgtggaatgcgtgtgagctggatccgtcagcccccaaggaaggccctggaatggcttgcacgcattgattgggatgatgaaaaattctacagcgcatctctgaggaccaggctcaccatctccaaggacacctccagaaaccaggtggtccttacaatgaccaacatggaccctgtggacacagccacgtattactgtgtgcggcagtattgtagtgctggtacctgctttggtgaacactggttcttcgatctctggggccgtggcaccctggtcactgtctcctcag

SEQ ID NO: 6441 - DNA, 355 bp, Homo sapiens
gaggtgcagctgttggagtctgggggaggcttggtacagcctggggggtccctgagactctcctgtgcagcctctggattcacctttagcatctttgccatgagctgggtccgccaggctccagggaagggactggagtgggtctcagctattggtggtagtggtggtaggacatactacgcagactccgtgaagggccggttcaccatctccagagacaattccaagaacacgctgtatctgcaaatgaacagcctgagagccgaggacacggccgtatattactgtgcgaaagaggttacgctatttttttttgactcctggggccagggaaccctggtcaccgtctcctcag

SEQ ID NO: 6442 - DNA, 355 bp, Homo sapiens
gaggtgcagctgttggagtctgggggaggcttggtacagcctggggggtccctgagactctcctgtgcagcctctagattcacctttagcttctttgccatgagctgggtccgccaggctccggggaaggggctggagtgggtctcaggtatcagtgctagtggtgatgccacatactacgcagactccgtgaagggccgcttcaccatctccagagacaattccaagaacacgctgtatctgcaagtgcacagcctgagagccgaggacacggccgtatattactgtgcgaaagaggttacgttatttttttttgactactggggccagggaaccctggtcaccgtctcctcag

SEQ ID NO: 6443 - DNA, 352 bp, Homo sapiens
gaggtgcagctggtggagtctgggggaggcttggtccagcctggggggtccctgagactctcctgtgcagcctctggatttatcgtcagtagcaactacatgagctgggtccgccaggctccagggaaggggctggagtgggtctcaattatttatcccggtggtagcacattctacgcagactccgtgaagggccgattcaccatctccagagacaattccaagaacacgctgtatcttcaaatgagcagcctgagagctgaggacacggctgtgtattactgtgcgagagactacggtgacttcttttttgactactggggccagggaaccctggtcaccgtctcctcag

SEQ ID NO: 6444 - DNA, 352 bp, Homo sapiens
gaggtgcagctggtggagtctgggggaggcttggtccagcctggggggtccctgagactctcctgtgcagcctctggagtcaccgtcagtagcaactacatgagctgggtccgccaggctccagggaaggggctggagtgggtctcagttatttatagcggtggtagcacatactacgcagactccgtgaagggccgattcaccatctccagagacaattccaagaacacgctgtatcttcaaatgaacagcctgagagctgaggacacggctgtgtattactgtgcgagagactacggtgacttctactttgactactggggccagggaaccctggtcaccgtctcctcag

SEQ ID NO: 6445 - DNA, 352 bp, Homo sapiens
gaggtgcagctggtggagtctgggggaggcttggtccagcctggggggtccctgagactctcctgtgtagcctctgagatcaccgtcagtagcaactacatgagctgggtccgccaggctccagggaaggggctggagtgggtctcaattatttatcccggtggtaccacatactacgcagactccgtgaagggccgattcaccatctccagagacaattccaagaacacgctgtatcttcaattgaacagcctgagacctgaggacacggctgtgtattactgtgcgaggaaccgtccacgtggctggggcacgtattggggccagggaaccctggtcaccgtctcctcag

SEQ ID NO: 6446 - DNA, 352 bp, Homo sapiens
gaggtgcagctggtggagtctgggggaggcttggtccagccgggggggtccctgagactctcctgtgcagcctctgaaatcaccgtcagtagtaactacatgagctgggtccgccaggctccagggaaggggctggagtgggtctcagttatttatcccggtggcagcacatactacgcagactccgtgaagggccgattcaccatctccagagactattccaagaacacgctgtatcttcaaatgaacagcctgagaactgaggacacggctgtgtattactgtgcgaggaaccgtccacgtggctggggcacgtactggggccagggaaccctggtcaccgtctcctcag

SEQ ID NO: 6447 - DNA, 352 bp, Homo sapiens
gaggtgcagctggtggagtctgggggaggcttggtccagcctggggggtccctgagactctcctgtgcagcctctggattcaccgtcagtagcaagtacatgcactgggtccgccaggctccagggaaggggctggagtgggtctcagttatttatagcggtgctagcacatactacgcagactccgtgaagggccgattcaccatctccagagacaattccaagagcacgctgtatcttcaaatgaacagcctgagagctgaggacacggctgtgtattattgtgcgagaggggattttgactggtcattagactactggggccagggaaccctggtcaccgtctcctcag

SEQ ID NO: 6448 - DNA, 352 bp, Homo sapiens; identical to SEQ ID NO: 6447

SEQ ID NO: 6449 - DNA, 352 bp, Homo sapiens
gaggtgcagctggtggagtctggaggaggcttgatccagcctggggggtccctgagactctcctgtgcagcctctgggatcaccgtcagtagcaactacatgagctgggtccgccaggctccagggaaggggctggagtgggtctcagttatttatagcggtggtagcacattctacgcagactccgtgaagggccgattcaccatctccagagacaatgccaagaacacactgtatcttcaaatgaacagcctgagagccgaggacacggccgtgtattactgtgcaagagacctagttacgtgggcctttgatatctggggccaagggacaatggtcaccgtctcttcag

SEQ ID NO: 6450 - DNA, 352 bp, Homo sapiens
gaggtgcagctggtggagtctggaggaggcttgatccagcctggggggtccctgagactctcctgtgcagcctctgggttcaccgtcagtagcaactacatgagctgggtccgccaggctccagggaaggggctggagtgggtctcagttatttatagcggtggtagcacatactacgcagactccgtgaagggccgattcaccatctccagagacaattccaagaacacgctgtatcttcaaatgaacagcctgagagccgaggacacggccgtgtattactgtgcgagagacctagctacgtgggcttttgatatctggggccaagggacaatggtcaccgtctcttcag

SEQ ID NO: 6451 - DNA, 355 bp, Homo sapiens
caggtgcagctgcaggagtcgggcccaggactggtgcagccttcggggaccctgtccctcacctgcgctgtctctggtggctccatcagtagtaataactggtggacttgggtccgccagcccccagggaaggggctggagtggattggggaaatctatcatagtgggagcaccaactacaacccgtccctcaagagtcgagtcaccgtttcagtagacaggtccaagaaccagttctccctgaagttgcgctctgtgaccgccgcggacacggccgtgtattactgtgcgagaccgaaggctggtagtgtcttcgacccctggggccagggaaccctggtcaccgtctcctcag

SEQ ID NO: 6452 - DNA, 355 bp, Homo sapiens
caggtgcagctgcaggagtcgggcccaggactggtgcagccttcggggaccctgtccctcacctgcgctgtctctggtggctccatcagtagtaataactggtggacttgggtccgccagcccccagggaagggactggagtggattggggaaatctttcatagtggcagcaccaactacaacccgtccctcaagagtcgagtcaccatatcactagacaggtccaagaaccagttctccctgaagttgagctctgtgaccgccgcggacacggccgtgtattactgtgcgagaccgaaggctggtagtattttcgacccttggggccagggaaccctggtcaccgtctcctcag

SEQ ID NO: 6453 - DNA, 358 bp, Homo sapiens
gaggtgtacctggtggagtctgggggagacttggtaaagccgggggggtcccttagactctcctgtgcagcctctggtttcactttcagtagtgtctggatgaactgggtccgccaggctccagggaaggggctggagtgggtcggccgtattaaaaccaaacctgatggtgggacaacagactacgctgtccccgtaaaaggcagattcaccatctcaagggatgattcaaaaaacacgctatatctgcaactgaacagcctgcaaaccgaggacacagccgtatattactgtacttcacggttggtgactacaaatgactactggggccagggaaccctggtcaccgtctcctcag

SEQ ID NO: 6454 - DNA, 358 bp, Homo sapiens
gaggtgcagctggtggagtctgggggaggcttggtaaagcctggggggtcccttagactctcctgtgcagcctctggtttcactttcagtaatgtctggatgaactgggtccgccaggctccagggaaggggctggagtgggtcggccgtattaagaccaagcctgaaggtgggacaacagactactctgtccccgtaaaaggcagattcaccatctcaagagatgactcaaaaaacacgctgtatctgcaattgaacagcctgcaaaccgaggacacagccgtttattactgtacttcacgattggtgactaccaatgactactggggccagggaaccctggtcaccgtctcctcag

SEQ ID NO: 6455 - DNA, 349 bp, Homo sapiens
caggtgcagctgcaggagtcgggcccaggactggtgaagccttcggggaccctgtccctcacgtgcgctgtctctggtggctccatcagcaataattggtggagttgggtccgccagcccccagggaaggggctggagtggattggggaaatctatcatagtgggaccaccaactacaacccgtccctcaagagtcgagtcaccatatcagtggacaagtctaacaaccagttctccctgaggctgagctctgcgaccgccgcggacacggccgtgtattactgtgcgagacagggccgggcagcttttgatatctggggccaagggacaatggtcaccgtctcttcag

SEQ ID NO: 6456 - DNA, 349 bp, Homo sapiens; identical to SEQ ID NO: 6455

SEQ ID NO: 6457 - DNA, 351 bp, Homo sapiens
gaggtgcaggtggtggagtctgggggaggcttggcacagcctggggggtccctgagactctcctgtgcagcctctggattcaccttcagtagctatagcatgagctgggtccgccaggctccagggaaggggctggagtgggtttcatacattagttttagtagtggtaccatacactacgcagactctgtgaagggccggttcaccatctccagagacaatgccaagaactcactgtatctgcaaatgaacagcctgagagacgaggacacggctgtgtattactgtgcgagagattactccccctacatggacgtctggggcaaagggaccacggtcaccgtctcctca

SEQ ID NO: 6458 - DNA, 351 bp, Homo sapiens
gaggtgcagctggtggagtctgggggaggcttggtacagcctggggggtccctgagactctcctgtgcagcctctggattcaccttaagtagttatagcatgagctgggtccgccaggctccagggaaggggctggagtgggtttcatacattagttttagtagtggtaccatacactacgcagactctgtgaagggccggttcaccatctccagagacaatgccaagaactcactgtatctgcaaatgaacagcctgagagacgaggacacggctgtgtattactgtgcgagagattactccccctacatggacgtctggggcaaagggaccacggtcaccgtctcctca

SEQ ID NO: 6459 - DNA, 393 bp, Homo sapiens
gaagtgcagctggtggagtctgggggaggcttggtacagcctggcaggtccctgagactctcctgtgcagcctctggattcagctttgatgattgtgccatgcactgggtccggcaagctccagggcagggcctggagtgggtctcaggtattagttggaatagtggtagcataggctatgcggactctgtgaagggccgattcaccatctccagagacaacgccaagaactccctgtatctgcaaatgaacagtctgagagctgaggacacggccttgtattactgtgcaaaatctggagggcccctcattagtggatacagctatggctctcagtactactactattacatggacgtctggggcaaagggaccacggtcaccgtctcctca

SEQ ID NO: 6460 - DNA, 393 bp, Homo sapiens; identical to SEQ ID NO: 6459

SEQ ID NO: 6461 - DNA, 337 bp, Homo sapiens
caggtgcagctgcaggagtcgggcccaggactggtgaagccttcggagaccctgtccctcacctgcactgtctctggtggctccatcagtagtttctactggagctggatccggcagcccccagggaagggactggagtggattgggtatatctattacagtgggagcaccaactacaacccctccctcaagagtcgagtcagcatatcagtagacacgtccaagaggcagttctccttgaagctgacctctgtgaccgctgcggacacggccgtgtattactgtgcgagggggttcgactactggggccagggaaccctggtcaccgtctcctcag

SEQ ID NO: 6462 - DNA, 337 bp, Homo sapiens
caggtgcagctgcaggagtcgggcccaggactggtgaagccttcggagaccctgtccctcacctgcactgtctctggtgactccatcagtagttactactggagctggatccggcagcccccagggaagggactggagtggattgggtatatctcttacagtgggagcaccaactacaacccctccctcaagagtcgagtcaccatatcagtagacacgtccaagaatcagttctccctgaagctgagctctgtgaccgctgcggacacggccgtgtattactgtgcgaggggctttgactactggggccagggaaccctggtcaccgtctcctcag

SEQ ID NO: 6463 - DNA, 340 bp, Homo sapiens
caggtgcagctgcaggagtcgggcccaggactggtgaagccttcggagaccctgtccctcacctgcactgtctctggtggctccatcagtagttactactggagctggatccggcagcccccagggaagggactggagtggattgggtatatctattacagtgggagcaccaactacaacccctccctcaagagtcgagtcaccatatcagtagacaggtccaagaaccagttctccctgaagctgagctctgtgaccgctgcggacacggccgtgtattactgtgcgggcggggcagcctggagctggggccagggaaccctggtcaccgtctcctcag

SEQ ID NO: 6464 - DNA, 340 bp, Homo sapiens
caggtgcagctgcaggagtcgggcccaggactggtgaagccttcggagaccctgtccctcacctgcactgtctctggtggctccatcagtaattactactggagctggatccggcagcccccagggaagggactggagtggattgggtatatctattacagtgggagcaccaactacaacccctccctcaagagtcgagtcaccatatcagtagacaggtccaagaaccagttctccctgaagctgagctctgtgaccgctgcggacacggccgtgtattactgtgcgggcggggcagcctggagctggggccagggaaccctggtcaccgtctcctcag

SEQ ID NO: 6465 - DNA, 373 bp, Homo sapiens
gacgtgcagctgttggagtctgggggaggcatggtacagcctggggggtccctgagactctcctgtgcagcctctggattcacctttagcctctatgccatgagctgggtccgccaggctccagggaaggggctggagtgggtctcaggtattagtggaagtggtggtagcacattctacgcagactccgtgaagggccggttcaccatctccagagacaattccaagaacacgctgtatctgcaaatgaacagcctgagagtcgaggacacggccgtatattcctgtgcgcaagtcccttatagcagtggctggtacttcctctggtacttcgatctctggggccgtggcaccctggtcactgtctcctcag

SEQ ID NO: 6466 - DNA, 379 bp, Homo sapiens
gaggtgcagctggtggagtctgggggaggcttggtaaagcctggggggtcccttagactctcctgtgcagcctctggtttcgctttcagtaacgcctggatgaactgggtccgccaggctccagggaaggggctggagtgggtcggccgtattaaaagcaaaactgatggtgggacaacagactacgctgcacccgtgaaaggcagattcaccatctcaagagatgattcaaaaaacacgctgtatctgcaaatgaacagcctgaaaaccgaggacacagccgtgtattactgtaccacagatacgagccttactacaatggttcagggagccattcatccttgctggggccagggaaccctggtcaccgtctcctcag

SEQ ID NO: 6467 - DNA, 370 bp, Homo sapiens
caggtgcagctacagcagtggggcgcaggactgttgaagccttcggagaccctgtccctcacctgcgctgtctatggtgggtccttcagtggttactactggagctggatccgccagcccccagggaaggggctggagtggattggggaaatcaatcatagtggaagcaccaactacaacccgtccctcaagagtcgagtcaccatatcagtagacacgtccaagaaccagttctccctgaagctgagctctgtgaccgccgcggacacggctgtgtattactgtgcgagagtccctttttggagtggttaccatataaactggtacttcgatctctggggccgtggcaccctggtcactgtctcctcag

SEQ ID NO: 6468 - DNA, 373 bp, Homo sapiens
caggtgcagctggtgcagtctggggctgaggtgaagaagcctggggcctcagtgaaggtctcctgcaaggcttctggatacaccttcaccggctactatatgcactgggtgcgacaggcccctggacaagggcttgagtggatgggacggatcaaccctaacagtggtggcacaaactatgcacagaagtttcagggcagggtcaccatgaccagggacacgtccatcagcacagcctacatggagctgagcaggctgagatctgacgacacggccgtgtattactgtgcgagagatcctgcgtactatggttcagggagttatccttctttcgatctctggggccgtggcaccctggtcactgtctcctcag

SEQ ID NO: 6469 - DNA, 373 bp, Homo sapiens
caggtgcagctggtggagtctgggggaggcgtggtccagcctgggaggtccctgagactctcctgtgcagcctctggattcaccttcagtagctatgctatgcactgggtccgccaggctccaggcaaggggctggagtgggtggcagttatatcatatgatggaagtaataaatactacgcagactccgtgaagggccgattcaccatctccagagacaattccaagaacacgctgtatctgcaaatgaacagcctgagagctgaggacacggctgtgtattactgtgcgagagagggggggattatgattacgtttggggcttggtacttcgatctctggggccgtggcaccctggtcactgtctcctcag

SEQ ID NO: 6470 - DNA, 376 bp, Homo sapiens
caggtgcagctgcaggagtcgggcccaggactggtgaagccttcacagaccctgtccctcacctgcactgtctctggtggctccatcagcagtggtgattactactggagttggatccgccagcccccagggaagggcctggagtggattgggtacatctattacagagggagcacctactacaacccgtccctcaagagtcgagttaccatatcagtagacacgtccaagaaccagttctccctgaagctgagctctgtgactgccgcagacacggccgtgtattattgtgccagagagctagcgatcgcagcagctcgtttaaactggtacttcgatctctggggccgtggcaccctggtcactgtctcctcag

SEQ ID NO: 6471 - DNA, 373 bp, Homo sapiens
gaagtgcagctggtgcagtctggagcagaggtgaaaaagcccggggagtctctgaggatctcctgtaagggttctggatacagcttcaacagttattggatcagctgggtgcgccagatgcccgggaaaggcctggagtggatggggaggattgatcctagtgacgcttataccatctatagcccgtccttccaaggccacgtcaccatctcagctgacaagtccatcagcactgcctacctgcagtggggcagcctgcaggcctcggacaccgccatgtattactgtgcgagacatttcagcgggggattcggggagtttgcgtggtggttcgacccctggggccagggaaccctggtcaccgtctcctcag

SEQ ID NO: 6472 - DNA, 370 bp, Homo sapiens
caggtgcagctacagcagtggggcgcaggactgttgaagccttcggagaccctgtccctcacctgcgctgtctatggtgggtccttcagtggttactactggagctggatccgccagcccccagggaaggggctggagtggattggggaaatcaatcatagtggaagcaccaactacaacccgtccctcaagagtcgagtcaccatatcagtagacacgtccaagaaccagttctccctgaagctgagctctgtgaccgccgcggacacggctgtgtattactgtgcgagaggccgtatgagtgtagtagtaccagctgctataggccttgactactggggccagggaaccctggtcaccgtctcctcag

SEQ ID NO: 6473 - DNA, 371 bp, Homo sapiens
caggtgcagctggtgcagtctggggctgaggtgaagaagcctgggtcctcggtgaaggtctcctgcaaggcttctggaggcaccttcagcagctatgctatcagctgggtgcgacaggcccctggacaagggcttgagtggatgggagggatcatccctatctttggtacagcaaactacgcacagaagttccagggcagagtcacgattaccgcggacgaatccacgagcacagcctacatggagctgagcagcctgagatctgaggacacgggcgtgtattactgtgcgagaggatcccctaaaacgggtggctacgattgggggggttttgactactggggccagggaaccctggtcaccgtctcctc

SEQ ID NO: 6474 - DNA, 373 bp, Homo sapiens
caggttcacctggtgcagtctggagctgaggtgaagaagcccggggcctcagtgaaggtctcctgcaaggcttctggttacacctttaccaactatggtatcagctgggtgcgacaggcccctggacaagggcttgagtgggtgggatggatcagcgcttacaatggtaacacaaactatgcacagaagctccagggcagagtcaccatgaccacagacacatccacgagcacagcctatatggagctgaggagcctgagatctgacgacacggccgtctattactgtgcgagagaggggtattgtagtaatagtagctgccacctgggttccgactactggggccagggaaccctggtcaccgtctcctcag

SEQ ID NO: 6475 - DNA, 370 bp, Homo sapiens
gaggtgcagctggtggagtctgggggaggcttggtccagcctggggggtccctgagactctcctgtgcagcctctggattcaccgtcagtactaactatatgagctgggtccgccaggctccagggaaggggctggagtgggtctcagttatttatagcggtggtagcacatattacgcagactccgtgaagggccgattcaccatctccagagacaattccgagaacacgctgtatcttcaaatgaacagcctgagagctgaggacacggctgtgtattactgtgcgttcaacatgctgaatatggttcggggaattattatgcactttgaatattggggccagggaaccctggtcaccgtctcctcag

SEQ ID NO: 6476 - DNA, 376 bp, Homo sapiens
caggtcaccttgaaggagtctggtcctgcgctggtgaaacccacacagaccctcacactgacctgcaccttctctgggttctcactcagcactagtggaatgcgtgtgagctggatccgtcagcccccagggaaggccctggagtggcttgcaggcattgattgggatgatgataaattctacagctcatctctgaagaccaggctcaccatctccaaggacacctccaaaaaccaggtggttcttacaatgaccaacatggaccctgtggacacagccacctattactgtgcacggtcgcattacgatattttgactggttattccgaattttttgactactggggccagggaaccctggtcaccgtctcctcag

SEQ ID NO: 6477 - DNA, 373 bp, Homo sapiens
caggtgcggctgcaggagtcgggcccaggactggtgaagccttcggagaccctgtccctcacctgcattgtctctggtggctccatcaccagtacttattactggggctggatccgccagcccccagggaagggactggagtggattggcagtatgtattatagtgggacctcctactacaacccgtccctcaagagtcgagtcaccatgtccgtagacacgtccgagaagcgcttctccctgaggctgaagtctgtgaccgccgcagacacggctgtttattactgtgcgagacggacccggtatgagggagcagtggctggtccggactttgactcctggggccagggaagcctggtcaccgtctcctcag

SEQ ID NO: 6478 - DNA, 376 bp, Homo sapiens
cagctgcagctgcaggagtcgggcccaggactggtgacgccttcggagaccctgaccctcacctgcattgtctctggtggctccgtcagcagtagtagttactactggggctggatccgccagcccccagggaaggggctggagtggattgggagtatctattatagtgggatcacatactacaacccgtccctcaacagtcgagtcaccatatcagtagacacgtccaagaaccagttctccctgaagctgagctctgtgaccgcagcggacacggccgtgtattactgtgcgagagagcacaggcaatatatggtagtggtaccaccgtcgttcgacccctggggccagggaaccctggtcaccgtctcctcag

SEQ ID NO: 6479 - DNA, 376 bp, Homo sapiens
cagctgcagctgcaggagtcgggcccaggactggtgaagccttcggagaccctgtccctcacctgcactgtctctggtggctccatcagcagtagtagttactactggggctggatccgccagcccccagggaaggggctggagtggattgggagtatctattatagtgggagcacctactacaacccgtccctcaagagtcgagtcaccatatccgtagacacgtccaagaaccagttctccctgaagctgagctctgtgaccgccgcagacacggctgtgtattactgtgcgagacatagggaatggagttgggcagcagctactggtgggatagactactggggccagggaaccctggtcaccgtctcctcag

SEQ ID NO: 6480 - DNA, 373 bp, Homo sapiens
caggtgcagctggtgcagtctggggctgaggtgaagaagcctggggcctcagtgaaggtttcctgcaaggcatctggatacaccttcaccagctactatctgcactgggtgcgacaggcccctggacaagggcttgagtggatgggaataatcaaccctagtggtggtagcacaacctacgcacagaagttccagggcagagtcaccatgaccagggacacgtccacgagcacagtctacatggacctgagcagcctgagatctgaggacacggccgtgtattactgtgcgagagacggatactatggttcagggagttattcgtactactttgactactggggccagggaaccctggtcaccgtctcctcag

SEQ ID NO: 6481 - DNA, 373 bp, Homo sapiens
caggtgcagctggtgcagtctggggctgaggtgaagaagcctggggcctcagtgaaggtttcctgcaaggcatctggttacaccttcaccagctactgtatgcactgggtgcgacaggcccctggacaagggcttgagtggatgggaataatcaaccctagtggtggtagcacaacctacgcacagaagttccagggcagagtcaccatgaccagggacacgtccacgagcacagtctacatggaagtgagcagcctgagatctgaggacacggccgtgtatttctgtgcgagagatccttacccctatggttcagggagcaataattacttcgacccctggggccagggaaccctggtcaccgtctcctcag

SEQ ID NO: 6482 - DNA, 370 bp, Homo sapiens
cacgtgcagctgcaggagtcgggcccaggactggtgaagccttcggagaccctgtccctcacctgcactgtctctggtggctccgtcagtagtgactactggagctggatccggcagccccccgggaagggactggaatggattggctatattaattacagtgggaacaccaactacaacccctccctcaacagtcgagtcaccatatcaatagacacgtccgagaaccagttctccctgaagctgagctctgtgaccgccgcagacacggccgtgtattactgtgcgacacaccgtgtcgccaagcagtggctgccagggggctggtttgacccctggggccagggagccctggtcaccgtctcctcag

SEQ ID NO: 6483 - DNA, 370 bp, Homo sapiens
caggtgcagctccaggagtcgggcccaggacaggtgaagccttcggagaccctgtccctcacctgcactgtctctggtgactccataaggagttactactggagctgggtccggcagtccccagggaagggactggagtggattgggtatatttatgacagcgggagtaccaattacaatccctccctcaagagccgagtcaccatatcagtagacacgtccaagaataatatctccctgaagctgagctctgtgaccgccgcagacacggccgtgtattactgtgcgcggttaattggtgatcgtagtggttattacgtggggtggttcgacccctggggccagggaaccctggtcaccgtctcctcag

SEQ ID NO: 6484 - DNA, 370 bp, Homo sapiens
caggtgcagctgcaggagtcgggcccaggactggtgaagccttcggagaccctgtccctcacctgcactgtctctggtggctccatcagtagttactactggagctggatccggcagcccccagggaagggactggagtggattgggtatatctattacagtgggagcaccaactacaacccctccctcaagagtcgagtcaccatatcagtagacacgtccaagaaccagttctccctgaagctgagctctgtgaccgccgcagacacggccgtgtattactgtgcgagatcagaggagggcaattactatgatagtagtggactattaggagactggggccagggaaccctggtcaccgtctcctcag

SEQ ID NO: 6485 - DNA, 373 bp, Homo sapiens
gaggtgcagctggtgcagtctggagcagaggtgaaaaagcccggggagtctctgaagatctcctgtaagggttctggatacagctttaccagctactggatcggctgggtgcgccagatgcccgggaaaggcctggagtggatggggatcatctatccaggtgactctgataccagatacagcccgtccttccaaggccaggtcaccatctcagccgacaagtccatcagcaccgcctacctgcagtggagcagcctgaaggcctcggacaccgccatgtattactgtgcgagggggccatatggttcggggagttattacccttactactttgactactggggccagggaaccctggtcaccgtctcctcag

SEQ ID NO: 6486 - DNA, 373 bp, Homo sapiens
gaggtgcagctggtgcagtctggagcagaggtgaaaaagcccggggagtctctgaagatctcctgtaagggttctggatacagctttaccagctactggatcggctgggtgcgccagatgcccgggaaaggcctggagtggatggggatcatctatcctggtgactctgataccagatacagcccgtccttccaaggccaggtcaccatctcagccgacaagtccatcagcaccgcctacctgcagtggagcagcctgaaggcctcggacaccgccatgtattactgtgcgagatccttttctgggttcggggagttattattaaactggttcgacccctggggccagggaaccctggtcaccgtctcctcag

SEQ ID NO: 6487 - DNA, 373 bp, Homo sapiens
gaggtgcagctggtgcagtctggagcagaggtgaaaaagcccggggagtctctgaagatctcctgtaagggttctggatacagctttaccagctactggatcggctgggtgcgccagatgcccgggaaaggcctggagtggatggggatcatctatcctggtgactctgataccagatacagcccgtccttccaaggccaggtcaccatctcagccgacaagtccatcaggaccgcctacctgcagtggagcagcctgaaggcctcggagaccgccatgtattactgtgcgagggggccacccacccgggaatggacacacataaattggttcgacccctggggccagggaaccctggtcaccgtctcctcag

SEQ ID NO: 6488 - DNA, 373 bp, Homo sapiens
gaggtgcagctgttggagtctgggggaggcttggtacagcctggggggtccctgagactctcctgtgcagcctctggattcacctttagcagctttgccatgagctgggtccgccaggctccagggaaggggctggaatgggtctcagctattagtggtagtggtggtagcacatactacgcacactccgtgaagggccggttcaccatctccagagacaattccaagaacacgctgtatctgcaaatgaacagcctgagagccgaggacacggccgtatattactgtgcgaaagatcacgagtatagtagtgcctggtacgaggggatattgagctactggggccagggaaccctggtcaccgtctcctcag

SEQ ID NO: 6489 - DNA, 371 bp, Homo sapiens
gaggtgcaactgttggagtctgggggaagcttggtacagcctggggggtccctgagactctcctgtgcagcctctggattcacctttagcagctatgccatgagctgggtccgccaggttccagggaaggggctggagtgggtctcagctattagtggtagtggtgatagcacatactatgcagactccgtgaagggccggttcaccatctccagagacaattccaagaatacgctgtatctgcaaatgaacagcctgagagccgaggacacggccgtatatttctgtgcgaaagaccgccttttagatagtttggggattaggtattactttgactactggggccagggaaccctggtcaccgtctcctc

SEQ ID NO: 6490 - DNA, 373 bp, Homo sapiens
gaggtgcagctgttggagtctgggggaggcttggtacagcctggggggtccctgagactctcctgtgcagcctctggattcacctttagcagctatgccatgagctgggtccgccaggctccagggaaggggctggagtgggtctcagctattagtggtagtggtggtagcacatactacgcagactccgtgaagggccggttcaccatctccagagacaattccaagaacacgctgtatctgcaaatgaacagcctgagagccgaggacacggccgtatattactgtgcgaaaggggttatgattacgtttgggggagttatcgcccactttgactactggggccagggaaccctggtcaccgtctcctcag

SEQ ID NO: 6491 - DNA, 373 bp, Homo sapiens
gaggtgcagctgttggagtctgggggaggcttggtacagcctggggggtccctgagactctcctgtgcagcctctggattcacctttagcagctatgccatgagctgggtccgccaggctccagggaaggggctggagtgggtctcagctattagtggtagtggtggtagcacatactacgcagactccgtgaagggccggttcaccatctccagagacaattccaagaacacgctgtatctgcaaatgaacagcctgagagccgaggacacggccgtatattactgtgcgaaagatggacatagcagcagctggtacgattggtattggttcgacccctggggccagggaaccctggtcaccgtctcctcag

SEQ ID NO: 6492 - DNA, 373 bp, Homo sapiens
gaggtgcagctggtggagtctgggggaggcttggtccagcctggggggtccctgagactctcctgttcagcctctggattcaccttcagtgactatgccatgcactgggtccgccaggctccagggaagggactgaaatatgtttcagctattagtagtgatgggggtagcacatactacgcagactccgtgaagggcagattcaccatctccagagacaattccaagaacacactgtatcttcaaatgagcagtctgagagctgaggacacggctgtatattactgtgtgaaagatccgtacagaggggcagtggctggaacaggagtttttgactactggggccagggaaccctggtcaccgtctcctcag

SEQ ID NO: 6493 - DNA, 373 bp, Homo sapiens
gaggtgcagctggtggagtctgggggaggcttggtccagcctggggggtccctgagactctcctgttcagcctctggattcaccttcagtacctatgctatgcactgggtccgccaggctccagggaagggactggaatatgtttcagctattagtagtaatggggttagcacatactacgcagactccgtgaagggcagattcaccatctccagagacaattccaagaacaagctgtattttcaaatgagcagtctgagagctgaggacacggctgtgtattactgtgtgaaagagggtagtagtggttattactactccagcacctggttcgacccctggggccagggaaccctggtcaccgtctcctcag

SEQ ID NO: 6494 - DNA, 373 bp, Homo sapiens
gaggtgcagctggtggagtctgggggaggcttggtccagcctggggggtccctgagactctcctgtgcagcctctggattcacctttagtagctattggatgagctgggtccgccaggctccagggaaggggctggagtgggtggccaacataaagcaagatggaagtgagaaatactatgtggactctgtgaagggccgattcaccatctccagagacaacgccaagaactcactgtatctgcaaatgaacagcctgagagccgaggacacggctgtgtattactgtgcgagatttagcggcgatgactacggtcgatggggagagtactttgactactggggccagggaaccctggtcaccgtctcctcag

SEQ ID NO: 6495 - DNA, 373 bp, Homo sapiens
gaggtgcagctggtggagtctgggggaggcttggtccagcctggggggtccctgagactctcctgtgcagcctctggattcacctttagtagctattggatgagctgggtccgccaggctccagggaaggggctggagtgggtggccaacataaagcaagatggaagtgagaaatactatgtggactctgtgaagggccgattcaccatctccagagacaacgccaagaactcactgtatctgcaaatgaacagcctgagagccgaggacacggctgtgtattactgtgcgagagatttgtattgtagtggtggtagctgctactttacctttgactactggggccagggaaccctggtcaccgtctcctcag

SEQ ID NO: 6496 - DNA, 373 bp, Homo sapiens
caggtgcagctggtggagtctgggggaggcgtggtccagcctgggaggtccctgagactctcctgtgcagcctctggattcaccttcagtagttatgctatgcactgggtccgccaggctccaggcaaggggctggagtgggtggcagttatattagatgatggaagcaataaatattatgcagactccgtgaagggccgattcaccatctccagagacaattccaagaacacggtgtatctgcaaatgaacagcctgagagctgaggacacggctgtttattactgtgcgagagattttagtcccctggagcagtggctggttacctggttcgacccctggggccagggaaccctggtcaccgtctcctcag

SEQ ID NO: 6497 - DNA, 373 bp, Homo sapiens
caggtgcagctggtggagtctgggggagtcgtggtccagcctgggaggtccctgagactctcctgtgcagcctctggattcagtttcaatagatatgccatgcactgggtccgccaggctccaggcaaggggctggagtgggtggcatttatatcatatgatggaagcaataaatactacgccgactccgtgaagggccgattcaccatctccagagacaattccaagaacacactgtatctgcaaatgaacagcctgagagttgaggacacggctgtgtttcactgtgcgagagagggtgtgatacgatattttgactgggtaaagccccttgactactggggccagggaaccctggtcaccgtctcctcag

SEQ ID NO: 6498 - DNA, 373 bp, Homo sapiens
caggtgcagctggtggagtctgggggaggcgtggtccagcctgggaggtccctgagactctcctgtgcagcctctggattcaccttcagtagctgttctatgcactgggtccgccaggctccaggcaaggggctggagtgggtggcagttatatcatttgatggaagcagtgaatactacgcagactccgtgaagggccgattcaccatctccagagacaattccaagaacactctgtatctgcaaatgaacagcctgagacctgaggacacggctgtgtattactgtgcgagaggagggttattaagatatttggagtggttaccctggttcgacccctggggccagggaaccctggtcaccgtctcctcag

SEQ ID NO: 6499 - DNA, 373 bp, Homo sapiens
gaggtgcagctggtggagtctgggggaggtgtggtacggcctggggggtccctgagactctcctgtgcagcctctggattcacctttgatgattatggcatgagctgggtccgccaagctccagggaaggggctggagtgggtctctggtattaattggaatggtggtagcacaggttatgcagactctgtgaagggccgattcaccatctccagagacaacgccaagaactccctgtatctgcaaatgaacagtctgagagccgaggacacggccttgtattactgtgcgagaggccagaatttatggttcggggagttacctgggatctttgactactggggccagggaaccctggtcaccgtctcctcag

SEQ ID NO: 6500 - DNA, 372 bp, Homo sapiens
caggttcagctggtgcagtctggagctgaggtgaagaagcctggggcctcagtgaaggtctcctgcaaggcttctggttacacctttaccagctatgatatcagctgggtgcgacaggcccctggacaagggcttgagtggatgggatggatcagcacttacaatggtaacacaaactatgcacagaagctccagggcagagtcaccatgaccacagacacatccacgagcacagcctacatggagctgaggagcctgagatctgacgacacggccgtgtattactgtgcgagagacaaccccccccgagttgcgttattcagatacgttatggacgtctggggccaagggaccacggtcaccgtctcctca

SEQ ID NO: 6501 - DNA, 373 bp, Homo sapiens
caggtgcagctggtggagtctgggggaggcttggtcaagcctggagggtccctgagactctcctgtgcagcctctggattcaccttcagtgactaccacatgaactggatccgccaggctccagggaaggggctggagtgggtttcatacatcacgaatactggtagttacacaaaccacgcagactctgtgaagggccgattcaccatctccagagacaacgccaagaactcactgtctctgcaaatgaacagcctgagagccgaggacacggccgtgtattactgtgcgagatccttgatcccgaatagcagcggctggtacagaaggggagataagtggggccagggaaccctggtcaccgtctcctcag

SEQ ID NO: 6502 - DNA, 373 bp, Homo sapiens
caggtgcagctggtggagtctgggggaggcttggtcaagcctggagggtccctgagactctcctgtgcagcctctggattcaccttcagtgactactacatgaactggatccgccaggctccagggaaggggctggagtgggtttcacacattagtagtagtggtattaccatatacgacgcagactctgtgaagggccgattcaccatctccagggacaacgccaagaactcactgtatctgcaaatgaacagcctgagagccgaggacacggccgtgtattactgtgcgagagattattgtagtggtggtagctgctactgggggtactttgactactggggccagggaaccctggtcaccgtctcctcag

SEQ ID NO: 6503 - DNA, 372 bp, Homo sapiens
gaggtgcagctggtggagtctgggggaggcctggtcaagcctggggggtccctgagactctcctgtgcagcctctggattcaccttcagtagctatagcatgaactgggtccgccaggctccagggaaggggctggagtgggtctcatccattagtagtagtagtagttacatatactacgcagactcagtgaagggccgattcaccatctccagagacaacgccaagaactcactgtatctgcaaatgaacagcctgagagccgaggacacggctgtgtattactgtgcgagcctcactggctacgatagggttaactactactactacatggacgtctggggcaaagggaccacggtcaccgtctcctca

SEQ ID NO: 6504 - DNA, 372 bp, Homo sapiens
gaagtgcagctggtggagtctgggggaggcttggtacagcctggcaggtccctgagactctcctgtgcagcctctggattcacctttgatgattatgccatgcactgggtccggcaagctccagggaagggcctggagtgggtctcaggtattagttggaatagtggtagcataggctatgcggactctgtgaagggccgattcaccatctccagagacaacgccaagaactccctgtatctgcaaatgaacagtctgagagctgaggacacggccttgtattactgtgcaaaagattatgcgtcggggggcctgaactactactactacatggacgtctggggcaaagggaccacggtcaccgtctcctca

SEQ ID NO: 6505 - DNA, 372 bp, Homo sapiens
gaggtgcagctggtggagtctgggggaggcttggtacagcctggggggtccctgagactctcctgtgcagcctctggattcaccttcagtagctatagcatgaactgggtccgccaggctccagggaaggggctggagtgggtttcatacattagtagtagtagtagtaccatatactacgcagactctgtgaagggccgattcaccatctccagagacaacgccaagaactcactgtatctgcaaatgaacagcctgagagccgaggacacggctgtgtattactgtgcgagagcatggttcggggagttattatactactactacggtatggacgtctggggccaagggaccacggtcaccgtctcctca

SEQ ID NO: 6506 - DNA, 372 bp, Homo sapiens
caaatgcagctggtgcagtctgggcctgaggtgaagaagcctgggacctcagtgaaggtctcctgcaaggcttctggattcacctttactagctctgctatgcagtgggtgcgacaggctcgtggacaacgccttgagtggataggatggatcgtcgttggcagtggtaacacaaactacgcacagaagttccaggaaagagtcaccattaccagggacatgtccacaagcacagcctacatggagctgagcagcctgagatccgaggacacggccgtgtattactgtgcggcagaattaggagggtactatggttcgggctactacggtatggacgtctggggccaagggaccacggtcaccgtctcctca

SEQ ID NO: 6507 - DNA, 378 bp, Homo sapiens
gaggtgcagctggtggagtctgggggaggcttggtaaagcctggggggtcccttagactctcctgtgcagcctctggtttcactttcagtaacgcctggatgaactgggtccgccaggctccagggaaggggctggagtgggtcggccgtattaaaagcaaaactgatggtgggacaacagactacgctgcacccgtgaaaggcagattcaccatctcaagagatgattcaaaaaacaccctgtatctgcagatgaacagcctgaaaaccgaggacacagccgtttattactgtaccacagatgtccctgatagctacgggagtttggggaactacatggacgtctggggcaaagggaccacggtcaccgtctcctca

SEQ ID NO: 6508 - DNA, 373 bp, Homo sapiens
gaggtgcagctggtggagtctgggggaggcctggtcaagcctggggggtccctgagactctcctgtgcagcctctggattcaccttcagtagctatagcatgaactgggtccgccaggctccagggaaggggctggagtgggtctcatccattagtagtagtagtagttacatatactacgcagactcagtgaagggccgattcaccatctccagagacaacgccaagaactcactgtatctgcaaatgaacagcctgagagccgaggacacggctgtgtattactgtgcgaggtcgcgtcatcttgaatattgtagtggtggtagctgctacttctactggggccagggaaccctggtcaccgtctcctcag

SEQ ID NO: 6509 - DNA, 373 bp, Homo sapiens
gaggtgcagctggtggagtcggggggaggcctggtcaagcctggggggtccctgagactctcctgtgcagcctctggattcagcctcagtagctataccatgaattgggtccgccaggctccagggaaggggctggagtgggtctcatccattagtagtagtggtagtcgcatatattatggagactcagtgaagggccgattcaccatctccagagacaacgccagaaactcactgtatctgcaaatgaacagcctgagagccgacgacacggctgtgtattactgtgcgagagaggggaagagtggtggtacctgctacggttgctggttcgacccctggggccagggaaccctggtcaccgtctcctcag

SEQ ID NO: 6510 - DNA, 373 bp, Homo sapiens
gaggtgcagctggtggagtctgggggaggcctggtcaagcctggggggtccctgagactctcctgtgcagcctctggattcaccttcagtagctatagcatgaactgggtccgccaggctccagggaaggggctggagtgggtctcatccattagtagtagtagtagttacatatactacgcagactcagtgaagggccgattcaccatctccagagacaacgccaagaactcactgtatctgcaaatgaacagcctgagagccgaggacacggctgtgtattactgtgcgagagccaggtatagcagtggctggccgtgggggtactactttgactactggggccagggaaccctggtcaccgtctcctcag

SEQ ID NO: 6511 - DNA, 373 bp, Homo sapiens
gaagtgcagctggtggagtctgggggaggcttggtacagcctggcaggtccctgagactctcctgtgcagcctctggattcacctttgatgattttgccatgcactgggtccggcaagctccagggaagggcctggcgtgggtctcaactattagttggaatagtgttagcataggctatgcggactctgtgaagggccgattcaccatctccagagacaacgccaagaactccctgtatctgcaaatgaacagtctgagagctgaggacacggccttgtattactgtgcaaaagataatggatttggtagtggtggtagcttcaactggttcgacccctggggccagggaaccctggtcaccgtctcctcag

SEQ ID NO: 6512 - DNA, 373 bp, Homo sapiens
gaagtgcagctggtggagtctgggggaggcttggttcagcctggcaggtccctgagactctcctgtgcagcctctggattcacctttaaggaatatgccatgcactgggtccggctagctccagggaagggcctggagtgggtctcaggtattagttggaatagtggtagtataggctatgcggactctgtgaagggccgattcaccatctccagagacaacgccaagaactccctgtttctgcaaatgaacagtctgagacctgaggacacggccttgtattactgtgcaaaagatctagagggagatattttgactggttattatgtgttcgaccccaggggccagggaaccctggtcaccgtctcctcag

SEQ ID NO: 6513 - DNA, 368 bp, Homo sapiens
caggtgatgctacaccagtggggcgcaggactgttgaagccttcggagaccctgtccctcacctgcgctgtctttggtgggtccttcagtggttactactggagctggatccgccagcccccagggaaggggctggagtggattggagaagtcaatcatagtggaaacaccaactacaacccgtccctcaagagtcgagccaccatatcaccagacacgtccaagaaccagttctccctgaagctgagctctgtgaccgccgcggacacggctgtctattactgtgcgagacaacggaaccccattactgtagttcgggagaatgcttttgatctctggggccaagggacgatggtcaccgtctcttc

SEQ ID NO: 6514 - DNA, 372 bp, Homo sapiens
caggtccagctggtgcaatctggggctgaggtgaagaagcctgggtcctcggtgaaggtctcctgcaaggcttctggaggcaccttcagcagctatactatcagctgggtgcgacaggcccctggacaagggcttgagtggatgggaaggatcatccctatccttggtatagcaaactacgcacagaagttccagggcagagtcacgattaccgcggacaaatccacgagcacagcctacatggagctgagcagcctgagatctgaggacacggccgtgtattactgtgcgagagcggggtatagtgggactcactactactactacggtatggacgtctggggccaagggaccacggtcaccgtctcctca

SEQ ID NO: 6515 - DNA, 372 bp, Homo sapiens
caggtccagctggtgcaatctggggctgaggtgaagaagcctgggtcctcggtgaaggtctcctgcaaggcttctggaggcaccttcagcagctatactatcagctgggtgcgacaggcccctggacaagggcttgagtggatgggaaggatcatccctatccttggtatagcaaactacgcacagaagttccagggcagagtcacgattaccgcggacaaatccacgagcacagcctacatggagctgagcagcctgagatctgaggacacggccgtgtattactgtgcgagagtccgccccgttgactacccgccatactactacggtatggacgtctggggccaagggaccacggtcaccgtctcctca

SEQ ID NO: 6516 - DNA, 370 bp, Homo sapiens
ggtccagctggtgcaatctggggctgaggtgaagaagcctgggtcctcggtgaaggtctcctgcaaggcttctggagacagcttcagcagtcatactatcagctgggtgcgacaggcccctggacaagggcttgagtggatggggaggatcatcccaatgcttggtaaagcaaactacgcacagaagttccagcgcagagtcgcgataaccgcggacaaatccacgaacacagcctacatggaactgggcagcctgagatctgaagacacggccgtatattactgtgcgatccctcccttccgtgcattttcctactactcctacgttatggacgtctggggccaagggaccacggtcaccgtctcctca

SEQ ID NO: 6517 - DNA, 369 bp, Homo sapiens
caggtgcagctgcaggagtcgggcccaggactggtgaagccttcggagaccctgtccctcacctgcactgtctctggtggctccatcagtagttactactggagctggatccggcagcccccagggaagggactggagtggattggttatatctattacagtgggagaaccaactacaacccgtccctcaagagtcgagtcaccatatcagaagacacgtccaagaaccagttctccctgaagctgagctctgtgaccgctgcggacacggccgtatattactgtgcgagagagcgaataataccaggtgctatgcctccctacggtctggacgtctggggccaagggaccacggtcaccgtctcctca

SEQ ID NO: 6518 - DNA, 369 bp, Homo sapiens
caggtgcagctgcaggagtcgggcccaggactggtgaagccttcggagaccctgtccctcacctgcactgtctctggtggctccatcagtagttactactggagctggatccggcagcccccagggaagggactggagtggattgggtatatctattacagtgggagcaccaactacaacccctccctcaagagtcgagtcaccatatcagtagacacgtccaagaaccagttctccctgaagctgagctctgtgaccgctgcggacacggccgtgtattactgtgcgaggtacggtctacccgttaattactactactactacggtatggacgtctggggccaagggaccacggtcaccgtctcctca

SEQ ID NO: 6519 - DNA, 372 bp, Homo sapiens
gaggtgcagctggtgcagtctggagcagaggtgaaaaagcccggggagtctctgaagatctcctgtaagggttctggatacagctttaccagctactggatcggctgggtgcgccagatgcccgggaaaggcctggagtggatggggatcatctatcctggtgactctgataccagatacagcccgtccttccaaggccaggtcaccatctcagccgacaagtccatcagcaccgcctacctgcagtggagcagcctgaaggcctcggacaccgccatgtattactgtgcgagatggggttcagtgggagctgggtactactactacggtatggacgtctggggccaagggaccacggtcaccgtctcctca

SEQ ID NO: 6520 - DNA, 375 bp, Homo sapiens
cagctgcagttgcaggagtcgggcccaggactggtgaagccttcggagaccctgaccctaacctgcactctctctggtggctccatcagcagtagaaattacaattggggctggatccgccagcccccagggaaggggctggagtggattgggaatatctatgacagtgggagcgcctactacgacccgtccctcaagagtcgggtcaccatatccgtagacatgtccaagaaccagttctccctgaggctgcgctctgtgaccgccgcagacacggctgtttattactgtgcgagacagtttgactttggggggctacatttctactactacatggacgtctggggcaaagggaccacggtcaccgtctcctca

SEQ ID NO: 6521 - DNA, 375 bp, Homo sapiens
cagctgcagctgcaggagtcgggcccaggactggtgaagcctccggagaccctgtccctcacctgcactgtctctggtgactccgtcagcaggactacttactactgggtctggatccgccagcccccagggaaggggctggagtgcattgggactatgtactatggtgggagtacctattacaacccgtccctcaagagtcgagtcaccatgtccgtagacacgtccaagaaccagttctccctgaggctgagctctgtgaccgccgcagacacggcagtctattactgtgcgagacgggggatagcaactcgccctcgctacttctactacatggacgtctggggcaaagggaccacggtcaccgtctcctca

SEQ ID NO: 6522 - DNA, 373 bp, Homo sapiens
gaagtgcagctggtggagtctgggggaggctcggtacagcctggcaggtccctgagactctcctgtgtagtctctggtttcacctttcatgattatgccatgaactgggtccggcaagctccagggaagggcctggagtgggtctcaggtattagttggaatagtggtaggataggctatgcggactctgtgaagggccgattcaccatctccagagacaacgccaggaactccctgtatctgcaaatgaacagtctgagacctgaggacacggccttgtattattgtgcaaagatgagagtgtcaggttgggcagcccccaatagtgcatttgataactggggccaagggacaatggtcaccgtcgcttcag

SEQ ID NO: 6523 - DNA, 372 bp, Homo sapiens
caggtgcagctgcaggagtcgggcccaggactggtgaagccttcggggaccctgtccctcacctgcgctgtctctggtggctccatcagcagtagtaactggtggagttgggtccgccagcccccagggaaggggctggagtggattggggaaatctatcatagtgggagcaccaactacaacccgtccctcaagagtcgagtcaccatatcagtagacaagtccaagaaccagttctccctgaagctgagctctgtgaccgccgcggacacggccgtgtattactgtgctcgggggatgactacgacttattactactactactactacatggacgtctggggcaaagggaccacggtcaccgtctcctca

SEQ ID NO: 6524 - DNA, 372 bp, Homo sapiens
caggtgcagctggtggagtctgggggaggcgtggtccagcctgggaggtccctgagactctcctgtgcagcctctggattcaccttcagtagctatggcatgcactgggtccgccaggctccaggcaaggggctggagtgggtggcagttatatcatatgatggaagtaataaatactatgcagactccgtgaagggccgattcaccatctccagagacaattccaagaacacgctgtatctgcaaatgaacagcctgagagctgaggacacggctgtgtattactgtgcgaaagatcaggagaggtatgcccgctactactactactacatggacgtctggggcaaagggaccacggtcaccgtctcctca

SEQ ID NO: 6525 - DNA, 373 bp, Homo sapiens
caggtgcagctggtggagtctgggggaggcgtggtccagcctgggaggtccctgagactctcctgtgcagcctctggattcaccttcagtagctatggcatgcactgggtccgccaggctccaggcaaggggctggagtgggtggcaatgatatcatatgagggaagtaataaatactatgcagactccgtgaagggccgattcaccatctccagagacaattccaagaacacgctgtatctgcaaatgaacagcctgagagctgaggacacggctgtgtattactgtgcgaaagatcgtaacccccacttcggtgactacgaagtctactttgacttctggggccagggaaccctggtcaccgtctcctcag

SEQ ID NO: 6526 - DNA, 373 bp, Homo sapiens
caggtgcagctggtggagtctgggggaggcgtggtccagcctgggaggtccctgagactctcctgtgcagcctctggattcaccttcagtagctatggcatgcactgggtccgccaggctccaggcaaggggctggagtgggtggcagttatatcatatgatggaagtaataaatactatgcagactccgtgaagggccgattcaccatctccagagacaattccaagaacacgctgtatctgcaaatgaacagcctgagagctgaggacacggctgtgtattactgtgcgaaaaggcgggggctatacgatttttggagtggttattcacttgactactggggccagggaaccctggtcaccgtctcctcag

SEQ ID NO: 6527 - DNA, 373 bp, Homo sapiens
caggtgcagctggtggagtctgggggaggcgtggtccagcctgggaggtccctgagactctcctgtgcagcctctggattcaccttcagtaactatggcatgcactgggtccgccaggctccaggcaaggggctggagtgggtggcaggtatatcatttgatggaagtaataaatactatgcagactccgtgaagggccgattcaccatctccagagacaattccaagaacacgctgtatctgcaaatgagcagcctgagagctgaggacacggctgtgtattactgtgcgaaagggccgtattacgatttttggactggttattccggccttgactactggggccagggaaccctggtcaccgtctcctcag

SEQ ID NO: 6528 - DNA, 373 bp, Homo sapiens
caggtgcagctggtggagtctgggggaggcgtggtccagcctgggaggtccctgagactctcctgtgcagcctctggattcaccttcagtagctatggcatgcactgggtccgccaggctccaggcaaggggctggagtgggtggcacttatatcatatgatggaattaataaatactatgtagactccgtgaggggccgattcaccatctccagagacaattccaagaacactctatatctgcaaatgaacagcctgagagctgaggacacggctgtgtattactgtgcgaaagatcaggatattgaagtggtgttggctgctttggcacccgactactggggccagggaaccctggtcaccgtctcctcag

SEQ ID NO: 6529 - DNA, 373 bp, Homo sapiens
caggtgcagctggtggagtctgggggaggcgtggtccagcctgggaggtccctgagactctcctgtgcagcctctggattcaccttcagtacctatggcatgcactgggtccgccaggctccaggcaaggggctggagtgggtggcagttatatcatatgatggaacaaataaatactatgcagactccgtgaagggccgattcaccatctccagagacaaatccaagaacacgctgtatctgcaaatgaacagcctgagagctgaggacacggctgtgtattactgtgcgaaagatctgtccattgtagtagtaccagctgctatttcggctgactactggggccagggaaccctggtcaccgtctcctcag

SEQ ID NO: 6530 - DNA, 370 bp, Homo sapiens
caggtgcagctgcaggagtcgggcccaggactggtgaagccttcggagaccctgtccctcacctgcactgtctctggtggctccatcagtagttactactggagctggatccggcagcccccagggaagggactggagtggattgggtatatctattacagtgggagcagcaactacaacccctccctcaagagtcgagtcaccatatcagtagacacgtccaagaaccagttctccctgaagctgagctctgtgaccgccgcagacacggccgtgtattactgtgcgagccatctgtatgatagtagtggttattaccacgatgcttttgatatctggggccaagggacaatggtcaccgtctcttcag

SEQ ID NO: 6531 - DNA, 376 bp, Homo sapiens
cagctgcagctgcaggagtcgggcccaggactggtgaagccttcggagaccctgtccctcacctgcactgtctctggtggctccatcagcagtaggagttactactggggctggatccgccagcccccagggaaggggctggagtggattgggagtgtctattatagtgggaccacctactacaacccgtccctcaagagtcgagtcaccatatccgtagacacgtccaagaaccagttctccctgaagctgagctctgtgaccgccgcagacacggctgtatattactgtgcgagacattttgttttttcggacggcagctccaccaaggcttttgatctctggggcccggggacactggtcaccgtctcttcag

SEQ ID NO: 6532 - DNA, 376 bp, Homo sapiens
cagctgcagctgcaggagtcgggcccaggactggtgaagccttcggagaccctgtccctcacctgcagtgtctctggtggctccatcagcaggagtagttactactggggctggatccgccagcccacagggaaagggctggagtggattgggaatatctattatagtgggagcacctactacaacccgtccctcaagagtcgagtcaccatatccgtagacacgtccaagaaccacttctccctgaagctgagctctgtgaccgccgcagacacggctgtgtattattgtgcgagacaagaccccttttggggggagttatcgttaggtgcttttgatatctggggccaagggacaatggtcaccgtctcttcag

SEQ ID NO: 6533 - DNA, 373 bp, Homo sapiens
gaagtgcagctggtgcagtctggagtagaggtgaaaaagcccggggagtctctgaggatctcctgtaagggttctggatacaggtttcccacctactggatcagctgggtgcgccagacgcccgggaaaggcctggagtggatggggaggattgatcctagtgactcttacatcaactacaacccgtccttccaaggccacgtcaccatctcagctgacaagtccatcagcactgcctacctgcagtggagcagcctgaaggcctcggacaccgccatgtattactgtgcgagagaatattgtggtggtgactgttatcaatatgaagcttttgatatctggggccaagggacaatggtcaccgtctcttcag

SEQ ID NO: 6534 - DNA, 370 bp, Homo sapiens
gaggtgcagctggtggagtctgggggaggcttggtccagcctggggggtccctgagactctcctgtgcagcctctggattcatcgtcagtgccaactacatgagctgggtccgccaggctccagggaagggactggagtgggtctcacttatttatagcggcggtagcacatactacgcagactccgtgaagggccgattcaccatctccagagacaattccaagaacacgctgtatcttcaaatgaacagcctgagaggtgaggacacggctgtgtattactgtgcgagagaatgttccactagtaccacctgctatgcctcaaatggaaatatctggggccaagggacaatggtcaccgtctcttcag

SEQ ID NO: 6535 - DNA, 373 bp, Homo sapiens
caggtgcagctggtgcagtctggggctgaggtgaagaagcctgggtcctcggtgaaggtctcctgcagggcttctggaggcaccttcagcagctctgctatcagctgggtgcggcaggcccctggacaagggcttgagtggatgggaacgatcatccctatccttggtatagcaaactacgcacagaagttccagggcagagtcacgattaccgcggacaaatccacgagcacagcctacatggagctgaacagcctgagatctgaggacacggccgtgtattactgtgcgaggccacgtggatatagtggctccgggagcgctgaatacttccaacactggggccagggcaccctggtcaccgtctcctcag

SEQ ID NO: 6536 - DNA, 370 bp, Homo sapiens
gaggtgcagctggtggagtctggaggaggcttggtccagcctggggggtccctcagactctcctgtgcagcctctgggttcactgtcagtaggaactacatgacctgggtccgccaggctccagggaaggggctggagtgggtctcagttatttatcccggtggtagcacattctacgcagactccgtgaagggccgattcaccatctccagacacaattccaacaacacgctgtatcttcaaatgaacagcctgagagttgaggacacggccgtgtattcctgtgcgagagaggcctccttcggtttagcagtggctggtactgcttttgatatctggggccaagggacaatggtcaccgtctcttcag

SEQ ID NO: 6537 - DNA, 370 bp, Homo sapiens
gaggtgcagctggtggagtctggaggaggcttggtccagcctggggggtccctgagactctcctgtgcagcctctgggttcaccgtcagtagcaactacatgagctgggtccgccaggctccagggaaggggctggagtgggtctcagttatttatagcggtggtagcacatactacgcagactccgtgaagggccgattcaccatctccagacacaattccaagaacacgctgtatcttcaaatgaacagcctgagagctgaggacacggccgtgtattactgtgcgagagcaccgttttgtggtggtgactgctaccccgatgcttttgatatctggggccaagggacaatggtcaccgtctcttcag

SEQ ID NO: 6538 - DNA, 373 bp, Homo sapiens
caggtgcagctggtgcagtctggggctgaggtgaagaagcctggggcctcagtgaaggtctcctgcaagacttcaggatacaccttcaccgactactatatgcactgggtgcgacaggcccctggacaagggcttgagtggatgggacggatcaaccctaacagtggtgacacaaaccatgcacagaagtttcagggcagggtcaccgtgaccagggacacgtccatcagtgcagtttacatggagctgagcgggctgagatctgacgacacggccgtctattactgtgcgagagaggtggtggtagctgctagggaagttactgatgcttttgatatctggggccaaggaacaatggtcaccgtctcttcag

SEQ ID NO: 6539 - DNA, 372 bp, Homo sapiens
caggtgcagctggtggagtctgggggaggcttggtcaagactggagggtccctaagactctcctgtgcagcctctggattcaccttcagtgactactacatgaactggatccgccaggctccagggaaggggctggagtgggtttcatacattagtagtcgtagtagctacacaaactacgcagactctgtgaagggccgattcaccatctccagagacaacgccaagagttcgctgtatctgcaagtgaacagcctgagagccgaggacacggccgtgtattactgtgcgagagggggtacagctatggacccctgggggccctccactatggacgtctggggccaagggaccacggtcaccgtctcctca

SEQ ID NO: 6540 - DNA, 372 bp, Homo sapiens
caggtgcagctggtggagtctgggggaggcttggtcaagcctggagggtccctgagactctcctgtgcagcctctggattcaccttcagtgactactacatgagctggatccgccaggctccagggaaggggctggagtgggtttcatacattagtagtagtagtagttacacaaactacgcagactctgtgaagggccgattcaccatctccagagacaacgccaagaactcactgtatctgcaaatgaacagcctgagagccgaggacacggccgtgtattactgtgcgagagtctctgagtggctggtaccagaggctaggtacggtatggacgtctggggccaagggaccacggtcaccgtctcctca

SEQ ID NO: 6541 - DNA, 376 bp, Homo sapiens
cagatcaccttgaaggagtctggtcctacgctggtgaaacccacacagaccctcacgctgacctgcaccttctctgggttctcactcagcactagtggagtgggtgtgggctggatccgtcagcccccaggaaaggccctggagtggcttgcactcatttattgggatgatgataagcgctacagcccatctctgaagagcaggctcaccatcaccaaggacacctccaaaaaccaggtggtccttacaatgaccaacatggaccctgtggacacagccacatattactgtgcacacatcgcccaggattactatgacccagggggggatgcttttgatatctggggccaagggacaatggtcaccgtctcttcag

SEQ ID NO: 6542 - DNA, 376 bp, Homo sapiens
cagatcaccttgaaggagtctgggcctacgctggtgaaacccacacagaccctcacgctgacctgcaccttctctgggttcgcactcagcactagtggagtgggtgtgggctggatccgtcagcccccaggaaaggccctggagtggcttgcactcatttattgggatgatgataagcgctacagcccatctctgaagagcaggctcaccatcaccaaggacacctccaaaaaccaggtggtccttacaatgaccaacatggaccctgtggacacagccacatattactgtgcacacaacggcttgactggaactacgtactttccctatgattttgatatttggggccaagggacaatggtcaccgtctcttcag

SEQ ID NO: 6543 - DNA, 376 bp, Homo sapiens
caggtgcagctggtgcagtctggggctgaggtgaagaagcctgggtcctcggtgaaggtctcctgcaaggcttctggaggcaccttcagcagctatgctatcagctgggtgcgacaggcccctggacaagggcttgagtggatgggagggatcatccctatctttggtccagcaaactacgcacagaagttccagggcagagtcacgattaccgcggacgaatccacgagcacagcctacatggagctgagcagcctgagatctgaagacacggccatatattactgcgccacgccctcgatgagggtgactagtccatttttgtattgtgcttttgatatctggggccaagggacaatggtcaccgtctcttcag

SEQ ID NO: 6544 - DNA, 373 bp, Homo sapiens
gaggtgcagctggtggagtctgggggaggcctggtcaagcctggggggtccctgagactctcctgtgcagcctctggattcacgttcagtagatacagcatgaactgggtccgccaggctccagggaaggggctggagtgggtctcatcaattagtggtagtagtagtcacaaagactacgcagactcagtgaagggccgattcaccgtctccagagacaacgccgagaactcactgtatctgcaaatgaacaacctgagagccgaggacacggctatctatttctgtgcgaggcccggtgtcccttccttagggaccggggctgaatacttccagcactggggccagggcaccctggtcaccgtctcctcag

SEQ ID NO: 6545 - DNA, 376 bp, Homo sapiens
caggtccagcttgtgcagtctggggctgaggtgaagaagcctggggcctcagtgaaggtttcctgcaaggcttctggatacaccttcactagctatgctatgcattgggtgcgccaggcccccggacaaaggcttgagtggatgggatggatcaacgctggcaatggtaacacaaaatattcacagaagttccagggcagagtcaccattaccagggacacatccgcgagcacagcctacatggagctgagcagcctgagatctgaagacacggctgtgtattactgtgcgagagtgtattactatggttcagggagttattataacggcgcttttgatatctggggccaagggacaatggtcaccgtctcttcag

SEQ ID NO: 6546 - DNA, 379 bp, Homo sapiens
cagctgcaactgcaggtgtcgggcccaggactggtgaagccttcggagaccctgtccctcacctgcactgtctctggtgactccatcatcagtagtagctactactggggctggatccgccagcccccagggatggggctggagtggattgggagtatctcttatagtgggagcacctactacaacccgtccctcaagagtcgagtcaccatatcagtcgacacgtccaagaaacagttctacctgaagtagatctctgtgaccgcagcggacacggccgtgtattactgtgcgaaagtgtaataggcagcagctggtaccgatttttggggcgcttttgatatctggggccaagggacaatggtcaccgtctcttcag

SEQ ID NO: 6547 - DNA, 376 bp, Homo sapiens
caggtgcagctgcaggagtcgggcccaggactggtgaagccttcggggaccctgtccctcacctgcgctgtctctggtggctccatcagcagtagtaactggtggagttgggtccgccagcccccagggaaggggctggagtggattggggaaatctatcatagtgggagcaccaactacaacccgtccctcaagagtcgagtcaccatatcagtagacaagtccaagaaccagttctccctgaagctgagctctgtgaccgccgcggacacggccgtgtattactgtgcgagagagggaattactatggttcagggctggcgttccgatgcttttgatatctggggccaagggacaatggtcaccgtctcttcag

SEQ ID NO: 6548 - DNA, 376 bp, Homo sapiens
caggtgcagctgcatgagtcgggcccaggactggtgaagccttcggggaccctgtccctcacctgcgctgtctctggtggctccatcagctctactaactggtggagttgggtccgccagcccccagggaaggggctggagtggattggggaaatccatcatggagggaacaccaactacaacccgtccctcaagagtcgagtcaccatctcagtagacaagtccaagaaccagttctccctgaagttgaactctgtgaccgccgcggacacggccgtgtattactgtgcgagagattggggactgaatacacttgggggaggaaatgatgcttttgatatctggggccaagggacaatggtcaccgtctcttcag

SEQ ID NO: 6549 - DNA, 376 bp, Homo sapiens
gaggtgcagctggtgcagtctggagcagaggtgaaaaagcccggggagtctctgaagatctcctgtaagggttctggatacagctttaccagctactggatcggctgggtgcgccagatgcccgggaaaggcctggagtggatggggatcatctatcctggtgactctgataccagatacagcccgtccttccaaggccaggtcaccatctcagccgacaagtccatcagcaccgcctacctgcagtggagcagcctgaaggcctcggacaccgccatgtattactgtgcgaggtttgggctatggttcggggagttattaccccacaactggttcgacccctggggccagggaaccctggtcaccgtctcctcag

SEQ ID NO: 6550 - DNA, 379 bp, Homo sapiens
cagctgcagctgcaggagtcgggcccaggactggtgaagccttcggagaccatgtccctcacctgcactgtctctggtggctccatcagcattagtagtcattactggggctggatccgccagcccccaggggaggggctggagtggattgcgagtatctattatagtggggccacctactacaacccgtccctcaagagtcgagtcaccatatccgtggacacgtccaagaaccagttctccctgaacctgagctctgtgaccgccgcagacacggctgtgtattattgtgcgagacaagggacttatgactacggtttcaccacggggaactggttcgacccctggggccagggaaccctggtcaccgtctcctcag

SEQ ID NO: 6551 - DNA, 373 bp, Homo sapiens
caggtccagctggtgcaatctggggctgaggtgaagaaggctgggtcctcggtgaaggtctcctgcaaggcttctggaggcaccttcagcagctatactatcagttgggtgcgacaggcccctggacaagggcttgagtggatgggaaggatcatccctttccttggtgtagcaaactccgcacagaagttccagggcagagtcacgattaccgcggacaagtccacgagcacagcctacatggagctgagcagcctgagatctgaggacacggccgtgtattactgtgcgaccagccatgttgattttggttcggggagttccgctgcttttgatatctggggccaagggacaatggtcaccgtctcttcag

SEQ ID NO: 6552 - DNA, 373 bp, Homo sapiens
caggtgcacctgcaggagtcgggcccaggactggtgaagccttcggagaccctgtcactcacctgcagtgtctctggtgactccatcagtagttactgttggacctggatccggcagcccccagggaagggactggagtggattgcgtatatttgtgacagtgggagcacctactacaatccctccctcaagagtcgagtcaccatatcacttgacacgtccaagaaccagttctccctgaagctgagttttgtggccgctgcggacacggccatatattactgtgcgaaagatcgatggttcagggggtacacatatcggggcaactggttcgacccctggggccagggagccctggtcaccgtctcctcag

SEQ ID NO: 6553 - DNA, 376 bp, Homo sapiens
gaagtgcagctggtgcagtctggagcagaggtgaaaaagcccggggagtctctgaggatctcctgtaagggttctggatacagctttaccagctactggatcagctgggtgcgccagatgcccgggaaaggcctggagtggatggggaggattgatcctagtgactcttataccaactacagcccgtccttccaaggccacgtcaccatctcagctgacaagtccatcagcactgcctacctgcagtggagcagcctgaaggcctcggacaccgccatgtattactgtgcgagtcgatattgtagtggtggtagctgctacgccctaggtgcttttgatatctggggccaagggacaatggtcaccgtctcttcag

SEQ ID NO: 6554 - DNA, 373 bp, Homo sapiens
gaggtgcagctggtggagtctgggggaggcttggtacagcctggggggtccctgagactctcctgtgcagcctctggattcaccttcagtagctatagcatgaactgggtccgccaggctccagggaaggggctggagtgggtttcatacattagtagtagtagtagtaccatatactacgcagactctgtgaagggccgattcaccatctccagagacaacgccaagaactcactgtatctgcaaatgaacagcctgagagccgaggacacggctgtgtattactgtgcgagagaccccccattacgatattttgactggcgggcggcttttgatatctggggccaagggacaatggtcaccgtctcttcag

SEQ ID NO: 6555 - DNA, 376 bp, Homo sapiens
gaggtgcagctggtggagtctgggggaggcttggtacagcctggggggtccctgagactctcctgtgcagcctctggattcaccttcagtagctatagcatgaactgggtccgccaggctccagggaaggggctggagtgggtttcatacattagtagtagtagtagtaccatatactacgcagactctgtgaagggccgattcaccatctccagagacaacgccaagaactcactgtatctgcaaatgaacagcctgagagccgaggacacggctgtgtattactgtgcgagagattcattactatggttcggggagtgggtcgagcatgcttttgatatctggggccaagggacaatggtcaccgtctcttcag

SEQ ID NO: 6556 - DNA, 376 bp, Homo sapiens
gaagtgcagctggtgcagtctggagcagaggtgaaaaagcccggggagtctctgaggatctcctgtaagggttctggatacagctttaccagctactggatcagctgggtgcgccagatgcccgggaaaggcctggagtggatggggaggattgatcctagtgactcttataccaactacagcccgtccttccaaggccacgtcaccatctcagctgacaagtccatcagcactgcctacctgcagtggagcagcctgaaggcctcggacaccgccatgtattactgtgcgagacatgaatattactatggttcggggagttatttgaactggttcgacccctggggccagggaaccctggtcaccgtctcctcag

SEQ ID NO: 6557 - DNA, 376 bp, Homo sapiens
gaagtgcagctggtgcagtctggagcagaggtgaaaaagcccggggagtctctgaggatctcctgtaagggttctggatacagctttaccagctactggatcagctgggtgcgccagatgcccgggaaaggcctggagtggatggggaggattgatcctagtgactcttataccaactacagcccgtccttccaaggccacgtcaccatctcagctgacaagtccatcagcactgcctacctgcagtggagcagcctgaaggcctcggacaccgccatgtattactgtgcgagacaattccctacctacggtgacttcctcctactaaactggttcgacccctggggccagggaaccctggtcaccgtctcctcag

SEQ ID NO: 6558 - DNA, 376 bp, Homo sapiens
caggtccagctggtgcaatctggggctgaggtgaagaagcctgggtcctcggtgaaggtctcctgcaaggcttctggaggcaccttcagcagctatactatcagctgggtgcgacaggcccctggagaagggcttgagtggatgggaaggatcatccctatccttggtatcgcagactacgcacagaagttccagggcagagtcacgattaccgcggacaaatccacgagcacagcctacatggagctgagcagcctgagatctgaggacacggccgtctattactgtgcgagagatcttagtcatgggtatagcagtggctcctcttggtacttcgacccctggggccagggaaccctggtcaccgtctcctcag

SEQ ID NO: 6559 - DNA, 376 bp, Homo sapiens
caggtccagctggtgcaatctggggctgaggtgaagaagccagggtcctcggtgaaggtctcctgtaaggcttctggaggcaccttcggcacctatactatcacctgggtgcgacaggcccctggacaagggcttgagtggatgggaaggatcatccctatccttggtataccaaactacgcacagaagttccagggcagagtcacgatttccgcggacaaatccacgagcacagcctacatggagctgagcagcctgagatctgaggacacggccgtgtattactgtgcgagagactactatggttcggggagttattggggtggcggctggttcgacccctggggccagggaaccctggtcaccgtctcctcag

SEQ ID NO: 6560 - DNA, 379 bp, Homo sapiens
cagatcaccttgaaggagtctggtcctacgctggtgaaacccacacagaccctcacgctgacctgcaccttctctgggttctcactcagcactagtggagtgggtgtgggctggatccgtcagcccccaggaaaggccctggagtggcttgcactcatttattgggatgatgataagcgctacagcccatctctgaagagcaggctcaccatcaccaaggacacctccaaaaaccaggtggtccttacaatgaccaacatggcccctgtggacacagccacatattactgtgcacacagacagccagcccatggagctatggttcacgccaactggttcgacccctggggccagggaaccctggtcaccgtctcctcag

SEQ ID NO: 6561 - DNA, 374 bp, Homo sapiens
caggtgcagctggtgcagtctggggctgaggtgaagaagcctggggcctcagtgaaggtctcctgcaaggcttctggatacaccttcaccagttatgatatcaactgggtgcgacaggccactggacaagggcttgagtggatgggatggatgaaccctatcagtggtaacacaggctatgcacagaagttccagggcagagtcaccatgaccaggaacacctccgtaaccacagcctacatggagctgagcagcctgagatctgaggacacggccgtgtattactgtgcgaggctggaattcccgtattgtagtggtggtagctgctacgcttctgactactggggccagggaaccctggtcaccgtctcctc

SEQ ID NO: 6562 - DNA, 376 bp, Homo sapiens
caggtgcagctgcaagagtcgggcccaggactggtgaagccttcggagaccctgtccctcacctgcactgtctctggttactccatcagcagtggttactactggggctggatccggcagcccccagggaaggggctggagtggattgggagtatctatcatagtggggacacctactacaacccgtccctcaagagtcgagtcaccatatcagtagacacgtccaagaaccagttatccctgaagctgaactctctgaccgccgcagacacggccgtgtattactgtgcgagagattcggcagcggattactatggttcagggtttgatgcttttgatatctggggccaagggacaatggtcaccgtctcttcag

SEQ ID NO: 6563 - DNA, 376 bp, Homo sapiens
caggtgcagctggtgcagtctggggctgaggtgaagaagcctggggcctcagtgaaggtctcctgcaaggcttctggatacaccttcaccggctactatatgcactgggtgcgacaggcccctggacaagggcttgagtggatgggacggatcaaccctaacagtggtggcacaaactatgcacagaagtttcagggcagggtcaccatgaccagggacacgtccatcagcacagcctacatggagctgagcaggctgagatctgacgacacggccgtgtattactgtgcgagtccgtgtgcaatatttggtagctgctcctcagttcactggttcgacccctggggccagggaaccctggtcaccgtctcctcag

SEQ ID NO: 6564 - DNA, 376 bp, Homo sapiens
caggagcaactggtgcagtctggggctgaggtgaagaagcctggggcctcactgacgatctcctgcgaggcttccggacacagcatcaccggctactggatgcactgggtgcgacaggcccctggacaagggcttgagtggatgggacggatgtaccctgacagtggtgccacaaactatgcacagaagtttcggggcagggtcaccctgacctgggacacgtccatcagcacagcctacatggaactgagtggactgacatctgacgacacggccgtttattactgtgccatgagtccctattgtggtgttgattgctattggaacaactggttcgacccctggggccagggaaccctggtcaccgtctcctcag

SEQ ID NO: 6565 - DNA, 376 bp, Homo sapiens
caggtgcagctgcaggagtcgggcccaggactggtgaagccttcggggaccctgtccctcacctgcgctgtctctggtggctccatcagcagtagtaactggtggagttgggtccgccagcccccagggaaggggctggagtggattggggaaatctatcatagtgggagcaccaactacaacccgtccctcaagagtcgagtcaccatatcagtagacaagtccaagaaccagttctccctgaagctgagctctgtgaccgccgcggacacggccgtgtattactgtgcgagaacggatacggtgactacgaaggtatggtcgtacaactggttcgacccctggggccagggaaccctggtcaccgtctcctcag

SEQ ID NO: 6566 - DNA, 376 bp, Homo sapiens
caggtgcagctgcaggagtcgggcccaggactggtgaagccttcggggaccctgtccctcacctgcgctgtctctggtgactccatcagcagtagtaactggtggagttgggtccgccagcccccagggaaggggctggagtggattggggaaatccatcatagtgggagcaccaactacaacccgtccctcaagagtcgagtcaccatgtcagtagacaagtccaagaaccacttctccctgaagctgagctctgtgaccgccgcggacacggccgtgtattactgtgcgagaggtgtggtattagaatggttcaggggccgctcccactggttcgacccctggggccagggaaccctggtcaccgtctcctcag

SEQ ID NO: 6567 - DNA, 376 bp, Homo sapiens
caggtgcagctgcaggagtcgggcccaggactggtgaagccttcggggaccctgtccctcacctgcgctgtctctggtggctccatcatcagtagtgactggtggagttgggtccgccagcccccagggaaggggctggagtggattggggaaatctatcatagggggagcaccaactacaacccgtccctcaagagccgagtcaccatatcactagacaagtccaagaacgagttctccctgaagctgaactctgtgaccgccgcggacacggccgtctattactgtgcgagatcgggatattaccgtggttcagggattttctccgacatattcgacccctggggccagggaaccctggtcaccgtctcctcag

SEQ ID NO: 6568 - DNA, 373 bp, Homo sapiens
gaggtgcagctggtggagtctgggggaggcttggtccagcctggggggtccctgagactctcctgtgcagcctctggattcaccgtcagtagctactacatgaactgggtccgccaggctccagggaaggggctggagtgggtctcagttatttataccggtggtagcacatactacgcagactccgtgaagggccgattcaccatctccagagacaattccaggaacacgctgtatcttcaaatgagcagcctgagagctgaggacacggctgtgtattactgtgcgagagagattttgggggattactatgattcggggagttatgctggcgactactggggccagggaaccctggtcaccgtctcctcag

SEQ ID NO: 6569 - DNA, 379 bp, Homo sapiens
cagatcaccttgaaggagtctggtcctacgctggtgaaacccacacagaccctcacgctgacctgcaccttttctgggttctcactcagtactagtggagtgggtgtgggctggatccgtcagcccccaggaaaggccctggagtggcttgcactcatttattgggatgatgataagcgctacagcccatctctggagagcaggctcaccatcaccaaggacacctccaaaaaccaggtggtcctcacaatgaccaacatggaccctgtggacacagccacatattactgtgcacgcgtgggatattgtagtagtaccagctgctatttttttgcttttgatctctggggccaagggacaatggtcaccgtctcttcag

SEQ ID NO: 6570 - DNA, 373 bp, Homo sapiens
caggtgcagctacagcagtggggcgcaggactgttgaagccttcggagaccctgtccctcacctgcgctgtctatggtgggtccttcagtggttactactggagctggatccgccagcccccagggaaggggctggagtggattggggaaatcaatcatagtggaagcaccaactacaacccgtccctcaagagtcgagtcaccatatcagtagacacgtccaagaaccagttctccctgaagctgagctctgtgaccgccgcggacacggctgtgtattactgtgcgagaggctcatatagcagtggctggtacctaggagggcggtggttcgacccctggggccagggaaccctggtcaccgtctcctcag

SEQ ID NO: 6571 - DNA, 373 bp, Homo sapiens
caggtgcagctacagcagtggggcgcaggactgttgaagccttcggagaccctgtccctcacctgcgctgtctatggtgggtccttcagtggttactactggagctggatccgccagcccccagggaaggggctggagtggattggggaaatcaatcatagtggaagcaccaactacaacccgtccctcaagagtcgagtcaccatatcagtagacacgtccaagaaccagttctccctgaagctgagctctgtgaccgccgcggacacggctgtgtattactgtgcgagaggtttatatcccctctacagtaactacggtcgggtctggttcgacccctggggccagggaaccctggtcaccgtctcctcag

SEQ ID NO: 6572 - DNA, 382 bp, Homo sapiens
gaggtgcagctggtggagtctgggggaggcttggtacagccagggcggtccctgagactctcctgtacagcttctggattcacctttggtgattatgctatgagctggttccgccaggctccagggaaggggctggagtgggtaggtttcattagaagcaaagcttatggtgggacaacagaatacgccgcgtctgtgaaaggcagattcaccatctcaagagatgattccaaaagcatcgcctatctgcaaatgaacagcctgaaaaccgaggacacagccgtgtattactgtactagagatagggcgttacgatattttgactggttattaccgccctttgactactggggccagggaaccctggtcaccgtctcctcag

SEQ ID NO: 6573 - DNA, 376 bp, Homo sapiens
caggtgcagctgcaggagtcgggcccaggactggtgaagccttcggagaccctgtccctcacctgcactgtctctggttactccatcagcagtggttactactggggctggatccggcagcccccagggaaggggctggagtggattgggagtatctatcatcttgggagcacctactacaacccgtccctcaagagtcgagtcaccatatcagtagacacgtccaagaaccagttctccctgaagctgagctctgtgaccgccgcagacacggccgtgtattactgtgcgagagcgagggggtattacgatttttggagtctccccggacactttgactactggggccagggaaccctggtcaccgtctcctcag

SEQ ID NO: 6574 - DNA, 376 bp, Homo sapiens
caggtgcagctggtgcagtctggggctgaggtgaagaagcctgggtcctcggtgaaggtctcctgcaaggcttctagaggcaccttcagcagctatcctatcagctgggtgcgacaggcccctggacaagggcttgagtggatgggaaggatcatccctatccttgccatagcaaactacgcacagaagttccaggtcagagtcacgattaccgcggacaaatccacgagcacagcctacatggaactgagcaacctgagatctgaggacacggccgtgtattactgtgcgagagatcaaggatatagcagtggctcggcatctaattactactttgactattggggccagggaaccctggtcaccgtctcctcag

SEQ ID NO: 6575 - DNA, 376 bp, Homo sapiens
caggtccagctggtgcaatctggggctgaggtgaagaagcctgggtcctcggtgaaggtctcctgcaaggcttctggaggcaccttcagcagctatagtatcacctgggtgcgacaggcccctggacaagggcttgagtggatgggaaggatcatccctatccttggtatagcaaactacgcacagaacttccagggcagagtcaccattaccgcggacaaatccacgagcacagcctacatggagctgagcagcctaaaatctgaggacacggccgtttattactgtgcgcgagtcaggggttactctgatagtagtgggtctgcttactactttgactcctggggccagggaaccctggtcaccgtctcctcag

SEQ ID NO: 6576 - DNA, 373 bp, Homo sapiens
gaggtgcagctgatggagtctgggggaggcctggtacagcctggggggtccctgagactctcctgtgtagcctctggattcaccttcagtacctacgacatgcactgggtccgccaagttacaggacaaggtctggagtgggtctcaactattgctgctgctggtgacacattttttccaggctccgtgaagggccgattcaccatctccagagaaaatgccaagaactccttgtatcttcaaatgaacagcctgagagtcggggacacggctgtgtattactgtgcaagagggagggcctattactatggttcagggaggtatcagggatttgacttctggggccagggaaccctggtcaccgtctcctcag

SEQ ID NO: 6577 - DNA, 376 bp, Homo sapiens
gaggtgcagctggtagagtctgggggaggcttggtccagcctggggggtccctgagactctcctgtgcagtctctggactcacctttaataactattggatgacctgggtccgccaggctccagggaaggggctggagtgggtggccaacataaaagaagatggaagtgacaaatactatgtggactctgtgaagggccgattcaccatctccagagacaacgccaagaactcactgtttctgcaaatgaacagcctgagagccgaggacacggccgtgtattactgtgcgagggtagggtataccagtggctgggggataaagaagtactactttgactactggggccagggaaccctggtcaccgtctcctcag

SEQ ID NO: 6578 - DNA, 376 bp, Homo sapiens
gaggtgcagctggtggagtctgggggaggcttggtccagcctggggggtccctgagactctcctgtgcagcctctggattcacctttagtagctattggatgacctgggtccgccaggctccagggaaggggctggagtgggtggccaacataaagcaagatggaagtgagaaatactttgtggactctgtgaagggccgattcaccatctccagagacaacgccaagaattcactgtatctgcaaatgaacagcctgagagccgaggacacggccgtgtattactgtgcgacgtggggatattactatgatactagtggttaccagctcttctttgactactggggccagggaaccctggtcaccgtctcctcag

SEQ ID NO: 6579 - DNA, 376 bp, Homo sapiens
caggtccagcttgtgcagtctggggctgaggtgaagaagcctggggcctcagtgaaggtttcctgcaaggcttctggatacaccttcactagctatgctatgcattgggtgcgccaggcccccggacaaaggcttgagtggatgggatggatcaacgctggcaatggtaacacaaaatattcacagaagttccagggcagagtcaccattaccagggacacatccgcgagcacagcctacatggagctgagcagcctgagatctgaagacacggctgtgtattactgtgcgagagaaaggagggattttgactggttattatatgggtactactttgactactggggccagggaaccctggtcaccgtctcctcag

SEQ ID NO: 6580 - DNA, 376 bp, Homo sapiens
gaggtgcagctggtggagtctgggggaggcttggtacagcctggggggtccctgagactctcctgtgcagcctctggattcaccttcagtagctatagcatgaactgggtccgccaggctccagggaaggggctggagtgggtttcatacattagtagtagtagtagtaccatatactacgcagactctgtgaagggccgattcaccatctccagagacaacgccaagaactcactgtatctgcaaatgaacagcctgagagccgaggacacggctgtgtattactgtgcgagagggtctggtttgtggttcggggagttattatcccactactttgactactggggccagggaaccctggtcaccgtctcctcag

SEQ ID NO: 6581 - DNA, 376 bp, Homo sapiens
gaggtgcagctggtggagtctgggggaggcttggtacagcctggggggtccctgagactctcctgtgcagcctctggattccccttcattacctatggcatgaactgggtccgccaggctcctgggaaggggctggagggggtttcatatattagtgccagtagtggtaccatatactacgcagactctgtgaagggccgattcaccatctccagagacaatgccaagaactcactgtatttgcaaatgagcagcctgagagacgaggacacggctgtgtattactgttcgagaggaacggcgggatacggtgactacggcggcaccgtcgaatttgactactggggccagggaaccctggtcaccgtctcctcag

SEQ ID NO: 6582 - DNA, 379 bp, Homo sapiens
cagctgcagctgcaggagtccggctcaggactggtgaagccttcacagaccctgtccctcacctgcgctgtctctggtggctccatcagcagtggtggttactcctggagctggatccggcagccaccagggaagggcctggagtggattgggtacatctatcatagtgggagcacctactacaacccgtccctcaagagtcgagtcaccatatcagtagacaggtccaagaaccagttctccctgaagctgagctctgtgaccgccgcggacacggccgtgtattactgtgccagatattatgattacatttgggggagttatcgtcactactactttgactactggggccagggaaccctggtcaccgtctcctcag

SEQ ID NO: 6583 - DNA, 379 bp, Homo sapiens
caggtgcagctgcaggagtcgggcccaggactggtgaagccttcacagaccctgtccctcacctgcactgtctctggtgcctccatcagcagtggtgatttctactggagttggatccgccagcccccagggaagggcctggagtggattggatacatccaaaacagtgggagcacctactacagcccgtccctcaggagtcgagttaccatgtcagcagacacgtccaagaaccagctctccctgaagctgacctctgtgactgccgcagacacggccgtgtattactgtgccagagagtggattaccatggttcagggagttatacatagctggttcgacccctggggccagggaaccctggtcaccgtctcctcag

SEQ ID NO: 6584 - DNA, 379 bp, Homo sapiens
caggtgcagctgcaggagtcgggcccaggactggtgaagccttcacagaccctgtccctcacctgcactgtctctggtggctccatcagcagtggtgattactactggagttggatccgccagcccccagggaagggcctggagtggattgggtacatctattacagtgggagcacctactacaacccgtccctcaagagtcgagttaccatatcagtagacacgtccaagaaccagttctccctgaagctgagctctgtgactgccgcagacacggccgtgtattactgtgccagagtattgggatattacgatttttggagtggtcgaaactggttcgacccctggggccagggaaccctggtcaccgtctcctcag

SEQ ID NO: 6585 - DNA, 376 bp, Homo sapiens
gaggtgcagctggtggagtccgggggaggcttagttcagcctggggggtccctgagactctcctgtgcagcctctggtttcaccttcagtagctactggatgcactgggtccgccaagctccagggacggggctggtgtgggtctcacgtattaacaatgatgggaggaccacaagctacgcggactccgtgaagggccgattcaccatctccagagacaacgccaagaacacgctgtatctgcaaatgaacagtctgagagccgaggacacggctgtgtattactgtgcaagagatcccgggtatagcagtagatggggccattacaactggttcgacccctggggccagggaaccctggtcaccgtctcctcag

SEQ ID NO: 6586 - DNA, 376 bp, Homo sapiens
gaagtgcagctgttggactctgggggaggcttggtacagcctggggggtccctgagactctcctgtgcagcctctggattcacctttagcgactatgccatgagctgggtccgccaggctccagggagggggctggagtgggtctcagtcattagtgatagtggtggtagttcatactactcagactccgtgaagggccggttcaccatctccaaagacaattccaagaacacgatgtatctgcaaatgaacagcctgagagtcgaggacacggccgtatattactgtgcgaaaaaaagggggaggggagacggctacaattatggggtccttgctgactactggggccagggaaccgtggtcaccgtctcctcag

SEQ ID NO: 6587 - DNA, 376 bp, Homo sapiens
gaggtgcagctgttggagtctgggggaggcttggtacagcctggggggtccctgagactctcctgtgtagcctctggattcccccttaggaactatgccatgagctgggtccgccaggctccaggaaaggggctggagtgggtctcaactattagtggtagtggtggtaccacagactacgcagactccgtgaagggccgcttcaccatctccagagacaattccaagaacacgcagtatctgcaaatgaacagcctgagagccgaggacacggccgtatattactgtgcgagagatcgtaatactatggttcggggagtcccgagggactactttgactactggggccagggaaccctggtcaccgtctcctcag

SEQ ID NO: 6588 - DNA, 376 bp, Homo sapiens
gaggtgcagctgttggagtctgggggaggcttggtacagcctggggggtccctgagactctcctgtgcagcctctggattcacctttagcagctatgccatgagctgggtccgccaggctccagggaaggggctggagtgggtctcagctattagtggtagtggtggtagcacatactacgcagactccgtgaagggccggttcaccatctccagagacaattccaagaacacgctgtatctgcaaatgaacagcctgagagccgaggacacggccgtatattactgtgcgaaaggcgatgttggggatttttggagtggttattacccgacttttgactactggggccagggaaccctggtcaccgtctcctcag

SEQ ID NO: 6589 - DNA, 376 bp, Homo sapiens
gaggtgcaactgttggagtctgggggagacttggtacagcctggggggtccctgagactctcctgtgcagcctctggattcacctttagcagctatgccatgagctgggtccgccaggctccagggaaggggctggagtgggtctcaactattagtgccactggtggtagcacatactacgcagactccgtgaagggccggttcaccatctccagagacaattccaagaacacgctgtatgtgcaaatgaacagcctgagagccgaggacacggccgtatattactgtgcgaaagcgatgggggttgggctgagtggtggtgacagaaggaactttgactactggggccagggaaccctggtcaccgtctcctcag

SEQ ID NO: 6590 - DNA, 382 bp, Homo sapiens
gaggtgcagctggtggagtctgggggaggcttggtaaagcctggggagtcccttagactctcctgtgcagcctctggtttcactttcagtagcgcctggatgaactgggtccgccaggctccagggaaggggcttgagtgggtcggccgtattaaaagcagacctgatggtgggacaacagactacgctacacccgtgaaaggcagattcaccatctcaagagatgatttagaaaatacggtatatctggaaatgaacagcctgaaaaccgaggacacagccgtgtattactgtaccacaggtggattttgtagtggtggtagctgctacgtacaaccacaggactactggggccagggaaccctggtcaccgtctcctcag

SEQ ID NO: 6591 - DNA, 382 bp, Homo sapiens
gaggtgcagctggtggagtctgggggaggcttggtaaagcctggggggtcccttagactctcctgtgcagcctctggtttcactttcagtaacgcctggatgaactgggtccgccaggctccagggaaggggctggagtgggtcggccgtattaaaagcaaaactgatggtgggacaacagactacgctgcacccgtgaaaggcagattcaccatctcaagagatgattcaaaaaacacgctgtatctgcaaatgaacagcctgaaaaccgaggacacagccgtgtattactgtaccacaggaagggtttatgattacatttgggggagttatcgttataacgactactggggccagggaaccctggtcaccgtctcctcag

SEQ ID NO: 6592 - DNA, 375 bp, Homo sapiens
aggtgcagctgatggagtctgggggacgtgtggtacggccgggggggtccctgagactctcctgtgtagtctctggattcaactttaatgattatggcatgaattgggtccgccaagttccggggaaggggctggagtgggtctctggtatcaattggaatggtgataatacaggatatgcagactccgtgaagggccgattcaccgtctccagagacaacggcaagaactccctgtatttgcaaatgaacagtctgagagccggcgacacggccgtctattactgtgcgagaggagtcatcgcaatttattattatgatactattggttattttgaccagtggggccaggggaccctggtcaccgtctcctcag

SEQ ID NO: 6593 - DNA, 373 bp, Homo sapiens
caggtgcagctgcaggagtcgggcccaggactggtgaagccttcggagaccctgtccctcacctgcactgtctctggtggctccatcagtagttactactggagctggatccggcagcccccagggaagggactggagtggattgggtatatctattacagtgggagcaccaactacaacccctccctcaagagtcgagtcaccatatcagtagacacgtccaagaaccagttctccctgaagctgagctctgtgaccgctgcggacacggccgtgtattactgtgcgagatccttaaacgatttttggagtggttatcctcaggactactttgactactggggccagggaaccctggtcaccgtctcctcag

SEQ ID NO: 6594 - DNA, 373 bp, Homo sapiens
caggtgcagctgcaggagtcgggcccaggactggtgaagccttcggagaccctgtccctcacctgcactgtctctggtggctccatcagtagttactactggagctggatccggcagcccccagggaagggactggagtggattgggtatatctattacagtgggagcaccaactacaacccctccctcaagagtcgagtcaccatatcagtagacacgtccaagaaccagttctccctgaagctgagctctgtgaccgctgcggacacggccgtgtattactgtgcgagggcgatgtggtattactatggttcggggagtcaatactactttgactactggggccagggaaccctggtcaccgtctcctcag

SEQ ID NO: 6595 - DNA, 373 bp, Homo sapiens
caggtgcagctgcaggagtcgggcccaggactggtgaagccttcggagaccctgtccctcacctgcactgtctctggtggctccatcagtagttactactggagctggatccggcagcccccagggaagggactggagtggattgggtatatctattacagtgggagcaccaactacaacccctccctcaagagtcgagtcaccatatcagtagacacgtccaagaaccagttctccctgaagctgagctctgtgaccgctgcggacacggccgtgtattactgtgcgagagaaattcattacatttgggggagttatcgttataagtactttgactactggggccagggaaccctggtcaccgtctcctcag

SEQ ID NO: 6596 - DNA, 373 bp, Homo sapiens
caggtgcagctgcaggagtcgggcccaggactggtgaagccttcggagaccctgtccctcacctgcactgtctctggtggctccatcagtagttactactggagctggatccggcagcccccagggaagggactggagtggattgggtatatctattacagtgggagcaccaactacaacccctccctcaagagtcgagtcaccatatcagtagacacgtccaagaaccagttctccctgaagctgagctctgtgaccgctgcggacacggccgtgtattactgtgcgagagccgacacgagttgggcccggggggggacgggggactactttgactactggggccagggaaccctggtcaccgtctcctcag

SEQ ID NO: 6597 - DNA, 378 bp, Homo sapiens
cagctgcagctgcaggagtccggctcaggactggtgaagccttcacagaccctgtccctcacctgcgctgtctctggtggctccatcagcagtggtggttactcctggagctggatccggcagccaccagggaagggcctggagtggattgggtacatctatcatagtgggagcacctactacaacccgtccctcaagagtcgagtcaccatatcagtagacaggtccaagaaccagttctccctgaagctgagctctgtgaccgccgcggacacggccgtgtattactgtgccagagggcgttgtagtggtggtagctgctactactactactacatggacgtctggggcaaagggaccacggtcaccgtctcctca

SEQ ID NO: 6598 - DNA, 375 bp, Homo sapiens
caggtgcagctgcaggagtcgggcccaggactggtgaagccttcggggaccctgtccctcacctgcgctgtctctggtggctccatcagcagtagtaactggtggagttgggtccgccagcccccagggaaggggctggagtggattggggaaatctatcatagtgggagcaccaactacaacccgtccctcaagagtcgagtcaccatatcagtagacaagtccaagaaccagttctccctgaagctgagctctgtgaccgccgcggacacggccgtgtattactgtgcgaggaacctatacagtaactactttcgttactactactactacatggacgtctggggcaaagggaccacggtcaccgtctcctca

SEQ ID NO: 6599 - DNA, 375 bp, Homo sapiens
caggtgcagctgcaggagtcgggcccaggactggtgaagccttcggggaccctgtccctcacctgcgctgtctctggtggctccatcagcagtagtaactggtggagttgggtccgccagcccccagggaaggggctggagtggattggggaaatctatcatagtgggagcaccaactacaacccgtccctcaagagtcgagtcaccatatcagtagacaagtccaagaaccagttctccctgaagctgagctctgtgatcgccgcggacacggccgtttattactgtgcgagagaaccgccaaggggtggtagctacggttactactactacatggacgtctggggcaaagggaccacggtcaccgtctcctca

SEQ ID NO: 6600 - DNA, 376 bp, Homo sapiens
caggttcagctggtgcagtctggagctgaggtgaagaagcctggggcctcagtgaaggtctcctgcaaggcctctggttacagcttcaccagctatggtatcagctgggtgcgacaggcccctggacaagggcttgagtggatgggaaggatcagcgcttacaatggtaacacaaactatgcacagaagctccagggcagagtcaccatgaccacagacacatccacgaccacagcctacatggagctgaggagcctgagatctgacgacacggccgtgtattactgtgcgagagatgggccggggggatcgtttgtagtagttccagctgcgattgacttctggggccagggaaccctggtcaccgtctcctcag

SEQ ID NO: 6601 - DNA, 376 bp, Homo sapiens
caggttcagctggtgcagtctggagctgaggtgaggaagcctggggcctcagtgaaggtctcctgcaaggcttctggttacacctttaccagctatggtatcagctgggtgcgacaggcccctggacaagggcttgagtggatgggatgggtcagcgcttacaatggtaaagcaacttatgcacagaaattccagggcagagtcatcatgaccacagacacatccacgagcacagcctacatggagctgaggagcctgagatctgacgacacggccgtgtattactgtgcgagagatctgagcgaagggaaattattatggttcggggaattgttgggctactggggccagggaaccctggtcaccgtctcctcag

SEQ ID NO: 6602 - DNA, 376 bp, Homo sapiens
caggttcagctggtgcagtctggagctgaggtgaagaagcctggggcctcagtgaaggtctcctgcaaggcttctggttacacctttaccagctatggtatcagctgggtgcgacaggcccctggacaagggcttgagtggatgggatggatcagcgcttacaatgataacacaaactatgcacagaagctccagggcagagtcaccatgaccaaagacacatccacgagcacagcctacatggacctgaggagcctgagatctgacgacacggccgtgtattactgtgcgagagacctcgtgcagtaccagctgctattgtcgagacctgcgttggactactggggccagggaaccctggtcaccgtctcctcag

SEQ ID NO: 6603 - DNA, 375 bp, Homo sapiens
caggtgcagctggtggaatctggggggggcgtggtccagcctgggaggtccctgagactctcctgtgtagcctctaaattcaccttcagtaattatcctatgaattgggtccgccaggctccaggcaaggggctggagtgggtggcacttatatcgtttgaaggaactagtaaatactacgcagacaccgtgaagggccgattcaccatctccagagacaattccaagaacaccctttatctgcaaatgaacagcctgagacctgaagacacggctgtttattattgtgcgagagatgcggacgacgaggtggttcggggaagtgtctacggattggacgtctggggccaagggaccacggtcaccgtctcctca

SEQ ID NO: 6604 - DNA, 375 bp, Homo sapiens
gaggtgcagctggtgcagtctggagcagaggtgaaaaagcccggggagtctctgaagatctcctgtaaggcttctggatacagctttaccgactactggatcggctgggtgcgccagatgcccgggaaaggcctggagtggatggggatcatctatcctggtgactctgataccagatacagcccgtccttccaaggccaggtcaccatctcagccgacaagtccagcagcaccgcctacctgcagtggagcagcctgaaggcctcggacaccgccatgtactactgtgcgcgaatgtccgctctggttcggggaacttactactactacgttatggacgtctggggccaagggaccacggtcaccgtctcctca

SEQ ID NO: 6605 - DNA, 375 bp, Homo sapiens
gaagtgcagctggtggagtctgggggaggcttggtacagcctggcaggtccctgagactctcctgtgcagcctctggactcacctttgatgattatggcatgcactgggtccggcaagctccagggaagggcctggagtgggtctcaggtattagttggaatagtggtagcataggctatggggactctgtgaagggccgattcaccatctccagagacaacgccaagaactccctgtatctgcaaatgaacagtctgagagctgaggacacggccttgtattactgtgcaaaaggctacccgggcgggatggctacgtcagactactactacatggacgtctggggcaaagggaccacggtcaccgtctcctca

SEQ ID NO: 6606 - DNA, 379 bp, Homo sapiens
cagatcaccttgaaggagtctggtcctacgctggtgaaacccacacagaccctcacgctgacctgcaccttctctgggttctcactcagcactagtggagtgggtgtgggctggatccgtcagcccccaggaaaggccctggagtggcttgcactcatttattgggatgatgataagcgctacagcccatctctgaagagcaggctcaccatcaccaaggacacctccaaaaaccaggtggtccttacaatgaccaacatggaccctgtggacacagccacatattactgtgcacacagtccccgcgatattttgactggttattatgcgaccctctttgactactggggccagggaaccctggtcaccgtctcctcag

SEQ ID NO: 6607 - DNA, 376 bp, Homo sapiens
gaggtgcagctggtggagtctgggggaggcctggtcaagcctggggggtccctgagactctcctgtgcagcctctggattcaccttcagtagctatagcatgaactgggtccgccaggctccagggaaggggctggagtgggtctcatccattagtagtagtagtagttacatatactacgcagactcagtgaagggccgattcaccatctccagagacaacgccaagaactcactgtatctgcaaatgaacagcctgagagccgaggacacggctgtgtattactgtgcgagagattacccctatagcagtggctgcgtgagtgtgtgctactttgactactggggccagggaaccctggtcaccgtctcctcag

SEQ ID NO: 6608 - DNA, 376 bp, Homo sapiens
gaggtgcagctggtggagtctgggggaggcctggtcaagcctggggggtccctgagactctcctgtgcagcctctggattcaccttcagtagctatagcatgaactgggtccgccaggctccagggaaggggctggagtgggtctcatccattagtagtagtagtagttacatatactacgcagactcagtgaagggccgattcaccatctccagagacaacgccaagaactcactgtatctgcaaatgaacagcctgagagccgaggacacggctgtgtattactgtgcgagagactcgcccgggtatagcagtggctggtatctttccgtagtgggctactggggccagggaaccctggtcaccgtctcctcag

SEQ ID NO: 6609 - DNA, 372 bp, Homo sapiens
gaggtgcagctggtggagtctgggggaggcttggtacagcctggggggtccatgagactctcctgtgcagcctctggattcatcctcagtagcgacgacatgcactgggtccgccaagctacaggaaaaggtctggagtgggtctcagctattggtagtgctggtgacacatactatccaggctccgtgaagggccgattcaccgtctccagagaagacgccaagaactccttgtatcttcagatgaacagcctgagagccggggacacggctgtgtattactgtgcaagagggcgggtacaacggatgggaacttactactactactacatggacgtctggggcaaagggaccacggtcaccgtctcctca

SEQ ID NO: 6610 - DNA, 375 bp, Homo sapiens
gaggtgcagctggtggagtctgggggaggcttggtacagcctggggggtccctgagactctcctgtgctgcctctggattctccttcagtgactataacatgaactgggtccgccaggctccagggaaggggctggagtggatttcattcattagtagtagtagcagtgccatttactacgcagtctctgtgaagggccgattcaccatctccagagacaatgccaagaactctctgtatctgcaaatgaacagcctgagagacgaggacacggctgtgtatttctgtgcgagggagccgactacggtgactgcttactactactactactacatggacgtctggggcaaagggaccacggtcaccgtctcctca

SEQ ID NO: 6611 - DNA, 375 bp, Homo sapiens
gaggtgcagctggtggagtccgggggaggcttagttcagcctggggggtccctgagactctcctgtgcagcctctggattcaccttcagtagctactggatgcactgggtccgccaagctccagggaaggggctggtgtgggtctcacgtattaatagtgatgggagtagcacaagctacgcggactccgtgaagggccgattcaccatctccagagacaacgccaagaacacgctgtatctgcaaatgaacagtctgagagccgaggacacggctgtgtattactgtgcaaggtctgtcggatacagctatggctactactactactacggtatggacgtctggggccaagggaccacggtcaccgtctcctca

SEQ ID NO: 6612 - DNA, 406 bp, Homo sapiens
caggtgcagctggtggagtctgggggaggcgtggtccagcctgggaggtccctgagactctcctgtgcagcctctggattcaccttcagtaactatactatgcactgggtccgccaggctccaggcaagggactagagtggcgcctggctccaggcaaggggctggagtgggtggcacttatatcatttgatggaagtaataaatactacgcagactccctgaagggccgattcaccatctccagagacaattccaagaacacgctgtatctgcaaatgcacagcctgtcacttgaggactcggctgtgtattactgtgcgagagccgattattgtattggtagtagctgctactcgtggtcgctacactactggggccagggaaccctggtcaccgtctcctcag

SEQ ID NO: 6613 - DNA, 376 bp, Homo sapiens
caggtgcagctggtggagtctgggggaggcgtggtccagcctgggaggtccctgagactctcctgtgcagcctctggattcaccttcagtagctatgctatgcactgggtccgccaggctccaggcaaggggctggagtgggtggcagttatatcatatgatggaagcaataaatactacgcagactccgtgaagggccgattcaccatctccagagacaattccaagaacacgctgtatctgcaaatgaacagcctgagagctgaggacacggctgtgtattactgtgcgagaagggcgctctacgatttttggagtggttattcctactactttgactactggggccagggaaccctggtcaccgtctcctcag

SEQ ID NO: 6614 - DNA, 376 bp, Homo sapiens
caggtgcagctggtggagtctgggggaggcgtggtccagcctgggaggtccctgagactctcctgtgcagcctctggattcaccctcagtcgctatgctatgcactgggtccgccaggctccaggcaaggggctggagtgggtggctgttatatcagatgatggaagtagtaaatactacgcagagtccgtgaagggccgattcaccatctccagagacaattccaagaacacgctgtctctgcaaatgaacagcctgagagctgaggacacggctctgtattactgtgcgagagatcggactaattactatggttcggggagtttcggtccgtttgactactggggccagggaaccctggtcaccgtctcctcag

SEQ ID NO: 6615 - DNA, 376 bp, Homo sapiens
caggtgcagctggtggagtctgggggaggcgtggtccagcctgggaggtccctgagactctcctgtgcagcctctggattcaccttcagaagctatgccatgcactgggtccgccaggctccaggcaaggggctggagtgggtggcatttttatcatatgatggaggtaataaatactatgcagactccgtgaagggccgattcaccatctccagagacaattccgagaacacgctctatctgcaaatgaacagcctgagagttgaggacacggctgtgtattactgtgcgaaagatccgaatctgtaccagccgctggtatatcctgggtgctttgactactggggccagggaaccctggtcaccgtctcctcag

SEQ ID NO: 6616 - DNA, 382 bp, Homo sapiens
gaggtgcagctggtggagtctgggggaggcttggtccagcctggagggtccctgagactctcatgtgcagcctctggattcaccttcaatgaccactatatggagtgggtccgccaggctccagggaaggggctggagtgggttggccgtgctagaaataaagttaacagttacaccacagaatacgccgcgtctgtgaaaggcagattcaccatctcaagagatgattcaaagaactcactgtatctgcaaatgaacaacctgaaaaccgaggacacggccgtgtattactgtgctagaacgttttacgatattgtgactggttactattattggtacttcgatctctggggccgtggcaccctggtcactgtctcctcag

SEQ ID NO: 6617 - DNA, 378 bp, Homo sapiens
caggtcaccttgaaggagtctggtcctgtgctggtgaaacccacagagaccctcacgctgacctgcaccgtctctgggttctcactcagcgatgctagaatgggtatgagctggatccgtcagcccccagggaaggccctggagtggcttgcacacattttttcgaatgacgaaaaatcctacagcacatctctgaagagcaggctcaccatctccaaggacacctccaaaagccaggtggtccttaccatgaccaacatggaccctgtggacacagccacatattactgtgcacggcccaccggtttttggagtggttatttctactactactacatggacgtctggggcaaagggaccacggtcaccgtctcctca

SEQ ID NO: 6618 - DNA, 375 bp, Homo sapiens
caggtgcagctggtgcagtctggggctgaggtgaagaagcctggggcctcagtgaaggtctcctgcgaggcttctggatacaccttcaccggctactatatgcactgggtgcgacaggcccctggacaagggcttgagtggatgggacggatcaaccctaacagtggtggcacaaactatgcacagaagtttcagggcagggtcaccatgaccagggacatgtccatcagcacagcctacatggagctgagcaggctgagatctgacgacacggccgtgtattactgtgcgagagaaactataacagttcggcccctcatcaactactactacatggacgtctggggcaaagggaccacggtcaccgtctcctca

SEQ ID NO: 6619 - DNA, 375 bp, Homo sapiens
caggtgcagctggtgcagtctggggctgaggtgaagaagcctggggcctcagtgaaggtctcctgcaaggcttctggatacaccttcaccggctactatatgcactgggtacgtcaggcccctggacaagggcttgagtggatgggacggatcaaccctaacagtggtggcgcaaactatgcacagaagtttcagggcagggtcaccatgaccagggacacgtccatcagcacagcctacatggagctgagcaggctgagatctgacgacacggccgtgtattactgtgcgagaggatatagtggctacgaatccctctactactactactacatggacgtctggggcaaagggaccacggtcaccgtctcctca

SEQ ID NO: 6620 - DNA, 379 bp, Homo sapiens
caactgcagctgcaggagtcgggcccaggactggtgaagccttcggagaccctgtccctcacctgcactgtctctggtggctccatcagcagcagtacttactactggggctggatccgccagcccccagggaaggggctggagtggattgggaatatctattatagtgggagcacctactacaacccgtccctcaagagtcgagtcaccatatccgtagacacgtccaagaaccagttctccctgaggctgagctcagtgaccgccgcagacacggctgtgtattactgtgcgagacatccacactacggtgataccggacactctttctggtacttcgatctctggggtcgtggcaccctggtcactgtctcctcag

SEQ ID NO: 6621 - DNA, 375 bp, Homo sapiens
gaggtgcagctggtggagtctgggggaggtgtggtacggcctggggggtccctgagactctcctgtgcagcctctggattcacctttgatgattatggcatgagctgggtccgccaagctccagggaaggggctggagtgggtctctggtattaattggaatggtggtagcacaggttatgcagactctgtgaagggccgattcaccatctccagagacaacgccaagaactccctgtatctgcaaatgaacagtctgagagccgaggacacggccttgtattactgtgcgagagaatcgagcttactatggttcggggagttatctcacggtatggacgtctggggccaagggaccacggtcaccgtctcctca

SEQ ID NO: 6622 - DNA, 375 bp, Homo sapiens
gaggtgcagctggtggagtctgggggaggcttggtccagcctggggggtccctgagactctcctgtgcagcctctggattcacctttagtagctattggatgagctgggtccgccaggctccagggaaggggctggagtgggtggccaacataaagcaagatggaagtgagaaatactatgtggactctgtgaagggccgattcaccatctccagagacaacgccaagaactcactgtatctgcaaatgaacagcctgagagccgaggacacggccgtgtattactgtgcgaggttcattaacagtggctggtctttttactactactacggtatggacgtctggggccaagggaccacggtcaccgtctcctca

SEQ ID NO: 6623 - DNA, 375 bp, Homo sapiens
gaggtgcagctggtggagtctgggggaggcctggtcaagcctggggggtccctgagactctcctgtgcagcctctggattcaccttcagtagctatagcatgaactgggtccgccaggctccagggaaggggctggagtgggtctcatccattagtagtagtagtagttacatatactacgcagactcagtgaagggccgattcaccatctccagagacaacgccaagaactcactgtatctgcaaatgaacagcctgagagccgaggacacggctgtgtattactgtgcgagcatctatggttcggggagttggtcctactactactacggtatggacgtctggggccaagggaccacggtcaccgtctcctca

SEQ ID NO: 6624 - DNA, 372 bp, Homo sapiens
caggtgcagctgcaggagtcgggcccaggactggtgaagccttcggagaccctgtccctcacctgcactgtctctggtggctccatcagtagttactactggagctggatccggcagcccccagggaagggactggagtggattgggtatatctattacagtgggagcaccaactacaacccctccctcaagagtcgagtcaccatatcagtagacacgtccaagaaccagttctccctgaagctgacctctgtgaccgctgcggacacggccgtatattactgtgcgagagacaagtgtagtagtaatagctgctactactactacggtatggacgtctggggccaagggaccacggtcaccgtctcctca

SEQ ID NO: 6625 - DNA, 372 bp, Homo sapiens
caggtgcagctgcaggagtcgggcccaggactggtgaagccttcggagaccctgtccctcacctgcactgtctctggtggctccatcagtagttactactggagctggatccggcagcccccagggaagggactggagtggattgggtatatctattacagtgggagcaccaactacaacccctccctcaagagtcgagtcaccatatcagtagacacgtccaagaaccagttctccctgaagctgagctctgtgaccgctgcggacacggccgtgtattactgtgcgagagttgtgagtgataaggacagggggttctactactactacatggacgtctggggcaaagggaccacggtcaccgtctcctca

SEQ ID NO: 6626 - DNA, 372 bp, Homo sapiens
caggtgcagctgcaggagtcgggcccaggactggtgaagccttcggagaccctgtccctcacctgcactgtctctggtggctccatcagtcgttactactggagctggatccggcagcccccagggaagggactggagtggattgggtatatctattacagtgggagcaccaactacaacccctccctcaagagtcgagtcaccatatcagtagacacgtccaagaacctcttctccctgaagctgagctctgtgaccgctgcggacacggccgtgtattactgtgcgagaaaaatagcccgcatcaggggtggtgactgctattcttgtatggacgtctggggccaagggaccacggtcaccgtctcctca

SEQ ID NO: 6627 - DNA, 372 bp, Homo sapiens
caggtgcagctgcaggagtcgggcccaggactggtgaagccttcggagaccctgtccctcacctgcactgtctctggtggctccatcagtagttactactggagctggatccggcagcccccagggaagggactggagtggattgggtatatctattacagtgggagcaccaactacaacccctccctcaagagtcgagtcaccatatcagtagacacgtccaagaaccagttctccctgaagctgagctctgtgaccgctgcggacacggccgtgtattactgtgcgagagattccacttattatacaatgccgtcgtactactacggtatggacgtctggggccaagggaccacggtcaccgtctcctca

SEQ ID NO: 6628 - DNA, 372 bp, Homo sapiens
caggtgcagctgcaggagtcgggcccaggactggtgaagccttcggagaccctgtccctcacctgcgctgtctctggtggctccatcagtccttactactggagctggatccggcagcccccagggaagggactggagtggattgggtatatctattactttgggagcaccaagtacaacccccccctcaagagtcgagtcaccatatcagtagacacgtccaagaaccagttctccctgaagctgagctctgtgaccgctgcggacacggccacttattactgtgcgagaactctgattgtgggagctacgtggcgggggaactacggtatggacgtctggggccgagggaccacggtcaccgtctcctca

SEQ ID NO: 6629 - DNA, 371 bp, Homo sapiens
ggtgcagctgcaggagtcgggcccaggactggtgaagccttcggagaccctgtccctcacctgcactgtctctggtggctccatcagtagttactattggagctggctccggcagcccccagggaagggactggagtggattgggtgtatctattacactgggagcaccacttacaacccctccctcaagagtcgactcaccatatcattagagacgtccaagaaccggttctccctgaagctgagctctgtgaccgccgcagacacggccgtatattactgcgcgagacatgtcaaatcgggtataactatgatcgacccttggtacttcgatctctggggccgtggcaccctggtcactgtctcctcag

SEQ ID NO: 6630 - DNA, 376 bp, Homo sapiens
gaggtgcagctggtggagtctgggggaggcttggtaaagcctggggggtcccttagactttcctgtgcagcctctggattcactttcagtaacgcctggatgagctgggtccgccaggctccagggaaggggctggagtgggttggccgtattaaaagcaaaactgatggtgggacaacagactacgctgcacccgtgaaaggcagattcaccatctcaagagatgattcaaaaaacacgctgtatctgcaaatgaacagcctgaaaaccgaggacacagccgtgtattactgtaccacagataaatcccgctatggttcggggagtggatggttcgacccctggggccagggaaccctggtcaccgtctcctcag

SEQ ID NO: 6631 - DNA, 370 bp, Homo sapiens
caggtgcagctggtgcagtctggggctgaggtgaagaagcctggggcctcagtgaaggtctcctgcaaggcttctggatacaccttcaccggctactatatgcactgggtgcgacaggcccctggacaagggcttgagtggatgggacggatcaaccctaacagtggtggcacaaactatgcacagaagtttcagggcagggtcaccatgaccagggacacgtccatcagcacagcctacatggagctgagcaggctgagatctgacgacacggccgtgtattactgtgcgatcctcaaaggaaaaggatattgtagtagtaccagctgccccccctggggccagggaaccctggtcaccgtctcctcag

SEQ ID NO: 6632 - DNA, 370 bp, Homo sapiens
caggtgcagctggtgcagtctggggctgaggtgaagaagcctgggtcctcggtgaaggtctcctgcaaggcttctggaggcaccttcagcagctatgctatcagctgggtgcgacaggcccctggacaagggcttgagtggatgggagggatcatccctatctttggtacagcaaactacgcacagaagttccagggcagagtcacgattaccgcggacgaatccacgagcacagcctacatggagctgagcagcctgagatctgaggacacggccgtgtattactgtgcgagagtgatggggtatagcagcagctgggcaaactggttcgacccctggggccagggaaccctggtcaccgtctcctcag

SEQ ID NO: 6633 - DNA, 373 bp, Homo sapiens
caggtgcagctgcaggagtcgggccccggactggtgaagccttcacagaccctgtccctcacctgcactgtctctggtggctccatcagcagtgatgattactactggagttggatccgccagcccccagggaaggacctggagtggattgggtacatctattacagtgggaacacctactacaacccgtccctcaagagtcgagttaccatatcagtagacacgtccaagaaccagttctccctgaagctgacctctgtgactgccgcagacacggccgtgtattactgtgccagagtggtaggatattgcagtagtaccagatgccatgttgactactggggccagggaaccctggtcaccgtctcctcag

SEQ ID NO: 6634 - DNA, 370 bp, Homo sapiens
caggtgcagctggtgcagtctggggctgaggtgaagaagcctggggcctcagtgaaggtctcctgcaaggcctctggaaacaccttcagcagttatgatatcaactgggtgcgacaggccactggacaagggcttgagtggatgggatggatgaaccctaacagtgctaacacaggctatgcacagaagttccagggcagagtcaccatgaccaggaacacctccataagcacagcctacatggaactgagcagcctgagatctgaggacacggccgtgtattactgtgcgagaggccccagttggagtggttattcggggtactactttgactactggggccagggaaccctggtcaccgtctcctcag

SEQ ID NO: 6635 - DNA, 381 bp, Homo sapiens
gaggtgcagctggtggagtctgggggaggcttggtccagcctggagggtccctgagactctcctgtgcagcctctggattcaccttcagtgaccactacatggactgggtccgccaggctccagggaaggggctggagtgggttggccgtactagaaacaaagctaacagttacaccacagaatacgccgcgtctgtgaaaggcagattcaccatctcaagagatgattcaaagaactcactgtatctgcaaatgaacagcctgaaaaccgaggacacggccgtgtattactgtgctagagatagggtgacttacgcctggggctactactactactacatggacgtctggggcaaagggaccacggtcaccgtctcctca

SEQ ID NO: 6636 - DNA, 370 bp, Homo sapiens
caggtgcacctggtgcagtctggggctgaagtgaagaagcctggggcctcagtgaaggtttcctgcaaggcgtctggatacactttcaccaattattatatccactgggtgcgacaggcccccggacaaggtcttgaatggatgggaattatcaaccctactggtggtagcactagccactcacagaagttccagggtagagtcaccctgaccagagacacgtccacgaccacagtatatatggaactgagcagcctgagagtcgaagacacggccgtctattattgtgcgagagaggtggttcagggagttaacgacgtcaattggctcgacccctggggccagggaaccctggtcaccgtctcctcag

SEQ ID NO: 6637 - DNA, 370 bp, Homo sapiens
caggtgcagctggtgcagtctggggctgaggtgaagaagcctggggcctcagtgaaggtttcctgcaaggcatctggatacaccttcaccagttactatatgcactgggtgcgacaggcccctggacaagggcttgagtggatgggaataatcaaccctagtggtggtagcacaagctacgcacagaagttccagggcagagtcaccatgaccagggacacgtccacgagcacagtctacatggagctgagcagcctgagatctgaggacacggccgtgtattactgtgcgagagatggggatatagcagcagctgacaattggtggttcgacccctggggccagggaaccctggtcaccgtctcctcag

SEQ ID NO: 6638 - DNA, 370 bp, Homo sapiens
gaggtgcagctggtggagtctgggggaggcttggtacagcctggggggtccctgagactctcctgtgcagcctctggattcaccttcagtagctatagcatgaactgggtccgccaggctccagggaaggggctggagtgggtttcatacattagtagtagtagtagtaccatatactacgcagactctgtgaagggccgattcaccatctccagagacaatgccaagaactcactgtatctgcaaatgaacagcctgagagacgaggacacggctgtgtattactgtgcgagagatccccagggaggctacgatcccttacgtcactttgactactggggccagggaaccctggtcaccgtctcctcag

SEQ ID NO: 6639 - DNA, 370 bp, Homo sapiens
caggtgcagctggtggagtctgggggggccttggtcaagcctggagggtccctgagactctcctgtgcagcctctggattcaccttcagtgactactacatgagttggatccgtcaggctccagggaaggggctggagtggatttcatacattagtggcagtggtactaccatatattacgcagactctgtgaagggccgattcaccatctccagggacaacgcccagaactcactgtatctgcaaatgagcagcctgagagccgaggacacggccgtgtattactgtgcgagcgataagtattttggcaggtggtacgggaactggctcgacccctggggccagggaaccctggtcaccgtctcctcag

SEQ ID NO: 6640 - DNA, 370 bp, Homo sapiens
caggtgcagctggtggagtctgggggaggcttggtcaagcctggagggtccctgagactctcctgtgcagccgctggattcaccttcagtgacttttacatgggctggatccgccaggctccagggaaggggctggagtgggtttcatacattagtagtagtgggtctaccatatactacgcacactctgtgaagggccgattcaccgtctccagggacaacgccgagaactcactgtatctgcaaatgaatagcctgagagacgaggacacggccgtgtattactgtgcgggagataagtattttggcagctggtacgggaactggttcgacccctggggccagggaaccctggtcaccgtctcctcag

SEQ ID NO: 6641 - DNA, 370 bp, Homo sapiens
caggtgcagctggtggagtctgggggaggcttggtcaagcctggagggtccctgagactctcctgtgcagcctctggattcaccttcagtgactactacatgagctggatccgccaggctccagggaaggggctggagtgggtttcatacattagtagtagtggtactaccatatactacgcagactctgtgaagggccgattcaccatctccagggacaacgccaagaactcactgtatctgcaaatgaacagcctgagagccgaggacacggccgtgtattactgtgcgagagataggttttttggcagctggtacgggaactggttcgactcctggggccagggaaccctggtcaccgtctcctcag

SEQ ID NO: 6642 - DNA, 375 bp, Homo sapiens
gaggtgcagctgttggagtctgggggaggcttggtacagcctggggggtccctgagactctcctgtgcagcctctggattcacctttagcagctatgccatgagctgggtccgccaggctccagggaaggggctggagtgggtctcagctattagtggtagtggtggtagcacatactacgcagactccgtgaagggccggttcaccatctccagagacaattccaagaacacgctgtatctgcaaatgaacagcctgagagccgaggacacggccgtatattactgtgcgaaagatttcgcagcagctgcaactccatactactactacggtatggacgtctggggccaagggaccacggtcaccgtctcctca

SEQ ID NO: 6643 - DNA, 375 bp, Homo sapiens
gaggtgcagctgttggaatctgggggaggcttggtacagcctggggggtccctgagactctcctgtgcagcctctggattcacctttagcagctatgccatgagctgggtccgccaggctccagggaaggggctggagtgggtctcacttattggtactagtggtagtatcacatactacgcagactccgtgaagggccggttcaccatctccagagacaattccaagaacacgctgtatctgcaaatgaacagcctgagagccgaggacacggccgtatattactgtgcgaaagacccgagcgttggctacgatcgctactactacttctacatggacgtctggggcaaagggaccacggtcaccgtctcgtca

SEQ ID NO: 6644 - DNA, 370 bp, Homo sapiens
gaggtgcagctggtggagtctgggggaggcctggtcaagcctggggggtccctgagactctcctgtgcagcctctggattcaccttcagtagctatagcatgaactgggtccgccaggctccagggaaggggctggagtgggtctcatccattagtagtagtagtagttacatatactacgcagactcagtgaagggccgattcaccatctccagagacaacgccaagaactcactgtatctgcaaatgaacagcctgagagccgaggacacggctgtgtattactgtgcgaggacctatgattacatttgggggagttaccacgagccgactcactggggccagggaaccctggtcaccgtctcctcag

SEQ ID NO: 6645 - DNA, 370 bp, Homo sapiens
gaggtgcagctggtggagtctgggggaggcctggtcaagcctggggggtccctgagactctcctgtgcagcctctggattcaccttcagtagttatagcatgaactgggtccgccaggctccagggaaggggctggagtgggtctcatccattagtagtagtagtagttacatatactacgcagactcagtgaagggccgattcaccatctccagagacaacgccaagaactcactgtatctgcaaatgaacagcctgagagccgaggacacggctgtgtattactgtgcgagagggtgcagtggtggtagctgctcctcgggagataatgactcctggggccagggaaccctggtcaccgtctcctcag

SEQ ID NO: 6646 - DNA, 370 bp, Homo sapiens
gaggtgcagctggtggagtctgggggaggcctggtcaagcctggggggtccctgagactctcctgtgcagcctctggattcatattcagtacctataagatgaactgggtccgccaggctccagggaaggggctggagtgggtctcatccattagtgctggtagtagtgacttatactacgcagactcagtgacgggccgattcaccatctccagagacaacgccaagaactcactatatctgcaaatgaacagcctgagagccgaggacacggctgtgtattactgtgcgacgaattactttggttcggggagttattactttccctttgactactggggccagggaaccctggtcaccgtctcctcag

SEQ ID NO: 6647 - DNA, 370 bp, Homo sapiens
gaagtgcagctggtgcagtctggagcagaggtgaaaaagcccggggagtctctgaggatctcctgtaagggttctggatacagctttaccagctactggatcagctgggtgcgccagatgcccgggaaaggcctggagtggatggggaggattgatcctagtgactcttatatcaactacagcccgcccttccaaggccacgtcaccatctcagctgacaagtccatcagcactgcctacctacagtggagcagcctgaaggcctcggacaccgccatgtattactgtgcgagagggggcgggggagacgcccaaatatggttcggggagttctactggggccagggaaccctggtcaccgtctcctcag

SEQ ID NO: 6648 - DNA, 370 bp, Homo sapiens
gaggtgcagctggtggagtctgggggaggcttggtacagcctggcaggtccctgagactctcctgtgcagcctctggattcacctttgatgcttatgccatgcactgggtccggcaagctccagggaagggcctggagtgggtctcaggtattagttgggatggtggtagcatagcctatgcggactctgtgaagggccgattcaccatctccagagacaacgccaagaactccctgtatctgcaaatgaccagtctgagacctgaagacacggccttgtattactgtgcaaaagatatctcgggtttaatagcagtggcgggtttcccggacaactggggccagggaaccctggtcaccgtctcctcag

SEQ ID NO: 6649 - DNA, 367 bp, Homo sapiens
gaggtgcagctggtggagtctgggggaggcttggtacagcctggggggtccctgagactctcctgtgcagcctctggattcaccttcagtagctacgacatgcactgggtccgccaagctacaggaaaaggtctggagtgggtctcagctattggtacttctggtgacaaatactatccaggctccgtgaagggccgattcaccatctccagagaaaatgccaagaactccttgtatcttcaaatgaacagcctgagagccggggacacggctgtgtattactgtgcaagaggagtccaaaaagacctcgggtgggagtactactttgactactggggccagggaaccctggtcaccgtctcctcag

SEQ ID NO: 6650 - DNA, 370 bp, Homo sapiens
caggtgcagctggtggagtctgggggaggcgtggtccagcctgggaggtctctgagactctcctgtgcagcctctggattctccttcagtagctattctatgcactgggtccgccaggctccaggcaaggggctggagtgggtggcactcatatcatatgatggaagtagaaaatactacgcagattccgtgaagggccgattcaccatctccagagacaattccaagaacacgctgtatctgcaaatgaacagcctgagagctgacgacacggctgtgtattactgtgcgagcccgcggggcctcgattactatgatactagtggttatgactactggggccagggaaccctggtcaccgtctcctcag

SEQ ID NO: 6651 - DNA, 370 bp, Homo sapiens
caggtgcagctggtggagtctgggggaggcgtggtccagcctgggaggtccctgagactctcctgtgcagcctctggattcaccttcagtagctatggcatgcactgggtccgccaggctccaggcaaggggctggagtgggtggcagttatatcatatgatggaagtaataaatactatgcagactccgtgaagggccgattcaccatctccagagacaattccaagaacacgctgtatctgcaaatgaacagcctgagagctgaggacacggctgtgtattactgtgcggaatgggattactatggttcagggagttatagcgtggggggctactggggccagggaaccctggtcaccgtctcctcag

SEQ ID NO: 6652 - DNA, 370 bp, Homo sapiens
caggtgcagctgctggcgtctgggggaggcgtggtccagcctgggaggtccctgagactctcctgtgcagcctctgtattcaccttcagtagctatggcatgcactgggtccgccaggctccaggcaaggggctggagtgggtggcatttatatcatatgatggcagtgttaagttctatgcaaactccatgaagggccgattcaccatctccagagacaattccaagagtactttgtatctgcaaatgaacggcctgagaactgaggacacggctgtgtattactgtgcgaaagattcggaggattgcagtagtaccagctgctatggtgattactggggccagggaaccctggtcaccgtctcctcag

SEQ ID NO: 6653 - DNA, 370 bp, Homo sapiens
caggtgcagctggtggagtctgggggaggcgtggtccagcctgggaggtccctgagactctcctgtgcagcctttggattcagtttcaggagttatggcatgcactgggtccgccaggctccaggcaaggggctggagtgggtggcagttatatcatatgatggaagtaataaatactatccagactccgtgaagggccgattcaccatctccagagacaattccaagaacacgctgtatctgcaaatgaacagcctgagagctgaggacacggctgtgtattactgtgcgaaagaccttctggttcagtaccccctctcgtactgctttgactactggggccagggaaccctggtcaccgtctcctcag

SEQ ID NO: 6654 - DNA, 367 bp, Homo sapiens
gaggtggaaatggtggagtctgggggaggcttggtccagcctggggggtccctgagactctcctgtgcagcctctggattcaccgtcagtggcaactacatgaactgggtccgccaggctccagggaaggggctggagtgggtctcagttttttatcccggtggtagcactttctatgcagactccgtgaagggccgattcaccatctccagagaccattccaagaacacgctgtatcttcaaatgaacagcctgagagctgaggacacggctgtatattactgtgcgagagagggcgcctttatagcagtggctggtacggggtttgactactggggccagggaaccctggtcaccgtctcctcag

SEQ ID NO: 6655 - DNA, 376 bp, Homo sapiens
caggtgcatctggtggagtctgggggaggcttggtcaagcctggagggtccctgagactctcctgtgcagcctctggattcaccttcagtgactactacatgacctggatccgccaggctccagggaaggggctggagtgggtttcatatattagtggtagtggtactaccatatactacacagactctgtgaagggccgattcaccatctccagggacaacgccaagaactcactgtatctgcaaatgaacagcctgagagccgaggacacggccgtgtattactgtgtgaggacggattcaaaaggcgggttcagggacttattaaagggattctgggactggggccagggcaccctggtcaccatttcctcag

SEQ ID NO: 6656 - DNA, 370 bp, Homo sapiens
gaggtgcaactggtggagtctgggggagacttggtccagcctggggggtccctgagactctcctgtgcagcctctggattcacctttagtagctattggatgaactgggtccgccaggctccagggaaggggctggagtgggtggccaacatagagcaagatgggagtgagaaatactatgtggactctgtgaagggccgattcaccatctccagagacaacgccaagaactcactgtatctgcaaatgaacagcctgagagccgaggacacggctgtgtattactgtgcgagagctaggtttttccgtggcttcgattcgggaaactttgactcctggggccagggaaccctggtcaccgtctcctcag

SEQ ID NO: 6657 - DNA, 370 bp, Homo sapiens
gaggtgcagctggtggagtctgggggaggcttggtccagcctggggggtccctgagactctcctgtgcagcctctggattcacctttagtagctattggatgagctgggtccgccaggctccagggaaggggctggagtgggtggccaacataaagcaagatggaagtgagaaatactatgtggactctgtgaagggccgattcaccatctccagagacaacgccaagaactcactgtatctgcaaatgaacagcctgagagccgaggacacggccgtgtattactgtgcgttgacacggaacgctatggttacaacggcgtactactttgactactggggccagggaaccctggtcaccgtctcctcag

SEQ ID NO: 6658 - DNA, 370 bp, Homo sapiens
gaggtgcaactggtggagtctgggggaggcttggtccagcctggggggtccctgagactctcctgtgcagcctctggattcacctttagtagctactggatgaactgggtccgccaggctccagggaaggggctggagtgggtagccaacataaagcaagatggaggtgagaaaaagtatgtggactctatgaagggccgattcaccatctccagagacaacgccaagaattcactgtatctgcaaatggacggcctgagaggcgaggacacggctgtgtattactgtgcgagagggggcccgtatagcgactcgtccggggggacttttgactcctggggccagggaaccctggtcaccgtctcctcag

SEQ ID NO: 6659 - DNA, 370 bp, Homo sapiens
caggtgcagctgcaggagtcgggcccaggactggtgaagccttcggggaccctgtccctcacctgcgctgtctctggtggctccatcagcagtaataactggtggagttgggtccgccagcccccagggaaggggctggagtggattggggaaatctatcatagtgggagcaccaactacaacccgtccctcaagagtcgagtcaccatatcagtagacaaatccaaaaagcagttctccctgaaactgagctctgtgaccgccgcggacacggccgtgtattattgtgcgacagatctggacctctgttctggtggtatatgctatctatattactggggccagggaaccctggtcaccgtctcctcag

SEQ ID NO: 6660 - DNA, 370 bp, Homo sapiens
caggtgcagctgcaggagtcgggcccaggactggtgaagccttcggggaccctgtccctcacctgcgctgtctctggtggctccatcagcagtagtaactggtggagttgggtccgccagcccccagggaaggggctggagtggattggggaaatctatcatagtgggagcaccaactacaacccgtccctcaagagtcgagtcaccatatcagtagacaagtccaagaaccagttctccctgaagctgagctctgtgaccgccgcggacacggccgtgtattactgtgcgagaggcgcaattgtagtagtaccagctgctacctactttgactactggggccagggaaccctggtcaccgtctcctcag

SEQ ID NO: 6661 - DNA, 367 bp, Homo sapiens
gaggtgcagctggtggagtctggaggaggcttgatccagcctggggggtccctgagactctcctgtgcagcctctgggttcaccgtcagtagcaactacatgagttgggtccgccaggctccagggaagggcctggagtgggtctcagttatttatagcggtgataccacatactacgcagactccgtgaagggccgattcaccatctccagagacaattccaagaacacggtgtatcttcaaatgaacagcctgagagccgaggacacggccgtgtattactgtgcgagacttgggggtgtatatagtgggtacgatggaggtcttgactattggggccagggaaccctggtcaccgtctcctcag

SEQ ID NO: 6662 - DNA, 367 bp, Homo sapiens
gaggtgcagctggtggagtctggaggaggcttgatccagcctggggggtccctgagactcacctgtgcagcctctggattcagtgtcagcagcaactacatgacctgggtgcgtcaggctccagggagggggctggagtgggtctcgattatttatcgcggtggaagttcttactacgcagactccgtgaagggccgattcaccatctccagagacaatttccagaatacgctgcttcttcaaatgcacaacctgagagccgacgactcggccgtctactactgtgcgagaggtggatatagtggatacgaccccatgtactactttgacttctggggccagggaacccaggtcaccgtctcctcag

SEQ ID NO: 6663 - DNA, 370 bp, Homo sapiens
caggtccagctggcgcaatctggggctgaggtgaagaagcctgggtcctcggtgaaggtctcctgcaaggcctctggagacacctttaacaactatatgatcagttgggtgcgacaggtccctggacaagggcttgagtggatgggaaggatcatccctcttcttggagtaacaagatacgcgccgaagttgcagggcagagtcacgatcaccgcggacaaagccacgagcacagcctacatggagttgagcagactgagatctgaggacacggccatgtattactgtgcgagagggcattattatgatagtagtgattatcactactttgacctctggggccagggaaccctggtcaccgtctcctcag

SEQ ID NO: 6664 - DNA, 370 bp, Homo sapiens
caggtccaactggtgcaatctggggctgaggtgaagaagcctgggtcctcggtgaaggtctcctgcaaggcttctggaggcaccttcagcagtaatactgtcacctgggtgcgacagggctctggacaagggcttgagtggatgggaaggataatccctgtctttggaatagtaaactacgcacagaagttccagggcagagtcacgattaccgcggacaaatccacgagtacagcctacatggagctgagcagcctgagatctgaggacacggccgtgtattactgtgcgagagcgtctttagtgggagaaacagaaagtggatcctttgactactggggccagggaaccctggtcaccgtctcctcag

SEQ ID NO: 6665 - DNA, 370 bp, Homo sapiens
caggtgcagctggtgcagtctggggctgaggtgaagaagcctgggtcctcggtgaaggtctcctgcaaggcttctggaggcaccttcagcagctatgctatcagctgggtgcgacaggcccctggacaagggcttgagtggatgggaaggatcatccctatccttggtatagcaaactacgcacagaagttccagggcagagtcacgattaccgcggacaaatccacgagcacagcctacatggagctgagcagcctgagatctgaggacacggccgtgtattactgtgcgagacattattactatggttcagggagttattacccccctcactactggggccagggaaccctggtcaccgtctcctcag

SEQ ID NO: 6666 - DNA, 370 bp, Homo sapiens
caggtccagctggtgcaatctggggctgaggtgaagaagcctgggtcctcggtgaaggtctcctgcaaggcttctggaggcaccttcagcagctatactatcagctgggtgcgacaggcccctggacaagggcttgagtggatgggaaggatcatccctatccttggtatagcaaactacgcacagaagttccagggcagagtcacgattaccgcggacaaatccacgagcacagcctacatggagctgagcagcctgagatctgaggacacggccgtgtattactgtgcgagagatctccggcgaggtggtaactcatgggagggctttgactactggggccagggaaccctggtcaccgtctcctcag

SEQ ID NO: 6667 - DNA, 370 bp, Homo sapiens
caggtgcagctggtgcagtctggggctgaggtgaagaagcctgggtcctcggtgagggtctcctgcaaggcttctggaggcaccttcagcagctatgctatcatctgggtgcgacaggcccctggacaaggacttgagtggatgggagggatcatccccatctttgatacaacaaactacgcacagaagttccagggcagagtcacgattaccgcggacgaatccacgagcgcagcctacttggagctgagcagcctgagatctgaggacacggccttttattactgtgcgacaatccccccttattgtactgatggtacctgccgccctgactactggggccagggaaccctggtcaccgtctcctcag

SEQ ID NO: 6668 - DNA, 367 bp, Homo sapiens
caggtgcagctacagcagtggggcgcaggactgttgaagccttcggagaccctgtccctcacctgcgctgtctatggtgggtccttcagtggttactactggagctggatccgccagcccccagggaaggggctggagtggattggggaaatcaatcatagtggaagcaccaactacaacccgtccctcaagagtcgagtcaccatatcagtagacacgtccaagaaccagttctccctgaagctgagctctgtgaccgccgcggacacggctgtgtattactgtgcgaggacccaaattacgatttttggagtggataactggttcgacccctggggccagggaaccctggtcaccgtctcctcag

SEQ ID NO: 6669 - DNA, 370 bp, Homo sapiens
caggtgcagctggtgcagtctggggctgaggtgaagaagcctggggcctcagtgaaggtttcctgcaaggcatctggatacaccttcaccagctactatatgcactgggtgcgacaggcccctggacaagggcttgagtggatgggaataatcaaccctagtggtggtagcacaagctacgcacagaagttccagggcagagtcaccatgaccagggacacgtccacgagcacagtctacatggagctgagcagcctgagatctgaggacacggccgtgtattactgtgcgagagagagcctcgttgtagtagtaccagctgctcctatcgatctctggggccgtggcaccctggtcactgtctcctcag

SEQ ID NO: 6670 - DNA, 370 bp, Homo sapiens
gaggtgcagttgttggactctgggggaggcttggtacagcctggggggtccctgagactctcctgtgcagcctctggattcacatttagcagctacgacatgaactgggtccgcctgactccagggaaggggctggagtgggtctcaactattagtggtagcggtggtagcacatactacgcagcctccgtgaagggccggttcaccatatccagagacaattccaagaacacgatgtatctgcaaatgaacaccctgagagccgaggacacggccgtatattactgtgcgaaagaagtcggtggttcggggagttatcaacggtacttcgatgtctggggccgtggcaccctggtcactgtctcctcag

SEQ ID NO: 6671 - DNA, 367 bp, Homo sapiens
gaggtgcagctggtggagtctgggggaggcttggtacagcctggggggtccctgagactctcatgtgcagcctctggattcaccttcagtacctacgacatgcactgggtccgccaagctacaggaaaaggtctggaatgggtctcacttattggtactgctggtgacacatactatccagcctccgtgaagggccgattcaccatctccagagaaaatgccaagaactccttgtatcttcaaatgaacagcctgagagccggggacacggctctgtattactgtgcaagagtaaactatgatagtagtggtttctactggtacttcgatctctggggccgtggcaccctggtcactgtctcctcag

SEQ ID NO: 6672 - DNA, 370 bp, Homo sapiens
caggtgcagctggtgcagtctggggctgaggtgaagaagcctggggcctcagtgaaggtttcctgcaaggcatctggatacaccttcaccagctactatatgcactgggtgcgacaggcccctggacaagggcttgagtggatgggaataatcaaccctagtggtggtagcacaagctacgcacagaagttccagggcagagtcaccatgaccagggacacgtccacgagcacagtctacatggagctgagcagcctgagatctgaggacacggccgtgtattactgtgcgaggccgcgaatttactacggtgactacaccaatgcttttgatatctggggccaagggacaatggtcaccgtctcttcag

SEQ ID NO: 6673 - DNA, 376 bp, Homo sapiens
gaggtgcagctggtggagtctgggggaggcttggtaaagcctggggggtcccttagactctcctgtgcagcctctggtttcactttcagtaacgcctggatgaactgggtccgccaggctccagggaaggggctggagtgggtcggccgtattaaaagcaaaactgatggtgcgacaacagactacgctgcacccgtgaaaggcagattcaccatctcaagagatgattcaaaaaacacgctgtatctgcaaatgaacagcctgaaaaccgaggacacagccgtgtattactgtaccacaagtgtggtagtggtgctaactgctggctggtacttcgatctctggggccgtggcaccctggtcactgtctcctcag

SEQ ID NO: 6674 - DNA, 374 bp, Homo sapiens
ggtgcagctggtggagtctgggggagacttggtaaagcctggggggtcccttagactctcctgtgcagcctctggtttcacttccactgaggcctggatgaactgggtccgccaggctccagggaaggggctggagtgggtcggccgtattacaagcaaaactgatggtgggacaacagaatacgctgcacccgtgaaaggcagattcaccatctcaagagaagattcaaaaaacacgctgtatctgcaaatgaacagcctgaaaaccgaggacacaggcgtgtatttttgtaccacaagtgtggtagtggtggtagctgctggctggtacttcgatctctggggccgtggcaccctggtcactgtctccgcag

SEQ ID NO: 6675 - DNA, 370 bp, Homo sapiens
caggcgcagttggtggagtctgggggaggcgtggtccagcctgggaggtccctaagactctcctgtgcagcctctggattcaccttcagtagctatgctatgcactgggtccgccaggctccaggcaaggggctggagtgggtggcagttatatcatatgatggaagcaataaatactacgcagactccgtgaagggccgcttcaccatctccagagacaattccaagaacacactttatctgcaaatgaacagcctgagagctgaggacacggctgtgtattactgtgcgagagatcccccgggacagtggctggggggagatgcttttgatatctggggccaagggacaacggtcaccgtctcttcag

SEQ ID NO: 6676 - DNA, 374 bp, Homo sapiens
gaggtgcagctggtggagtctgggggaggcttggtacagccagggcggtccctgagactctcctgtacagtttttggattcacctctggcgattatgctttgaactggttccgccaggctccagggggggggctggagtgggtaggtttcattagaagcaaagcttatggtgggacaacagagtacgccgcgtctgtgaaaggcagattcaccatctcaagagatgattccaaaagcagcgcctatctccaaatgaacagcctgaaaaccgaggacacagccgtgtattactgtactagagtgtcgtataccagtggctggtattcagggttctttgaccactggggccagggaaccctggtcaccgtctcctc

SEQ ID NO: 6677 - DNA, 373 bp, Homo sapiens
cagatcaccttgaaggagaccggtcctacgctggtgaaacccacacagaccctcacgctgacctgcctcttctctgggttttcactcaggactaccggagtgggtgtgggctgggtccgtcagcccccaggaaaggccctggagtggcttgcactcatttattgggatgatgataagcgctacagcccatctctgaagagtagactcaccatcaccaaggacgcctccggaaaccaggtggtccttacaatgactaacatggaccctgtggacacagccacatattactgtgtacacagaagccttcaaggaagctggagctacatcccttttgatatctggggccaagggacactggtcaccgtctcttcag

SEQ ID NO: 6678 - DNA, 367 bp, Homo sapiens
caggtgcagctacagcagtggggcgcaggactgttgaagccttcggagaccctgtccctcacctgcgctgtctatggtgggtccttcagtggttactactggagctggatccgccagcccccagggaaggggctggagtggattggggaaatcaatcatagtggaagcaccaactacaacccgtccctcaagagtcgagtcaccatatcagtagacacgtccaagaaccagttctccctgaagctgagctctgtgaccgccgcggacacggctgtgtattactgtgcgagagaacatcgaggtggctggtggaaaaatgatgcttttgatatctggggccaagggacaatggtcaccgtctcttcag

SEQ ID NO: 6679 - DNA, 369 bp, Homo sapiens
caggtccagcttgtgcagtctggggctgaggtgaagaagcctggggcctcagtgaaggtttcctgcaaggcttctggatacaccttcactagctatgctatgcattgggtgcgccaggcccccggacaaaggcttgagtggatgggatggatcaacgctggcaatggtaacacaaaatattcacagaagttccagggcagagtcaccattaccagggacacatccgcgagcacagcctacatggagctgagcagcctgagatctgaagacacggctgtgtattactgtgcgagaggttccttcggagtttactactactactacggtatggacgtctggggccaagggaccacggtcaccgtctcctca

SEQ ID NO: 6680 - DNA, 370 bp, Homo sapiens
caggtgcagctggtggagtctgggggaggcgtggtccagcctgggaggtccctgagactctcctgtgcagcctctggattcaccttcagtagctatggcatgcactgggtccgccaggctccaggcaaggggctggagtgggtggcaattatatcatatgacggaactaataaatactatgcagactccgtgaagggccgattcaccatctccagagacaattccaagaacacgctgtatctgcaaatgaacagcctgagggttgaggacacggcactgtattactgtgtgaaagatttggaatggggtggctacgactgggatggttttgatatctggggccaagggacaatggtcaccgtctcttcag

SEQ ID NO: 6681 - DNA, 280 bp, Homo sapiens
agctatggcatgcactgggtccgccaggctccaggcaaggggctggagtgggtggcagttatatcatatgatggaaataataaatattatgcagactccgtgaagggccgattcaccatctccagagacaattccaagaacacgctgtatcttcaaatgaacagcctgagagctgaggacacggctgtgtattactgtgccctcggaggggtagtggtggtagctgcttttgatgcttttgatatctggggccaagggacaatggtcaccgtctcttcag

SEQ ID NO: 6682 - DNA, 370 bp, Homo sapiens
caggtgcagctggtggagtctgggggaggcgtggtccagcctgggaggtccctgagactctcctgtgcagcctctggattcaccttcagtagttatggcttccactgggtccgccaggctccaggcaaggggctggagtgggtggcagttatatcatatgatggaagtaataaatactatgcagactccgtgaagggccgattcaccatctccagagacaattccaagaacactctgtatctgcaaatgaacagcctgagagctgacgacacggctctgtattactgtgcgaaggatccccccactccctggggtgaccatgaaccttttgatatctggggccaagggacattggtcaccgtctcttcag

SEQ ID NO: 6683 - DNA, 370 bp, Homo sapiens
caggtgcagctggtggagtctgggggaggcgtggtccagcctgggaggtccctgagactctcctgtgcagcctctggattcaccttcagtagctatggcatgcactgggtccgccaggctccaggcaaggggctggagtgggtggcagttatatcatatgatggaagtaataaatactatgcagactccgtgaagggccgattcaccatctccagagacaattccaagaacacgctgtatctgcaaatgaacagcctgagagctgaggacacggctgtgtattactgtgcgaccttaactggaacgacctggggcgctgatgatgcttttgatatctggggccaagggacaatggtcaccgtctcttcag

SEQ ID NO: 6684 - DNA, 370 bp, Homo sapiens
gaggtgcagctggtgcagtctggagcagaggtgaaaaagcccggggagtctctgaagatctcctgtaagggttctggatacagctttaccagttactggatcggctgggtgcgccagatgcccgggaaaggcctggagtggatggggctcatctttcctggtgactctgataccagatacagcccgtctttccaaggccaggtcaccatctcagccgacaagtccatcagcaccgcctatgtgcagtggagcagcctgaaggcctcggacaccgccatgtattactgtgcgattttcttgcttcaggccgcggcggtgactcctacaggggactactggggccagggaaccctggtcaccgtctcctcag

SEQ ID NO: 6685 - DNA, 369 bp, Homo sapiens
gaggtgcagctggtgcagtctggagcagaggtgaaaaagcccggggagtctctgaacatctcctgtaagggttctggatacagctttaccagctactggatcggctgggtgcgccagatgcccgggaaaggcctggagtggatggggatcatctatcctgatgactctgataccagatacagcccgtccttccaaggccaggtcaccatctcagccgacaagtccatcagcaccgcctacctgcagtggagcagcctgaaggcctcggacaccgccatgtattactgtgcgagagaggggactggtacctacttctactactacggtatggacgtctggggccaagggaccacggtcaccgtctcctca

SEQ ID NO: 6686 - DNA, 368 bp, Homo sapiens
aatgcagctggtgcagtctgggcctgacgtgaagaagcctgggtcctcagtgaaggtctcctgcaaggcttctggattcacctttagtacctctgctgtgcagtgggtgcgtcaggctcctggacaacgccttgagtggataggatggatcgtcgttggcagtggtaacacaaacttcgcacagaagttccaggagagagtcaccattaccagggacatgtccacaagcacagcctacatggagctgagcagcctgagatccgaggacacggccgtgtattactgtgcggcaccctattgtagtgctggtagctgcaatgatggttttgatatctggggccaagggacaatgatcaccgtctcttcag

SEQ ID NO: 6687 - DNA, 370 bp, Homo sapiens
caaatgcagctggtgcagtctgggcctgaggtgaagaagcctgggacctcagtgaaggtctcctgcaaggcttctggattcacctttaccagctctgctatgcagtgggtgcggcaggctcgtggacaacaccttgagtggataggatggatcgtcgttggcagtggtaacacaaactacgcacagaagttccaggaaagagccaccattaccagggacatgtccacaagcacagcctacatggagctgagcagcctgagatccgaggacacggccgtgtattactgtgcggccccatactgtagtggtggtacgtgctccgatggttttgatatctggggccaagggacaatggtcaccgtctcttcag

SEQ ID NO: 6688 - DNA, 370 bp, Homo sapiens
caagtgcagctggtgcagtctgggcctgaggtgaagaagcctgggacctcagtgaaggtctcctgcaaggcttctggattcacctttactacctctgctgtgcagtgggtgcgacaggctcgcggacaacgccttgagtggatagggtggatcgtcgttggcagtggtaacacaaactacgcacagaagttccaggagagagtcaccattaccagggacacgtccacaagcacagcctacatggagctgagcagcctgagatccgaggacacggccctgtattactgtgcggcgccatattgtagtggtggtagttgttacgatggttttgatatctggggccaagggacaatggtcaccgtctcttcag

SEQ ID NO: 6689 - DNA, 369 bp, Homo sapiens
gaggtgcagctgttggagtctgggggaggcttggtacagcctggggggtccctgagactctcctgtgcagcctctggattcacctttagcagctatgccatgagctgggtccgccaggctccagggaaggggctggagtgggtctcagctattagtggtagtggtggtagcacatactacgcagactccgtgaagggccggttcaccatctccagagacaattccaagaacacgctgtatctgcaaatgaacagcctgagagccgaggacacggccgtatattactgtgcgaaagtggttagtagtggttactactactactacggtatggacgtctggggccaagggaccacggtcaccgtctcctca

SEQ ID NO: 6690 - DNA, 375 bp, Homo sapiens
gaggtgcagctggtggagtccgggggaggcttggtccagcctggggggtccctgaaactctcctgtgcagcctctgggttcaccttcagtggctctgctatgcactgggtccgccaggcttccgggaaagggctggagtgggttggccgtattagaagcaaagctaacagttacgcgacagcatatgctgcgtcggtgaaaggcaggttcaccatctccagagatgattcaaagaacacggcgtatctgcaaatgaacagcctgaaaaccgaggacacggccgtgtattactgtactgcaactaacaatgaccccccttactactactactacatggacgtctggggcaaagggaccacggtcaccgtctcctca

SEQ ID NO: 6691 - DNA, 366 bp, Homo sapiens
gaggtgcagctggtggagtctgggggaggcttggtccagccgggggggtccctgagactctcctgtgcagcctctggatttaccgtcagcagcaactacatgacctgggtccgccaggctccagggaaggggctggagtgggtctcagttatttataccggtggtagcacatactacgcagactccgtgaagggccgattcaccatctccagagacaattccaagaacacactgtatcttcaaatgaacagcctgagagctgaggacacggctgtgtattactgtgcgagagataatcccaatgactatgatagtagtggttacccggacgtctggggccaagggaccacggtcaccgtctcctca

SEQ ID NO: 6692 - DNA, 373 bp, Homo sapiens
cagatcaccttgaaggagtctggtcctacgctggtgaaacccacacagaccctcacgctgacctgcaccttctctgggttctcactcaacactaatagagtgggtgtgggctggatccgtcagcccccaggaagggccctggagtggcttgcactcatttattgggatgatgataagcgctacagcccatctctgaagagcaggctcaccatcaccaaggacacctccaaaaaccaggtggtccttacactgaccaacatggaccctgtggacacagccacatattactgtgcacgcacgaggccttggtacgatttttggagtggatccacggacgactggggcaaagggaccacggtcaccgtctcctcag

SEQ ID NO: 6693 - DNA, 367 bp, Homo sapiens
gaggtgcagctggtggagtctgggggaggcttggtccagcctggggggtccctgagactctcctgtgcagcctctggattcaccgtcagtagcaactacatgagctgggtccgccaggctccagggaaggggctggagtgggtctcagttatttatagcggtggtagcacatactacgcagactccgtgaagggccgattcaccatctccagagacaattccaagaacacgctgtatcttcaaatgaacagcctgagagctgaggacacggctgtgtattactgtgcgagatgggactacggtgcccccacagcggcctggtacttcgatctctggggccgtggcaccctggtcactgtctcctcag

SEQ ID NO: 6694 - DNA, 369 bp, Homo sapiens
caggtgcagctggtgcagtctggggctgaggtgaagaagcctggggcctcagtgaaggtctcctgcaaggcttctggatacaccttcaccagttatgatatcaactgggtgcgacaggccactggacaagggcttgagtggatgggatggatgaaccctaacagtgctaacacaggctatgcacagaagttccagggcagagtcaccatgaccaggaacacctccataagcacagcctacatggagctgagcagcctgacatctgaggacacggccgtgtattactgtgtaaaagctaacgacgtattgaagaactactactactacatggacgtctggggcaaagggaccacggtcaccgtctcctca

SEQ ID NO: 6695 - DNA, 366 bp, Homo sapiens
caggtgcagctgcaggagtcgggcccaggactggtgaagccttcggagaccctgtccctcacctgcactgtctctggtggctccatcagtagttactactggagctggatccggcagcccccagggaagggactggagtggattgggtatatctattacagtgggagcaccaactacaacccctccctcaagagtcgagtcaccatatcagtagacacgtccaagaaccagttctccctgaagctgagctctgtgaccgctgcggacacggccgtgtattactgtgcgagagattgggggaggagtggctggtaccgttacggtatggacgtctggggccaagggaccacggtcaccgtctcctca

SEQ ID NO: 6696 - DNA, 369 bp, Homo sapiens
gaagtgcagctggtggagtctgggggaggcttggtacagcctggcaggtccctgagactctcctgttcagcctctggattcacctttgataattatggcatgcactgggtccggcaagcttcagggaagggcctggagtgggtctcaggtattaattggaatagtggtagaataggctatgcggactctgtgaagggccgattcaccatctccagagacaacgccaagatgtccctgtttttggaaatgaacagtctgagagttgaggacacggccttgtattactgtgcaaaagatagtggggcatactattttggttcaggaaacatggacgtctggggcaaagggaccacggtcatcgtctcctca

SEQ ID NO: 6697 - DNA, 369 bp, Homo sapiens
gaggtgcagctggtggagtctgggggaggcctggtcaagcctggggggtccctgagactctcctgtgcagcctctggattcaccttcagtagctatagcatgaactgggtccgccaggctccagggaaggggctggagtgggtctcatccattagtagtagtagtagttacatatactacgcagactcagtgaagggccgattcaccatctccagagacaacgccaagaactcactgtatctgcaaatgaacagcctgagagccgaggacacggctgtgtattactgtgcgagaggcctctggttatttggagtggttatttcgggcatggacgtctggggcaaagggaccacggtcaccgtctcctca

SEQ ID NO: 6698 - DNA, 370 bp, Homo sapiens
caggtgcagctgcaggagtcgggcccaggactggtgaagccttcggaaaccctgtccctcacctgcactgtctccagttactccatcagcagtggttactactggggctggatacggcagcccccggggaagggactggagtggattgggagtatctatcatagtgggaacaccaactacaacccgtccctcaagagtcgagtcaccttgtcactagacacgtccaagaaccaattctccctgaagctgagctctgtgaccgccgcagacacggccgtgtattattgtgcgagggaggggagtataactggaactaccaggggcgacttcgatctctggggccgtggcaccctggtcactgtctcctcag

SEQ ID NO: 6699 - DNA, 366 bp, Homo sapiens
gaggtgcagctggtggagtctggaggaggcttggtccagcctggggggtccctgagactctcctgtgcagcctctgggttcaccgtcagtagcaactacatgagctgggtccgccaggctccagggaaggggctggagtgggtctcagttatttatagcggtggtagcacatactacgcagactccgtgaagggccgattcaccatctccagacacaattccaagaacacgctgtatcttcaaatgaacagcctgagagctgaggacacggccgtgtattactgtgcgagagatccccgcgggggggaggatgactactacggtatggacgtctggggccaagggaccacggtcaccgtctcctca

SEQ ID NO: 6700 - DNA, 366 bp, Homo sapiens
gaggtgcagctggtggagtctggaggaggcttgatccagcctggggggtccctgagactctcctgtgcagcctctgggttcaccgtcagtagcaagtacatgagttgggtccgccaggctccagggaaggggctggagtgggtctcagttatttatagcggtggtagcacatactacgcagactccgtgaagggccgattcaccgtctccagagacaatttcaagaacacgctgtatcttcaaatgaacggcctgagagccgatgacacggccgtctattactgtacgaaaggctcaggtggctacaatttatacttctactacatggacgtctggggcaaagggaccacggtcaccgtctcctca

SEQ ID NO: 6701 - DNA, 369 bp, Homo sapiens
gaggtgcagctggtggagtctgggggaggcttcgtacagcctggggggtccctgagactctcctgtgcagcctctggattcaccttcagtacctatagcatgaactgggtccgccaggctccagggaaggggctggagtgggtttcatacattagtagtagtagtgataccatatactacggagactctgtgaagggccgattcaccatctccagagacaacgccaagaactcactgtatctgcaaatgaacagcctgagagccgaggacacggctttgtattactgtgcgaggcactacggtgctaaaagtcactactactacggtatggacgtctggggccaagggaccacggtcaccgtctcctca

SEQ ID NO: 6702 - DNA, 369 bp, Homo sapiens
gaggtgcagctggtggagtctgggggaggcttggtacagcctggggggtccctgagactctcctgtgcagcctctggattcaccttcagtagctatagcatgaactgggtccgccaggctccagggaaggggctggagtgggtttcatacattagtagtagtagtagtaccatatactacgcagactctgtgaagggccgattcaccatctccagagacaacgccaagaactcactgtatctgcaaatgaacagcctgagagccgaggacacggctgtgtattactgtgcgaggatagcagtggaagggtactactactactacggtatggacgtctggggccaagggaccacggtcaccgtctcctca

SEQ ID NO: 6703 - DNA, 369 bp, Homo sapiens
gaggtgcagctggtggagtctgggggaggcttggtaaagcctggggggtccctgagactctcctgtacagcctctggattcaccttcagtagttatagcatcaactgggtccgccaggctccagggaaggggctggagtgggtttcatacattagtagtagtagtagtaccatatactacgcagactctgtggagggccgattcaccatctccagagacaacgccaagaactcactgtatctgcaaatgaacagcctgagagccgaggacacggctgtgtattactgtgcgagggctgtggccattacttcctactactactacggtatggacgtctggggccaagggaccacggtcaccgtctcctca

SEQ ID NO: 6704 - DNA, 372 bp, Homo sapiens
cagctgcagctgcaggagtcgggcccaggactggtgaagccttcggagaccctgtccctcacctgcactgtctctggtggctccatcagcagtagtagttactactggggctggatccgccagcccccagggaaggggctggagtggattgggagtatctattatagtgggagcacctactacaacccgtccctcaagagtcgagtcaccatatccgtagacacgtccaagaaccagttctccctgaagctgagctctgtgaccgccgcagacacggctgtgtattactgtgcgagaggtagctatgacccatactactactactactacatggacgtctggggcaaagggaccacggtcaccgtctcctca

SEQ ID NO: 6705 - DNA, 370 bp, Homo sapiens
caggtacagctggtgcagtctggggctgaggtgaagaagcctggggcctcagtgaaggtttcctgcaaggcatctggatacatcttcaccagctactatatgcactgggtgcgacaggcccctggacaagggcttgagtggatgggaataatcaaccctagtggtggtagcacaagctacgcacagaacttccagggcagagtcaccatgaccggcgacacgtccacgagcacactttacatggaactgagcagcctgaggtctgacgacacggccgtgtattactgtgcgagacccgggatcggtatagtaggacatgatgaatacttccagcactggggccagggcaccctggtcaccgtctcctcag

SEQ ID NO: 6706 - DNA, 370 bp, Homo sapiens
caggtgcagctggtggagtctgggggaggcttggtcaagcctggagggtccctgagactctcctgtgcagcctctggattcaccttcagtgaccactacatgagctgggtccgccaggctcccgggaaggggctggagtggatttcatacattagtagtagtggtagttacacaaactacgcagactctgtgaagggccgattcaccatctccagagacaacgccaagaactcactgtatctgcaaatgaacagcctgagagccgaggacacggccgtgtattactgtgcgaggcgatattgtactggtggtacctgcttccgatacattgactactggggccagggatccctggtcaccgtctcctcag

SEQ ID NO: 6707 - DNA, 370 bp, Homo sapiens
caggtgcagctggtggagtctgggggaggcttggtcaagcctggagggtccctgagactctcctgtgcagcctctggattcaccttcagtgactactacatgagctggatccgccaggctccagggaaggggctggagtgggtttcatacattagcagtattagtacttacacacactacgcagactctgtgaagggccgattcaccatttccagagacaacgccaagaactcactctatctgcaaatgaacagcctgagagccgaggacacggccgtcttttactgtgcgagattcggatattgtagtggtgctagctgctaccaccttgactactggggccagggaaccctggtcaccgtctcctcag

SEQ ID NO: 6708 - DNA, 384 bp, Homo sapiens
caggtgcagctggtggagtctgggggaggcgtggtccagcctgggaggtccctgagactctcctgtgcagcctctggattcaccttcaatagatctcctatgcactgggtccgccaggctccaggcaaggggctggagtgggtggcagttatatcaaacgatggaagtaataaatactacgcagactctgtgaagggccgattaaccatctccagagacaattccaagaacactctgtatctgcaaatgaacagcctgagaactgaggacacggctgtgtattactgtgcgaaagcctggctctttgactggttctcctcaggggtctactacttctacggtttggacgtctggggccaagggaccgcggtcaccgtctcgtca

SEQ ID NO: 6709 - DNA, 384 bp, Homo sapiens
gaagtgcagctggtggagtccgggggaggcttagttcagcctggggggtccctgagactctcctgtgcagcctctggattcaccttcagtagctactggatgcactgggtccgccaagctccagggaaggggctggtgtgggtctcacgtattaatagtgatgggattagcacaggctacgcggactccgtgaagggccgattcaccatctccagagacaacgccaagaacacgctgtatctgcaaatgaacagtctgagagccgaggacacggctgtgtattactgtgccagagtggggctcggaaattttgactggttattttcctactactactactacatggacgtctggggcagagggaccacggtcaccgtctcctca

SEQ ID NO: 6710 - DNA, 384 bp, Homo sapiens
gaagtgcagctggtgcagtctggagcagaggtgaaaaagcccggggagtctctgaggatctcctgtaagggttctggatacagctttaccagctactggatcagctgggtgcgccagatgcccgggaaaggcctggagtggatggggaggattgatcctagtgactcttataccaactacagcccgtccttccaaggccacgtcaccatctcagctgacaagtccatcagcactgcctacctgcagtggagcagcctgaaggcctcggacaccgccatgtattactgtgcgagacacggtatagcagcagctggtaccgtaggaggttacttctactacggtatggacgtctgggcccaagggaccacggtcaccgtctcctca

SEQ ID NO: 6711 - DNA, 384 bp, Homo sapiens
gaggtgcagctggtgcagtctggagcagaggtgaaaaagcccggggagtctctgaagatctcctgtaagggttctggatacacctttaccacctactgggtcggctgggtgcgccaggtgcccgggaaaggcctggagtggatggggatcatctatcctgctaactctgataccagatacagcccgtccttgcaaggccaggtcaccatctcagccgacaagtccatcagcaccgcctacctgcagtggagcagcctgaaggcctcggacaccgccatatattactgtgcgagacatgtacggggagggtttgtggttcagggagttatttcctccggctacatggacgtctggggcaaagggaccacggtcaccgtctcctca

SEQ ID NO: 6712 - DNA, 367 bp, Homo sapiens
caggtgcagctgcaggagtcgggcccaggactggtgaagccttcggagaccctgtccctcacctgcactgtctctggtggctccatcagtagttactactggagctggatccggcagcccccagggaagggactggagtggattgggtatatctattacagtgggagcaccaactacaacccctccctcaagagtcgagtcaccatatcagtagacacgtccaagaaccagttctccctgaagctgagctctgtgaccgccgcagacacggccgtgtattactgtgcgagacatccgtatagcagcagctggtacatcgtcgcttttgatatctggggccaagggacaatggtcaccgtctcttcag

SEQ ID NO: 6713 - DNA, 366 bp, Homo sapiens
caggtgcagctgcaggagtcgggcccaggactggtgaagccctcggagaccctgtccctcacctgcactgtctctggtggctccatcagtacttactactggagctggatccggcagcccccagggaagggactggagtggcttggatatatcttttacagtgggagcaccaactacaacccctccctcaggagtcgagtcaccatatcagtagacacgtccaagaaccagttctccctgaagctgagctctgtgaccgctgcggacacggccgtgtattactgtgcgagagaacgagggtatagcagtggccatcctgatgcttttgatatctggggccaagggacaatggtcaccgtctcttca

SEQ ID NO: 6714 - DNA, 367 bp, Homo sapiens
caggtgcagctgcaggagtcgggcccaggactggtgaagccttcggagaccctgtccctcacctgcactgtctctggtggctccataagtcattactactggagctggatccggcagcccccagggagagaactggagtggattgggtacatctattacagtgggggcaccaactacaatccctccctcaggagtcgagtcaccatatcagtagacacgtccaagaaccagttctccctgaggctgaggtctgtgaccgctgcggacacggccgtgtattactgtgcgagagatagggggtatagcagtggctggcctgatgcttttgatatgtggggccaagggacaatggtcaccgtctcttcag

SEQ ID NO: 6715 - DNA, 384 bp, Homo sapiens
caggtgctgctggtgcagtctggggctgaagtgaagaagcctgggtcctcggtgaaggtctcctgcaaggcttctggaggcaccttcaacagctatgttatcagctgggtgcgacaggcccctggacaagggcttgagtggatgggagggatcatccctatctttggttcagcaaactacgcacagaagttccagggcagagtcacgcttaccgcggacgaatccacgagcacagcctacatggagctgagcagcctgagatctgaggacacggccgtctattactgtgcgaggtggtctagtactctggttcagggatcccccgattactactactactacatggacgtctggggcaaagggaccgcggtcatcgtctcctca

SEQ ID NO: 6716 - DNA, 384 bp, Homo sapiens
caggtgcagctggtgcagtctggggctgaggtgaagaagcctgggtcctcggtgaaggtctcctgcaaggcttctggaggcaccttcagcagcgatgctatcagctgggtgcgacaggcccctggacaagggcttgagtggatgggagggatcatccctctctttgggacaacaaataacgcacagaagttccagggcagagtcacaattaccgcggacgaatccacgagcacggtctacatggagctgagcagcctgagatctgaggacacggccgtatatttctgtgcgagagatcggggatattgtagtggtggtagatgccaagactactactactacatggacgtctggggcaaagggaccacggtcaccgtctcctca

SEQ ID NO: 6717 - DNA, 393 bp, Homo sapiens
caggtacagctgcagcagtcaggtccaggactggtgaagccctcgcagaccctctcactcacctgtgccatctccggggacagtgtctctagcaacagtgctgcttggaactggatcaggcagtccccatcgagaggccttgagtggctgggaaggacatactacaggtccaagtggtataatgattatgcagtatctgtgaaaagtcgaataaccatcaacccagacacatccaagaaccagttctccctgcagctgaactctgtgactcccgaggacacggctgtgtattactgtgcaagagatccacgatattttgactggttaggtaactcctactactactacggtatggacgtctggggccaagggaccacggtcaccgtctcctca

SEQ ID NO: 6718 - DNA, 373 bp, Homo sapiens
cagctgcagctgcaggagtcgggcccaggactggtgaagccttcggagaccctgtccctcacctgcattgtctctggtggctccatcagcagtagtagttactactggggctggatccgccagcccccagggaaggggctggagtggattgggagtatgcattatagtgggaccacctactacaacccgtccctcaagagtcgagtcaccatatcagtagacacgtccaagaatcagttctccctgaagctgagctctgtgaccgcagcggacacggccgtgtattactgtgcgatagatcccgttattaattactatgatagtagtggttattccacgtggggccagggaaccctggtcaccgtctcctcag

SEQ ID NO: 6719 - DNA, 373 bp, Homo sapiens
cagttgcagctgcaggagtcgggcccaggactggtgaagccttcggagactttgtccctcacctgcactgtctctggtggctccaccagcagcaatagttactactggggctgggtccgccaggccccagggaaggggctggagtggattgcgactatctattatagtgggaccacctactacaatccgtccctcaagagtcgagtcaccatatccgcagacacgtccagggaccagttctccctgaggctgagctctgtgaccgccgcagacacggctgtgtattactgtgcgagacagcgatcctggccgtccggtgttgttggaactatagacttctggggccagggaaccctggtcaccgtctcctcag

SEQ ID NO: 6720 - DNA, 373 bp, Homo sapiens
cagctgcagctgcaggaatcgggcccaggactggtgaagccttcggagaccctgtccctcacctgcactgtctctggtgcctccatcagcagtagtaattactactggggctggatccgccagcccccagggaaggggctggagtggattgggagtgtctattatagtgggagcacctactacaacccgtccctcaagagtcgagtctccatatcagtagacaagtccaagaaccagttctccctgaagctgagctctgtgaccgcagcggacacggccgtgtattactgtgcgacccggttttacgatattttgactggttatttttcccttgactactggggccagggaaccctggtcaccgtctcctcag

SEQ ID NO: 6721 - DNA, 373 bp, Homo sapiens
cagctgcagctgcaggagtcgggcccaggactggtgaagccttcggagaccctgtccctcacctgcactgtctctggtggctccatcagcagtagtagttactactggggctggatccgccagcccccagggaaggggctggagtggattgggagtatctattatagtgggagcacctactacaacccgtccctcaagagtcgagtcaccatatcagtagacacgtccaagaaccagttctccctgaagctgagctctgtgaccgcagcggacacggccgtgtattactgtgcgagagattcagacacgtacgtttgggggagttatcgtcacgactactggggccagggaaccctggtcaccgtctcctcag

SEQ ID NO: 6722 - DNA, 370 bp, Homo sapiens
gaggtgcagctgttggagtctgggggaggcttggtacagcctggggggtccctgagactctcctgtgcagcctctggattcacctttagcagctatgccatgagctgggtccgccaggctccagggaaggggctggagtgggtctcagctattagtggtagtggtggtagcacatactacgcagactccgtgaagggccggttcaccatctccagagacaattccaagaacacgctgtatctgcaaatgaacagcctgagagccgaggacacggccgtatattactgtgcgaaagattccccaaccagcagctggttacagtactactttgactactggggccagggaaccctggtcaccgtctcctcag

SEQ ID NO: 6723 - DNA, 370 bp, Homo sapiens
gaggtgcagctgttggagtccgggggaggcttggtacagcttggggggtccctgagactctcctgtgcagcctctggattcacctttagcaactatgccatgagctgggtccgccaggctccagggaaggggctggaatgggtctcatctattagtggtagtggtggtagcacatactacgcagactccgtgaagggccggttcaccatctccagagacaattccaagaacacgctgtatctgcaaatgaacagcctgagagccgaggacacggccgtatattactgtgcgaaaggcgctccgagtgggaattactatgtagtccactttgaccactggggccagggaaccctggtcaccgtctcctcag

SEQ ID NO: 6724 - DNA, 370 bp, Homo sapiens
gaggtgcagctgttggagtctgggggaggcttggtacagcctggggggtccctgagactctcctgtgcagcctctggattcacctttagcagctatgccatgacctgggtccgccaggctccagggaaggggctggagtgggtctcagctattactggtagtggtgggaccacatactacgcagactccgtgaagggccgattcaccatctccagagacaattccaagaagacgctgtatctgcagatgagcagcctgagcgccgaggacacggccgtatattactgtgcgaaagctccgtattactctggttcggggagttattatggagactactggggccagggaaccctggtcaccgtctcctcag

SEQ ID NO: 6725 - DNA, 370 bp, Homo sapiens
gaggtgcagctgttggagtctgggggaggcttggtacagcctggggggtccctgagactctcctgtgcagcctctggattcacctttagcagctatgccatgagctgggtccgccaggctccagggaaggggctggagtgggtctcagcaattagtggtagtggtggtagcacatcctacgcagactccgtgaagggccggttcaccatctccagagacaattccaagaacacgctgtatctgcaaatgaacagcctgagagccgaggacacggccgtatattactgtgcgaaagcttcgcattcactatggttcgggacatccctggtcggctactggggccagggaaccctggtcaccgtctcctcag

SEQ ID NO: 6726 - DNA, 370 bp, Homo sapiens
gaggtgcagctgttggagtctgggggaggcttggtacagcctggggggtccctgagactctcctgtgcagcctctggattcacctttagcagctatgccatgagctgggtccgccaggctccagggaaggggctggagtgggtctcagctattagtggtagtggtggtagcacatactacgcagactccgtgaagggccggttcaccatctccagagacaattccaagaacacgctgtatctgcaaatgaacagcctgagagccgaggacacggccgtatattactgtgcgaaaggggcttgtagtggtggtagctgctacggacctgtgtgggactggggccagggaaccctggtcaccgtctcctcag

SEQ ID NO: 6727 - DNA, 384 bp, Homo sapiens
gaggtgcagctgttggagtctgggggaggcttggtacagcctggggggtccctgagactctcctgtgcagcctctggattcacctttagcagctatgccatgagctgggtccgccaggctccagggaaggggctggagtgggtctcagctattagtggtagtggtggtagcacatactacgcagactccgtgaagggccggttcaccatctccagagacaattccaagaacacgctgtatctgcaaatgaacagcctgagagccgaggacacggccgtatattactgtgcgaaggcggaatgggattttgactggttatcagattactactactactacggtatggacgtctggggccaagggaccacggtcaccgtctcctca

SEQ ID NO: 6728 - DNA, 384 bp, Homo sapiens
gaggtgcacctgttggagtctgggggaggcttggtacagcctggggggtccctgagactctcctgtgcagcctctggattcacgtttagcagctatgccatgaactgggtccgccaggctccagggaaggggctggagtgggtctcagctattagtggcactggtgatagctcatactacgcagactccgtgaagggccggttcaccatctccagagacaattccgagaacacggtgtatctgcaaatgagcagcctgagagccgaggacacggccctttattactgtgcgaaagggggtttacgatattttgactggtgggaaggagactactactactacatggacgtctggggcaaagggaccacggtcaccgtctcctca

SEQ ID NO: 6729 - DNA, 372 bp, Homo sapiens
caggtcaccttgaaggagtctggtcctgcgctggtgaaacccacagagaccctcacgctgacctgcaccgtctctgggttctcactcagcaatgctggaatgggtgtgagctggctccgtcagcccccagggaaggccctggagtggcttgcacacattttttcgaatgacgaaaaatcctacagcacatctctgaagagcaggctcaccatctccgaggacacctccaaaagccaagtggtccttaccatgaccaacatggaccctgtggacacagccacatattactgtgcacggataaggctggacccattggggggctactactacatggacgtctggggcaaagggaccacggtcaccgtctcctca

SEQ ID NO: 6730 - DNA, 384 bp, Homo sapiens
gaggtgcagctggtggagtctgggggaggcctggtcaagcctggggggtccctgagactctcctgtgcagcctctggattcaccttcagtagctatagcatgaactgggtccgccaggctccagggaaggggctggagtgggtctcatccattagtagtagtagtagttacatatactacgcagactcagtgaagggccgattcaccatctccagagacaacgccaagaactcactgtatctgcaaatgaacagcctgagagccgaggacacggctgtgtattactgtgcgagaaggggtggtcgggaggggttcgggccgggggactactactactacggtatggacgtctggggccaagggaccacggtcaccgtctcctca

SEQ ID NO: 6731 - DNA, 171 bp, Homo sapiens
agagacaacgccgagaactcactgtatctgcaaatgaacagcctgagagccgaggacacggctgtgtattactgtgcgaggccgcattaccttgatggtagtggttatcaccgcaactactactacggtatggacgtctggggccaagggaccacggtcaccgtctcctca

SEQ ID NO: 6732 - DNA, 384 bp, Homo sapiens
gaggtgcagctggtggagtctgggggaggtgtggtacggcctggggggtccctgagactctcctgtgcagcctctggattcacctttgatgattatggcatgagctgggtccgccaagctccagggaaggggctggagtgggtctctggtattaattggaatggtggtagcacaggttatgcagactctgtgaagggccgattcaccatctccagagacaacgacaagaactccctgtatctgcaaatgaacagtctgagagccgaggacacggccttgtattactgtgcgagagaatattgtagtgctatcatctgctcacactactactactactacggtatggacgtctggggcccagggaccacggtcaccgtctcctca

SEQ ID NO: 6733 - DNA, 381 bp, Homo sapiens
gaggtgcagctggtggagtctggaggaggcttggtccagcctggggggtccctgagactctcctgtgcagcctctgggttcaccgtcagtagcaactacatgagctgggtccgccaggctccagggaaggggctggagtgggtctcagttatttatagcggtggtagcacatactacgcagactccgtgaagggccgattcaccatctccagacacaattccaagaacacgctgtatcttcaaatgaacagcctgagagctgaggacacggccgtgtattactgtgcgagagataattcgcctgatagtagtggttattaccgctactactactacggtatggacgtctggggccaagggaccacggtcaccgtctcctca

SEQ ID NO: 6734 - DNA, 381 bp, Homo sapiens
gaggtgcagctggtggagtctgggggaggcttggtacagcctggggggtccctgagactctcctgtgcagcctctggattcaccttcagtagctacgacatgcactgggtccgccaagctacaggaaaaggtctggagtgggtctcagctattggtacctctggtgacacatactatgcaggctccgtgaagggccggttcgccatctccagagaaaatgccaagaactccttatatcttcaaatgaacagcctgagagccggggacacggctgtgtattactgtgcaagagggaccgtacattatgcttcagggagcacctcttaccactactactacatggacgtctggggcaaagggaccacggtcaccgtctcctca

SEQ ID NO: 6735 - DNA, 373 bp, Homo sapiens
caggtcaccttgagggagtctggtcctgcgctggtgaaacccacacagaccctcacactgacctgcaccttctctggattctcactcagcactagtggaatgtgtgtgagctggatccgtcagcccccagggaaggccctggagtggcttgcactcgttgattgggatgatgataaatactacagcacatctctgaagaccaggctcaccatctccaaggacacctccaaaaaccaggtggtccttacaatgaccaacatggaccctgtggacacagccacgtattactgtgcacggggcgccattggagcagtggctggtacgggctggttcgacccctggggccagggaaccctggtcaccgtctcctcag

SEQ ID NO: 6736 - DNA, 385 bp, Homo sapiens
caggtgcagctggtgcagtctggggctgaggtgaagaagcctggggcctcagtgaaggtctcctgcaaggcttctggatacaccttcaccgactactatatgcactgggtgcgacaggcccctggacaagggcttgagtggatggggcggatcaaccctaacagtggtggcacaaactgtgcacagaagtttcagggccgggtcaccatgaccagggacacgtccatcagcacagcctacatggagctgagcaggctgagatctgacgacacggccgtgtattactgtgcgagatctagcccagagtatctggttcagggaattattggggactacaactggttcgacccctggggccagggaaccctggtcaccgtctcctcag

SEQ ID NO: 6737 - DNA, 385 bp, Homo sapiens
gaggtgcagctggtggagtctgggggaggcctggtcaagcctggggggtccctgagactctcctgtgcagcctctggattcaccttcagtaattataacatgaactgggtccgccaggctccagggaaggggctggagtgggtctcttccattaatagtagtagtagttacatatactacgcaaactcagtgaagggccgattcaccatctccagagacaacgccaagaactcactgtatctgcaaatgaacagcctgagagccgaggacacggctgtgtattactgtgcgagagaaagtccactcggtatctccatttttggagtggcgggatggaactggttcgacccctggggccagggaaccctggtcaccgtctcctcag

SEQ ID NO: 6738 - DNA, 385 bp, Homo sapiens
gaggtgcagctggtgcagtctggagcagaggtgaaaaagcccggggagtctctgaagatctcctgtaagggttctggatacagctttaccagctactggatcggctgggtgcgccagatgcccgggagaggcctggagtggatggggatcatctatcctggtgactctgataccagatacagcccgtccttcgaaggccaggtcaccatctcagccgacaagtccatcagcgccgcctacctgcagtggagcagcctgaaggcctcggacaccgccatgtattactgtgcgagaagtaatatcgggtatagcagcagctggcaaaccagtctacgaaactggttcgacccctggggccagggaaccctggtcaccgtctcctcag

SEQ ID NO: 6739 - DNA, 382 bp, Homo sapiens
caggtgcagctacagcagtggggcgcaggactgttgaagccttcggagaccctgtccctcacctgcgctgtctatggtgggtccttcagtggttactactggagctggatccgccagcccccagggaaggggctggagtggattggggaaatcaatcatagtggaagcaccaactacaacccgtccctcaagagtcgagtcaccatatcagtagacacgtccaagaaccagttctccctgaagctgagctctgtgaccgccgcggacacggctgtgtattactgtgcgagaggcgataccgctcggagccggctacggtggcgccggggagtagatgcttttgatatctggggccaagggacaatggtcaccgtctcttcag

SEQ ID NO: 6740 - DNA, 382 bp, Homo sapiens
caggtgcagctgcaggagtcgggcccaggactggtgaagccttcggagaccctgtccctcacctgcactgtctctggtgccttcatcagtagttactactggagctggatccggcagcccccagggaagggactggagtggattgggcatatctattacagtgggagcaccaactacaacccctccctcaagagtcgcgtcaccatatctgcagacacgtccaagaaccagttctccctgaagctgagctctgtgaccgctgcggacacggccgtgtattactgtgcgagatggggcttgggggcgtattcctttggttcagggagtccccctggggctttagatatctgggcccaagggacaatggtcaccgtctcttcag

SEQ ID NO: 6741 - DNA, 387 bp, Homo sapiens
caggtgcagctgcaggagtcgggcccaggactggtgaagccttcggagaccctgtccctcacctgcactgtctctggtggctccgtcagcagtggtagctactactggagttggatccggcagcccccagggaagggactggagtggattgggtatatctattacagtgggagcaccaactacaacccctccctcaagagtcgagtcaccatatcagtagacacgtccaagaatcagttctccctgaagctgagttctgtgaccgctgcggacacggccgtgtattactgtgcgagagatcggggggtagagcagctcgacgtccggttctacttcttctactacatggacgtctggggcaaagggaccacggtcaccgtctcctca

SEQ ID NO: 6742 - DNA, 385 bp, Homo sapiens
gaggtgcagctggtgcagtctggagcagaggtgaaaaagcccggggagtctctgaagatctcctgtaagggttctggatacagctttaccagctactggatcggctgggtgcgccagatgcccgggaaaggcctggagtggatggggatcatctatcctggtgactctgataccagatacagcccgtccttccaaggccaggtcaccatctcagccgacaagtccatcagcaccgcctacctgcagtggagcagcctgaaggcctcggacaccgccatgtattactgtgcgagacgaggggagtattgtagtggtggtagctgctatcgcttcgattccgcttttgatatctggggccaagggacaatggtcaccgtctcttcag

SEQ ID NO: 6743 - DNA, 385 bp, Homo sapiens
caggttcagctggtgcagtctggagctgaggtgaagaagcctggggcctcagtgaaggtctcctgcaaggcttccggttacacctttaccagctttggtatcagctgggtgcgacaggcccctggacaagggcttgagtggatgggatggatcagcgcttacaatggtaacacaaactatgcacagaaattccagggcagagtcaccatgaccacagacacatccacgagcacagcctacctggagctgaggagcctgagatctgacgacacggccgtgtattactgtgcgagagtccccctttattatgataggagtggttattacggagggagtgatgcttttaatatctggggccaagggacaatggtcaccgtctcttcag

SEQ ID NO: 6744 - DNA, 385 bp, Homo sapiens
caggtacacctggtggagtctgggggaggcgtggtccagcctgggaggtccctgagactctcctgtgtagcctctggatttaccttcagtgcctatgctctgcactgggtccgccaggctccaggccaggggctggagtgggtgacagttatatcaaatggtggaagtaacaaatactacgcagactccgtgaagggccgattcaccatctccagagacaattccaagaacacgctgtatctgcaaatgaacagtctgagagctgaggacacggctgtatattactgtgcgagatcccttcggggatcttgtagtggtgggagctgtctggatcttcccttcctccagcactggggccagggcaccctggtcaccgtctcctcag

SEQ ID NO: 6745 - DNA, 385 bp, Homo sapiens
gaggtgcagctggtgcagtctggagcagaggtgaaaaagcccggggagtctctgaagatctcctgtaggggttctggatacatctttaccaactactggatcggctgggtgcgccagatgcccgggaaaggcctggagtggatggggatcatctatcctggtgactctgataccagatacagcccgtccttccaaggccaggtcaccatctcagccgacaagtccatcagcaccgcctacctgcagtggagcagcctgaaggcctcggacaccgccatgtatttctgtgcgaggctggaatcccccgggtatagcggtggctggtaccggggagactggtacttcgatctctggggccgtggcaccctggtcactgtctcctcag

SEQ ID NO: 6746 - DNA, 384 bp, Homo sapiens
caaatgcagctggtgcagtctgggcctgaggtgaagaagcctgggacctcagtgaaggtctcctgcaaggcttctggattcacctttactagctctgctatgcagtgggtgcgacaggctcgtggacaacgccttgagtggataggatggatcgtcgttggcagtggtaacacaaactacgcacagaagttccaggaaagagtcaccattaccagggacatgtccacaagcacagcctacatggagctgagcagcctgagatccgaggacacggccgtgtattactgtgcggcagagagcagatattgtagtggtggtagctgctactactactactacggtatggacgtctggggccaagggaccacggtcaccgtctcctca

SEQ ID NO: 6747 - DNA, 385 bp, Homo sapiens
gaggtgcagctgttggagtctgggggaggcttcgtacagccgggggggtccctgagactctcctgtgcagcctctggattcacctttagcagctatgccatgagctgggtccgccaggctccagggaaggggctggagtgggtctcagctattagtggtagtggtggtagcacatactacgcagactccgtgaagggccggttcaccatctccagagacaattccaagaacacgctgtatctgcaaatgagcagcctgagagtcgaggacacggccgtatatcactgtgcgaaagaccgcacccgcgtcctcacaaactatggtgaccatggctactggtacttcgatctctggggccgtggcaccctggtcactgtctcctcag

SEQ ID NO: 6748 - DNA, 385 bp, Homo sapiens
gaggtgcagctggtggagtctgggggaggcttggtacagcctggggggtccctgagactctcctgtgcagcctctggattcaccttcagtagctatagcatgaactgggtccgccaggctccagggaaggggctggagtgggtttcatacattagtagtagtagtagtaccatttactacgcagactctgtgaagggccgattcaccatctccagagacaacgccaagaactcactgtatctgcaaatgaacagcctgagagccgaggacacggctgtgtattactgtgcgtctccctccaggggctcggggaagcttactatggttcggggagttccagactttgactactggggccagggaaccctggtcaccgtctcctcag

SEQ ID NO: 6749 - DNA, 388 bp, Homo sapiens
cagctgcgactgcaggagtcgggcccaggactggtgaggccttcggagaccctgtccctcacctgcactgtctctggtggctccaccagcagtagcagttactactggggctggatccgccagcccccagggaaggggctggagtggattgggagtatctattatagtgggagcacctactacaacacgtccctcaagagtcgagtcaccatatcaatagacacgtccaagaaccagttctccctgaagctgacctctgtgaccgcagcggacacggccgtgtattactgtgcgacagggccccctttttatatggttcggggagttattattcggtactggtacttcgatctctggggcagtggcacactggtcactgtctcctcag

SEQ ID NO: 6750 - DNA, 388 bp, Homo sapiens
cagctgcagttgcaggagtcgggcccaggactggtgaagccttcggagaccctgtccctcacctgcactgtctctggtggctccgtcagcagcagtagttattactggggctggatccgccagcccccagggaaggggctggaatggattggcagtatctattatagtgggagcacctactacaacccgtccctcaagagtcgagtcaccatatcagtagacacgtccaagaatcagttctccctgaagctgaactctgtgaccgcagcggacacggccgtgtatttctgtgcgggcaacccccccaaatacctgtatagcagcagctggggtagctactggtacttcgatctctggggccgtggcaccctggtcactgtctcctcag

SEQ ID NO: 6751 - DNA, 388 bp, Homo sapiens
cagctgcagctacaggagtcgggcccaggactggtgaagccttcggagaccctgtccctcacctgcactgtctctggtggctccatcagcagtagtagttacttctggggctggatccgccagcccccagggaaggggctggagtggattggaagtatcttttatagtgggagcacctactacaacccgtccctcaagagtcgagtcaccatgtcagtagacacgtccaagaaccagttctccctgaagttgagctctgtgaccgcagcggacacggccgtgtattactgtgcgggccacctagtttctatggttcggggagttttcaaagtcagctactggtacttcgatctctggggccgtggcaccctggtcactgtctcctcag

SEQ ID NO: 6752 - DNA, 381 bp, Homo sapiens
caggtgcagctacagcagtggggcgcaggactgttgaagccttcggagaccctgtccctcacctgcgctgtctatggtgggtccttcagtggttactactggagctggatccgccagcccccagggaaggggctggagtggattggggaaatcaatcatagtggaagcaccaactacaacccgtccctcaagagtcgagtcaccatatcagtagacacgtccaagaaccagttctccctgaagctgagctctgtgaccgccgcggacacggctgtgtattactgtgcgaggtatccctatcctgtcccccccagcttttccgcctctttccgtcggggtatggacgtctggggccaagggaccacggtcaccgtctcctca

SEQ ID NO: 6753 - DNA, 385 bp, Homo sapiens
gaggtgcagctggtggagtctgggggaggcctggtcaagcctggggggtccctgagactctcctgtgcagcctctggattcaccttcagtagctatagcatgaactgggtccgccaggctccagggaaggggctggagtgggtctcatccattagtagtagtagtagttacatatactacgcagactcagtgaagggccgattcaccatctccagagacaacgccaagaactcactgtatctgcaaatgaacagcctgagagccgaggacacggctgtgtattactgtgcgagagtcagatattgtagtagtaccagctgctatggtggagtagggtactactttgactactggggccagggaaccctggtcaccgtctcctcag

SEQ ID NO: 6754 - DNA, 385 bp, Homo sapiens
caggtgcagttggtgcagtctggggctgaggtgaagaagcctggggcctcagtgaaggtttcctgcaaggcatctggatacaccttcaccagttattatatgcactgggtgcgacaggcccctggacaagggcttgagtggatgggaataatcaaccctagtggtggtagtacaagctacgcacagaagttccagggcagagtcaccatgaccagggacacgtccacgagcacagtctacatggagctgagcagcctgagatctgaggacacggccgtgtattactgtgcgagagaggcaaataggggccgacacacttacgcagtgggtgatacgggtgcctttgactactggggccagggaaccctggtcaccgtctcctcag

SEQ ID NO: 6755 - DNA, 383 bp, Homo sapiens
ggtgcaactgttggagtctgggggaggcataccgcagcctggggggtccctgacactctcctgtgcagcctctggaatcacctttagcagctatgccatgaactgggtccgccaggctccagggaaggggctggagtggctttcagcaattagtggttctggtgttaccacatactacgcagactccgtgaagggccggttcaccatctccagagacaattccaagaacacgctgtatctgcaaatgaccggcctgagagccgaggacacggcccgatactactgtgcgaaaggccacccgagagattactttggttcggggagccaaaagccatactactttgactactggggccagggaaccctggtcaccgtctcctcag

SEQ ID NO: 6756 - DNA, 385 bp, Homo sapiens
gaggtgcagttgctggagtctgggggaggcttggtacagcctggggggtccctgagactctcctgtgcagcctctggattcacctttagcagctatgccatgagctgggtccgccaggctccagggaaggggctggagtgggtctcatctattagtggtggtggttataacacatactacgcagactccgtgaggggccggttcaccatctccagagacaattccaagaacacgctgtatctgcaaatgaacagcctgagagccgaggacacggccgtatattactgtgcgaaagatgactattgtactggtgatgtatgctatttggcagtggctggtaactttgactactggggccagggaaccctggtcaccgtctcctcag

SEQ ID NO: 6757 - DNA, 385 bp, Homo sapiens
gaggtgcagctgttggagtctgggggaggcttggtacagcctggggggtccctgagactctcctgtgcagcctctggattcacctttagcggctatgccatgagctgggtccgccaggctccagggagggggctggagtgggtctcagctattagtggtagtggtgttagcacacactacgcagactccgtgaagggccggttcaccatctccagagacaattccaagaacacactgtatctgcaaatgaacagcctgagagccgaggacacggccgtatattactgtgcgaaagtatcggatttaacctatttcgatattttgactggttatccctactcctttgactactggggccagggaaccctggtcaccgtctcctcag

SEQ ID NO: 6758 - DNA, 382 bp, Homo sapiens
caggtgcagctgcaggagtcgggcccaggactggtgaagccttcggagaccctgtccctcacctgcactgtctctggtggctccatcagtagttactactggagctggatccggcagcccccagggaagggactggagtggattgggtatatctattacagtgggagcaccaactacaacccctccctcaagagtcgagtcaccatatcagtagacacgtccaagaaccagttctccctgaagctgagctctgtgaccgctgcggacacggccgtgtattactgtgcgaggggtcccctcaagaattactatgatagtagtggttattttgacccatactttgactactggggccagggaaccctggtcaccgtctcctcag

SEQ ID NO: 6759 - DNA, 361 bp, Homo sapiens
gaggtgcagctggtggagtctgggggcggcttggtacagcctggggggtccctgagactctcctgtgcagcctctggattcaccttcagtaactacgacatgcactgggtccgccaacctccaggaaaaggtctggagtgggtctcagctattggtacttctggtgacacatactatccagactccgtgaagggccgattcaccatctccagagaaaatgccaagaactccttgtatcttcaaatgaacagcctgagagccggggacacggctatctattactgtgcaagaggtgacagcagtggcttgttttactactttgactactggggccagggaaccctggtcaccgtctcctcag

SEQ ID NO: 6760 - DNA, 388 bp, Homo sapiens
cagctgcagctgcaggagtcgggcccaggactggtgaagccttcggagaccctgtccctcacctgcactgtctctggtggctccatcagcagtagtagttactactggggctggatccgccagcccccagggaaggggctggagtggattgggagtatctattatagtgggagcacctactacaacccgtccctcaagagtcgagtcaccatatccgtagacacgtccaagaaccagttctccctgaagctgagctctgtgaccgccgcagacacggctgtgtattactgtgcgagacggacccagtattacgatttttggagtggttacccgccccccctctgttttgatatctggggccaagggacaatggtcaccgtctcttcag

SEQ ID NO: 6761 - DNA, 364 bp, Homo sapiens
caggtccagcttgtgcagtctggggctgaggtgaagaagccgggggcctcagtgaagatttcctgcagggcttctggatataccttcactaagtatgtcatccattgggtacgccaggcccccggacaaagccttgagtggatgggatggaccaacgctggcaatggtgacacaagatattcacagaacttccagggcagagtcaccattaacagggacacatccacgagcacagtctacatggagctgagcagcctgacatctgaagacacggctgtatattattgtgcgagagatctgccggatgatcctaattgttactttgactactggggccagggaaccctggtcaccgtctcctcag

SEQ ID NO: 6762 - DNA, 364 bp, Homo sapiens
gaggtgcagctggtggagtctgggggaggtgtggtacggcctggggggtccctgagactctcctgtgcagcctctggattcacctttgatgattatgccatgagctgggcccgccaagctccagggaaggggctggagtgggtctctggtattaattggaatggtgtaagcacaggttatgcagagtctgtgaagggccgattcaccatctccagagacaacgccaagaactccctgtatctgcaaatgaacagtctgagagccgaggacacggccttgtattactgtgcgagagtaggcggactttcgtgggagctacatcttgactactggggccagggaaccctggtcaccgtctcctcag

SEQ ID NO: 6763 - DNA, 364 bp, Homo sapiens
gaggtgcagctggtggagtccgggggaggcgtagttcagcctggggggtccctgagactctcctgtgcagcctctggattcaccttcagtatctactggatgcactgggtccgccaagctccagggaaggggctggtgtgggtctcacgtattaatagagatgggagtagcacaagctacgcggactccgtgaagggccgattcaccatctccagagacaacgccaagaacacgctgtatctgcaaatgaacagtctgagagccgaggacacggctgtgtattactgtgcaagagagtcggcgactacggtgactccggatattgactactggggccagggaaccctggtcaccgtctcctcag

SEQ ID NO: 6764 - DNA, 364 bp, Homo sapiens
gaggtgcagctggtggagtctgggggaggcttggtccagcctggggggtccctgagactctcctgtgcagcctctggattcacctttagtagctattggatgacctgggtccgccaggctccagggaaggggctggagtgggtggccaacatagaccaagatggaagtgaggaatactatggggactctgtgatgggccgattcaccatctccagagacaacgccaagaactcactgtatctgcaaatgaacagcctgagagccgaggacacggctgtgtattactgtgcgagagatctggatgtgtatagcagctcgccaggggactgctggggccagggaaccctggtcaccgtctcctcag

SEQ ID NO: 6765 - DNA, 364 bp, Homo sapiens
gaggtgcagctggtggagtctgggggaggcttggtccagcctggggggtccctgagactctcctgtgcagcctctggattcagcttcagtagctatgctatgcactgggtccgccaggctccagggaagggaccggaatatgtttcatctattactagtgatgggggtggcacattttattcagactctgtgaagggcagattcaccatctccagagacaattccaagaacacactgtatcttcaaatgggcagcctgagagctgaggacatggctgtatatttctgtgcgagagaagcatttgagactacggtggtgatccttgactactggggccagggaaccctggtcaccgtctcctcag

SEQ ID NO: 6766 - DNA, 385 bp, Homo sapiens
gaggtgcagctggtggagtctgggggaggcttggtacagcctggggggtccctgagactctcctgtgcagcctctggattcaccttcagtagctatagcatgaactgggtccgccaggctccagggaaggggctggagtgggtttcatacattagtagtagtagtagtaccatatactacgcagactctgtgaagggccgattcaccatctccagagacaacgccaagaactcactgtatctgcaaatgaacagcctgagagccgaggacacggctgtgtattactgtgcacggattactatggttcggggagttaaccgacttaaactcgaggctgatgcttttgatatctggggccaagggacaatggtcaccgtctcttcag

SEQ ID NO: 6767 - DNA, 364 bp, Homo sapiens
gaggtgcagctgttggagtctgggggaggcttggtacagcctggggggtccctgagactctcctgtgcagcctctggattcatctttagcaactatgccatgagctgggtccgccaggctccagggaaggggctggagtgggtctcaactattagttatagtggtggtagcacatactacgcagactccgtgaagggccggttcaccatctccagagacaattccaagaacacgctgtttctgcaaatgaacagcctgagagccgaggacacggccgtatattactgtgcgaccggctacggtgactacggggactggtacttccatctctggggccgtggcaccctggtcactgtctcctcag

SEQ ID NO: 6768 - DNA, 364 bp, Homo sapiens
gaggtgcagctggtggagtctgggggaggcttggtccagcctggggggtccctgagactctcctgtgcagcctctggattcaccttcagtaactatgctatgcactgggtccgccaggctccagggaagggactggaatatatttcaactattagtagtaatggggatagcacatattatgcaaactctgtgaagggcagattcaccatctccagagacaattccaagaacacgctgtatcttcaaatgggcaggctgcgagctgaggacatggctgtgtattactgtgcgagagagcccaggctaccgtcgttggggtacttcgatctctggggccgtggcaccctggtcactgtctcctcag

SEQ ID NO: 6769 - DNA, 364 bp, Homo sapiens
gaggtgcagctggtggagtctgggggaggcttggtccagcctggggggtccctgagactctcctgtgcagcctctggattcacctttagtagctattggatgagctgggtccgccaggctccagggaaggggctggagtgggtggccaacataaagcaagatggaagtgagaaatactatgtggactctgtgaagggccgattcaccatctccagagacaacgccaagaactcactgtatctgcaaatgaacagcctgagagccgaggacacggctgtgtattactgtgcgagaggccaccaggtgtgggactactggtacttcgatctctggggccgtggcaccctggtcactgtctcctcag

SEQ ID NO: 6770 - DNA, 361 bp, Homo sapiens
gaggtgcagctggtggagtctgggggaggcttggtacagcctggggggtccctgagactctcctgtgcagcctctggattcaccttcagtagctacgacatgcactgggtccgccaagctacaggaaaaggtctggagtgggtctcagttattggtactggtggtgacacatactatccagactccgtgaagggccgattcaccatctccagagaaaatgccaagaactccttgtatctacaaatgaacagcctgagagccggggacacggctgtgtattactgtgcaagaggggaattcagggagttagttgggtacttcgatctctggggccgtggcaccctggtcactgtctcctcag

SEQ ID NO: 6771 - DNA, 385 bp, Homo sapiens
caggtgcagctggtggagtctgggggaggcgtggtccagcctgggaggtccctgagactctcctgtgcaacctctggatttaccttcagtagctatggcatgcactgggtccgccaggctccaggcaaggggctggaatgggtggcagttatatcatatgatggaagtaataaatactatgcagactcagtgaagggccgattcaccatctccagagacaattccaagaacacgctgtatatgcaagtgatcagcctgagagctgaggacacggctgtgtactactgtgcgaaatccttgggtccatattgtagtggtggtggtagctgcttcccaacaacaattgattactggggccagggaaccctggtcaccgtctcctcag

SEQ ID NO: 6772 - DNA, 384 bp, Homo sapiens
caggtgccggtggtggagtctgggggaggcgtggtccagcctgggaggtccctgagactctcttgtgcagcctctggattcgttttcagcagctatggcatgcactgggtccgccaggctccaggcagggggctggagtgggtggcagttatatcacatgatggagatcttaaattttattcagactccgtgaagggccgattcaccgtctccagagacaattccaagaacacgctgtatctgcaaatggacagcctgcgagttggagacacggctacttattactgtgcgagagatactcccccatcgtttctgggggtcttatcgactttccaagcctaccttgacttctgcggccagggaacccaggtcaccgtctcctca

SEQ ID NO: 6773 - DNA, 385 bp, Homo sapiens
caggtgcagctggtggagtctgggggaggcgtggtccagcctgggaggtccctgagactctcctgtgcagcctctggattcaccttcagtagctatgctatgcactgggtccgccaggctccaggcaaggggctggagtgggtggcagttatatcatatgatggaagtaataaatactacgcagactccgtgaagggccgattcaccatctccagagacaattccaagaacacgctgtatctgcaaatgaacagcctgagagctgaggacacggctgtgtattactgtgcgaggagcatacagtatgattacgtttgggggagttatcgttctatcccattctttgactactggggccagggaaccctggtcaccgtctcctcag

SEQ ID NO: 6774 - DNA, 298 bp, Homo sapiens
agtagctatgctatgcactgggtccgccaggctccaggcaaggggctggagtgggtggcagttatatcatatgatggaagtaataaatattacgcagactccgtgaagggccgattcaccatctccagagacaattccaagaacacgctgtatctgcaaatgaacagcctgagaggtgaggacacggctgtgtatcactgtgcgagaggttcgattggggatctagtagtaccagctgctatccgcgacgttcgttttgaccagtggggccagggaaccctggtcaccgtctcctcag

SEQ ID NO: 6775 - DNA, 364 bp, Homo sapiens
gaggtgcagctggtgcagtctggagcagaggtgaaaaagcccggggagtctctgaagatctcctgtaagggttctggatacagctttaccagctactggatcgcctgggtgcgccagatgcccgggaaaggcctggagtggatggggatcatctatcctggtgactctgataccagatacagcccgtccttccaaggccaggtcaccatctcagccgacaagtccatcagcaccgcctacctgcagtggagcagcctgaaggcctcggacaccgccatgtattactgtgcgagactcttgggggagctactgataaactggttcgacccctggggccagggaaccctggtcaccgtctcctcag

SEQ ID NO: 6776 - DNA, 364 bp, Homo sapiens
gaggtgcagctgttggagtctgggggaggcttggtacagcctggggggtccctgagactctcctgtgcagcctctggattcacctttagcagctatgccatgagctgggtccgccaggctccagggaaggggctggagtgggtctcagctattagtggtagtggtggtagcacatactacgcagactccgtgaagggccggttcaccatctccagagacaattccaagaacacgctgtatctgcaaatgaacagcctgagagccgaggacacggccgtatattactgtgcgaaagataagtggctacgaccggggaactggttcgacccctggggccagggaaccctggtcaccgtctcctcag

SEQ ID NO: 6777 - DNA, 364 bp, Homo sapiens
gaggtgcagctgttggagtctgggggaggcttggtacagcctggggggtccctgagactctcctgtgcagcctctggattcacctttagcagctatgccatgagctgggtccgccaggctccagggaaggggctggagtgggtctcagctattagtggtagtggtggtagcacatactacgcagactccgtgaagggccggttcaccatctccagagacaattccaagaacacgctgtatctgcaaatgaacagcctgagagccgaggacacggccgtatattactgtgtgccacgtcacgatttttggagatacaactggttcgacccctggggccagggaaccctggtcaccgtctcctcag

SEQ ID NO: 6778 - DNA, 364 bp, Homo sapiens
caggtgcagctggtggagtctgggggaggcgtggtccagcctgggaggtccctgagactctcctgtgcagcctctggattcaccttcagtagctatgctatgcactgggtccgccaggctccaggcaaggggctggagtgggtggcagttatatcatatgatggaagcaataaatactacgcagactccgtgaagggccgattcaccatctccagagacaattccaagaacacgctgtatgtgcaaacgaacagcctgagagctgaggacacggctgtgtattactgtgcgagaagtggttcagggagttattacaactggttcgacccctggggccagggaaccctggtcaccgtctcctcag

SEQ ID NO: 6779 - DNA, 364 bp, Homo sapiens
caggtgcagctggtggagtctgggggaggcgtggtccagcctgggaggtccctgagactctcctgtgcagcctctggattcaccttcagtagctttgctatacactgggtccgccaggctccaggcaaggggctggagtgggtggcagttatttcatatgatggaagcaataaatactacgcagactccgtgaagggccgattcaccatctccagagacaattccaagaatacgctgtatttgcaaatgaatagcctgagagctgaggacacggctatgtattactgtgcgagagcctcctcggggggatattttacatcgttcgacccctggggccagggaaccctggtcaccgtctcctcag

SEQ ID NO: 6780 - DNA, 361 bp, Homo sapiens
caggtccagctgcaacagtggggcgcaggactattgaagccctcggagaccctgtcccgcacctgtgctgtctatggtgcatccttcagtggttactactggacctggatccgccagtccccagggaaggggctggagtggattggggaaatcaatgagattggagtcaccaactacaacccgtccctcaagagtcgagtcaccatatcagtggacacctccaagaaacagttctccctcaacctgaagtctgtgaccgccgcggacacggctatttattactgtgcgagagcccctttcattgactattatcaaggccttgacttctggggcccggggaccctggtcaccgtctcctcag

SEQ ID NO: 6781 - DNA, 364 bp, Homo sapiens
caggtgcagctggtgcagtctggggctgaggtgaagaagcctggggcctcagtgaaggtctcctgcaaggcttctggatacaccttcaccggctactatatgcactgggtgcgacaggcccctggacaagggcttgagtggatgggacggatcaaccctaacagtggtggcacaaactatgcacagaagtttcagggcagggtcaccatgaccagggacacgtccatcagcacagcctacatggagctgagcaggctgagatctgacgacacggtcgtgtattactgtgcgagggggactacggtgactacggatgatgcttttgatatctggggccaagggacaatggtcaccgtctcttcag

SEQ ID NO: 6782 - DNA, 367 bp, Homo sapiens
caggtcaccttgaaggagtctggtcctgcgctggtgaaacccacacagaccctcacactgacctgcaccttctctgggttctcactcagcactagtggaatgcgtgtgagctggatccgtcagcccccagggaaggccctggagtggcttgcacgcattgattgggatgatgataaattctacagcacatctctgaagaccaggctcaccatctccaaggacacctccaaaaaccaggtggtccttacaatgaccaacatggaccctgtggacacagccacgtattactgtgcacgcataagcgggaggacggacattgatgcttttgatatctggggccaagggacaatggtcaccgtctcttcag

SEQ ID NO: 6783 - DNA, 361 bp, Homo sapiens
caggtgcagctacagcagtggggcgcaggactgttgaagccctcggagaccctgtccctcacctgcggtgtctatggtgggtccctcagtgtttactactggagctggatccgccagcccccagggaaggggctggagtggattggggaaatcaatcatagtggaagcaccaactacaacccgtccctcaagagtcgagtcaccatatcagtagacacgtccaagaaccagttctccctgaaactgagctctgtgaccgccgcggacacggctatgtattactgtgcgagagtgggcttgatggacgagggggctgcttttgatatctggggccaagggacaagggtcaccgtctcttcag

SEQ ID NO: 6784 - DNA, 367 bp, Homo sapiens
caggtgcagctgcaggagtcgggcccaggactggtgaagccttcacagaccctgtccctcacctgtagtgtctctggtggctccatcagcagtggtgatttctactggaattggatccgccagccccccgggaagggcctggagtggattgggtacatctattacagtgggagcacctactacaacccgtccctcaagagtcgcgttaccgtatcagtagacacgtccaagaaccagttctccctgaagctgaactctgtgactgccgcagacacggccgtgtattactgtgccagagcccggtatagcagcagctggtggtcttttgatatctggggccaagggacaatggtcaccgtctcttcag

SEQ ID NO: 6785 - DNA, 364 bp, Homo sapiens
caggtgcagctggtggagtctgggggaggcgtggtccagcctgggaggtccctgagactctcctgtgcagcctctagattcaccttcagtcactatggcatgcactgggtccgccaggctccaggcaaggggctggagtgggtggcagttatatcgtatgatggaagtaataaatactttgcagactccgtgaagggccgattcaccatctccagagacaattccaagaacacgctgtatctgcaaatgaacagcctgagacctgaggacacggctgtgtattactgtgcgagacaggggcagcagcaactgggttatgcttttgatatctggggccaagggacaatggtcaccgtctcttcag

SEQ ID NO: 6786 - DNA, 364 bp, Homo sapiens
caggtgcagctggtggagtctgggggaggcgtggtccagcctgggaggtccctgagactctcctgtgcagcctctggattcaccttcagtagctatgctatgcactgggtccgccaggctccaggcaaggggctggagtgggtggcagttatatcatatgatggaagtaataaatactacgcagactccgtgaagggccgattcaccatctccagagacaattccaagaacacgctgtatctgcaaatgaacagcctgagagctgaggacacggctgtgtattactgtgcgagatccggttcggggagttaccttggcgcttttgatatctggggccaagggacaatggtcaccgtctcttcag

SEQ ID NO: 6787 - DNA, 364 bp, Homo sapiens
caggtgcaactggtggagtctgggggaggcgtggtccagcctgggaggtccctgagactttcctgtgcagcctctggattcaccttcagtacctttgctatatactgggtccgccaggctccaggcaaggggctggagtgggtggcacttatatcatatgatggatttaataaatactacgcagactccgtgaagggccgattcaccatctccagggacaattccaagaacacgctacatctgcaaatgaacagcctgagagctgacgacacggctgtgtattactgtgcgaggacgtctagtgggagctactttgatgcttttgatttctggggccaagggacaatggtcaccgtctcttcag

SEQ ID NO: 6788 - DNA, 364 bp, Homo sapiens
caggtgcagctggtggagtctgggggaggcgtggtccagcctgggaggtccctgagactctcctgtgcagcctctggattcagcttcagtagctatggcatgcactgggtccgccaggctccaggcaaggggctggagtgggtggcagttatatcatatgatggaagtaataaatactatgcagactccgtgaagggccgattcaccatctccagagacaattccaaaaacacgctgtatctgcaaatgaacagcctgagagctgaggacacggctgtgtattactgtaatgtagaggtagtggcggtagctgctgatgtttttgatatctggggccaagggacaatggtcaccgtctcttcag

SEQ ID NO: 6789 - DNA, 364 bp, Homo sapiens
gaggtgcagctggtggagtctgggggaggcttggtccagcctggggggtccctgagactctcctgtgcagcctctggattcacctttagtgtctattggatgagctgggtccgccaggctccagggaaggggctggagtgggtggccaacataaagcaagatggaagtgagaaatactatgtggactctgtgaagggccgattcaccatctccagagacaacgccaagaactcactgtttctgcaaatgaacagcctgagagccgaggacacggccgtgtattactgtgcgagagaggggctagtagtggtttcgtatgtctttgatatctggggccaagggacaatggtcaccgtctcttcag

SEQ ID NO: 6790 - DNA, 364 bp, Homo sapiens
gaggtgcagctggtggagtctgggggaggcttggtccagcctggggggtccctgagactctcctgtgcagcctctggattcaccctcagtatctattggatgagctgggtccgccaggctccagggaaggggctggagtgggtggccaacataaagcaagatggaagtgagaaatactatgtggactctgtgaagggccgattcaccatctccagagacaacgccaagaactcactgtatctgcaactgaacagcctgagagccgaggacacggccgtgtattactgtgcgagagatgacgtcaggactggctggagtgcttttgatatctggggccaagggacaaaggtcaccgtctcctcag

SEQ ID NO: 6791 - DNA, 364 bp, Homo sapiens
gaggtgcagctgttggagtctgggggaggcttggtacagcctggggggtccctgagactctcctgtgcagcctctggattcacctttagcagctatgccatgagctgggtccgccaggctccagggaaggggctggagtgggtctcagctattagtggtagtggtggtagcacatactacgcagactccgtgaagggccggttcaccatctccagagacaattccaagaacacgctgtatctgcaaatgaacagcctgagagccgaggacacggccgtatattactgtgcgactgctagtagtggcctatttctggacgcttttgatatctggggccaagggacaatggtcaccgtctcttcag

SEQ ID NO: 6792 - DNA, 367 bp, Homo sapiens
cagatcaccttgaaggagtctggtcctacgctggtgaaacccacacagaccctcacgctgacctgcaccttctctgggttttcactcagcactagtggagtgggtgtgggctggatccgtcagcccccaggaaaggccctggagtgacttgcactcatttattgggatgatgataagcgctacagcccatctctgaagagcaggctcaccatcaccaaggacacctccaaaaaccaggtggtccttacaatgaccaccatggaccctgtggacacagccacatattactgtgcacaacggttctatggttcgggcttggttagtttcgacccctggggccagggaaccctggtcaccgtctcctcag

SEQ ID NO: 6793 - DNA, 367 bp, Homo sapiens
cagatcaccttgaaggagtctggtcctacgctggtgaaacccacacagaccctcacgctgacctgcaccttctctgggttctcactcacctctcgtggagtgactgtgggctggatccgtcagcccccaggaaaggccctggaatggctcgcactcatttattgggatgatgataagcgctacagcccatctctgaagagcagggtcaccatcaccaaggacacctccaaaaaccaggtggtccttacaatgaccaacatggaccctgtggacacagccacatattactgtgcacacaaatatgactacggtggggagggtgcttttgatatctggggccaagggacaatggtcaccgtctcttcag

SEQ ID NO: 6794 - DNA, 367 bp, Homo sapiens
cagatcaccttgaaggagtctggtcctacgctggtgaaacccacacagaccctcacgctgacctgcaccttctctgggttctcactcagtactagtggagtgggtgtgggctggatccgtcagcccccaggaaaggccctggagtggcttgcactcatttattgggatgatgataagcgctacagcccatctctgaagagcaggctcaccatcaccaaggacacctccaaaaaccaggtggtccttataatgaccaacatggaccctgtggacacaggcacatattactgtgcacacaggggggctacagtgacccccaatgcttttgatatctggggccaagggacaatggtcaccgtctcttcag

SEQ ID NO: 6795 - DNA, 364 bp, Homo sapiens
gaagtgcagctggtgcagtctggagcagaggtgaaaaagcccggggagtctctgaggatctcctgtaagggttctggatacagctttaccaactactggatcagctgggtgcgccagatgcccgggaaaggcctggagtggatggggaggattgatcctagtgactcttataccaactacagcccgtccttccaaggccacgtcaccatctcagctgacaagtccatcagcactgcctacctgcagtggagcagcctgaaggcctcggacaccgccatgtattactgtgcgaatggttattactactatcccctgggcgcttttaatatctggggccaagggacaatggtcaccgtctcttcag

SEQ ID NO: 6796 - DNA, 364 bp, Homo sapiens
gaagtgcagctggtgcagtctggagcagaggtggaaaagcccggagagtctctgaggatctcctgtaagggttctggatacaccttcaccagctactggatcaactgggtgcgccagatgcccgggaaaggcctggagtggatggggaggattgatcctagtggctctcataccaactacagcccgtccttccaaggccacgtcagcatctcagctgacaagtccctcagtactgcctacctgcagtggagcagcctgaaggcctcggacaccgccatgtattactgtgcgagacggggtgactggccccttcggggtgcttttgatctctggggccaagggacaatggtcaccgtctcttcag

SEQ ID NO: 6797 - DNA, 360 bp, Homo sapiens
caggtgcagctgcaggagtcgggcccaggactggtgaagccttcggagaccctgtccctcacctgcactgtctctggtggctccatcagtagttactactggagctggatccggcagcccccagggaagggactggagtggattgggtatatctattacagtgggagcaccaactacaacccctccctcaagagtcgagtcaccatatcagtagacacgtccaagaaccagttctccctgaagctgagctctgtgaccgctgcggacacggccgtgtattactgtgcgagaggctacagccctggatactactactacatggacgtctggggcaaagggaccacggtcaccgtctcctca

SEQ ID NO: 6798 - DNA, 364 bp, Homo sapiens
gaggtgcagctggtgcagtctggagcagaggtgaaaaagcccggggagtctctgaagatctcctgtaagggttctggatacagctttaccagctactggatcggctgggtgcgccagatgcccgggaaaggcctggagtggatggggatcatctatcctggtgactctgataccagatacagcccgtccttccaaggccaggtcaccatctcagccgacaagtccatcagcaccgcctacctgcagtggagcagcctgaaggcctcggacaccgccatgtattactgtgcgagtcctgggggcctgctagggtttggtgcttttgatatctggggccaagggacaatggtcaccgtctcttcag

SEQ ID NO: 6799 - DNA, 363 bp, Homo sapiens
caggtgcagctgcaggagtcgggcccaggactggtgaagccttcggagaccctgtccctcatctgcgctgtctctggtgactccatcaacagtggtgactggtgaatctgggtccgccagcccccagggaaggggctggagtggattggggaaatccatcatagtgggaacacctactacaacccgtccctcaagagtcgaattaccatgtcagtagacacgtccaagaaccagttctacctgaaactgaggtctgtgaccgccgcggacacggccgtgtatttctgtgcccccccaaatacgaactattactactacggtttggacgtctggggccaagggaccacggtcaccgtctcctca

SEQ ID NO: 6800 - DNA, 360 bp, Homo sapiens
gaggtgcagctggtggagtctgggggaggcttggtacagcctggggggtccctgagactctcctgtgcagcctctggattcaccttcagtagctacgacatgcactgggtccgccaagctacaggaaaaggtctggaatgggtctcagctattggtactgctggtgacacatactatccaggctccgtgaagggccgattcaccatctccagagaaaatgccaagaactccttgtatcttcaaatgaacagcctgagagccggggacacggctgtgtattactgtgcaagagctacggcttactactactactacggtatggacgtctggggccaagggaccacggtcaccgtctcctca

SEQ ID NO: 6801 - DNA, 363 bp, Homo sapiens
caggtgcagctgcaggagtcgggcccaggactggtgaagccttcggggaccctgtccctcacctgcgctgtctctggtggctccatcagcagtagtaactggtggagttgggtccgccagcccccagggaaggggctggagtggattggggaaatctatcatagtgggagcaccaactacaacccgtccctcaagagtcgagtcaccatatcagtagacaagtccaagaaccagttctccctgaagctgagctctgtgaccgccgcggacacggccgtgtattactgtgcgagaggacttaccgcccactactactactacatggacgtctggggcaaagggaccacggtcaccgtctcctca

SEQ ID NO: 6802 - DNA, 363 bp, Homo sapiens
gaggtgcagctggtggagtctgggggaggtgtggtacggcctggggggtccctgagactctcctgtgcagcctctggattcacctttgatgattatggcatgatctgggtccgccaaggtccagggaaggggctggagtgggtctctggtattaattggaatggtggtggcataggttatgcagactctgtgcagggccgattcaccatctccagagacagcgccaagaactccctgtatctgcaactgaacagtctgagagccgaggacacggccttatattattgtgcgagagctaggcgacaatactgggactccggtatggacgtctggggccaagggaccccggtcaccgtctcctca

SEQ ID NO: 6803 - DNA, 360 bp, Homo sapiens
caggtgcagctacagcagtggggcgcaggactgttgaagccttcggagaccctgtccctcacctgcgctgtctatggtgggtccttcagtggttactactggagctggatccgccagcccccagggaaggggctggagtggattggggaaatcaatcatagtggaagcaccaactacaacccgtccctcaagagtcgagtcaccatatcagtagacacgtccaagaaccagttctccctgaagctgagctctgtgaccgccgcggacacggctgtgtattactgtgcgaggacaccggcatactactactactactacatggacgtctggggcaaagggaccacggtcaccgtctcctca

SEQ ID NO: 6804 - DNA, 363 bp, Homo sapiens
caggttcagctggtgcagtctggagctgaggtgaagaagcctggggcctcagtgaaggtctcctgcaaggcttctggttacacctttaccagctatggtatcagctgggtgcgacaggcccctggacaagggcttgagtggatgggatggatcagcgcttacaatggtaacacaaactatgcacagaagctccagggcagagtcaccatgaccacagacacatccacgagcacagcctacatggagctgaggagcctgagatctgacgacacggccgtgtattactgtgcgacctcaggaatactatggtactactacggtatggacgtctggggccaagggaccacggtcaccgtctcctca

SEQ ID NO: 6805 - DNA, 363 bp, Homo sapiens
caggctcaactggtgcaatctggacctgaagtgaagaagcctggggcctcagtgaaggtctcctgcaaggcttctggttacactttttccaactatgccatcagttgggtgcgccaggcccctggacaagggcttgagtggatgggaggaatcaccgtctacaatggttacacaaattttgcaccgaagttccagggcagagtcgtcctgaccacagacacatccacgaatacagcgtacatggacttgaggagcctgagatctgacgacacggccgtatatttttgtagattaggaggaaacagttttgctttcggcgacatggacgtctggggccaagggaccacggtcaccgtctcctca

SEQ ID NO: 6806 - DNA, 361 bp, Homo sapiens
gaggtgcagctggtggagtctggaggaggcttggtccagcctggggggtccctgagactctcctgtgcagcctctgggttcaccgtccatagcaactacatgaactgggtccgccaggctccagggaaggggctggagtgggtctcagttatttatagcggtggtggcacatactacgcagactccgtgaagggccgattcaccatctccagacacaattccaggaacacgctgtatcttcaaatgaacaccctgagagctgaggacacggccgtgtattactgtgcgagatcgcgtgaaacttcggggaggggtgcttttgatatctggggccaagggacaatggtcaccgtctcttcag

SEQ ID NO: 6807 - DNA, 369 bp, Homo sapiens
gaggtgcagctggtggagtctgggggaggcttggtaaagcctggggggtcccttagactctcctgttcagcctctggattcactttcagtaacgcctggatgagctgggtccgccaatctccagggaaggggctggagtgggttggccgtattaaaagcaaaactgatggtgggacaacagactacgctgcacccgtgaaaggcagattcaccatctcaagagatgattcaaaaaacacgctgtatctgcaaatgaacagcctgaaaaccgaggacacagccgtgtattactgtaccacgctcgagtgggggaattattattatggtatggacgtctggggcccagggaccacggtcaccgtctcctca

SEQ ID NO: 6808 - DNA, 363 bp, Homo sapiens
caggtgcagctggtggagtctgggggaggcgtggtccagcctgggaggtccctgagactctcctgtgcagcctctggattcaccttcagtagttatggcatgcactgggtccgccaggctccaggcaaggggctggagtgggtggcagttatatcatatgatggaagtgataaatactatgcagactccgtgaagggccgattcaccatctccagagacaattccaagaacacgctgtatctgcaaatgaacagcctgagagctgaggacacggctgtgtattactgtgcgaaagcgggacagtattcgtactactactacatggacgtctggggcaaagggaccacggtcaccgtctcctca

SEQ ID NO: 6809 - DNA, 363 bp, Homo sapiens
caggtgcagctggtggagtctgggggaggcgtggtccagcctgggaggtccctgagactctcctgtgcagcctctggattcaccttcagtagctatgctatgcactgggtccgccaggctccaggcaaggggctggagtgggtggcagttatatcatatgatggaagtaataaatactacgcagactccgtgaagggccgattcaccatctccagagacaattccaagaacacgctgtatctgcaaatgaacagcctgagagctgaggacacggctgtgtattactgtgcgagtgccctcggtggtagctactactacggtatggacgtctggggccaagggaccacggtcaccgtctcctca

SEQ ID NO: 6810 - DNA, 361 bp, Homo sapiens
gaggtgcagctggtggagtctgggggagccttggtacagcctggggggtccctgagactctcctgtgcagcctctggattcatctttaactataacatgaactgggtccgccaggctccagggaaggggctggagtgggtttcatacattagtggtagtggttccaccatatactacgcagactctgtgaagggccgattcaccatctccagagacaacgccaagaactcactgtatctgcaaatgaacggcctgagagccgaggacacggctgtgtattactgtgcgagagataggagtgggagctactggagaacttttgatatctggggccaagggacaatggtcaccgtctcttcag

SEQ ID NO: 6811 - DNA, 364 bp, Homo sapiens
cagatgcagctggtggagtctgggggaggcgtggtccagcctgggaggtccctgagactctcctgtgcagcctcaggattcaccttcagtagctatgttatgcactgggtccgccaggctccaggcaaggggctggagtgggtggcagttattgcatatgatggaagcagtaaatactacgcagactccgtgaagggccgattcaccatctccagagacaattcccagaacacgctgtatctgcaaatgaacagcctgagacctgaggacacggctgtgtattactgtgcgagagattcgtctaacggtgactccgtctacttccaacactggggccagggcaccccggtcaccgtctcctcag

SEQ ID NO: 6812 - DNA, 366 bp, Homo sapiens
cagctgcagctgcaggagtcgggcccaggactggtgaagccttcggagaccctgtccctcacctgcactgtctctggtggctccatcagcactagtagttactactggggctggatccgccagaccccagggaaggggctggagtggattgggagtatttattatagtgggagcacctactacaacccgtccctcaagagtcgggtcaccatatccgtagacacgtccaagaaccagttctccctgaagctgagctctgtgaccgccgcagacacggctgtgtattactgccacgtatgccacaaggaccgcactcactactacatggacgtctggggcaaagggaccacggtcaccgtctcctca

SEQ ID NO: 6813 - DNA, 364 bp, Homo sapiens
gaggtgcagctggtggagtctgggggaggcctggtcaagcctggggggtccctgagactctcctgtgcagcctctggattcaccttcagtagctatagcatgaactgggtccgccaggctccagggaaggggctggagtgggtctcatccattagtagtagtagtagttacatatactacgcagactcagtgaagggccgattcaccatctccagagacaacgccaagaactcactgtatctgcaaatgaacagcctgagagccgaggacacggctgtgtattactgtgcgagagataaactggaacgacgggaaggaactctagactactggggccagggaaccctggtcaccgtctcctcag

SEQ ID NO: 6814 - DNA, 364 bp, Homo sapiens
gaggtgcagctggtggagtctgggggaggcctggtcaagcctggggggtccctgagactctcctgtgcagcctatggattcaccttcaatagttatagcatgaactgggtccgccaggctccagggaagggactggagtgggtctcatccattagtagtagtggtagttacatgtactacgcagactcagtgaagggccgattcaccatctccagagacaatgccaagaatacactgtatctgcaaatgaacagcctgagaaccgaagacacggctgtgtattactgtgcgagagccgcagataactggaataaccacctctgtcactactggggccagggaaccctggtcaccgtctcctcag

SEQ ID NO: 6815 - DNA, 364 bp, Homo sapiens
gaggtgcagctggtggagtctgggggaggcctggtcaagcctggggggtccctgagactctcctgtgcagcctctggattcaccttcagtagctatagcatgaactgggtccgccaggctccagggaaggggctggagtgggtctcatccattagtagtagtagtacttacatatactacgcagactcagtgaagggccgattcaccatctccagagacaacgccaagaactcactgtatctgcaaatgaacagcctgagagccgaggacacggctgtgtattactgtgcgacccgtcccgactggttattacgctctcgggatgactactggggccagggaaccctggtcaccgtctcctcag

SEQ ID NO: 6816 - DNA, 361 bp, Homo sapiens
caggttcagctgcaggagtcgggcccaggactggtgaagccttcggagaccctgtccctcacctgcactgtctctggtggctccatcagtggttacttctggacctggatccggcagcccccagggaagggactggagtggattggatatattcattacagtgggaccacccactacaatccctccctcaagagccgagtcaccatatcactagacatgtccaagaaccagttctccctgaagctgacgtctgtgaccgctgcggacacggccctctattactgtgcgagtgaccccagggatggtggcagctggtacttccaccgctggggccagggcaccctggtcaccgtctcctcag

SEQ ID NO: 6817 - DNA, 361 bp, Homo sapiens
gaggtgcagctggtggagtctggaggaggcttgatccagcctggggggtccctgagactctcctgtgcagcctctgggttcaccgtcagtagcaactacatgagctgggtccgccaggctccagggaaggggctggagtgggtctcagttatttatagcggtggtagcacatactacgcagactccgtgaagggccgattcaccatctccagagacaattccaagaacacgctgtatcttcaaatgaacagcctgagagccgaggacacggccgtgtattactgtgcgagaggcagctggtacgcaaactacaactggttcgacccctggggccagggaaccctggtcaccgtctcctcag

SEQ ID NO: 6818 - DNA, 364 bp, Homo sapiens
caggtgcagctgcaggagtcgggcccaggactggtgaagccttcggggaccctgtccctcacctgcgctgtctctggtggctccatcagcagtagtaactggtggagttgggtccgccagcccccagggaaggggctggagtggattggggaaatctatcatagtgggagcaccaactacaacccgtccctcaagagtcgagtcaccatatcagtagacaagtccaagaaccagttctccctgaagctgagctctgtgaccgccgcggacacggccgtgtattactgtgcgagagaaatagcagtggctggttttagatggttcgacccctggggccagggaaccctggtcaccgtctcctcag

SEQ ID NO: 6819 - DNA, 364 bp, Homo sapiens
caggtgcagctgcaggagtcgggcccaggactggtgaagccttcggggaccctgtccctcacctgcgctgtctctggtggctccatcagcagtagtaactggtggagttgggtccgccagcccccagggaaggggctggagtggattggggaaatctatcatagtgggagcaccaactacaacccgtccctcaagagtcgagtcaccgtatcagtagacaagtccaagaaccagttctccctgaagctgagctctgtgaccgccgcggacacggccgtgtattactgtgcgagagtctggtggcgtcaaagagcggtctggttcgacccctggggccagggaaccctggtcaccgtctcctcag

SEQ ID NO: 6820 - DNA, 364 bp, Homo sapiens
gaggtgcagctggtggagtctgggggaggcttggtccagcctggggagtccctgagactgtcgtgttcagcctctggattcaccttcagtctgtattctatgtactgggtccgccaggccccagggaagggactggagtatgttgctgttgtcaccagtactgggggtagcacaacgtatgcggactccgtgaggggcagattcaccatttccagagacaattccaagaacacgctgtatcttcaaatggggagtctgagacctgaggacacggctgtgtattactgtgtgaaggtggggtatggtgcggggaattactactttgagtcctggggccagggaaccctggtcaccgtctcctcag

SEQ ID NO: 6821 - DNA, 366 bp, Homo sapiens
caggtgcagctgcaggagtcgggcccaggactggtgaagccttcggagaccctgtccctcacctgcactgtctctggtggctccgtcagcagtggtagttactactggagctggatccggcagcccccagggaagggactggagtggattgggtatatctattacagtgggagcaccaactacaatccctccctcaagagtcgagtcaccatatcagtagacacgtccaagaaccagttctccctgaagctgagctctgtgaccgctgcggacacggccgtgtattactgtgcgagagcccccattgctacctactactactatatggacgtctggggcaaagggaccacggtcaccgtctcctca

SEQ ID NO: 6822 - DNA, 366 bp, Homo sapiens
caggtgcagctgcaggagtcgggcccaggactggtgaagccttcggagaccctgtccctcacctgcactgtctctggtggctccgtcagcagtgatagttactactggagctgcatccggcagcccccagggaagggactggagtggattgggtatatctattacagtgggagcaccaactacaacccctccctcaagagtcgagtcaccatatcagtagacacgtccaagaaccagttctccctgaagctgagctctgtgaccgctgcggacacggccgtgtattactgtgcgaggggcccggtgaattactactactactacatggacgtctggggcaaagggaccacggtcaccgtctcctca

SEQ ID NO: 6823 - DNA, 364 bp, Homo sapiens
caggtgcagctggtgcaatctgggtctgagttgaagaagcctggggcctcagtgaaggtttcctgcaaggcttctggatacaccttcactaactatgctataaattgggtgcgacaggcccctggacaagggcttgagtggatggggtggatcaacagcaacactgggaacccaacgtatgcccagggcttcacaggacggtttgtcttctccttggacacctctgtcagcacggcatatctgcagatcaccagcctaaaggctgaggacactgccgtgtattactgtgcgagagttcgggtcttgccagttgcggactactttgactactggggccagggaaccctggtcaccgtctcctcag

SEQ ID NO: 6824 - DNA, 364 bp, Homo sapiens
gaggtgcagctggtgcagtctggagcagaggagaaaaagcccggggagtctctgaagatctcctgtcaggtttctggatacagttttattagttcctggatcggctgggtgcgccagatgcccgggaaaggcctggagtggatggggatcatctatcctggtgactctgataccacatacagcccgtccttccaaggccaggtcatcatctcagtcgacaagtccatcagcaccgcctacctgcagtggagcagtctgaaggcctcggacaccgccatgtattactgtgcgagacgggcaagtgggagctactcaggctactttgactactggggccagggaaccctggtcaccgtctcctcag

SEQ ID NO: 6825 - DNA, 362 bp, Homo sapiens
ggtgcaactggtgcagtctggagcagaagtgaaaaagcccggggagtctctgaagatctcctgtaagggttctggatacaactttcccaactactggatcggctgggtgcgccagatgcccgggaaaggcctggagtggatggggatcatctatcctggtgactctgataccagatacagtccgtccttccaaggccaggtcaccatctcagccgacaagtctatcagcaccgcctacctgcagtggagcagcctaaaggcctcggacgccgccatgtatttctgtgcgagacaggaacgatttttggggtggtggccctttgactactggggccagggaaccctggtcaccgtctcctcag

SEQ ID NO: 6826 - DNA, 363 bp, Homo sapiens
caggtccagctggtgcaatctggggctgaggtgaagaagcctgggtcctcggtgaaggtctcctgcaaggcttctggaggcaccttcagcagctatactatcagctgggtgcgacaggcccctggacaagggcttgagtggatgggaaggatcatccctatccttggtatagcaaactacgcacagaagttccagggcagagtcacgattaccgcggacaaatccacgagcacagcctacatggagctgagcagcctgagatctgaggacacggccgtgtattactgtgcgagacaatatatagcagcagctggttacggtatggacgtctggggccaagggaccacggtcaccgtctcctca

SEQ ID NO: 6827 - DNA, 363 bp, Homo sapiens
caggtgcagctggtgcagtctggggctgaggtgaagaagcctgggtcctcggtgaaggtctcctgcaaggcttctggaggcaccttcaacaactatgctatcagctgggtgcgacaggcccctggacaagggcttgagtggatgggagggatcatccctatctttagtacagccaactacgcacagaagttccacggcagagtcacgattaccgcggacgaatccacgagcacagcctacatggagttgagcagcctgagatctgaggacacggccgtctattactgtgcgagagcgggtagtccctactactactactacatggaagtctggggcaaagggaccacggtcaccgtctcctca

SEQ ID NO: 6828 - DNA, 364 bp, Homo sapiens
caggtgcagctggtgcagtctggggctgaggtgaagaagcctggggcctcagtgaaggtctcctgcaaggcttctggatacaccttcaccggctactatatgcactgggtgcgacaggcccctggacaagggcttgagtggatgggacggatcaaccctaacagtggtggcacaaactatgcacagaagtttcagggcagggtcaccatgaccagggacacgtccatcagcacagcctacatggagctgagcaggctgagatctgacgacacggccgtgtattactgtgcgaggcccgatattttgactggttattctcactttgactactggggccagggaaccctggtcaccgtctcctcag

SEQ ID NO: 6829 - DNA, 364 bp, Homo sapiens
gaggtgcagctgttggagtctgggggaggcttggtacagcctggggggtccctgagactctcctgtgcagcctctggattcacctttagcagctatgccatgagctgggtccgccaggctccagggaaggggctggagtgggtctcagctattagtggtagtggtggtagcacatactacgcagactccgtgaagggccggttcaccatctccagagacaattccaagaacacgctgtatctgcaaatgaacagcctgagagccgaggacacggccgtatattactgtgcgaaagatccccatggctggtacagagggatgattgactactggggccagggaaccctggtcaccgtctcctcag

SEQ ID NO: 6830 - DNA, 364 bp, Homo sapiens
gaggtgcagctgttggagtctgggggaggcttggtacagcctggggggtccctgagactctcctgtgcagcctctggattcacctttagcagctatgccatgagctgggtccgccaggctccagggaaggggctggagtgggtctcagctattagtggtagtggtagtagcacatactacgcagactccgtgcagggccggttcaccatctccagagacaattccaagaacacgctgtatctgcaaatgaacagcctgagagccgaggacacggccgtatattactgtgcgaaagatagagggtcctttttagcagtggctcttgactactggggccagggaaccctggtcaccgtctcctcag

SEQ ID NO: 6831 - DNA, 364 bp, Homo sapiens
gaggtgcagctgttggagtctgggggaggcttggtacagcctggggggtccctgagactctcctgtgcagcctctggattcacctttagcagctatgccatgagctgggtccgccaggctccagggaaggggctggagtgggtctcagctattagtggtagtggtggtagcacatactacgcagactccgtgaagggccggttcaccatctccagagacaattccaagaacacgctgtatctgcaaatgaacagcctgagagccgaggacacggccgtatattactgtgcgaaagggattagcagcagctggcagtactactttgactactggggccagggaaccctggtcaccgtctcctcag

SEQ ID NO: 6832 - DNA, 364 bp, Homo sapiens
gaggtgcaccttttggagtctgggggaggcttggtacagcctggggggtccctgagactctcctgtgcagcctctggattcacctttagctactatgccatgagctgggtccgccaggctccagggaaggggctggagtgggtctcagctattagtggtagtgctgctagaacaaactacgcagactccgtgaggggccggttcaccatctccagagacacttccaagaacacactgtatctgcaaatgaacagcctgagagccgaggacacggccctatattactgtgcgaagttcagcagctcctggtcaaaggagggatttgactactggggccagggaaccctggtcaccgtctcctcag

SEQ ID NO: 6833 - DNA, 364 bp, Homo sapiens
gaggtgcagctgttggagtctgggggaggcttggtacagcctggggggtccctgagactctcctgtgcagcctctggattcacctttagcatctatgccatgacctgggtccgccaggctccaggggaggggctggagtgggtctcaactattagtggtagtggtggtagcacatactacgcagactccgtgaagggccggttcaccatctccagagacaattccaagaacacgctgtatctgcaaatgaacagcctgagagccgaggacacggccgtatattactgtgcgaaagcttcaactatggttcggggagttctacttgactactggggccagggaaccctggtcaccgtctcctcag

SEQ ID NO: 6834 - DNA, 364 bp, Homo sapiens
gaggtgcagctgttggagtctgggggaggcttggtacagcctggggggtccctgagactctcctgtgcagcctctgaattcacctttagcagctatgccatgagctgggtccgccaggctccagggaaggggctggagtgggtctcagctattagtggtagtggtggtagcacatactacgcaggctccgtgaagggccggttcaccatctccagagacaattccaagaacacgctatatctgcaaatgaacagcctgagagccgaggacacggccgtatattactgtgcgaaagtgggccggttgggtcgtgttactcagtttgacaactggggccagggaaccctggtcaccgtctcctcag

SEQ ID NO: 6835 - DNA, 364 bp, Homo sapiens
gaggtgcagctgttggagtctgggggaggcttggtacagcctggggggtccctgagactctcctgtgcagcctctggattcacctttagcaactatgccatgacctgggtccgccaggctccagggaaggggctggagtgggtctcacttattactgctagtggttctaccacatactacgcagactccgtgaagggccgattcaccatctcccgagacacttccaagaacacgctgtatctgcaactgaacagcctcggagtcgccgacacggccgtctattactgtgcgaaaggcctttcaacggtgactgccggtggaggggactactggggccagggaaccctggtcaccgtctcctcag

SEQ ID NO: 6836 - DNA, 367 bp, Homo sapiens
cagctgcagctgcaggagtcgggcccaggactggtgaagccttcggagaccctgtccctcacctgcactgtctctggtggctccatcagcagtagtagttactactggggctggatccgccagcccccagggaaggggctggagtggattgggagtatctattatagtgggagcacctactacaacccgtccctcaagagtcgagtcaccatatcagtagacacgtccaagaaccagttctccctgaagctgagctctgtgaccgcagcggacacggccgtgtattactgtgcgagagaaaaactatggttcggatcccgaccgtttgactactggggccagggaaccctggtcaccgtctcctcag

SEQ ID NO: 6837 - DNA, 367 bp, Homo sapiens
cagctgcagctgcaggagtcgggcccaggactggtgaagccttcggagaccctgtccctcacctgcactgtctctggtggctccatcagcagtagtagttactactggggctggatccgccagcccccagggaaggggctggagtggattgggagtatctattatagtgggagcacctactacaacccgtccctcaagagtcgagtcaccatatcagtagacacgtccaagaaccagttctccctgaagctgagctctgtgaccgcagcggacacggccgtgtattactgtgcgagagatcgtggagccttcggtggaggagtggtttatgcctggggccagggaaccctggtcaccgtctcctcag

SEQ ID NO: 6838 - DNA, 367 bp, Homo sapiens
cagctgcagctgcaggagtcgggcccaggcctggtgaagtcttcggagaccctgtcgctcacctgcactgtctctggtggctccatcaccagtagcagttattactggggctggatccgccagcccccagggaaggggctggagtggattgggagtgtctattatagtgggagttcctactacaacccgtccctcaagagtcgagtcactatttcaagagacacgtccaagaaccacttctccctgaaggtgagctctgtgaccgctgcggatacggccgtgtattattgcacgagagatctgggattttcggggtcaccacctggggactactggggccagggaaccctggtcaccgtctcctcag

SEQ ID NO: 6839 - DNA, 367 bp, Homo sapiens
cagctgcagctgcaggagtcgggcccaggactggtgaagccttcggagaccctgtccctcacttgcactgtctctggtggctccatcagcagtagtagttactactggggctggatccgccagcccccagggaaggggctggagtggattgggagtatctattatagtgggagcaccgactacaacccgtccctcaagagtcgagtcaccatatcagtagacacgtcgaagaaccagttctccctgaagttgagctctgtgaccgcagcggacacggccgtgtattattgtgcgagatccatcgctataattactatgatagtctttgactactggggccagggaaccctggtcaccgtctcctcag

SEQ ID NO: 6840 - DNA, 370 bp, Homo sapiens
gaggtgcagctggtggagtctgggggaggcttgggagagcctggggggtcccttagactctcctgtgtagcctctggattcactttcactaacgcctggatgagctgggtccgccaggctccagggaaggggctggagtggattggccgtattaaaagcaaaactgctggtgggacaacagactacgctgcacccgtgaaaggcagattcagcatctcaagagatgattcaagaaacacggtttatcttcaaatgaacagcctaaaaagtgaggacgcagccgtgtatttctgtaccggagatcttcccggtggtgactccgattactttgactactggggccagggaaccctggtcaccgtctcctcag

SEQ ID NO: 6841 - DNA, 370 bp, Homo sapiens
gaggtgcagctggtggagtctggggggggcttggtgaagcctggggggtcccttagactctcctgtgcagcctctggattcagtttcagtagcgcctggatgaactgggtccgccaggctccagggaaggggctggagtgggtcggccgcattaaatacagatctgatggtggggcagcagactacgctgcacccgtgaaaggcagattcaccatctcaagagataattcaaaaaacatgatgtttctgcacatgaacgccctgaggaccgaggacacagccgtgtactactgtaccacagacggactttggaatgcttattattcacttgactactggggccagggaaccctggtctccgtctcctcag

SEQ ID NO: 6842 - DNA, 370 bp, Homo sapiens
gaggtgcagctggtggagtctgggggaggcttggtaaagcctggggggtcccttagactctcctgtgcagcctctggttttgtttttagtaacgcctggatgaactgggtccgccaggctccagggaaggggctggagtgggtcggccgtattaaaagtaagactgatggtggggcaacagagtacgctgtacccgtgcaaggcagattcaccatctcaagagatgattcagaaaacaccttgtatctgcaaatgaacagcctgagaaccgaggacacagccgtgtattactgtgtcacctccggtcgaggagtggtggtagctgctacctggagctggggccagggaacactggtcaccgtctcctcag

SEQ ID NO: 6843 - DNA, 346 bp, Homo sapiens
ggaggcttggtaaagcctggggggtcccttagactctcctgtgcagcctctggtttcactttcagtaacgcctggatgaactgggtccgccaggctccagggaaggggctggagtgggtcggccgtattaaaagcaaaactgatggtgggacaacagactacgctgcacccgtgaaaggcagattcaccatctcaagagatgattcaaaaaacacgctgtatctgcaaatgaacagcctgaaaaccgaggacacagccgtgtattactgtaccacagatccccctattgtactggtggtgtatgctgactactggggccagggaaccctggtcaccgtctcctcag

SEQ ID NO: 6844 - DNA, 364 bp, Homo sapiens
caggtgcagctggtggagtctgggggaggcttggtcaagcctggagggtccctgagactctcctgtgcagcctctggattcaccttcagtgactactacatgagctggatccgccaggctccagggaaggggctggagtgggtttcatacatcagtagtagtagtagttcctcaaactacgcagactctgtgaagggccgattcaccatctccagagacaacgccaagaactcactgtttctgcaaatgaacagcctgagagccgaggacacggccgtgtattattgtgtgagagactgggatttgggtgggaactacgggggcgactactggggccagggaaccctggtcaccgtctcctcag

SEQ ID NO: 6845 - DNA, 362 bp, Homo sapiens
gaggtgcagctggtggagtctgggggaggcttggtacagcctggggggtccctgagactctcctgtgcagcctctggattcaccttcagtagctatggcatgagctgggtccgccaggctccagggaaggggctggagtggatttcatacattaccagaagtagtagcaccatatactacgcagactctgtgaagggccgattcaccatctccagagacaatgccaagaactcactgtatctgcaaatgaacagcctgagagacgaggacacggctgtgtattactgtgcgagagaaagcctatggttcagggagttggagtttgactactggggccagggaaccctggtcaccgtctcctc

SEQ ID NO: 6846 - DNA, 364 bp, Homo sapiens
gaggtgcagctggtggagtctgggggaggcttggtacagcctggggggtccctgagactctcctgtgcagcctctggattcaccttcagtagctatagcatgaactgggtccgccaggctccagggaaggggctggagtgggtttcatacattagtagtagtagtggtaccatatactacgcagactctgtgaagggccgattcaccatctccagagacaacgccaagaactcactgtatctgcaaatgaacagcctgagagccgaggacacggctgtgtattactgtgcgagagatctgggagcagtggctggtgacccctatgactactggggccagggaaccctggtcaccgtctcctcag

SEQ ID NO: 6847 - DNA, 364 bp, Homo sapiens
gaagtgcagctggtggagtctgggggaggcttggtacagcctggcaggtccctgagactctcctgtgcagcctctggattcacctttgatgattatgccatgcactgggtccggcaagctccagggaagggcctggagtgggtctcaggtattagttggaatagtggtagcataggctatgcggactctgtgaagggccgattcaccatctccagagacaacgccaagaactccctgtatctgcaaatgaacagtctgagagctgaggacacggccttgtattactgtgcaaaaggtggtatagcagtggctggtgcagactttgactactggggccagggaaccctggtcaccgtctcctcag

SEQ ID NO: 6848 - DNA, 363 bp, Homo sapiens
gaagtgcagctggtggagtctgggggaggcttggtacagcctggcaggtccctgagactctcctgtgcagcctctggattcacctttgatgattatgccatgcactgggtccggcaagctccagggaagggcctggagtgggtctcgggtattagttggaatagtgttagcataggctatgcggactctgtgaagggccgattcaccatctccagagacaacgccaagaactccctgtatctgcaaatgaacagtctgagagctgaggacacggccttgtattactgtgtcaaaggtatagagtatagcagctcgtccttcccgcactactggggccagggaaccctggtcaccgtctcctca

SEQ ID NO: 6849 - DNA, 381 bp, Homo sapiens
gaggtgcagctggtggagtctgggggaggcttggtacagcctggggggtccctgagactctcctgtgcagcctctggattcaccttcagtagctatagcatgaactgggtccgccaggctccagggaaggggctggagtgggtttcatacattagtagtagtagtagtaccatatactacgcagactctgtgaagggccgattcaccatctccagagacaatgccaagaactcactgtatctgcaaatgaacagcctgagagacgaggacacggctgtgtattactgtgcgagggtcgctgcccctacggatagcagctctcactactactactactacatggacgtctggggcaaagggaccacggtcaccgtctcctca

SEQ ID NO: 6850 - DNA, 378 bp, Homo sapiens
gaggtgcagctggtggagtctggaggaggcttgatccagcctggggggtccctgagactctcctgtgcagcctctgggttcaccgtcagtagcaactacatgagctgggtccgccaggctccagggaaggggctggagtgggtctcagttatttatagcggtggtagcacatactacgcagactccgtgaagggccgattcaccatctccagagacaattccaagaacacgctgtatcttcaaatgaacagcctgagagccgaggacacggccgtgtattactgtgcgagagtaggcggcggtggcggcacccgaagatactactactactactacatggacgtctggggcaaagggaccacggtcaccgtctcctca

SEQ ID NO: 6851 - DNA, 364 bp, Homo sapiens
caggtgcagctggtgcagtctggggctgaggtgaagaaggctgggtcctcggtgaaggtctcctgcaaggcttctggaggcaccttcagcagttatgttatcacctgggtgcgacaggcccctggacaagggcttgagtggatgggagggatcatctctatgtttggtacagcaaactacgcacagaagttccagggcagagtcacgattaccgcggacgaatccacggacacagcctacatggagctgagcagcctgagatctgaggacacggccgtgtattactgtgcgagaggcgtgggaacggtgaccaccgccttctttgactactggggccagggaaccctggtcaccgtctcctcag

SEQ ID NO: 6852 - DNA, 364 bp, Homo sapiens
caggtgcagctggtgcagtctggggctgaggtgaagaagcctgggtcctcggtgaaggtctcctgcaagtcttctggaggcaccttcagcagctatgctatcagctgggtgcgacaggcccctggacaagggcttgagtggatgggagggatcatccctatctttggtacaacaaactacgcacagaagttccagggcagagtcacgattaccacggacgaatccacgggcacagcctacatggagctgagcagcctgagatctgaggacacggccgtgtattactgtgcgaggcttagtggctacgatacctcccccttagttgactactggggccagggaaccctggtcaccgtctcctcag

SEQ ID NO: 6853 - DNA, 364 bp, Homo sapiens
caggtgcagctggtgcagtctggggctgaggtgaagaagcctgggtcctcggtgaaggtctcctgcaaggcttctggaggcaccttcagtaactttgctctcagctgggtgcgacaggcccctggacaagggcttgagtgggtgggaaggatcatccctatccttaatataggaaataacgcacagaagttccagggcagagtcacgattaccgcggacaaatccacgagcacagcctacatggatctgagcagcctgagatctgaggacacggccgtgtattactgtgcgagagaagttccgtcgggtgaccacacgttcattgacaactggggccagggaaccctggtcaccgtctcctcag

SEQ ID NO: 6854 - DNA, 364 bp, Homo sapiens
caggtgcagctggtgcagtctggggctgaggtgaagaagcctgggtcctcggtgaaggtctcctgcaaggcttctggaggcaccttcagcagctatactatcacctgggtgcgacaggcccctggacaaggacttgagtggatgggaaggatcatccctgtccttggtatagcaaactacgcacagaagttccagggcagagtcacgatcaccgcggacaaatcaacgaccacagcctacatggagctgagcagcctgagctctgaggacacggccgtgtattactgtgcgagatggtattgtagtggtggaagctgctcctttgactactggggccagggaaccctggtcaccgtctcctcag

SEQ ID NO: 6855 - DNA, 364 bp, Homo sapiens
caggtccagctggtgcaatctggggctgaggtgaagaagcctgggtcctcggtgaaggtctcctgcaagacttctggaggcaccttcaacagctatagtatcagctgggtgcgacaggcccctggacacgggcttgagtggatggggaggatcatccctatcattggtgtaataaactatgcacagaagttccagggcagagtcacgattacggcggacaagtccacgagcacagcctacctggagctgagcagcctgagatctgaagacacggccgtatattactgtgcgagagattgggaggctacggggtttatggcctttgactactggggccagggaaccctggtcaccgtctcctcag

SEQ ID NO: 6856 - DNA, 364 bp, Homo sapiens
caggtgcagctggtgcagtctggggctgaggtgaagaagcctgggtcctcggtgaaggtctcctgcaaggcttctggaggcaccttcagcagctatgctatcagctgggtgcgacaggcccctggacaagggcttgagtggatgggaaggatcatccctatccttggtatagcaaactacgcacagaagttccagggcagagtcacgattaccgcggacaaatccacgagcacagcctacatggagctgagcagcctgagatctgaggacacggccgtgtattactgtgcgagtggggatttttggagtggccgtgggtggttcgacccctggggccagggaaccctggtcaccgtctcctcag

SEQ ID NO: 6857 - DNA, 364 bp, Homo sapiens
caggtccagctggtgcaatctggggctgaggtgaagaagcctgggtcctcggtgaaggtctcctgcaaggcttctggaggcaccttcagcagctatactttcagctgggtgcgacaggcccctggacaagggcttgactggatgggaaggatcatccctatccttggtatagcaaactacgcacagaatttccagggcagagtcacgattaccgcggacaaatccacgaccacagcctacatggagctgagcagcctgagatctgaggacacggccgtgtattactgtgcgagagaccggggcatcagctggggtaactggttcgacccctggggccagggaaccctggtcaccgtctcctcag

SEQ ID NO: 6858 - DNA, 364 bp, Homo sapiens
caggtgcagctggtgcagtctggggctgaggtgaagaagcctgggtcctcggtgaaggtctcctgcaaggcttctggagacaccttcagcagctatgctatcagctgggtgcgacaggcccctggacaagggcttgagtggttgggaggcatcatccctatctttggtacaacaaactacgcacagaggttccagggcagagtcacgattaccgcggacgaatccacgagcacagccttcatggagctgagcagcctgagctctgaggacacggccatatattactgtgcaagagagggttcgtttcttgagcgcccgaggttcgacccctggggccagggaaccctggtcaccgtctcctcag

SEQ ID NO: 6859 - DNA, 364 bp, Homo sapiens
caggagcagctggtgcagtctggggctgaggtgaagaagtttgggtcctcggtgaaggtctcctgcaaggcttctggaggcaccttcagcagctatgctatcaactgggtgcgacaggcccctggacaagggcttgagtggatgggaaggaccatccctatccttaatacagcaacctacgcacagaagttccagggcagagtcacaattaccgcggacaaatccacgagcacagcctacatggagctgaacagcctgagatctgaggacacggccgtgtattactgtgcgagagggatgatagctgctactcccaactggttcgacccctggggccagggaaccctggtcaccgtctcctcag

SEQ ID NO: 6860 - DNA, 381 bp, Homo sapiens
gaggtgcagctggtgcagtctggagcagaggtgaaaaagcccggggagtctctgaagatctcctgtaagggttctggatacagctttaccagctactacatcggctgggtgcgccagatgcccgggaaaggcctggagtggatggggatcatctatcctggtgactctgataccagatacagcccgtccttccaaggccaggtcaccatctcagccgacaagtccatcagcaccgcctacctgcagtggagcagcctgaaggcctcggacaccgccatgtattactgtgcgagacatgttccgccttggcgcagtggcttccgtgcactctactactacatggacgtctggggcaaagggaccacggtcaccgtctcctca

SEQ ID NO: 6861 - DNA, 381 bp, Homo sapiens
gaggtgcagctggtgcagtctggagcagaggtgaaaaagcccggggagtctctgaagatctcctgtaagggttctggatacagctttaccagctactggatcggctgggtgcgccagatgcccgggaaaggcctggagtggatggggatcatctatcctggtgactctgataccagatacagcccgtccttccaaggccaggtcaccatctcagccgacaagtccatcagcaccgcctacctgcagtggagcagcctgaaggcctcggacaccgccatgtattactgtgcgagactggaggcgaagtatagcagcagctggtaccgtttcgactacgctatggacgtctggggccaagggaccacggtcaccgtctcctca

SEQ ID NO: 6862 - DNA, 381 bp, Homo sapiens
gaggtgcagctggtgcagtctggagcagaggtgaaaaagcccggggagtctctgcagatctcctgtaagggttctggatacaactttaccaactactggatcgcctgggtgcgccagatgcccgggaaaggcctggagtggatggggagcatctatccggatgactctgataccagatacagcccgtccttccaaggccaggtcaccatctcagccgacaagtccatcagcaccgcctacctgcagtggagcagcctgaaggcctcggacaccgccatgtatcactgtgcgagaaaaagttggcgttactatggttcggggacttattaccccctaggtatggacgtctggggccaagggaccacggtcaccgtctcctca

SEQ ID NO: 6863 - DNA, 381 bp, Homo sapiens
gaggtgcagctggtgcagtctggagcagaggtgaaaaagcccggagagtctctgaagatctcctgtaagggttctggatacagctttaccaactactggatcggctgggtgcgccagatgcccgggaaaggcctggagtggatggggatcatctatcctggtgactctgataccagatacagcccgtccttccaaggccaggtcaccatctcagccgacaagtccatcagcaccgcctacctacagtggagcagcctgaaggcctcggacaccgccatatattactgtgcgagacaggtcccacccttttacgatttttggagtggttactactactacatggacgtctggggcaaagggaccacggtcaccgtctcctca

SEQ ID NO: 6864 - DNA, 381 bp, Homo sapiens
caggtgcagctggtggagtctgggggaggcgtggtccagcctgggaggtccctgagactctcctgtgcagcctctggattcaccttcagtagctatgctatgcactgggtccgccaggctccaggcaaggggctggagtgggtggcagttgtatcacatgagggaagttacaaaacctacgcagagtccgtgaagggccgattcaccatctccagagagaattcccagaacacgctgtatctgcaaatgaacagcctgagagctgaggacacggctgtgtattactgtgcgagagtcgaggattatgattacgtttgggggtcaccatactactacggtatggacgtctggggccaggggaccacggtcaccgtctcctca

SEQ ID NO: 6865 - DNA, 381 bp, Homo sapiens
caggtgcagctggtggagtctgggggaggcgtggtccagcctgggaggtccctgagactctcctgtgcagcctctggattcaccttcagtagctatgctatgcactgggtccgccaggctccaggcaaggggctggagtgggtggcatttatatcatatgatggaaataataaatactacgcagactccgtgaagggccgattcaccatctccagagacaattccaagaacacgctgtatctgcaaatgaacagcctgagagctgaggacacggctgtgtattactgtgcgagagggcttgggagctggtaccgggaagtggtggtagctgctaacggtatggacgtctggggccaagggaccacggtcaccgtctcctca

SEQ ID NO: 6866 - DNA, 384 bp, Homo sapiens
cagctgcaactgcaggagtcgggcccaggactggtgaagccttcggagaccctgtccctcatttgcactgtctctggtggctccatcagcagtagttgttactactggggctgggtccgccagcccccagggaagggcctggagtggatcgggaatgtctattgtactgggagcacgtactacaacccgtccctcaagagtcgagtcaccatatcagtagacacgtccaagaaccagttctccctgaagctgagctctgtgaccgcagcggacacggccgtgtattactgtgcgagagataataaacagtggctgttaggggccaactactactactacggtatggacgtctggggccaagggaccacggtcaccgtctcctca

SEQ ID NO: 6867 - DNA, 378 bp, Homo sapiens
caggtgcagctacagcagtggggcgcaggactgttgaagccttcggagaccctgtccctcacctgcgctgtctatggtgggtccttcagtggttactactggagctggatccgccagcccccagggaaggggctggagtggattggggaaatcaatcatagtggaagcaccaactacaacccgtccctcaagagtcgagtcaccatatcagtagacacgtccaagaaccagttctccctgaagctgagctctgtgaccgccgcggacacggctgtgtattactgtgcgagatccacgcggtcttcgtatgtagtagtaccagctgctatgggcggtatggacgtctggggccaagggaccacggtcaccgtctcctca

SEQ ID NO: 6868 - DNA, 378 bp, Homo sapiens
caggtgcagctgcaggagtcgggcccaggactggtgaagccttcggagaccctgtccctcacctgcactgtctctggtggctccatcagtagttactactggagctggatccggcagcccccagggaagggactggagtggattgggtatatctattacagtgggagcaccaactacaacccctccctcaagagtcgagtcaccatatcagtagacacgtccaagaaccagttctccctgaagctgagctctgtgaccgctgcggacacggccgtgtattactgtgcgagttcccccccagcattaacgggcggctggcactactactactacggtatggacgtctggggccaagggaccacggtcaccgtctcctca

SEQ ID NO: 6869 - DNA, 370 bp, Homo sapiens
gaggtgcagctggtggagtctgggggaggcttggtacagccagggcggtccctgagactctcctgtacagcttctggattcacctttggtgattatgctatgagctggttccgccaggctccagggaaggggctggagtgggtaggtttcattagaagcaaagcttatggtgggacaacagaatacgccgcgtctgtgaaaggcagattcaccatctcaagagatgattccaaaagcatcgcctatctgcaaatgaacagcctgaaaaccgaggacacagccgtgtattactgtactagagccctagattatagcagtggctggtacgggggctactggggccagggaaccctggtcaccgtctcctcag

SEQ ID NO: 6870 - DNA, 381 bp, Homo sapiens
gaggtgcagctggtggagtctgggggaggcctggtcaagcctggggggtccctgagactctcctgtgcagcctctggattcaccttcagtagctatagcatgaactgggtccgccaggctccagggaaggggctggagtgggtctcatccattagtagtagtagtagttacatatactacgcagactcagtgaagggccgattcaccatctccagagacaacgccaagaactcactgtatctgcaaatgaacagcctgagagccgaggacacggctgtgtattactgtgcgactcacactcatggttcggggagttatttgggctactactactacggtatggacgtctggggccaagggaccacggtcaccgtctcctca

SEQ ID NO: 6871 - DNA, 381 bp, Homo sapiens
gaggtgcagctggtggagtctgggggaggcctggtcaagcctggggggtccctgagactctcctgtgcagcctctggattcaccttcagtagctatagcatgaactgggtccgccaggctccagggaaggggctggagtgggtctcatccattagtagtagtagtagttacatatactacgcagactcagtgaagggccgattcaccatctccagagacaacgccaagaactcactgtatctgcaaatgaacagcctgagagccgaggacacggctgtgtattactgtgcgagattcacctattactatgatagtagtggctatcccatttcctacggtatggacgtctggggccaagggaccacggtcaccgtctcctca

SEQ ID NO: 6872 - DNA, 361 bp, Homo sapiens
caggtgcagctgcaggagtcgggcccaggactggtgaagccttcggagaccctgtccctcacctgcactgtctctggtggctccatcagtagttactactggagctggatccggcagcccccagggaagggactggagtggattgggtatgtctattacactgggagcaccagttataacccctccctcaagagtcgagtcaccatatcagttgacacgtccaagaaccagctctccctgaggctgaggtctattaccgccgcagacacggccgtgtattactgtgcgagacatacaacagagactgggccgtactactttgactactggggccagggaaccctggtcaccgtctcctcag

SEQ ID NO: 6873 - DNA, 361 bp, Homo sapiens
caggtgcagctgcaggagtcgggcccaggactggtgaagccttcggagaccctgtccctcacctgcactgtctctggtggctccatcagtagttactactggagctggatccggcagcccccagggaagggactggagtggattgggtatatctattacagtgggagcaccaactacaacccctccctcaagagtcgagtcaccatatcagtagacacgtccaagaaccagttctccctgaagctgagctctgtgaccgccgcagacacggccgtgtattactgtgcgagacaccgcagcagctggtacctttcctcaattgactactggggccagggaaccctggtcaccgtctcctcag

SEQ ID NO: 6874 - DNA, 381 bp, Homo sapiens
gaggtgcagctgttggagtctgggggaggcttggtacagcctggggggtccctgagactctcctgtgcagcctctggattcacctttagcagctatgccatgagctgggtccgccaggctccagggaaggggctggagtgggtctcagctattagtggtagtggtggtagcacatactacgcagactccgtgaagggccggttcaccatctccagagacaattccaagaacacgctgtatctgcaaatgaacagcctgagagccgaggacacggccgtatattactgtgcgggccatattgtggtggtgactgctattttttactactactactacggtatggacgtctggggccaagggaccacggtcaccgtctcctca

SEQ ID NO: 6875 - DNA, 381 bp, Homo sapiens
gaggtgcagctgttggagtctgggggaggcttggtacagcctggggggtccctgagactctcctgtgcagcctctggattcacctttagcagctatgccatgagctgggtccgccaggctccagggaaggggctggagtgggtctcagctattagtggtagtggtggtagcacatactacgcagactccgtgaagggccggttcaccatctccagagacaattccaagaacacgctgtatctgcaaatgaacagcctgagagccgaggacacggccgtatattactgtgcgaaatcgatgtcaactggggatcccccagattacttctactactacggtatggacgtctggggccaagggaccacggtcaccgtctcctca

SEQ ID NO: 6876 - DNA, 219 bp, Homo sapiens
ggtggtagcacatactacgcagactccgtgaagggccggttcaccatctccagagacaattccaagaacacgctgtatctgcaaatgaacagcctgagagccgaggacacggccgtatattactgtgcgaaagtagcagggacgggtgactacccctactactactactattactgcatggacgtctggggcaaagggaccacggtcaccgtctcctca

SEQ ID NO: 6877 - DNA, 381 bp, Homo sapiens
gaggtgcagctgttggagtctgggggaggcttggtacagcctggggggtccctgagactctcctgtgcagcctctggattcacctttagcagctatgccatgagctgggtccgccaggctccagggaaggggctggagtgggtctcagctattagtggtagtggttatagcacatactacgcagactccgtgaagggccggttcaccatctccagagacaattccaagaacacgctgtatgtgcaaatgaacagcctgagagccgaggacacggccgtatattactgttcgaaaaactccgtcacgagcggttatccctatcactactactacaacggtatggacgtctggggccaagggaccacggtcaccgtctcctca

SEQ ID NO: 6878 - DNA, 379 bp, Homo sapiens
caggtgcagctgcaggagtcgggcccaggactggtgaagccttcggagaccctgtccctcacctgcgctgtctctggtggctccatcactagttactactggagctggatccggcagcccccagggaagggactggagtggattgggtatatccatcacagtgggggtacctactacaacccctccctcaagagtcgagtcaccatatcagtggacacgtccaggaaccagttctccctgaagctgagctctgtgaccgccgcagacacggccgtgtattactgtgcgagaggggtcgtagaaatgacttcaatgagaacctggggtgagaaaaggtttgacttctggggccagggaaccctggtcaccgtctcctcag

SEQ ID NO: 6879 - DNA, 385 bp, Homo sapiens
caggtgcagctgcaggagtcgggcccaggtctggtgaagccttcggagaccctgtccctcacctgcactgtctctggtggctccgtcagcagtggtagttactactggaactggatccggcagcccccagggaagggactggagtggattgggtatatttattacagtgggagcaccaactacaacccctccctcgagagtcgagtcaccatatcagcagacacgtccaagaaccagttctccctgaagctgagctctgtgaccgctgcggacacggccgtgtattactgtgcgagagggaaaggatattgtagtggtggtagctgctactccgaggctcaccttgactcctggggccagggaaccctggtcaccgtctcctcag

SEQ ID NO: 6880 - DNA, 382 bp, Homo sapiens
gaggtgcagctggtggagtccgggggaggcttagttcagcctggggggtccctgagactctcctgtgcagcctctggattcaccttcagtagctactggatgcactgggtccgccaagctccagggaaagggctggtgtgggtctcacgtattaacagtgatgggagtagcacaaacaacgcggactccgtgaagggccgattcaccatctccagagacaacgccaagaacacactgtatctccaaatgaacagtctgagagccgaggacacggctgtgtatttctgtgcaagaggggcaccctattactatgatagtagtggttattatcacggctggttcgacccctggggccagggaaccctggtcaccgtctcctcag

SEQ ID NO: 6881 - DNA, 385 bp, Homo sapiens
cagatcaccttgaaggagtctggtcctacgctggtgaaacccacacagaccctcacgctgacctgcaccttctctgggttttcactcagcaccagtggagtgggtgtgggctggatccgtcagaccccaggaaaggccctggagtggcttgcactcatttactgggatgatgataagcgctacagcccatctctgaagagcaggctcaccatcaccaaggacacctccaaaaaccaggtggtccttacaatgaccaacatggaccctgtggacacagccacatattactgttcacacagtgtctcccacgccatcacacagtgggtggtaagtggctggtactttgactactggggccagggaaccctggtcaccgtctcctcag

SEQ ID NO: 6882 - DNA, 385 bp, Homo sapiens
cagatcaccttgaaggagtctggtcctacgctggtgaaacccacacagaccctcacgctgacctgcaccttctctgggttctcactcagcactagtggagtggctgtgggctggatccgtcagcccccaggaaaggccctggagtggcttgcactcatttattgggatgatgataagcgctacagcccatctctgaagagcaggctcaccatcaccaaggacacctccaaaaaccaggtggtccttacaatgaccaacttggaccctgtggacacagccacatatttctgtgcgcacagtggttattgtagtggtggtacctgctatactttccccggggctttcgacccctggggccagggaaccctggtcaccgtctcctcag

SEQ ID NO: 6883 - DNA, 377 bp, Homo sapiens
gaagtgcagctggtggagtctgggggaggcttggtacagcctggcaggtccctgagactctcctgtgcagcctctggattcacctttgatgattatgccatacactgggtccggcaagctccagggaagggcctggagtgggtctcaggtgttacttggaatagtggtaccataggctacgcggactctgtgaagggccgattcatcatttccagagacaacgccaagaactccctgtatctgcaaatgaacagtctgagaactgaggacacggccttgtattactgtgcaaaagatagtcgacatagcagtggctggtccgccttggagaactactactttgaccagtggggccaggggaccctggtcaccgtctc

SEQ ID NO: 6884 - DNA, 381 bp, Homo sapiens
caggtgcagctggtgcaatctgggtctgagttgaagaagcctggggcctcagtgaaggtttcctgcaaggcttctggatacaccttcactagctatgctatgaattgggtgcgacaggcccctggacaagggcttgagtggatgggatggatcgacaccaacactgggaacccaacgtatgcccagggcttcacaggacggtttgtcttctccttggacacctctgtcagcacggcatatctgcagatcagcagcctaaaggctgagggcactgccgtgtattactgtgcgagaactatgggtcggggagttttttcttcatactcctactactacggtttggacgtctggggccaagggaccacggtcaccgtctcctca

SEQ ID NO: 6885 - DNA, 381 bp, Homo sapiens
caggtgcagctggtgcagtctgggtctgagttgaagaagcctggggcctcagtgaaggtttcctgcaaggcctctggatacaccttcactcactatgctatgaattgggtgcgacaggcccctggacaagggcttgagtggatgggatggatcaacaccaacactgggaacccaacgtatgcccagggcttcacaggacggtttgtcttctccttggacacctctgtcagcacggcatatctgcagatcagcagccttaaggctgaggacactgccgtgtattactgtgcgagctattactatggttcggggagttttctcccctactactacttcggtatggacgtctggggccaagggaccacggtcaccgtctcctca

SEQ ID NO: 6886 - DNA, 382 bp, Homo sapiens
caggtgcagctggtggagtctgggggaggcttggtcaagcctggagggtccctgagactctcctgtgcagcctctggattcaccttcagtgaccactacatgagctggatccgccaggctccagggaaggggctggagtgggtttcatacattagtattagtagtacttacacaaactacgcagactctgtgaagggccgattcaccatctccagagacaacgccaagaactcactgtatctgcaaatgaatagcctgagagccgaggacacggccatgtattactgtgcgagagacagggcgaattattactatgatgatagtggttactacaactttttcgacccctggggccagggaaccctggtcaccgtctcctcag

SEQ ID NO: 6887 - DNA, 382 bp, Homo sapiens
gaggtgcagctggtggagtctgggggaggcctggtcaagcctggggggtccctgagactctcctgtgcagcctctggattcaccttcagtagctatagcatgaactgggtccgccaggctccagggaaggggctggagtgggtctcatccattagtagtagtagtagttacatatactacgcagactcagtgaagggccgattcaccatctccagagacaacgccaagaactcactgtatctgcaaatgaacagcctgagagccgaggacacggctgtgtattactgtgcgagagcaataaatacatggatagcagcagctggtaccgtttcttggtggttcgacccctggggccagggaaccctggtcaccgtctcctcag

SEQ ID NO: 6888 - DNA, 381 bp, Homo sapiens
caggtccagcttgtgcagtctggggctgaggtgaagaagcctggggcctcagtgaaggtttcctgcaaggcttctggatacaccttcactagctatgctatgcattgggtgcgccaggcccccggacaaaggcttgagtggatgggatggatcaacgctggcaatggtaacacaaaatattcacagaagttccagggcagagtcaccattaccagggacacatccgcgagcacagcctacatggagctgagcagcctgagatctgaagacacggctgtgtattactgtgcgagagacgggcggttcagtggttactattattactactactactactacatggacgtctggggcaaagggaccacggtcaccgtctcctca

SEQ ID NO: 6889 - DNA, 381 bp, Homo sapiens
caggtccaggttgtgcagtctggggctgaggtgaagaagcctggggcctcagtgaaggtttcctgcaaggcttctggatacaccttcactggctatactatgcattgggtgcgccaggcccccggacaaaggcttgagtggatgggatggatcaacgctggcaatggtaacacagaatattcacagaagtttcagggcagagtcaccattaccagggacacatccgcgagcacattctacatggagctgagcagcctgagatctgaagacacggctgtgtattactgtgcgagcgggaggttcggggatccattgttccgattttactactactacggtatggacgtctggggccaagggaccacggtcaccgtctcctca

SEQ ID NO: 6890 - DNA, 384 bp, Homo sapiens
caggtgcagctgcaggagtcgggcccaggactggtgaagccttcacagaccctgtccctcacctgcactgtctctggtggctccatcagcagtggtgattactactggagttggatccgccagcccccagggaagggcctggagtggattgggtacatctattacagtgggagcacctactacaacccgtccctcaagagtcgagttaccatatcagtagacacgtccaagaaccagttctccctgaagctgagctctgtgactgccgcagacacggccgtgtattactgtgccagagccccagcctcatatagcagcagctggagcctgcccgactactacatggacgtctggggcaaagggaccacggtcaccgtctcctca

SEQ ID NO: 6891 - DNA, 382 bp, Homo sapiens
caggtccagctggtgcaatccggggctgaggtgaagaagcctgggtcctcggtgaaggtctcctgcaaggcttctggaggcaccttcagcagctatagtatcagctgggtgcgacaggcccctggacaagggcttgagtggatgggaaggatcatccctatccttggtgtagcaaactacgcacagaacttccagggcagggtcacgattaccgcggacaaatccacgagcacagcctacatggagttgagcagcctgagatctgaggacacggccgtgttttactgtacgagagaaagagcccaaacgttttactatggttcggggagttatctggctcttgatatctggggccaagggacaatggtcaccgtctcttcag

SEQ ID NO: 6892 - DNA, 382 bp, Homo sapiens
gaggtgcagctggtgcagtctggagcagaggtgaaaaagcccggggagtctctgaagatctcctgtaagggttctggatacagctttaccagctactggatcggctgggtgcgccagatgcccgggaaaggcctggagtggatggggatcatctatcttggtgactctgataccagatacagcccgtccttccaaggccaggtcaccatctcagccgacaagtccatcagcaccgcctacctgcagtggagcagcctgaaggcctcggacaccgccatgtattactgtgcgtcacaccccgcttactatgatagtagtggttattaccatcatgatgcttttgatatctggggccaagggacaatggtcaccgtctcttcag

SEQ ID NO: 6893 - DNA, 382 bp, Homo sapiens
caggtgcagctggtgcagtctggggctgaggtgaagaagcctggggcctcagtgaaggtctcctgcaaggcttctggatacacgttcaccggctactatgtgcactgggtgcgacaggcccctggacaagggcttgagtggatgggacggatcaaccctaacactggtggcacaaactatgcgcagaagtttcagggcagggtcaccatgaccaggaacacgtccatcaccacagcctacatggagctgaggaggctgagatctgacgacacggccgtatattactgtgcgagagagccggggggaggatattgtagtggtggtagctgcttcccgtttgatgactactggggccagggaaccctggtcaccgtctcctcag

SEQ ID NO: 6894 - DNA, 382 bp, Homo sapiens
caggtgcagctggtggagtctgggggaggcgtggtccagcctgggaggtccctgagactctcctgtgcagcctctggattcaccttcaatagctatgctatacactgggtccgccaggctccaggcaaggggctggagtgggtggcagttatatcatctgatggaagcgataaatactacgcagactccgtgaagggccgattcaccatctccagagacaattccaagaacaccctgtatctgcaaatgaacagactgagaggtgaagacacggctgtgtattactgtgcgagagccttggagccctcgtattactatggttcagggagtggccatgcttttgatatctggggccaagggacagtggtcaccgtctcttcag

SEQ ID NO: 6895 - DNA, 382 bp, Homo sapiens
caggtgcagctggtggagtccgggggaggcgtggtccagcctgggaggtccctgagactctcctgtgcagcctctggattcaccttcagtacatatgctatgcactgggtccgccaggctccaggcaaggggctggagtgggtggcggttatatcatttgatggaaccactaaatactacacagactccgtgaagggccgattcaccatctccagagacaattccaggaacacgctatatctgctaatgaacagcctgagagttgaggacacggctgtgtatcactgtgtgagagccgatgatagttgtagtggtggcacttgctccggaacctatgcttttgatatctggggccaagggacaatggtcaccgtgtcttcag

SEQ ID NO: 6896 - DNA, 382 bp, Homo sapiens
caggtgcagctggtgcagtctggggctgaggtgaagaagcctggggcctcagtgaaggtttcctgcaaggcatctggatacaccttcaccagctactatatgcactgggtgcgacaggcccctggacaagggcttgagtggatgggaataatcaaccctagtggtggtagcacaagctacgcacagaagttccagggcagagtcaccatgaccagggacacgtccacgagcacagtctacatggagctgagcagcctgagatctgaggacacggccgtgtattactgtgcgagaacacggggcgcccaatatagtggctacgattgggttttaggtgcttttgatatctggggccaagggacaatggtcaccgtctcttcag

SEQ ID NO: 6897 - DNA, 382 bp, Homo sapiens
caggtccagttggtacagtctggggctgaggtgaagaagcctggggcctcagtgaaggtctcctgcaaggtttccggatacaccctcactgaattatccatgcactgggtgcgacaggctcctggaaaagggcttgagtggatgggaggtttcgattctgaagatggtgaaacaatctacgcacagaagttccagggcagagtcaccatgaccgaggacacatctacagacacagcctacatggagttgagcagcctgagatctgaggacacggccgtctattactgtgcaacagatgagagatattgtagtagaacaatctgcgcccgatggataaactttgacttctggggccagggaaccctggtcaccgtctcctcag

SEQ ID NO: 6898 - DNA, 385 bp, Homo sapiens
cagctgcagctgcaggagtcgggcccaggactggtgaagccttcggagaccctgtccctcacctgcactgtctctggtggctccatcagcagtagtagttactactggggctggatccgccagcccccagggaaggggctggagtggattgggagtatctattatagtgggagcacctactacaacccgtccctcaagagtcgagtcaccatatcagtagacacgtccaagaaccagttctccctgaagctgagctctgtgaccgcagcggacacggccgtgtattactgtgcgagagatggatattgtagtagtaccagctgctatgctaggtcagggtggttcgacccctggggccagggaaccctggtcaccgtctcctcag

SEQ ID NO: 6899 - DNA, 382 bp, Homo sapiens
gaggtgcagctggtggagtctgggggaggcctggtcaagcctggggggtccctgagactctcctgtgcagcctctggattcaccttcagttttcatagcatgaactgggtccgccaggctccagggaaggggctggagtgggtctcatccattagtagtagtagtaggttcatatactacgcagactcagtgaagggccgattcaccatctccagagacaacgccaagaactcattgtatctgcaaatgaacagcctgagagccgaggacacggctatatattactgtgcgagagatggaaactctggggacgatttttggaagaggccgccggctgcttttgatatctggggccaagggacaatggtcaccgtctcttcag

SEQ ID NO: 6900 - DNA, 385 bp, Homo sapiens
caggtcaccttgaaggagtctggtcctgcgctggtgaaacccacagagaccctcacactgacctgcaccttctctgggttctcactcagcactactggaatgcgtgtgagctggatccgtcagcccccagggaaggccctggagtggcttgcacgcattgattggaatgatgataaaatctacagctcatctctgaaaaccaggctcaccatctccaaggacacctccaaaaaccaggtggtccttataatgaccaacatggaccctgtggacacagccacctattactgtgcacggagccgagtcctaggatattgttttggtggtttatgctccgactggttcgacccctggggccagggaaccctggtcaccgtctcctcag

SEQ ID NO: 6901 - DNA, 364 bp, Homo sapiens
caggtgcagctggtggagtctgggggaggcgtggtccagcctgggaggtccctgagactctcctgtgcagcctctggattcaccttcagtagatatggcatgcactgggtccgccaggctccaggcaaggggctggagtgggtggcagttatatcatattatggaagtaatgaatactatgcagactccgtgaagggccgattcaccatctccagagacaattccaagaacacgctgtatctacagatgaacagcctgagacctgaggacacggctgtgtatttctgtgcgaaggactattactacgtaaacttgaactactttgactactggggccagggaaccctggtcaccgtctcctcag

SEQ ID NO: 6902 - DNA, 364 bp, Homo sapiens
caggtgcagctggtggagtctgggggaggcgtggtccagcctgggaggtccctgagactctcctgtgcagcctctggattcacattcagtagctttgctatgcactgggtccgccaggctccaggcaaggggctggagtgggtggcagttatatcatatgatggaagtaataaatactacgcagactccgtgaagggccgattcaccagctccagagacaattccaagaacacgctgtatctgcaaatgaacagcctgagagctgaggacacggctgtgtattactgtgcgaggcctggttcggggagttattcctccccctttgactactggggccagggaaccctggtcaccgtctcctcag

SEQ ID NO: 6903 - DNA, 364 bp, Homo sapiens
caggtgcagctggtggagtctgggggaggcgtggtccagcctgggaggtccctgagactctcctgtgcagcctctggattcaccttcagtagctatgctatgcactgggtccgccaggctccaggcaaggggctggagtgggtggcagttatatcaaatgatggaagtattaaatcctacgcagactccgtgaagggccgattcaccatctccagagacaattccaagaacacgctgtatctgcaaatgaacagcctgagagctgaggacacggctgtgtattactgtgcgagagacaacctgtccaagatgtgggagctacccgactactggggccagggaaccctggtcaccgtctcctcag

SEQ ID NO: 6904 - DNA, 364 bp, Homo sapiens
caggtgcagctggtggagtctgggggaggcgtggtccagcctgggaggtccctgagactctcctgtgcagcctctgaattcaccttcagtatctattctatgcactgggtccgccaggctccaggcaaggggctggagtgggtggcagttatatcatctgatggaagcaataaatactacgcagactccgtgaagggccgattcaccatcgccagagacaattccaagaacacgttgtatatgcaaatgaacagcctgagagttgaggacacggctgtgtattactgtgcgagagaatcaatcgtggcagctggaagggactttgactactggggccagggaaccccggtcaccgtctcctcag

SEQ ID NO: 6905 - DNA, 364 bp, Homo sapiens
caggtgcagatggtggagtctgggggaggcgtggtccagcctgggaggtccctgagactctcctgtgcagcctctggattcaccttcagtatctatgctattcactgggtccgccaggctccaggcaaggggctggagtgggtggcagttatatcatatgatggaagtaataaatactacgcagactccgtgaagggccgattcaccatctccagagacaattccaagaacacactgtctctgcaaatgaacagcctgagacctgaggacacggctgtgtattactgtgcgagaccttcgagtgggagctacttcagctactttgactactggggccagggaaccctggtcaccgtctcctcag

SEQ ID NO: 6906 - DNA, 364 bp, Homo sapiens
caggtgcagctggtggagtctgggggaggcgtggtccagcctgggaggtccctgagactctcctgtgcagcctctggattcatcttcagtacctatgctatgcactgggtccgccaggctccaggcaaggggctgtattggttggcagttatatcatatgatggaattaataaatactacgcagactccgtgaagggccgattcaccatctccagagacaattccaagaacacgctgtatctgcaaatgaacagcctgggagctgaggacacggctgtgtactactgtgcgagaacgaacggtggtgtatatcagaactattttgactcctggggccagggaaccgtggtcaccgtctcctcag

SEQ ID NO: 6907 - DNA, 359 bp, Homo sapiens
caggtgcagctggtggagtctgggggaggcgtggtccagcctgggaggtccctgagactctcctgtgcagcctctggattcaccttcagtggctatgctattcactgggtccgccaggctccaggcaaggggctggactgggtggcagttatatcatatgatggaagtaataaatactacgcagactccgtgaggggccgattcaccatctccagagacaattccaagaacacgctgtatctgcaaatgaacagcctgagagctgaggacacggctgtgtattactgtgcgagagatcgctcagggagttatcgcttcatctttgactactggggccagggaaccctggtcaccgtctc

SEQ ID NO: 6908 - DNA, 364 bp, Homo sapiens
caggtgcagctggtggagtctgggggaggcgtggtccagcctgggaggtccctgagactctcctgtgcagcctctggattcaccttcagtagctatgctatgcactgggtccgccaggctccaggcaaggggctggagtgggtggcagttatatcatatgatggaagtaataaatactacgcagactccgtgaagggccgattcaccatctccagagacaattccaagaacacgctgtatctgcaaatgaacagcctgagagctgaggacacggctgtgtattactgtgcgagagtccgtagtgggagctaccaggactactttgactactggggccagggaaccctggtcaccgtctcctcag

SEQ ID NO: 6909 - DNA, 364 bp, Homo sapiens
caggtgcagctggtggagtctgggggaggcgtggtccagcctgggaggtccctgagactctcctgtgcagcctctggactcaccttcagtagctatgctatgcactgggtccgccaggctccaggcaaggggctggagtgggtggcagttatatcatatgatggatttaataaatactacgcagactccgtgaagggccgattcaccatctccagagacaattccaagaacacgctgtatctgcaaatgaacagcctgagagctgacgacacggctttgtattactgtgcgcgtccgtatagtgggagctactacgcttactttgactactggggccagggaaccctggtcaccgtctcctcag

SEQ ID NO: 6910 - DNA, 364 bp, Homo sapiens
caggtgcaggtggtggagtctgggggaggcgtggtccagcctgggaggtccctgagactctcctgtgcagcctctggattcaccttcagtacctatgctatgcactgggtccgccaggctccaggcaaggggctggagtgggtggcagttatatcatatgatggaagtaataaatactacgcagactccgtgaagggccgattcaccatctccagagacaattccaagaacacgctgtatctgcaaatgaacagcctgagagctgaggacacggctgttttttactgtgcgagagatctctcgggtggttattccttcacctttgactactggggccagggaaccctggtcaccgtctcctcag

SEQ ID NO: 6911 - DNA, 364 bp, Homo sapiens
caggtgcagctggtggagtctgggggaggcgtggtccagcctgggaggtccctgagactctcctgtgcagcctctggattcaccttcagtagctatgctatgcactgggtccgccaggctccaggcaaggggctggagtgggtggcagttatatcatatgatggaagtaataaatactacgcagactccgtgaagggccgattcaccatctccagagacaattccaagaacacgctgtatctgcaaatgaacagcctgagagctgaggacacggctgtgtattactgtgcgagaggggtgcaagcagtggctggaccgggacctgactactggggccagggaaccctggtcaccgtctcctcag

SEQ ID NO: 6912 - DNA, 364 bp, Homo sapiens
caggtgcagctggtggagtctgggggaggcgtggtccagcctgggaggtccctgagactctcctgtgcagcctctggattcactttcagtagccatggcatgcactgggtccgccaggctccaggcaaggggctggagtgggtggcagttatatcatatgatggaagtgataagtactacgcagactccgtgaagggccgattcaccatcaccagagacaataccgagaacacgctgtatctgcaaatgaacagcctgagagctgaggacacggctgtgtattattgtgcgagagaggggaggttcggggagtggggcggctcactggactggggccagggaaccctggtcaccgtctcctcag

SEQ ID NO: 6913 - DNA, 364 bp, Homo sapiens
caggtgcagctggtggagtctgggggaggcgtggtccagcctgggaggtccctgagactctcctgtgcagcctctggattcaccttcagtagctatgctatgcactgggtccgccaggctccaggcaaggggctggagtgggtggcagttatatcatatgatggaagcaataaatactacgcagactccgtgaagggccgattcaccatctccagagacaattccaagaacacgctgtatctgcaaatgaacagcctgagagctgaggacacggctgtatattactgtgcgagcgaccccttgactacattaactggtggcggcggctactggggccagggaaccctggtcaccgtctcctcag

SEQ ID NO: 6914 - DNA, 364 bp, Homo sapiens
caggtgcagctggtggagtctgggggaggcgtggtccagcctgggaggtccctgagactctcctgtgcagcctctggattcaccttcagtatctatgctatgcactgggtccgccaggctccaggcaaggggctggagtgggtggcagttatatcatatgatggaactaataaatactacgcagactccgtgaggggccgattccccatctccagagacaattccaagaacacgctgtatctgcaaatgcccagcctgagagctgaggacacggctgtgtattactgtgcgagagcaaggactgggagctaccgaacctcatttgactactggggccagggaaccctggtcaccgtctcctcag

SEQ ID NO: 6915 - DNA, 382 bp, Homo sapiens
caggttcagctggtgcagtctggagctgaggtgaagaagcctggggcctcagtgaaggtctcctgcaaggcttctggttacatctttaccagctatggtatcagctgggtgcgacaggcccctggacaagggcttgagtggatgggatggatcagcgcttacaatggtaacacaaactatgcacagaagctccagggcagagtcaccatgaccacagacacatccacgagcacagcctacatggagctgaggagcctgggatctaacgacacggccgtgtattactgtgcgagagatcggctggtgaggcggggtgctgtcggtccctttttttactggttcgacccctggggccagggaaccctggtcaccgtctcctcag

SEQ ID NO: 6916 - DNA, 382 bp, Homo sapiens
caggtgcagctggtggagtctgggggaggcgtggtccagcctgggaagtccctgagactctcctgtgcagcctctggattcaccttcagaagatatggcatgcactgggtccgccaggctccaggcaaggggctggagtgggtggcagttatgtcatttgatggaagtaataaatactatgcagattccgtgaagggccgattcaccatctccagagacaattccaagaacacgttgtatctgcaaatgaacagcctgagagctgaggacacggctgtgtattactgtgcgaaacaatctggtccctattgtggaggtggtaactgctactccgggtcctttgactactggggccagggaactctggtcaccgtctcctcag

SEQ ID NO: 6917 - DNA, 382 bp, Homo sapiens
caggtgcagctggtggagtctgggggaggcgtggtccagcctgggaggtcccggagactctcctgtgcagcctctggattcaccttcagtagctatgccatgaactgggtccgccaggctccaggcaaggggctggagtgggtggcagttgtatcatatgatggaagaaataaatactatgcagactccgtgaagggccgattcaccatctccagagacaattccaagaacacgctgtatctgcaaatgaacagcctgagagctgaggacacggctgtgtattactgtgcgagcaggggggcggaccgtggatatagtgtctacggcggagattgggtactgggctactggggccagggaaccctggtcaccgtctcctcag

SEQ ID NO: 6918 - DNA, 382 bp, Homo sapiens
caggtgcagctggtggagtctgggggaggcgtggtccagcctgggaggtccctgagactctcctgtgcagcctctggattcaccttcggtacctatggcatgcactgggtccgccaggctccaggcaaggggctggagtgggtggcagttatatcatatgatggaagtaataaacactatgcagactccgtgaagggccgattcaccatctccagagacaattccaagaacacgctgtatctgcaaatgaacagcctgagagctgaggacacggctgtgtattactgtgcgaaaaatctcgggacctattgtagtggtggtagctgctactcaggctactttgactactggggccagggaaccctggtcaccgtctcctcag

SEQ ID NO: 6919 - DNA, 382 bp, Homo sapiens
caggtgcagctggtggagtctgggggaggcgtggtccagcctgggaggtccctgagactctcctgtgcagcctctggattcaccttcagtagctatgtcatgcactgggtccgccaggctccaggcaaggggctggagtgggtggcagttatatcatatgatggaagtaataaacactatgcagactccgtgaagggccgattcaccatctccagagacaattccaagaacacgctgtatctgcaaatgaacagcctgagagctgaggacacggctgtgtattactgtgcgaaacggggggggcaatattgtagtggtggtagctgctccggtggctactttgactactggggccagggaaccctggtcaccgtctcctcag

SEQ ID NO: 6920 - DNA, 382 bp, Homo sapiens
caggtgcagctggtgcagtctgggggaggcgtggtccagcctgggaggtccctgagactctcctgtgttgcctctggattcaccttcgggacctatggcatgcactgggtccgccaggctccaggcaagggactgcagtgggtggcactgatatcatacgacggaaacaacaaattttatgcagactccgtgaagggccgattcaccgtctctcgagacaactccaggagcacactttatctacacatgaatggcctgagaactgaagacacggcagtatattattgtgcgaaagataggggccagtcaagagttgtagccctcctgtcaaccagttggttcgacccctggggccagggaaccctggtcaccgtctccccag

SEQ ID NO: 6921 - DNA, 382 bp, Homo sapiens
caggtgcaactggtggagtctgggggaggcgtggtccagcctgggaggtccctgagactctcctgtgcagcctctggattcaccttcagtacctatggcatgcactgggtccgccaggctccaggcaaggggctggagtgggtggcagttatatcatatgatggaggtaataaagactatgcagactccgtgaagggccgattcaccatctccagagacaattccaagaacacgctgtatctgcaaatgaacagcctgagagctgaggacacggctgtttattactgtgcgaaagatcttgccccgtattgtggtggtggtagctgctactcggggtactttgactactggggccagggaaccctggtcaccgtctcctcag

SEQ ID NO: 6922 - DNA, 382 bp, Homo sapiens
caggtgcaactggtggagtctgggggaggcgtggtccagcctgggaggtccctgagactctcctgtgcagcctctggattcaccttcaataactatggcatgcactgggtccgccaggctccaggcaaggggctggagtgggtggcagttatatcatatgatggaattaatgaatactatgcagactccgtgaagggccgatttaccatctccagagacaattccaagaacacgctgtatctgcaattgaacagcctgagagctgacgacacggctgtgtattactgtgcgaaagatttgtggtactttggttcagagacttatgattcggtattggaatattttaagtggggccagggaaccctggtcaccgtctcctcag

SEQ ID NO: 6923 - DNA, 352 bp, Homo sapiens
cagatcaccttgaaggagtctggtcctacgctggtgaaacccacacagaccctcacgctgacctgcaccttctctgggttctcactcagcactagtggagtgggtgtgggctggatccgtcagcccccaggaaaggccctggagtggcttgcactcatttattgggatgatgataagcgctacagcccatctctgaagagcaggctcaccatcaccaaggacacctccaaaaaccaggtggtccttacaatgaccaacatggaccctgtggacacagccacatattactgtgcacacactacctggggatcccagaactggggccagggaaccctggtcaccgtctcctcag

SEQ ID NO: 6924 - DNA, 349 bp, Homo sapiens
caggtgcagctggtgcagtctggggctgaggtgaagaagcctggggcctcagtgaaggtctcctgcaaggcttctggatacaccttcagcgcctattatatacactgggtgcgacaggcccctgggcaagggcttgagtggatgggacggatcagccctggcagtggtgacgcatggtatgcacagaggtttcagggcagggtcaccatgaccagcgacacgtccgtcaacacagcctacatggagctgaccagcctgacatctgccgacacggccgtgtattattgtgggagaggagtacagactttcgacccctggggccagggaaccctggtcaccgtctcctcag

SEQ ID NO: 6925 - DNA, 387 bp, Homo sapiens
gaggtgcagctggtggagtctgggggaggcttggtccagcctggggggtccctgagactctcctgtgcagcctctggattcaccttcagtagctatgctatgcactgggtccgccaggctccagggaagggactggaatatgtttcagctattagtagtaatgggggtagcacatattatgcaaactctgtgaagggcagattcaccatctccagagacaattccaagaacacgctgtatcttcaaatgggcagcctgagagctgaggacatggctgtgtattactgtgcgagagatttcaagtcctattgtagtggtggtagctgcccccccggtccctacggtatggacgtctggggccaagggaccacggtcaccgtctcctca

SEQ ID NO: 6926 - DNA, 355 bp, Homo sapiens
gaggtgcagctggtggagtctgggggaggcttggtaaagccagggcggtccctgagactctcctgtacaggttctggattcacctttggtgattctgctatgagctggttccgccaggctccagggaaggggccggagtgggtaggttccattagaagcaaaacttatggagggacgacagaatacgccgcgtctgttaaaggcagattctccatctcaagagatgattccaaaagcatcgcctatctgcaaatgaacagcctgaaaatcgacgacacagccgtgtattactgtactggaggaatactatggctgaattactggggccagggaaccctggtcaccgtctcctcag

SEQ ID NO: 6927 - DNA, 346 bp, Homo sapiens
caggtgcagctgcaggagtcgggcccaggactggtgaagccttcggagaccctgtccctcacctgcactgtctctggtggctccatcagtagttactactggagctggatccggcagcccccagggaagggactggagtggattgggtatatctattacagtgggagcaccaactacaacccctccctcaagagtcgagtcaccatatcagtagacacgtccaagaaccagttctccctgaagctgagctctgtgaccgccgcagacacggccgtgtattactgtgcgaggggatacagctatgctgactactggggccagggaaccctggtcaccgtctcctcag

SEQ ID NO: 6928 - DNA, 384 bp, Homo sapiens
caggtgcagctgcaggagtcgggcccaggactggtgaagccttcggagaccctgtccctcacctgcactgtctctggtggctccatcagtagttactactggacctggatccggcagcccccagggaagggactggagtggattggctatatctattacagtgggaggaccaactacaacccctccctcaagagtcgagtcaccatatcagtagacacgtccaagaaccagttctccctgaagctgaggtctgtgaccgctgcggacacggccgtttattactgtgcgagagacccccattactatgacagtagtggttattactcgggcaactactacggtatggacgtctggggccaagggaccacggtcaccgtctcctca

SEQ ID NO: 6929 - DNA, 349 bp, Homo sapiens
caggtccagcttgtgcagtctggggctgaggtgaagaagcctggggcctcagtgaaggtttcctgccaggcttctggatacaccttcactagctatgctatacattggttgcgccaggcccccggacaaaggcttgagtggatgggatggatcaacgctggcaatggtaacacaaagtattcacagaagttccagggcagagtcaccattaccagggacacatccgcgagcacagcctacatggagctgagcagcctgagatctgaagacacggctgtgtattactgtgcgagaggacttggttacctagactactggggccagggaaccctggtcaccgtctcctcag

SEQ ID NO: 6930 - DNA, 382 bp, Homo sapiens
gaggtgcagctggtggagtctgggggaggcctggtcaagcctggggggtccctgagactctcctgtgcagcctctggattcaccttcagtagctatagcatgaactgggtccgccaggctccagggaaggggctggagtgggtctcatccattagtagtagtagtagttacatatactacgcagactcagtgaagggccgattcaccatctccagagacaacgccaagaactcactgtatctgcaaatgaacagcctgagagccgaggacacggctgtgtattactgtgcgagaggaacgtggaaggcgggctatggttggaaagttggatactggtacttcgatctctggggccgtggcaccctggtcactgtctcctcag

SEQ ID NO: 6931 - DNA, 387 bp, Homo sapiens
gaggtgcagctggtggagtctgggggaggcttggtccagccgggggggcccctgagactctcctgtgcagcctctggattcacctttagtcactattggatgagctgggtccgccaggctccagggaaggggctggagtgggtggccaacataaaacacgatggaagtgagaaatactatgtggactctgtgaagggccgattcaccatctccagagacaacgccaagaacttactgtatctgcaaatgaacagcctgagaggcgaggacacggctgtgtattactgtgcgagagatctaggtgatagcgcttatagcagtggctggtactactactactactacatggacgtctggggcaaagggaccacggtcaccgtctcctca

SEQ ID NO: 6932 - DNA, 387 bp, Homo sapiens
gaggtgcagctggtggagtctgggggaggcttggtccagcctggggggtccctgagactctcctgtgcagcctctggattcacctttagtagctattggatgagctgggtccgccaggctccagggaaggggctggagtgggtggccaacataaggcaagatggacgtgagaaatactatgtggactctgtgaagggccgattcaccatctccagagacaacgccaagaactcactgtatctgcaaatgaacagcctgagagccgaggacacggctgtatattactgtgcgagagcgccctttttttatgattacatttgggggagttatcgttcctactactacatggacgtctggggcaaagggaccacggtcaccgtctcctca

SEQ ID NO: 6933 - DNA, 387 bp, Homo sapiens
gaggtgcagctggtggagtctgggggaggcttggtccagcctggggggtccctgagactctcctgtgcagcctctggattcacctttagtagctattgcatgagctgggtccgccaggctccagggaaggggctggagtgggtggccaacataaagcaagatggaagtgcgaaatactatgtggactctctgaagggccgattcaccatctccagagacaacgccaagaactcactgtatctgcaaatgaacagcctgagagccgaggacacggctgtgtattactgtgcgagggccccggggacctcccggtatagcagtggctggtactcctactactactacatggacgtctggggcaaagggaccacggtcaccgtctcctca

SEQ ID NO: 6934 - DNA, 387 bp, Homo sapiens
gaggtgcagctggtggagtctgggggaggcttggtccagcctggggggtccctgagactctcctgtgcagcctctggattcacctttagtagctattggatgagctgggtccgccaggctccagggaaggggctggagtgggtggccaacataaagcaagatggaagtgagaaatactatgtggactctgtgaagggccgattcaccatctccagagacaacgccaagaactcactgtatctgcaaatgaacagcctgagagccgaggacacggccgtgtattactgtgcgagagacccttggttgggttatgatagtagtcaagtatactactactactacggtatggacgtctggggccaagggaccacggtcaccgtctcctca

SEQ ID NO: 6935 - DNA, 384 bp, Homo sapiens
gaggtgcagctggtggagtctggaggaggcttggtccagcctggggggtccctgagactctcctgtgcagcctctgggttcaccgtcagtagcaactacatgagctgggtccgccaggctccagggaaggggctggagtgggtctcagttatttatagcggtggtagcacatactacgcagactccgtgaagggccgattcaccatctccagacacaattccaagaacacgctgtatcttcaaatgaacagcctgagagctgaggacacggccgtgtattactgtgcgagagatcgttactatggttcggggagttattataaccactactactactacggtatggacgtctggggccaagggaccacggtcaccgtctcctca

SEQ ID NO: 6936 - DNA, 382 bp, Homo sapiens
gaggtgcagctgttggagtctgggggaggcttggtacagcctggggggtccctgagactctcctgtgcagcctctggattcacctttagcagctatgccatgagctgggtccgccaggctccagggaaggggctggagtgggtctcagctattagtgctagtggtggtaggacatactacgcagactccgtgaagggccggttcaccatctccagagacaattccaagaacacgctgtatctgcaaatgaacagcctgagagccgaggacacggccgtatattactgtgcgaaagccccgctgggagaaagggctggtattatttttggaccggaatacttccagcactggggccagggcaccctggtcaccgtctcctcag

SEQ ID NO: 6937 - DNA, 387 bp, Homo sapiens
gaggtgcagctggtgcagtctggagcagaggtgaaaaagcccggggagtctctgaagatctcctgtaagggttctggatacaggtttaccagctactggatcggctgggtgcgccagatgcccgggaaaggcctggagtggatggggatcatctatcctggtgactctgataccagatacagcccgtccttccaaggccaggtcaccatctcagccgacaagtccatcagcaccgcctatctgcagtggagcagcctgaaggcctcggacagcgccatgtattattgtgcgagacatgggggcggggggttttgtaatagtaccagctgctatgactactactacatggacgtctggggcaaagggaccacggtcaccgtctcctca

SEQ ID NO: 6938 - DNA, 388 bp, Homo sapiens
caggtgcagctggtggaatctgggggaggcgtggtccagtctgggaggtccctgagactctcctgtgcagcctctggattcaccttcagtagttatgctatgcactgggtccgccaggctccaggcaaggggctggagtgggtggcagttatatcatatgatggaagtaatacatactacgcagactccgtgaagggccgattcaccatctccagagacaattccaagaacacgctgtatctgcaaatgaacagcctgagagctgaggacgcggctgtgttttactgtgcgagagacgtaccactccgatattttgactggttagtcaccgacatctcgtactactttgactactggggccagggaaccctggtcaccgtctcctcag

SEQ ID NO: 6939 - DNA, 393 bp, Homo sapiens
gaggtgcagctggtggagtctgggggaggcttggtaaagcctggggggtcccttagactctcctgtgcagcctctggtttcactttcagtaacgcctggatgaactgggtccgccaggctccagggaaggggctggagtgggtcggccgtattaaaagcaaaactgatggtgggacaacagactacgctgcacccgtgaaaggcagattcaccatctcaagagatgattcaaaaaacacgctgtatctgcaaatgaacagcctgaaaaccgaggacacagccgtgtattactgtaccacgatgggccatcgggtttcaattatgggggggtattactactactactactacatggacgtctggggcaaagggaccacggtcaccgtctcctca

SEQ ID NO: 6940 - DNA, 387 bp, Homo sapiens
caggtgcagctggtgcaatctgggtctgagctgaagaagcctggggcctcagtgaaggtttcctgcaaggcttctggatacaccttcactacctatggtatgaattgggtgcgacaggcccctggacaagggcttgagtggatgggatggatcaacaccgacactgggaacccaacgtatgcccagggcttcacaggacggtttgtcttctccttggacacctctgtcagcacggcatatctgcagatcatcagcctaaaggctgaggacactgccgtgtattattgtgcgagaagaattggtacgagaagaattggcacgtcgggctactactactactacggcatggacgtctggggccaagggaccacggtcaccgtctcctca

SEQ ID NO: 6941 - DNA, 387 bp, Homo sapiens
cagctgcagctgcaggagtcgggcccaggactggtgaagccttcggagaccctgtccctcacctgcgctgtctctggtggctccatcagcagtagtagtttctactggggctggatccgccagcccccagggaaggggctggagtggatcgggactatctattatagtgggagcacctactacaacccgtccctcaagagtcgagtcaccatatcagtagacacgtccaagaaccagttctccctgaagctgacctctgtgaccgcagcggacacggccgtgtattactgtgtgagagagtattgtagtagtagcagctgctatgggaataactactactactacggcatggacgtctggggccaagggaccacggtcaccgtctcc

SEQ ID NO: 6942 - DNA, 390 bp, Homo sapiens
cagctgcagctgcaggagtcgggcccaggactcgtgaagccctcggagaccctgtccctcacctgcactgtctctggtggctccatcagcagtagtcgttcctactggggctggctccgccagtccccaggcaagggcctggagtggattgggagcatgtcttatagtgagaagaactactacaacccgtccctcaagagtcgagtcacgatctccgtagtcacgtccaagagccagttctccctgaagttgacctctgtgaccgccgcagacacggctgtgtattactgtgcgagatgggcatataactggaaccacgggctacaatttgacttctcgcagtactacttgggcgtctggggcaaagggaccgcggtcaccgtctcctca

SEQ ID NO: 6943 - DNA, 385 bp, Homo sapiens
caggtgcagctgcaggagtcgggcccaggactggtgaagccttcggagaccctgtccctcacctgcactgtctctggtggctccatcagtagttactactggagctggatccggcagcccccagggaagggactggagtggattgggtatatctattacagtgggagcaccaactacaacccctccctcaagagtcgagtcaccatatcagtagacacgtccaagaaccagttctccctgaagctgagctctgtgaccgccgcagacacggccgtgtattactgtgcgagacaaggacgtccccacagtggatacagctatggcctcgctaggtattactactttgactactggggccagggaaccctggtcaccgtctcctcag

SEQ ID NO: 6944 - DNA, 387 bp, Homo sapiens
caggtgcagctggtggagtcggggggaggcttggtcaagcctggagggtccctgagactctcctgtgcagcctctggattcaccttcagtgactactacatgagctggatccgccaggctccagggaaggggctggagtggctttcatacattagtagtagtagcagatccacaaactacgcagactctgtgaagggccgattcaccatctccagagacaacgccaagaactcactgtatctgcaaatgaacagcctgagagccgaggacacggccgtgtattactgtgcgagagatccccagtactatgatagtagtggttattatcgggacaactactacggtatggacgtctggggccaagggaccacggtcaccgtctcctca

SEQ ID NO: 6945 - DNA, 387 bp, Homo sapiens
caggtgcagctggtggagtctgggggaggcgtggtccagcctgggaggtccctgagactctcctgtgcagcctctggattcaccttcagtagctatgctatgcactgggtccgccaggctccaggcaaggggctggagtgggtggcagttatatcatatgatggaagcaataaatactacgcagactccgtgaagggccgattcaccatctccagagacaattccaagaacacgctgtatctgcaaatgaacagcctgagagctgaggacacggctgtgtattactgtgcgagaaagtattacgatttttggagtggtcgtaatccttactactactactactacatggacgtctggggcaaagggaccacggtcaccgtctcctca

SEQ ID NO: 6946 - DNA, 300 bp, Homo sapiens
agtagctatgctgtgcactgggtccgccaggctccaggcaaggggctggagtgggtggcagttatatcatatgatggaaccaataaatactacgcagactccgtgaagggccgattcaccatctccagagacaattccaagaacacgctgtatctgcaaatgaacagcctgagggctgaggacacggctgtgtattactgtgcgagagatgggggtcagaccgcgtatagcagtggctggtactactacttctactacatggacgtctggggcaaagggaccacggtcaccgtctcctca

SEQ ID NO: 6947 - DNA, 388 bp, Homo sapiens
gaggtgcagctggtggagtctgggggaggcctggtcaagcctggggggtccctgagactctcctgtgcagcctctggattcaccttcagtagctatagcatgaactgggtccgccaggctccagggaaggggctggagtgggtctcatccattagtagtagtagtagttacatatactacgcagactcagtgaagggccgattcaccatctccagagacaacgccaagaactcactgtatctgcaaatgaacagcctgagagccgaggacacggctgtgtattactgtgcgagaaattgggccggatattgtagtagtaccagctgctatgatacactaaactggttcgacccctggggccagggaaccctggtcaccgtctcctcag

SEQ ID NO: 6948 - DNA, 387 bp, Homo sapiens
caggttcagctggtgcagtctggagctgaggtgaagaagcctggggcctcagtgaaggtctcctgcaaggcttctggttacacctttaccagctatggtatcagctgggtgcgacaggcccctggacaagggcttgagtggatgggatggatcagcgcttacaatggtaacacaaactatgcacagaagctccagggcagagtcaccatgaccacagacacatccacgagcacagcctacatggagctgaggagcctgagatctgacgacacggccgtgtattactgtgcgagatctcacggactatggttcggggagttatggaacccctactactactacggtatggacgtctggggccaagggaccacggtcaccgtctcctca

SEQ ID NO: 6949 - DNA, 414 bp, Homo sapiens
gaggtgcagctggtggagtctgggggaggcttggtacagcctggggggtccctgagactctcctgtgcagcctctggattcaccttcagttacttctacatgagcggggtccgccaggctcccgggaaggggctggaatgggtaggtttcattagaaacaaacctaatggtgggacaacagaacagaccacgtctgtgaaaagcagattcacaatttcaagagatgattccaaaagcatcacctatctgcaaatgaagagcctgaaaaccgaggacacggccgtgtattacagttccagcgccaaccccgagggtcacgaggcccctatgattgcatttgggggagttatggttagatctttggactgcaacatggacgtctggggcaaagggaccacggtcaccgtctcctca

SEQ ID NO: 6950 - DNA, 408 bp, Homo sapiens
gaggtgcagctgttggagtctgggggaggcttggtacagcctggggggtccctgagactctcctgtgcagcctctggattcacctttagcagctatgccatgagctgggtccgccaggctccagggaaggggctggagtgggtctcagctattagtggtagtggtggtagcacatactacgcagactccgtgaagggccggttcaccatctccagagacaattccaagaacacgctgtatctgcaaatgaacagcctgagagccgaggacacggccgtatattactgtgcgaaagattgcccccccaatagttcatcgtattacgatattttgactggttattatactgggtactactactacggtatggacgtctggggccaagggaccacggtcaccgtctcctca

SEQ ID NO: 6951 - DNA, 358 bp, Homo sapiens
gaggtgcagctggtggagtctgggggaggcttggtccagccgggggggtccctgagactctcctgtgcagcctctggattcaccgtcagtagcaacttcatgaattgggtccgccaggctccagggaaggggctggagtgggtctcagttatttatagcggtggtaccacatactacgcagactccgtgaagggccgattcaccatctccagagacaattccaagaacacgctgtatcttcaaatgaacagcctgagacctgaggacacggctgtgtattactgtgcgagagcatctaccgtggcagctggcttatttgactactggggccagggaaccctggtcaccgtctcctcag

SEQ ID NO: 6952 - DNA, 361 bp, Homo sapiens
caggttcagctggtgcagtctggagctgaggtgaagaagcctggggcctcagtgaaggtctcctgcaaggcttctggttacacctttaccagctatggtatcagctgggtgcgacaggcccctggacaagggcttgagtggatgggatggatcagcgcttacaatggtaacacaaactatgcacagaagctccagggcagagtcaccatgaccacagacacatccacgagcacagcctacatggagctgaggagcctgagatctgacgacacggccgtgtattactgtgcgagggctggactctattaccctgatgcttttgatatctggggccaagggacaatggtcaccgtctcttcag

SEQ ID NO: 6953 - DNA, 359 bp, Homo sapiens
caggtgcagctggtggaatctgggggaggcgtggtccagcctgggaggtccctgagactctcctgtgcagcctctggattcaccttaagtactatgctatgcactgggtccgccaggctccaggcaaggggctggagtgggtggcagttatatcatatgatggaggcaaaaaatactacgcagactccgtgaagggccgattcaccatctccagagacatttccaagaacacgctgtatctgcaaatgaacagcctgagagctgaggacacggctgtgtcctactgtgcgagacatgccccagtggctagtcctactttgactactggggccagggaaccctggtcaccgtctcctcag

SEQ ID NO: 6954 - DNA, 409 bp, Homo sapiens
gaagtgcagctggtggagtctgggggaggcttggtacagcctggcaggtccctgagactctcctgtgcagcctctggattcacctttgatgattatgccatgcactgggtccggcaacctccagggaagggcctggagtgggtctcaggtattagttggaatagtggtaccataggctatgcggactctgtgaagggccgattcaccatctccagagacaacgccaagaactccctctatctgcaaatgaacagtctgagaactgaggacacggccttgtattactgtgcaatcttgccggccaccaggaagtattacgattttgggtggctaaccgatccaattgccgtagtggctcgtgaggttttggacgtctggggcaaagggaccacggtcaccgtctcctcag

SEQ ID NO: 6955 - DNA, 361 bp, Homo sapiens
caggtccaacttgtgcagtctggggctgaggtgaagaaacctggggcctcagtgaaggtttcctgcaagggttctggatacagtttcactagctatagtctggactgggtgcgccaggcccccggagagagccttgagtggatgggatcgatcaacgctggcaatgggaacacagaatactcacagaagttccaaggcagagtcagcatcaccacagacacatccgcgagaacagcctacatgacattgagcagcctgagatctgcagacacggctgtgtattactgcgcgtttagcagcgggtggtaccatgatggttttgatatctggggccaagggacaatggtcatcgtctcttcag

SEQ ID NO: 6956 - DNA, 391 bp, Homo sapiens
cagctgcagctgcaggagtcgggcccaggactggtgaagccttcggagaccctgtccctcacctgtactgtctctggtggctccatcagcagtagtagttactactggggctggatccgccagcccccagggaaggggctggagtggattgggagtatctattatagtgggagcacctactacaacccgtccctcaagagtcgagtcaccatatcagtagacacgtccaagaaccagttctccctgaagctgagctctgtgaccgcagcggacacggccgtgtataactgtgcgagagatagcgtttattgtagtggtggtagctgctactcaggccctaactggtacttcgatctctggggccgtggcaccctggtcactgtctcctcag

SEQ ID NO: 6957 - DNA, 370 bp, Homo sapiens
caggtacagctgcagcagtcaggtccaggactggtgaagccctcgcagaccctctcactcacctgtgccatctccggggacagtgtctctaataacagtgctgcttggaactggatcaggcagtccccatcgaggggccttgagtggctggggaggacatactacaggtccaagtggtataatgattatgcagtatctgtgaaaagtcgaataaccgtcaacccagacacatccaagaaccagttctccctgcaattgaactctgtgactcccgaagacacggctgtgtattactgtgcaagagagcgagaccgctcaccaaactggatcgactactggggccagggaaccctggtcaccgtctcctcag

SEQ ID NO: 6958 - DNA, 388 bp, Homo sapiens
gaggtgcagctggtggagtctgggggaggcctggtcaagcctggggggtccctgagactctcctgtgcagcctctggattcaccttcagtagctatagcatgaactgggtccgccaggctccagggaaggggctggagtgggtctcatccattagtagtagtagtagttacatatactacgcagactcagtgaagggccgattcaccatctccagagacaacgccaagaactcactgtatctgcaaatgaacagcctgagagccgaggacacggctgtgtattactgtgcgagagatacaaacggacgcaagagacgtttgggggagttatcgttatacgctaactttgactactggggccagggaaccctggtcaccgtctcctcag

SEQ ID NO: 6959 - DNA, 361 bp, Homo sapiens
caaatgcagctggtgcagtctgggcctgaggtgaagaagcctgggacctcagtgaaggtctcctgcaaggcttctggattcacctttactagctctgctgtgcagtgggtgcgacaggctcgtggacaacgccttgagtggataggatggatcgtcgttggcagtggtaacacaaactacgcacagaagttccaggaaagagtcaccattaccagggacatgtccacaagcacagcctacatggagctgagcagcctgagatccgaggacacggccgtgtattactgtgcggcacggggtacagctatggtttatgcttttgatatctggggccaagggacaatggtcaccgtctcttcag

SEQ ID NO: 6960 - DNA, 364 bp, Homo sapiens
cagatcaccttgaaggagtctggtcctacactggtgaaacccacacagaccctcacgctgacctgcaccttctctgggttctcactcagcactcgtggagtggttgtgggctggatccgtcagcccccaggaaaggccctggagtggcttgcactcatctattgggatgatgataagcgctacagcccatctctgaagagcaggctcaccatcaccaaggacacctccagaaaccaggtggtccttacaatgaccaacatggaccctgtggacacagccacatattactgtggcgcccttccacgtggatacacctatgggctcaactcctggggccagggaaccctggtcaccgtctcctcag

SEQ ID NO: 6961 - DNA, 364 bp, Homo sapiens
cagatcaccttgaaggagtctggtcctacgctggtgaaacccacacagaccctcacgctgacctgcaccttctctgggttctcactcagcactactggagtgggtgtgggctggatccgtcagcccccaggaaaggccctggagtggcttgcactcatttattgggatgatgataagcgctacagcccatctctgaggagcaggctcaccatcaccaaggacacctccaaaaaccaggtggtccttacaatgaccaacatagaccctatggacacagccacatattactgtgcacaccgatttggggcagttatcgtcggctttgactcctggggccagggaaccctggtcaccgtctcctcag

SEQ ID NO: 6962 - DNA, 361 bp, Homo sapiens
gaggtgcagctggtggagtctgggggaggcttggtacagcctggggggtccctgagactctcctgtgcagcctctggattcaccttcagtagctatagcatgaactgggtccgccaggctccagggaaggggctggagtgggtttcatacattagtagtagtagtagtaccatatactacgcagactctgtgaagggccgattcaccatctccagagacaacgccaagaactcactgtatctgcaaatgaacagcctgagagccgaggacacggctgtgttttactgtgcgacaatatcgtcccctgctacagtctactttgactactggggccaggggaccctggtcaccgtctcctcag

SEQ ID NO: 6963 - DNA, 364 bp, Homo sapiens
cagctgcagctgcaggagtccggctcaggactggtgaagccttcacagaccctgtccctcacctgcgctgtctctggtggctccatcagcagtggtggttactcctggagctggatccggcagccaccagggaagggcctggagtggattgggtacatctatcatagtgggagcacctactacaacccgtccctcaagagtcgagtcaccatatcagtagacaggtccaagaaccagttctccctgaagctgagctctgtgaccgccgcggacacggccgtgtattactgtgccagagtggtggtagctgctcatgatgcttttgatatctggggccaagggacaatggtcaccgtctcttcag

SEQ ID NO: 6964 - DNA, 364 bp, Homo sapiens
caggtcaccttgaaggagtctggtcctgtgctggtgaaacccacagagaccctcacgctgacctgctccgtctctgggttctcactcagcaatgctaaaatggctgtgagctggatccgtcagcccccagggaaggccctggagtggcttgcacacattttttcggatgacgaaaaatccttcagcacatctctgaatagcaggctcaccatctccaaggacacctccaaaagccaggtggtccttaccatgaccaacatggaccctgtggacacagccacatattactgtgcacggatagtatggttcggggctaactactttgactactggggccagggaaccctggtcaccgtctcctcag

SEQ ID NO: 6965 - DNA, 367 bp, Homo sapiens
gaggtgcagctggtggagtctgggggaggcttggtaaagcctggggggtcccttagactctcctgtgcagcctctggattcactttcagtaacgcctggatgagctgggtccgccaggctccagggaaggggctggagtgggttggccgtattaaaagcaaaactgatggtgggacaacagactacgctgcacccgtgaaaggcagattcaccatctcaagagatgattcaaaaaacacgctgtatctgcaaatgaacagcctgaaaaccgaggacacagccgtgtattactgtaccacaggtcgagtaccctacgagagggggtttgactactggggccagggaaccctggtcaccgtctcctcag

SEQ ID NO: 6966 - DNA, 367 bp, Homo sapiens
gaggtgcagctggtggagtctgggggaggcttggtaaagcctggggggtcccttagactctcctgtgcagcctctggattcactttcagtaacgcctggatgagctgggtccgccaggctccagggaaggggctggagtgggttggccgtattaaaagcaaaactgatggtgggacaacagactacgctgcacccgtgaaaggcagattcaccatctcaagagatgattcaaaaaacacgctgtatctgcaaatgaacagcctgaaaaccgaggacacagccgtgtattactgtaccacagaaggttactatggttcggggagttattattactggggccagggaaccctggtcaccgtctcctcag

SEQ ID NO: 6967 - DNA, 361 bp, Homo sapiens
gaggtgcagctggtggagtccgggggaggcttagttcagcctggggggtccctgagactctcctgtgcagcctctggattcaccttcagtagctactggatgcactgggtccgccaagctccagggaaggggctggtgtgggtctcacgtattaatagtgatgggagtagcacaagctacgcggactccgtgaagggccgattcaccatctccagagacaacgccaagaacacgctgtatctgcaaatgaacagtctgagagccgaggacacggctgtgtattactgtgcaagagacctgcttatagcagcagctggcattgactactggggccagggaaccctggtcaccgtctcctcag

SEQ ID NO: 6968 - DNA, 361 bp, Homo sapiens
gaggtgcagctggtggagtccgggggaggcttagttcagcctggggggtccctgagactctcttgtgcagcctctgggttcaccttcagtgcctactggatgcactgggtccgccaagctccggggaaggggctggtgtggctctcacgtattagtggtgatgtaactagcacaacctacgcggcctccgtgaagggccgattcaccatctccagagacaacgccaagaacacgctgtatctgcaaatgaacagtctgagagccgatgacacggctgtatatttctgtgcaaagagcagcggtagtggttacctagactttgactactggggccagggaaccctggtcaccgtctcctcag

SEQ ID NO: 6969 - DNA, 361 bp, Homo sapiens
gaggtgcagctggtggagtccgggggaggcttagttcagcctggggggtcccggagactctcctgtgcagcctctggattcatcttcagtagctactggatgcactgggtccgccaagccccagggaaggggctggtgtgggtctcacgtattaatagcgatgggagtagcacaagctacgcggactccgtgaagggccgattcaccatctccagagacaacgccaagaacacgctgtatctgcaaatgaacagtctgagagccgaggacacggctgtgtattactgtgcaagagaaacaatagcagtggctcactactttgactactggggccagggaacccgggtcaccgtctcctcag

SEQ ID NO: 6970 - DNA, 367 bp, Homo sapiens
gaggtgcagctggtggagtccgggggaggcttggtccagcctggggggtccctgaaactctcctgtgcagcctctggattcaccttcagtggctctactatgcactgggtccgccaggcttccgggagagggctggagtgggttggccttattagaaacaaagctaacagttacgcgacagcatatgctgcgtcggtgaaaggcaggttcaccatctccagagatgattcaaagaacacggcgtatctgcaaatgaacagcctgaaaaccgaggacacggccgtttattactgtacccgtagtggctacgattcgggtgatgcttttgatatctggggccaagggacaatggtcaccgtctcttcag

SEQ ID NO: 6971 - DNA, 361 bp, Homo sapiens
caggtgcagctggtgcagtctggggctgaggtgaagaagcctggggcctcagtgaaggtctcctgcaaggcttctggatacaccttcaccggctactatatgcactgggtgcgacaggcccctggacaagggcttgagtggatgggacggaccaaccctaacagtggtggcacaaactatgcacagaagtttcagggcagggtcaccatgaccagggacacgtccatcagctcagactacatggagttgagcaggctgagatctgacgacacggccgtctattactgtgcgaccggtacagcagctcgtccgctggattttgactactggggccagggaaccctggtcaccgtctcctcag

SEQ ID NO: 6972 - DNA, 364 bp, Homo sapiens
cagctgcagctgcaggagtcgggcccaggactggtgaagccttcggagaccctgtccctcacctgcactgtctctggtggctccatcagcagtagtagttactactggggctggatccgccagcccccagggaaggggctggagtggattgggagtatctattatagtgggagcacctactacaacccgtccctcaagagtcgagtcaccatatccgtagacacgtccaagaaccagttctccctgaagctgagctctgtgaccgccgcagacacggctgtgtattactgtgccccgaacgctgttgggagctctggttcttttgatatctggggccaagggacaatggtcaccgtctcttcag

SEQ ID NO: 6973 - DNA, 367 bp, Homo sapiens
gaggtgcagctggtggagtctgggggaggcttggtccagcctggagggtccctgagactctcctgtgctgcctctggattcaccttcaatgaccactacatggactgggtccgccaggctccagggaaggggctggagtgggttggccgttctagaaacaaagctaacggtttcaccatagagtacgccgcgtctgtcaaaggcagattcaccatctcaagagatggttcaaagaactcactgtatctgcaaatgaacagcctgcaaacccaggacacggccgtgtattactgtgctagaggaattatgatggaccctcactactttgactactggggccagggagccctggtcaccgtctcctcag

SEQ ID NO: 6974 - DNA, 364 bp, Homo sapiens
cagatgcagctgcaggagtcgggcccaggactggtgaagccctcggagaccctgtccctcacctgcgctgtctctggtgactccatcagcagaaatacttattcctggggctgggtccgccagccccccgggaagggcctggagtggattgggactatctattatggtgggaacaccttctaccactcgtccctcaagagtctagtcgccatatccagagacacgtccaagaaccaggtctccctgaagctgagctctgtgaccgcagcggacacggccatttactactgtgcgagaggttggacgggcggtgggggttactttgaccgctggggccagggaaccctggtcaccgtctcctcag

SEQ ID NO: 6975 - DNA, 364 bp, Homo sapiens
cagctgcagctgcaggagtcgggcccaggactggtgaagccttcggagaccctgtccctcacctgcactgtctctggtggctccatcagcagtagtagttactactggggctggatccgccagcccccagggaaggggctggagtggattgggagtatctattatagtgggagcacctactacaacccgtccctcaagagtcgagtcaccatatcagtagacacgtccaagaaccagttctccctgaagctgagctctgtgaccgcagcggacacggccgtgtattactgtgcgagagatccagcagcagctggtccgacccttgactactggggccagggaaccctggtcaccgtctcctcag

SEQ ID NO: 6976 - DNA, 364 bp, Homo sapiens
cagctgcagctgcaggagtcgggcccaggactggtgaagccttcggagaccctgtccctcacctgcactgtctctggtggctccgtcaccaatgatacttactactggggctggatccgccagcccccagggaaggggctggagtggattgcgagtatctattatagtggcagcgcctactacaacccgtccctcaggagtcgagtcaccgtatcagtggacacgtccaagaaccagttctccctgaaactaaactctgtgaccgcagcggacacggccgtatattattgtgcgagatccacgtgggcgtgggcacgttgttttgactgctggggccagggaaccctggtcaccgtctcctcag

SEQ ID NO: 6977 - DNA, 361 bp, Homo sapiens
caggttcagctggtgcagtctggagctgaggtgaagaagcctggggcctcagtgaaggtctcctgcaaggcttctggttacacctttaccagctatggtatcagctgggtgcgacaggcccctggacaagggcttgagtggatgggatggatcagcgcttacaatggtaacacaaaatatgcacagaagttccagggcagagtcaccatgaccacagacacatccacgagcacagcctacatggagctgaggagcctgagatctgacgacacggccgtgtattactgtgcgagagcgattgcgggtatagcagtggcccctgactactggggccagggaaccctggtcaccgtctcctcag

SEQ ID NO: 6978 - DNA, 361 bp, Homo sapiens
caggttcagctggtgcagtctggagctgaggtgaagaagcctggggcctcagtgaaggtctcctgcaaagcttctggttacacctttaccagttatggtatcagctgggtgcgacaggcccctggacaagggcttgagtggatgggatggatcagcgcttacaatggtaacacaaactatgtacagaagctccagggcagagtcaccatgaccacagacacatccacgagcacagcctacatggagctgaggagcctgcgatctgacgacacggccgtgtatttctgtgcgagaggtgcaggaacggtgactaaattaggggactactggggccagggaaccctggtcaccgtctcctcag

SEQ ID NO: 6979 - DNA, 361 bp, Homo sapiens
caggttcagctggtgcagtctggtgctgaggtgaagaagcctggggcgtcagtgaaggtctcctgcaaggcttctggttacacctttaccagctatagtatcagttgggtgcgacaggcccctggacaagggcttgagtggatgggatggatcagcgtttacaatggtaacacaacctatgcacagaagctccagggcagagtcaccatgaccacagacacatccacgagcacagcctacatggagctgaggagcctgagatctgacgacacggccgtgtattactgtgcgaggctgctatggttcggggagttattaactgactactggggccagggaaccctggtcaccgtctcctcag

SEQ ID NO: 6980 - DNA, 364 bp, Homo sapiens
caggtcaccttgaaggagtctggtcctgcgctggtgaagcccacacagaccctcacactgacctgcaccttctatgggttctcactcagcactagtggaatgcgtgtgagctggatccgtcagcccccagggaaggccctggagtggcttgcacacattgattgggatgatgataaattctacagcacatctctgaagaccaggctcaccatctccaaggacacctccaaaaaccaggtggtccttacaatgaccaacatggaccctgtggacacagccacgtattactgtgcacggaccgacgtaggccgtagtctagggttcgacccctggggccagggaaccctggtcaccgtctcctcag

SEQ ID NO: 6981 - DNA, 361 bp, Homo sapiens
caggtgcagctggtgcagtctggggctgaggtgaagaagcctgggtcctcggtgaaggtctcctgcaaggcttctggaggcaccttcagcagctatgctatcagctgggtgcgacaggcccctggacaagggcttgagtggatgggaaggatcatccctatccttggtatagcaaactacgcacagaagttccagggcagagtcacgattaccgcggacaaatccacgagcacagcctacatggagctgagcagcctgagatctgaggacacggccgtgtattactgtgcgagagagcgtggtttttggagtggttatcctgactactggggccagggaaccctggtcaccgtctcctcag

SEQ ID NO: 6982 - DNA, 361 bp, Homo sapiens
caggtgcagctggtgcagtctggggctgaggtgaagaagcctgggtcctcggtgaaggtctcctgcaaggcttctggaggcaccttcagcagctatgctatcagctgggtgcgacaggcccctggacaagggcttgagtggatgggagggatcatccctatctttggtacagcaaactacgcacagaagttccagggcagagtcacgattaccgcggacgaatccacgagcacagcctacatggagctgagcagcctgagatctgaggacacggccgtgtattactgtgcgagaattagtggctacgatcttcgaatggttgactactggggccagggaaccctggtcaccgtctcctcag

SEQ ID NO: 6983 - DNA, 361 bp, Homo sapiens
caggtccagctggtgcaatctggggctgaggtgaagaagcctgggtcctcggtgaaggtctcctgcaaggcttctggaggcaccttcagcagttatactatcagctgggtgcgacaggcccctggacatgggcttgagtggatgggaaggatcatccctacgcttggtgtagcatactacgcacagaacttacagggcagagtcacgattaccgcggacaaatccactagcacagcctacatggagctgagcagcctgaaatctgaggacggggccgtttattactgtgcgagagatcgcaatagtggctatggcccctttgactactggggccagggaaccctggtcaccgtctcctcag

SEQ ID NO: 6984 - DNA, 358 bp, Homo sapiens
gaggtgcagctggtggagtctggaggaggcttgatccagcctggggggtccctgagactctcctgtgcagcctctgggttcaccgtcagtaacaactacatgagctgggtccgccaggctccagggaaggggctggagtgggtctcagttatttatagcggtggtagcacatactacgcagactccgtgaagggccgattcaccatctccagagactcttccaagaacacgctgtatcttcaaatgaacagcctgagagccgaggacacggccgtgtattactgtgcgagagcggcatatgcctggggtggctggttcgacccctggggccagggaaccctggtcaccgtctcctcag

SEQ ID NO: 6985 - DNA, 358 bp, Homo sapiens
gaggtgcagctggtggagtctggaggaggcttgatccagcctggggggtccctgagactctcctgtgcagcctctggattcaccgtcagtagcaactacatgagctgggtccgccaggctccagggaaggggctggagtgggtctcagttatttatggcggtggtagcacatactacacagactccgtgaagggccgattcaccatctccagagacaactccaagaacacactgtatcttcaaatgaacagcctgagagccgaggacacggccatgtattactgtgcgagagaaggcgatttttggcgtggttatgtggactgctggggccagggaaccctggtcaccgtctcctcag

SEQ ID NO: 6986 - DNA, 358 bp, Homo sapiens
gaggtgcagctggtggagtctggaggaggcttgatccagcctggggggtccctgagactctcctgtgcagcctctgggatcaccgtcagtagcaactacatgagctgggtccgccaggctccagggaaggggctggagtgggtctcagttatttatagtggtggtaccacatactacgcagactccgtgaagggccgattcaccatctccagagacaattccaagaacacgctgtttcttcaaatgaacagcctgagagccgaggacacggccgtatattactgtgcgagaggggacggtgactaccgggttccatttgacttctggggccagggaaccctggtcaccgtctcctcag

SEQ ID NO: 6987 - DNA, 358 bp, Homo sapiens
gaggtgcagctggtggagtctggaggaggcttgatccagcctggggggtccctgagactctcctgtgcagcctctgggttcaccgtcagtagcaactacatgagctgggtccgccaggctccagggaaggggctggagtgggtctcagttatttatagcggtggtagcacatactacgcagactccgtgaagggccgattcaccatctccagagacaattccaagaacacgctgtatcttcaaatgaacagcctgagagccgaggacacggccgtgtattactgtgcgagggagtggtcgcgtggctttccttactttgactactggggccagggaaccctggtcaccgtctcctcag

SEQ ID NO: 6988 - DNA, 358 bp, Homo sapiens
gaggtgcagttggtggagtctggaggaggcttgatccagcctggggggtccctgagactctcctgtgcagcctctggtttcaccgtcagtaacaaatacatgagctgggtccgccaggctccagggagggggctggagtgggtctcacttatttatactggtggtgccacagcctacgcagactccgtgaggggccgattcaccatctccagagacaattccaagaacacactatttcttcaaatgaacaacctgagggccgacgacgcggccgtatatttctgtgcgagccgaccctccggtgacttcccttcctttgactactggggccagggaaccctggtcagcgtctcctcag

SEQ ID NO: 6989 - DNA, 361 bp, Homo sapiens
gaggtgcagctggtggagtctgggggaggcttggtccagcctggggggtccctgagactctcctgttcagcctctggattcaccttcagtagctatgctatgcactgggtccgccaggctccagggaagggactggaatatgtttcagcaattagtattaatgggggttccacatactacgcagactccgtgaagggcagattcaccatctccagagacaattccaagaacacgctgtatcttcacttgagcagtctgagagctgaggacacggctgtgtattactgtgtgaaagagtcgcattactatgtccgggactttgactactggggccagggaaccctggtcaccgtctcctcag

SEQ ID NO: 6990 - DNA, 361 bp, Homo sapiens
gaggtgcagctggtgcagtctggagcagaggtgaaaaagcccggggagtctctgaagatctcctgtaagggttctggatacagctttaccagctactggatcggctgggtgcgccagatgcccgggaaaggcctggagtggatggggatcatctatcctggtgactctgataccagatacagcccgtccttccaaggccaggtcaccatctcagccgacaagtccatcagcaccgcctacctgcagtggagcagcctgaaggcctcggacaccgccatgtattactgtgcccgcctaggtgactacggtgtcggctggttcgacccctggggccagggaaccctggtcaccgtctcctcag

SEQ ID NO: 6991 - DNA, 361 bp, Homo sapiens
caggtgcagctgcaggagtcgggcccaggactggtgaagccttcggggaccctgtccctcacctgtgctgtctctggtggctccatcagcagtactaattggtggagttgggtccgccagcccccagggaaggggctggagtggattggagaaatctatcatagtgggaccaccaactacaacccgtccctcaggagtcgagtcaccatatcaatagacaagtcccagaaccagttttccctgaagctgacctctgtgaccgccgcggacacggccgtgtattactgtgcgagcccgtccctgggctatagcagtggcatggaccactggggccagggaaccctggtcaccgtctcctcag

SEQ ID NO: 6992 - DNA, 361 bp, Homo sapiens
gaggtgcagctggtggagtctgggggaggcttggtccagcctggggggtccctgagactctcctgtgcagcctctggattcacctttagtacctgttggatgagctgggtccgccaggctccaggtaaggggctggagtgggtggccaacttaagacacgatggaagtgagaagtactctgtggactctgtgaagggccgattcaccatctccagagacaacgccaagaactcactgtatctgcaaatgaacagcctgagagccgaggacacggctgtgtattactgtgcgaggcagtgcggtgactacccttcctactttgactcctggggccagggaaccctggtcaccgtctcctcag

SEQ ID NO: 6993 - DNA, 361 bp, Homo sapiens
gaggtgcagctggtggagtctgggggaggcttggtccagcctggggggtccctgagactctcctgtgcagcctctggattcacctttagtgactattggatgacctgggtccgccaggctccagggagggggctggagtgggtggccaatataaaccaacgtggaagtgagacatactatgtggactctgtgaggggccgattcaccatctccagagacaacgccaagaactcggcgtctctgcaaatgaagagcctgagagccgacgacacggctatatattactgtgcgagagatctgagaccgactacgagggggtggggctactggggccagggaatcgtggtcaccgtctcctcag

SEQ ID NO: 6994 - DNA, 361 bp, Homo sapiens
gaggtgcagctggtggagtctgggggaggcttggtccagcctggggggtccctgagactctcctgtgcagcctctggattcacctttagtagctattggatgagctgggtccgccaggctccagggaaggggctggagtgggtggccaacataaagcaagatggaagtgagaaatactatgtggactctgtgaagggccgattcaccatctccagagacaacgccaagaactcactgtatctgcaaatgaacagcctgagagccgaggacacggccgtgtattactgtgcgagagatcgcctttacagctatggcaactttgactactggggccagggaaccctggtcaccgtctcctcag

SEQ ID NO: 6995 - DNA, 361 bp, Homo sapiens
gaggtgcacctggtggagtctgggggaggcttggtccagcctggggggtccctgagactctcctgtgcagcctctggattcacctttagtagctattggatgagctgggtccgccaggctccagggaaggggctggagtgggtggccaacataaagcaagatggaagtgagaaatactatgtggactctgtgaagggccgattcaccatctccagagacaacgccaagaactcactgtatctgcaaatgaacagcctgagagccgaggacacggctgtatattactgtgcgagagtacggtcctatggttcaggagagtgtgactactggggccagggaaccctggtcaccgtctcctcag

SEQ ID NO: 6996 - DNA, 361 bp, Homo sapiens
gaggtgcaactggtggagtctgggggaggcttggtccagcctggggggtccctgagactctcctgtgcagcctctggattcacctttaggatcttttggatgagctgggtccgccaggctccagggaaggggctggagtgggtggccaacataaagccggatggaggtgagaaatactatgtggactctgtgaagggccggttcaccatctccagagacaacgccaagaactcactgtttctacaaatgaacagcctgagagtcgaggacacggctgtttattactgtgcgactttttttactcaaagctcgcccgcctttgactactggggccagggaaccctggtcaccgtctcctcag

SEQ ID NO: 6997 - DNA, 360 bp, Homo sapiens
gaggtgcagctggtggagtctgggggaggcctggtcaagcctggggggtccctgagactctcctgtgcagcctctggattcaccttcagtagctatagcatgaactgggtccgccaggctccagggaaggggctggagtgggtctcatccattagtagtagtagtagttacatatactacgcagactcagtgaagggccgattcaccatctccagagacaacgccaagaactcactgtatctgcaaatgaacagcctgagagccgaggacacggctgtgtattactgtgcgagagatcgagtgggtgaccccctctacatggacgtctggggcaaagggaccacggtcaccgtctcctca

SEQ ID NO: 6998 - DNA, 363 bp, Homo sapiens
cagctgcagctgcaggagtccggctcaggactggtgaagccttcacagaccctgtccctcacctgcgctgtctctggtggctccatcagcagtggtggttactcctggagctggatccggcagccaccagggaagggcctggagtggattgggtacatctatcatagtgggagcacctactacaacccgtccctcaagagtcgagtcaccatatcagtagacaggtccaagaaccagttctccctgaagctgagctctgtgaccgccgcggacacggccgtgtattactgtgccagagaggtttctgactactactactacatggacgtctggggcaaagggaccacggtcaccgtctcctca

SEQ ID NO: 6999 - DNA, 361 bp, Homo sapiens
caggtgcagctgcaggagtcgggcccaggactggtgaagccttcggagaccctgtccctcacctgcactgtctctggtggctccatcagtagttactactggagctggatccggcagcccccagggaagggactggagtggattgggtatatctattacattgggaggagcaccaactacaacccctccctcaagagtcgagtcaccatatcagtagacacgtccaagaaccagttctccctgaagctgagctctgtgaccgccgcagacacggccgtctattactgtgcgagacgtcgcgatattttgactggttattataatccatggggccagggaaccctggtcaccgtctcctcag

SEQ ID NO: 7000 - DNA, 358 bp, Homo sapiens
caggtgcagctgcaggagtcgggcccaggactggtgaagccttcggagaccctgtccctcacctgcactgtctctggtggctccatcagtagttactactggagctggatccggcagcccccagggaagggactggagtggattgggtatatctattacagtgggagcaccaactacaacccctccctcaagagtcgagtcaccatctcagtagacacgtccaagaaccagttctccctgaagctgagctctgtgaccgccgcagacacggccgtgtattactgtgcgagggacttcggtggtaacgcgaactactttgactactggggccagggaaccctggtcaccgtctcctcag

SEQ ID NO: 7001 - DNA, 358 bp, Homo sapiens
caggtgcagctgcaggagtcgggcccaggactggtgaagccttcggagaccctgtccctcacctgcactgtctctggtggctccatcagtagttactactggagctggatccggcagcccccagggaagggactggagtggattgggtatatctattacagtgggagcaccaactacaacccctccctcaagagtcgagtcaccatatcagtagacacgtccaagaaccagttctccctgaagctgagctctgtgaccgccgcagacacggccgtgtattactgtgcgagacatcccaatcaaagtagtggttattctagggactggggccagggaaccctggtcaccgtctcctcag

SEQ ID NO: 7002 - DNA, 358 bp, Homo sapiens
caggtgcagctgcaggagtcgggcccaggactggtgaagccttcggagaccctgtccctcacctgcactgtctctggtggctccatcagttattactactggagctggatccggcagcccccagggaagggactggagtggattgggtatatctattacagtgggagcaccaactacaacccctccctcaagagtcgagtcaccatatcagtagacacgtccaagaaccagttctccctgaagctgagctctgtgaccgctgcggacacggccgtgtattactgtgcgagttacggtggtgaagcgtacaactggttcgacccctggggccagggaaccctggtcaccgtctcctcag

SEQ ID NO: 7003 - DNA, 358 bp, Homo sapiens
caggtgcagctgcaggagtcgggcccaggactggtgaagccttcggagaccctgtccctcacctgcactgtctctggtggctccaccagtagttactactggagctggatccggcagcccccagggaagggactggagtggattgggtatatctattacagtgggagcaccaactacaacccctccctcaagagtcgagtcaccatatcagtagacacgtccaagaaccagttctccctgaagctgagctctgtgaccgccgcagacacggccgtgtattactgtgcgagacattttctggggagtggtcccctttttgactactggggccagggaaccctggtcaccgtctcctcag

SEQ ID NO: 7004 - DNA, 358 bp, Homo sapiens
caggtgcagctgcaggagtcgggcccaggactggtgaagccttcggagaccctgtccctcacctgcactgtctctggtgactccatcagtaattactactggagctggatccggcagcccccagggaagggactggagtggattgggtatatctattacagtgggagcaccaactacaacccctccctcaagagtcgagtcaccatatcagtagacacgtccaagaaccagttgtccctgaaactgagctctgtgaccgccgcagacacggctgtgtattactgtgcgagagattatgggttcggggagttaccccaaaattactggggccagggaaccctggtcaccgtctcctcag

SEQ ID NO: 7005 - DNA, 358 bp, Homo sapiens
caggtgcagctgcaggagtcgggcccaggattggtgaagccttcggagaccctgtccctcacctgcactgtctctggtggctccatcagtggtttctactggagctggatccggcagcccccagggaaggggctggagtgggttggctatatcttttacagtgggatcaccaactacaacccctccctcaagagtcgagtcaccatttcagtagacacgtccaagaaccagttctccctgaggctgagctctgtgaccgctgcggacacggccgtgtattactgtgcgagagcttggactgattattataccggccccggctactggggccagggaattttggtcaccgtctcctcag

SEQ ID NO: 7006 - DNA, 358 bp, Homo sapiens
caggtgcagctgcaggagtcgggcccaggactggtgaagccttcggagaccctgtccctcacatgcagtgtctctggtggctccatcagtacttactactggagctggagccggcagcccccagggaagggactggagtggattgggtttatcaataacaatgggcgcaccaagtacaatccctccctcaagagtcgagtcaccatgtcactagacacgtccaagaatcagttctccctgaagctgaactctgtgaccgccgcagacacggccgtttattactgtgcgagacataacccttcgggtgactcttcgtttgattattggggccagggaatcctggtcaccgtctcctcag

SEQ ID NO: 7007 - DNA, 358 bp, Homo sapiens
caggtgcagctgcaggagtcgggcccaggactggtgaagccttcggagaccctgtccctcacctgcactgtctctggtggctccatcattagttactactggagctggatccggcagcccccagggaagggactggagtggattgggtatatctattacagtgggagcaccaactacaacccctccctcaagagtcgagtcaccatatcagtagacacgtccaagaaccagttctccctgaagctgacctctgtgaccgccgcagacacggccgtgtattactgtgcgagacataacagtggctggtatccctggttcgacccctggggccagggaaccctggtcaccgtctcctcag

SEQ ID NO: 7008 - DNA, 360 bp, Homo sapiens
agatacaactggtggagtctgggggagacttggtacagccgggggggtccctgagactctcctgtgcagcctctggattcaccttcagtggctatagcatgcattgggtccgccaggctccagggaagggactggagtgggtgtcattcattagtaccaatggtggtaccatacactacgcagactctgtgaagggccgattcaccatgtccagagacaacgacaagaactcagtgtttctccaaatgaacagcctgagaggcgacgacacggctatatattattgtgcgcgagggaggagtgcctggtcttattacttccattcatggggccagggcaccctggtcaccgtctcctcag

SEQ ID NO: 7009 - DNA, 357 bp, Homo sapiens
gaggtgcaggtggtggagtcggggggagacttggtccagcctggggggtccctgagactctcctgtgcagcctctggaatcaccgtcagtcgtaattacatgacctgggtccgccaggctccagggaaggggctggagtgggtctcagttatttatagcggtggcagcacatactacgcagactccgtgaagggccgattcaccatctccagagacaactccaagaacactctgtatcttcaaatgaacagcctgagagctgaggacacggctgtgtattactgtgcgagacctattttcggggggaggaacggaatggacgtctggggccaagggaccacggtcaccgtctcctca

SEQ ID NO: 7010 - DNA, 361 bp, Homo sapiens
caggtgcagttggtggagtctgggggaggcgtggtccagcctgggaggtccctgagactctcctgtgcagcctctggattcaccttcagtagctatggcatgcactgggtccgccaggctccaggcaaggggctggagtgggtggcagttatatcatatgatggaagtaataaatactttgcagactccgtgaagggccgattcaccatctccagagacaattccaagaacacgctgtatctgcaaatgaacagcctgagaactgaggacacggctgtgtattactgtgcgaaagagggcagcttcggggagcagtgggaggagcactggggccagggaaccctggtcaccgtctcctcag

SEQ ID NO: 7011 - DNA, 359 bp, Homo sapiens
ggtgcacctggtggaatctgggggatacgcggtccagcctgggacgtccctgagactctcctgtgcagcctctggattcaccttcagtgtctatggcatgcactggatccgccaggctccaggcaagggactggagtgggtggcagttatatcatatgatggaagtaaaaaatattatgcagactccgtgaagggccgattcaccatctccagagacaattccaagaacaccctttatctgcaaatgaacagcctgagaactgatgacacggctgtttatcactgtgcgaattatctcggggctgcggtgacaactcctgcatactggggccagggaaccctggtcaccgtctcctcag

SEQ ID NO: 7012 - DNA, 361 bp, Homo sapiens
caggtgcagctggtggagtctgggggaggcgtggtccagcctgggaggtccctgagactctcctgtgcagcctctggattcaccttcagtagctatgctattcactgggtccgccaggctccaggcaaggggctggagtgggtggcagttatcttatatgatggaagctataaatcctacgcagactccgtgaagggccgattcaccatctccagagacaattccaaggacacgctctatctgcaaatgaacagcctgagagctgaggacaccgctgtgtattactgtgcgagagattggggtaacacagtaaccctttttgactactggggccagggaaccctggtcaccgtctcctcag

SEQ ID NO: 7013 - DNA, 361 bp, Homo sapiens
caggtgcagctggtggagtctgggggaggcgtggtccagcctgggaggtccctgagactctcctgtgcagcctctggattcaccttcagtacctatcctatgcactgggtccgccaggctccaggcaaggggctggagtgggtggcagttatatcatatgatggaaataataaattctacgcagactccgtgaagggccgattcaccatctccagagacaattccaagaacacgctgtttctgcaaatgaacagcctgagacctgaggacacggctgtgtattactgtgcgagcctgattactatgattcggggagtccctgactgctggggccagggaaccctggtcaccgtctcctcag

SEQ ID NO: 7014 - DNA, 361 bp, Homo sapiens
caggtgcagctggtggagtctgggggaggcgtggtccagcctgggaggtccctgagactctcctgtgcagcctctgaattccccttcagtttctatgctatgcactgggtccgccaggctccaggcaaggggctggagtgggtgtcagttatatcatatgatggaagtaatgaatactacgtagactccgtgaagggccgattcaccatctcccgagacaattccaagaacacgctgtttttgcaaatgaacagcctgagagctgaggacacggctgtatattactgtgcgagagaagtggtgactgctattccccatcttgactactggggccagggaaccctggtcaccgtctcctcag

SEQ ID NO: 7015 - DNA, 361 bp, Homo sapiens
caggtgcagctggtggagtctgggggaggcgtggtccagcctgggaggtccctgagactctcctgtgcagcctctggattcagtttcagtagctatgctatgcactgggtccgccaggctccaggcaaggggctggagtgggtggcagttatatcatatgatggaagtaataaatactacgcagactccgtgaagggccgattcaccatctccagagacaattccaagaacacgctgtatctgcaaatgaacagcctgagagctgaggacacggctgtgtattactgtgcgagagatctcggcgggagctactttcctctcggctactggggccagggaaccctggtcaccgtctcctcag

SEQ ID NO: 7016 - DNA, 361 bp, Homo sapiens
caggtgcacctggaggagtctgggggaggcgtggtccagcctgggaggtccccgagactctcctgtgcagcctctggattcaccttcagtatctatacaatgcactgggtccgccaggctccaggcaaggggctggactgggtggcagttatatcatatgatggaggtaataaatactacgcagactccgtgaagggccgattcaccatctccagagacaattccaagaacacgctgtatctgcaaatgaacagcctgagagctgaggacacggctgtgtattactgtgcgagagaaactatagcagcagctacctactttgactactggggccagggaaccctggtctccgtctcctcag

SEQ ID NO: 7017 - DNA, 361 bp, Homo sapiens
caggtgcagctggtggagtctgggggaggcgtggtccagcctgggaggtccctgagactctcctgtgcagcctctggattcagtttcagtaactatggtatgcactgggtccgccaggctccaggcaaggggctggagtgggtggcacttatatcatatgatggaagtaaaaaatactacgcagactccgtgcagggccgattcaccatctccagagacaattccaagaacacgctgtatctgcaaatgaacagcctgagaactgaggacacggctgtgtattactgtgcgagagattatgggttcggggagttaccccaaaattactggggccagggaaccctggtcaccgtctcctcag

SEQ ID NO: 7018 - DNA, 361 bp, Homo sapiens
caggtgcagctggtggagtctgggggaggcgtggtccagcctgggaggtccctgagactctcctgtgcagcctctggattcacctttagtgattatgctgtgcactgggtccgccaggctccaggcaaggggctggagtgggtggcagttattttatctgatggaagcaataaattcttcgcagactccgtgaagggccgattcaccatctccagagacaattccaagaacacgctctatctgcaaatgaacagcctgagagctgaggacacggctgtctattactgtgcgagagatcaaggggtgatggtgactcactttgactactggggccagggaaccctggtcaccgtctcctcag

SEQ ID NO: 7019 - DNA, 361 bp, Homo sapiens
caggtgcagctggtggagtctgggggaggcgtggtccagcctgggaggtccctgagactctcctgtgcagcctctggattcaccttcagtagctatgctatgcactgggtccgccaggctccaggcaaggggctggagtgggtggcagttatatcatatgatggaagtaataaatactacgcagactccgtgaagggccgattcaccatctccagagacaattccaagaacacgctgtatctgcaaatgaacagcctgagagctgaggacacggctgtgtattactgtgcgagagatttcgattactatggttcggggagttgttactggggccagggaaccctggtcaccgtctcctcag

SEQ ID NO: 7020 - DNA, 361 bp, Homo sapiens
caggtgcagctggtggagtctgggggaggcgtggtccagcctgggaggtccctgagactctcctgtgcagcctctggattcaccttcagtagctatggcatgcactgggtccgccaggctccaggcaaggggctggagtgggtggcagttatatcatatgatggaagtaataaatactatgcagactccgtgaagggccgattcaccatctccagagacaattccaagaacacgctgtatctgcaaatgaacagcctgagagctgaagacacggctgtgtattactgtgcgaaggatcgtgactacatgagaaacttctttgactactggggccagggaaccctggtcaccgtctcctcag

SEQ ID NO: 7021 - DNA, 361 bp, Homo sapiens
caggtgcagctggtggagtctgggggaggcgtggtccagcctgggaggtccctgagactctcctgtgcagcctctggattcaccttcagtagctatggcatgcactgggtccgccaggctccaggcaaggggctggagtgggtggcagttatatcatatgatggaagtaataaatactatgcagactccgtgaagggccgattcaccatctccagagacaattccaagaacacgctgtatctgcaaatgaacagcctgagagctgaggacacggctgtgtattactgtgcgaagtacccccatagcagctcgtccgacagtgactactggggccagggaaccctggtcaccgtctcctcag

SEQ ID NO: 7022 - DNA, 357 bp, Homo sapiens
gaggtgcagctggtggagtctggaggaggcttgatccagcctggggggtccctgagactctcctgtgcagcctctgggttcaccgtcagtagcaactacatgagctgggtccgccaggctccagggaaggggctggagtgggtctcagttatttatagcggtggtagcacatactacgcagactccgtgaagggccgattcaccatctccagagacaattccaagaatatgctgtatcttcaaatgaacagcctgagagccgaggacacggccgtgtattactgtgcgagagtcggaaacttctactactactacatggacgtctggggcaaagggaccacggtcaccgtctcctca

SEQ ID NO: 7023 - DNA, 361 bp, Homo sapiens
gaggtgcagctgttggagtctgggggaggcttggtacagcctggggggtccctgagactctcctgtgcagcctctggattcacctttagcagctatgccatgagctgggtccgccaggctccagggaaggggctggagtgggtctcagctattagtggtagtggtggtagcacatactacgcagactccgtgaagggccggttcaccatctccagagacaattccaagaacacgctgtatctgcaaatgaacagcctgagagccgaggacacggccgtatattactgtgcgagggtttttatagcagtggcctacggctttgactactggggccagggaaccctggtcaccgtctcctcag

SEQ ID NO: 7024 - DNA, 361 bp, Homo sapiens
gaggtgcagctgttggagtctgggggaggcttggtacagcctggggggtccctgagactctcctgtgcagcctctggattcacctttagcagctatgccatgagctgggtccgccaggctccagggaaggggctggagtgggtctcagctattagtggtagtggtggtagcacatactacgcagactccgtgaagggccggttcaccatctccagagacaattccaagaacacgctgtatctgcaaatgaacagcctgagagccgaggacacggccgtatattactgtgcgaaagggctagtggtggtagcttactactttgactactggggccagggaaccctggtcaccgtctcctcag

SEQ ID NO: 7025 - DNA, 361 bp, Homo sapiens
gaggtgcaactgttggagtctggcggaggcttggtacagcctgggatgtccctgagattctcctgcacagcctcgggattcacctttcgcagctatgccatgagctgggtccgccaggctccagggaaggggctggagtggctctccacaattagttctactggtattgccaaatactacgcagactccgtaaagggccgcttcaccatctccagagacaactccaggaacacggtgtatctgcaaatgaacagcctgagcgccgaggacacggccgtctacttctgtgcaagacaatttgcctcggggaactatttctttgactcctggggccagggaaccctgctcaccgtgtcctcag

SEQ ID NO: 7026 - DNA, 361 bp, Homo sapiens
gaggtgcagctgttggagtctgggggaggcttggtacagcctggggggtccctgagactctcctgtgcagcctctggattcacctttagcagctatgccatgagctgggtccgccaggctccagggaaggggctggagtgggtctcagctattagtggtagtggtggtagcacatactacgcagactccgtgaagggccggttcaccatctccagagacaattccaagaacacgctgtatctgcaaatgaacagcctgagagccgaggacacggccgtatattactgtgcgaaagatcggggtattaattactatggttcggagttatggagccagggaaccctggtcaccgtctcctcag

SEQ ID NO: 7027 - DNA, 361 bp, Homo sapiens
gaggtgcagctgttggagtctgggggaggcttggtacagcctggggggtccctgagactctcctgtgcagcctctggattcacctttagcagctatgccatgagctgggtccgccaggctccagggaaggggctggagtgggtctcagctattagtggtagtggtggtagcacatactacgcagactccgtgaagggccggttcaccatctccagagacaattccaagaacacgctgtatctgcaaatgaacagcctgagagccgaggacacggccgtatattactgtgcgaaaatagtcgacggagtggctggtttccttgactactggggccagggaaccctggtcaccgtctcctcag

SEQ ID NO: 7028 - DNA, 361 bp, Homo sapiens
gaggtgcagctgttggagtctgggggaggcttggtgcagcctggggggtccctgagactctcctgtgcagtctctggattcacctttagcaactatgccatgagctgggtccgccaggctccagggaaggggctggagtgggtctcaggtattagtggtagtggtgggagcacatacaacgcagactccgtgaagggccggttcaccatctccagagacaattccaagaacacgctgtatctgcaaatgaacagcctgagagccgaagacacggccgtatattactgtgcgacttccgggtttggcagcaggaggtactttgactactggggccagggaaccctggtcaccgtctcctcag

SEQ ID NO: 7029 - DNA, 361 bp, Homo sapiens
gaggtgcagctgttggagtctgggggaggcttggtacagcctggggggtccctgagactctcctgtgcagcctctggattcacctttagcagctatgccatgagctgggtccgccaggctccagggaaggggctggagtgggtctcagctattagtggtagtggtggtagcacatactacgcagactccgtgaagggccggttcaccatctccagagacaattccaagaacacgctgtatctgcaaatgaacagcctgagagccgaggacacggccgtatattactgtgcgaaaggactggttcggggagttatttggtttgactactggggccagggaaccctggtcaccgtctcctcag

SEQ ID NO: 7030 - DNA, 361 bp, Homo sapiens
gaggtgcggttgttggagtctgggggcggctgggcacagcggggggggtccctcagactctcctgtgtagcctctggattcatctttagcacctctgacatgagctgggtccgccaggctccagggaaggggctggagtgggtctcaggtattagtggtggtggtggtaggacacactacgcagactccgtgaagggccggttcaccttgtccagagacacttccaagaacacgctgtatctgcaaatgaacagcctgagagccggggacgcggccgtatattactgtgcgaaaggaggggatagcgggtataattacgttgactactggggccagggaaccctggtcaccgtctcctcag

SEQ ID NO: 7031 - DNA, 361 bp, Homo sapiens
gaggtgcagctgttggagtctgggggaggcttggtacagcctggggggtccctgagactctcctgtgcagcctttggattcacctttagcagctatgccatgagctgggtccgccaggctccagggaaggggcgggagtgggtctcagttattagtgctagtggtggtagcacatactacgcagactccgtgaagggccggttcatcatctccagagacaattccaagagcacgctgtatctgcaaatgaacagcctgcgggccgaggacacggccgtgtattactgtgcgaaattgccttcagggagttatggatggttcgacccctggggccagggaaccctggtcaccgtctcctcag

SEQ ID NO: 7032 - DNA, 361 bp, Homo sapiens
gaggtgcagctgttggagtctgggggaggcttggtacagcctggggggtccctgagactctcctgtgcagcctctggattcacctttagcagctatgccatgagctgggtccgccaggctccagggaaggggctggagtgggtctcagctattagtggtagtggtggtagcacatactacgcagactccgtgaagggccggttcaccatctccagagacaattccaagaacacgctgtatctgcaaatgaacagcctgagagccgaggacacggccgtatattactgtgcgaaaggatggtccattggttattacagaggtgactactggggccagggaaccctggtcaccgtctcctcag

SEQ ID NO: 7033 - DNA, 361 bp, Homo sapiens
caggtgcagctggtggagtccgggggaaacttggtcaagcctggagggtccctgagactctcctgtgcagcctctggattcaccttcagtgactactacatgagctggatccgccaggctccagggaaggggctggagtgggtttcatacattagtattagtagtagtttcacaaactacgcagactctgtgaagggccgattcaccatctccagagacaacgccaagaactcactgtatctgcaaatgagcagcctgagagccgaggacacggccgtgtattactgtgcgagagataggggatatagtggcccccgtatggattactggggccagggaaccctggtcaccgtctcctcag

SEQ ID NO: 7034 - DNA, 367 bp, Homo sapiens
gaggtgcagctggtggagtctgggggagacttggtacagccagggcggtccctgagactctcctgtacagcttctggattcacctttggtgattatgctatgagctggttccgccaggctccagggaaggggctggagtgggtaggtttcatcaggagcaaaatgcatggtgggacaacagattacgccgcgtctgtgaaaggcagattcaccatctcaagagatttttccaaaagcatcgcccatctgcaactcaacagcctgaaaaccgaggacacggccgtgtattactgtagtagacactacggtgggaactactggttcttcgatctctggggccgtggcaccctggtcactgtctcctcag

SEQ ID NO: 7035 - DNA, 361 bp, Homo sapiens
gaggtgcagctgttggagtctgggggaggcttggtacagcctggggggtccctgagactctcctgtgcagcctctggattcacctttagcagctatgccatgtactgggtccgccaggctccagggaaggggctggagtgggtctccactattagtggtagtggtggtaacacatactacgcagactccgtgaagggccggttcaccatctccagagacaattccaagaacacgctgtatctgcaaatgaacagcctgagagccgaggacacggccgtatattactgtgcgaaaggatacaactatggggactggtacttcgatctctggggccgtggcaccctggtcactgtctcctcag

SEQ ID NO: 7036 - DNA, 359 bp, Homo sapiens
ggtgcacctgttggagtctgggggaggcttggtccagcctggggggtccctgagactctcctgtgcagcctctggattcacctttagcaattatgccatgagctgggtccgccaggctccagggaaggggctggagtgggtctccggcattagtggaagtggtggcggcaccttctacgcagactccgtgaagggccggttcaccatctccagagacaattcccagaacacactgtatctacaaatgaacagcctgagagccgaggacacggccgtatattcctgtgcgagagaggttgagcagctcgactggtacttcgatctctggggccgtggcaccctggtcactgtctcttcag

SEQ ID NO: 7037 - DNA, 361 bp, Homo sapiens
caggtgcagctggtgcagtctggggctgaggtgaagaagcctgggtcctcggtgaaggtctcctgcaaggcttctggaggcaccttcagcagctattctttcacctgggtgcgacaggcccctggacaagggcctgagtggatgggaaggatcatccctacccttggtgtagcaaactacgcacagaagttccagggcagagtcacgattaccgcggacaaatccacgagcacagcctacatggaactgagcagcctgagatctgaggacacggccctgtattattgtgcgagagagggtggtaggcacgactggtacttcgatctctggggccgtggcaccctggtcactgtctcctcag

SEQ ID NO: 7038 - DNA, 355 bp, Homo sapiens
caggtgcagctgcaggagtcgggcccaggactggtgaagccttcggagaccctgtccctcacctgcactgtctctggtggctccatcagtagttacttctggaactggatccggcagccccccgggaagggactggagtggattgggtatatctattacagtgggagcaccagctacaacccctccctcaagagtcgagtcaccatatccgtagacacgtccaagaaccaggtctccctgaagctgagctctgtgaccgctgcggacacggccgtgtattactgtgcgagctctacatggctacgaggtgcttttgatatctggggccaggggacaatggtcaccgtctcttcag

SEQ ID NO: 7039 - DNA, 360 bp, Homo sapiens
gaggtgcagctggtggagtctgggggaggcttggtacagcctggggggtccctgagactctcctgtgcagcctctggattcaccttcagtagctatagcatgaactgggtccgccaggctccagggaaggggctggagtgggtttcatacattagtagtagtagtagtaccatatactacgcagactctgtgaagggccgattcaccatctccagagacaatgccaagaactcactgtatctgcaaatgaacagcctgagagacgaggacacggctgtgtattactgtgcgggtttgaccgcttactactactactacatggacgtctggggcaaagggaccacggtcaccgtctcctca

SEQ ID NO: 7040 - DNA, 358 bp, Homo sapiens
caggtgcagctggtggagtcggggggaggcgtggtccagcctgggaggtccctgagactctcctgtgcagcctctggattcaccttcagtcactatggcatgcactgggtccgccaggctccaggcaaggggctggagtgggtggcagttatgtcatatgatggaagttataaatactatgtagactccgtgaagggccgattcaccatctccagagacaattccaagaacacgctgtatctgcaaatgaacagcctgagagctgaggacacggctgtgtattactgtgcgagggactacggtgactacgctgctcttgatatctggggccaagggacaatggtcaccgtctcttcag

SEQ ID NO: 7041 - DNA, 358 bp, Homo sapiens
caggtgcagctggtggagtctgggggaggcgtggtccagcctgggaggtccctgagactctcctgtgcagcctctggattcaccttcagtacctatggcatgcactgggtccgccaggctccaggcaaggggctggagtgggtggcagttgtgtcatatgatggaagtaataaatactatgcagactccgtgaagggccgattcaccatctccagagacaattccaagaacacggtgttcctgcaaatgaacagcctgagacctgaggacacggctgtgtattactgtgcgaaactgtcggaagtcgttgatgcttttgatatctggggccaagggacaatggtgaccgtctcttcag

SEQ ID NO: 7042 - DNA, 358 bp, Homo sapiens
caggtgcagctgcaggagtcgggcccaggactggtgaagccttcggagaccctgtccctcacctgcactgtctctggtggctccatcagtatttcctactggagctggttccggcagcccccagggaagggactggggtggattgggtttatctctgacactgggagcaccaactacaacccctccctcaagagtcgagtcaccatatccgtagacacgtccaagaaccagttgtccctgaagctgacctctgtgaccgccgcagacacggccgtgtattactgtgcgagacatcgtaactccccctcctggtacttcgatctctggggccgtggcaccctggtcactgtctcctcag

SEQ ID NO: 7043 - DNA, 360 bp, Homo sapiens
gaggtgcagctggtgcagtctggagcagaggtgaaaaagcccggggagtctctgaagatctcctgtaagggttctggatacagctttaccagctactggatcggctgggtgcgccagatgcccgggaaaggcctggagtggatggggatcatctatcctggtgactctgataccagatacagcccgtccttccaaggccaggtcaccatctcagccgacaagtccatcagcaccgcctacctgcagtggagcagcctgaaggcctcggacaccgccatgtattactgtgcgagacgggattactactactactacggtatggacgtctggggccaagggaccacggtcaccgtctcctca

SEQ ID NO: 7044 - DNA, 360 bp, Homo sapiens
cagctgcagctgcaggagtcgggcccaggactggtgaagccttcggagaccctgtccctcatctgcactgtctctggtggctccatcagcactagtagttactactggggctggatccgccagcccccagggaaggggctggagtggattgggagtatctattatagtgggagcacctattacaacccgtccctcgagagtcgagtcaccaaatccgtagacacgtccaagaaccagttctccctgaacctgagctctgtgaccgccgcagacacggctgtatattactgtgcgagggtttatatagtggctacaggcatggacgtctggggcaaagggaccacggtcaccgtctcctca

SEQ ID NO: 7045 - DNA, 361 bp, Homo sapiens
caggtccagcttgtgcagtctggggctgaggtgaagaagcctggggcctcagtgaaggtttcctgcaaggcttctggatacaccttcactagctatgctatgcattgggtgcgccaggcccccggacaaaggcttgagtggatgggatggatcaacgctggcaatggtaacacaaaatattcacagaagttccagggcagagtcaccattaccagggacacatccgcgagcacagcctacatggagctgagcagcctgagatctgaagacacggctgtgtattactgtgcgagaagcagtggctggttgtactggtacttcgatctctggggccgtggcaccctggtcactgtctcctcag

SEQ ID NO: 7046 - DNA, 355 bp, Homo sapiens
gaggtgcagctggtggagtctgggggaggcttggtacagcctggggggtccctgagactctcctgtgcagcctctggattcaccctcagtaactacgtcatgcactgggtccgccaagttacaggaaaaggtctggagtgggtctcagctattggtactgctggtgacacatactatccaggctccgtgaagggccgattcaccatctccagagaaaatgccaagaactccttgtatcttcaaatgaacaacctgagagccggggacacggctgtgtattactgtgccacatcatcgtggctacgaggtgcttttgatatctggggccaagggacaatggtcaccgtctcttcag

SEQ ID NO: 7047 - DNA, 357 bp, Homo sapiens
caggtgcagctgcaggagtcgggcccaggactggtgaagccttcggagaccctgtccctcacctgcactgtctctggtggctccatcagtagttactactggagctggatccggcagcccccagggaagggactggagtggattgggtatatctattacagtgggagcaccaactacaacccctccctcaagagtcgagtcaccatatcagtagacacgtccaagaaccagttctccctgaagctgagctctgtgaccgctgcggacacggccgtgtattactgtgcgaggacaataggctactactactactacatggacgtctggggcaaagggaccacggtcaccgtctcctca

SEQ ID NO: 7048 - DNA, 358 bp, Homo sapiens
gaggtgcagctggtggagtctgggggaggcctggtcaagcctggggagtccctgagactctcctgtgcagcctctggattcgccttcagcaactattacatgacctgggtccgtcaggctccagggaaggggctggagtgggtctcattaattagtaatagtggcaattacatatactacgcagactcattgaagggccgattcagcatctccagagacaacgccaagaactcactctatctgcaaattaacagcctgagagccgacgacacggctgcgtattactgtgcgagagtcatacgggggagcagtggctgtgactattggggcctgggaaccctggtcaccgtctcctcag

SEQ ID NO: 7049 - DNA, 358 bp, Homo sapiens
caggtgcagctggtggagtctgggggaggcgtggtccagcctgggaggtccctgagactctcctgtgcagcctctggattcaccttcagtagctatggcatgcactgggtccgccaggctccaggcaaggggctggagtgggtggcagttatatcatatgatggaagtaataaatactatgcagactccgtgaagggccgattcaccatctccagagacaattccaagaacacgctgtatctgcaaatgaacagcctgagagctgaggacacggctgtgtattactgtgcgaaacccttggggtttgtactggtggtgtatgactggggcaaagggaccacggtcaccgtctcctcag

SEQ ID NO: 7050 - DNA, 357 bp, Homo sapiens
caggtgcagctggtgcagtctgggggaggcgtggcccaggctggggggtccctgagagtctcgtgttcagcctctggattcatcttcagtaccgatgctgtgcactgggtccgccaggctccaggcaaggggctggagtgggtggcagttatatcaagtgatggaaggagcaaatactacgcagacgccgtgaggggccgattcaccatctccagagacaattccaaaaacacggtgtatctgcaaatgaacagcctgcgaggtgaggacacggctgtgtattcctgtgcgagaagtacaaactactaccactacatggacgtctggggcacagggaccacggtcaccgtctcctca

SEQ ID NO: 7051 - DNA, 357 bp, Homo sapiens
gaggtgcagctggtgcagtctggagcagaggtgaaaaagcccggggagtctctgaagatctcctgtaagggttctggatacagctttaccagctactggatcggctgggtgcgccagatgcccgggaaaggcctggagtggatggggatcatctatcctggtgactctgataccagatacagcccgtccttccaaggccaggtcaccatctcagccgacaagtccatcagcaccgcctacctgcagtggagcagcctgaaggcctcggacaccgccatgtattactgtgcgagggaggggtctcgctactacggtatggacgtctggggccaagggaccacggtcaccgtctcctca

SEQ ID NO: 7052 - DNA, 353 bp, Homo sapiens
ggtacagttacagcagtggggcgcaggactgttgaagccttcggagaccctgtcccgcacctgcgctgtctatggtgagtccttcagtgattcctactggagctggatccgccagcccccagggaaggggctggagtggattggggaaatcaatcatactggaagcaccaggtacaacccgtccctcaagagtcgagtcaccatatcagtagacacgtccaagaaacagttctccctgaaactgaactctgtgaccgccgcggacacggctgtgtattactgtgcgggaggcggactggcccagaggggatgggactactggggccagggagccctgatcaccgtctcctcag

SEQ ID NO: 7053 - DNA, 355 bp, Homo sapiens
caggtgcagctacagcagtggggcgcaggactgttgaagccttcggagaccctgtccctcacctgcgctgtctatggtgagtccttcagaggtcacctctggagctggatccgccagtccccagggaagggcctggaatggattggggatatcactgatactggagccaccaactacaacccgtccctcacgagtcgagtcaccatatcactacacacgtccaggaaccagttctccttgaaactgagctctgtgaccgccgcggacacggctgtctattactgtgcgagaggcgggctggccctgacgggatggggctactggggccagggaaccctggtcaccgtctcctcag

SEQ ID NO: 7054 - DNA, 355 bp, Homo sapiens
caggtgcagctacagcagtggggcgcaggactgttgaagccttcggagaccctgtccctcacctgcgctgtctatggtgggtccttcagtgattactactggaactggatccgccagcccccagggaaggggctggagtggattggggaaatcaatcatagtggaagcaccaactacaacccgtccctcaagactcgagtcaccatttcagtagacacgtccaagaaccagttctccctgaggctgacctctgtgaccgccgcggacacggctgtttactactgtgcgagatttgagattcggggagttaccagggactactggggccagggaaccctggtcaccgtctcctcag

SEQ ID NO: 7055 - DNA, 358 bp, Homo sapiens
gaggtgcagctggtgcagtctggagcagaggtgaaaaagcccggggagtctctgaagatctcctgtaagggttctggatacagctttaccagctactggatcggctgggtgcgccagatgcccgggaaaggcctggagtggatggggatcatctatcctggtgactctgataccagatacagcccgtccttccaaggccaggtcaccatctcagccgacaagtccatcagcaccgcctacctgcagtggagcagcctgaaggcctcggacaccgccatgtattactgtgcgagactgggcggggttattactgcttttgatatctggggccaagggacaatggtcaccgtctcttcag

SEQ ID NO: 7056 - DNA, 358 bp, Homo sapiens
gaggtgcagctggtgcagtctggagcagaggtgaaaaagcccggggactctctgaagatctcctgtaagggttctggatacagctttaccagctactggatcggctgggtgcgccagatgcccgggaaaggcctggagtggatggggatcatctatcctggtgactctgaaaccagatacagcccgtccttccaaggccaggtcaccatctcagccgacaagtccaccagtaccgcctacctgcagtggagcagcctgaaggcctcggacaccgccatgtattactgtgcgggccgggtaccctgggtaggagcttttgatttctggggccaagggacaatggtcaccgtctcttcag

SEQ ID NO: 7057 - DNA, 354 bp, Homo sapiens
gaggtgcagctggtggagtctggaggaggcttggtccagccgggggggtccctgagactctcctgtgcagcctctgggatcaccgtcagtagcaactacatgaattggatccgtcaggttccagggaaggggctggagtgggtctcaattatttatagcggtggtagcacgttcttcgcagactccgtgaagggccgattcaccatctccagagacaattccaagaacaccctgtatcttcaaatgaacagcctgagaactgaggacacggccgtgtattactgtgcgagagatcttagtgaggcggggggtatggacgtctggggccaagggaccacggtcaccgtctcctca

SEQ ID NO: 7058 - DNA, 361 bp, Homo sapiens
cagatcaccttgaaggagtctggtcctacgctggtgaaacccacacagaccctcacgctgacctgcaccttctctgggttctcactcagcactagtggagtgagtgtgggctggatccgtcagcccccaggaaaggccctggagtggcttgcactcatttattgggatgatgataagcgctacagcccatctctgaagagcagactctccatcaccaaggacacctccaaaaaccaggtggtccttacattgaccaacatggaccctgtggacacagccacatattactgtgcacacagggatccactaagagatgcttttgatatctggggccaaggggcaatggtcaccgtctcttcag

SEQ ID NO: 7059 - DNA, 361 bp, Homo sapiens
cagatcaccttgaaggagtctggtcctacgctggtgaaacccacacagaccctcacgctgacctgcagtttctctgggttctcactcaccactagtggagtgggtgtgggctggatccgtcagcccccaggaaaggccctggagtggcttgcactcatttattgggatgatgataagcgctacagcccatctctgaagagcaggctcaccatcaccaaggacgcctccaaagatcaggtggtcctttcaatgaccaacatggaccctgtggacacagccacatattattgtgcatgtccgagtgggagtcggaatgcttttgatttttggggccaagggacagtggtcaccgtctcttcag

SEQ ID NO: 7060 - DNA, 358 bp, Homo sapiens
gaggtgcagctggtggagtctgggggaggcttggtacagcctggggggtccctgagactctcctgtgcagcctctggattcaccttcagtgtctataacatgaactgggtccgccaggctccagggaaggggctggagtgggtgtcatacattagtattagtagtagtaccatatactacacagactctgtgaagggccgattcaccatctccagagacaatgccaagaactcactgtatctgcaaatgaacagcctgagagacgaggacgcggctgtgtattactgtgcgaggaacggaaatggggggcactactttgactactggggccagggaaccctgctcaccgtctcctcag

SEQ ID NO: 7061 - DNA, 358 bp, Homo sapiens
gaggtgcagctggtggagtctgggggaggcttggtccagcctggggggtccctgagactctcctgtgcagcctctggattcacctttagtagctattggatgagctgggtccgccagcctccagggaaggggctggagtgggtggccaacattaagcaagatggaggtgagaaatactatgtggactctgtgaagggccgattcaccatctccagagacaacgccaagaactcactgtatctgcgaatgaacagcctgagagccgaggacacggccgtgtattactgtgcgaggcttgctagcagcagctggttttttgacttctggggccagggaaccctggtcaccgtctcctcag

SEQ ID NO: 7062 - DNA, 358 bp, Homo sapiens
caggtgcagctggtgcagtctggggctgaggtgaagaagcctgggtcctcggtgaaggtctcctgcaaggctcctggaggcaccttcagcagctatgctatcagctgggtgcgacaggcccctggacaagggcttgagttgatgggagggatcatccctatctttcgtacaacaaactacgcacagaagttccagggcagagtcacgattaccgcggacgaatctacgagcacagcctacatggagctgaccagcctgagatcagaggacacggccatttattactgtgcgagatctccagtggttctttttgcttttgatgtctggggccaagggacaatggtcaccgtctcttcag

SEQ ID NO: 7063 - DNA, 361 bp, Homo sapiens
cagctgcagctgcaggagtccggctcaggactggtgaagccttcacagaccctgtccctcacctgcgctgtctctggtggctccatcagcagtggtggttactcctggagctggatccggcagccaccagggaagggcctggagtggattgggtacatctatcatagtgggagcacctactacaacccgtccctcaagagtcgagtcaccatatcagtagacaggtccaagaaccagttctccctgaagctgagctctgtgaccgccgcggacacggccgtgtattactgtgccagaggggtggtagctgcctcgacctttgactactggggccagggaaccctggtcaccgtctcctcag

SEQ ID NO: 7064 - DNA, 358 bp, Homo sapiens
caggtgcagctggtggagtctgggggaggcgtggtccagcctgggaggtccctgagactctcctgtgcagcctctggattcaccttcagtacctatggcatgcactgggtccgccaggctccaggcaaggggctggagtgggtggcagttatttcatatgatggaagtaatatatactatgcagactccgtgaagggccgattcaccatctccagagacaattccaagagcacgctgtttctgcaaatggacagcctgagagctgaagacacggctgtatattactgtgcgaaagactacggtgactacggagccttgcgttactggggccagggatccctggtcaccgtctcctcag

SEQ ID NO: 7065 - DNA, 358 bp, Homo sapiens
caggtgcagctggtggagtctgggggaggcgtggtccagcctgggaggtccctgagactctcctgtgcagcctctggattcaccttcagtagctatgctatgcactgggtccgccaggctccaggcaaggggctggagtgggtggcagttatatcatatgatggaagtaataaatactacgcagactccgtgaagggccgattcaccatctccagagacaattccaagaacacgctgtatctgcaaatgaacagcctgagagctgaggacacggctgtgtattactgtgcgagagctcttggtggttattactactttgactattggggccagggaaccctggtcaccgtctcctcag

SEQ ID NO: 7066 - DNA, 358 bp, Homo sapiens
caggtgcagctggtggagtctgggggaggcgtggtccagccggggaggtccctgagactctcctgtgcagcctccgactttagcttcaggacctatgaaatgcactgggtccgccaggctccaggcaaggggctggagtgggtggcaggtatatcatatgatgggagtcagaaaaactacgcagactccgtgaagggccgattcgccatctccagggacccttccaagaacacgctgtttctgcaaatggacagcctgagacgtgatgacacggctgtttattactgtgcgagaattgggctggcagcacttgcccttgactactggggcctgggaaccctggtcaccgtctcctcag

SEQ ID NO: 7067 - DNA, 358 bp, Homo sapiens
caggtgcagctggtggagtctgggggaggcgtggtccagcctgggaggtccctgagactctcctgtgcagcctctggattcaccttcagtagctatgctatacactgggtccgccaggctccaggcaaggggctggagtgggtggcagttatatcatatgatggaaataataaatactacgcagactccgtgaagggccgattcaccatctccagagacaattccaagaacacactatatctgcaaatgaacagcctgagagctgaggacacggctgtttattactgtgcgagagcgactgggagctacgccagctttgactactggggccagggaaccctggtcaccgtctcctcag

(The sequence listing continues in the following parts.)

1. An antibody or antigen binding fragment thereof that binds to the SARS-COV-2 receptor-binding domain (RBD) and/or SARS-COV-2 spike trimer comprising:
a complementarity-determining region 3 (CDR3) heavy chain and light chain pair that shares at least 90% identity with the heavy chain and/or light chain of a pair selected from the group consisting of: BG1-1, BG1-3 to BG1-28, BG4-1 to BG4-27, BG7-1 to BG7-7, BG7-9 to BG7-20, and BG10-1 to BG10-19 (SEQ ID NOS: 1-184); or
a heavy chain and light chain pair that shares at least 90% identity with the heavy chain and/or light chain of a pair selected from the group consisting of: BG1-1, BG1-3 to BG1-28, BG4-1 to BG4-27, BG7-1 to BG7-7, BG7-9 to BG7-20, and BG10-1 to BG10-19 (SEQ ID NOS: 185-368).

2. The antibody or antigen binding fragment thereof of claim 1, wherein said antibody or antigen binding fragment is an IgG antibody or antigen binding fragment.

3. The antibody or antigen binding fragment thereof of claim 1, wherein said antibody or antigen binding fragment is a monoclonal antibody.

4. The antibody or antigen binding fragment thereof of claim 1, wherein said CDR3 heavy chain and light chain pair or heavy chain and light chain pair is selected from the group consisting of: BG1-6, BG1-12, BG1-14, BG1-17, BG1-22, BG1-23, BG1-24, BG1-25, BG1-26, BG1-28, BG4-10, BG4-11, BG4-14, BG4-16, BG4-17, BG4-24, BG4-25, BG4-26, BG7-14, BG7-15, BG7-16, BG7-18, BG7-19, BG7-20, BG10-10, BG1014, and BG10-19.

5. The antibody or antigen binding fragment thereof of claim 1, wherein said CDR3 heavy chain and light chain pair or heavy chain and light chain pair is selected from the group consisting of: BG1-22, BG1-24, BG4-25, BG7-15, BG7-20, and BG10-19.

6. The antibody or antigen binding fragment thereof of claim 1, wherein said heavy chain and light chain pair is BG7-15.

7. The antibody or antigen binding fragment thereof of claim 6, wherein said antibody or antigen binding fragment thereof binds the two “down”/one “up” RBD conformation on the SARS COV2 spike trimer with no glycan or interprotomer contacts.

8. The antibody or antigen binding fragment thereof of claim 6, wherein said antibody or antigen binding fragment recognizes an epitope in proximity to RBD residues 439-450.

9. The antibody or antigen binding fragment thereof of claim 6, wherein said antibody or antigen binding fragment blocks RBD-ACE2 interactions.

10. The antibody or antigen binding fragment thereof of claim 1, wherein said heavy chain and light chain pair is BG7-20.

11. The antibody or antigen binding fragment thereof of claim 10, wherein said antibody or antigen binding fragment thereof binds a 2d/1u or 1d/2u binding state in the SARS CoV2 spike trimer.

12. The antibody or antigen binding fragment thereof of claim 1, wherein said heavy chain and light chain pair is BG10-19.

13. The antibody or antigen binding fragment thereof of claim 12, wherein said antibody or antigen binding fragment thereof binds to an all down RBD conformation in the SARS CoV2 spike trimer.

14. The antibody or antigen binding fragment thereof of claim 12, wherein said antibody or antigen binding fragment recognizes an epitope in proximity to the N343-glycan.

15. The antibody or antigen binding fragment thereof of claim 12, wherein said antibody or antigen binding fragment light chain makes secondary contacts with an adjacent RBD.

16. The antibody or antigen binding fragment thereof of claim 12, wherein said antibody or antigen binding fragment heavy chain makes contacts with an epitope in proximity to the N343-glycan and the light chain contacts adjacent down RBDs and interacts with residues that overlap with the ACE2 receptor binding motif.

17. The antibody or antigen binding fragment thereof of claim 1, wherein said heavy chain and light chain pair is BG1-24.

18. The antibody or antigen binding fragment thereof of claim 17, wherein said antibody or antigen binding fragment thereof binds both the up/down RBD conformation on the SARS COV2 spike trimer.

19. The antibody or antigen binding fragment thereof of claim 1, wherein said heavy chain and light chain pair is BG1-22.

20. The antibody or antigen binding fragment thereof of claim 19, wherein said antibody or antigen binding fragment thereof binds only the up RBD conformation on the SARS CoV2 spike trimer.

21. The antibody or antigen binding fragment thereof of claim 1, wherein said antibody or antigen binding fragment is a VH3-53/3-66 antibody.

22. The antibody or antigen binding fragment thereof of claim 21, wherein said antibody or antigen binding fragment comprises a CDR3 having a consensus sequence according to FIG. 29.

23. The antibody or antigen binding fragment thereof of claim 21, wherein said heavy chain and light chain pair is BG4-25.

24. An antibody or antigen binding fragment thereof that binds to the SARS, MERS and CoV2 spike trimers outside of the receptor-binding domain (RBD) comprising a complementarity-determining region 3 (CDR3) heavy chain and light chain pair that shares at least 90% identity with the heavy chain and/or light chain of a pair selected from the group consisting of LKA-1-17 (Table 7).

25. The antibody or antigen binding fragment of claim 1, wherein the antibody or antigen binding fragment is modified to enhance stabilization, in vivo half-life, neutralizing activity and/or dimerization.

26. The antibody or antigen binding fragment of claim 25, wherein the antibody or antigen binding fragment is a fusion protein.

27. The antibody or antigen binding fragment of claim 26, wherein the antibody or antigen binding fragment is fused to another antibody or antibody fragment, Fc domain, antigen binding domain, glutathione S-transferase (GST), and/or serum albumin.

28. The antibody or antigen binding fragment of claim 25, wherein the antibody or antigen binding fragment comprises amino acid substitutions that increase antibody binding and/or viral neutralization activity.

29. A method of treating a coronavirus infection comprising administering to a subject in need thereof one or more antibodies or antigen binding fragments of claim 1.

30. The method of claim 29, wherein the coronavirus is selected from the group consisting of SARS-COV-2, SARS and MERS.

31. The method of claim 30, wherein the SARS-COV-2 is a SARS-COV-2 variant.

32. The method of claim 31, wherein the SARS-COV-2 variant is selected from the group consisting of B.1.1.7 and B.1.351.

33. The method of claim 29, wherein BG10-19 is administered.

34. The method of claim 29, wherein BG10-19 and BG4-25 are administered.

35. A method of identifying neutralizing antibodies from a subject infected with a virus comprising selecting antibodies expressed in B cells further expressing a transcriptional program, wherein the transcriptional program comprises one or more genes selected from the group consisting of:
a. GRAMD1C, TMEM156, PDE4D, NFKBIA, S100A10, TKT, CAPG, CXCR3, CFLAR, HMGA1, MARCKSL1, PIM3, RHOF, MIF, ZFP36L1, NME2, MGAT4A, COCH, HOPX, ITGB2-AS1, BASP1, CD80, PAPSS1, CD70, LYPLAL1, LMNA, and FAS; or
b. TKT, ARHGDIB, CFL1, CNN2, S100A10, HSPA8, HMGA1, PPIA, RAC2, CLIC1, SLC25A5, ARPC1B, SELL, PPP1CA, CAPZB, PPP1R18, CAPG, LDHB, S100A4, VIM, LTB, ANXA2, LCP1, TUBB, ACTG1, GAPDH, ACTB, PFN1, CORO1A, and TMSB10; or
c. CD27, CD80, CD46 and CD86.
